United States Patent Application Publication US 2009/0307807 A1 - sequence listing, part 3

SEQ ID NO: 13109 - DNA, 375 bp, Glycine max
agccttgatgtaacatttggagaggttaatgattcaactttatgatgcgctccatgagaggttggatcagatggagaatagagaccatatgaattgctcaagagcttccattgttcaatttcgagcgtctagatatataatgcgcctcaatcggacctccgagataaaagttatgaccatttgaaatgctcaagagcttccattgttcaatttcgagcgtcacgatatattatgcacctgaatcggacctgcgagtgacaacttatgaccatttgaattgctcaagagcttccattgttcaattttgagcgtcacgatatattatgcacctgaatcggacctgcgagtgaacacttatgaccatttgaattgctc

SEQ ID NO: 13110 - DNA, 320 bp, Glycine max
  unsure (1)..(320): unsure at all n locations
ntacccttcacttgcaataaccacttctcataacaacagcacacactcttctgctagtgtccacaacaatctccttagtccaaaagaaattcataatactgttgtatctagttcttctaaactttggcatcaaagactatgccatcctaacaaggatgcactatcaattgtactaaataaatgtaatataccctttatcaataaaactagcagtgatttttgtaattcttgctctatagccaaatctcacaaactaccctcttctccctcttctactgtttatactgcacctcttgaattagtattctttgatgtttggg

SEQ ID NO: 13111 - DNA, 354 bp, Glycine max
  unsure (1)..(354): unsure at all n locations
agctgaatctgacagctgcatggaatgtcttttgttctcttctatggatggagcaatgcaggatttcacgtgagcatgtatatgccatctggaccagtggagactgttatgccatatctcctaataagggctgaacagaatagaggaatgttggctgcttcgggctatgacaggcaactgatgaggtaacaaaaaaacattttaattatattaaccacttttcattctggcatcatgcacatgaatcacacattgtgatgtgtatgcangaaggagtcgtgaatgagactaacagctgctgtcttttaattttctatactcttatgggacgagttaatgagatgtgataatgtc

SEQ ID NO: 13112 - DNA, 431 bp, Glycine max
  unsure (1)..(431): unsure at all n locations
gtttatccatgatatcctatgatggtgagcttcttcttgtttcatcttctcattgttgtggcgtgtccaatcatctttcttccttctccattctgctgccattgaacttcaagaagcaaagaactccattgatgaagaagatccaaggcctacaagctccacatggagttacatcacatgcatatcatactctgagtgtagctagtaacaacacacaacaaatgataatttttgggaggatgatccaaaagtttttgcttcatacacctacaacaactaagtcatagtagagaagaagagtcaaagtctttcaagtatcatgtatttggcagtttttaaggtcaacatagctgaatctttntctgcaacctttatatgtttgattgaagaacgaaatgttgaatactctanatcaactcactttttaattt

SEQ ID NO: 13113 - DNA, 424 bp, Glycine max
  unsure (1)..(424): unsure at all n locations
tatcctcctctanagcatggaagcctaatgccgagaaggattttgatgccatgtattatattctttaagctaatagaatgtattttctattttaaagaaaaagcttaaaaatcactaatttattttctttaatgcattaggattgttcattttcatttctttttccaacttttgtttctataattaaaagatgatagcaattcttctatttgcagaaatgacttaaatgtgaaggtgtcaaacatcaaaattcagggtgtggggcataaatatatatgcctaagatcacattattatgtaatcaattctaatttttataataaagtattatgtttctttattatatttacactatttgataagatagctattttgataaagtcctttataattgagattatgaaaatgagaaacaagtctctta

SEQ ID NO: 13114 - DNA, 423 bp, Glycine max
  unsure (1)..(423): unsure at all n locations
tttcttctagaggaattcgacaaggagttatgctttctacttacatttttgtattgtgcattgagaggcttttccttcttatttctatagctatggaccaaggagtgtagcgtcatattcatcttagtagacatggccctcctataacatatttagcctttgcatatgatgttattctatttgtgaaggctatcctagagcatgtccatgtgatgaagaatattctaaatctattttgcaagagctccaggtagaaattaagcttagagaaatctcgcatgttatttttaaatattgtgggaagaaatctcaagcaacatttgagtgatgctatatggatgtagtggacagaggacctangcaattaccttgtgtcccaaattttcatagnaggccctcatgaattaccttctagtttattat

SEQ ID NO: 13115 - DNA, 340 bp, Glycine max
  unsure (1)..(340): unsure at all n locations
ggatcttaagcaccgctgctgcagctntcactcggtgtccattaggcgtctttatatcgagacgctcgaaattgaacaacggaagctctcgagaaatggaaatgatcatcactcttcactcagatgtccgaatcagacgcataatatatcgagacgctcgaaattgaactacggaagctctcgagaaatttaaatgatcataaattctcactcggatgtccaattgaggaacatcagatatcgagacgctcgaaantgagcaacggaacctctcaggagattcaaatgggcatagactttcagacggaagttcgattcaagcacatcacatatggagacg

SEQ ID NO: 13116 - DNA, 429 bp, Glycine max
  unsure (1)..(429): unsure at all n locations
agcttcgaattanatcatgttatatactctctgttctattgatcctaatcctgaaaattgattcttgtttatatcatattcgttgtttattttgcagagcttctacctggaatcagggaagatgcagaagctggaactctgcctgctaatgttgttgcgggaatggaaggattctacaatatataactataaaaatgcagtaagtntatattctatgtcttatattcatatacacacatgcattgtgatatccaaacttttcataatatcggtggtgtgggaacagatattagtttactcataattcactatgaagctgaactcagaaaatcacgtgtttcaagtatgagaagattgcgtctattggcgctgtcatctattcttgttcctttactttnttcatgtgttgattcatagttgggtataata

SEQ ID NO: 13117 - DNA, 387 bp, Glycine max
tcaggtctgcttaatataacactttttagtttactatttcttaatttcttcctgctattagtgcaaaccattttgctatgttttgtgtttttttgttcgtgttgtggttttgagtttgaaagttgaacggttgtgcttagctttttgaactttacggtatgttgttgttgttggatggcactatatcacatgaatgcatttggtttgcaacctgctgcgtttgcaaggggttgtgaagcgaatttaataataaataaaacaatgttttctctctggctctctttgtatatttattgaaaaactatacaatatttatagagtatcttcaataatacttaaaaaattaagtattatgataaaaaaatttttacataagtgacttaatga

SEQ ID NO: 13118 - DNA, 423 bp, Glycine max
  unsure (1)..(423): unsure at all n locations
agcttcatggccgaaaattcgaggatattcacgttgagcctcgttcttaaattggtgccccatanaagaatgaaaataagaatcatcaataaacaatatatattagatataacttatgtttgactaccaaatttacttgttaatgatatttaattagacatattatataattatatgtataccttgccttgccaagaactgagatcggtgtggcagattgtggtgaagaggatcttgattcgaacctccattntctgaggaggatgaacaagaacacgttccaccacaaagggctctccatgaccatatgccacggcagcttcatcataataataataataataataataataataatattgagctatgagaatgagaatttgtgcgcattctgtacgatagtatgatctgaatanataatat

SEQ ID NO: 13119 - DNA, 384 bp, Glycine max
  unsure (1)..(384): unsure at all n locations
tttcgagcgtctcgaattattactggactcaatcggacttccgagtgaaaagttattgtcgttagaattagctgcgagcttcggttntaaatttcgagcgtctcgatatattacgggactcaatcggacttccgagtgaaatgttattgtcgttcgaatntgctacgagcttcggttntaaatttcgagcgtctcgatatgttacgggactcagtcggacttccgagtgaaatgttattgtcgttagcatttgctgcgagcttcggttttaaaattcgagcgtcacgatatattacgggactcaatcagacttccgagtgaaatgttattgtcgttagcatntgctgcgagcttcggtntataatttgagcgtcttatatatta

SEQ ID NO: 13120 - DNA, 472 bp, Glycine max
  unsure (1)..(472): unsure at all n locations
agctatngaattagtattacttgagatcatatatttggtgttaaaaaattctttctctttctggtattatntgtctttttaaaataatgcattatttcataaaaaagttaactacactagctagtatgataaaatcattctccttgactaanatatcctcattaaaatagttaanatctaattgtaaattagtttaaatagtaatatttttgccatagcacagtatacaatataaattgttatttttatataactaaattcataataataaaaaaattaatatgtaaatcatattaaaattaaagttcataataaataaatatttagaacatataaattatagtttagatctacaataaataatttatattgtagtacaagaatactnttaactatttgataatttcttttaaaaattaaaatatgtacaacaataaagatgaaaatgatagattgaaaggtataataacca

SEQ ID NO: 13121 - DNA, 384 bp, Glycine max
  unsure (1)..(384): unsure at all n locations
aatgacactaacttgtgactcggatatctgattgagtcatttcatcatgcgaaacgctcgaaattgaatacagaagctctaagcaagtacacatgacaataactcttgactcagatattcgagtgagtcattttataattagagacgctcataattgaatgctcgagctctcaccaaattcaaatgacaataactttatactcagatgtccgattgagtcccgtaatatatcttgacgctcaaaatggaaaacagaagctctgagcaaattcgagcgaaagtaacttttgactcanatgtccgatngagtcatttaataattgaagacgctcggaatatgaatatagaagctctcacaaaaatcatatgacaataactttatac

SEQ ID NO: 13122 - DNA, 406 bp, Glycine max
  unsure (1)..(406): unsure at all n locations
gcttcatggtatgcccaagatnttggnctcttactgttacccattgtttattactaaattctggcatgaactattccaattaagtggaacaaaactgcgcataagttctgcgtactacctgcaatccaatggtcagaccaaagttcttaatcgagtcattgagcaataccttcgtgcttttgttcacaacaagccatcttcttggggtaaatcttttatttggtatggatggtcctacaataccttcaaacgctcagctntaggtgcttctccttatgaaatcacttacgggaaaaaagccccttagcattccccaatatcttacaggaacctcaacaaatgatgtagttgacaacttcttaagtaatagggaagccgcttttgcagagctgaaaagaagcttttg

SEQ ID NO: 13123 - DNA, 443 bp, Glycine max
  unsure (1)..(443): unsure at all n locations
agctntatgtgacacactttgtcactcagtgtttcttttgaaaaccattgtgaaaatactattttatcaattactagatgacaatgcttttgttttcataaaatatggttttactcattggacaaaactatctataacttggtttttgcaaatttgttagtgaaaaacaacttcttgcgaacagattttattttcatctaacacgttattcaaccctccttctagtgtgatatctattttttcattatcttggacaacataatttagttgcattgatgtatctatgtatttcttttatgtatgttatgatacccacatcttgagggtgaaatgtatttaactatatatggagtgcgttgatttttatatatatatctggtccattcgaatgatattgtcgatgaaggcttctattttaagctacaataattacttattctatt

SEQ ID NO: 13124 - DNA, 470 bp, Glycine max
agctttaagccaaacatgtaatcaattacattatattaccttaaaccatatcaccacagaataaatcatggtaatggattaaatcatggggtaatcgattaaaatagaaggtttcaaaaatcgataaccacacaacaacacagtgtaatcgtttaacacgagagagtaatcgattaaaatagtgaaaaacacaatatgataaagtaaaatatgtatgttttaaaaaaaaaattcaaccacatatcagcatatcaacatactaagatattactgaagataataacaaacatagagagcatatataacaagctacatgtactaaaacataacatcatccaacactagatccatctaagatacctagttcattcctaataaagaagaacttatctctagcaagagggttagtaaagatgtcagctagatgatgttcactatcatcaaactcaatgcaacaatcacactttgat

SEQ ID NO: 13125 - DNA, 476 bp, Glycine max
  unsure (1)..(476): unsure at all n locations
gcttccatgcaattcactaaatgggcatctttgtttttgtgcatcgcattctctaacgggagattgtgaggacataacaagtgtctactagtatggtaacttgttattgtacccacttgttaccaaggttgagatcattaccagcttttttgcatatccgactctaaggtataattgagttaaataccttactatanagtctgaccaggacgacattaattggtcaattgtcttaagaattactacatattaggtttttcttatttaaaaagtagttatttatttttaatcccccaaaaaaattgttttagataaaacaaaacttgtaaaactcttattgtgaaaataaactgatacaagtatccatttgataaatatataaaatttgttttttcactataaagcatgttntaatataaaanaagtttaattaanatttaattaaacacacatctcaattatatntaaatctaaaa

SEQ ID NO: 13126 - DNA, 447 bp, Glycine max
  unsure (1)..(447): unsure at all n locations
taaatgtttgtcttatttgtacacacgcgcaattgcaattattattgaatatcanattatcaatagtaagtactaagtactaagtacaacgaaattcaataaaatttgatcgattcttttccgctctcccaccaaggaatatcaccaccatccaaatcttagattgttactaattatacaagtctaattatcaaattaatagagcaatatcatcctaagcaagaacctgggaaaaaaacgttctatttntctttataaacattacagtgttttgtttatatatatattctaaatatcaaattatgtttagcaccattaaacaaaacgtgtgtgatcaattcattttaatgtgtttatagctagcacatgaggaaaacagatacgactagattataattgttttacaaaccgaatcaatgaccaatatatctctttctttcttcctaa

SEQ ID NO: 13127 - DNA, 456 bp, Glycine max
  unsure (1)..(456): unsure at all n locations
agctaagcactaacattcttcttctttggcaaattttgtctaaaacatacttagacacttcctgagcaggtacgagcagttatgcaagtgggatcagcaactttcattatcagagtaatcaagcacagcggtatctgtagtggcgacagcataattctgcaagttgcaagtcgtttcccggatgtcaagacatctcacgtgaccatcagcttttgctccccctgtctccatgctcttactgctgtgaagcagttcactgcagcatcttctatcagctactagtcttttccaggatgtcaagacatctcatgtgacatncagcttttgctccccctgtctccatgctcgtactgcatcttctatcagctactagttgcagtagcttacatcaatcatcatcagcagcagcagtctccccctcagaatcatatacatacaactccccctcaaatcatg

SEQ ID NO: 13128 - DNA, 287 bp, Glycine max
ctctgtggttatgctcctctgccgacaccacacagatctttgcccttctgtgcaacaatgtgaagcaattgaacaaccagaagcttatgctgaacacatatacaatagacctcctgctcctcagcagcggaagcagccacaatagaacaactatgacctctccagcaacatgtacaatcccgactggaggaatcatcccaaccttagatggtcgaatccttcacaacaatagcagcaacaacaacgaccttattctcaaatgttgttggaccaagaagaccatacgt

SEQ ID NO: 13129 - DNA, 377 bp, Glycine max
  unsure (1)..(377): unsure at all n locations
aaaagntattgtcatttgaatntgttcaaagcttctatttccaatttcaagcatcatgatatatgacgggactcaatcggacatccgagtaaaaactaattgtcgtttgaatttcctcagagtttctattttcaattttgcgagagcctctgtattaatctcgaccgtcatatactattaaataagtcaatcggacatccgagtcaaaagttattggcattagaatttgctcacagcgcctgttttcaattctgagcgtctctatatattacgggaatcaatctgacatccgagtataaatttattggcgatagaattagatcaatgtttctattttcaataccgcgcgtctcgatatatgaagggactacatttga

SEQ ID NO: 13130 - DNA, 439 bp, Glycine max
agccttggagtttccaagtgccaattcgtcctcttctttagtccagtcttcttctggcttcaattcatcagtgggctttccttctgtgtccagcatcttgggatgttcccagcctttgatgacagctttccaggttctgctatccagtgatttgaggaaggccaccattcttgctttccagtattcatagttgcttccatcaagaattggtggtctgttcactggtcctccttctttctccatgttcatcagaatttatctccccagatctcactctgtgatttcgagtgttggctctgataccaattgaaattctgataccaggggacagatgtcgtacaggatgtcacgacatcacgcttcagaacatgcagtttatgtgtgtccgtatgaacagattaaacaagtaaataacacaagagaattgttacccagttcg

SEQ ID NO: 13131 - DNA, 355 bp, Glycine max
ccatttgtctacctaggaatacctatatgtgcaaatccgaggcggggtcagctgtgggatcctattctcaaaaagtgtgagagagtattatctcagcggaagcaaagacacctttcgtttggggggagagtgacgcttatccagtcagtcttaacttccattcccatttattttttgtgttctttcgggattcccaagaaggaggtggacaagttagtcagtttgcaatgtatattcctatggggaggaggagcagatcacaacaagattgcttggattaaatgggagacagtatgcctcccacaagataaaggggacttgtgtatcaaggacatatatactttcaatcttgctc

SEQ ID NO: 13132 - DNA, 424 bp, Glycine max
  unsure (1)..(424): unsure at all n locations
agctngtatcttctattaatggagattaatcttttcttccacatcgtgtgngctgcaggaaatgatcaaccatatgaagattggtatagtagaagcaaagcatggtctctatcacctgataccaaactagttgaccaccaaagctgtaaactctaccatcacccatcctcnatgcaatgtaattcccataaaccttcggcactttaggttgcgtcacccttcancttgaaagaatacaatgtatgaaaacctattatcctcttctaagaaataacacaaattgtgtctgcaacacatgtcatttatgcacagcacaagaatatgccttttctcctaacagttcacatgcatctcatgttatcgatttacttcacatggatttatggggtccgtgtcaaaactatcaatgcatggacacaaatat

SEQ ID NO: 13133 - DNA, 247 bp, Glycine max
  unsure (1)..(247): unsure at all n locations
tatanggttaaagtctcacgattgtcacgtgctcatgcaactattgttagncgnggctatacgagacatcttgcctaacaaagtcaagttcacgataactcgcctgtgctttttctttcatgctatatgtagcaaagtgattgatccactaatgtttgatgagttggaaaatgaggccgcaattatactgtgcctgttggagatgtattttccccctgctattcttgacatcatgattcacttgatc

SEQ ID NO: 13134 - DNA, 317 bp, Glycine max
acaaaataattatgatctttcaagcaacagatacaatccaggttagaggaatcatccaaatctgagatggacaagtcctccacaacaacagcagcttgtccctccatttctgaatgttgctggcccaagcaagccatatgttcctcccccaatgcagcagcagcaacaacaacaaaggcaacaagcaactgagggatcctcctcaccttccttagaagagttagtgaggaaaatgaccatccagaatatgccaatttagcaagagacaagagccttcattcagagtctgacaaataagatggggcagatggctactc

SEQ ID NO: 13135 - DNA, 424 bp, Glycine max
agcttagccaaatgcacgtcattttaattcatatataatgttcattgcatagtcttcatccagggctgggcttgcgtgccattagagtcaatgcaactattagaataagccaatttaagtagtgacattatgttaactacaagattcatttgactattaaaataacattgattaattcttaggtgtttgctcacatgtagtagttgtgcaataatatcttattagaattagtagctaataattagattattgacatgaagaaaatagatcttaattagatgtattgtaagatttggacggtccaatatgatatatctagacgatataaaatactcataattttgatgataatagaaatataaattatcgatggactaatgctttatataaagtgaaatagaacatacttggtacaaactcaaat

SEQ ID NO: 13136 - DNA, 393 bp, Glycine max
agctttatggtttcttggatggctactcattgttaaatcagataagaccaagaaaaaaccacttttacatgcccctttggtgtctttgcttacaaaaggatatcgtttgggttatgtaatgtccctgccacctttcagagatgtatgctagccattttgttgatctggtaaaaaaatgcatcgatgtgttcatggattatttctttgtctttggattttcctttgaccattgtttatccaacttggaattggtgtgaccacaagatctcgtctcgagggattgaagtggacaaggcaaaaattgatattattgagaagttgcctccacttatgaatgtgaaaggcatccaaagttttctcatacatgcccgacttctatcggaggttcataaa

SEQ ID NO: 13137 - DNA, 432 bp, Glycine max
  unsure (1)..(432): unsure at all n locations
tcttacatagtccgcctttgctagaccttcttaatgcttattaacataaacattaggcataggcacaaagatcaagaggagttattgggttaaaaccatatacaacttctaaaggagaacaattagtggtgctatgaacagctctattgtaagaaaattcaacatggggtaaacaagcttcccaagtttttaagttcttcctcaaaactgtcctaagcaaagttcccaaagtcctattaacaacttccgtttgcccatcggtttgtgggtgacaagtggttgaaaataacaatttagtgcccaacttgctccacaaagtcctccaaagatggcttaggaacttagagtccctatcactaacaatgctccttggcanaccatggagtctcacaatctccttgaaaacaaatcagccacatgggaagcattatc

SEQ ID NO: 13138 - DNA, 279 bp, Glycine max
tgctgcatgcaagctttgagcatattcaaacgtattattactttgactcggatgtcccgatcgtgtcccgtaatatatcgagacactcttaattggaaacagaagctctgatgcaattcaaacgactataactttttacacggatgtccgattgagttccgtaatatatcgagacgctattaattgaaaacagaagctctgatcatattcatacggaccatactttttactcggtgttctattgtgtactgaaaatatcgagacgctcgcaatcgataa

SEQ ID NO: 13139 - DNA, 411 bp, Glycine max
  unsure (1)..(411): unsure at all n locations
ctgcaagcttacaataggaatntcagctgtctacagttattaagaatactaactaaacttcagttaagccaattttaactgtgttttactatttaagtcctagtttacaatttctcttattctttntctttcaattacttgttttgaaagcaatcatctgaattttctctatcttgtataatgataagaaccttgggagatctacaccacaaaagcgagtcattgtagtttggagagctaacagtcttatacatcctanacttcaaatgtgagattcaagtctcataccttgcaattggatcctaacattccatcttgcttcgcagccccatgcccacatgggcaggctgtgcactaaccctttaactagtccctagcanaaactacaatgccagcatcaccacacatgcc

SEQ ID NO: 13140 - DNA, 394 bp, Glycine max
  unsure (1)..(394): unsure at all n locations
acgaccataactgttgactcgaatgtatgatcgatgccgattatatatcgagacactcaaaattgaaaaacagaagctcacgagaaattcanatgggtataacttttcactcggatgtctgattcacgcgcataatatatcgagaccctctanattgaacagggaagctctcggcaaatccaaacgaccataacatttgactcgaatgtatcatcgacgcccacgatatttcgagacgctcaaaattgaataacggaagctcttgagaaattcatatggctataacttttcactcgaatgtccgattcacacgcataagatatctagacccttgaattgagcatggaagctcttggcaattcaaacgaatataacttttgacttaatgtatgat

SEQ ID NO: 13141 - DNA, 380 bp, Glycine max
gacactatgaaactcaactatgctgcaatatttacaatagacctcctcaacctcatcatttaaatcaaccacagcagagcaattatgacctctctagcaacagatacaaccctggatggaggaatcaccctaacctcagatggtccagccctcagcaacaacaacagcagcctgctccttccttccaaaatgttgttggcccaagcagaccatacattcctccaccaatccaacaacagcaacaacccctgaaacagccaacagttttaggccacattatttccaataagggtattgaagtagatcctgcaaaaatttctgttatttcacaattgccttacccctcctgtgtgcgagaggtgtgatcatttcttggtcat

SEQ ID NO: 13142 - DNA, 432 bp, Glycine max
  unsure (1)..(432): unsure at all n locations
gcttctccaaacaatagtatcgtctgcatattggagaatattatcatgcactttattcttccccactacagagctttggaagcaattatagctgattgctaccctcatcatacctgtcaaaccttcagcaaccaggtcaaaaacgagtggggccaaaaggtccacttgtctcaagcctctctgaggcttaaactctgacgctgggcttacattagcaatgactgacacagaagctgaagtaatgcaccccttgatccagctaatccatctctcattaaagcccattcttctcaacatatagaataggaactgccatgacacatagtcatangccttttcaagacaactttaaagaccatacatgacctgttggacctacttgcctcctccactacctcattagcaaccaaagccccatacaacagctttcta

SEQ ID NO: 13143 - DNA, 268 bp, Glycine max
tttattgacctgtgagccagtatcaatgtgatgtcactctctatgtgcagaagattgggagagttggaaataatgcccacttgaatgactatacaattagctgacagctccattaccaggtcatatagagtaattgaagatgttgtggtcagagtaaaacattttatcttctcgacagactatgtggtaatggatatctctgaagatactgacatccctgtaatattgtgaaggccattcatgctgattggaggctgcatagttgata

SEQ ID NO: 13144 - DNA, 445 bp, Glycine max
  unsure (1)..(445): unsure at all n locations
gatgaatgaagggagaggaagagaaagtctcttaatttgtgctntaaaagagctctaaaatctgaagattaattttcaaatgatcaaagntggaaaaatgcacacacatagcctctatttatagcctaagtgtcatataaaattggaggaaaatttgaatatctattcaaatttcactttaatttgaaattgaatttgtggagccgtattttggagccaaaatttcactaattatgattagtgaatttcagatatggttcagcccattaatccaagatcaagtccaagattctccactaagtgtgcttaggtgtcatgaagcatgtaaagcatgaatgacatgcacaaagtgtgactatatgatgtggcaatggggtgtagcaagaaaatggctcacctcccctctaaaattaattggatgggcttcaccattcaattaattatt

SEQ ID NO: 13145 - DNA, 462 bp, Glycine max
  unsure (1)..(462): unsure at all n locations
agctntaagaaaatttgcaacatcgttntggttatttaacaagaacattctatttcttgacattggtaccttggtaattatattatttctcccatctctgatggaaagactggaatctttcatgtgaatatcatagccttttttgagtaattgtcccaaactcaaaatattgttcttcatatttgggacgtagtagacatttgatatgaattcatgtcttgcatccttcanatggattatgatcttaccttttntcctttataggaatattggaattattaccaaattaggcattgccacttactgactcatcaagatccacgaacatgcttctttttccacacatatggttgcttgcaccagtctccangtaccatgtngtttcttggttacctatattacctccatgtgctangagaactgtttcannacttccatctttttgctccacatagttagtct

SEQ ID NO: 13146 - DNA, 393 bp, Glycine max
  unsure (1)..(393): unsure at all n locations
agctngaaggcaaactggatgcattggttaacttggtaacccagctggccttgaaccagaaattgtacctgtcgcaagggtctgtgttttgtgctcctctgctgaccaccatacagacctttgcccttccatgcagcaacccggagcaatggagtagcccgaagcttatgctgcaaacatttacaatagacctccttaacctcagcagcaaaatcaaccacaacagaacaattatgacctctctagcaaaagatacaaccctggatggaggaatcaccctaatctcagatggtctagccctcagcaacaacaacagcagcctgctccttccttccaaaatgctactggcccaagtagaccatacattcctccaccaatccaacaacaacaaca

SEQ ID NO: 13147 - DNA, 423 bp, Glycine max
  unsure (1)..(423): unsure at all n locations
tatactctnncttcatnatatacgatatagatgttaagttgacgtatccgcatcttcataatagagatgtctctaaaataatacaaaattaattttaaaatatataaaattagaaattcccaaattaaattgtagctagaaatagttattatctataaataattgtattatttattaagagtgtgtgaattattataaattataccgcagacgtatatgatttttacgaataaaaaattaagtatatttcttatgatatgatcttatctcttaatttactctcattaatagagtgggatatattgttcttcattaatcttaacatttaaattcaaaacttttaccaacaactatttatgcactccaaaatcctatctatattcaatcggtatatatttactctatgctcattcatttctatat

SEQ ID NO: 13148 - DNA, 473 bp, Glycine max
  unsure (1)..(473): unsure at all n locations
tgcaagcttcaagaaaaagatggcctcaacaaacttcttatttccagtaaggaattctattaatagacctccaatctttaatggagagggttaccattactggaaaacccgaatgcaaatttttattgaggcaatagacctaaatatttgggaagccatagaaatagggccttatatacccaccacagtagaaagaattacaatagatggcagttcatcaagtgaaagtataactatagaaaaacctagagatagatgttctgaagaggatagaaaacgagtacaatacaatttaaaagccaaaaacataataacatctgccctgngaatggatgatatattcagggtttcaaattgtaagagtgctaacgaaatgtgggacactcttcgattaacacatgaaggaactacatatgttaaaagatctangataaatgcactaactcatgagtatgaattatntagaatgaatg

SEQ ID NO: 13149 - DNA, 425 bp, Glycine max
agcttccaaccatagagcttgttaggctgctatatcaacaacaatatattctacttcacatgttgacaaagcaactacactctgcttctttgagcaccaagagattggtgatgttccatatttgaaaacataaccagtagtgcttttcctatcatccttatcaccacaccaatctgaatcactataaccaaacacttctccttctatttcttgtgactgaaaggatataaaatgccaacatccaatgttcctatcacatatctcagaatcctctttgctgccaagaaatgaggtgtctttggtttctccataaacctgcttatcaatataacacaatatgcaattatatgtttggtgtacatatgaaccataattgacctacatattggtggacgagggatgatcaatttgtttctcatacccat

SEQ ID NO: 13150 - DNA, 469 bp, Glycine max
tataagcttgcgtcagatttgaatgctgcaatgaagatgatatacatgtattctactttgcctgcccttggaaattgctaaaagtatgaaggcgtgtggagaaagcatgcgagagaacattattgctgcaagaatcttgcgatccatgattctgaaatttaactatgttgtgtgctcgattgaagaatccaataatttggatactatgacaatcgatgaactgcagagtagtcttttagttcataagtaaaggatggtgtgttatgaagaggagtgacaagcaccgtatattacgcatgaagataggggatgaagaggacgaggatgatgaaaaccacgacgaatagggttttccgtcgtagaggaagacggagacagtcaatcaacaaagttgatattgaatgcttcaagtgtcacaaacatggacattgtcaatatgaatgtctacctgggaataaaataaatatgc

SEQ ID NO: 13151 - DNA, 419 bp, Glycine max
  unsure (1)..(419): unsure at all n locations
tgtgcattcaatatcctgatgagggtgttccatatgttctctagactggactaatacatttgctgcccaagtttcatggtcttgcaagtgaagatcctcataagcatcttaaggagttccatattgtttgttccaccatgaagccccctgatgtccaagaagatcatgtctntctaaaggcttttcttcattctctagagggagtggcaaaagattggctatactaccttgctcctaggtccatttntagctgggatgaccttaagaaggtgttcttggagaaattcttccctgcaactaggaccactgccatcagaaaagacatttcatgcatcaggcaacttagtggagaaagcttgtatgagtactgggaaagattcaagaaattgtgtgcaagctgtcctcaccaattgatttct

SEQ ID NO: 13152 - DNA, 397 bp, Glycine max
agcttgaaggataacttgatgccttggacaactctggaactcagctttccatgaataaaaaatctacacctgttgcaagtgtctgtggtctatgttcttttgcagatcaccatacagatctctgtccttctttacagcaatctggagtcaatgagcaacctgaagcttatgctgcaaacatttataatagacctcctcagcagggaaaccaacaacagcagaataattatgacttttcgagcaatagatacaatccaggttggaggaatcatcaaaatctgagatggacaagtcctccacaacaacaacagcctgtccctcctttccagaatgctgctggtccaagcaagccatatgttcctcctccgatgcagcagcagtcacaacaaagacaaca

SEQ ID NO: 13153 - DNA, 143 bp, Glycine max
  unsure (1)..(143): unsure at all n locations
ttgaaatcgcacagcggaagctctcgagaaagtcaaatggtcttaacttgtctcacggaagtccgattcaggcacatactatatcgagactcccaaatagaacaacgnaagctctcgttatatttaaatagtcataacctttc

SEQ ID NO: 13154 - DNA, 380 bp, Glycine max
  unsure (1)..(380): unsure at all n locations
gctcagggcttcggtattccatatcgagcgtctcgatatattacgggactcaatcggacatcatagtaaaaagttataggtgtttgaatttgctcagagcttcngtattccatttcgagcatctcgatatattacgggactcaatcagacatccgagtataaagttattgtatgttgaatttgctcacggcttctatattccatttcgagcgtctcgatgtattaccggactcaatcagacatccgactataaatgtattgtcgtttgaattgctcagagctctacatatcatttagcttctcattatacggactcaatataatccgataaaattattggcttgatttgtagacttcgaatcattttaggttgattatta

SEQ ID NO: 13155 - DNA, 497 bp, Glycine max
  unsure (1)..(497): unsure at all n locations
gcttggtgaagtaacccggcttctggtgtgtgcaggtattggttntgctgacaaatagtgtagttgcaaacaaaatctttagtgtcaaagtacatgtgttggatcgagtggcctcagaataattaagaaggaggggtttaattaattattcctaagcctttactaattaaaaatttactcttctaaggcttttactatgttgttaagagaataaggagtagaagagaaacttaaccaaaagtaaaagcggaaattaaaatgcacagcggaaagtaaaagagtagggaagaaggagacaaacatacaagagtttttatactggttcggcaacaactcgtgcctacatccagtccccaagcgacctgcggtccttgagatttctttcaaccttgtaaaaatccttttacaagcaaagatccacaanggatgtaccctccctttgtctctttgaacctagtggatgtaccctccactagaactgatccacaagagatgta

SEQ ID NO: 13156 - DNA, 422 bp, Glycine max
  unsure (1)..(422): unsure at all n locations
gcttttgcagttggaatcatttatcctatctccgacagccaacaggtgagtcccatctaggtagttccgaagaaaatcggcctcaccgtgatcaanaatgagaaggaggagctgattcctactcgggtgcagaacagttggagagtctgcattgactataggaggctgaaccaagttaccaaaaaggaccattttcccctgccattcattgaacagatgcttgaacgcctgacaggtaaatctcactactgtttccttgacagtttttctggttatatgcaaatcactattgctcctaaggatcaggaaaataccacattcacctggcctttcggcacttttgcccatagaaggatgactntcggcctgtgcaatgcccctggtactctttttgcggtgcatgaatcaatatttcagtgatt

SEQ ID NO: 13157 - DNA, 389 bp, Glycine max
  unsure (1)..(389): unsure at all n locations
gcttaaccttcggtttggctcgaagacatacttaataagagaatccttaatagacaacagctctggaaattccttcttcaatttggctgcgtcaagctaattaattgttgctcctgngagcaacaatcaccttcgcctgttcctcaagagtgaagttcttccaagtgaaattggggtcaacataatccctgtacatctccaagatntcattgtgactaaccactccagggttagtaaagttccagatcccagtcagattcctcttccccatctcaatggagataggaagcagttcatccaatatagtcatcgaattcggaatgtcggtttctttgaagccgattccggatccaagggggtgatcggagtcgtactcnaagatgcagtcg

SEQ ID NO: 13158 - DNA, 263 bp, Glycine max
  unsure (1)..(263): unsure at all n locations
actctctagaaattcanatggtcataacttttcacacggatgtccgatcgggcgcataatatgtcgagaggctcgaaattgaacaacggaagctcttgagaaattcaaatggtcataacttttcacacggatgtccgattcaggagcatcacatattgagacgctcgaaattcaaatggggataacttttcaaacagatgatggacttaagcttatactatgatgatacactcgagcgcaaacatcgtagactctctcgaaat

SEQ ID NO: 13159 - DNA, 300 bp, Glycine max
  unsure (1)..(300): unsure at all n locations
cgtgctctgcnactattgttagtcgcggctatacgagacatctttgccaacaaagatagttagccataacttgcctttgctttttcttccatgctatatgtagcaaagtcattgatcctgtcaagtttgatgagctggaaaatgaggccgcaattatactgtgccaggtggagatgtattttccccttgctttctttgacatcatgattcacttgattgtgcatctggtcagagaaatcaaatgttatggtcctgcttatctatggaggatatacccggctgagcgatacatgaagatct

SEQ ID NO: 13160 - DNA, 243 bp, Glycine max
gatttgagagctgtgaagaatggtctaggcagattttggaaggccttttatatcttcacagtcacaatccaccggttattcaccgaaaccttaattgcaataacatttttgtcaatgggaatcaaggggaggtgaaaattggtgatttaagattggcggctatccttcaacaggccaattcagctcacagtgtcataggtaacgtttcctgagaaatattacatttattttacccttttttat

SEQ ID NO: 13161 - DNA, 390 bp, Glycine max
  unsure (1)..(390): unsure at all n locations
agcttgtaatcgattacacacatactgntatcgattaccagaggagattttcagaagatattctcaacagtcacatctttctgtgtggttcttgaatggctatcaaaggcctatatatatgtgacttgagacacgaatttgaaaagagtgtttcaaaacaaaaaggtcttatcctcttataaagcaaaatcgttttatcctcttacaaattccttggccaaattacttgtgattcaataaggaattatttgagtgctcaaattgttcaatctatctctttcaagagagatttcttcttttcttcttctttattctgaaaagggattaagagaccgatggtctcttgttgtgaaagaattgtcaacacaaaggaagggttgtccttgtgtg

SEQ ID NO: 13162 - DNA, 349 bp, Glycine max
  unsure (1)..(349): unsure at all n locations
gctttgagcaaattcaaacgacaataactnttatctcgggtgtccgattgtgtcccgtagtatatcgagacgctcgaaattgacaacagaagctcaaagcacattcgaacggcaataactttttactcagatgtccgattgagtcccagtatatatcgagacgctcgtaattgaaaacagaagctctcagcaaattcacacgacaataactatntactcggatgtccgattgagtcncgtaatatatcgagacgctcgtaattgataacagaagctctgagcaaattcaaacgacaataactctttactcggatgttcgactgagttccgtaatatatctagacgctcg

SEQ ID NO: 13163 - DNA, 427 bp, Glycine max
  unsure (1)..(427): unsure at all n locations
atggaagctcctaatatctcccacactnntttgggtgggccattcttggatggccttgattttctcagggtccacttggaccccatttctaccaactacaaaccctaagaaaactatattatctacacaaaaaagtacacttctctatatttgcatagagggtgtttttcctaaggactgaaagaacttgcctaagatgtcctaagtgatcatctaggctcctactgtacactaaaatatcatcaaaataaacaactacaaatctacctatgaaatcccttaagacatgatgcataagcctcataaaggtgcttggtgcattagtgagcccgaaaggcatcactagccattcatacaaaccaaacttggtcttgagagccggtttccactcatcaccctttttcatcctgatgtggtgatacccact

SEQ ID NO: 13164 - DNA, 504 bp, Glycine max
tgcagcatgcaagctgttggtgctcaagcctacttctcttctttgagtgaatctataataatttaaaaaacatgaatgttagttacttagtttcaatttcagcttctaatgtttcataatcaaattaaaaatgttcactttcatataatactatagattaagtgattaacttacatgctcaaaggtactccaattacgctcacatcctgatgagctacaggtcaaacttaaaattttaatggcaatggtttgcaagtgtggtgttttccctccacacaatttccaccactcaactggtaaatgcaattcatatgcattagcatgtacacagattattaattaatcattcaaatttataagtgaactttcccacttactaggagatatctcagtccttgctttcattgctacaatcataccaaacctctctctagctctattatacactagcaattgttgtgaacatcattacaaaatatcatcttactaagccatcatacattg

SEQ ID NO: 13165 - DNA, 433 bp, Glycine max
  unsure (1)..(433): unsure at all n locations
acttaatccagataagtatgaaaaagttttttcaaaaactagtagcacatggattnttctcaaaatctatttaccaaagattttttactctctagtaatagattaccagattattgtaatcgattaccaatagaaaaaatggttttcaaaaagctttcaactgaatttacaacgctccaattgatttcaaaatgttgtaatcgattacaatgttttggtaatcgattacctgtgtgcttgaacgttgaaattcaaattcaaatgtgaagagtcacattctttcacaaaaaagctttgtgtaattgattacactattttggtaatcgattactagtgaaagnttctgaacanatcanaatatgtaactcttcaaatagtttttgacttttacacattgctcttaagtttaataaaagtcataactcttctaatg

SEQ ID NO: 13166 - DNA, 459 bp, Glycine max
  unsure (1)..(459): unsure at all n locations
gagactaagaaattnctaatgaatatatttgatatgaaagatcttggggaagcctcttttgtattaggaatcaagatctaagagatcgctctcaagatatcctaaggttgtcacaagagagttatgtctataaggtcctagacagattcggcatgaaagatagtaaaccaggagataccccgatagctaaaggagacaaatttagtctcaaacaatgccctaataatgaccttgaaagaatagagatgcaaaagattccttatgcatcagcagtaggaagtctaatgtacactcaagtttgcactcgtctcgatataacatatgtagtaggagtcctgggcaaatatttgagtaatcctggaatgctgcattgaaaagcagcanaacgtgtgatgcgttacctacagagaataaaaggatacatgctcacttatcaaaattctgggaatatggagatca

SEQ ID NO: 13167 - DNA, 347 bp, Glycine max
  unsure (1)..(347): unsure at all n locations
cttgagcanattcaaacgacaataacgttttactcttatgtctgattgagtcccgtaatatatcgagacgctcgaaattgaataccaagctctgagcaaattcaaacgacaataactttttactcgaatgtccgattgagtcccgtaatatatcgaaacgctcgaaattgaatgttgaagctctgagcatattcaaacgacaataactgtttactcggatgtctgattgagtcccgtaatgtatcaaaacgctcgatattgaatgttgaagctctgagcacattcaaacgacaacaagtttttactcggatgttcgattgagtcccgtaatatatcgaaacgctcga

SEQ ID NO: 13168 - DNA, 373 bp, Glycine max
  unsure (1)..(373): unsure at all n locations
agcaagaaattatgtgcatatatagctacaaacgtcttggaattgatacatacagatattngtgggccatttcatacaccttcatggaatggtcaacaatattttatatcattcatagacgattactccagatatgcatacttgtttcttatacatgacaagtcacaatctttggatgtgttcaaaatatttaaagttgaagttgaaaatcaacttaacaaaaagaataaaatgtgtcagatttgaccgtgatggtgaatattatgacagatatgacggttcaggtgaacaacattcgggaccttgtgccaggtacctagaggaatgtggaatcgtcccacagtacaccatgccanggtcacctagcatgaat

SEQ ID NO: 13169 - DNA, 452 bp, Glycine max
  unsure (1)..(452): unsure at all n locations
aaaagcaatgggcaatggttatagaaagattgtgaanaaaaattgtttggaagaatattatacatatatattaacatgtgccaaagtcatgcttttatagactcttcatgtctagtcaaagaaaccattggaagagttgtgactttagagaaaaccatgttaagagttataactcttaactttttcttcaaaattgttcactggtagtcgattaccacaaaggcgtaatcgattacacaatgagttttatgaaaaattgtgactcttcacaattgggattgaattccaacgttcagattcacttgtaatcaattactaatattgtgtaatcgattacactatntgaaaatcattttggaacgttgcaacccatctgaaaaccatttgaaaaccaaactggtaactggtaatccattactgataactagtaatcgattactagagagtaatca

SEQ ID NO: 13170 - DNA, 457 bp, Glycine max
  unsure (1)..(457): unsure at all n locations
gcaagctngatcttnntagtttntatctttaatctttaatccctgaacgaactattcaagtggggggagtcgaactttaattatcttttacttcgcgcctaaagagggagcgccaaatatagataatatactgctcgttaatctgggaaagatataacagatttatgtgtccagtattttcgggcaagatgtcctgcacatcgtatccgacatcgtggatcctgcagcttcaattcttcatttgacattttatcttgccttgtgcattgtgcatcccaatctgattccttgacataacgtaggacatcatgtgcagcaactccagctttccttcattatctaagagcttatgttgtaacaanattttagccaatcttttagaactcagtaaagctaagcactaacattccgtgttcaaatacgagcgtctcgctatcctacgggacaccatcggaca

SEQ ID NO: 13171 - DNA, 442 bp, Glycine max
  unsure (1)..(442): unsure at all n locations
tctcagcttcacatcagaccacttcaggtgctggaactacttccatggacttgatggggcctatgcaagttgaaagccttgaggaaagaggtatgcctatgttgttgtggatgatttctccaaatttacctgcgtcaactttatcagagagaaatcagacacctttgaagtattcaaggagttgagtctaagacttcaaagagaaaaagactgtgtcatcaagagaatcaggagtgaccatggcagagagtntgaaaacagcaagtttactgaattctgcacatctgaaggcatcactcatgagttctctgcagccattacaccacaacaaaatggcatagttgaaaggaaaaacatgactctgcaagaagctgctanggtcatgcttcatgccaaagaacttccctataatctctgggctgaagccatgaacacagcatgc

SEQ ID NO: 13172 - DNA, 384 bp, Glycine max
  unsure (1)..(384): unsure at all n locations
ccaccatctnttcatagtagaatatcggtaatgtgtctactatcattatcattttttctccgccattgaggtgccacttgagctgccaggtctctccacctttgggcgtattctttgaaagatctgtgcccctttatgcacatgttctgtagttgcatcctatccggaaccatatcaaaattgtactgatactgcctaacaaaggcaaccattatgtccttccaagaatggactcgggaaggttccaagttagtgtaccaggttacagctaccctagtaagactttcatggaaggaatgtatcagcaattcctcatcttttgcgtattcccccatcttctgacaatacatctntagatggntcttgtgacaagtagtccccttg

SEQ ID NO: 13173 - DNA, 448 bp, Glycine max
tgagcacattcaaacgacgaataactttgactcgaatgtccgattgtgtcccgtatgatatcgagacgctcgtaattgaaaacggaagctctatgaaaatctaacgacaataacttttaactcgggtgtctgatcgagccctgtaatatatcaagacactcgcaatttaaaacagaagttctgagcatattcaaacgacaataacttttgatactgatgtccgattgagtcccgtaagatatcgagacgctcataattgaaaactaaagctctgagcaaattgaaacgacaataacttttgactcgtatgtccgattgtgtcccgaaggatatcgagacgctcgtaattgaaaacggacgctctgaggaaaatctaacgacaataacttttaactctgatgtccgattgagctcctgaatatatcgagacgctcgtaattgataacag

SEQ ID NO: 13174 - DNA, 465 bp, Glycine max
tatgtctggtcgagtacagatctgagcatacattatactcctagcaactaatgcatacaaaattgcttccatttgttttcattccaattatttctaggacattgtgtgagactaaatttgtctcatttctgaattggaacgagtaatgctgagcacttttccatcctaaatctttctagtactttattgatatatgttttttgagataagcctaacaattcttgtgatctatttcagaatatttctatccctatcacatagcttccctcacccttatccttcatttcaaagttactagaaagaaacttagtctcatgaagaagaccaagatcattagttgcaaggaatgtatcatcaacatataggattacaaaaataaccttactcccactgaacttcagatatatacaccgatcaacaatatttttcttaaatccaaaggaaacaatggtatcattaaactta

SEQ ID NO: 13175 - DNA, 342 bp, Glycine max
cccgagagctatcgttgatcattttcgagggtcgttatatgtgatgcgccttaatctaacatccgtgtgaagagttatgaccatgtgtatctctctagagcttttgttgttcaatttcgagcctctcgacattatttgcgcccgaatcggatattcgcgcgaaaatttatggccatgtgaatttctctagagtttctgatgttctattatgagcgtatctatatattataagccagaatcggacatccgcgtgaaaacgtatgaccatttgaacttctccagagctctccgtgatcaatttcgagcctctcgacatatcattccgcccgaatcgcacattcg

SEQ ID NO: 13176 - DNA, 305 bp, Glycine max
gtctcgaaaacttgataggacctaaagagagttgcttctttggactgatattcgtttgcaactcgtccctatactagttgtaagtcgctataacacctgagcattcttgctcccacttcctttgtcacttttacgcctgctatgactgcttcatattcagccaggttatttgatgctttaaaatcctagggcctgctccgacgaaccttattgggtccttctaggatgatgcctgcctctcttgctttcatattggatgcactatttacattagagcccactagtcaagggtggcttggacatta

SEQ ID NO: 13177 - DNA, 365 bp, Glycine max
  unsure (1)..(365): unsure at all n locations
gatgaaccaggtntcacacttgcgcaatctttccctgaactccttctccgttgcaacaacatccttctacctcttcaccgccacactcgcccccatctccatcgtcgccttataagtcgttccaaaggtgcctttccaccaaacttcaactgatgccctcaacaactcatccaaactaaatactctactcacattcccaataaacaccaaactcttattatctccaccaccaccactgctactctgaacctcactcttctccactgaacctgaattcccgccactctcattactcttctcacgagacactacttcaccttccacgacacacttctcaggtggcaagattcattctcatcttcttg

SEQ ID NO: 13178 - DNA, 435 bp, Glycine max
  unsure (1)..(435): unsure at all n locations
cttgaatctcagctgtggagtcatacacattctccaccctgtgatagtccgtgtagggatgagttcattcttctcattatggatcattgtcataccgcctttctgggcatcacttggactagactcacccaagcactgtcagagatcggatagataagtcttgcttcaagcaacttgaggacttctttttggacttcctccttcatggatgggttaagtctcctttgtgattgtttccccagtctataatcagctttcatcatgattntatgcatgcagtaggatgggctaatccccttaagatcgaagatatgccatcctattgctaccttatacttcttgagtacctccactaactgtgcttccttagctgaagacaagtcattactgatgactactggcttggcatcatttgcctcaagaaaaacatacttc

SEQ ID NO: 13179 - DNA, 463 bp, Glycine max
actggatgcattggttaacttggtaacccatctggccttgaaccagaaatctgtacctgttgcaagggtctgtggtttgtgctcctctgctgaccaccatacagacctttgcccttccatgcagcaacctggagcaattgagcagcccgaatcttatgctgctaatatttacaatagacctcctcaacctcagcagcaaaatcaaccacagcagaacaattatgacctctccagcaacagatacaaccctagatggaggaatcaccctaatctcagagggtctagccctcagcaacaacaacaacagcctgctccttccttccaaaatgctgctggcccaagcagaccatacattcctccaccaatccaacaacagcaacagccccagaaacagccaacagttgaggctcctccacaaccttccctcaaagaacttgtgaggcaaattactatgcagaacatg

SEQ ID NO: 13180 - DNA, 474 bp, Glycine max
tgttaggctatactcgataaatatgtctggctctactcttttgccaacttgtctcgcttaacctgtggtacatttgtaaacacaaacaaccgaaaacttttagattttttaattgtggcttaaagccataccaagcctcaaaaggagtcttcccatcaactgcttttgtgggaagtctgctcaacaaaaatacaacagtattggttgcctcggcccaatattctttgggaaattccttctcatgaagcagatatctagccctccattatggttctatttttccgctcactgaccccattttgctttggagtgtatggtgttgtaagttgatgctcaattccaacctcctcacagaatttatcaaattcatttaaggtgtattccttgtcgttatatgacctcaaaactcgaattctaaagccactttgattctcaatccagttcttgaatttgaagaacacacctgcaaccgct

SEQ ID NO: 13181 - DNA, 396 bp, Glycine max
  unsure (1)..(396): unsure at all n locations
tgcgccacttgaaaagcctctnttgaatggtgactctaatgttatcaacaattatgttcccattaaggctagaggaaatgaaaattaacctggtattcaaatgttggatttttcagcattcttactttctcatggatgattcctttaataactctagggaatgagaagactttagagcatgaggatctcccacatcttgctactgatgacagtgtggatgggaatttgccaacttttacaaacaaacttgagtcagagtgtggtaatgtgataacaaccctactctagtttcataacaaccctacganaatatgatgtnactgctcacatgaacaacactacactagtgtgataacaacccttgctacactatgcaaacaaccctgcttcaatgta

SEQ ID NO: 13182 - DNA, 375 bp, Glycine max
  unsure (1)..(375): unsure at all n locations
tggagtccatgccgtcacgtttggactctttgagtgacatgttacaagctgtgaatcccggtgatcatgcagtaagttaactgtactgcttggctttcttgaatcctccgtgctactaagtaaaataattaaatgtttggtttttatgctttgtaggctgtaaaagacgaagttattattgatcttgttgaccgctgtcgcacaaaccagaaaaaattgatgcagatgctaacaactactgggttagttccactcagctattccatctggcacacacccaaatgtacttgtgtgttaccttgtgaaggctatccactgatatgtggaatgatcttattgtcttggttntgtcagatggatgacgagcttcttgga

SEQ ID NO: 13183 - DNA, 430 bp, Glycine max
  unsure (1)..(430): unsure at all n locations
ctacttcacatggatttgatggggcctatgcanngtgaaagccttggaggaaagaggtatgctatgttgttgtggatgatttctccagatntacctgggtcaactttatcagagagaaatcagaaacctttgaagtattcaaagagttaagtctaagacttcaaagagaaaaagactgtgtcatcaagagaatcaggagtgaccatggcagagagtttgaaaacagcaggttcactgaattctgcacatctgaaggcatcactcatgagttctctgcagccattacaccacaacagaatggcacagttgaaaggaaaaacaggactttgcaagaggctgctanggtcatgcttcatgccaaagaacttcccttatatctctgggctgaagccatgaacacagcatgctacatccacaacagagtcacact

SEQ ID NO: 13184 - DNA, 382 bp, Glycine max
tactcctcatgcttctcaccatgtctaattaagttctatttcttcgttctgccacactattatgatctggagaactagcatagtgtattggacaacaatcccatgttcttgaagaaatttcgcacatgaacctggtgcttgtccatcctctgtgtatctaccataatactccccacctctatctgatctcacgatcttaatttgttttccacattgtttctcaacttcagccttataaactttaaaggcatctaaagcttcattcttagaatgaagtaagtcaagatacatatatcgtgaataatcatctataaaggttatgaagtatttcggacaatatgcattcatgtctggacaacatatgtctgcatgtatgatatct

SEQ ID NO: 13185 - DNA, 466 bp, Glycine max
  unsure (1)..(466): unsure at all n locations
agcttcacacaatggttcatcacttttctgatggaagctcaatatanttgtcttagcctggtttcttttttcctcttggaagaaacagtctaaaaacttgtttccaatgtcactccaagtgataaggctctgagatggatgagtattgagtcacttcaaggcattatctcctatgacggaaaaatggaaaaccatcatatagagattctcctcttcagtttgggtcacccctgttgtaccacattgatcataaaatgtggccagatggttgtatgggtcttcattacctaagctaggaaatgcatgttgggcaaggaaagtgattangcctaactttagcctttgttgtgtggttgttgctccttggtctagcaatgttgaagtatactcgtgaaccattatcagtgtcatggtccgcaagagttctcctaacaagtgatgcttcttctacttcctcatatgtact

SEQ ID NO: 13186 - DNA, 445 bp, Glycine max
  unsure (1)..(445): unsure at all n locations
agcttatgagaattattcacaattaaagaatgaggaatgccaatatcaattgcaccattattgtaattaccaactggaccatcacccaaagaaagaattcaatatgaatatattatcttttcactttcatccacatcatttaaaccacttttcaaacgcatgttttgagttaatttcaaagttttacaacatttttcataattgagaagagttaatggtggccaaaataatttcaactttacttgcattangcacaacaaacaaaatttgtttgaaatcaccattgagaatgacaactttttcaccaaaagttttatgcaaactattgtcaatagtaaaacacataatatctcttaatgttctatcaagagcttcaaatgcanatctactaaccatagctgcttcattccatatgatcaaaggtagtgtggttcaacaattctac

SEQ ID NO: 13187 - DNA, 345 bp, Glycine max
  unsure (1)..(345): unsure at all n locations
tctgttntcaatttcgagcgtctcgatattntacagagctctatccgacatccgaggtaaacgttattgtcgtttgattttctaagagcttcccttttcaattacaagcgtcttgatatattacgggacacaatcggacacccgagttaaaagttattgtcgtttgaatatgctcagagcttctattttcaattacgagcgtctcgatatattacgggactcaatcggacatccgagcaaaaatatattgtcgtttgagttttctcagagcttcggttttcaattacgagcgtctcgatgtactacgatacacaatcggacatccgagttaaaagttattgtcgt

SEQ ID NO: 13188 - DNA, 431 bp, Glycine max
  unsure (1)..(431): unsure at all n locations
agtatttatctactccaattaacaagtcaagtcaaacttgtcaggttccaaacaccaaaataaaggacattctgagaattaatttggaacctttaacatcacaccctaagcaagaatcatattcatacggatagaccaaatgccttattatgaaatttttgttgtttgcttattgtattaataactaataaatcaatttggtgaaattaatttaaggtgaattctgtagttaatacttcgcttcaaacttatacatcctaacttttaccacacatcatcagtattggtagtattctctttttaccacaaattgaaacatcacttgtacttttatgttgttcataagtgcagggggatgctatccatgaccataagcaatggagaagttggttgcttcatgatctcataanaactccaccaacactggtaca

SEQ ID NO: 13189 - DNA, 397 bp, Glycine max
  unsure (1)..(397): unsure at all n locations
ntgcttccatttccgtcgagcagaaagcttctgctgaacatggatgctttccttttcattgttgtcactttcgtgttagcttccaaactcattntgctcaaggaagtgaactacctcgtaccacaagcagttcaaaaacatatattatccatgtgaaggggccacaggataagtcactagatcaaacagaagatttggagagctggtaccattcattcatgccacctactattatgagctctgaggaacagcctcgaatgaattattcatacctcaatgtgatgagtggttctgctgcaagactcactgaagaagagtcgatagctgtggaaaaaaatgatggcttcatttctgctcgttccgaaaagatactgcatcgccaaaccacaaatacccc

SEQ ID NO: 13190 - DNA, 347 bp, Glycine max
atgtcaaaacaacctttcccatggataattggaggaagacatcttgatgcaacaacctgaatgttttgaaatggaatggaagaaataatatgtatgtacgttgaaaaggtttatatatgggttgaaacaatctccaaggaagtggtaccagagattcgatgagttcattattactcatgggtacaacagaagtgcctatgattcatgtatctattatagtaaggtgggggatggttttcgcatctatgtgctactctatgtggatgacatgctcatagcatctcaagacaagtctgaaattcataatttgaagtcactacttagtaataaattttagatgatagata

SEQ ID NO: 13191 - DNA, 449 bp, Glycine max
  unsure (1)..(449): unsure at all n locations
gcttctcgatatattatgcgccataatcgtacttccatttgagaagttatgaccatgtgaatntctcgagagcttccgctgttcaatttcgagcgtctcgatatattatgcgcctgaatcagactttcgtgtgataagttatgaccatttgaatatctcgagagcttccgttgttcaatttcaagcttctcgatatattatgcacctgaatcggacttccgtttgaaaagttatgaccatttgaatttctcgagagctttcgttgttcaattatgagcttctcgatatactatgcgccagaatcggacctccgtgtgataagttatgacaatatgaatttctcgagagcttccgttgttcaatatctagcttctcgatatattctgcgcctgaatcggacttccgngtgagtagttatgaccatttgaatattcgagagcttcgttgtt

SEQ ID NO: 13192 - DNA, 317 bp, Glycine max
catttgttattgatttgctttaccttgtacgtggctaaacatgttagcctttgtaagtggttaaaccttgggttatgacttctacttaatggttaaatgtaacattccataacataaatacagatatttattataaaaatatatatattcgacaagattagaaaacatgtatatagttcacagaagatagaatatctcgtttatcttctattctaaaatatcagtattagcattatatttattagataaataatataatatatctcgtttatgttatcattatatctaggatgaaatatgataagatgctatcaaaa

SEQ ID NO: 13193 - DNA, 286 bp, Glycine max
atgagatcccgttagaacaattgtgccactagtcaacagagttcagtgaacctcggtttagagagagagctacatagaatagagtgagaaaattgtttacactgtaatgtgcattgagtcattaattttattggtccatagtcttgtttagtgaacgttatactgcgcttaataaccagccgtcactttgaatttaccctaactgataccacgctgtgtttgactcagttactacaggttagtgacagctgttaactgctgtcgataaaatactagtacagatctt

SEQ ID NO: 13194 - DNA, 313 bp, Glycine max
acatatcttttcatcacattcctagagaggaaaatcatatggttcgtgcccttgccacactagcatccctgttctagctaagcccgcatggagatttgctgtatcaaattcaaatgtcgtggaaagccttacacattgctacttaatagaggaagagaaaaatggtaagcctttcgtactctgatatcaaatgatacatcgaagacaaggaatactcgcatgaggcctctgacaacaacaagagaacgttgcgaaagttggcggcagacttctttctgagtggggatatcctatacaagaggaaccatgacat

SEQ ID NO: 13195 - DNA, 465 bp, Glycine max
  unsure (1)..(465): unsure at all n locations
ctagatccctcttgtggactaggctcaacttaaatatcttacgattgtttagcctaatntagcctaagctttgtcctcatttggatttcttttgtctcttccagatagcttctatatgttggcttatctggtaaggaagctcttagaatgagatcaatttggtgctctatccctctcaaagcatgcaacccatgaggggtgtctttgaggaagacatccgctaacctcttcaataatttttccacacctagaggcaaagaactagctatataagacaaacaataatcatgaggcattagtaaatacataggttgtctagctagaatcactctcttcaccttctgtattctcatgaacaaactcaatatctgtctctcttgaatttcatccttntttgcagttcactcttattttatcgcattctttctttctttctcttctctcatgttctctctcgtttatcaa

SEQ ID NO: 13196 - DNA, 305 bp, Glycine max
atctatggaaaataaaaaaataattgtgggtcacgcatcgtatttaatgatactttcttttgattttataatttttaatgaattttaacaataataaaaaatagtatgcttgaatgagtgtgttaaagagtgtgatatcaatcttctttaaccttatacaatatttgagattacagattaatttaactaatttagtaatttctggtgtattgggcgtgttagcttaacctcttcttcatttaaaattccctcgagacagttgttcgaaatatattatcaattagtattctagctgttatattatc

SEQ ID NO: 13197 - DNA, 496 bp, Glycine max
  unsure (1)..(496): unsure at all n locations
tcagaattcaatttcgcgcgtctcaatagattacgggactctatcagacatccaagcaaaacattattgtcgtttgaattagctcagagcttcagaattcaatttcgatggtctcgatatattacgggtctcaatcagacatctgagtaaaaaagttattatcgtttgaatttgctgagagcttcaacattcaatttcgagcgtctcgatgtattacgggacttaatcagacatccgagtaaaaagttatcgtcgtttgaatttggtcagagcttcaacattcagtttagagcgtctcgatatattacgggactcaatcagacatccgagtaaaaagttattgtcgtttgaaaatcctcagagcttcggtattcaatttcgagcgtcttgatatattacgggactcaatcagacatccgagtaaaaagttattgtcgtntgaatntgctcagagcttcaacattcaatttcgagcgcctcgatatatttcgggact

SEQ ID NO: 13198 - DNA, 406 bp, Glycine max
  unsure (1)..(406): unsure at all n locations
agctntaaagaggatcaaatngaacttattgtttctgggttggaacaaagcaagcagaagttcatatgggtgctgagagatgctgataaaggagacatctttgatggaaatgaaacaaaaaggtatgagcttccaaatgggtttgaggagaggattaaaggcatagggcttattgtgagagattgngcaccccaattggaaattctgagccacacttcaacaggggggtttatgagtcattgtggatggaactcctgcttagagagcataaccatggnggtgccaatagcatcatggcctatgcactctgaccagccaagaaacactgttntgataacacatgtgctcaatgttggtttggttgtgaaggattgngcacaaaggaatgcattggtgactgcgtcag

SEQ ID NO: 13199 - DNA, 409 bp, Glycine max
  unsure (1)..(409): unsure at all n locations
agcttcgaatggtcatcgcttcattcttgtgtcgatagattatttcaccaaatgggtcgaagcggcttcttataccaatgtcacgaggagtgtggtggtcagattcataaagaagtgtcgtaacctacccttcggcgggagggcgacgcgagactcgcgggatgcgtgttccacgaaaggaatacgcgcggagtcgccaccaacgtttattcgagganaacgtcggataaaccgganaagacgagatctactgaacttttagtgaaaggttcgggagttgtatttacgcacggtgaaggtattagcaccccacacgcccgtcccaagggacggcagcctttaatcgaatgtgcaacatgactctgatnttatgttcctttatgtcttatatctttatacccttttatat

SEQ ID NO: 13200 - DNA, 498 bp, Glycine max
  unsure (1)..(498): unsure at all n locations
ntgatgcaacatatggagaggttaatgaaacaacgagatgatgcgctccatgagaggttggatcaaatggagaatagagatcataatgaagaagaaaggaggagaagagggaatgatggtgttcctagacaaaaccgaattgatggtattaaactcaacattcctccatttaaaggaaagaatgatccggaggcctacttggagtgggagatgaacatagagcatgttttctcatgccacaactatgaggaggaccagaaggtgaagcttgccgccacggagttttccgactatgctcttgtgtggtggaacaagctacaaaaggagagagcaagaaatgaagagccaatggttgatacatggacggagatgaaaaagatcatgaggaagcggtatgtgccggctagttactcaagggacttgaaattcaagctccaaaaactaacccaaggcaacaagggggtngaggagtatttcaaggaaatggatgtgctcatg

SEQ ID NO: 13201 - DNA, 494 bp, Glycine max
  unsure (1)..(494): unsure at all n locations
agcttcttagtctcagatgatgcagctaagtttgtagctacctcatgcactcctctaatgactatagcatcatttctggcgctaaactgctgggagttagaagccatcttctcaattaaattcctggcttcaacaggagtcatgtctccaagggctccaccactggcagcatctatcatacttctctccatattactgagtccttcataaaaatattggagaagaagctgctccgaaatcagatggtgagggcaactggcacatagttttttaaatcgctcccagtactcatacaggctctctccactgagttgtctaatacctgagatatccttcctgatggttgtggtcctggaagccagggaaaatttttctaagaatactctcttaaggtcatcccagcttgtgatggaccttggagcaaggtaatacagccagtcctttgccactcnctctaatgaatgaggaanagccttcagaaatatgtgatcctc

SEQ ID NO: 13202 - DNA, 440 bp, Glycine max
  unsure (1)..(440): unsure at all n locations
ctctaaagttgatttgacaagtgggtatcgtcaaattatgattagagagggggatgaatggaanacaactttcaaaactaaatatgggtggtatgaatggctggttatgccctttgggttgaccaatgctcctagctctttcatgagattaatgaaccatgtgttaagggaatttctangaaaatttattgtggtttatttgatgatatcttgatttacancaaattccatgatgaacatcttgttcatttgaggagagttttaaaggcccttaggcatgagagcttgtatgctaacatggataaatgtgtgttctgtntggaccatgtaagtttccttggttntgttgttagctcatacggagtacaggttgatcaagaaaaggtgaaagtcattcaagaatggccaacccacaactgtatgtgaggttagtaactttc

SEQ ID NO: 13203 - DNA, 250 bp, Glycine max
  unsure (1)..(250): unsure at all n locations
cacaacaatccgctctcatatgggatctaacgagcatagtnatcgtctccataatggctacatctactaactgctcaccatttctctttaggtgattggaaacagcaagaattcttggagaataattggaaatggactcttactctctcatatgtaaggagtctcactcacctcttagagtgtggagacacacctgttttactctgtcttctcctttgagagaggttagaagcctatcacatgcctcctt

SEQ ID NO: 13204 - DNA, 470 bp, Glycine max
  unsure (1)..(470): unsure at all n locations
agcttgtgcattcaatatcccgatgaaggtgttccatatgttctcaagactggactaatacatttactgcccaagtttcatggtcttgcaggtgaagatcctcataagcatcttaaggagttccatattgtttgttccaccatgaagccccctgatgtccaggaatatcatatctttctaaaggcctttcctcattctctagagggagtggcaaaagattggttgtactaccttgctcccaggtccattttcagctgggatgaccttaagagggtgttcttggagaaattcttccctgcatctaggaccactgccatcaaaaaacacatttcaggcatcagacaacttagtggagaaagcttgtatgagtactgngaaagatntaagaaattgtgtgcaagctgtcctcaccaccagatttctgagcaactccttcttcaatatttctacganggacttanaaacatgga

SEQ ID NO: 13205 - DNA, 400 bp, Glycine max
  unsure (1)..(400): unsure at all n locations
attctcttctctagggtccatcaattctactgctccgtgaggtctgacttctttgattatgaacggccctgaccacttggacttcagcttacctgagaatagccttagtctcgagttaaaaagtagtacttgttgccctggctggaattctttcctttgtagcttcttgtcatgatacgccttcatcttttgcttgtagattttggatgactcgtaggcgttcagtcccatttcttctaattccagtaactttagattcctcttttctccgcatgcactgtcatcgaaattaagcaatttgaaagcccaatatgctntgtgctctagctccactggtaagtgacatgcctttccatatactagcagaaatggtgataagccgatgagaatcttgaatact

SEQ ID NO: 13206 - DNA, 480 bp, Glycine max
  unsure (1)..(480): unsure at all n locations
acttactaaaatatgctcnacaattaattattataattaaggaattgttgacacgtggttccatgtattttcattcaatttagtgttgattaaaccaacccaaaacatcttttttcaaatgaaaaatcacttattttattgaaaaaataaatntaaataaactcactcatattctattgttattcctatgtactttgttaatctttatttcaatttttagttaagattataaatataagtaaaaaaatgaagagtatattataattataaagattacaatgaaatataattatataataaaatgttagacaattattcaaaatattgttacaactataattttaattttctttctttataaatatatttatttaataaaataatatattttatcataagagtctaattcaattcgttgaataaaatgtgagtngttgcaaaattcttgatgtgattcgtagagatataaaatattaataa

SEQ ID NO: 13207 - DNA, 392 bp, Glycine max
  unsure (1)..(392): unsure at all n locations
tcgagcgtctcgatatatttctttactcattcngacatgcgagtgacaatgtactgtcgtttgaatttgctcatagctacaacattcaatttcaagcgtttcgatatattactggacttaatcagacatccgagtaaaaagttattgttggttgaatttgctcagagcttcgatattccatttcgagcatctcgatatattacgggactcaatcagacatccgagtataaagttattgtagcttgaatcttgctcaggcttcngtattccatttcgagcgtctcgatatattacgggactcaatcagacatccgagtaaaaagttattgtcgtttgaatttgctcagagcttcngcattccatttcgagcatctcgatatattacgggactc

SEQ ID NO: 13208 - DNA, 439 bp, Glycine max
aagcacctgcggctgcagctgatcccacaatccaccataatgtgtatttctcccaacggagctcgctctatcaaatgcaatccgatagggcggccatggcccttatctgccaatctatcagcaatagagtagccttctatgagagtatgcgtaattctctaaccaaattctgtcaacccaatcataaagttgcctgataataaccaccatcgggtgattaatgatcacctaagtatctagaataagcttgttcacagtaacataatcactctccaaccatattgtatatctaaaatctatttcccaggccagcttcaacctatatagaattcccatcaattcagctctcaaaacagtacatgatcccagattgaaagtgaagctcgtcatacaaatgtccatactatatctaattgcccctccacatgcagccttgctt

SEQ ID NO: 13209 - DNA, 296 bp, Glycine max
  unsure (1)..(296): unsure at all n locations
agcttatgctgcagacatgtatattttacctctttcgcagcaagaaccacaacagcagaataattatgatctntcaagctaccgatccaattcaggatggaggaatcatccaaatctgagaaggacgaattcatcacaactacaacagtctgtccctcctttccagaatgttggtggttcgaacaagcgcatatgttcctcttctaatgcagcagctgcatcaacagcatcatagacttcaagcaactgagaccccttcttaacctttctaagaagagttgatgaagcaaatgaac

SEQ ID NO: 13210 - DNA, 485 bp, Glycine max
  unsure (1)..(485): unsure at all n locations
tcaagcttgaccaggaattattgtattggttggttgttgaattctggttgttcctggtgcggagatgatggtacagcgggtgaaccaggagcggcagtttcttttggtgaggaagccatggaaaaacagagcgtttggaatgatttcgtaaatctcagaaaactattgggaaatgctggagaaaacacgaatgccaagcagatataaatttgaatgaagaatgtagaggggcgtgtgaagcaacggtcgaatttgctttgtggtgaacgtgctattaatgttaagtgattcgtttgggcacgttcagattgcagtagctgctataattcctctagcagacaaatgcccagcttgcccctcagtttttcaaactgattngcatccaaagcctttgtgaaaatatctgctatttgttcctcagtgtcaacatgcttcagtgtgatcactntatcatcaacaagatctctgatatagtgatgtctaat

SEQ ID NO: 13211 - DNA, 478 bp, Glycine max
  unsure (1)..(478): unsure at all n locations
aaaagttcccaatcaaagaatcggaagaaagcaaaaggagaaaattcccaatcaaagagtgggagaaagcaaaaacacaagagaaagaaaattcccgatcaaggatcgaaagaaaacagaagaaatatgcagaaaggtctttggaccagacaatatctgaacaatacagaattgtcacccaagtaaacagaaaagaaaggaaaccacgacctanagtgatcctctccctttgattgccaaccaaaatcctgtgcgccggtgacttgtccagctcacactaaacaaaaaacagaaaaggaaaaggccaagaacactcaaagccaaatttcccacaaaccattcccaagaaaaaagtcctattgatccatgatcacacatgtaatctttgatntgatagaanatgaattgcaaaaccaagtcatgacatatctatggttcggaattaggatgaaacacttacctatgtgagattggacac

SEQ ID NO: 13212 - DNA, 362 bp, Glycine max
ctatgctcttgtgttgtggaacaagctacaaaaagagagagcaagatatgaagatcccatggttgatacatggacgaagattaaaaatatcatgaggaagcggtatgtgccggctagttactcaatggacttgaaattcaagctccataaactaacccaatgcaacatgggggttgaggagtatttcaaggaaatggatgtgctcatgattcaagcaaatattgaagaagatgacgaggtaactatggctcgatttcttaatggtttgactaatgatatccgtgatattgttgagctgcacgagtttgttgaaatggatgatctgcttcacatagcaatccaagtggagcaactattaaaaa

SEQ ID NO: 13213 - DNA, 455 bp, Glycine max
  unsure (1)..(455): unsure at all n locations
ttcaataatctaacttacagagattagcgaatcttaataaatatatagagcttaagataataattaagttcaatagaataaaaaacttccacccccaacaaaactcctgtatggtcctcctacacaaaccaaaacataaaatacacactctcgacagcaaaacatttaaaattataaacatacngggttgtagacacaattgacataatgcanaaccaaaagtgtgcctatcaacaaaactagaaagntttgctcacaattataataagatagaacaaatgggctttactacaagtgtctattactataattttatattgcatgactctattttatatttactatttaaattgtgtggaatggtgtgctacattatattataataattgaaaacatgtacacaaatagaaatttatacaagttctcttagatcataatggcctgatgaataatat

SEQ ID NO: 13214 - DNA, 486 bp, Glycine max
gctacgatagtacttatggataacttaattacttataactactaattaataaaaatcaaattatcttccaatgctattcttttattaattgagttaattatccattactagtcatatattgaaaaaatgtcctttaaatgtaaaaaatgatagacattaagattgtcttcattgatatatagtctttgcctctcttttttaatcctaacatatgatatattaatagtatatttcatttttttaaaattaatataattatatattagtatgaaaaaacattcatgattgaattataattaatatgttcttagttcgaataaaattgatacaattttcttataaaatgtctcacatttggattttatcatataaaaacataaatattttacatcaatatcatgataatctacgaattaagataatataaaagtataatatttctattgtagatttaatgtatattaaacacacaaaccaacttataca

SEQ ID NO: 13215 - DNA, 450 bp, Glycine max
  unsure (1)..(450): unsure at all n locations
agcttgagccanaatcctaactcaccatanaccttgacccangatgagaatgtcaatccttaccctcggaagcaaaanagaagagaaggaaaatttccaatcaaagaataaaataagagaaggataatttccaatcaaagagaaagctaaaaaaagagagaaggaaaatttccaatcaaagaaataaaagagaaggataatttccaatcaaagagaaagcacaacaaagagagaaggataatttccaatcaaaggaaaaaagagaggaaaggaaattcccaatcaaagagtgggagaaagcgaaaagaatagaaagataattcccaaccaaagagtgggagaaagtaaaaggaaggaaagaaagctcctgatcaatgatcgaaagaaatcagaagaaatgtgcagaaaggtctctggaccggacaatatctgtacaatatagaattgtca

SEQ ID NO: 13216 - DNA, 451 bp, Glycine max
  unsure (1)..(451): unsure at all n locations
ngccttgccccttgatatatatgagggactcatggtcgctatgaatgacaaattccttgcgataaaggtagtgttgccatgttttcaaagcccgtactaaggcatacaactccttatcataagttgaatagttaaaggtaggaccacttaacttttcactaaaataagcaattggatggtcttcttgcaacaacacagccccaatcccgacatttgaagcatcacacttaatttcaaaagatatttgaaagtttggcaatgcaagtatgagggcattagttaccttttgcttaagaatattgaaagcttcttcttgtttctttcctcatttgaaaccaacatttttcttgagcacttcattgagaggtgctgccaatgtgctaaaatccttcacacatcgtctataataacttgctaagccatgataactcctcacctcgatcacagactt

SEQ ID NO: 13217 - DNA, 451 bp, Glycine max
  unsure (1)..(451): unsure at all n locations
tgagaatggagaattgcactaagcaatcactacgcatagctctcaactcgaaggtggaggacacatgaacgaaaacacaattcatggggctccgaanaaggggttgagaatggagaattacactaagcaatcactacgcatagctccaaactcgaaggtggaggacacatgaacgataacgcaattcatggggctccgaaaagattgagaatggagaattgcactacgcaatcactacgcatagctccaaacgcgaaggtggaggacacatgaatgaaaacgcaattcatggggctccgaatagattgagaatggagaattgcactaagcaatcactacgcatagctccaaactcgaaggtggaggacacatgaatgaaaatgcaattcatggggctccgaanagattcgaatggagaattgcactaagcaatcactacgcatagctccaa

SEQ ID NO: 13218 - DNA, 403 bp, Glycine max
  unsure (1)..(403): unsure at all n locations
tcatgttaacctaataaatcaattcatggttataacttatgcaaaaatagtattcggcacacttacattaatgtctttctaaatgtctttaagcatctgtaattataatcattgtatcactggaattcccctcatntccttgaactangaataaagatacgtgcttcctttatttgtaagtagcttcatctcaaaatggctatctgtttaaaacatgtattggattctattgcagtatcaacaagatgacccacgtaccctttgcgtgaacaaagttggtccttataacaatccacaagatacgtacaattattacagcctaccatgttgccgcccacctgttaattctgcacacagatgtggagtgcttgatgaagtccagtgtggcaatgatctcattgat

SEQ ID NO: 13219 - DNA, 346 bp, Glycine max
tgtgacgattgttatgtctaatgaaatgtaaacatgagcaactatgggctttaagaagttattatctggatttttgttgaacaagatggtatacgggacattaaaatgcacagaagcagtaagcaatctatttatcaagtatactgctctagtgaaggtaaaaaaacttgataagcacggaggcttgtttaaaaacagtgagtcctaattccacaatatgtctgcgcttcctttccactacaccattttggtgatgagtgtgaggactgatccatctatgagtgataccttggcttgctataaaaatagtgataggtctgaactccactctccggtctgtttgaac

SEQ ID NO: 13220 - DNA, 323 bp, Glycine max
  unsure (1)..(323): unsure at all n locations
tggtcataactaatcactcagaggtcttattgangcgcataatatatcgacacgctcgaaattgaacaatggaagctcttgaacgattcaaatggtcatatctgtttcacacataggtcagattcatgcgccaaatatatccagacgctccagattgaacaacagaatctctcgagaaaatccgatggtaatgactcattactcggttgcccgattcttgagcgttatatatcacaanctctatattgtacactggaagctattgacctattcaaatggtcataactaatcactcggatgtctgattgtagcgcgtaatatat

SEQ ID NO: 13221 - DNA, 346 bp, Glycine max
  unsure (1)..(346): unsure at all n locations
gtggtggaacaagctacagtaggagagagcttgaaatgaatagccaatggttgatacatggacggagatgaaaaatatcatgacgactcggcttgtgccggctatttactcatgggacttgaaattcaagctccaanaactaacccaacgcaacaagggggtagaggattatttcaaggaaatggatgtgctcatgattcaagcaaatattgaagaagatgacgaggtaactatggctcgatatcttaatggtgtgactaatgatatccgtgatattgttgagctgcttgagtttgatgaaacggatgacttgcttcactattcaatcctagtggagcatcatatt

SEQ ID NO: 13222 - DNA, 346 bp, Glycine max
  unsure (1)..(346): unsure at all n locations
aatatattttatcaagaaaatcaagttaaaatttataaaaaaaaatgttacataaatatgtttatttatgtaattttacattttanagttaatctaacaagaataatttatcaaacatttataattcaataagatgatgttcaatttttaactattaattatcttttttagctagttgggtaaacataggcttagtctctcatttctttataaagaaattttcatattgattntangataataagatgtttatttattcttattgagaagaaatataaaaaatgttttgttntgaagatgatggattacaaaaaattaaacacccaaaacaaaagtaatctaaatc

SEQ ID NO: 13223 - DNA, 422 bp, Glycine max
  unsure (1)..(422): unsure at all n locations
ctcagcttaacatcagaccacttccagggtgctggaactacttcacatgtacttgatggggcctatgcaagttgtaaggaaaaacaggactctgcaagaggctgctagggtcatgcttcatgccaaagaacttccctataatctctgggctgaagccatgaacacagcatgctacatccacaacagagtcatactgagaagagggactccaaccaccctgtatgaaatctggaaagggaggaagccatctgtcaagcacttccacatctttggaagtccatgttacatcttggcagatagagagcaaaggagaaagatggatcccaagagtgatgcangaatattcctgngatactctacaaacagcagagcatatagagtattcaattccagaaccagaacagtgatggaatccatcaatg

SEQ ID NO: 13224 - DNA, 432 bp, Glycine max
  unsure (1)..(432): unsure at all n locations
agcttatagttattggagggagaataaaacaatttanaatcaattgtacctttcaagtaacgaagaattctttntgcagctnttagatgaggagaggtaggagcctccgtaaagcgacacacaactcccaccgcatatagaatatcgggccttgtattggttagataccttanactccccacaagactcttgaagatcgtggagtctaccttctctccttcatcaaaatttgataacttcaagccaccttccataggtgtgttcacgggattgcaatcaagcatattaaatntcttcaacacttcttttgtgtagctntcttgtgagacaaagataccattcttcgttntcttcacttccattcccaagtaatatgacatgagtctcgtatctgtcatatcaaattcacgagacatggnactcttgaagtct

SEQ ID NO: 13225 - DNA, 286 bp, Glycine max
  unsure (1)..(286): unsure at all n locations
tacatcttatatggataaagcaagcttcccgctagtgtttccttaagtttcatgggataattgcttcatttggtttcgatgaaaaccccatggctcaatgcatataccacatggtcagtgggagtaaaatatagtgtcttgttntatatgtagatgatattttacttgcagccaacgatcggggtttgctacatgaggtgaaacaatttttctctaagaattctgacatgaacgatatgggtgatgcatcttatgtcatcggcattaagattcatagagatagatc

SEQ ID NO: 13226 - DNA, 400 bp, Glycine max
ctaagcttaacattcaattgtgagcgtctcgtaatattacgggactcaatcagacatccgagtaaaaatttattgtcgtttggattggctcagagattcaacattcaatttcgagcgtctcaatatattacgggactcattcagacatccgagtaaaaagttattgtcgtttgaattagctcacagcttcaacaatcaatttcgagcatctcgatatatcacgggactcaatcagacatccgagtcaaaagttattgtcgtttgaattggctcagagcttccacattcaatttcgagcgtctcgatatattacgggactcaatcagacatccgagtaaatagatatcgtacgttgaataggctcagagcttcaacattgaatttcgagcgtctcgatatg

SEQ ID NO: 13227 - DNA, 308 bp, Glycine max
  unsure (1)..(308): unsure at all n locations
actcggatgtctgattgagtccggtcatatatcgagacgctcgaaattgaatgttgaagctctgaaccaattcagacgacaataactntatactccgatgtctgattgaggcccgtcatatatcgagacgctcgaaattgaatgttgaagctctgagccaattcaaacgacaataactttttactcggatgtctgattgaggcccgtaatatatcgagacgctcgatattgaatgtggaagctctgagccaattcaaacgacaataactntntactcggatgtctgattgacgcccgtaatatatcga

SEQ ID NO: 13228 - DNA, 497 bp, Glycine max
  unsure (1)..(497): unsure at all n locations
cttatactntatgttaatgggtatgaagtgataatatttcgtcaatttatccactattacccatactacatcttggcgagatntggtcctaggcaagccaaagacaaaattcatcaagatacaatcccatttccactcaagaattgtcaaaggttgcaattcatcangaaatttttgaagttccacattcgctttttgacacctcatacactttgccatgtactctgccacatttttcttcaagctataacaccaaaagttcttcttcacatcttggtacatntttgtgaaacctggatgaaaactcaatcgactcttatgcattnttccaagatttcttccttcaacatgctctagtgaggtatgcacanctcattccttgaatggatgagtccattcgcatccttactgaattctaaattttgccttcttctttaacttaatcntgtctatangaatngatctccttgtgaacctctcaacttgttcaaacactc

SEQ ID NO: 13229 - DNA, 288 bp, Glycine max
  unsure (1)..(288): unsure at all n locations
taatctactgcctcaattagagtttcttccttgtctatcacattangacttgtagggacatacccatataaagcctcaaaatgtgtcatttgtggtggtgtatgaaacttggtattataccataattctgccattgctaaatgatttgtccattatttgggcatatttccaatagcacatctcaaataagcttctacggatttattgagattcccaatctatccactattttgtgtatggaaaggtgtggatcttaacaatttaacaccatgtgactgcattaaacct

SEQ ID NO: 13230 - DNA, 440 bp, Glycine max
  unsure (1)..(440): unsure at all n locations
tgtgttctcccttgtagaactactatctgtattaacagtngcaacccaactatctggtagtgatgacaatagaatcaatgccttcacctcatcctcaaatntaatctgtactgactccaactgggcaagaatagtattaaattcattaatatgatcaattacagagttaccttctcccatcttgaggttgaacaactgacgcatcaagtatactttgttggctacagacggcttctcgtacatatctgataacgccttcattaagcctgcaataatcttctcgtttacaatgttgaacgcgacgttcttggctaatgtcaatctgatcatgccaagagcctgtcgatctagcaagtttcattcttcttgccttatngccgttggcttatcccctgataaaggttgatgcagcttcttctgatatagataatcctctatct

SEQ ID NO: 13231 - DNA, 408 bp, Glycine max
  unsure (1)..(408): unsure at all n locations
cgagtcttactgaaagctgtgccgggtgtttcactactattggtgatgtgtattctatgacaagaactattggagttcccatgacaaccattgaagccaggctggaatctgtgccagatatgggatatgatgccctctccaatgtaccccgtggagaaatttgtttgagaggaaataccttgttcttcggctaccacaagcgtgaagatcttaccaaagaagttatggttgatggctggtttcatacacgtaaaaccatgttgtcctgtattctaaattaacatagtgattggtngatcagcacacaattcacatacatgtaaaccattgcaggtgacattggagaatggcaatcaaatagggccatgagaattattgatcggaagaagaatctctactaattgtctc

SEQ ID NO: 13232 - DNA, 418 bp, Glycine max
  unsure (1)..(418): unsure at all n locations
ctcaagctntttattntcactcgaatntgaaattgaattttggagacaaattntcactaattatgattagtgaactttagctatggttcagcccaccaatccaagatcaattccaagattctccactaagtgtgcttatgtgtcatgaggcatgtaaagcatgaatgacatgcacaaagtgtgactatatgatgtggcaatggggtgtagcaagcaaatgatcacctccccctctaatatttaattggattggtcttctcccaattcaattaaatntatttctcaacacacacatcanatatggacttaattaacgtganattacaaaactacccctaatacacanactatagtctaggtgccctataataccagggcttgaaaatcctacatntctanggtacnctacctacattat

SEQ ID NO: 13233 - DNA, 359 bp, Glycine max
tgattctgttgagaaagaatattcctcattcctattcccaatgcgtccatttccaccacgaatggcagggaaaagtccggcaaccgcaagactagggcgctacagatgacttccttgagcttgtcaaaagctgcttgggctttcggggaccagcaaaacttgtctctggccaggagctgagttagaggtgctgcaattgaagcataccccttaatgaatcttcgatagaaacctaataaaccgagaaagccccttaaagctctggtcgaggaaggtactggccattgttggattgcttccaccttcgtcgagactggttgaacaccaaactacgagaccaaatggcctagatactccac

SEQ ID NO: 13234 - DNA, 426 bp, Glycine max
  unsure (1)..(426): unsure at all n locations
gtggtctatataggctgtcanatgcattattactcaatntcgataaatgttcataganaattttgcatgtggttgttttactttgcataattttcatttattaaaaaatattanatntctgctctttactttatcctccaggttggaattgctgaacttaaaacagctgttgaaagaaccggaggtcttgttgtacttgctgaaagttntggccattcagtgttcaaggattcactanagcgtgttttccaatcgggtgattatgatntgngtctatcttcanagtaagtctttaaagaatttcattnttatntnntgtatctgatatactaatattcctgangtgtgtttcttgttgatgtaataaggataactctactgcataaattattattggctagtgagctactatgttagttaaatact

SEQ ID NO: 13235 - DNA, 303 bp, Glycine max
  unsure (1)..(303): unsure at all n locations
gtgactactgcgggtgatttcngcaaccccggttcgcacaccgtggcgaattggttcaagattgagaagtatgaggatgcttacaagttggtgtactgtccaagtgtgtgctacgattgcagttatccatgcagtgatattggaatataccaggatgaatatggcaaacgtcttgctctatgttctgaaccatacaaagtgaagttccagcgggcttgattattgaattgataactaaactcaataaagaataatgaatacgtgtaatgaactactctatgctcntgctgcatatattggaat

SEQ ID NO: 13236 - DNA, 362 bp, Glycine max
gaatcacaaatttgtacctgtcgcaagggtttgtggtttgtgctcctctgctgaccaccatacagacctttgcccttccatgcaacaacctggagcaattgagcagcctgaagcttatgctgcaaatttttacaatagacctcctcaacctcagcagcaaaatcaaccacagcagaacaattatgacctctccagcaacagatacaaccctagatggaggaatcaccctaatctcagatggtccagccctcagcaacaacaacagcagcctgctccttccttccagaatgctgctagcccaagcagaccatacattcctccaccaatccaacaacagcaacaaccgcagaaacagccaacag

SEQ ID NO: 13237 - DNA, 397 bp, Glycine max
  unsure (1)..(397): unsure at all n locations
agatggaccatntcaagtgctngaaagaattaatgacaatacttacaaagttgagctgcccggtgagtataatgttagttccaccttcaatgtctctgatttatctcttnttgatgcagatggagaatccaatttgaggacaaatccttctcaagagggagagaatgatgaggacatgaccaagagcaagggcaaggatccacttgaaggaattggagggcctatgacaagggctagagcaaggaaagccaagcaagctcttcaacaagttntgtccatactatttgaatacaagcccaagtttcaaggagaaaagtccaaggttgtgagttgtatcatggcccaaatggaggatggactaaatgacaccactttgtctcaatttagagtggttagt

SEQ ID NO: 13238 - DNA, 333 bp, Glycine max
  unsure (1)..(333): unsure at all n locations
gacgcaaggctaagcgataagatactnttcccactaattcgatgatctgataggggccataaaaacgctttcctagttntgaaacttatcagcgatcgaagtttggcggtaaagtcttagcttcacatagacccagtccccaattttgaagttgacttcttgacggtgaggatcagtagagttcttcattcgtgcctgagatcgttcgagtntttgacgaagggcatcaaacatatcttggcgagtggtaaggaggaagtccacagcctcgactgatgatgaaccaggaaggtagtccgggatatcgggtggtggcttcccgtacattacctc

SEQ ID NO: 13239 - DNA, 232 bp, Glycine max
atataaatatatatcacgactctaacttcatgatattgatgcctatctacgccacatatgaatcattgtataatggaacaataatatatggatgtatagagatggaaaagctgaccttctcgtctattattgctttatacatagcgacttgctccttggcagcactggtagtgttttcagcttctccttgaagatgcaactttgacttcttgatgtctctctcctctgtctc

SEQ ID NO: 13240 - DNA, 173 bp, Glycine max
tccgtgtgaaatgttatgaccatctgaatttctcgagagcttccgatgtttaatattgagcgtatccatctatgatacgcctgaatcggacctccgtgcgaaaagctatgaccattcgaatttctcaagagcttccggtgttcagtttcgagcgtctctatatgtcatgcgcc

SEQ ID NO: 13241 - DNA, 447 bp, Glycine max
  unsure (1)..(447): unsure at all n locations
actcagcttacacaatntagttttctcacacttgagtcttagaatactaattactaagtcttttctgactcgatgattgaaatgatgcatgtttatgtgtgtatccctacaatgccataatcaagaatcaccaatcttacttactaaaccactaagttcatgaaatgatgcatgtttaatgttttaacatatagatatcacctatccttttgctaatatggacaattgtcacaaagttgactaatgctcaagaggttatgctttagtccatcaacatataaaacattctttatttgtgtcttgtactgattttcaatgtttccttctcccataatattccctttattgttgtcttcaaaagtgatgtatcctctttcttttatacaaagtcagaagtttgaacttgtacccatcatgtgcctagaccaaccactatccaagtaccat

SEQ ID NO: 13242 - DNA, 346 bp, Glycine max
tgtccatatcatggaagaccctcatgacatctcagctgttattcattggatttctgatatggagctccaagagattaatgctgtgggatcaagatatacctggataaggcctaatgggtatgtgaagagtatgcttgacagatttttggtctcggaccaatggttgtctatgtggcctgagagctgccaacatgttttgcaaagggatatatctgatcattgctcaaccattctgcaaactaacatggcggactggggtcctaagccctttatggtttttgattggtggctgcagcacaaagagtatcaaacaatggtgagggagacctggactaatgatcagcat

SEQ ID NO: 13243 - DNA, 431 bp, Glycine max
  unsure (1)..(431): unsure at all n locations
tcntagtctcaatttgagcgtctcgatatattacccggttcattctgacatccaagtaaaaagttattgttgtttgaatttcctatgagcttcggttttcaatntggagcgtctcgatatattacaggactcaaccggacatccgtgtataaagttattgtcatttgaattttcttagagcttcggatctaaattttgagcgtctcgatatattacgggactcaatcagacatccgagtcaaaagttattgtcgtttgaatttgatacgagcttccgttgtcaatttggagcatccctcgataaattacgacactctgtcgggcatncgagtaaaaagatattgtcgtttgaatattctaagagtttcctgtttgaatttggagcgtctcgatatattacgggactcaactggacatccgtgtataaagta

SEQ ID NO: 13244 - DNA, 447 bp, Glycine max
  unsure (1)..(447): unsure at all n locations
tgaatggtgacctgcgtagaagtgtgagttgattgagaggcaatcatttattcaacttcgcatttctctcgcatccactgaaccaagattcctattccanaatgaccggtaactgttccattttcatttctctcatatctcagattcattcataataatcataacaaccctttctctaatctatggagattgattgctgcagctcctacttcttccagcctgtggctggctccaatacccagcanaagatggtgcgaactcttcttccttctctacacccncttctggctcaccctttgactcggcattgttattcccttcaatctttacgaaggtttactctatccaccttttacattgtnntttgtaagcattctaatatgatctcacagtttgatctatctggccactacggaataatccgttacactaatccactaaattatt

SEQ ID NO: 13245 - DNA, 359 bp, Glycine max
  unsure (1)..(359): unsure at all n locations
tcacctggttcaagcacgactntctttctgcttttgttggcttgccttgcatagctcgcatntttcttttcaatttgagccttcacttgctcatgcaacttcttcacatacttagctttagcctgtgcatccttatgcttaaacatagcaatgttaggcataggcaacaaatcaagaggagtcaaaggattaaatccatacactatctcaaatggtgaacaattagttgtgctatggacagcctgattataagcaaactcaacatgaggcaaacaggcttcccacaatataagaattttctttataacattcctaatcantatgcctatagtcctattgactacctcagtttgaccatt

SEQ ID NO: 13246 - DNA, 302 bp, Glycine max
  unsure (1)..(302): unsure at all n locations
tgctggaactacttcacatggtcttgttggttcctatgcaagttgaaagccttggagganagacgtatgcctgtgtggttgtggatgatttctccagatttacctgggtcaactctatcagagaaaaatcagacacctttgaagtatctaaagagttgagtctaagactgcaaagagaaaaatattgcgtgatcaacaaaatcacgagtgaccatggcagacagttcgagaacatcgggtttactgaatactgcgcatgtgatggcatcactcatgagtactctgctaccattacaccacaa

SEQ ID NO: 13247 - DNA, 441 bp, Glycine max
  unsure (1)..(441): unsure at all n locations
ctgcagcttagctntgtcccaggcttcatgtagacttgtccaanatcgcgaagtaaacctcggatccctgtcggatacaatatcggaaggaattccatgcaacctcactacttccttgatgtacaactccactagcttctccattctatacttcatattcaccggaataaaatgtgcagatntggtaagtcgatctactatgacccacacagcgtcatgtccacgactagtcttgggtaaactagatacaaaatccatagatatgctctcccatttccattccggaatttccaatggcttcaattctcttgatggtcgctggtgctcaaccttatgcctttgacatgtcaaacatcttgctacatattcagctacatctttcttcatgtcatgccaccaaanacttctcttcaaatcttggtacatcttagtcattcctgg

SEQ ID NO: 13248 - DNA, 381 bp, Glycine max
  unsure (1)..(381): unsure at all n locations
agtcttgtcttttacatacttatatggacatctggtgagtatgtaaacagcagtgtagactgcttcagcccagaatgtgttaggtagtcccttttccttgagcatcgatctagccatctccataactgtgcgattctttctctcggacactccattntgttgaggagaatatgcgactgtaagttgtctctcaatgccttcatcctcacaaaatctttcaaactcgtgagaggtgtactctctgccgcgatcacttcttaatacttttatccgttttccactttgattttcaacaaggaccttgatacttttgaatactccanagacttctgatttttcttttagaacatatactcatgtcattctagagaagtcatcaat

SEQ ID NO: 13249 - DNA, 430 bp, Glycine max
  unsure (1)..(430): unsure at all n locations
catgatatatgacgggtctcattctgacatccgagtaanaactaatcgtcgttggaatttcctcagaggttctattttcaattctgtgagtctcaatatactacacgattcaatcggactttccagtaaaaatgtattatcgtttgaattntctcagagcttctattttcaatttcgagcacctataattattaagggactcaattggacatccgagtcaaaagttattgttctttgaatttcctcagagcttctattttcaattttgagcgtctcgaattattaaaggactcaatccgacatctgtgtcaaagttaattacgttgaatgtcctcgagcttctgtttcaatttgagtgctagatatataccggactcaatcgacatccaacaaaagtattgcatttgattttggagagctcgtatatttc

SEQ ID NO: 13250 - DNA, 439 bp, Glycine max
  unsure (1)..(439): unsure at all n locations
tgtaagatttgcaagatcatcttcgttgacaactccttgagtattatggccatctataagaagcgttgacaatttatagagtgatccaagactttcaaatggatttccgctgaatttattaatagagagatagagatattttaaatctatctcccataagttgcggagattacccaaaaaagtcggaattgttccttcaagttgattacgtgataaatcaagttcaacaagagaagtcaaatttcccaaagaagttggaatggttccttcaagttgattatatgacaaatcaagttcaacaagagaagtcaaatttcccagggcatcagaaatagtcccatgcaagttgctggaacttaggtccaaagacttgagacgatganaaccgtataagcaatcacgtatagatgatgagaatgaattgaaagacaagtcaaga

SEQ ID NO: 13251 - DNA, 442 bp, Glycine max
  unsure (1)..(442): unsure at all n locations
tgatgcaacatatggagaggttaatgaaacaacgagatgatgcgctccatgagaggttggatcaaatggagaatagagatcataatgaagaagaaaggaggagaagagggaatgatggtgttcctagacaaaaccgaattgatggtattaaactcaacattcctccatttaaaggaaagaatgatccggaggcctacttggagtgggagatgaaaatagagcatgttttctcatgccacaactatgaggaggaccagaaggtgaagcttgccgccacggagttttccgactatgctcttgtgtggtggaacaagctacaaaaggagagagcaagaaatgaagagccaatggttgatacatggacggagatgaaaaagatcatgaggaagcgatatgtgccggctagttactcaagggactngaaattcaagctccaaaaact

SEQ ID NO: 13252 - DNA, 451 bp, Glycine max
  unsure (1)..(451): unsure at all n locations
actgtgtgcatgaatactgttgggatgtggcaaattgttatgcagttattgttattccggaaggaatgaattggcaacaaaagataagattcttttaagatgctgatttctatctatggcataacccgtacttattcaagttaaagggtgacaatttgtttaggagatgtcttactaaagaggaagttcaagacatcttatggcattgccataattcccccatatggtggccattataatggggaaaggacaactagtaaagttntgcaatccaaattatttcggccttcaattntcaatgatgcacacaatcatactcaaagttgtgataaatgccaaagatccagtaatacttcatagagacatganatgccattataaaacatcttataggttgaggtctttggttattggggaaattggtgcatggaaccttttcctcatcacattc

SEQ ID NO: 13253 - DNA, 351 bp, Glycine max
  unsure (1)..(351): unsure at all n locations
ntgagccaattctaacgagtaataacttttactcggatgtctgtatgagtctcgtaatatatcgacacgctcgaaattgaatgttgaagctctaagcctattcaaacaacaataacgttttactcggatgtccgattcagtgacgtaatatatcgggacgctcgaaattgaaagttgaacctctgagccaactcaaacgacaantaacttttacttggatgtctgattgagtaccgaaatatatcgagacgctcgaaattgaatgttgaacctatgagcctattcaaacgacaataactttttactcggatgtctgattgagtcccataatatatcgagaacgctcgaaat

SEQ ID NO: 13254 - DNA, 320 bp, Glycine max
acattcaactttgagcgtctctatatattacgggactcaatcagacatccgagtaaaaagttatggtcgtttgaattggctcagaggttcaaaattcaatttcgagcgtctcgatatatttcaggacttaatcagacatccgagtaaagagttattgtctgttgagttggcttagaggttcaacattcaatttcgagcgtctcgatatattacgtcactgaatcggacatccgagtgaaaagttattggcgtttgaattggctctgagcttcaacattcaatttcgagcgtctcgatatattacggtactcaatcagaca

SEQ ID NO: 13255 - DNA, 438 bp, Glycine max
gcttggcgcttatatctttgcatgaatatatgctattgggactcaagagtgttatgcaatagttgtggacaataaattacaaattagcttggctaagaatccagttgctcatgggaggaagcaacatattgaaactaaatatcattttcttcgtgatcaagttaataaagggagattatagttgtgtctctgcaagtttgaacaacaagttgtagataccctaactgaagaatgcaagatgtaaagaattgaggagaatgttgaatgtggtgtctttagaaactttgatttaaggaggagtgttgcagagtaattcaaagtgttaacccatgtgtgtgcgtgaactttgtaggtatatagttaaatgtgacaccctctaccctcacacataacgaataagaggaaataaaatcatgtggaaaattttataataaaaaa

SEQ ID NO: 13256 - DNA, 294 bp, Glycine max
gcttatgcatctcttttcgcaccttttttttattgatggggtgagccttctctgtggctgactaactggtctgtagtcttcttccatcattatcttgtgcatacagtaggtagggctgtatcctttcagatctgatatgtgccaccctattgcctccctgtgtctcttgaggacctccaccaacatgttctcttcctctgttggtagctcagtgctgatcaccacaggcttggtctcattctgctctaagaacacatactttaagatgttgggtaggatcttcagctccacctt

SEQ ID NO: 13257 - DNA, 403 bp, Glycine max
  unsure (1)..(403): unsure at all n locations
ctcattaagaatcaaagtgccatgaagaatatgtctgtctttaatgaaagctgtttgtctttcatcaattaagacaggtatgacatgtctcaacctgtttgctaaaagcttagctattattttatacatgcagcctatcaaagatattggtctataatcatttagggactgagggtggttaactttagggattaaagccaagaaagaggcattgctgcctctagggaaactaccattgacatggaactcatccacaaatcttctgaactctggtttcagcacaccccagaattccttaataaaattgaaattaaagccgtctggcccaggggacttatctncaccacaactccacacagcttccttgagttcttggtctgagaaagctaaaatcaactcctcc

SEQ ID NO: 13258 - DNA, 452 bp, Glycine max
ttatagaatgcctgacgagagcgtctccacggagaaccctctctacaagcttctgcggcgtgtgaagacactcgcgccgcgcgtggtgacgctggtggagcatgatgccaacgccaacacggcgccgttcgtggctcgagtaaccgagttgtgcgcgtattacggcgcgctgttcgactcgctcgagtcgacgatggcacgggagaacttgaagcgagtcaggatcgaggagggactgagtcggaaggtggtgaactcggtggcgtgcgaaggaatggaccgcgtggaacggtgcgaggtgtttgggaagtggcgcgcgcgtatgagcatggctgggttcatgttgaagccactgagtcagcgagtcgctgattcgatcaaagcgcgactcggtggcgctgggaaccgagtcgcggttaaagtatagaacggtgggatttgctctgctggat

SEQ ID NO: 13259 - DNA, 477 bp, Glycine max
  unsure (1)..(477): unsure at all n locations
ngttgtcattgttgcacaattgcaggagcaacgagtaaccttcctagctnttccttccgaatcaatcttgcacaactgcagggagaaagtccaccaaaattaaaacacaaaagcaatggcataaattaatccattggaaggcataaatatagaatagtcatacaacaacaacaacgccttatcccactaggtggggtcggctacatggatcaacttccgccataatgttctatcaagtaccatacttctatccaaatcattaagtttgagatccttttttataacctctcttatagtctttntgggtcttcctctgcctcgaattgtttgccttctctccatctggtctactctccttactacagagtctaccggtcttctctctacatgcccaaaccacctaagtctattttccaccatcttctctacaataagcgctactccaaccctctctctaatagcttcggttctaaattt

SEQ ID NO: 13260 - DNA, 405 bp, Glycine max
  unsure (1)..(405): unsure at all n locations
cggagatgatggtacagcgggtgaaccacaagcggaagtttcttttggtgaggtagccatggaaaagcagagcgtttggaatgatntcttaaatctcagaacgctantgggaaatgctggttaaaacactaatgccaagcagatataaatttgaatgaagaatgtagaggggcgtgtgaggcaacggtcgaattctgtttggcttaatagtgaacgtgctattaatggtaagtgattcgttcgggcacgttcagagtgctgtagttgctataattcctctagcanacacatgcccagcttgcccctcaagttttcaaactganttgcatccaaagccttngtgaanatatcttgctatttgtcctcagtgtcaacatgcttcagtgtgatctacttatcatcaac

SEQ ID NO: 13261 - DNA, 439 bp, Glycine max
  unsure (1)..(439): unsure at all n locations
tgaagacaagactatacgaggtatcttccttgggtatagcattatctctaagggctaccgtgtctacaacttgcaaactaagaaactcgtcatcagtcgagatgttgaagttgatgaatatgcttcatggaattgggatgaagaaaaagtggagaagaacgttcttatacccgcttaactacctcaagaagaatatgaggaagaagatccaggtgaaccaccttcacctacatcacaacaacaagatcaagaactatcatcaccagagtctactccaaaacgagtaagatctttggtggacatatatgaaacttgtaacttggccatacttgaacctggaagcnttgaagaagcgtcaaagcatgaagtatgggtcaaggcaatggaagaagagatacagatgatcgagaaaagcaacacatgtggagtagtnaatcgt

SEQ ID NO: 13262 - DNA, 358 bp, Glycine max
  unsure (1)..(358): unsure at all n locations
catagcaccactaattgttctacttgtgaagttgtttatggtcctaacccactaactcctcttgatcttttgcctatgcctaatgtttctgtttttaagcataaagaacgtcaagctaaggctgactatgtgaagaagcttcatgagagagtctaagatcatattgagaggaataataaaagctatgctatacaagccaacaaagggagagagaaggttatcttctaacccggagattgggtttgggtgcacatgataaaagaaaggttttcggaacacaagaaatcanatcttcaaccaaggggagatggaccatttcatgtgcttgatagaatcaatgacaatgcttacaaagttg

SEQ ID NO: 13263 - DNA, 429 bp, Glycine max
  unsure (1)..(429): unsure at all n locations
gcttcttagtttcagatgatgcagatgggtttgtatccacctcatgcactcctctaatgactatggcatcatttctggcgctaaactgctgggagttggaagccatcttctcaattaaatttctggcttcagcaggagtcatgtctccaagggctccaccactggcagcatctatcatacttctctccatattactgagtccttcataaaaatattggagaagaagctgttttgaaatctgatggtgggggcaactggcacatagtttcttaaatctctcccagtactcatacaggctctctccactgagttgtctaatacctgagatatccttcctgatggctgtggtcctggaagcagggaanaatttttctaagaatactctcttaaggtcatcccaactcgtgatggaccttggagcaaggaata

SEQ ID NO: 13264 - DNA, 409 bp, Glycine max
  unsure (1)..(409): unsure at all n locations
gcttctgctctagctngagcaagttcagcctttctttngtttttgctcaaactnttcttatagttggtaacaaatctatcaagctcccagagagtctcagcatccacactatcaatgtccacttcaatttcatcgtcatgttgattaagtgctgaatttctcttcttaatgatttgtacaatagcatcaagcttctctgaaggcaagctctgaaggttagtgcttagtttttgcttttcctcaaatgtcatgtctcttttatgaggatcttttgcctttggctnttttggagctggggttctacttgatggagtaatgctcatgagtcttggagtctgtgtcattgattctgatctattcaaaatccttctcatatcaagaggtggtggtgtaatgcagaaacccttct

SEQ ID NO: 13265 - DNA, 443 bp, Glycine max
  unsure (1)..(443): unsure at all n locations
tgacaggttcatgcactctgaattgttcgctttacctcaatgtgttggcactcacatntttcagattctgcatagtttgtgaaggcaatttgtcaaaattttgggactgagcttggttcaactgagtagccatttgccccatctgatttgtcagactctgaatagaggctcttgtctcttgctgaaattgcatattctggatggacatttgtctcactaactcttctaaggaaggttgaggaggagcctcagttgcttgttgtcattgttgtgactgttgttgttgttgctgcattggaggaggaacatatggcttgtttggactagcaacattctggaaaggagggacaggatgttgttgttgtggaggacttgcccatcttatatctggatgatatgtccaacctggatcgtatctgtttcttgaaagatcataattattc

SEQ ID NO: 13266 - DNA, 462 bp, Glycine max
ttaaaactaagctgccaagaatgtaacctataacggacgctcttgtgggctcatacgagaaaatctttggtattgtaggcattggatccatgagtaatacatgggatcaaacgttgccatattgttcatttaatccacgcaagaattgcatggctcgatcttcctgctttcgttgagcaatagtggtgaggactgaacaagtgcacttaatagtgcaagaacaaatgggatcaggtgtgaaattctcgatttcgtcccatatgatgcgtagcttcatgaaatattccgtaacagagagagtaccttgcttcatcgatgatgcttcttgtagaagatcagagatccccttgcgcgtatcgagacttcaaatcactctagatttcttctactttgtccattcatataatactttgtctaattgaaatggataccgaatgaacgatccaagacaccaccatgtta

SEQ ID NO: 13267 - DNA, 464 bp, Glycine max
tactcagccctgtatggattacacatatactcgaatcgattaccagagctttttttcactatatattcgcaacagtcacatctgtttatgtggttcttgaatggctatcaaaggcctatatatatgtgacttaagacacgaattcgatgagagtttttcagaacaaaaaggtcttatcctcttataaagcaaaatcgtctaatcctcttacaaataccttggccaaattactcgtgattcaataaggaaatatctgagtgctcacattgttcaatctatctctttcaacagagatcacctcttctcttcttctatattctgaaaagggattaagagacccacggtctctcgttgtgaaacaattcttaacacaaaggaaggaattgtcttgtgtgtttagaacttgttaaaggaattctcaatatagtggaactctcaagcggctgattgggactggactttgc

SEQ ID NO: 13268 - DNA, 435 bp, Glycine max
taaacattcaatttcgagcgtctcgttatattacgggactctatcagacatcttagtaaaaacttattgtcgtatgaattggcttaaagcttaaacattcaactttgagcgtctcgatatattacgggactcaatcagacttccgagtaaaaagctattgccgtttgaattggctcataggttcaacattcaatttcgagcgtctcgatttatttcggtactcaatcagacatccgagtaaaaagttattgtcgtttgagttggctcagaggttcaacattcaatttcgagcgtcccgatatattacgtcactgaatcggacatccgagtgaaaagttattgtcgtttgaattggctcagagcttcaacattcaatttcgagcgtgtcgatatattacgggactcaatcagacatccgagtaaaaagttattgtc

SEQ ID NO: 13269 - DNA, 389 bp, Glycine max
  unsure (1)..(389): unsure at all n locations
gatgtccgattgagtctcgtaatatatcgacacgctcgaaattgaatgttgaagctctaagcctattcaaacaacaataacgttttactcggatgtccgattcagtgacgtaatatatcgggacgctcgaaattgaaagttgaacctctgagccaacccanacgacaataactntntacttggatgtctgattgagtaccgaaatatatcaagacgctcgaaattgaaagttgaacctatgagcctattcaaacgacaatagctntttactcggatgtctgatggagtcccataatatatcgagacgctcaaagatgaatgttgaagctctgagccaattcatacgacaataacgttttactcggatgactgattgagtcccgtaatat

SEQ ID NO: 13270 - DNA, 407 bp, Glycine max
  unsure (1)..(407): unsure at all n locations
agctntgaatgctctattcaatggagttgacattaatatcttcatacttatcaacacatgcacagtggccaaggatgcatgggagatcctgaaaaccactcatgaatgaacctccaaagtgaagatgtccagattgcaactattggctacaaaattcgaaaatctgaagatgaaggaggaagaatgtattcatgacttccacatgaacattcttgaaattgccaatgcttgcactgccttgggagaaaggatgacagacgaaaagctggtgagaaagatcctcagatccttgcctaagagatttgacatganagtcactgcaatagaggaggcccaagacatttgcaacatgagagtagatgaactcattggttcccttcanacctttgagctangactctcggata

SEQ ID NO: 13271 - DNA, 478 bp, Glycine max
  unsure (1)..(478): unsure at all n locations
tactcagcttagactcactagcacctagccacctagagntaggttatctactctcttntatccatgtctcatcaaatcccaatctatgcaacatatgaaaatggaatctccaagaaaaataatcatactccttttcaaagtctaccttgaaccagagacacttcttttttatcctagcttcatccactacctcacatcttctttttcaaaggccaccaatacaataagcaataattgtctcccaccaaagacaacacattgtctattatcaattacatcacctaaagcccttctcattctattggctaacacttgtgccaaagatttatacaaacatcctactatagaaataggtctagattctcccaagctntgaggatttttacatttagcaatccaaataataaaggagggaattatatctctaggtaacaccccatgtgcatggaattgctntaactacttcaataagtctccc

SEQ ID NO: 13272 - DNA, 471 bp, Glycine max
  unsure (1)..(471): unsure at all n locations
tcagcttacaaagtctattggctggatacaagcaccgaggcagtttactagaagtttaatgagtttatgagcaactcatgattcaacagatgtgacatggaccattgctgctatgttaagaaatatactaatagttatgttatcgctatcgcgtatgttgatgacatgttgattgcaggatctagtatgacataaattaacattgtgaagcagtagttggtagaaaactttgaaatgaaggatcttggtccagctaaacaaatccttggtataagaattcttagaaacagatcagaaggaattttgaagttgtctcaggagaaatatatacacaatttgcttgacaggttttaccttgaagattctaagaccaggaatacccctttgggatcttatttgaagntttcaaagaagcaatctttgcagatgatgaagaanaatgttacatgtcaagagtaccatatgcatcat

SEQ ID NO: 13273 - DNA, 241 bp, Glycine max
atctgtttctgtcacccaatcccaagtttgcatatcggtcccaaccccatccatacaaattcccatctttagtgatttgtacactatgttcagcaccagccagcaccattttgataggtatttccttgcaaaatacaaagttcatgtctccaagtagttaagggaataataatctgtttgatacatatacttttctgttgtcaattaattatataatgcattgtcatgagcatacattaac

SEQ ID NO: 13274 - DNA, 436 bp, Glycine max
  unsure (1)..(436): unsure at all n locations
tcgaacagtcatcacttcattctcatggcgatagattatttcaccaaatgggtcgaagcggcttcttacaccaatgtcacgaagagtgtgatggtcagattcataaagaaggaactgatttgtcgatacggactccctaggaagatcattactgacaatggcaccaatctgaataaaaaaatgatgcatgaaatgtgcggngatttcaagatccagcatcataactccaccccctatcggccaaagataaatggggctgtggaggctgcaaataaaaatattaagaaaattattcagaagatgacggtgtcatacaaagattggcatgagatgttgccttttgccctgcatggatatcgaacctcggtacgaacttctactanggcggcaactctgtattccttggtttatgggatggaagcggtactcccatttg

SEQ ID NO: 13275 - DNA, 468 bp, Glycine max
  unsure (1)..(468): unsure at all n locations
actagatgcattggttaacttggtaacccagcttgccttgaatcaganatctgtaccagtcgcaagagtctgtggtttatgctcctctactgaccaccatacagacctctgcccttccatgcagcaacctggagcaattgagcagcctgaagcttatgctgcaaacatttacaatagacctccttaacctcaacaacaaaatcaaccacagcagaacaattatgacctctccagcaatagatacaaccttggatggaggaatcaccctaatctcagatggtctagccctcaacaacaacaacagcaacctgctccttccttccaaaatgttgctggcccaagcagaccatacattcctccaccaatccaacaacagcaacaaccccagaaacaacaaacagttgaggctcctccgcaaccttccctcgaagaacttgtgatgcaaatgactatgcagaacatgcagtt

SEQ ID NO: 13276 - DNA, 453 bp, Glycine max
  unsure (1)..(453): unsure at all n locations
gtagcccatcatctttatatcgtacaacactgttgatgtgtctactatcatcgacatcagtgttctctccgtcattgaggtgccacttgagctgccaagtctctccacctttgggcgtattcttttgaaagattcgtgccccctttttgcacatgttctgtagttgcatcctatccgaagacattatactgaaactgcctaacgatggcaaccactatgtccttccaagaatggactcgggaaggttccaaggtactgtaccaggtaacagctaccccagtaagactttcttggaaggaatgtattagcaattcctcatcttttgcatatgcgcccatcttccgataatacatctttagataggacttgatgcaagtagccnccttgtacttgtctaaggccaacaccttgaacttggaaagtgtgatgatattgcgtactaggaacaactct

SEQ ID NO: 13277 - DNA, 335 bp, Glycine max
  unsure (1)..(335): unsure at all n locations
ttacgccaaagaaaaacaatgggaagatgtacaaagtttgagaaagatgataaaagatggcaacatgaataagttgccaggttatagttgggttgatattaaaaataaaacccatgtgtttggggttgaagactggtctcatcctcaaaagaaagaaatttatgaaaagcttgataatcttcttgatcagataaagcgaatcggttatgttcctcaaacagaatcagttctgattgacatggatgacaatttgaaggagaagcttcttcattatcacagcgagaggatggccgtggcattntcattactaacctgcccaactggtatgccgatca

SEQ ID NO: 13278 - DNA, 374 bp, Glycine max
  unsure (1)..(374): unsure at all n locations
caataataganaatacttttttctcatcgtttatttacgacattctacatcgtttttaaaaccgatgttgaaagtaccaatgttgaatgtattattgttaacatcgattttgaaaatttgatgttaacataaaaatactaacatcagttttctcaataaccgatgttatatacaaagaactaaagaaaataagtgtatgcatgatgaacattgacatctgttttctataaaaactcgatgtaatgtaatttattaacatcggttttctatataaaaccgatgtgaacgtccatcatctatacacttattttgctgtagttagttatatataacatgcggtatctataaataacagattgtaaagtttgtatatt

SEQ ID NO: 13279 - DNA, 217 bp, Glycine max
  unsure (1)..(217): unsure at all n locations
ttctttttgctttacaagaggctgagagaagatatgatctggctagagctgcagacctgcgatatggagcaattcaagaggtggaaactgcaatacaacaaccttgagggagcactgaagagaatctgatgttgactgaaacntgtggaccggagcaaatagctgatgttgtgagccgctggaccggtataccagttacaaggctttgccaaaatga

SEQ ID NO: 13280 - DNA, 401 bp, Glycine max
gctttggagacccactgcaggaagctattctcgaactaatatgcttcagatgaaatggttcattttgtaatttctcaattcagttgtcaattctggacgatttcctgttaatttatcctttcacttttggttatagatgacttgctccacggttgaactcactgttcaatatgtggagaagttgagggaaatgattccactttatgaaattgtcaatgaacgtatcaacatcaatgacatttaatgggcacagcactgtattatttcaagctctcatatagcaatgcaagtgatgggaagctattgtgatagatctccagacgtaactgccactctagcaattgcaaattcttcgaactagctgatttattagtgatatgtatcttgaggctacattacaa

SEQ ID NO: 13281 - DNA, 446 bp, Glycine max
acactataatactcagctagagccaattcaacgacaatagctttatactctgatgtctgtatgagtcccgccatatatcgagacgctcgaaatttaatgttgaagctctcagccaattcaaacgacaataactttttactcggatgtctgattgagtcctgtaatataacgagacgctcgacattgaatgttgaagctctgagctcattcaaacgacaataactttttacacggatgtctgattgagtcccgtcatatattgagacgctcgaaattgaatgttgaatctctgagccaatccaaacgacaataacgttttactcggatgtctgattgagtcctcgaatatatcgagacgctcaaacatgaatgttgaagctctgagccatatcaaacgacaataacttcttacacggatgtctgattgagtcccgtcatatatcgag

SEQ ID NO: 13282 - DNA, 296 bp, Glycine max
  unsure (1)..(296): unsure at all n locations
gcttgtaagccaccatgcctatcttctgtataacctgcaagggaccataaaaacgtctagccaatttagagtaagattctcttgtggttgaggtttgtctatgagggtgtagtttgactaaaatccaatctctaatcttgaagcttacatctcgtctatgattattcgcaaaatgcttcatggttcctatgcctcgagcaacttcttntctgaagctttgaacataacctcttgattaaccaagaaatcatcaactgcttcgaccttcgatgaccccataatgtattgagggggac

SEQ ID NO: 13283 - DNA, 456 bp, Glycine max
  unsure (1)..(456): unsure at all n locations
agcttccatcaagttccctccaccttgganaggatntgacctcaaatcccgaggtttttcatactctgggctccttccctcaacacctgtaaaaagaacaaaaacacatgtattagtggtgtttggtttgttgaagtaaggtaaggtctgaaaattcatttcctgngcatcttcccatgaaggaacatggtttctcatcaactcaatgagtggtgctacaagtatagaaaaatatgggacaaaccttttgtaaaagtttgttaagtcatggaagccccaaattnttcttatacttggtggagtgggccactcangagtgacctttattctcttaaggttcatgggaaccccttgaccactatttaaaaaattaagganattaatgcaatanagcgtacctttttctataattntgtgttgattattcctacaaaataatacgacaaacctaaagtg

SEQ ID NO: 13284 - DNA, 391 bp, Glycine max
  unsure (1)..(391): unsure at all n locations
attgagtcttgtaatatatcgagacgctcgtacttganaacaaaagctcgtggcatatgcaaaccgcaataactnttaactcggatgtccgactgattcccgtaacatatcgagacgcttgtaattgaaaacggaagctctgagcaaattctaacgacaataactttttactcggatgtccgattgaatccagtaatatatcaagatgcttgaaattgaaaacagaagctctgagcanattcaaaagacaataacttcttactcggatgtatgattgagtcccgtagtatatcgagacgctcgaaattcagaacagaagctctaagcaaattcaaccgacgataactgtttactcggatgtctgattgagtctcgtataatatggagacac

SEQ ID NO: 13285 - DNA, 407 bp, Glycine max
  unsure (1)..(407): unsure at all n locations
ctgcacgcatgcaagcttgctaacccatggaagctcctaatatcttccacattctgngatggccttgattttctcaagatccacttggaccccatttctaccaactacaaaccgtaagaaaactatattatccacacaaaaaagtacacttctctatatatgcatagagggtgtttttcctaaggactgaaataacttgcctgagatgtcctaagtgatcatctaggctcctactatacactaaaatatcatcaaaataagcaactacaaatctacttatgagatcccttaagacatgatgcataagcctcataaaggtgcttggtgcattagtgagcccaaaaggcatcactagccattcataccaaccaaacttggtcttgaaagcgggtntccattcatcaccc

SEQ ID NO: 13286 - DNA, 443 bp, Glycine max
gcatgcaagcttatagaatatataataaaagaactatgactattgaagaatctattcatgtttcctttgatgagtctaatgctatttctccaagaaaggatattttagatgatgttacagaatctttagaacaaatgcacattcatggacaagattctaaaggaagaagtcaaatcaaatgatgaacttccaaaagaatggaaagcttcaaaagatcatccccttgacaacattattggtgatatctcagaaggggtaacaactagacattctcttaaatatttatgcaataatatggcttttgtgtctatgattgaacctaaaaatataaatgaagccataatagatgatcattggatagtagctatgcaagaagaactaaatcagttcgaaagatacaatgtgtgggaattagtaaagaaacctcgaaactaccctatcat

SEQ ID NO: 13287 - DNA, 398 bp, Glycine max
  unsure (1)..(398): unsure at all n locations
tgcaagctggtcgaggctctcgtgaaggacatactcgtatacaagaagcttttcgaagccatgggtacaataaccgaacaaactcaccacattacggtgctgtacacgcgccaacgactntgcctcgttaacgaactgcgatcttccttgattcgatctatgcgataacttcttcaccgcattctctctcccatcatatcaatttacccttcacaaatcagtataatattggagagaacacatattagaataagtctcagattgtttgcttaccaagtaaaaccagatattagtaacatctatttatccgtgttgaactttctccaaaattataattccaattcgtcaacctttctgggtatagaaaatngcttccttaatccctaataaaattcatt

SEQ ID NO: 13288 - DNA, 429 bp, Glycine max
  unsure (1)..(429): unsure at all n locations
ctgatttggactggcacggtcattatctaacgagcacaatgcanatcttacaaatcgtgtcatcacattatggtacaggtaatntatgtccataataggttttaattttgacctaagttcttttgggagggttgcatcatgaacttatgcccatacacattattgatttatttcattatattattagaccccctgagctgctgcttgggacaacaaggtatgggccacctgtagatatgtggtctgtagggtgcatttttgcagagcttcttcatgggaagcctatctttcctggaaaagatgaggttagtgataatatgtataattcttgtctgatattacgggtaaagctaaagtggttgtgaaattgtattgaggcgaggcatgcttctatccagtatgttatcactactcagtatacaagatgtc

SEQ ID NO: 13289 - DNA, 434 bp, Glycine max
  unsure (1)..(434): unsure at all n locations
agctngtcacgaaacagagggttattctttatcaatttcttcagtcagccagcattatgtcttgtgcagaatttgtttctccatacttgccagcaacaatatttttcccaattcaattttaactagcaacaaaataaatgactaagcaataagcaaattggaaaaaaataacacaacagccaaacaccacagataacctacttgtccaatgcttctaagtacttctactttcgtatctcaaagaagatcttcatggagtatttattgtcatccaacttcataaaaccagacaagtacttatccaccttatcccactccctatttctcaccatatcctcaaaatacctcatgttaaagaaaaatcccgattattgctccttcaagttcacaaattcacaaattcacatacataataacaaattagactanatata

SEQ ID NO: 13290 - DNA, 275 bp, Glycine max
aatgaataaaaaatctgcacctatctccagactttgtgtgatatgctcctatgccgaccaccacacagacctatgtccttcatggcaacaatctgaagcaattgaacagcctatatcttatgtcgcaaacatctacaacagacctctcttacctcagcatcaaaatcagccacaacataataactatgacctcttcagcaataggtacaatcccgaatggaggaatcatcccaaccttatatggtcgaatgcttcacaacaacagcaacaacaac

SEQ ID NO: 13291 - DNA, 363 bp, Glycine max
  unsure (1)..(363): unsure at all n locations
gcttgatcanattcaacgacaatagtttttctcggatgtccaataaagttccgtaatatatcgagacgctccagattgaaattggaagctcgtatcaaaatcatacgacattaacgtttgactcggatgtccgattgactcccgtaatatatcgtgacgctccaaattgaaaacagaagctctaagacaattcaaacgacaataactctgtattcggatgttcgattgagtcccgtaatatatcgagatgctccatattgaaaacggaagctcgtatcaaaagcaaaccacaataactttttactcggatgtccgattgagtcccataatatatcgagacgctcgaaattgaatacggatgct

SEQ ID NO: 13292 - DNA, 428 bp, Glycine max
  unsure (1)..(428): unsure at all n locations
agcttgtcaaaggatggacagttccattagtttctacagtctatgtagcatctttctcaactgattcttcaaaatctccaaaggtctcctgagctgtttgtgcaagttgtattgccaaacccattacaacttctcttattttagtgcaagctcttcctttaaagagtatttcaatctgcaaattatccagagcaaaagttgataataagttacatccattgaaatatgcctcctattttctaattaaccanatgcaaaacagccacaacaacctataatgcatgacctgaacacaatatatcagacatcttgtacttgtgacatcattattgccatggctttggtataattctatcacatgctgactgaaaaattgttgggagtataactagtaagagacctactttaacgaggagaaaagaaagtat

SEQ ID NO: 13293 - DNA, 500 bp, Glycine max
  unsure (1)..(500): unsure at all n locations
agtcacctgangcatcaagcttggcccaaacttcttgataattggctgtcacacaacccagctnttagaactcacccctactggaattccaagataagagaaaggaatttccaactggctacaattaagaaatagagctgcatccctacaccaacccactgatttgcccacacaaccgaaatggcttttggcataatttatcttgagcctagaaaccatctgaaaacacctcaggataatttttaggactctaacattatccttggtggcagccccaaaaaatagagtatcatctgcatattagagtatgttaacttcctccttttgacttcccacttggtagctgctgaacaggatcttagatatggctgtgttcatcanacctgtaaggccttccactactatatngaaaagcagaggtggtagggaatcaccctgccttaagcctctcttaggggatcacccttcctagtgngacttccatttaataaaatggatat

SEQ ID NO: 13294 - DNA, 429 bp, Glycine max
  unsure (1)..(429): unsure at all n locations
agcttgctcacaagattctccttgcctggcacttcaaaaccttctggttgggtcatatcgatgcaagctccattggagcttgtangcctangatcttcttcatcaatggattcctttgcttcttggaagataaaaggcagcggaatggagaaagaagagagagaggagactccacttcaaggagaagataagtctagaagaagctcaccaccataggaggccatggataagagcttggaggaagaaggagatgaatgaagggagggggagagaagagcacgatattntgtgctcaaaaagagctctganatctgaagttaatattcaaatgatcaatagtngaaaaaatgcacacacatgacctctattatagcctaagtgtacacaaaattggaaggaattcaaattcacttgaattgaaatgaattg

SEQ ID NO: 13295 - DNA, 436 bp, Glycine max
  unsure (1)..(436): unsure at all n locations
agcttctcccacanagacagtatcatctgcatattgcagaatgtttactggcaccttctgctntcctactaaataactgctgtacagacctttggatagagctgtcctcatcatgccagtcaagccttcagccacaatattgaaaaggaaaggggctaaggggtccccttgcctcaaacctctagtgggggaaaattcatttgaggggctgccatttatgagaatggatatagaagctgattgattgcaagcattgatccatttcctccatataggacagaaccccattctgaccatcatataatccagaaagttccatganacagagtcataagcctttgcaaagtccactttaaacaccaaagctggtttcttacttcttttagcttcctctattgcttcattgagaatcanagttccatgaaagatgtgtcta

SEQ ID NO: 13296 - DNA, 393 bp, Glycine max
  unsure (1)..(393): unsure at all n locations
agctngaatcttganactagattcttganttttgaaatcaaatttcctcttgaaccttgaagtgttcttgattcaatcttgaactgattctttgattcttgagatcatcatctttgttatcattaattgttcttgatctttgagctttntgtcatcacctttgtcatcatcagaacttctttgaatcaatcttgattcatcatgaagcttgcttctacaattatatccttactcactctagaaccatcaaacaccatagttttatcaaagcagcttaacaagacatggttggaagataaccagtccatacccagaataacatcaatttggctcagaggccaacanattagatcaatcactaatggtctaccagaaatttccacaggacaattc

SEQ ID NO: 13297 - DNA, 366 bp, Glycine max
  unsure (1)..(366): unsure at all n locations
agcttgcttctacatataatagatatagaaggtgtggngtgtatatgtattatctattgtaagatgttacattgctacttaaaagaaagtcctctaagaccacaccacatgccttgactctcatttggtgtcatgactcctatctcaaactcctccaccaataattctagtaaccaattaatggtttcttacatatccttctatctatatatattcaaaattctcaagagttttcttaaaccactcgcttctcaaatcaataccacaacgggtatttgtttacttggtattagagaggcattattgcagcanatcaagcattttcaaaagctaatgatgcaccanagggctatcttgccatatatg

SEQ ID NO: 13298 - DNA, 463 bp, Glycine max
  unsure (1)..(463): unsure at all n locations
agctntatacttcacaaagatgtcagcaacatcagatntaaacttcatagaataaatccaacacattcttgaataatcatcaatgaatgcaatataatacttactgtcattcaatgatggtgttttcatgggtcctcccacatctgtgtgtactaactgcagcttttgtgaagcccttgaagtcttgttttgttaggaagtctggtttgctttccatattggcaagcaacacattntggaggtaaattgtctaattctggcatatctttcactatattgttctttctcatgaaaagtagtgcagcatgatgaaagtgccccaatctcttgtgccaaagcattgtattatcatcctctatgtgtacagctgctngctgctcctcattcatcaagtccaagacaaaactcttgcctttcatttgaactntgatcatttctattagtgttgcatctttaatcacac

SEQ ID NO: 13299 - DNA, 226 bp, Glycine max
  unsure (1)..(226): unsure at all n locations
tgcacgctgcagcttaacatcataccactttcagggtgctggaactacttcacatggatttgatggtgcctatgncagttgaaagccttggaggaaagatgtatgcctatgttgctgtggatgatttctccagatttacctgcgtcaactttatcagagagaaatcagaaacctttgaagtattctcagagttgagtctaagacttcttagagagaaagactgtgt

SEQ ID NO: 13300 - DNA, 311 bp, Glycine max
  unsure (1)..(311): unsure at all n locations
agcttcgatgatcagttaggatggtgaagtggtgccctagtangtactgccaccacttcttgacggcggcggtgatggctgctaactcacaaacatatgttgacgaatccattaacttgcggcaaaactatntgctaaagaatgagatggggtggcctccccgcgtcaacactgccctcatgccggaccccgacgcgttcgtcaccacaacataaggaactttgaaattatgtaaggcgagaacacgcgttgccgagatagcgtccttgaggttctgattagccattcatactttgaagaccactaaactg

SEQ ID NO: 13301 - DNA, 484 bp, Glycine max
  unsure (1)..(484): unsure at all n locations
agcttctagactntatacaagaatgaagttctgataccacttgttaaacaagtggcctcagatatcttaagaaggcgggttgaattaagatattgcaaactatttccccaattaaaaattctatttcaatttcaatgcaagttgcaagttcccttaaaaatgaacttttaaataataattcacatagaaaaatctgaatataaatataaatcaataataaatgaaattctgataccgatgacagatgtcgtaccggatgtcacgacatcacacttcagaacatgcagattatatttgacagtatgaacagattanacaagttaataacacaagagaattgttaacccagttcggtgcaacgtcacctacatctgggggctaccaagccagggaggagatccactaaaatagtgttagttcaaagatctaacagccactgtttacaaccttctcacctaaccactacccatgcaacctctaccta

SEQ ID NO: 13302 - DNA, 402 bp, Glycine max
  unsure (1)..(402): unsure at all n locations
agcttgtaagtgtgggatctgctgtttatggaaagctctggtgcagtaagcacacactatacccaaaaggtatgccagtaggatcttttctgggtttatattatattagattatctatttcttggaacttacttgtccagtttttggtatacttttgaaggattcaagactcgagttaatttctctagcattcttgatccaacaagaatctgtacctatattgctgaagtcattgatgctggttgtcttggacctcttttcaaggtatcatgcctaaccatgtttctgtcttacgtctgaaaacgaaacaatattgacaagtcactggttcttgataatactggaatccatgtagtcaacccaccacaatatggtgtntgttgcttgttgtgacattttcag

SEQ ID NO: 13303 - DNA, 332 bp, Glycine max
  unsure (1)..(332): unsure at all n locations
ctctatgggaggtgactatttatcagacacaagtctattatgagacattcctatgagagttnttaatgttggtctataagcccaaagtgcattatctagtttaattgcccaatctttcctagatgcactaactggtttttcaagaattatttataactcgctattggacaattctatttggcccctagtttgtgggtgatatggggttgcaagcttttgagtcacccatatttagccaagaggccattaaacaacttattacagaagtcagcgcctttgtcactaatgattgctcgaggtgtgctaaatctggtgaaaaatattttctttga

SEQ ID NO: 13304 - DNA, 294 bp, Glycine max
tggtcataacttatcacacggaggtccatatgaggcgcataatatatcgagacgctcgaaattaaacaacgtatactctcaagagattcatatggtcgtaacttatcacacggaagtccgattcaggtgcataatacaccgagacgctcgaaattgaaccacgaatgttctcgagaaattcaaatggtcataaattttcaaacggcagtccgatttaagcgcattatacatcgagaatcttgaaattgaacaactgaagctatccagaaattcggatggtcgttacttgtcaca

SEQ ID NO: 13305 - DNA, 228 bp, Glycine max
agcttcataattcaatttcgagcgtctcaatatattacgggactcaatcagacatccgagcaaaacgttattgtcgtttggattagttcagagcttcagaattcaatttcgatcgtctcgatatattacgggactcaatcagacatctgaggaaaaaagttattgtcgtttgaatttgctgagagctccacattcaattttgagcgtgctcgaaggattaccggactt

SEQ ID NO: 13306 - DNA, 489 bp, Glycine max
  unsure (1)..(489): unsure at all n locations
gcttcctcggggccattcctgcgaaggctatacattggaaagttagtttacaatatatataacaatcattacaaacaagggccaaacaacacttctcatggcacgagtgtcaacatgcactatataaaataatcatattggggtcgtgctattttatgacacatacgtatttgcacacataaaaattttgtgtgaagcattttacgacacctatccatgtacatattntttgacaaaccttttcatgctacatcctatatatatacacacatttnttggaaggcttcttttgttacctactcacaaatacacatatnttgagaaacacttttacgctacccatccaacactttgtaaggcacttcatgctatatatattcatattatgcaaggcattntcatgctatatatattcatatgttgcaaggcatnttattcaacatattgcaaggcatttccatgctatatatattcacatatatacatacc

SEQ ID NO: 13307 - DNA, 427 bp, Glycine max
  unsure (1)..(427): unsure at all n locations
cttgacagtgcctgatttattgaccagctattntgcaccctttatatctctacagaaccaaatcaactctaccattntaacatacttcaaacagcaatgccgaacagattttattagcaagatagaatggttgctttcattaaacatccttgtcacctgtggatggttttgttactatgtaagtaagctaatcccgagagaatatgccttgtaaaattgcaaaccacagattctgtcatagctccacaatggtcacgcataaatttactgattgatcccgggtagacatactccatatatatgtacatatgatcgccaacctgaaaatacaaatgcttcaaaacgtcaatctaatttactatgacaaatatccttaacttccattggtgtatcgatatacttgaacaaaactaacaacaaaaataac

SEQ ID NO: 13308 - DNA, 341 bp, Glycine max
atgaagaccttcttaattattatgctatcatggaacatcctggtgtgttctttgtagaacctgacattctcatacactattaggcggatcctcatctaactcactcagtcgctactatctttcctcaccagcttgatccataaagaagttgcaactcttcactgcccaatatgctttggctcatttcaactagaagatgacatgcctttccaaacacaacccgataatgagacattcttatgggtgctttgtatgaagtcctatgacccaaagaacatcttctagcctggtactccaatctttcctgctaggctgcacaattctcgctaaaattctcttta

SEQ ID NO: 13309 - DNA, 275 bp, Glycine max
  unsure (1)..(275): unsure at all n locations
gcaatcttgaaattgaacaacggaagctcttgagttactcaaatggtaataacttgttacacggaagtccgattcaagcgcataatatatcgagatgctcganattgaacaacgaatgctctcgtgaaattcaaaatggtcataacttgtcacacggaagttccattcaggtgcataacatattcgagacgctcgaaattgaacaaccacagctctagagaaattcaaatggtcatatcttgtcaaacggaggtccgattcagccacataatata

SEQ ID NO: 13310 - DNA, 449 bp, Glycine max
  unsure (1)..(449): unsure at all n locations
agcttaacagttaatntactaattaaatatttctaatctaataagtcagttaacataaaaaataataattntgtaacttttaattaatttttcaattttgatcaaaataatttatcaattattttgatcaanagttactatagaaaatagataaattaaaattaaacacatttaaatactgtcataaaatatatcctatnttttcttcaatttatttttaattacgaggaatttatattgattagttntttccttccatgttcttctttatttcccaaataaggcaacatgacaccacaaagcacgtaaattaaatgataaagaattattatggtttaaccccgataattcannatccgaaaattagctatgactactacaaagttgggtggaataatattatttatccttaaatttactaaatttacttattaaaaaagcattcattt

SEQ ID NO: 13311 - DNA, 430 bp, Glycine max
cattatcttcatgattagataatacacatttcataccagtgcatgacttcaagtcatcaaagtaacgatctttagttaaaatcactaatatgatactcatgcatacgcacaagtaatacaactgcctacgcgtttaagagagaatgtgtgacagggatgaaagaaaagatatagtggatatttaagattttaaaaggaagatggtgtacttatcaaaagggtgatacaattagcaagtttatgtaaaaagactaaacttaccatcttgtaacagctggcaaataaataaagaagcttattgaaataatttttattatatagaatttattatatagaattcacttctaagtcatttaagtccttcagaaatatagacggatacacatgcatatagtatttaacaacatttactattaaaaatcaacaagac

SEQ ID NO: 13312 - DNA, 368 bp, Glycine max
  unsure (1)..(368): unsure at all n locations
gtgtatattaaggatgctattgaagttgtcttattgatgattgtaggttcccatatccaatctttttatacaactttatatattttaagttctgattntctgattgtagaatttcatctttaaactattactcttgttggatggttcaactaaatgtgaacgataatttttaacaagaaaatcccgccagggccaatggacatatttntaatgtgggatacccaaacaatgaggttatagntaggcagcttgctgaaatgatgactcacgttataggattaacgttgattgtttgatcctattagaatttcaacatggtatctgggaccattcaacanttattntcgttcaattctgcaagtttattc

SEQ ID NO: 13313 - DNA, 281 bp, Glycine max
  unsure (1)..(281): unsure at all n locations
aaatgttatctatataaatnttaaatgtaanaaaagatgttattaacaaaatgtcatctaattctgatcggaattgaaggaaaaaataaattatttgaatttatacttgataatttgattaatttcagattaaattattctcaaaatataattctaaatatatttgcatcatgatatccttccttctacttgaagttattcgaanaatatattatataatttacctgcataattttcatttttagctttattacagctaattctatttaaattaaatttgt

SEQ ID NO: 13314 - DNA, 381 bp, Glycine max
  unsure (1)..(381): unsure at all n locations
taccctgatgaggatgttccatatgttcttaaaactggactgattcatttgcttccaaagtttcatggccttgcaggtgaagacccgcacaaacatttgaaagaatttcacattgtctgctccaccatgaaacccccagatgtccaagaggatcacatatttatgaaggcttttcctcactcattagagggagtggcaaaggactggctgtattaccttgctccaaggtccatcacgagctgggatgaccttaagagagtattcttagaaaanattttccctgcttccaggaccacagccatcaggaaggatatctcatgtattagacaacttagtggagagagcttgtatgagtactgggagagatttaagaaactatgt

SEQ ID NO: 13315 - DNA, 384 bp, Glycine max
  unsure (1)..(384): unsure at all n locations
ctgtgtgctagtgttgctccatctacttcctgtgtcnaattttaatccccactgagtccagacactgtttgaactttattgttggaagagcttttgtcatcatatcagcaggattatctgaagtagaaatcttttctattaacacatcaccttgtgttaccacatcacgaataaaatgcatccttatatctatgtgctttatcctttcgtggtacatttggtttttggttaagtgaattgtgctttgactatcacaatgcacaacaacttcctttttacttacaccaagatcaccaacaagacctttaagccataaagcttctttcaccgcttcagtagctgccatatattctgcttctgtagtcgacaatgcaacagtggact

SEQ ID NO: 13316 - DNA, 422 bp, Glycine max
  unsure (1)..(422): unsure at all n locations
ttgcttctaccaatttaatctccatattctatntgattggatcccattttcatgtggtcacgcatatagcgcatcctactctatcgagaggtcaaaagatataactcctattatgtaggagggatgaatcatatctatatcactcacatctcttaatatgattattgtaagcctagctactacttttatgataactntgttacagatggtgtatgatagcattaaagcctataactctacatgtaggaatgtagtaacttcaaatcaaggacaactattaccttatgattgctatgagaagcgcttatgatagttaaatgactattatgaagcattctcatattggatctatctagtataaatatttactcctaatatttatacttgngtggtgacttgatatctcgtatccatgacctatg

SEQ ID NO: 13317 - DNA, 278 bp, Glycine max
  unsure (1)..(278): unsure at all n locations
caacggaagctcttgttatactcanatggtaataacttgtcacacgggagttcgattcaagcgcataatatatctagatgctcgaaattgaacaacgaatgctctcgtgaaagtcaaaatggtcataagcttgtcacacggaagtccgatttaggagcataacatatcgaaacgctcgaaattgaacacccaaagctcttaagaaattcaaatgggcatatctttcctaacggaagtccgattcagccacataatatatcgagaagctcgaattgaac

SEQ ID NO: 13318 - DNA, 287 bp, Glycine max
tcttttactcggatgactgattgagtcccgtcatatatcgagacgctcgaaattgaatgttgatgctctgagccaattcaaacgacaataatattttactcggatgtttgattgagtcccgtaatatatcgagacgctcgaaattgaatgttgatgctctgagcaaattcaaacgacaataactttttactcggatgtctgattcagtcccgtcacatattgagatgctcgaaattgaatgttgaagctctcagccacttcaaacgacaacaacattttactcggat

SEQ ID NO: 13319 - DNA, 421 bp, Glycine max
agcttagtaaagctaggcactaacaatctccctctttggctatatttgtctaaaacatacttagacactttctgagcaggtacgagcagttatgcaagtgggatcagcaactttcattatcagagtaatcaagcacagcggaaattctgcaagttgcaagtcgtttccaggatgtcaagacatctcacatgacatcagctttctgcttctgctccccctgtctccatgctcttactgcagcatcttctatcagctactagtctttttcaggatgtcaagacatctcatgtgacatcagctttcccttgtctccatgctcttactgcagcatcttctatcagctactagtagcttacatcagtcatcatcagcagcagcagtctccccctaaaatcatgtacatacaactccccctcaaaat

SEQ ID NO: 13320 - DNA, 379 bp, Glycine max
  unsure (1)..(379): unsure at all n locations
tactcggatgtctgattgagtcctgtaatatatcgacacgctcgaaattgaatgcttatgctctgagcaaattcatacgacaataactttttactcggatgtctgattgagtcccgtaatatatcgagaccctcgaaattgaatgctgatgctctgagcaaattcaaacgacaataactttttacacggatgtctgattgagtcatgtaatatatcgagacgctcgaaattgaatactgaagctctgagcaaattcaaacgacaataactttttactcggatgtctgantgaatcccataatatatcgacacgctcgaaatagaatcttgatgctctgagcaaattcaaacgaccataactctttactcggatgtctga

SEQ ID NO: 13321 - DNA, 389 bp, Glycine max
agcttaacaaaaggcatgcgaagtgggtggaattcctatagcaattcccttatgttatcaaacataaaaagggaaaaggtaatattgtagccgatgctctttctcggcgtcatgcattactttctatgcttgaaacaaaattgattggtcttgaatgtttgaaaagcatgtatgaaaatgatgaaacttttggagaaatttttaaaaattgtgaaaaattttcagaaaatggtttctttagacatgaaggctttcttttcaaagaaaacaaattgtgtgtgcctaaatgttctactagaaattttcttgttcgtgaagcacatgaaggaggtttaatggggcattttggggtccaaaagactctataaacattacaagaacatttttat

SEQ ID NO: 13322 - DNA, 430 bp, Glycine max
gctgaattgaaaatgttattagggactgattgatttggtcttctttcatgtgggcgtcggcatgctaattaatttcaaattcatgaatactcatctgaatttaagttgaaattgaaccaaaaaactagttttggtttagtttagatttaaatttacttcttttgtttatttgtaaaagtggagataagtcgaacttatttgaaaatgcaaagaatattttaatattaaaaaattattatgagaataaatttttcttatatttagtataggagaataaactattttttgaaaataaaataaaaattaatttttatgtactattaatatattattttccatcgtatactaacaaaaagccattttaagtaattttttacagtactataacattaattaacttatcatacatgatcattcttattggataata

SEQ ID NO: 13323 - DNA, 320 bp, Glycine max
agctttgatgcaacatttggagaggttaatgaatcaacgagatgatgcgctccatgagaggttggatcaaatggagaatagagatcataatgaagaagaaaggagtataagagggaatgatggtgttcctagacaaaactgaattgatgatattaaactcaacattcctccatttaaaggaaagaatgatccagaggcctacttggagtgggagatgaatatagagcatgttttctcatgcaacaactatgaggaggaacaaaaggtgaagcttgccgtcacggagttttccgactatgttcttgggtggtggaacaagc

SEQ ID NO: 13324 - DNA, 402 bp, Glycine max
agcttatcaaggacatgtttggataatttatacattccataaaatttaattattgattgaataaaaatatattcttgttataattactttaattattattatatatatcgtgtaatcgagcccgcactattaaggtttgtctacaatttacaaaaattaagtatttttagtgtaaattttctttttttaagtagattttagatagattaaggattatgtagattttatgcaaactcaataaactctcaatttataactgtattatgttttgtcgctttaattattttcaattgatgtgttattcttaaataaaagaaattttattcttaataacatcaaatccttaataataatattattgaaatatttaatcgatacaatatttatatacttgagtctgat

SEQ ID NO: 13325 - DNA, 335 bp, Glycine max
gcgtatcgatatattacgagactcaatttttcattcgtgtaaaaagttattgttgtttgatttttcccagagcttcagttttcaatttcgagcgtctcgatatactactggacacaatcagacatccgagtcaaaagttattgtcgtttgaatttgctcacagcatctgttttcaattacgagcgtatcgatatattacgggactcaatcgtagatccgtgtaaaaaggtattgtcggttgaaatttcttagaagcttcatttttcaattcgagcgtctcgaatactactggacacaatcggacatccgagtagaaagtattgtccttgaatttg

SEQ ID NO: 13326 - DNA, 371 bp, Glycine max
agcttgaacattatctccttttgggttcgcaggttcttccatgcacggaatccagtgatcatctcgattacaatgcacccaagagaccatatatctaacgctggttcaatctgaccaacgaccgattctggtgacatgtaaaaaggtgtccctctaaacttgaccttcccatactcagcatttgcatcttctctagtcttggacaacccaaaatcagcaatcttcagttgataccttgcatgatcatcagatgaaggaaagagaaggatgttgtccggtttgagatcacaatggacgactccttttcgatgaatgcaagaaagccctttgagaagcatacgagtgtagactcttacttcactatccgatat

SEQ ID NO: 13327 - DNA, 201 bp, Glycine max
atcttaacatggtagtcaaagatttcgattctcttcttctgcagtaaattcacccttttttagatctggtctcaaatgatttgcccatcgtagacggcagcttttcccacaacgggcaagtcctgaatatttatgtactgcattccaattgccttgtccgtgttgtttggcatattctaaccaaattgcatcctctgctgc

SEQ ID NO: 13328 - DNA, 389 bp, Glycine max
  unsure (1)..(389): unsure at all n locations
ttcatagctatactcgattaccaaaactatgtaatccattaccaatgctntaaaacggttaaaaatgaatttgtaagtgtgcaattgattacacatcatatgtaatcgattacgccaatgctgtaatcgattaccagagaggattttcgagaaaatctgccaacagtcacaacttttcattggatttttgaatggccatcaaaggcatttaaataggtgacttgggcacgaattttcttcagagttttcactgttcacaaaaggcataatcctctcaaacaaaaatctcttatcttcaaaaattccttggccaacacttgtgtattcaataagtaatgaggcttcattgaacatttgctctttaagagatataatnctcttcttctctc

SEQ ID NO: 13329 - DNA, 354 bp, Glycine max
agctttcagcaggaaagctaagtgtgaagtatgttattctgcacaggattggagctgcaaactgggttcccaccaatcatacttccactgttgccacaggtttgggtaaatttctgtatgctgttggaaccaaatccaaatttaattttggaaactatatctttgatcaaactgttaagcattcagaatcatttgctgtcaaattacccattgccttccctactgtattatgtggcattatgttgagtcagcatcccaatatgttaaactacactgactttgtgatgaagagagaatctcctctatccctgcactataaactgtttgaggggacacatgtcccagacattgtct

SEQ ID NO: 13330 - DNA, 311 bp, Glycine max
  unsure (1)..(311): unsure at all n locations
gctagcttataggaagcagcaacaccgttggcattcttgtcttatgcaacatnttaggatgcgccttccacaattgcgagatctatggtctttctgatacttggcttgaagtattattcactagtgaccgaagaaaagcatattctgataagttgcaagtatgacttataataggcacttaaaattctctatcactgcatgtgtctccatggaagaaagcaaacttaatactgctattttttctactgaggaaactgaacccacccttttactccttcaccttattatgcataattccttcctctaccatg

SEQ ID NO: 13331 - DNA, 359 bp, Glycine max
agcttgaatgctcatttgagcttatatgcatgttatttacacacaaagggaaagggagagataactgaccaaatcttttcatggctattcttccagaagaacgctcccctgatgtagtttcgtttatagcttggaccatctcatttttgctgacatatccatccttgttcttgtctaagaatacaaatgtatcaaccaaagtctcaaatgtgccctccagctttggcatcccaattcgtgatttctagggaagtcatggaaaaaaatttgaagatgtagccaaacatggaaattcaagggttattgttatcaatgcaagcatgatggaaatctatgcttgcctgaagaaatgcctgaaa

SEQ ID NO: 13332 - DNA, 343 bp, Glycine max
agcttctctattagctgcacttgactactatgtttgcttgcatagagacatcttcatctctgcttccccaggaaatatgcacaatgcattggtgagttgtgctatatgcatttttagatgtctctaattgaaggttaaattattaactaggtctgtactatttgggaattttcaaatagttctttatacttttatttttaattgagtccctaaactaaaaaggtattccctatagttttttggcagtttcaaatcgccagaaaatgacaatttatggcgtcttaaaaagactattgactcaataaaaaaaattcaagatcaagatctaattttaaaaaaaaaa

SEQ ID NO: 13333 - DNA, 371 bp, Glycine max
  unsure (1)..(371): unsure at all n locations
agctntgatttccattgttccggaaacctttcttttctcatgtgcacccaaacccaatcttcgggttcgaagacaccttctttctccctttgttggcttgtttagcatagcttttatttttcctctcaatttgatctttgactctctcatgaagcttcttcacatagtccgcctttgcttgaccttctttatgcttaaaaacagaaacattatgcataggcaaaagatcaagaggagttagtgggttaaaaccataaacaacttcaaaaggagaacaattagtggtgctatgaacagctctattgtaagcaaattccacatggggtaaacaagttttccaagtttttaagttcttcctcaaaactgtccta

SEQ ID NO: 13334 - DNA, 301 bp, Glycine max
agcttcttgttacaactagaggaagagaagttggtgcctgcttcacaagcacctttccaacgagagggtactttggacaaacctgtgtcttggaaactgatgtgttcaggccatattcctgtatcaaggactcctatgatcacatctgaggccaagttagaagcactccaaagtccttttccattctgtaagccaagaaaatgggagctgtattgtgtgtgaaggcttattagttcatcatgtatggctgaaaggaaaccatctatttggttcaagtactcaagctgcttatatgaaagtt

SEQ ID NO: 13335 - DNA, 336 bp, Glycine max
gatattataggacttcttcttacatccgagaaaaagttattgacggttgaatttgctcagaacttcaacatttaatttcgagcgtgtcgctatattacgggactatatcagacatccgagtaaaaagttattgtcgtttgaatttgctcagagcttcaacattcaatttcgagcgtgtcgatatattacgggactcaatcagacattcgagtaaaatggtattggtcgtttgaatttgctcagagcttcaacatttaagttcgagcgtctcggtatattatacgactcaattagacattcgagtaaaaggtattgtcgtttgaatttgctctgagc

SEQ ID NO: 13336 - DNA, 332 bp, Glycine max
catatgtactttgtaatgtctacctttttgattttatcatagattattggggctaaaatatgcgcctggtaataggtattttcttaaacgagaataggtatggtagagaatagttcaacatcagcctacacagtatccaacatcagaggagttgagtattgggaggatcaagtctaaagcttgtgatcttcggggtcaccatattgcacgaagagtctggaaagattactatgctaaggtctttctctattgtacctctcctaacacatacacacattagtgctatgttatacctgttggcccccaacattgattctcaatctgtttaacca

SEQ ID NO: 13337 - DNA, 367 bp, Glycine max
agcttcgcatgttcatttaattgtgccaacaaatgaattttagccccatgacttagaacaagatcacgacatctatgcgaatccccagcgacatttcctaatgcccacactgcctgtgagtacccaaaataccaagggtaaaatgttaaagcttttaataaatgatagcatggaacagtacaacaaggtattgttgtcttctgttgtcggctgcaaattaataaatggttaaatacaaccaccccacgcacaaacatacagataccccaccacccccctaccccaaaatttctttcttaacatgcaatacctgctcatacaactttacaccacaataagcaaccccaattctaaaattatacataac

SEQ ID NO: 13338 - DNA, 366 bp, Glycine max
agcttgccttgccccttgatatatttgagggactcatggtcactatgaatgacaaattccttgggataaaggtagtgttgccatgttttcaaagcccgtactaaggcatacaactccttatcataagttgaatagttaagggtaggaccacttaacttttcactaaaataagcaattggatggccttcttgcatcaacacagccccaatcccaacatttgaagcatcacactcaatttcaaaagatttttgaaagtttggcaacgcaagtatgggggcattaattagcttttgcttaagaacattgaaagcttcttcttgtttctctccccatatgaaaccaacatttttcttgaacacttcattg

SEQ ID NO: 13339 - DNA, 375 bp, Glycine max
tagcttgagggggggaaccttgcaatggatatgtttatgctctatgggatcgaggtgagggtcattcgcggagtgcggtatgagggtgctgcctctgctactgggaggttgtatgtgtatgatgggttgtatataattcatgaatgctggtttgatgtggggaaatcgggttttggggtttttaagtataagctgtgtatgattgatgggcattctaatatggggactgtggtgttgaatgaggctcttttgcttaggaacgatcccttgagtttcaaaccctcgttttgttagtcgcttgatgttttaaattaggaagataacgcggctgttccgcttttaattacattgatcctatctttgacctctgtaata

SEQ ID NO: 13340 - DNA, 361 bp, Glycine max
atcggacatccgagtgaaaagttatgaccatttgaatttctcgagagcttcctatgtttaattttgagcgtctcgatatattatacgcctgaatcgaacctcagtgtaaaaagttatgaccatttgaatttctttagagcatccgttgttcattttcgagcgtctctatatgtgatgcaccttaatcggacctccgtgtgaaaagttatgaccatttgaatttctcgagagcttccgttgttcaatttcgagcgtctcgacatattatgcgcccgaatcggacatccatgggaaaagctatgaccatttgaatttctcgagagcttccagtggtcaatttcgagcgtctcgacatattatg

SEQ ID NO: 13341 - DNA, 312 bp, Glycine max
  unsure (1)..(312): unsure at all n locations
tgaaggtaactanatgccttggtaacttggtaacccatctgtgccttgaatcataaatctgtacttggtgcaagagtctatggtttattctcctctgctgaccaccatacaatcctttgcccttctatgcagcaacctggagcaattgagcagcctaaagcttatgttgcaaacatttacaatagacctcctcaacctcagcagaaaatcaaccacaacagaacaattatgacctctccagcaacatatacaatcccggatggaggaatcatcctaatctcaaatgggctagccctcaacaacaacaacagc

SEQ ID NO: 13342 - DNA, 379 bp, Glycine max
agcttgagaacaatttatttgtatgtccttaaattttataattagtgtactgagaagtgtaaatatcaatcaatctcttattgcataaaaataaaattctagaattatttatatgatagtctctcataaccttattttttataattatatctttcagtctttttatctcattattcatcttatttcacatttccttttcttattcaaaattgttgcataattatatatgtgatatcttaaaaaatattaaatattaatttgttatggagagaaatttaaatctaagacttctttcttcttttttcttatttcttattttaactattaagtcaacctattaactccttatatatgtgatacttaaatttttctttactta

SEQ ID NO: 13343 - DNA, 393 bp, Glycine max
  unsure (1)..(393): unsure at all n locations
agcttgcttgcctctagttgacaaaggtgcggattactattangtatcttcgcatgccacctgactcacgggttggggtgacagaactgtggggtggttgacaaaagcgggacttttgctcctacatatcttcaattgcgagactacatagttcttcaatttttgtgtgagactacaaatagtctcaatgttattttactaaaatgcgaacatgctaacatgctttagcaaagaaacaaaccttcaactgatcaaggcaacatatatttttttgaataaaaacaatgcgtctattggagaaggaaagtatgctaataaaattttctcataaccacaaatgagattttggatggtagcatttcgtttctaaatgaccatttagaagaaacactg

SEQ ID NO: 13344 - DNA, 408 bp, Glycine max
  unsure (1)..(408): unsure at all n locations
agctntgaagaaaaaagagtaagattgagaaatgtttctgtttaataatgacactttgcgaaaaaaatctcaaagatattggacaatgttccctacaacaaaaagctcaatcctttgtttaacaaagttatttgttttgtgttgtgattgcttatcctcactccatgagtttgtttctttgtaaatctttcaaacacttttaattgagaaattcaagagtggctttgttactagagaatataagcaggaaacaagaatcaaacccgtatagttaactgggaaagctaaggattataatcgacattgattcatcattttgattttaatttaacatttccaattaaaataaacatgaaacatttgtttcattcagcttctttaataaaaaaataagatttgaaaattaaa

SEQ ID NO: 13345 - DNA, 348 bp, Glycine max
  unsure (1)..(348): unsure at all n locations
tctcgatatattatgcgcctgaatcagacttccgtttcaaaagttatgaccatatgaatttctccactgtattccgtgtgacaagttatgaccatttgaatttctcgatagcattcgttgttcaatttcgagcgtctcgatatattatgtgccagaatcggacttccgtgtgacaagttatgaccatttgaatttgttgagagcatccgttgttagatttcgagtatctcgatatattatgcgcctgaatcggacatccgtgtgacaagttatggccatatgaatttctcgagagcattcngttgtcaatttcgagcgtctcgatatagtctgcgcgttaatcggact

SEQ ID NO: 13346 - DNA, 361 bp, Glycine max
agcttgaaattgaacaatagaagctctctagaaattcaaatggtcataacttgtcacacgaagtacgattcaggcgcataatataccgagatgctcaaaattgaacaacggaagctctcgagaaattcaaatggtcataacttatcacacggaagtccgattcaggcgcataatatatcgagacggtcaaaattgaacaacggatgctctcgataaattcaaatggtcataacttttcaaacggacatccgattcaagcgcataatatattcagaagctctaaattgaataacagaagctctcgagaaattcaaatgggcataactattcacacgaagttcgattcaagggcataatatac

SEQ ID NO: 13347 - DNA, 442 bp, Glycine max
agcttatcaagacctggagacaagttatgaactaaacaggtgcatccaaaaatatgtggatcaacatgaagcaatagttctttaagaaaaaaatggaatgtggtattttatttttaatagaggaagaaggcattcgatttaccaaaaaacaggctgtcaaaactgcatcaccccaatgccggacaggtacattggcatgaagtaataatgtccgagcagtctcaacaagattcctattcttcctttcggcaatgccattctgttgaggagtatgaggacaagaagactgatggagaatgccctgcgctgacaaaaaagaagaaatagcagaagaaaagtattctttcgcattatcactcctaaggatcttaattgtcttaccaaacttgagtttaatttcattaacaaaagaagtgagaatcgaagaaaatttagatcattc

SEQ ID NO: 13348 - DNA, 465 bp, Glycine max
  unsure (1)..(465): unsure at all n locations
agcttcataaaagtttatatggctngaaacatgcactgaggcagtggtacaagaagtttaatgagtttatgagcaacttatgattcaacagatgtggcatgaaccattgctactacgttaagaaatatactaatagctatgttatccttgccaagtatgttaatgacatgttgattgcaggatctagtatggcagaaattaacaggttgaagcagcagttgacagaaaactttgaaatgaaggatcttggttcagctaaacaaatatttggtatgagaattcttagaaacagatcagaaggaattttgaagttgtctcaggagaaatatatacataagttgtttgacaggttttaccttgaagattctaacaccaggaatacccctttgggatctcatttgaagttntcaaagaagcaatctttgcagatagatgaagaanaatgttacatgtcaagagtaccat

SEQ ID NO: 13349 - DNA, 375 bp, Glycine max
  unsure (1)..(375): unsure at all n locations
gcttgtaatcgattaccaaaagttttaaacattntataacagtctttagaaatttgaatntaaatttcaaagcctgtaatcgattatagcttgtgtgtaattgattgccagacattaaaattcaaatttcaagactgaagagtcacaactcttcaaaagctaactgcataatcgattaccacatttatgtaatcgattaccagtagggaattttcgaaaataacttccaagagtcacaattgttcaagaaatttttgaatggtcatcaaaggcctataaataggtgacttaggacacaaaattacctagagagtttttctgaacaaaattgtcttatcctcttcaaacaaaaatgtcttatcactctcaaaatat

SEQ ID NO: 13350 - DNA, 468 bp, Glycine max
  unsure (1)..(468): unsure at all n locations
gcttctggtgggacatcttgacttgctttcctttctgacattcaccacagattctgccttcttctattttcagattgggaatgcctctaacagcacctttgtcaatgattttcttcatgcctcttaagtgcagatgtccaaatctttgatgccatattttgacttcatcttctttggaggatagacatgtggaggagtaactggtttcttgaggtgtccataggtaacagttgtcctttgatctgctgcccttcattagaacttcactcttctcatttgtcaccaagcattctgactntgtgaagtttacattgaatccttcatcacacaactgactgatgctgatcaagtttgcagtcagtcccttcaccagcagtactttgttcagactangaagtccatcatggactagctntcccattccagtgatctnttctttagagccatctccaaatgtcacatagctag

SEQ ID NO: 13351 - DNA, 468 bp, Glycine max
  unsure (1)..(468): unsure at all n locations
gcttcttggaggttngatggatcctcctctattgtataggccatataatcgggcccatagtctttagcaattcttgctttcttacctcttcgaggctctatttttggttctggtagtgcaagattttcactactaatagtaggaaggcgactggatgaagtaccaccactattccttaatttaaaaggaaatttattttcataaaaatcagcatcatttgactctatgatcacttttgtgtttaggtcataaaacctatacgctttgttattaatagcataactaatgaacacacattcataggctctacttgtgagtttaaccctcttggggtctgggatccttacataggccagacatccncaagttctcaaataggacaaatttggttgtcttttccttaatatctcatagggagatgtcttgctttttgattngnggattctatttatcacataacaaacattt

SEQ ID NO: 13352 - DNA, 383 bp, Glycine max
  unsure (1)..(383): unsure at all n locations
agcttaccaagaatgttatacaaagatgatttactttgtgaagcatgtaaggggaaatagattaaaaccttcttttcaagaaaaaactttgtttccacctcaaaaccactcgaactattacatattgatttgtttggtcatatggtctggtagtagttgacgactactcaagatggacatgggttatgttccttgctcacaagaatgagtcttttaaggtcttctttaaattctctaaaagagttcaaattgaaaagggagtatgtattactttaatcagaagtgatcatggtggaaagtttaaaaatgagagctttcatcaattctgtgaaaaaaatggaattcttcataacttctatactactagaacancctaaaaaaat

SEQ ID NO: 13353 - DNA, 403 bp, Glycine max
  unsure (1)..(403): unsure at all n locations
ccttatctatccacacccctctattaactaaattaacttccttaaaaataattacggatgaaaataacgcaacaaataatcaaacatcaaacataattactaataatatatagatatatatcagggtgttacaactctcccacccttttagaaatntcatcctcgaaatttaccttactcaaacaaggatgggtgagcttctcgcatctgactttctaattcccacgtggcatctcatccagatgcacctccccagatcaccttgaccaacggaatctctntccctcttaagtgttgtgttcgcctatcctcgatcctcaaaggcaatgtttcatatgtcaaattctccttcacttgtacatcatccaattcaatcacatgggatggatcacggatatactta

SEQ ID NO: 13354 - DNA, 395 bp, Glycine max
  unsure (1)..(395): unsure at all n locations
agcttctatagaaggttcgttcctatattttatacaattgcatcacctctcaatgagttggtgaagaagaatttggcatttacctagggtgaaaaacaagagcaagcatttgctttgctcaaagaanagcttactaaggcacctgttctagcttttcctgacttttctaaaacttttgagctagaatgtgatgcctctggagtgggtgttggagttgtattgttacaaggaaggcaccctattgcttattttagttaaaaacttcatagtgccaccttcaactaccccacctatgataaagagctttatgccttaataagagccctccaaacttgggaacattaccttgtttccaaggaatttgtcattcatagtgatcatcaatcacttaagta

SEQ ID NO: 13355 - DNA, 446 bp, Glycine max
  unsure (1)..(446): unsure at all n locations
agcttgccgcgacacctaaattcgatgtactgtttatcctcatgctggatcagttggaacatggatgccagagtggcaagggcatcggccatctaattctccactctggggatgtggtgaaaggatacgtcatcaaagtactctatcagttttctaatgtaggcctggtagggtatcaacttatgatccctggtctcctattctcctttcaattggtggattaccaaggctaagtccccatataccttgagcaacttgaccttgaagtcaatttccgcttggatcccaagggcatacgcctcatattcagccatgttgttcgtgcagtcaaagcccaacctagtcgtgaagggtatacatngatcgttgggtgtaaccaaaagcaccccaactccatggcctagtgcattagacgccaccgtaaaccacacaatccatttgcccta

SEQ ID NO: 13356 - DNA, 407 bp, Glycine max
  unsure (1)..(407): unsure at all n locations
gcttaagctccttcttctgcacaaggctcttaatatttgaagagtatccttgtggaaccttcacccgacgaagacactgacaaaaacttatcttctcctttntggacaaagtatggcaagctgggggcaagtaaatnttcttcccatcagacattggatgcaactgtgatcgtatgcccatatcagctagatcttgacgggtattcaagccatccttcgtctttccttgaatgttaaggagcatcccaatcacactgtcacaaacatttttctcgacatgcataacatcaatacaatgtctaatgtcaagatcagaccagtacggaagatcaaagannatcgacctcttcttccatatgcaactcttacttatatccttcttttgggtctttccaaatacattattc

SEQ ID NO: 13357 - DNA, 159 bp, Glycine max
agccatttccgcaccttttcctctgtccactttcaaccgttcctccaaatgtaaaatggcctatcggaatacattttctacatcctaactactataaaacaacctttagacttacgtttgctactctcatggtctcaatactgccgccgaaattctgtc

SEQ ID NO: 13358 - DNA, 397 bp, Glycine max
  unsure (1)..(397): unsure at all n locations
agctngaatataaactaaatgccttggtattttggtaacccaactggccatgtatcagaaatatgcacctgtcgcaagactctgtggtttatgctcctctgccgaccaccatacagacctttgcccctctgtgctgcaatctggagcaattgaacagtctgaagcatatgctgccaacatctacaatagacctcctcaacctcagcagcaaaatctgccacaacagaacaattatgacctctccaacaacaggtacaatcccgggtggaggaatcatcccaaccttagatggtcaagtcctccacaacagcagcaacaacaacagccttattttcataatgctgctggcccaagcagatcatacgttcctccaccaatccagcaccaacaacaacag

SEQ ID NO: 13359 - DNA, 341 bp, Glycine max
  unsure (1)..(341): unsure at all n locations
agctntataaaccaatattacttacctattttcacttgcttggatccagtaacaatataaccttctacaccacgaacaatatccctttgataatgctgaaaacacaattgtgatttggagctatgatcagcctaggggagaagggataaatcgacatcaactataaatgaaaacaaagaattgaaatcaaagaaccaggtaaccttccccgcacgtgtcgatatataaagtatctcaagtttctggtgtagctggagctccactccatcagtaaccacattatctgaaccttcataaccgccacccccaaactgcttcagaacagtctaaatagcaacact

SEQ ID NO: 13360 - DNA, 439 bp, Glycine max
  unsure (1)..(439): unsure at all n locations
nagcttatcaaggacatgtttggataatttatacattctataaaatttaattattgatagaataaaaatatattcttgttataattactttaattattattatataatcgntgtaatcgagcccgcactattaaggtttgtttacaatttaaaaaagttaagtatttttagtgtaaattttctttttttaagtagattttagatagattagggattaggtagattttatgcaaactcaataaactctcaatttataactgtattttgttttgttgctttagttattttcaattgatgtgttattcttaaataaaagaatttttaattttaataacatcaaatccttaataataatattattgaaatatttaattgatacattatttatatacttgagtctgataagcttgagtgcgaaccatgatcactgcaatacaag

SEQ ID NO: 13361 - DNA, 417 bp, Glycine max
gcttatgcttcaaacatttataatagaccttcttagcagcaaaaccaacaacaacagaataattatgacctttcaagcaacagatacaatcctggatggagaaatcatccaaatctgagatgggcaagtcctccacaacaacaacagtctatccatccttttcagaatgctgctggtccaagcaagccatatgttcctcctccaatacagcagctgtcacaacaaagaaaacaagcaactgacgctcctcctcaaccttctttagaagaattagtgaggcaaatgaccatccagaatatgcaatttcaacaagagacaagtgtttgatcaagtggactcggaataattaagaaggggggtgaattaattattaatgaacctttactaattaaaaatccatccttcttaatggtacta

SEQ ID NO: 13362 - DNA, 454 bp, Glycine max
  unsure (1)..(454): unsure at all n locations
agctgtcaanagggaagcaagttaaaaattgttttcaaagtaaatacgttgtttctacttcaaaaccccttgaactacttcacattgacttatttggtccctcgaaaactatgggttttggtggtaattactatgtcctagttataatagatgattactcaaggttcacatggactttatttntgaaaaccacaagtgaagcttttgatgcttttcgcanacttgccaaggtgattcaaaatgaaaaaggtctcaacattgtttcacttagaagtgatcatggaggtgaatttcaaaatgagtatttgaaaacttttgtgaagaaaatgaaattcaccataatgtttctacctcaagaacacctcaacaaaatggtgttgtggagaaggaaaatagatcccttgaagaaggtgcaagaacccttcaaatgaaacaaagtacctaagtacttttg

SEQ ID NO: 13363 - DNA, 327 bp, Glycine max
taacgttttactcggatgtccaattgagtcccgtaatatatcgacacgctcgaaattgaatgttgaagctctgagccaattcaaacaacaataactttttactcggatgtccgattgagtgacttaatatatcgggacgctcgaaattgaatgttgaacctctgagcacattcaaacgacaataactttttagtcggatgtttgattcagtttcgtcatatatcgagacgctcgaaattgaattttgaacctctgagccaattcaaacgacaataacattttactcgaatgtctgattgagtcccgtaatatattgagacgctcgaa

SEQ ID NO: 13364 - DNA, 428 bp, Glycine max
  unsure (1)..(428): unsure at all n locations
agcttgtttcactattgaagttagatagttttatctttgcatttctaaccattgaggatcaaaccaactttntaatcactgccaacctataaaatctgatgtggggtacagctaatgtttatattcttcaagttggatttgctgtatttttggaaaatttcatttcattgttctcaatttttgtggaataatggtgttctcttgtgtattaactgtcataattgtttaattttcaaatacagagataatcgctcctccagatcatcacttgtagatggttttgatagtctggaggagggtggtctaagggcttcttcttcttactcacgtgaaattaatgagcatgataatgataaagccatagagaagttggaggacagagtttcgtttctgaaacgagtgagttttttctatcaagtactatttca

SEQ ID NO: 13365 - DNA, 373 bp, Glycine max
  unsure (1)..(373): unsure at all n locations
cttcaagtagtgcatgatatgcttccagagaataacacattttctaaaagttactatcaggccaagaagatactgtgtccaatgggtatggagtattataagattcatgcttgcccccaatgattgcatattgtacagacatgaatttgaagaaatgtccaaatgccctacgtgtggggtatcacggcataaaatcaatgatgatgaggagtgtagtagtgatgaaaactcaaaaaaggacccctcagtgaaggtgttgtggtatctgtcgatcattccaaggtttaagcgactttntgctaatggagacaaaaccttacatggcacgcaaatggcagaaactgtgatggaatagtccgtcatccggttgatt

SEQ ID NO: 13366 - DNA, 445 bp, Glycine max
  unsure (1)..(445): unsure at all n locations
agcttcaacggtgtgttagggttgatgcgggttattccattcactttatatcgtanctttccattaattatggctttagaatttgccaacacaagtgttctttgaacagggatggttccatagtggaatgagccctgaggatttggtcgaactgcatttgctgtcaaattcagtcttcaaaacaacacaatagaacacagtctgagcctatgatcaccagatccccaattatttttttttttggttataggtaagaatcaaaaaattcataaaactgatacacattactgaattaactaagaaaatatgttctatttacctcttaatttaaattgttaaaaattataaacttaagaatgtcatatttccatttcatcttaatttttatattaaatatataaatcaagtaaccaacgtatattttttactatttatataatatttg

SEQ ID NO: 13367 - DNA, 404 bp, Glycine max
gataatcaatgaacattgccatagatagtgaaaaaaattattaataacctcattcaaaaataaacatgtcatggttgagcttactttaattcattgtttatgtcatagtttaaatgataaacgagacagaggtagcttagttatttcattattaaatcaattggttaattaaacattgctcaaagaattcataattataatttgttcataaaaaattgcaacagaaaaatattgatgagctaattaaatgttatatttttaatactatctttaagattgcaacattttaagattgtagttatcaaatgcatgatacaaaagaagtgtgtgttgatcattatactgctccatgaataattgaagcttgcattaattattataacatgtcattatttatcatacca

SEQ ID NO: 13368 - DNA, 459 bp, Glycine max
  unsure (1)..(459): unsure at all n locations
cctttaatgtttcagagtacccaaacaatattccattatcacacttagagacaaactttcctaagttgtccttagtgtttaaaatgaaacattgacatctaaagtgatggaagtatgatatgttggggtttggtcctttccacaattcatatgaagtcttttttagaataggtcttacgtatattttgttttgtgaataatatgtaatattcactaattcagctcataagtgcttaggagtaaaaaatattattaagcatggcctttgtcatttcctataattatttgttcttccctccaaccacaccattctgttaaagtgttctaggagttgaaaagttgtgaaggatactattttcctcacaaaatagttgaaaattcacattttcaaatttntctccatggtcacttctcattgaagcaatgcatactccttctatanttttcaatcttgttcat

SEQ ID NO: 13369 - DNA, 265 bp, Glycine max
taatggacacacatgaacatcgctacgcaacgacattcatggcgctccgaacatacgtggagtattgaggattgccttgagggtccgcacttaagcgatcatgaaactatgctccatacatcatagtggaggacacatgaacaaccctaagcaataatattcatgtggcgccgaaaaaggatgagaatggaggatggccttgagggtcctctcttatgcaatcatggaacacagactacaactctcaaacggaggacacatgaat

SEQ ID NO: 13370 - DNA, 457 bp, Glycine max
  unsure (1)..(457): unsure at all n locations
ctaagctttacatgcttggaagtatagataagtggaatattaagcttatataagagattncttagtagtgggacaataactatgtgtaaggcaaaaattctgtttatcattcaaactcatctccataataaacataatttgggacaaggtatcaattaaaattagctactagtttaatagatgtgagtgggcttaaaacatattgtaagttggaagtaataaataattatagtttccttttcttaaactgtttgactgcttaagtatgaatattgttgtatctctaaaacatagaatgttacactattgcaataccatcaatataatcctttcaatggaacaaaatctaaaaatatatattataacacaataaactaattatactgaactgagtcttaaatcaagattcaaatgtggaattgccaccttatttagtaactcgtatttctcatagcta

SEQ ID NO: 13371 - DNA, 343 bp, Glycine max
  unsure (1)..(343): unsure at all n locations
ggtgatgacaaactaacatggttgntgtgtacgtcataccatcacataatattccccttgtcttcctttgaagcgactttaagtattccatggctgccccaatggtgcttttcacaaaacaaaacaaaatactcaggcaaattcacttatctaaagcaattgacaacatatatctcttgcaacataaacaaagcacctacttgtatacttgccactcagaaggaggagcataaatacagcctttgctgtcctatgctcacatatcatgccacctgcacacagaaataagaacattcaatcacttatatcctagaaaatgttcaacaggagttacagagaactt

SEQ ID NO: 13372 - DNA, 285 bp, Glycine max
gttcatgctgggggtcttcaaacaagcaatagggagaggggaaggagcttcacacttatgagcaaaaaatgttcctacaagaacaccaggtgcttgagtccctctattgcttggcctcacttcatgaacattgaaacctttctcatcactgctcttggctggtccccaaatacatgagtttctctcacactggtctgtgagatctgacctaacacacctgattttgtcaagtgagggtttctcatgtgtggtggtgacaacatggcctaacgctttatagccatc

SEQ ID NO: 13373 - DNA, 486 bp, Glycine max
  unsure (1)..(486): unsure at all n locations
ngaaaaactgtctatatgcagcagcccccaggcttcgaatatgacaataaccttgtttataaactgaacaaggctctttatgggctgaagaaagcacttcgtgcatggttttaaaagctttcagcaactcttatctctcttgggttcaaggctagcaagtgtgacccttccttatttgcctcttcctcatgtggaaacacaacttatgcgcttgtctatgtggatgacataatcctcactggaaataacagtgttctaattcaacaacttatttcacagctaaactttattttctctcttaaacatcttggcaagttagactacttccttggaattgaagtcaagtataattttgcaggttttgtcatgctttctcaaaccaaatacatctcagattntcttgaaagagtaaatatggaagaagctaaaggaattttcacccttatggttggtaatctcaaattgtcaaagcaagaaactacatgc

SEQ ID NO: 13374 - DNA, 369 bp, Glycine max
  unsure (1)..(369): unsure at all n locations
agctttgagcaatttcaatcgacaataactntttacatggatgcctgattgagtcccgtcatatatcgagacgctcgaaatngaatgtagaagctctgagccaattaagacgacaatatctttntactcggatgtctgattgagtcccgtcatatatcgagacgctcgaaattgaatgttgatgctctgagcaaattcaaacgacaataaatctntactcggatgtctgattgagtcccgtcacatatctagatgctcgaaattgaatgttgatgctctgagcaaattcaaacgacaatatctctttactcggatgtctgattgagtcccgtaacatatcgagacgctcganattgaatgttgaagctc

SEQ ID NO: 13375 - DNA, 341 bp, Glycine max
  unsure (1)..(341): unsure at all n locations
caaactcagtttggtgtttccatcaagtgcctcaaatctgacaatgctaaagagcttgccctcactcagttnttggcttccataggcactcttcatcaattttcctgtattgagagacaagaacaaaattcagtggttgaaaagaatcattagcatcttctcaatgtagccagagctttgtacttccattctaaagtccctttatcattgtggggagattgtgttaccactacaacctttctcatcaacggaactccttcatcattactaaaacacaactcaccattcaacattttgttcaataaggaatcagaatatcatgccttgaggagttttgggtg

SEQ ID NO: 13376 - DNA, 417 bp, Glycine max
  unsure (1)..(417): unsure at all n locations
agctttggatcttngggagtgcaganaagaatactatgatgttcatgaactacctttaaatccaacagtggctcagatgaagaatcacagagagaggaagaccaaaaaggctaaggctaaaaatttccttttctctgttgtgtcaaaaattatttttacaagaattatgaacttcaaatctaccaaacagatttgggattatgtcagatcaaaatatcaaggttgtgaaagaaccaaaggcatgcaagtacttaacttgggcaaagaattcgagatttaaagcatgaaagagactgaaacaattaaaggctacgttgaccaactgttatgcatagcaaatagagtgaggcttcttgggaaggactntcctgatgaaagaatagtgcanaaaatcttggtcactatactcaagaagta

SEQ ID NO: 13377 - DNA, 486 bp, Glycine max
  unsure (1)..(486): unsure at all n locations
taataaatctatatatggtttaaaacaagccttccatcagtggtaccttatgtttcatgggataattcattcatttggttttgatgaaaacctcatggatcaatgcatataccacaaggttagtgagagtaaaatatgttttcttgtttatatgttgatgatattttacttgcaggcaatgatcggnggttagctacatgaggtgaaataatttctctctaagaatnttgacatgaaggatatgggtgatgcatcgttgtcattgacattaagattcatagagatagacctcgaggtattttatgtttttcatatgaaacctatattaacaaaattctagagagatttcggatgaaagattgttcacctagtgttgctgccattgtgaaaggtgataggtttaatttgaaccaatgtccanagaatgactttgagaaggaacagattgaaaacattccttatgcttagttgttggaagcctcatgt

SEQ ID NO: 13378 - DNA, 359 bp, Glycine max
taaaacaatccataatcaattgtacccttcaagttacgaagaattcttcttgcggcttttagatgaggagaggtatgagcctccgtatagcgacacacaacttccaccgcatatagaatatcgggccttgtattggttagataccttaaactccccacaagactcttgaagaccatggagtctaccttctctccttcatcaaactttgataacttcaagccaccttccatatgtgtgttcacgggattgcaatcaagcatactaaatttcttcaacacttcttttgtgtagcttccttgtgagacaaagataccattctccatttgcttcacttccatttccaagtaatatgacatgag

SEQ ID NO: 13379 - DNA, 368 bp, Glycine max
  unsure (1)..(368): unsure at all n locations
acattcaatttcgagcctctcgatatattacgggactcaattaaacatccgagagaaacgttattgtcgtttcaatttgctcagaggctcaacattcaatttcgagcgtctcgatatattacgggactcaatcagacatccgaggaaaatgttattgtcgtttgaattggctcagaggttcaacattcaatttcgagcgtctcgatatgttacgggactcaatcagacatccgagtaaaaagcaattgtcgtttgaattggctcagagattaaacattcaatttcgagcgtctcgatatattacgggactcactcagacatccgagntaaaagttattgtcgtttgaatttgctcagaaggtcaacat

SEQ ID NO: 13380 - DNA, 474 bp, Glycine max
  unsure (1)..(474): unsure at all n locations
agagactnttcaagctatntatcttctatctcatataagctctctaactntntagttttctcactctaagaagtggattcactcttgtcttggatggttatgaatgaaagctcctaccattatttatactactccacttccacaatgaatggtggagattacttgtatcctaaggtgaatattaattctctagaatgctttgcacattctagtagtttctacaattttctatttccttccatatcctttcatactcttctataagattctagaaggtttcacacatctccataatagttcagaggtttccacatttttccataagtttctaaagaattctacaccactctagagttcttcagaacattctagaanattcaacattctnttagaaaagtttataaatttcttgaacctatgtgatttagaatatanaanaaattatagcacccaanaacaatttttaggaatata

SEQ ID NO: 13381 - DNA, 450 bp, Glycine max
  unsure (1)..(450): unsure at all n locations
ttgcaatgttccaattgtcttttaaatggtgtgatcgattacaatatattggtaattgattaccagtgtatctgaacgttgaaattcaaattcaattgtgaagagtcacatcttttcataaaatgctttgtgtaatcgattacatggttttggtaatcgattaccagtgacaagttttgaataaagatcaagagatgtaactcttccaatggttttctcaagattttctcaaggttataactcttccaatggttttctcttccaatggtgccatcattttcttctattttctaaaccttttttgcaccatattaattactgattggtcttaattgtcaattaatcacgcagatttattatttgggctcatgtagctaatatgatgttttaatctaatttcaggaattaatganacattgcgcttaatccggatcttggttatgggcttga

SEQ ID NO: 13382 - DNA, 376 bp, Glycine max
  unsure (1)..(376): unsure at all n locations
caacctccgttggagttgtcggntgtagccactccatatccgactccaccttgttcggatccattgcaaccccgtctttataaatcacgtgtcccaagaactgcactttctccaaccaaaattcacatttcgacaatttggcgaacaatttcctatccctcaggatacgcagcacaatcctcaagtgcttctaatgctcctccttattccttgaatacactatgatatcatcaatgaacacaaccacaaactgatccaagtaatcatggaatatagggtggatgatagacgaacagttctaggcaatcaatttgtggggctccacactctatggtggaggacgcatgaacagcgctacgcaatcaattcatgggac

SEQ ID NO: 13383 - DNA, 491 bp, Glycine max
  unsure (1)..(491): unsure at all n locations
aagcttaagaaccatcctcgatacatattggtgaatcttataagggtacaactagacattctcttaaagacttatgcaataatatggattttgtatctatgattgaacctaataatataaaagaagccataatagatgataactggatcattgccatgcaagaagaattgaaccaatttgaaagaaacaatgtgtggaaattagtagaaaaacctgaaaattatcctgtcatatgaacaaaatgggtttttagaaataaattagatgaacatggtataattattagaaataaagccaggttagtagcaaaagggtataatcaagaagaacgtatagactatgaagaaacatatgctcctgttgcangattagaagccattagaatgctctcggcatatgcatccataatggattttaaactntatctaatggatgttaagagtgctcttctatatggagtaattcacgaagaggtatatgtcgaacaaccc

SEQ ID NO: 13384 - DNA, 474 bp, Glycine max
  unsure (1)..(474): unsure at all n locations
gtattcaaattggctnttggaagtgccttggtcagaatgtcagcactttgatgctctgttntgtagtacagtaacttcacttctccttccctttgaacttctcttagaagaaaaatctttatcttgaaatgcttagttttgccgtgaaacactagatcattagcaattgatattgcagcctggttgtccacaaaaatctgtgtgctttcttcttgtttcatatgcaaatctgtcataattttcctgatccaaagagcttgattcactacaacaacagcagctacatactctgcttctgcagttgattgagctacaacttcttgctttttagaacaccaagaaaagactccagaaccaaatgataaacaataaccagaggtgcttctcatgtcatcaatacaacctgcccagtcactatcataatatccatggagcttannaatatgagaatgagagtacattataccatagtct

SEQ ID NO: 13385 - DNA, 474 bp, Glycine max
  unsure (1)..(474): unsure at all n locations
agctttgngatgtanaagccttccatgccattttacaccaccaatactttctcgggtatcatagattnttggctattctctattaatctgtttcaaaaaatatcacataataagacttggaataaaattaaattctgtaaaatagaagaaaaaggaagcaacaaactaatactacatactcgatatttgacttgtatgtttgtgatgctggtaatttacaattgaattntcccttgcaatctggacaatagtaatctgtattttccagatcctgtaaccacgagtctgacctttatcataatccacttcatgaaagagagaaatctaaaaataaataaataaatagtgtcatcatgtntaagcatgatacagcaccttgaaaactttgctggatattntatcgcactcagcatgcacccacacattacaaccatcacaacacacctgatacaaagagttcattaccacaatatg

SEQ ID NO: 13386 - DNA, 410 bp, Glycine max
  unsure (1)..(410): unsure at all n locations
cgacaataactntatactcggttgtcttactgagtcgcgtaatatattgagacactcaaaattgattatcgaagctctgagcaaattcaaacgacagtaactttttactcggatgtctgattgactcccgtaatatatagagacgctcgaaatggaataccgaagctctgagataattcaaacgacatatactttttactctgatgtctgattcagtcccgtaatatatcgaaacgctcgatattgaatgttgatgctctgagaaacttcaaactacagtaactttntactcggatgtctgattcaggcccgtaatatatcgaaacgctcgatattgaatgttgaagctttgagtaccttcaaacaataataactttttactcggatgtctgattgacacctgtaatata

SEQ ID NO: 13387 - DNA, 271 bp, Glycine max
  unsure (1)..(271): unsure at all n locations
aaccttctggtggggtcttatagatgtcttcctctaaattcccatgcaagaatgcagatttaacatctagctgctccaagtaaagattctctgcagcaacaatactcagaataactctgatggtagttatctttacaactggaaaggagtctctgagatatcaattcccctgttctactgaaaccctttcaccacaagactcgccttgtatcttcttctaccgtcagattcttcctttagcctacagacccacctatnttgtgacgctttc

SEQ ID NO: 13388 - DNA, 334 bp, Glycine max
  unsure (1)..(334): unsure at all n locations
cactgaagaggaagacaaaattatctgcactctatatgacaccatcggaagcaggcaagtccattattnttttttttttatatatatgaacgtattgaatatgtgaatatgcattgcttttgcattattattgctatatatctgagtaatgtgatggttttgcctctaggaggtgctttatatcatgtaaactttccgggagaacatacaatgatgtgaagaatcactggaacacccagctaaagagaaagctcttggcaagaaacacatgtagtactggtgccacgacaagcaacaacaatgtcactttgagcaatactaaatattgtgatca

SEQ ID NO: 13389 - DNA, 398 bp, Glycine max
gcttcatgagagagtcaaagatcaaattgatatgaaaaataaaagttatgctaaacaagccaacaaagggagaaagaaggttgtcttcaaacccggagattgggtttgggtgcacatgagaaaagaaaggtttccggaacaaaggaaaacaaagcttcaaccaaggggagatggaccatttcaagtgcttgaaagaatcaatgacaacgcttacaaagttgagctgcccggtgagtataatgttagttccaccttcaatgtctctgatttatctctttttgatgcagatggagaatccgatttgaggacaaatccttctcaagagggagagaatgatgaggacatgaccaagagcaagggcaaggatccacttgaaggacttggaggacctatgacaa

SEQ ID NO: 13390 - DNA, 436 bp, Glycine max
ctcagcttcacattcaatttcgagcgtctcgatgtatcacgggactctatcagacatccgagtaaaaagttatcgtcgtatgaatttgctcagagcttcagaattcaatttcgatcgtctcgatatattacgggactcaatcagacatctgagtaaaaaagttattgtcgtttgaatttgctgagagcttcaacattcaatttcgagcgtctcgatgtatcacgggactcaatcagacatccgagtaaaaagttattgtcgttcgaattagctctgagcttcagaattcaatttcgagcgtctcaatagattacgggactcaatcagacatccgagcaaaaagttattgtcgtttgaattagctcagagcttcagaattcaatttcgatcgtctcgttatattacgggactcaatcagacatctgagtaaagaagt

SEQ ID NO: 13391 - DNA, 392 bp, Glycine max
  unsure (1)..(392): unsure at all n locations
ttatatgcacatgtatgttttcacttctcatcactctagtttttcctgttagattattgagatcaaccttagaagctggaatttcaagattagtttactttcaaaagagtaccagcatacctgcaagtcaacaggtttgatgctgtgggaatcagctcggttgatggcttctgtccttgcagaaaatcccaacattgttgctggaaaaagggtcttggagttggggtgcggcagtgggggaatctgctccatgattgctgttagagatgctgatctagtagttgcaactgatggagatggctntgcactngatctcctgaccaaaaatgttgcatccaacattgagccatcattactgactaaactcaccacaaaaaaactggagtggggaa

SEQ ID NO: 13392 - DNA, 489 bp, Glycine max
  unsure (1)..(489): unsure at all n locations
ctcagcttgaagcaacgttgttgaatttaagttgcttgagagtggatgcttacattccattccattcgagttgcacctataactaatatntttgtttgaatttacagattctatttcgattttaacatgacttatgtgggagcagggatgatttgcccccacctagtgaatntgtctttgctccttggagctgttctatcttttggagtggtatggccgctcattgatcttcgtaagggagattggttcccgaccaatttagatgagagcagcatgaaagccttgtatggctacaaggtcttcctgacagttgctctcatcctcggtgatggcttatacaactttgtcaagattctagtttcctcaatccttagcgtacatgananaattaagaaccgtaaaaatggtaagaaaaggattcagaacttgccattctcgaggtcatatnntggtatgaaatattacattcaattcacatataatttggct

SEQ ID NO: 13393 - DNA, 389 bp, Glycine max
  unsure (1)..(389): unsure at all n locations
agctntaggtcttanaatgtcagtcatgtcaattatgaaagcatgttaggtcctcttttccaaagagaactgaaatangatgtaaatctactttttccactattcactctgatatttggggtccaagctgtgtcacatcttttggtttcagatattttgttacctttattgatgaatactctagatgtacttggctntatttaatgaaagatcgatatgaactttaacctatattcatgtctttcattaatgaaatcaagacccagtttttaaaagtaattaagattctcaggagtgataatgctaaagaatatttctcctttaatctcttttcgttttaaccacacaaggcattttacattagtccacatgtcctcacataccacaac

SEQ ID NO: 13394 - DNA, 280 bp, Glycine max
tcatcaagctgtgcttcaatccagtccattaggtattctacatatgttggagcagaaacctcaataggtgtcttaatatgtacaccatctgcccatctatattcatacctaaagttgtcgtgcaaaaagacaagaccacataagagctacgaatgtataaatatttagcacagatggatctagaattctcattggcattaaaggaatgattatataacacacacatgccagatggatccagaaagggagtgcaaaagtaactcgttactaaatattgtct

SEQ ID NO: 13395 - DNA, 185 bp, Glycine max
  unsure (1)..(185): unsure at all n locations
agcttgcaaggtttctatactctaagcaagtttacactgagttcaggagcaccattgctatcaggattcatcatatagaaagcttccgagtctctggacccaacaattctctcaaacttggccctcatgtacatgatttcaccctctgaccctgcttcagctncactattattattggtattatt

SEQ ID NO: 13396 - DNA, 455 bp, Glycine max
  unsure (1)..(455): unsure at all n locations
ngatgcctctctgtataaccctntntacttttgggatctttccaatatcttctagcatcaagtcaagacaatgtgctacacatggagtccaaaatatattttgtctcgtgacttgtgaaattctacctaaaaagaccaaaatcaataaacttgtatgagtagtgtaacaattaaaagttataactactaaaaaaaacttcattaagtatgattgaattctcacccgccaacacataattacttccattgtccgtcaccacttgaataacattcttttctccaatctcctcaacaaagctatccaaaagctcaaagatcttctgaccagtcttcatgtattcagaagcatccacactcctcacaaattgtgttcccaacgaacaatntaccanaaagttaatcaaagttctattcttcctattcgtccaaccatctgacataattgaacacccata

SEQ ID NO: 13397 - DNA, 351 bp, Glycine max
agcatgcaagtttactaatacaagatcatacctcttcttatattctactctgtatagatcagtagttggagctcttcaatactctctactataaccagacctacacttagttatgctgtagacaaagtctgtcaattcatggtcaatcctattgaatctcactggacagcagtgaatagaattctcaggtatatcaaaggctgcttacaccatggcctacttctgaaagctgctacttctggaattcacattcccagtaatgccctttgtgatgcagactgagcttctgaccctgatgatcacagatctactacaggaggtgctatttattctggccttaatcatatatct

SEQ ID NO: 13398 - DNA, 341 bp, Glycine max
  unsure (1)..(341): unsure at all n locations
gcttactataacaagagcagacctcttctcttatcctactctgtatagaacagcagatggagctcttcaatactctccactataaccagacctagactaagttgtgctgtaaacaaaatctgnctattcatggccaatcctcttgaatctcactggacagcagtgaaaagaattctcaggtatctcaaaggctctttacaccatggcctacttctcaaagctgctactcctggaattcccattcncagtaaagccctttgtgatgcagactgngcttctgaccctgatgatcacagatctacttcaggagttgcctattatttggccttaatcatatatct

SEQ ID NO: 13399 - DNA, 314 bp, Glycine max
  unsure (1)..(314): unsure at all n locations
cctcataaatagaaggaggaaactttgcnttttcaaatgcgtcatttaacaaatacaatatcatagtcattgccttgtcgcttaatccacacaaaacttttatatgatataatttgattataaattctagttttgtgtactcgcttccttcatacaatgtttggctcccatcatttagaagctcataaaagacattatgatcttctcttggttcatcatttactatttcatcttcatttaatggttgtgatgcacctacattatggtcatgttgcctatattgttcaaatgcgtcattgatcatcatatccatt

SEQ ID NO: 13400 - DNA, 336 bp, Glycine max
  unsure (1)..(336): unsure at all n locations
ttagtactgttgacgccattggaaacaggtcgtgcgactagattatttcggtgtctaatggtgtattcaattcaagaaagaggatactacaagccgtactataatgtgcagatggtattgatgaggcttgcctcagatttgatgaagcagttggccaaatggagaaacagcaacagcaagatgtagatgcacttcaagtttcaaaagatgggactgagaagaaagattatcctgttgatctctctcttccagatataaaaaatgggatatatagctcagatgagtntaggatgtatacattcaaagttaggccttgctcaagagcttattctcatg

SEQ ID NO: 13401 - DNA, 280 bp, Glycine max
actcagcttgtgcaacctcagacgcgaatcttccattctgttctgcctgaatgaacagacacacatagtcacattccatttccatgtctgcgtcatgcggagtggtggagtgtgtgttcgtgctgggctgcgcgcggtggctgtggaagcgctgcacctacgtgggcagctactacagcgccacgtggtcctccgccaccgccgacgagttcgacccggacccacgcgtctgccgcctcatcctcgccaactacgagcccgatctccgtacccccaacca

SEQ ID NO: 13402 - DNA, 428 bp, Glycine max
  unsure (1)..(428): unsure at all n locations
agtctcacaattgtcacgtgctcatgcataaattgttagtcgtggctatacgagacatcttgccaaacaaagtcaggttagccataactcgcctgtgctttttcttccatgctatatgtagcaaagtcattgatcctgtcaagtttgatgagctggaaaatgaggccgcaattatactatgccagttggagatgtattttccccctgctttctttgacatcatgattctcttgattgtgcatctggtcagagaaatcaaatgttgtggtcctgtttatctacngtggatgtacccagttgagcgattcatgaagatctttaaaggatatacaaagaatctatatcatccagaagcatctattgttgagaggtacattgcagaaaaagccattgaattntgtcagaatacattcagaaggctaaacatg

SEQ ID NO: 13403 - DNA, 367 bp, Glycine max
tctacattcaatttcgagcgtctcgatatgttacgggactctatcagacatccgagtaaaaagatattgtcgtttgaatttgctcagagcatcaacattcaatttcgagcatctagatatgtgacgggactgaatcagacatccgagtaaagatttattgtcgtttgaatttgctcagagcatcaacaatcaagttcgagcgtctcgatatattacgggactcaatcagacatccgagtaaaaagttattgtcgcttgaattggctgagagcttcaacattcaatttcgagcgtctcgatatgtgacgggactgaatcagacatgcgagtaaaagatattgtcgtttgaattgctcaagcatcacat

SEQ ID NO: 13404 - DNA, 314 bp, Glycine max
  unsure (1)..(314): unsure at all n locations
tgtatctccttgtcagagtagctctgtcccgaatacacaactctgaaaacatcatcattgctcaagaggtgtttaattccatgaggagcaaganaaggaaggtgggttggatgactataaagattgatttanaagaggcttatgatagattgagttggtctttcatccaagatattcttattgatattgggctttcgacgagttttgttgagctagtgtggtattgcatatcttcccctacaatgaaggtgttgcaaaatggcaaagcattagaggaatttttacaagctatgggaatttgcaaggtgattcat

SEQ ID NO: 13405 - DNA, 473 bp, Glycine max
  unsure (1)..(473): unsure at all n locations
tagatggagaagaagagagtgcgagcaaaatagggctcgcgttctatatattttaaatgtaagtccaacatcggttttcaatacaaaaccaatgttaatcaaatgatgttaacattaacattggttttctggaagaaaccgatgttaacttatcatacgttaacatcggttgtctgaanaaccgatgttaaagaattgacgttaacattggttcttgaaaacccgatgttaatgaactgacgttaacatcggttcttgaaaaccgatgttaatgaatacacattattaacaattatgccaccgagtttatgttctcatcggctttgtcaaaaaccgatgttaatctgatgatgttaaatctacattttcaagtagtgccaacaaccaaatagaaaaaatcatatatatatatatatatatatatatatatatatatatatatagatatatcaaaagagatacattagagtatg

SEQ ID NO: 13406 - DNA, 293 bp, Glycine max
caatacttggagactcatgcctcttcctccttcaaaacagctatcggatgtcgctggatatataagatcaaatatcgagccgatgggtccatagaaagatacaaagcacgcctggttgccaagggttacactcaaacggaggggttggactaccttgacaccttttctccggtagcaaaactcacctccgtacgagttcttctagctttggccgcactcaacaaatggcacctgcggcaactggacgtcaacaacgcgtttctccatggtgaccttgaagaaaggtatatatg

SEQ ID NO: 13407 - DNA, 429 bp, Glycine max
  unsure (1)..(429): unsure at all n locations
ctcagcttataatatgaatctaattaatgtgctagatataaataacttttctaagtgtcctatatgtgtggaagctaagtatgcaaagaagccttttaaacctgtcaaaaatagaactacggaactgcttgaattaattcacacggatttggctgacttcaaaacacagtaagtagaggaggtaaagcatattttattacttttatagatgatttttctagatatgccaaagtttatcttctaaggacaaaagatgaggctgaagaaatgtttttaaaacataaggcagaagttgaacaccaattagatcgtaaaattaaaagacttaagtctgataggggtggtgaatatggcaactattttcttgagaatnttgtgaaaagatgggaatatcatgaaatagtgcccctatactctcaacaaatggat

SEQ ID NO: 13408 - DNA, 419 bp, Glycine max
  unsure (1)..(419): unsure at all n locations
nttacatgaactcacgataacacatttgcaagagcatcggtctgccgacagcgaagccggtgtgggcgatgttagatnttgcacttccaggaatgtgtgattntcaatttgggtacaaaaggattangcgaatgaaactgtttntgtcangaacaatattgcattgctgcttccactttagaaattaattntgtagcttattttttgttctttaatcaaaatagtgtgtcaattcttactttatctttattntctattattaaatattatactaaaatggaattttattntattattttttaatatgtgatttaaatttattattctttaattgagatancnttattttacttntaaaaatcttaaatttaatctctatattttagtgaacatttacttttactttaaaaattatattt

SEQ ID NO: 13409 - DNA, 364 bp, Glycine max
  unsure (1)..(364): unsure at all n locations
ctattgactaatattttttgtaatacttaataaaaatattgttaaaagtctttgatcacattcaaaaaaatattatcaaattatgaataaatatcactaatatatgtttatgacattctatcaaatgttatatatagtttatgttgttaaagcttaaaaatatcataaaaaaactttaataatatacgtaacatttgataaatattataaaatatattaacaacatttattcataattgtgtgacattnttttgaatgtcgtcaaaagttttagtaacatttttattaaatgttagataaaaaaaaaatattgctaaagatcatgtttgtagtagtgcctggaagtatgttgctttctgcactt

SEQ ID NO: 13410 - DNA, 446 bp, Glycine max
  unsure (1)..(446): unsure at all n locations
ctctcgagaaatgtaaatggtcatcataacttgtcacacggaagtccgattcaggcgcatactatatcgagacgctcgaaatctaaccacggacgctctctagaaattcaaatggtcataacttttagcacgaaagaccgactcaattgcataatatatcgagacactcgaaattaaacaccgaaagctctcgagaaattcaaatgatcataactttntacacgtaggtcagattcagacctataatatatcgagatgctcgaaactgaacaacgaaagctctcgagaaattcaaatggtcataacttgtaacaaataagtacgaattatgcgcataatataatgagacgctcgaaatttaacaatggaacgtctcgagaaattcnaatggtcatcacttttcacatggaggtcacaatgagacgcatcacatttcgagacgctca

SEQ ID NO: 13411 - DNA, 443 bp, Glycine max
  unsure (1)..(443): unsure at all n locations
ctcagcttgtatttgttttcaaatgaggtggtggaagttatatatggtttttaagacaacctaataggtgcattataaaaaaagaagacgatctattaggtcatgtatagctacngcaaagtgtaacgatgagttattntgttgagatgtgaacacgcaaaaagaacaattttcgtacgttggatgactaatgttgtatgctagttgtagtgttgtattgaatactttaataaatgaagttataaatcactataaatatctataatctatagaatatttccaatgatgattgtcttagtgagtagagtttcttaaattatatatttagtctctatagtattttttgcggtgctcatagtgttatgttattatcaacaacttatacctatatttactctaatgataagatacttctagaaaattactgttatatccttttattt

SEQ ID NO: 13412 - DNA, 378 bp, Glycine max
tctagactgtatacaagaatgaagctctgataccacttgctttacaagtggcctcagatatcttatgataaggggttgaattaagatatcacaatcttttatatattaaaattctattgtgattttaacccaaatcccaagatttctttcaaaaattgaactcctaaataattatgcaaattaatcttactgaatagacataataagcaataagcaataaacaataaaagagtttaagggaagatagattgcaaactcagatttatactggttcggccacacctttgtgtctatgttcagtccccaagcaacccccttgagagttccactatcttgcaaaatccctttacaagttctgaagcacacaaagacaaccct

SEQ ID NO: 13413 - DNA, 337 bp, Glycine max
  unsure (1)..(337): unsure at all n locations
tatgactcggtttcttagggattcctaaactatatgatgatgaggatgggattttgtgaaagatggggaaaatggatccatggatgcctttctagtgcaactatatcaattttgatcaatggcagcactactagagaatttgtgcctgagaggggactgaggcaagtagatccccttgcacctttcctatttaatatagcagctgagggactcactggtttgatgaggacaactgtctccaaaaaccttttcagcagctataaagtggggaggcaaaaggaggagattaacatcttgcagtatgcagatgatacactatnntttggaactgcaacta

SEQ ID NO: 13414 - DNA, 370 bp, Glycine max
  unsure (1)..(370): unsure at all n locations
catcatttcaatttctcattaagtaaaatggatcattntcaaggtccaacgccttataatgatcacctcttaagtaaaaaaaagagtcgcttgataagcaagaactacgtaggtctgatttcctcatcgcaattgaggatacgtaggagcaaaagccccgcttttgtcgaccaccccaagagatcgttaatggtccaatgccttaacgtttctctcctttcaaaaacaagagatcgttaatggcccaacgccttaacgtttctcccctttcaaaatcaaaagaccgtttaatggttcaacaccttanatgaccttctgttcaataataacatattgtgcaaaagaagataaaaacaacttaaccaaacac

SEQ ID NO: 13415 - DNA, 439 bp, Glycine max
  unsure (1)..(439): unsure at all n locations
tgaagacaagactatacgaggtatcttccttgggtatagcaatatctctaagggctaccgtgtctacaacttgcaaactaagaaactcgtcatcagtcgagatgtggaagttgatgaatatgcttcttggaattgggatgaagaanaagtggagaagaaggttcttatacccgctcaactacctcaagaagaagctgaggaagaagacccaggtgaaccaccttcacctccaccacaacaacaagatcaagaactatcatcaccagagtctactccaagacgagtaagatctttggtggacatatatganacctgtaacttggccatacttgaacctggaagccttgaagaagcgtcanagcaggaagtatgggtcaaggcaatggaagaagagatgcagatgatcgagaaanacaacacatgggagttagtanatcgt

SEQ ID NO: 13416 - DNA, 277 bp, Glycine max
  unsure (1)..(277): unsure at all n locations
cttctcttctgactcatgatgtanatccatgtcattcttgtattgtcatcaattatggacataaaatacatccaccacctagagaagggactcttgcaagcccccaacagtcatcatgaatataatcaagagttcctttggtggtgtgaattgctttaagaaatataatcctatgttgcttgccgaaaacacagagctcacagaatttcagttcatccaatttctgatttcccaacagctgctgtgtttgaagtattatcatacccttttcactcat

SEQ ID NO: 13417 - DNA, 387 bp, Glycine max
  unsure (1)..(387): unsure at all n locations
actagatgcctgggttaacctggtaacccagctgggcttgaataaaaaatctcacctgtcgccagactctgtggtttatgctcctctgccgaccaccacacagacctttgcccttctgtgcaacaatctgaagcaattgaacagcctgaagcttatgtgtcaaacatctacaatagacctcttcaacctcagcagcaaatcagccacaacagaacaattatgacctctccagcaacaggtacaatcccgggtggaggaatcatgccaaccttagatggttgagtccttcacaatagaagcaacaacaacagccttanttttagaatgttgttggcccaagcagaccatacgttccttcaccaatctagctagaacaacaacaacagc

SEQ ID NO: 13418 - DNA, 408 bp, Glycine max
  unsure (1)..(408): unsure at all n locations
agcttattcaaatattcggattaagcatatgtttagttttaaaaaaattaaataattattagctcttagaattttattaataaaggaaaatatgtaatttctattttaaaaatgttaaattaaatatgcactaaattgaatgaagaaaatatattcttaccattatttaaacaactttcacataacttcaaaaacttaactgcaagtataccttgatcaacaactagcttgtccgatatgttcaacaacattatcatacgtcataaacaaataaaatcactagaacacatataagggtaagctctctttactcaatgatgtctctcaagctagatgaataanaatgaaggtgatgggaatgagctccaagttctacacgaattttgcagcagcaacgctgcaaaagta

SEQ ID NO: 13419 - DNA, 485 bp, Glycine max
  unsure (1)..(485): unsure at all n locations
tagcccacaatgttctccaaatatggcttaagaacttggtatccctatcacttactatgctcctaggtaggccatggagtctcaccacttgcttgaaaaataagtcaactacatggcaagcatcatcaacctttttgaaacgtataaaatgcaccattgtttataacattgcaacaaccacaaaaacaaaatccttgccactctttgttctaggaaattgcaaaacaaagtccatagatatgtcaatccaaggaaaatcacgaactggcagaggatgatataaaccatatggcttcacttttgattntttatttttacaaacaaggcattatttatgtacatcatgtttcatatgagaccaataaaaatgctcatgcaatatttctaaggtcttttgcaccccagaatgccaccatcaaatcatcctcgtgtgcctcatttaccaacaaatctcttatggaacacttaggcacacacagtctttt

SEQ ID NO: 13420 - DNA, 458 bp, Glycine max
  unsure (1)..(458): unsure at all n locations
ccctctggttgctctgctagggtttccaagcattagagagaatgtgaagggattataatctcaatttcactatctttgtgcgagaggaatttctctctctacagacattattttgcaaatcccaacaataggaatgtgcaaaaatgagttttgaaggtggtgtccaaatttcaggatgattcaatggttaacaagtctaggatcatagttttattgcgatagatttgcgtgtatgcggtaaaaagagagagtttttggagatgaagaagggagaacaattttgaaagagagctctattttactccctattgaaataaataaacaaaacatcctttntattttctaaaaacatatttattntatttaccttanaaccattattttaattaataaaactatgcatccttatttattttacaaaanatagggtgttactgggtagctaatatgcagatcaa

SEQ ID NO: 13421 - DNA, 472 bp, Glycine max
  unsure (1)..(472): unsure at all n locations
agcttcaagaatcaagatcaagattcatgactcaagattcaagaatcaagagaagacttaatcaagataagtatgaaaaggttntttcaaaaactgagtagcacatggatttttgtcaaaacatgtttaccaaagaatttttactctctggtaatcgattaccagattgttgtaatcgattaccagtagaaaaatgaatttgaaaaagttttcaaatgaatttataacgttccaattgatttcagaaagctgtaatcgattacaatgtgttggtaatcgattaccagtgcctttgaacgttgaaattcanattcaaatgtgaagagtcacatcctttcacatannagccttgtgtaatcgactacactgattnggtaatcgattaccagtgattgtntttgaataaataaaagatgaactnttanatggttttgacttttaaattgtttaagttttcttaagcatactctct

SEQ ID NO: 13422 - DNA, 452 bp, Glycine max
  unsure (1)..(452): unsure at all n locations
ngctaacccatggaagctcctaatatctcccacactntntgtggtgggccattcttggatgaccttgattttctcagggtccacttggaccccatttctaccaactacaaaccctaagaaaaatatattatctgcaccaaaaatacacttctctatatttgcatagagggtgtttttcctaaagactgaaagaacttgcctgagatgtcccaagtgatcatctaggctcctactgtacactaaaatatcatcaaaataaagaactacaaatctatctatgaaatcccttaagacatgatgcataagcctcataaaggtgcttggtgcattagtgagcccaaaaggcatcactagccattcatacaaaccaaacttggtcttgaaagcggttntccactcatcgccctttntcatcctgattnggtgataaccacttttaagaatcaattttg

SEQ ID NO: 13423 - DNA, 469 bp, Glycine max
  unsure (1)..(469): unsure at all n locations
cttgatccgcctctatattttccacaatcccatcctccctccagataatgagcttctggtgaagggtagatggcacagctccaactccatgaatccactcccttcctaatagcaagttaaaattagccttagactgtatcaccaggaaaagagttggtcgaactatactgcctacagcaacatctacttgaatggctcccaaagaatagccagttttaccctcataattcgaaagcacaatgttgtgggcagatagatcagtgtcatgtttcccgatcttgtagagcatagatcgaggcattaagttgacagccgctcctccatcaatgagcactntgttgattccaacattctcaacttttgctctgatgaaaagaggtttgagatgaattntcatctgaaaatctggctnttcgaaataagctaattgctcttccacacagccattattcataacatagtaacatac

SEQ ID NO: 13424 - DNA, 471 bp, Glycine max
agctagaagattcatttggattttgtgaacttggtatagtctaaagtcttatagttcggatctttaacctccaattgtgtttgtcaaagaatattttagagattaataaaaattgtgtagtcatttcaaaagcaggtgggataaattacaaatgttatgtgccaaagatactacttatccactttttgatatgatccaggttagcagagttgaaataggttatttatatttataatcacatatttatccttttttatggatttgaagagacttttaaaaagaaaatggaactttatggattctacattgttattaatatcacacataataacatacaacgatattcatagtcatattcttttaattttaacgtgaatttaattaattgaactattttttaaacatcataaacaaaatccatatcttttacattaattgaactacttttgaattgttactattcttctaaca

SEQ ID NO: 13425 - DNA, 407 bp, Glycine max
  unsure (1)..(407): unsure at all n locations
ggatccttaagcacctgcggctgcagctggagaaagctgagatgtttgtgtttacatgcctaactgacgcaatcctaccccgcaagggcattggatagaagactccaagtagattgggccagagatccaagggaaggccctagggttctcatgagccttagggtagattttgaccccatgggctaagtatgagcccgcttatctttgtaaatattagaatagggtttttccttcgtttaggccttgtattttggccattctagtagtataaggttttagccttgtatttcgaggcattttgagtagtctttgtagttgggaccttttttgtattttcatgtatnttgtcatgggggtgagcttagatattgtanggggcgtgtagcanagttctagcttctcatctc

SEQ ID NO: 13426 - DNA, 487 bp, Glycine max
  unsure (1)..(487): unsure at all n locations
ttgaatgctctattcaatggagttgacaagaatatcttcagactgatcaacacttgcacagtggccaaagatgcatgggagatcctgaaaaccactcatgaaggaacctccaaagtgaagatgtccagattgcaactattggctacaaaattcgaaaatctgaagatgaaggaggaagagtgtattcatgacttccacatgaacattcttgaaattgccaatgcctgcactgccttgngagagaggataacagatgaaaagctggtgagaaagatcctcagatccttgcctaagagatttgacatgaaagtcactgcaatagaggaggcccaagaacattgcaacatgagagtggatgaactcattggttcccttcaaacctttgagctangactctcggatagggctgaaaagaagagcaagaatctggcgttcgtgtcanatgatgaaggagaagaaggtgagtatgaccttgatactgatgaag

SEQ ID NO: 13427 - DNA, 430 bp, Glycine max
accttgctaattcaattaggaattcccttcctaatattctagtgatcatcttgatgttgtgacttgtaatcttgaagtattgtcttgaattttaatcttgaaaagcccatttgcatcaattgcaacacatcatcatgatcatcatcaaaacatcaaagccaattgcatctacacatgtgtcctccaccttcgagattggagctatgtttcacgattgcctaagtgcggaccctcaaggcaatccgccattctccctttttttttcggagacccatgaatgttattgcctagcgctattcatgtgccctccaccttcgaggttggagctatgtttcatgattgcctaagtgcggaccctcaaggcaatcctccattctccccctttttggagccccatgaatgtcactgtctaacactgttcacgtgtcct

SEQ ID NO: 13428 - DNA, 457 bp, Glycine max
agcttcattgagaaaacttccttgagaagctaatgcttatctacacacacccctctcataactaagctcacctccttgaaaagtttccttaagaagattcctaaagaagctagagcttaactacacatacctctctaatagctaagctcacctccttgagatgagaagctagaacttagctacacaccccctataatagctaagctcacccccatgacaaaaaacatgagaatacaaaaaaaaagtccttactacaaagactactcaaaatgccccgaaatacaaggctaaaaccctatactactagaatggccaaaatacaaggcccaaatgaaggaaaaacctattctaatatttacaaagataagtaggctcatacttagcccatgggctcgaaatctaccctaaggctcatgagaaccctacggccttcccttggatttctagcccaatctac

SEQ ID NO: 13429 - DNA, 320 bp, Glycine max
gactcttgtaagttggcacttggatacatctttgtgatagttaacagagcaatatcttggagaagagctaaacaatcattagttgccacctcaactatggaagcagagcttgtctcattatttgaggcatcatctcaaagggtatttggttgaaacaattcattgttggtctacaaatagttgatttcatatatagaccattgaagatatattgtgataataaagctgctatttttctggctaaaaacagtaaaagtggaagcaaagcaagcatattgtggaaacaaaagaaatcattactcaacaataaattaatgatt

SEQ ID NO: 13430 - DNA, 409 bp, Glycine max
  unsure (1)..(409): unsure at all n locations
nttaaaagatatttactctgtggtaatcgattactagtgactgtaatcgattaccaatggccaaaatgcttattagaatgctctaaaatgtttaatattttttaaagtttgtaattgattacacaaggcttgtaatcgattatcagaagttnttgaacattttaaaacaacttttagaaatttgaatttaaatttcaaagcctgtaatcgattacagagtgtatgtaatcgattattagagttaatattcaaatttcaaatgtgaaaagtcacaactcttcagaatacaactgtgtaatcgattacatcattctggtaatcgattaccagtgaggaattttctaaaataattcctaacagtgattttgaatggccatcaatacatangtgacttgggacacaaattttc

SEQ ID NO: 13431 - DNA, 422 bp, Glycine max
  unsure (1)..(422): unsure at all n locations
acgacaataactntatacaaggatttccgattgagtcccgtaatatatcgagacgctccacattgaaaatggaaactcgtagcaaatttgaacgacaataactntttactcggatgtccgattcagccctgtcatatatcgagatggtccagattgaaaacgcatgcttgtacaaaattcaaaatacaataacttttcactcggatgtccgattgagtcccgtaatatatcgagatgctccaaattcaaaacggtagctcgtagcaaattcaaacgacaataactttttacttggatgtgcgattgagtcccgttatcgagacactcgaaattgaaaacggatgttcatagcagattcatatgacaataactttatactcggatgtgctattgagtcgtcgcctatatagagatgctcccaa

SEQ ID NO: 13432 - DNA, 472 bp, Glycine max
  unsure (1)..(472): unsure at all n locations
catgcaagcttcttcacatagaccgcctttgctcgaccttctttatgactaaaaacagacacattatgcataagcaaaagatcaagaggagttagtggattaaaaccataaacaacttcaataggagaacaattagtggtgccatgaacagttctatggtaagctaattcaacatggggtaaacaagcttcccaagtttttaagttatacctcaaaactggcctaagcatagttcccaaagtcctattaacaacttccgttagccatcggtttgcgggtgacaagtggttgaaaataacaatatagtgcccaacttgctccacaaagtcctccataaatgcaaatcatcatgcctaggtataggatgcctatatttaatggtgatgttataagggctctacaatcagaacacatgcgccatgtcccattcttnttagggaccaaatcactgggacagcacatggactcatac

SEQ ID NO: 13433 - DNA, 485 bp, Glycine max
  unsure (1)..(485): unsure at all n locations
agcttctatagaaggttngttcctaatttctctacaattgcctcacctctcaatgagctggtaaagaagcatgtggcatttacctgnggtgaaaaacaagagcaatcctttgctttgctcaaagaaaagctaactaaggcacctgttctagctcttcctgacttttctaaaactntttagctagaatgtgatgcctccagagtgggagttggagctgttttgttacaaggtgggcactctattgcttattttagtgaaaaacttcatggtgccacccttaactacccctcctatgataaagagttttatgccttaataagagcactctgaacttgggaacattaccttgtatcctaagaatttttcattcatagtgatcatcaatcacttaagttcattagagggcaaagcaagttaaacaaaaggcatgcaanatgggtagagtacctagagcaatttcatatgttataaatacaaaagggaaa

SEQ ID NO: 13434 - DNA, 419 bp, Glycine max
  unsure (1)..(419): unsure at all n locations
tattacggacactataaaactcagcttcacattcataccgagcgtctcgatatactacgggactcaatcagacatccgagtaaaaagttattgtcgtttgaatttgctcagagcttcggcattcaagtccgagcgtctcaatatattacgggtctcaatcagacaaccgagtaaaaagttattgtcgtttgaatttgcttagagcttcggtattcaatttcgagagtttcgatatattacgggattgaatcagacattcgagtaaaaagttattgtcgtttgaatttgcacagaacttcggtattccattntgagcaactcgatatattacggtactcaatctgacatccgagtaacaaggtattgtcgtctgtaattgctcagagacttgataatcaatttcgagcgtctcgatatgt

SEQ ID NO: 13435 - DNA, 406 bp, Glycine max
  unsure (1)..(406): unsure at all n locations
agcnttgagtaccttcatacaacaataactntntactcggatgtctgattgacacctgtaatatatccagacgctcgaaattgaataccgaagctctgagcaaattcaaacgacaataagtntctactcgtatgttcgattgactctggtaatatatcgaaacgctcgaaattgaagaccgaaggtctgagcaaattcaaacagcaataactttttactcggatgtttgattgagtcccgtagtatatcgagacgctcggacttgaatgccgaagctctgcgcacattcaaacgacaataacttttttcctcggatgtctgattgagtcccgtaatatatcgagacgctcggacttgaatgccttagctctgagcaaatccaaatgacaataacattttactcgga

SEQ ID NO: 13436 - DNA, 366 bp, Glycine max
tatatctgatcgccatagtgatacattcaaaaaagatatcctgtgcatcttcccgatcaaagtatcgcccatcaccatccaacaccaacaagccattcttcgaatcctcgggaggcaatgaattatacagggcctacagatgcacagaattctcacttacaaagcaaatgcataattcatgcaatcatacattgcatggaaatctacaaacctgtatccaatttgcgagagaaaagacttgcataaacactttcacctgcaaaacaaatatgcctataattaattatatggaaaatactactctcacacttccaacatggagctacacccgtcaatacttccttataactgtgtccaatgtgttac

SEQ ID NO: 13437 - DNA, 388 bp, Glycine max
tgtaaggttaaagtctcacgattgtcacgtgttgatgcaacaatggttagtcgtggctatacgagacatcttgccaaacaaagtcaagttagccataactcgcctgtgctttttcttccatgccatatgtagcaaagtcgttgatcctgtcaagtttgatgagttggaaaatgagaccgcaattatactatgccagttggagatgtattttccccctgctttctttgacatcatgattcacttgattgtgcatctggtcagagaaatcaaatgttgtggtcctgtttatttgcggtggatgtacccggttgagcgatacatgaagatcttaaaagggtatacaaagaatctatatcatccacaagcatctattgttgagaggtacatt

SEQ ID NO: 13438 - DNA, 365 bp, Glycine max
  unsure (1)..(365): unsure at all n locations
ggatccttaagcacctgcngctgcaagctgacaacgtcgtgaattttgtagtacattgtatcaactagaggctgntaaacaatccaatccagaaattagtgtgtcagtgagtgtagaataagagacagcgagaagagagaaagaggaaggatgtggaattactgtgctgccccagcggtcttgaggatcgacgtcggcgcctcgtctgagcagcaagccaactacgtcggtgcggccctggcatgcggcgacttggagcgcggtgcggccgtcaatgtcagtgaaattgacgtcactcccggcgtccaagagctccttaataccgtccgagtcgccttcgttggccaaatacattaaccggaccg

SEQ ID NO: 13439 - DNA, 325 bp, Glycine max
  unsure (1)..(325): unsure at all n locations
agcttgaatcggacatccgtgtgaatagttatgacgatttgaatttctcaagatcttccgttgntcaatttcgagcttctcgacatattatgcacccgaatcagatatccttgtgaaaagatatgactatttgaatttgccgagagcttccgatgtttaatttcgagcgtatcgatatattactagcttgaatcggacatccgtgtgaaaatttatgaccatttgaatttctacgagcttccgttgtcaaattccagcttctcgatatgtgatttgcctgaatcggacatccgcgcgaatagttatacccgttgaaattctcaag

SEQ ID NO: 13440 - DNA, 414 bp, Glycine max
  unsure (1)..(414): unsure at all n locations
nagcttancatcagacagagcttgaagtttctgctcccttgactttgcagcctgctcaacctttctcttgtacacatccaagcactcctgttctaactgaagaagcatcttgtctcgttgctcatcgctctcaccaacctcatcccatatttcctacagtgtataaagataatgtaattatctaatcccattattctgtagagcattctcatcttaagtgacaaagatgaatagctgaatgtagttagttacctgaagctttcttaacaaggaaccacatgtgttttctccaagaagaggattctgagcttcggtcactgccattgaagtcccagcgacacttaccctgcacctccaaaaacaaaaatgacatgaaaattttctctccttccaccaaacgaatagagaaacatc

SEQ ID NO: 13441 - DNA, 463 bp, Glycine max
  unsure (1)..(463): unsure at all n locations
gaatcaagattcaagaataatcaagtttcaagatttaatcaaatttcaagaatcaagattcaagaataatcaagataaagattcaagaatcaagagaagactcaatcaagataagtactaaaaacgtttttcaaaacattgagtagcacaagaatttttcacaaaatcgtttaccaaagagttttactctctggtaatcgattaccagaaggtagtaattgattactagtagccaacattgttttcaaaactgatttacaaagctataatcgattaccataatcatgtaatcaattaccaatgttntaaaacattagatttcaaatttcaagagtcacaattagtgttaaaacattntcaaatcatttttaacttgtgtaattgattacacaatacttggtaatcgataccagagtatctannacgtttgattntcannaattannatgaagagtcacatcta

SEQ ID NO: 13442 - DNA, 407 bp, Glycine max
  unsure (1)..(407): unsure at all n locations
agctngtgtagcgataattctagctgggaaaagtatttctcacctattacccagatgtcggtgcagcttgataatagtttcctcctcttccttggtgtagtttcctcttttgaggtttggccttaggtaattcagccaccttagtctgcaactctttccacatctcgcaagacctaacaaattaataacaacaacaacaaagtaaaaccaattacaatggattcatatatgatttagctataagctgtgcatgtatataattaaatattgaatatatggctcctacaaattcatgtagaagttaaaccaaaccttgaaaacagagaagaagaataattgaaagccacattggcgactatattgatggtacatactctcacatacttaatttgtttctgaccaaacta

SEQ ID NO: 13443 - DNA, 485 bp, Glycine max
ctttcgaagtccactgttgaaatcatagcacgcttctctctgtgaatagtttcatccaccacttcattgagaatcagaattccatggagaatgtgcctattttttatgaaggctatctgcctttcatcaattaactcatccagcagaatcctcaacctatttgccaagagttgtgctattactttatacatgcagccaatgagagagatgggcctgtgatcatttacagactgcggctgagatatcttatgaataagagccacttaagaggcattgctgcctctaggaaagcttccatgagcatggaattcatccacaaatcttcgaaaatcatgtttgagcagcccccacaactccttgataaatctaaaattaaaaccatctggccccgagcatttatcaccagcacaactccaaatagcatctctgatttctgaatcagagaaaggcgcagtcagctcctctctttgattatgatgaatcat

SEQ ID NO: 13444 - DNA, 354 bp, Glycine max
agcttctggtgggacatcatgacttgctatccattctgatattcaccacagattctgccttcttctattttcagattggtaatgcctctaacagcacctttgtcaatgattatcttcatgcctcttaagcgcagatgtccaaatctttgatgccatattttgacttcatcttctttggataatagacatgtggaggagcaactgtgttcttgaggtgttcatatgtgacacgagtccttagatctgctgcccttcaataggactttactcttttcattagcaccaagcattctgactttgcgaagattacattgaatccttcattacacaactgactgatgctgatcaagttct

SEQ ID NO: 13445 - DNA, 458 bp, Glycine max
gaatactactggacataatgggtttcctgtcattgatgatccacctttctcagattcaccagagctatgtggacttgtactgaggtctcatttactagtgttactgaaggagaagattctttcaagggataggggttttgcaaatcaaaggatcttccaaagaatttctactttggattttggacaggcgggatcacgaaacgggatcaaactacaggatcttgatatccaagaggaagagatggatatgtatgttgatctccatcccataactaatgcatctccttacactgtggctgagacaatgtcactagccaaagctgctattcttttccgacaacatggactcaagcacatgtgtgttgttccaaagaaccaatgggtatgatatcttttcttttccctcccacaaaatgatattatatactccttcactcgaatctgtcatatgcattctt

SEQ ID NO: 13446 - DNA, 419 bp, Glycine max
  unsure (1)..(419): unsure at all n locations
tgctcgcatcatcaactggagtggatctttattatacataacacacttagtttatgtgtcatccagtgaagctagattacccggtggtgacctttacctatccaaaggactaggactgagccctgatactcaacgagtcatgctctatcttgctggttgttcgggaagcgtggccggcttacgtgttgcgaaagacatagctgataacaaccctggaagccgagtgctgatcgctatctcagacactacaattattgtgttcaagccaccaagtgcagatagaccttatgatctagntggtgtggcactctatggggatggtgctggtgcaatgataattggctcatacccaatattggagtatgagaagcctgtctttgagcttcacactgcagttgacgaggttttgccgcacactg

SEQ ID NO: 13447 - DNA, 471 bp, Glycine max
  unsure (1)..(471): unsure at all n locations
ctaagcttaacatcagaccacttccagggtgctggaactacttcacatggacttgatggggcctatgcaagttgaaagccttggaggaaaaaggtatgcctatgttgttgtggatgatttctccagatttacctgngtcaactttatcagagagaaatcggacacctttgaagtattcaaggagttgagtctaagacttcaaagagaaaaagactgtgtcatcaagagaatcaggagtgaccatggcagagagtttgaaaacagcaagtttactgaattctgcacatctgaaggcatcactcatgagttctctgcagccattacaccacaacaaaatggcatagttgaaaggaaaaataggactttgcaagaagctgctanggtcatgcttcatgccaaagaacttccctataatctctgggctgaagccatgaacacagcatgctacatccacaacagagtcacacttag

SEQ ID NO: 13448 - DNA, 371 bp, Glycine max
  unsure (1)..(371): unsure at all n locations
agcntttgagcaattcanatggtctgaactnttcactcgtagctctgatttaggcacatcacatatatagacgctcgaaattgaacaacggaagctctcgagatattcaaatggtcataacttttaacttggaggtccgattcaggcacataatatatcgagacgcccgaaattcaacaacggaagcacttgagaaaatcaaatggtcattaattttaactcggaggtccgattcaggcgcatcacatatagagacgctcgaaattgaacaaaggaagctcttgagatattcaaatggtcattacttntcactcggaggtccgattcaggcacataatatatcgagacgcccgaaattgaactacggaagc

SEQ ID NO: 13449 - DNA, 445 bp, Glycine max
  unsure (1)..(445): unsure at all n locations
gcttacaatagagctgntcatagcaccactaattgttctccttttgaagatgtttatggttntaacccactaactcctcttgatcttttgcctatgcctaatgtttctgtttttaagcataaagaaggtcaagcaaaggcggactatgtgaagaagcttcatgagagagtcaaagatcaaattgagaggaagaataaaagctatgctaaacaagccaacaaagggagaaagaaggttgtcttcgaacccggagattgagtttgggtgcacatgaganaagaaaggtttccggaacaaaggaaatcaaagcttcaaccaaggggagatggaccatttcaagtgcttgaaagaatcaatgacaatgcttacaaagttgagctgcccggngagtataatgttagttccaccttcaatgtctctgatntatctctntttgatgcagatg

SEQ ID NO: 13450 - DNA, 420 bp, Glycine max
  unsure (1)..(420): unsure at all n locations
agcttgaatcggacatccgtgtganaagttatgtcgatttgaatttctcaagatcttccgctggtcaatttcgagcttctcgacatattatgcacccgaatcggatatccttgtgaaaagttatgactatttgaattctccgagagtttccgatgtttaatttcgagcgtatcgatatattataagcttgaatcggacatccgtgtgaaaatttatgaccatttgaatttctcaagagcttccgttgttcaatttcgagcttctcgatatgtgattcgcctgaatcggacatccgtgtgaaaagttataccacttgaatttctcaagagcttccgttgttcagatttgagcgtctcgatatgtgatttgcctgaatcggacattcgtgtgaaaagtattaccatttgaatttctcaagac

SEQ ID NO: 13451 - DNA, 479 bp, Glycine max
  unsure (1)..(479): unsure at all n locations
ctaagctactcaattgctccaggttgctgcatggaaaggcatatgtctgtatggtggtcagcagaggagcataaaccacagactcttgcgacaggtacagatttctgattcaaggccagctgggttaccaagttaaccaatgcatctagtttgccttcaagcttcttagtttcagatgatgcagatgagtttgtagctacctcatgcactcctctaatgactatagcatcatttctggcgctaaactgctgggagttggaagccatcttctcaattaaatttttggcttcaacaggagtcatgtctccaagggctccaccactggcagcatctatcatacttctctccatattactgagtccttcataaaaatattggagaagaagctgccccgaaatctgatggtgagggcaactggcacantaatttttaaatctctcccagtattcatataggctctcttcactgagttgtctaat

SEQ ID NO: 13452 - DNA, 457 bp, Glycine max
caggctccctctaattcatcgagtaactcatcaatggttggaattgggaatctgtccttgacggtaatgtcgtttaaagctctgtagtcaacgtaaaaatgccatgatccatcacgttttttgaccaataatacatgggatgagaatgggctagtgcttggaattatgccactccggagcatggtttctacctaagtttcgatttcttatttttgaaaataaggatatcgatagggtcaaacattgatgggttcagagttgggtatcaagtgtatggcgggattggtggtgtgggatggtgggagggtcattggtgtgtggaatatggtcacgaattgtgtgagttaattgcgtatttctgggtattaagcattgtcgaacgtgggtagtggattgtcggagttgatgatacgtatgtggaagaaaatactaacactgtccatatgtactattcatc

SEQ ID NO: 13453 - DNA, 474 bp, Glycine max
gtagattgaagaaggtaatgctagacataatagatgaaagacagtctgcattcataggtggaagacacttgttgcatagtgtattgatagccaatgaagcggtggaggaagcaaagaggtgccaaaagtcatgtttggtgtttaaagtagactatgaaagagcatacaactccgtctcgtgggatttcctatcatacatgatgcgaagattgggcttctgtcccaagtggattcattggatcgagggttaccttagctcagcctcggtttctatattggtaaatggtagccccacaaacgaattcattccacaaagaggccttatacaaggtgatcccctagcgcctctattgttcaatattattgcggaaggcctaaccggtttgatgagagaagcattggataagaagctgtttagcagtttcctagtgaggaaaaacaataaggcagtcaacatcttacaatacactgatg

SEQ ID NO: 13454 - DNA, 459 bp, Glycine max
agcttgtaatcgattacacacatactataatcgattaccaaaggagtttttcagaaaacattctcaacagtcacatctttttatctgtttcttaaatggccatcaaaggcttgtatatatgtgacttgagacacaaattttgataagagttttgaagatcaaaaaggtcttatcctcttaacaagcaaaattgttttatcctcttaaaaattccttggccaaaacacttgtgattcaataaggaattatttgagtgctcaaattgttcaatctatctctttcaagagagatttcttcttctcttcttctttattctgaaaagggattaagagacccagggtctcttgttgtgaaagaattctaaacacaaaggaaggattgtctctgtgtgtttagaactttgaaaaggaatttacaagatagtgaaactctcaagcgggttgcttggggactggatgt

SEQ ID NO: 13455 - DNA, 502 bp, Glycine max
  unsure (1)..(502): unsure at all n locations
ctattacggacctataaaactcagcttggtacaattctctcatcctatcctccaactcccatgtagaatcaccctcatcggttccccactgcaccttcaccaacgcgatctcctttcctctcaacgacttcatccttcggtcagtgatcttctgaggttgtgctctataggtgaggttatccttcacctgtacctcgtccactgcaagtatatgtgatggatctgggttgtaccgtctcagttgagagacatgaaacacaggatgcaaattcgataaactcggaggtaaggcgatatgataagctacaggcccaatcttcttcaaaatctgatatggacctagatacttgggtgtcaacttcctagccttaagagctcttccgactccggttacgggagaaaccttcaaaaacacatgttctccttcctgaaaatctagtggcttcctccttctatcataatagctcttctgcctatcctgagatgctnttatcttctctcg

SEQ ID NO: 13456 - DNA, 427 bp, Glycine max
agcttcagaattcaatttcgatcgtctcgatatattcaggtctcaatcagacatctgaggaaaaaagttattgtcgtttgaatttgctgagagcttcaacattcaattttgagcgtctcgatgtattacgggacttaatcagacatccgagttaaaagttattgttgtttgaatttgctgagagcttcaacattcaatttcgagcgtctcgatattttacgggactcaatcagacatccgagttaaaagttattgttgtttgaatttgctgagagcttcaacattcaatttcgagcgtctcgatattttacgggactcaatcagacatccgagtaaaaagttattgtcgtttgaatttgctgagagcttcaacattcaatttcgagcgtcttgatgtattaccggactcaatcagacatccgagcaa

SEQ ID NO: 13457 - DNA, 425 bp, Glycine max
agcttatgaacctcatatgaacttagtggattttgtaacaaattgtaggcaataacaatgcattgactaatagtttcatcctcgaaatcttatcaatcctccaaaacaagcatgagaacatattccagtacatccatgccttttcattctatttagaataattaatgaaaaagtcgatgctacctaagacaagcaaaatcacaataaaggccttcatctctaaagattagctcatttaagaatgtcaaaactggcatcaatcctttctttgtaagccaaaatatggcacaaaagctaaaagagcaaataacaacaaaacataaaatctaataaggctaatgatcacaattcacaaaaaaatagagtagatagatattatcttataaagaaactaaagagttgctcacacgatgaaatgtgtatat

SEQ ID NO: 13458 - DNA, 414 bp, Glycine max
  unsure (1)..(414): unsure at all n locations
agcttatcaatgtggcagttccggtgaccattgacgaactggcgatcaatacaaaanatatactcaatccatgggaaaggaatgaaaatcacacactttgcctcaactctgctaaagcaattggatgtacagtagtcaacattggcacccaggacttcattgaaggaagggtatgcttgtaggcattcaagtttccacccataaaagcagaattattgtgggcgtgtacactgcagaacaacaaaatttaagattaaatttaatttataaatgaaatcctttgttaagttatgaaataggaatttttttattttaaaatcaaatcctttgttcagaaagttataagaaatctttttttttttttttttaattttagttgtgtatactacaaagaaatctggtcaaatctgatta

SEQ ID NO: 13459 - DNA, 403 bp, Glycine max
  unsure (1)..(403): unsure at all n locations
atcttgttcatcaatggagtnccttgcttcttgaagattaatggtagcggaatggagatggaagaatactgattggaaatgccacttcaaggagaagatgagtcaagaagaagctcaccaccatatgaagccatggataagagcttgaaggtaggagaaaataacacgagggagagggagagaaggaacacaacattntgtgcctcaaaacaggtctgaactttgaagtgtaattctcaaatgatcaaagttgaaaaatgcacacacatgacctctatttatagcctaagtgtcacacanaattggagggaaaattgaatttctattcaaaattcacttgaatttgaaattgaatttgtggagccaaaatttcattaattatgattaagtgaatttcagtatg

SEQ ID NO: 13460 - DNA, 334 bp, Glycine max
gagaataatgtctaatctctgaagtctaatttctcaaatgatcgaagatgaaaaatgcacacgcaacggctttatatatagccttacagcacaccaattggaggaatttgaatttattgaatttccttggatttaatttgaggagcccaaatttcaccaattataattaatgaatttccgatatggtactacccactaatgcaagatcaagtacaagattctgcactaagtgtgcttaagtgtcatgaagcatgtatagcatgaacgacatgcacaaagtgtgactatatgatgtggcaatgacgtgtagcaagcaaatgttcaccttcccctt

SEQ ID NO: 13461 - DNA, 392 bp, Glycine max
  unsure (1)..(392): unsure at all n locations
atatggagctgactggcaggtcaaaagcctcgagcacggaatatattaataagttctcggcatctctcctctcattctgacccctttggatctgtgtttgaagatgactttagtttttgttaatgttatttatctgattgtttattgaaacaatatacaactttagagcatagacctataaggtaccatccatgggtgtattggacatacgtgtagcttctagatgctattgtaacattctngttgaagatatgtaatatggaccagtaatggatcaatttcgtanaagagcttactcgttattatattaacgtttaccactctagttaagtcgcgtccatacttaatatggataatgattttattatgatatacttaccgtctaacggact

SEQ ID NO: 13462 - DNA, 259 bp, Glycine max
  unsure (1)..(259): unsure at all n locations
atgactgttngactatgccttgtngcttcatgtnntaatttgaacatctcgatatattatgcgcctgaatcgggcatcntgagtgaaaattatgccatatgagttagtcgacagcttcgntggtcaaattcaagcgtgtcgacatattattggcctgaatcggacatctgagtcanaagttatggcagtttaaatttccatgtgcttccatgtttaattntgagcatctcgatatattatgcacctgaatcggacatct

SEQ ID NO: 13463 - DNA, 281 bp, Glycine max
  unsure (1)..(281): unsure at all n locations
ctttcactcggaagtgcgaatgagtcctgttatatatcgacacgctcgannattaaaccgaagctcatagcacattcgaacgacaataacttctcattcggaagtctcgatgagtcccataacatatcgagatgctcaaaatagaaaacagaagctcgttgcatattcgaacgacaataacgttntactcggatgtccgattgagccccgtaatatatagagacgctcgaaatttaacaccgaagctcgcagcanattctaacgacaataacttttcactc

SEQ ID NO: 13464 - DNA, 182 bp, Glycine max
  unsure (1)..(182): unsure at all n locations
ctaccaactacaaaccctaagaaaactatattatctacacaaaaagtacacttctctatatttgcatagagggtggttttcctaaggactganagaacttgcctgagatgtcctaagtgatcatctaggctcctactgtacactanaatatcatcaaaataaacaactacaaatctacctat

SEQ ID NO: 13465 - DNA, 205 bp, Glycine max
  unsure (1)..(205): unsure at all n locations
gacaataactatttactctgatgtctgattgagtcccgtaatatatcgagacgctcgaaantgaatgttgaatctctgaacatattcagacgaccataactttctactcggatgtctgattgagtcccgttatatatcgagacgctcgaaattgaacgcggaatctctgaactaattaaacggctatactcttcactcggatgct

SEQ ID NO: 13466 - DNA, 402 bp, Glycine max
  unsure (1)..(402): unsure at all n locations
ttcttctagacttagagagataacatgtaatcctcttgaacccttaccttccactctctcatcatgccgagactccggaaccctaacaggttttgccttttccatgtacttgaaacanaactcaatagcttctttctcaatgtacctttcaacaatagatgctntacgacggtgtagattatntgtataccattntaagatcgtcatgcatcactcaaccgggtacatccaccgcanataaacgggaccgcaacatttaatntctctcaccatatgaacaatttagtgaaccatgatgtcaaaacatgagagaggaatatatatctccaactgacatatgataataatagcctcattttctagctcatctaacttgagaggatcaatgactnntgcacatat

SEQ ID NO: 13467 - DNA, 253 bp, Glycine max
  unsure (1)..(253): unsure at all n locations
cctactatatactatcttctctccatgtntcagtaggatgaagttggtggttctatcacatatagggcatgcatgatgtcntttgacactatatccacttaaatttccatatgtnggagagtcattaatagtacaaaacactattgaacgtaacctgaaggtctgttgcatattggcatcccatacatcaaccccgtcttctcacnaatttctcatgtcttcaatcaatggattgagatacacattgatatca

SEQ ID NO: 13468 - DNA, 303 bp, Glycine max
  unsure (1)..(303): unsure at all n locations
tcttctctgatcatnngctggtcacaagtcaatcctgttctttnntgtatttcatttctgggattctctgagcattcaagaagaaaatgtgacttctntacctcatgtacttgatcttctagcagtgtaatgcattcctcctgtanatcattctgtggcataatcctactcanaactntgctgaaacgagtgcttttatngttttgtaaggatcgtcctctagcatttgtcatggatctgtcagtaaccaccattggctcattctcatctgctatagtaacagcagctggtgtcttctctttt

SEQ ID NO: 13469 - DNA, 358 bp, Glycine max
  unsure (1)..(358): unsure at all n locations
tctgaagcttgtaatttttttcattgtatcttttagactatttattatggaagcttatcttgttacatatttcaagcaacaatattatttaataataagatcagatttttattggtcattatatacgaagtagattataatttagtggttatctaaatattttattataatttaaaaagtctaatcacagaatcaccactctgggattatcatctacaatggatacatgtgctactatatactttaattatatacaccatacatgttgaatcacccagtaccaaatcatatgntacacaaacactaccacccattctcggtgctaattaggtctgaatataaagctttttttgaaatt

SEQ ID NO: 13470 - DNA, 170 bp, Glycine max
  unsure (1)..(170): unsure at all n locations
aaccttagatggtcgaatccttcacaacatcaacaacaaccttatnttcaaaatgtggctggcccaagcagaccatacgttcctccaccaatccaacaacaacaacaacaacagcctcagatagaacaaacagttgaggcctctccacaaccttcccttgaagaacatgt

SEQ ID NO: 13471 - DNA, 267 bp, Glycine max
  unsure (1)..(267): unsure at all n locations
ctcgagagcttccgttgtcaatttctagcgtctcgatatattatgcgcccgaatcggatctccttgtgananagtatgactatataaatctcacgagaacttccgttgttcaatttctagcgtctcgatatattatacgccagaatctgacatccgagttataaagtatgaccatttgaatttctcaagtgcttccgttggtcaatctcgagcgtctctatatattatgcgcccgaatcagatctccttgtgaaaagtatgactatt

SEQ ID NO: 13472 - DNA, 232 bp, Glycine max
  unsure (1)..(232): unsure at all n locations
gcgacacacaactcccaccgcatatagaatatcgggccttgtattggttagataccttaaactccncacaagactctngaagatcgnggagtctaccttctctccttcatcannaattgataacttctaagccaccttcataggtgtgttcacgggaatgcaatcaagcatattaaatntcttcaacacttcttttgtgtagctttcttgtgagacaaagataccattcttc

SEQ ID NO: 13473 - DNA, 210 bp, Glycine max
ctcactgacaatctccttggatagaagcttctcttgattgaaatgacaatcaatctctatgtgcttactcctttcatgaaaaactgcgttcgaggcaatatgaagagcatcctgattatcacaatacaacttcaatggtaactcttcataatacctcaattctcgcagaagctgtctaatccacattagctcacaagtaaccatagccat

SEQ ID NO: 13474 - DNA, 267 bp, Glycine max
  unsure (1)..(267): unsure at all n locations
aatgcctctaacagcaccttagtcaatgatnttcttcatgcctcttaagagcagatgtccaaatctttgatgccatatattgacttcatcttctttggaggatagacatgtggaggagtaactggtttcttgaggtgtccatangtaacacgtgtcctttgatctgctgcccttcattagaacttcactcttctcatattgcaccaagcattctgacatttgtgaagttacatttgatccttcatcacacaactgactgatgcttga

SEQ ID NO: 13475 - DNA, 294 bp, Glycine max
  unsure (1)..(294): unsure at all n locations
acggagtttccgactatgctcttgtgtggtggaacaagctacataaggagagagcaagaaatgaagagccaatgtgtgatacatggacgcagatgaaaaanatcatgangaagatgtatgtgccggctagttactcaagggacttgaaattcaagctccaaatactaactcaaggaagcaagggggtngaggagtatttcaaggaaatggatgtgctcatgattcaagcaaagatngaagaagatgaagaggtaactatggctcgntttcttaacggtntgactaatgatatct

SEQ ID NO: 13476 - DNA, 453 bp, Glycine max
agctatttatcataggaggcgtagttgagggtggcactatgaaatttttcactaaaataagcaatagggtgcccaccttgtaacaatacagctccaacttccactccagaggcatcacattctagctcaaaagttttagaaaagtcaggaagagctaaaacaggtgtcttagtaagcttttctttgagcaaagcaaaggctcgctcttgtttttcaccctatgtaaatgccacattcttcttcaccagctcattgagaggtgatgcaattgtagagaaattatgaacgaaccttctatggaagcttgctaacccatggaagctcctaatatcttctaataaccgaccactaacctataatacataattaccattcttagaaccgcagtttcatgggtgtttgcattactttaattccatttatgtacaattccaacaaactatttagtctata

SEQ ID NO: 13477 - DNA, 436 bp, Glycine max
agcttcaacattcaatttcgagcgttccgatatattacaggaatcaatcagacatctgaataaaaagttgttgtcgtttgaatttgctcagagcttcggtattccatttcgagcgtctcggtatattacaggactcaatcagacatccgagtaaaaagtgattgtcgtttgaatttgctcagagcttcaacattaaatttcgagcgttcggatatattacgggactcaatcagacatccgagtaaaaagttattgtcatttgaatttgctcagagcttcgatattccatttctagcgtctcgatatattacgagactcaatcagacatccgagtaaaaagttattgtcgtttgaatttgctcagagcttcggtattccatttcgagcgtctcgatatattacgggactcaatcagacatccgagtgaaaacgtatt

SEQ ID NO: 13478 - DNA, 420 bp, Glycine max
  unsure (1)..(420): unsure at all n locations
agcttcccaagtctntaagttcttcctcanaactgtcctaagcaaagttcccaatgtcctattaacaacttctgtttgcctatcagtttgtgggtgacaagtggttgaaaataacaatttagtgcccaacttgccccacaaagtcctgcaaaaatggcttaagaacttagagtccctatcactaacaatgctccttggcaaaccatggagtctcacaatctccttgaaaaacaaatcagccacatgggaagcatcatcaacttttttacatggaataaaatgagccattttagaaaacctatcaacaaccacaaaaatggagtctctaccaccacttgtttttggcagccccaaaacaaaatccatggataaatcaatccaaggatactccggaattggcaatggagtatacaatccatg

SEQ ID NO: 13479 - DNA, 381 bp, Glycine max
agcttgagaagagcctcctcataccctttatagaagtcaaagtaatcatctttcaaatcaacccttttatgggtctcaatccgttttcttgttttctctcaattttttcatttgcatggctttctctctcaccgtcgtgggaaaaagtgatgatctttttgttctattttttgcggggtgtgttgaaaagggtttatcgtttgtttgttgcgtctgattcgcaggttgaatgcacgattccaaaggatgatggaactctggtttcctatgtgggattcaagatccaacatgataatgctcgtggtcctatgaagggagggattacgtatcctcccgaaggtctcggggtttgaacctttatattgattttgtttctcatca

SEQ ID NO: 13480 - DNA, 407 bp, Glycine max
agcttaatataagctatcatgtgatgtgtcttaactttattccacttcactgtactcgcaggcgataaacatccatcatgagaagagaattgactcgccggttgacaaggacctgaagaacgactatgatgggattgaactcgatgaaatagctcaagtggctcttctatgtactccataccttccaagctacagaccatagatgtctgaagtggatgggatgctagaatgagatggtcttgcagagaaatgggaggcctcacagagagctgaatccacaagaggtagacgctatgaactctcatcttcagagcgctactctgatctcactgatgactcttcattactagcccaagcaatggaactatctggaccaagatgatctacatagtcactgcgacactgaa

SEQ ID NO: 13481 - DNA, 357 bp, Glycine max
  unsure (1)..(357): unsure at all n locations
ttcacgagagctttcgntgttcattntcgaacgtctctatatgtgatgcgccttaatctaacatccgtgtgaaaagttatgaccatttgaatttctcaagagcttacgttggtcaattatgagcctctcgacatattatgcgcccgaatcggacatccgtgttaaaaggtacgagcatttggatttctcgaaagctatcttgggtcaattccgagcatctcgacatattatttgcccgaatctgaccttcgtgtgaaaagttatgaccatttgaatatctcgagagcttcctatgtttaatttcgagcgactcgatatattatatgcatgaatctgaccttcgggtaaaagttatga

SEQ ID NO: 13482 - DNA, 402 bp, Glycine max
gcaagcttctatagaaggttcgttcctaatttctctacaattgcatcacctctcaatgagctagtgaagaagaatgtggcatttaactggggtgaaaaacaagagcaagcctttgctttgcttagagaaaagcttactaaggcacctgttctagctcttcctaacttttctaaaacttttgagctaaaatgtgatgcctctggagtgggagttggagctgttttgttgcaaggtgggcaccctattgcttattttagtgaaaaacttcatggtgcgacccttaactaccccacctatgataaagagctttatgccttaataagagcactccgaacttgggaacattaccttgtttccaaggaatttgtcattcatagtgatcaacaatcacttaagttcatt

SEQ ID NO: 13483 - DNA, 363 bp, Glycine max
  unsure (1)..(363): unsure at all n locations
atgttcttaatactggactaatccatttgcttccagagtttcatggccttgcaggtgaagacccacacaaacatctgaaagaattccatattgtttgctccaccatgaaacccccagatgtccaggaggatcacatatttttgaaggcctttcctcattctttagagggagtggcaaaggactggctatattaccttactccatggtccatcacgagctgggatgacctcaagagagtattcttagaaaaaaatttccctgcttccaggaccacgaccatcagaaaggatatttcaggtattagacaattcaatggagagagcctatatgaatactgggagagattaanaagttatgtgtcat

SEQ ID NO: 13484 - DNA, 369 bp, Glycine max
  unsure (1)..(369): unsure at all n locations
gtctctatggcaggaatgatcactntaattaattctgttctgacagccttgcctctgttttacctgtctttcttcaaagctccttcagcagtgttaaagaggcttatttcgatccaaaggaattttctatggcgtggaggtgctgaagggaaaaagattgcttgggcggcttgggatcatatctgagttcctagaatacaatgagggctacgaatcaaagctctcaaggactctaatagagcccttctcattaaatggaagaggctgctgttccaccaatcagactacttgtggagcagaattcttacctcaaaatacaaaggttggagatggttggaggagaattcccacaagcagactcattcctat

SEQ ID NO: 13485 - DNA, 486 bp, Glycine max
ctcgtccggatccttaagtcacctgcggcatgcaagcttatggctgtcttctctgcttcaagaacttggaatcattactagaatggctattgaattattagtagacagtaaatctgctattgatctagcaaggaatccagtctctcatgactgaagcaagcacattgagactaaatttcattttctgagagatcaagtggctaaaggaaaggttaagctagtacattgcagaactgaggttcagctagctaacataatgactaaggcgttgaaggctgacagattcaaggagctgagaaggaaaataggcgttcagagtttggaggattaagaagttttgttcagtaaatgttgttgtaatgttcttgttgttgattcactgtttttgaatcaaaggggagtgttagggataattaattccaaaatagttactagtttgttagtagttgatggtggttagttagttgttttagtctatatatagat

SEQ ID NO: 13486 - DNA, 440 bp, Glycine max
  unsure (1)..(440): unsure at all n locations
agcttttagaanacgtcgatgtcaagtgtatactatttttcttttatgtttcagttgtacatagcttgtgtcttcttcatagatatggcatgcacgatggttcttaacactgtatccactcaaattccgtatgctggaaagtcatttatggtacaaaatagcattgcgcgtaacttgaatgtctcattttgatacctaccaaacacgacaaccctctcatcccataacttgcttaagtcttcaatcaagggattgagataaacatcgatgccatttcctaggtgtcttgggcccgatatcatcatagacaccatcatgtattttcgcttcatgcacaaccaaggaggcaagttgtaaattactaacaaaataggccacgaactgtgttgagtgcttaaactgtcacatntcattagtagcaagttcaagcctaagatttc

SEQ ID NO: 13487 - DNA, 448 bp, Glycine max
  unsure (1)..(448): unsure at all n locations
agcttttctttgtgggttgatgaactctgtcacgcagaatggcatgatcgctggctgacatattctcaattagctcagttgcctcttcaggagtcttcagctttatttttccccttgttgaagcatctagcagttgcttggtttatagtctcagcccatctataaacatattcaattgaattggctcagagaacccatggatgggattctttctcaataaaactctaaacctctccaacgcttcactcaaggactcgttagggaactgatgaaatgaagagattgcagccttcccttccgcattctttgactatgggaaatatttcttcagaaacttttctacaacttcttcccaggttttcagactgttacccttaaataagtagagccacctcttggcttctnctgccaaggaaaatgaaaactggctgagtctaatagcctcatc

SEQ ID NO: 13488 - DNA, 358 bp, Glycine max
  unsure (1)..(358): unsure at all n locations
accaattggtcactaaagttgacaaagtcaatggtgatttctccttatcgtaatttctctctcacaaaatgacaatttatctctgtgtctaatatgttcatggaagactagattggatgcaatgtgaagagtggtttgattatcacaaataagcttatggccatatgtttcttcaaattggagctgccggagaagttgtcatagccacgtaatttcacttacaactgctgccaaggcacaatattttgcttccgcactagatctaacaattgtattttgtttcttgcttctncagtaaagataagtacctccaataagaacacaaaaaccagaggtagatctcctgcttgatggtgat

SEQ ID NO: 13489 - DNA, 418 bp, Glycine max
  unsure (1)..(418): unsure at all n locations
agcttcatcaacaacatcgatttcataataaaatagcattggttcttaccaaaaaccgatgtctgttatcagaaaacaacatctatttttagtgaaaatcgatgttgttttattaccagcaacatcgattttttactaaaaaccaatgttgtcttcatatattaacatcggttttggtaaaaaccaatgttgatatgaagatatatgacttttttttataattcttactatataatattgattatttaaataatcgatgttgtaattttatgttaacatcggttttagaaaaccgatgttaaccgtattactttcaacgtcgatactttcaaaattggttgaataaccaattggaaagtccttaataaccgatgtaaaaacctattntctagtaatgtctcacccctggtctttcatg

SEQ ID NO: 13490 - DNA, 477 bp, Glycine max
  unsure (1)..(477): unsure at all n locations
tctcagcttatattgtaggcttcttcttgtgtaacttgtcaaaggtggcctcttatgaacaaagaggataggcttaaactccaactgtacctcacctcagaagtgcttgacagccaaatgctcttcctagtcattggtgagactcttgtagaaagcagaatactcctcctttgtgatctcctcaggctttgtcatctaaatggccttgtgcttgttcaccaatgagcattcatgtgacacttccttaatcttctttttattntgttctcccttgtccttctcttcatcaacatcctgcacctaagtacatgaaaaaattacttattgaagtaaaattgtaattaaaaaaataccaaaaaataaaaaaattacattctanagtacttttntagatgttattcgttatggttcaagtaataatcatgatgaaaatngatccatgtgtgtttgatttcttttatcagcaaatatgatatg

SEQ ID NO: 13491 - DNA, 328 bp, Glycine max
  unsure (1)..(328): unsure at all n locations
tgacaataactatgtactcggatgtccttcaaagttccgcaatatatgtagacgctccaaattgaaaatngaagctcctagcaaattcaaatggcaataaatttttactcggatgtccgcttgagtccggtactatatcgaaatactcgaaattgaaaacggaagctcgtagcagatgcagaccgcaataacatttaactcggatgttcgattgaatcccctaatatatcgagatgctcgaaattgataatagaagctctgagcaatttcgaactacaataactctatactcggatgtccgatagaggtccgtaatatattgagatgc

SEQ ID NO: 13492 - DNA, 435 bp, Glycine max
  unsure (1)..(435): unsure at all n locations
agcttgtaggaaattcaaacgataataactttttattcggatgtccgattgaatcgggtaatatatcgagacgctcaaaattgagactagaagctctgagcaaattgaaatgacaataactttatacacggatgtccggttgagtcccgtaatatatcgagacgctccaaattgaaaacggaaactcttagaaaattcaaacaacaataactntttactcggatgcccgacagagtgtcgtaatttatcgagagatgctccaaattgaacacaaaagctcgtatcaaattcaaacgacaataactttttactcggatatctgattgagtcccgtaatatatcgagacgctcaaaagttagatccgaagctctgagaaaattgaattgacaataactttatacacggatgtccagttgagtcctgtatatatggag

SEQ ID NO: 13493 - DNA, 388 bp, Glycine max
  unsure (1)..(388): unsure at all n locations
actaccctnggttcgctaacatggaanactttaaggccacagaacaaccaccagaaggtataaaattccacaagagataaaggttcttcggagaagccaccaagtatgttcgggattaccctattcttttttgtattggtcctaacaatttgttaagacgatgtgtaacaaagggagaacaaactagcatattttcacattgccacaactcaccatatggaggcaacttcaacggagaaagaacaactgcaaagatctttcaagccagattctattagcctaaattcttcaaagatgctcataaccatgcacgatcatgcgacaactgttaacgaactgacaacatatctagacgacatgaaatgccattacagaacatgcacgagat

SEQ ID NO: 13494 - DNA, 391 bp, Glycine max
tgcaagcttgatgccaacattggagaggttaatgaatcaacgagatgatgcgctccatgagaggttggatcaaatggagaacagagatcataatgattaagaaaggcggagaagagggaatgatggtgttcctagacaaaaccgaattgatggtattaaactcaacattcctccctttaaaggaaagaatgatccggaggcctacttggagtgggagatgaaaatagagcatgttttctcatgcaacaactatgaggaggaccaaaaggtgaagcttgccgccacagagttttccgactatgctcttgtgtggtggaacaagctacaaaaatagagagcaagaaatgaagagccaatggttgatacatgggcgaagatgaaaaggatcatg

SEQ ID NO: 13495 - DNA, 400 bp, Glycine max
  unsure (1)..(400): unsure at all n locations
tcatccgcaaactgaagcatgtatactgggaccttattctttcctaccaaaaagctgtgaaagaagtttgtagagactgcttccctcatcaaacctgataacccttcagcagccaaaacaaataaaaaaggggccaaaggatccccttgcctcannacctcttgaggcttaaactcctcagttggactaccatttacaaggatggatattgaagctgaagaaaggcagcctttaacccaaccaatccacctttcatggaaccccattctcctcaacatatagaaaataaatngccaggacacagagtcataagctntctcanagtccactntaagcactaaacacgaattcttttgcctctagcctcctcacaacctcacttcaatcagaactcatgtac

SEQ ID NO: 13496 - DNA, 451 bp, Glycine max
  unsure (1)..(451): unsure at all n locations
agcttaccaccataggaggccatggataagagcttggaggaagaaggagatgaatgaagggagaggaagagaagagcacaaaattttgtgttctaaaagagctctatctgaagtttcatttttaaatgatgaaaattgaaaaaatgcacacacatggcctctatttatagcctaagtgtcacacaaaattagagggaaatttgaatntctattcaaatttcacttgaatttgaaattgaatttgtggagccaaaatttcactaattatgattagtgaattttagctatggttaagcccactaatccaagatcaagtccaagattctccactaagtgtgcttaggtgtcatgaggcatgtaaagatgaaggacatgcacaaagtataactatatgatgtggcaatggggtgtagcaaacaaatgctcacctcccnctctaaaatttaattgg

SEQ ID NO: 13497 - DNA, 321 bp, Glycine max
  unsure (1)..(321): unsure at all n locations
tttctcatgtgcacccaaacccaatcttcgggttcaaagacaaccttctttctccctttgttggcttgtctagcatagcttttattnttcctctcaatttgatctttgactctctcatgaagcttcttcacatagtccgcctttgcttgaccttctttatgcttaaaaacataaacattatgcataggcaaaagatcaagaggagttagtgggttaaaaccataaacaacttcaaaaggagaacaattagtggtgctatgaacaactctattgtaagcaaattcaacatggggtaaacaagcttcccaagtttttaagttc

SEQ ID NO: 13498 - DNA, 336 bp, Glycine max
  unsure (1)..(336): unsure at all n locations
tatgtagatcaaccccctggatttgaaaactcagacnagactaatcatgattttagattaaaaaaggctntatatggctcaaagcaatatagatactactcttttcataaagagaaaattacatgatattttattggttcaaatttatgttgatgatattatttttggatctactaatgaattattgtgcatggaattctctcatgacatgcaaagtgagtttgaaatgttaatgatgggagaacttaatttctttcttggattacaaattaaacaaaccaagactnggaattttgtcaatcaatccaagtactgcaaagagttaattcacatatt

SEQ ID NO: 13499 - DNA, 363 bp, Glycine max
agcttatcaccacactccttcaaaccactggcctcaccaccaacaacttcagcttcgtgaatctcacttgcgactcccaatttggcgtcatctcgatcctcttccccgcaccgtactctccctctaatgccaccatcctcttcttcataaagaagcgtgatggcactagaaaaccactgagcgccactacgctgaactttctcctcatcggtagggacacatcgttggtggcgctaagctggttcttctgactcttcatgaaccaccccatcgtggaagaaaagatcctcgcagagctaacgttggtgcttacttccactcatggcggcgaccgacgacactggatggaggaggcaatggact

SEQ ID NO: 13500 - DNA, 437 bp, Glycine max
  unsure (1)..(437): unsure at all n locations
cttcattgcatccagccactntctattntcttcactntccatggcctctctaaagcactcaggttctccatcatctgttaggatcacatactcattaggagaatacctcttagaaggttgtctctccctattggaccccctgagttgaagttgagatggtttggtagcatcaccaagattttcatcttgtgacatgtcatgctcctcctcctcatcatcagaagaaacatctacctcgtctctaggttgttggacaccaacatcattctgagcatccatattcaaattctgaataggcggctgaactggttgaaaatcagccacatcgttgtcttccttgggtgtagacttctccaccttaccattgtcttcaatggtttggttttccatgaatttcacatcacgaattataacaagcttcttctcaacaggatcat

SEQ ID NO: 13501 - DNA, 397 bp, Glycine max
caccaccattaccaaagccagacgctcaataccatcaaaatcagcatgttcaatagccaatattcccgcatcagcaaagagctcctctggaaaattgtaaatcaactgtctgttaacaaaacagttgataccatgacctattatcttctgcaccttttctctcattttctctttctctgctgtttcaatttgagcaactctagccatagaatcaacacgaacacgtgcaccatatatcttcactttgtctgtgtccatggcagtgtttgccaccagtatctttgcattctctatccgcttgtgttgtccaataccaattttcttgtcaagaatgaatctgatcaaataattaaaacagaaagaaagcttactttctacccagagtaataaaatgata

SEQ ID NO: 13502 - DNA, 328 bp, Glycine max
  unsure (1)..(328): unsure at all n locations
ttggtttcttggggcctgatttggacttaaaataaaacttgtgtttcttttgtcttggcatcatcaagaccatcatacacatacattcacaaacatcgctatattgtcgtaacaacccattgtcttttgaaccatggatccctnccactcaagttttggtgttatgcattgtaaatcgcaacgtgtctcatcaatcggatgccctctctcacactaaacgaaaagtctccattagaagtcttgtttcatcgtccatcaaattatagtaaactaaaagcttttggttatctttggtttccttgggtcactccatatacaactaacaaac

SEQ ID NO: 13503 - DNA, 444 bp, Glycine max
  unsure (1)..(444): unsure at all n locations
gctgttagtgtgtgtntaaatgtctattatattataaaaattatgtaataatgtttctttgaagaaaattttatcagtgaaaataaaatattttgaatatgaattttgtagtatttttttaattagattaggttggtgttaatgatttattagtgtgttaataattcatgaacgtttcaactttcatttaaaaaaattagtagatcatatttatttgaagaaagtattttgagtatgaaatttattttaatatgaagttgtagtatttttttaattagattaggttcatttttttgtgttaaaaattgataagcgttcaagttgaaagtgttatttgatgatgttttgttgtttcttgtatcatatttaatttaatatatnntgtagtaatttgtaattacctattttcattttgaagttattattggtaagaattaatatttt

SEQ ID NO: 13504 - DNA, 432 bp, Glycine max
  unsure (1)..(432): unsure at all n locations
gtcactaaagntattaaatttttttcaattcaatttaatattttttaaataaaattaagataattcaaatcaagtttattataaatactaaacttccattaaaagacacaacaaacggcgacggataaatacagggtattttactaatctatataaattagaaactggccagtggattttttacaggacttctaattatggttgatgaaaagataatttattttaaatttaattaaaatgtattgatagtataattttttttacaatgaaatctaattatgaattatcatatgataaaattattaattttatatctctggttgcttagtgtggaggtaaaataaataatctgtcaatggttgtcattgagataactaaagtacgaatttattaacgggcaattaagtatctatataaatactccggtatctc

SEQ ID NO: 13505 - DNA, 448 bp, Glycine max
  unsure (1)..(448): unsure at all n locations
agctaggtatagctagtattctttgtcctatgtatacgtatcaaactattcctggctctaacacaaattagaagatttattngtttgatcgcataatgactaacattcatcacttaattgtgcattagagcatatttatgcagtagaatgcttctattgatggtaattgaagaatttcagagtttgactntatttattcttcataggattcgatagattctagaaaaatgtctatgcaaaatagatctcagacacaaaatattaaataaaatcttaaatgtcatttttaatggtatattagaatatgatttgattttgctatcgtctaaaacattatacacagatttcaccaatatatgttatgatacacataagaccgaacttttaacatttatatttgtttatatctaatcacaataattagagatctttaattatcttaagatac

SEQ ID NO: 13506 - DNA, 308 bp, Glycine max
agcttcttaacgcttattcagggtacaactaattatgatgcaccctccatacgaggaataaactaccttcatcactgaagacgccaacttctgttatagggtcatgcctttcggactcaaaatgatggagctacatactagaggctcatggaccaggtctttaaacatcagataggccagaacgttaaggtatatgtggacgacatggttatcaagtcttatagtgtggcccaacatgtagcagacttgaaggaagtatttggagaaacctcgaaatatgacatatgcctcaaccctgaacatgcacc

SEQ ID NO: 13507 - DNA, 425 bp, Glycine max
  unsure (1)..(425): unsure at all n locations
agcttacttcatctagctnttctctcctattatgaattttcttctgtttttcagcagtcttttttattgaaaattctgttgcttacctgaattttgttatataggggtctatgcaggcgatccttcaaaattaagtatgaaagcagcattcgggaaagtttggaagctggaaaaaaatggtggtagcattattggtggaactttcaaagcaatacaagagagaaatggagcttcaaaaccacctcgagatccgtaataatatatttgctctggatttttgccataatttattgagtatttcactaattcaattaatcatgtaggcgtctgccaaaaccaaaaggtcagactgttggatctttccggaagggacttaccatgttgcctgatgcaatttctggcaggtactacatgtngtctaatac

SEQ ID NO: 13508 - DNA, 403 bp, Glycine max
  unsure (1)..(403): unsure at all n locations
tctacaaagcatacggctntctggatgtagatgatgttatctatacagatggatcttatatatctatatatctatagatagatatatagatatagatatatagatatagatcatacaatgaagtaccgcacgagtgggtatataggaatccaaatctgccgaatcactcatgttatgatcttctacatcctaggtcttcccgttccttcatctggcttatgttcttcatgtagcattcagactgaatgactctatgaaattacgtcgctacttccacatggtacgggtaacgtatgagacatctctatttttcccggggggaatccttagaattaccacagcttagctttcaattcgcctctgaccatcaaatgaaatgtgaataacccgtcctcccctcttt

SEQ ID NO: 13509 - DNA, 451 bp, Glycine max
  unsure (1)..(451): unsure at all n locations
agcttctgataaaaaccgagcagttctaataagatttgtaatatgaatacccttacgctttgcagatatataaggtgacattttaggattccattttctagtaccgtggccaaaatgaactcctgcttccatcatctcttccaagattatgttccaatatctttttgtcatttatatttatccccacacttttctttcatttcaaaatcgaaattctataaattttttgaaatgaaagaaagagacccggtatactgaaatagaaataagtgttccaaaggaaccttctcttctaccgaagaatggcctttgataaatgatcgggccattttttctatttaatatttaatatgattattctctctattatctttcttttattatacaaaataaaatgaccgaagatgaatccgctcttaagaatcattattttanggaatattaaatacta

SEQ ID NO: 13510 - DNA, 346 bp, Glycine max
  unsure (1)..(346): unsure at all n locations
ctttattgaacgcataanatataatattgattatgtatgggattaatcttctttgtcatctgagaagatcaaacgtcgatagttgatcagaaatatatcataaaagataaaagaactaagtgtatatgtaaatataatatatagaagttcacacatatataaactgaagcaaaaatatgttaatgcatcatataaaatataggcaagtgtacatacgaatagatcttttgtcttgtgtagataggcacaatagtattaatgaatcgataattgcaaaatcaggttatgaaagatctgacaaaaaacagagttttaaatatatatgcgaacataagatatagaaact

SEQ ID NO: 13511 - DNA, 258 bp, Glycine max
gcttgctaacatttgtgttattacgaactttccttatctttatatggaaactcgtcatgaacatcttgagaagttggtatctgatccactggaccagacccatcaatctgatgaagcaactatttctcaacttcagggtgtgcagcacccacatagacaacagaacacaaagtaaaggacgaggttgctgagacatcaccgaagcgctcgcaagtaacaccacttatggactcatgtgcgaacacattctctgacaca

SEQ ID NO: 13512 - DNA, 505 bp, Glycine max
  unsure (1)..(505): unsure at all n locations
ctttaatgcggtttcagttcanatgaactacaaagattagccattatttaggcatgtaacatgatataatattcctaggtggttttccttttgactagtgtgactaggggcatcaagaagattgttttaactatattatgggcttaagaggtttatttatctaacttatcttcaccttcaacacaacacaaacatattagcaacatcaattnttattcctgagtgctgttaattntaaggtgtatactgatgcgagacctgagaccagaaaggcataatgtagatgggagtttgatgtcatacccttacaatgaaattgctgataaataaataagttggcagatgtttgtcaaaacagccacaaaaggtggcacatgccaccttgctactgacaaatattcaaatatatatgtaacatggtgaggaagatgctggatggtgaatctctctccattgtagtggaggtgtcgcatcactattcaaccattcattcattcattcacca

SEQ ID NO: 13513 - DNA, 470 bp, Glycine max
  unsure (1)..(470): unsure at all n locations
tcatgctgaagcatgtatggcanaacttcattagtgttgttcaacacatacaagtgagcttgtaacanatcttctacacttggagtgataacatgcagtcctcttgaacccttaccacccactctatcgtcatggaaagactcaggaaggccagcaggttttgccttttcaatgtagtataaacaaaattcaatggcttcttttgcaatgtacctttcaacaatagatgcttccggacgatgtagattcttcgtatacccttttaagatcttcatgtatcgctcaaccgggtacatccagcgcagataaacaagaccacaacatttgatttctctaactaggtgaacaattaagtgaaccatgatgtcaaagaaagcaggaggaaaatacatccncaactgacacagtataattgcagtctcattntccaggtcatcaaacttgacaggatcaaggactntgctacatat

SEQ ID NO: 13514 - DNA, 432 bp, Glycine max
  unsure (1)..(432): unsure at all n locations
agcttcttagtttcagatgatgcagatgggtttgtatctacctcatgcactcctctaatgactatggcatcatttttggcgctaaactgctgggagttggaggccatcttctcaattaaatttatggcttcagcaggagtcatgtctccaagggctccaccactggcagcatctatcatacttctctccatattactgagtccttcataaaaatattggagaagaagctgttctgaaatctgatggtggnggcaactgacacatagtttcttaaatctctcccagtactcatacaggctctctccactgagttgtctaatacctgagatatccttcctgatggctgtggtcctggaagcagggaaaattttttctaagaatactctcttaaggtcatcccagctcgtgatggaccttggagcaagggaatac

SEQ ID NO: 13515 - DNA, 372 bp, Glycine max
agcttcaacctagaggagacgaaccattccaagtgttggagaagatcaacgacaatgcctacaagattgacttgcctagtgagtataatgtaagtgccactttcaatgtgtctgatctatctctttttgatgcagatggaggagccttggatttgaggacaaatccttttcaaggagggagtgatgaagacataaccaagggcaaggaccatgaagcacttgaaggtcccatgaccagaggcagacttaaacaagcccaacacatcatagagacaaggctggtcatttgtatagctgtcattgatgatgattgaaggcccaagtggagaaagatgaaggcccagaggcagaggcactaccaagactactaat

SEQ ID NO: 13516 - DNA, 390 bp, Glycine max
  unsure (1)..(390): unsure at all n locations
agctntgagcanattcaaacgacaatatctnctgtttcggatgtgcgagtgggtcccgtaatatatctagacgctcgagattgagaactgaagctctgagaaaaatcatacgacaataaatctttactcggatgtgcgattgagttccgtaatatatcgagacgctcgcaatggaaaacagaatctctgatgagattcaaacgagaataacatttatctcggatgttcgattgtgacccgtaatatatcgagaggctcgaaattgaaaactgaagctctgagaccatgaaacgacactagttcttaactgggatgtccgaatgagacccgtagtatatcgagacgctcgtaattgaaaacagaagctctgagctatctcaagcgacaata

SEQ ID NO: 13517 - DNA, 473 bp, Glycine max
  unsure (1)..(473): unsure at all n locations
agcttaggaagtatcaattgaggttaaaccccgctaagtgcaccttcggngtcaaatcagggaaattgctaggtttcatcgtgagccagaaagggatagaggtgaaccccgtatcgagaggcaggtctgaggtttcctgggacgtttgaattatattgccagattcatatcacagctcaccgctatttgtgagccgttgttcaaactcttacataaaaaccaaaccgtccgctgaaacgatgattgtcaagaggcattcggaaggatcaaaaagtgtctcataaaccctctcgtgcttatgccgccggtacccggaaggcctctcatcttgtatatgaacgatttggacgagtcgatgggatgtatgctggagcaacatgacgagtccgggaggagagagcgcgctgtctactacttgagtaagaagttcacggcctgtgaaatgaattactcccagctcgaaagaaacgtgt

SEQ ID NO: 13518 - DNA, 415 bp, Glycine max
  unsure (1)..(415): unsure at all n locations
tgatggagggagttgagatgatagaccttggtttaatgaccttctttcttggcatggagatcaaacaaggagaacatgaagtcttcatttgtcaaaagaagtatgccaacgagattttaaagaagtttaaacttgaagaatgcaaagaaatgagcactccaatgaatcaaaaggaaaaactntgcaaggaagatggaacgaagaagatagatcaagcatattttagaagcatgactgggtatttaatgtatcttacaacaactcgacctgatattttaaatgttgtaagcattttatctcaatttatgaattgtgcaagtgaaatgcatctcaaggctgcaaaaagggtgataagatatgtcaaaggcacttagcaatttggcatcaagttcaagagaactgaagagttcaagct

SEQ ID NO: 13519 - DNA, 409 bp, Glycine max
  unsure (1)..(409): unsure at all n locations
gatatttaagatggatgatcatgacagtctctagagtcttagaaagggtatattaaataggaagggaattccaattgaagtagcaaaaagtttggccaagaaatttaagttaaaaagtctttttcaacaaatttactctctggtaatcgattaccagtggccaaaactgatttacaacaactattaaaatttgaattcaaaatttgcactgtgtaatcgattacacatatatggtaatcgattaccagcagtttctgaacgttttaattcaaattntaaagcttgtaatcgattacacaaatactgtaatcgattaccagagcagattttcagaaaatattctcaatagtcacatctttntatttggttcttgaatggctatcacaggcctatatatatgtgacttgag

SEQ ID NO: 13520 - DNA, 502 bp, Glycine max
  unsure (1)..(502): unsure at all n locations
ttgctcanagcttctgttctgaatttcgagcatctccatatactacgggaaacaatcggacatccgagtaaaaaggttttgttgtttgaattttctaagaggttatgatttcaattttgagcgtctcgatatattacgagactcaatcaggcatccgagtaaaaagttattgtcgttagatttttcttagagcttctatttccgattatgagcgtctcgatatattacgagattcattcggacatccgagtaaaaagttattgtcgtttgattntgctcaaagcttctgttatgaatttcgagtgtctcgatatactacgggacacaatcggacatccgagtaaaaagttattgacattngaagttgctcantagcattcgtgtcaattacgagcgtctagatatattanaggattcattcggacatccgagtaaaaagttattatctgtttatttngctcagagcttctggtttcaatttcgagcatctcgatatattaca

SEQ ID NO: 13521 - DNA, 482 bp, Glycine max
  unsure (1)..(482): unsure at all n locations
agctttanaagaatggctaagaatttgttaaaacataagcacttagactatgaaggaaagctggagttgctgcacatgatgtccaacgttatgtcaaagaataagatcgggctgcacaatgcacaaggcaagataaagtgtcaaatgaagaattgaagctgcaggattcacgatgccggatacaatgtccaggacatcctgcctgaaaatactggaattgctaaaagcattgaagctgcaggatccacgatgtcggatacaatgtccaggacatcctgcccgaaaatactggagttgctaaaagcattgaagttgcaggatccacgatgtcggatacgatgtccaggacatcttgcccgaaaatactggacatataaatctgttatatctttaacagattattgtgcagntagcaagagattagatgatctatctttaggaacgaattanaagataattaaagttcgaattacaaactagaa

SEQ ID NO: 13522 - DNA, 415 bp, Glycine max
  unsure (1)..(415): unsure at all n locations
ttacggacactataaaactaagctggtatgcatgattggatgtttatgatcctcanagcttggatgttgngaaacataaacttcctcttcaacgtatccatttaggaaagaacttttgacatccatttggtataacttgaaacccataacacaagcataagcaagtagtaatcttacggcctctagccttgctattggtgcataggtttcaccanagtctataccctatcattggttatagcccttggctactagccttgcctcattcctaagtatcanaacatgttcatccaattaattcttgaacacccatttagtgccaatgatgttcatgacnttagaataaggtaccaattcccatacgtcaattcttttaaatggttcaactcctcatgcatggacattattcaaaact

SEQ ID NO: 13523 - DNA, 437 bp, Glycine max
tgcttggttggcgaaacagacagccattgcaatttaatatggcgattgggatgagtcatatgcgaaactttcgtcgtggctaacacacatgcaaaatcattctcctggatcatattttcaagtactacatgacgattttatcgttgggaatacggttagtcgcgaacaccgtcagtttcatagagttttttggactcttgggcaatgtaaagaagcttccaagtactggaagccaatcatacaagttgacggcacacatttgtacggcaaataccgtgggaccctcttaatggccacatcacaagatggaaatggtggtgtccttcctctagcattcgcggtggttgaaggtgagacgttgacagcgtggtcatgtgttttggacacttgcgtgaccacaaacccttgcacaggtacaaccctggatggaggaatca

SEQ ID NO: 13524 - DNA, 438 bp, Glycine max
  unsure (1)..(438): unsure at all n locations
atcattagtcaaaactaacattcaaggacccatgatnaattgggtaccaaaatcaaaatatgattatatgaatgaaggactccttgaagaaaagttggtacattgatagcggttgctccaaacatatgacgggagatgcatcaaagtttattcatatttctcaaaaaaaatagtggacatgtgacctatggagacaacaacaaaggtaaaattcttggagttggaaaaataggtacaaatccttctacctccatagaaaatgttttacttgttgatggccttaagcatagtttattaaatgttcttcaattatgtgataaaggctttttggtatcttttgattctcataattgcttttgatgagactaactctnttatgccaagaaatggtactactctattaattcattataaatggctgaatgttnttcttctctc

SEQ ID NO: 13525 - DNA, 462 bp, Glycine max
  unsure (1)..(462): unsure at all n locations
agcttcaagctagttntatccacatagtggatatcttcccaaagacaaacttgggagtttactcaataatcatccaaaaacactttttccaataatttagttttctcattgaatttcaatgcatttggttatatgaattaataaaggagaataaatgaaataagaaaaaaattattgtttgatttgtaaatgaaactgaaatgaaataaatgtttctaataagttttaatattgttttaagcaaaagtgtgggcaacaaaaggatatactttntagaataaaaaatacattnttttaatttgtcagtatatctttatgagcatttanattgcaatattttgttctttaaggatatctaagttatttctattaaaaaaggatatctaagntatttaatgaacatacctcttctttttccttattcaactaaataggaagaagacaaaattactcttccttttt

SEQ ID NO: 13526 - DNA, 416 bp, Glycine max
  unsure (1)..(416): unsure at all n locations
ngaaggagtttcatgcatcagggaacaatntcactntataagtgggtcccaattggcttcctaattntcagcttacctctttggatgtgagatcgtggcagtaaggtgccaattttccatcatggattcagtcacaaaacaaacttcaagatgttggactgtctaacacggngattttagattctattcccatacggatgtgagaagcactntctcaggttttgtatttaaacctctcttacaatcatatccatggtgagcttgggactacattaaagaatccattatctatccatactattgatctaagctcaaatcacttatgtggtaaattatcctatctttcaagtgatgtgtttcggttagatctttcaagcaattcattctctgaatccatgagattagaatttctgaat

SEQ ID NO: 13527 - DNA, 481 bp, Glycine max
  unsure (1)..(481): unsure at all n locations
gtaatcttganattcaagacaacactctgatttctgaggtttttgngacaaaaatggtcattgaccagtccattttccatgacttaactaaattaaccagtgacggtgtaccatttgaaggtacactgaatgacgactagaaatttgatttctctgcccatgatgcccaccagttggtttgcaccaacaatgcggatatgaccggacgtcttcttaccgggtcattggcttttgaaagccgcatccttcactatttaattatgcgtattctgcttccacggtcttccaaccttgcccaggtttctgaggaagatctaattatcatgtgggccttccatacagggcgtcaactcgactgggcacacttagtcagatatcgcatgcataaggcattgcgattaaatgctccactaccatatccacagcttggtactctatntcttcgtcattttgaaattcttcttgattctgaatcttatat

SEQ ID NO: 13528 - DNA, 410 bp, Glycine max
  unsure (1)..(410): unsure at all n locations
agcttaggctgagttctacttaccacccacagactaacgattagaccaagcgcactatcaaatccttagaggacctcttgagagcctgtgtcttagagcagcggngtagttgggatggtttcttacccttgatagagtttacatataacaatagtttttactccagtataggtatggcaccttacgaggcgttgtatggtagaagatgtangacacctctatgttgggtagatctaggtgagagcattgccttatgacctgaggtggttcagcagaacactgaanaggtcaagttgatccaatagaggatgagagtagcccaaagtaggtagaagagctaccatgtaggaatagaaagggaccttgaattgttgaggtgatcatgtattcctgagagtcactccatggac

SEQ ID NO: 13529 - DNA, 450 bp, Glycine max
agtcttgatgcaacatttggagaggttaatgaaacaacgagatgatgcgctccatgagagggtggatcaaatggagaatagagatcataatgaagaagaaaggaggagaagagggaatgatggtgttcctagacaaaaccgaattgatggtattaaactcaacattcctccatttaaaggaaagaatgatccggaggcctacttggagtgggagatgaaaatagaccatgttttctcatgcaacaactatgaggaggaccagaaggtgaagcttgccgccacggagttttccgactatgctcttgtgtggtggaacaagctacaaaaggagagagcaagatatgaagagccaatggttgatacatggacggagatgaaaagatcatgaggaagcggtatgtgccggctatgtactcaagggacttgaaattcaagctccaaaaactaacc

SEQ ID NO: 13530 - DNA, 467 bp, Glycine max
gctgatgaaactgatgcttggtaacttggaacctaactgtccttgaatcacaaatctatacctgatgcaaggtttgtggtttgtgctcctctgctgaccaccatacagacctttgcccttccatgcagcaacctggagcgattgagcagcctgaagcttatgctgcaaatatttacaatagacctcctcaacctcagcagcaaaatcaaccacagcagataaattatgacctctccagcaacagatacaaccctggatggaggaatcaccctaacctcagatggtccagccctcagcaacaacaacagcagcctgctccttccttccaaaatgctgctggcccaagcagaccatacattcctccaccaatccaacaacagcaacaaccccagaaacaaccaacaggtgaggcccctccacaaccttccctcgaagaacttgtgaggcaaatgactatgcagaacatg

SEQ ID NO: 13531 - DNA, 431 bp, Glycine max
  unsure (1)..(431): unsure at all n locations
agcttaatgaccctcaatctttcaatgattatatatccatctcccttatagggtgtgtctataaaatcgtggctaaagttctggccaagaggctggcccttgtgttacctcatcttatagatgaaagacaaacggattttatgaaggggaggcacattcttcatggtgttttgattgccaatgaggttatagctgaggctaaggctagaaataaaccttgcatggtcttcaaagaggattttgaaaaggcgtatgattcggtttcttgtggttttcttgactacatgttgatgaggatgggctnttgtgaaagatggaggaaatggattaatggtttcctgtccactgcaaccatatccattttaattaatggaagtctgtttttggagatgccactcaacataatggtagaaccttataatgtatttgag

SEQ ID NO: 13532 - DNA, 424 bp, Glycine max
actcaagctgaggaaactagatgccttgggtaacctagtaacccaactggccatgaataaaaaatatgcacttgtcgctagactctgtggtttatgctcctctgccgaccaccacacagacctttgcccttctgtgcaacaatctgaagcaattgaacagcctgaagcttatgctgcaaacatctacaatagacctccttaacctcaacagcaaaatcagccattacagaacaattatgacctctccagcaacaggtacaatcccgggtggaggaatcatcccaaccttagatggtcgaatccttcacaacagcagcaacaacaacaacaaccttattttcagaatgttgctggcccaagtagaccatacgttcttccaccaatccagtagcaacaacaacaacagccctagaaacaacaaaca

SEQ ID NO: 13533 - DNA, 502 bp, Glycine max
  unsure (1)..(502): unsure at all n locations
ngcanaccgacttcaactccaatggtttctaatctcaaactcttggcacaaganagccttcctcatctaatctcaaactcactacttttggtgactcaaattaggcctcttgctcagattcttgaaaatcagtcattggattctcaatattctttggcccttctcttatttcatggagatcaaagaagaaatctactatatgctgatcctccttcgaggaagattacaaggctctcgcatcaatgatatatgaaacataatggatactttacctccttgaagatctacataacctcggccaatccggtgtctttatactgttgagtctatggatcaattagaacattcgtagtacgcctttacatccatcattgtctcactctttcctttcanagttggacatgtatgatatatatagctcagcttgcaggagggtgtatctgatgatacatanaatagtactaaaactcaattntaatagatatgtcaataatcaacaata

SEQ ID NO: 13534 - DNA, 422 bp, Glycine max
tatagatactcaagcttcaacatcagaccacttccagtgtgctggaactacttcacatggacttgatggggcctatgcaagttgaaagccttggaggacagaggtatgcctatgttgttgtggatgatttctccagatttacctgagtcaactgtatcagagagaaatcagacacctttgaagtgttcaaggagttgagtctaagacttcagagacataaagactgtgtcatctagagaatcatgagtgaccatggcatacagtttgaaaacagcaagtctactgaattctgcacatctgaaggcatcactcatgagttctctcgagtcattacaccacaacaatactggttagttgaaaggaacaacatgactgtgcgagatgctgctagggtcatgcttcatgccacagaacttccctat

SEQ ID NO: 13535 - DNA, 413 bp, Glycine max
  unsure (1)..(413): unsure at all n locations
agcttgagcnattcaaacgacataacttttactctatgttcgattgagttcagtaatatatcgagatactagaanatgaaaacggaaactcgtagaaagtgcataccgcaatcacttttaactcggatgtccgattgagtctcgtaatatatcaagacgttcgtaatggacaacagaagctcaatgaaaattctaacgatattaactctttcctcgaaggtacgattgagtaccgtcatatatcgagatgctacaaattgagaatagaagctcctagcaaattcaaacgacgataactttttacttggatgtccgattgaacacggtaatatatcgagacactcgcaaatgagatctgaagctctgagataattcacacaacaataactgtatacacggatgtccgattgagt

SEQ ID NO: 13536 - DNA, 499 bp, Glycine max
  unsure (1)..(499): unsure at all n locations
aagttcctcagctgacttgagtagattgagacatattcttccacccaagacttgatatcatcccatatctctagcccatcagaagcataaggatagtcctcgatcaaaagtcaaactccatggggagcagatggatccttaacagcaactcctctgaattaaaagcacccaaataacattgattagcataagagttatatcaagcctgaagccttttttcttcttatgtcattgatgactttgtatatcatgcattcatgtgccactactctgtcaaagccatgaactgtcaaagccatcatttatgatgaaacagtctttgtctttccaaaatctgaaatacgagccacttgagcatctgctaaacgatatttcgtgccaccaatagtaacctcagatgatacagtctgcacatccaacacaatataatccaccaattgtctactagtaagtaatgacttgaaggatgctctncagtactgatcaacatctatgaaac

SEQ ID NO: 13537 - DNA, 392 bp, Glycine max
gtttcacgaatgtcatgtgctcatgcaacaattgttaaccgtggctatacgagacatcttgccaaacaaagtcaggttcacgataactcgcccgtgctttttcttccatgctatatgtagcaaagtgattgatccagtaatgtttgatgagttggaaaatgaggccgcaattatactgtgccagttggagatgtattttccccctgctttctttgacatcatgattcacttgattgtgcatctggtcagagaaatcaaatgttgtggtcctatttatctatggtggatgtacccggttgagcgatacatgaagatcttaaaagggtatacaaagaatctatatcgtccggaagcatctattgttgagaggtacattgcagaagaagccattg

SEQ ID NO: 13538 - DNA, 447 bp, Glycine max
  unsure (1)..(447): unsure at all n locations
taccctgatgaggatgtcccatatgttcttatnactggactaatccatttgcttccagagtttcatggccttgcaggtgaagacccacacaaacatctgaaagaattccatattgtttgctccaccatgaaacccccagatgtccaggaggatcacatatttttgaaggcctttcctcattctctatagggagtggctaaggactggctatattactctactccatggtccatcacgagctgggatgacctcaagagagtattcttatataaaaatttccctgcttccaggaccacgaccatcagaaaggatatttcaggtattagacaattcaatggagagagcctatatgaatactgggagagatttaaaaagttatgtgtcatttgcccacaccaccaaatatcagagcagcttcttctgcaaatattttatgaacgactcagt

SEQ ID NO: 13539 - DNA, 365 bp, Glycine max
  unsure (1)..(365): unsure at all n locations
agcttaaaccaagtagntatctggtttttttaattgnggnngaagcctgaaggcatccattatccctaactatcctggatggttgcaaatactgtcctaagtactacagaaacaagaagactgacagtgtaacgaagtaccacgtctctcaagagaaataacaagcgttgaagactaaactataaataaaaacattatttcattgtacaaagcatacctttcttggccttttggctaagatcaagtgtagtatctgttcttatcagtttaatatttgatatgtggaccattggttcacacgatattaaattaattttttgagggggagggtccattatagtagctggctactggggctctcacgt

SEQ ID NO: 13540 - DNA, 438 bp, Glycine max
  unsure (1)..(438): unsure at all n locations
gcttgataacaaaatcagcctcctccatccttgtattattgtatacatgttgggcgagcgttgtgttacccaccccactcatgcccacaatagaaattattgatagctgcttatagttgccagtttcatatgtgagccaattaatgatcatttctttgccatcatctctgacataaataacactttcaaccaccaaagaagttgatggcattttctgtgacacttgactgcttgatcctactcttaacatcggtaccttntaatatacagcttttcaaagtgggcaatctttccccagtcttcgccttctggtctctggcaacgctgtttgagcaatggacaacccgaaattccaagagttcaaatggaattgggcacaccctcctctggtaagcattggaggctgcggcagttttcaagcctcaattccttgagaga

SEQ ID NO: 13541 - DNA, 455 bp, Glycine max
  unsure (1)..(455): unsure at all n locations
gacacccgaacttcacaagccatctatatatatctttgaatgaagaataagtccaaacctatatagatgatcaacttgaanagggagatgaaatctcaccagcactcaccaaagccatcgaagattctcatgtatatattctaattttctcagagaacgatgcttcctcaaaatggtgcttgggtgaactcatcaagattatggaatgcaagaatgaaaaaggacaaatggtaataccagttttctacaacgtagattcatcccatgtgaggaagcagacagggagctgtgagcaagcctttgaaaaacatgagggagaacctatgtgcaagaaatggaaagctgttctcactgaagcattcaatttagctgggtggaactctcgaacttataggtaagataataaaatggaatgagtgattaaaatttctgaaagaaaaaatgagaaagacaat

SEQ ID NO: 13542 - DNA, 445 bp, Glycine max
  unsure (1)..(445): unsure at all n locations
gcaagctngagtgaactntgaataatatgaaaacttttatctttctctacgatctcacttttaatgttgtgatatgcctacttatacgtaactgtacattttatttctagtaagcaattatgtatttatcacttaggtagcttgattagatattggcaaatatgttattaatttcgtttgaactttgtagtctattcactgtaatcagtgttatgtatgttatatttcatgaaataatgtatgtattttacttctagactctgttgacatcatttatttggtatgggattttataataatattaaataatggtgtcttttatgttcagatgtctggtgagnttccatgtgctacttctgatgctcaatctatgcaaactacatctataggtcaatccgaaaaggttcactcactttcatatgctgatccacagcaaccaggtatt

SEQ ID NO: 13543 - DNA, 434 bp, Glycine max
  unsure (1)..(434): unsure at all n locations
tcttcttcttcattatgcgacgatgaagcatgttcttctccggcgtggacacccacacctcattctctgatatcgggccactgacatgggctgcggngggtccaaggtggaggacttccccgtggtggttctgtgcagagagcgaaaggcgttcctcaaagccgcatcagagcaacgctacgctctcgccgctgcacacgtggcgtatttccattcgctgagtgaaattggcgacgcccttcacaagttcgccgaacaagacctcaccaccaccaccggttcctcctctccggttctcacattaccctcggaaaccaaaagcatcaacaataacaaactctcatcctcttccccttctatagcatctaatgaaaaaaaaactatngaaaacaaaatgaatggcttaattcactagtcagcctatagttgttcat

SEQ ID NO: 13544 - DNA, 450 bp, Glycine max
  unsure (1)..(450): unsure at all n locations
catgcacaaagtgccagtgagttcgacttatcgtgtgtcacaatggccagagaagtggccagcaagactaaccaacataccttattggttgacaaattctcaagttggagtttatggaaaacctgcccctgaagattttactgctgattatggacactggaaacgtatagtgtccaagtcttatcttaatgggataggaattaattggtccaatatgcggaatgtcatggatatgagatcagtctatggagggtgagtgaaatttgttgcttcccatgttactctgaattatattaaccggccattntgacatacttcactttgtttttgggctacaggtttgctgctgccttgaaggatatgaatatttgggtcatgaatgtggtttcagtaaattccgcagacacactttctcttatttatgagcgaggtctctttggcatgtatcat

SEQ ID NO: 13545 - DNA, 483 bp, Glycine max
  unsure (1)..(483): unsure at all n locations
agcttgcttgagaagctagagggagggttactctcacccctccaatagctaagctcacttacatgccaaaatacatgaaaatacaaaaaaattctatactacaaagactactcaaaataccctgaaatacaaggctaaaaccctataccagtagagtacccttaacttgtacccttaatttgtagggtaccctacaaacctaaaatggccaaaatacaaggcccaaaagaaggaaaacatattctaatatttacaaagtggactcatacttagcctatgggctcaaaatttaccctaaagctcatgagaatcctagggccttctcctgcatctctagcccaatcttcttggagtcttctatccaatgcccttggggggtaggattgcatcacataacctctatggagacnagatntggaactttgcatatctcctctaagcgtctaagttggtcgacatctattatattagactgattagcat

SEQ ID NO: 13546 - DNA, 435 bp, Glycine max
actattatactcagcttaacattatactctgagcgtctcgatatattacgggactctatctgacatccgagtaaaaagttatttggcgttgaattggctcataggctcaaaattcaatttcgagcgtctcgatatatttcgggactcaatcagacatccgagtaaagagttattgtcgtttgagttggctcacaggttcaacattcaattgcgagcgtcccgatatattacgtcactgaatcggacatccgagtaaaaagttatagtctgttgaatttgctctgagcttcaacattcaatttcgagcgtctcgatatattacgggactcaatcagacatccgagaaataagttattgtcgtttgaatcgtgtcataggttcaacacttcaattcgagcgtctcgatttatgactggactcaatcagacatccgag

SEQ ID NO: 13547 - DNA, 281 bp, Glycine max
  unsure (1)..(281): unsure at all n locations
agctntgagccaattctaacgaataataacttttactcggatgtccgattgagtctcgtaatatatcgacacgctcgaaattgaatgttgaagctctaagcctattcaaacaacaataacgttttactcggatgtccgattcagtgacgtaatatatcgggacgctcgaaattgaaagtggaacctctgagccaactcaaacgacaataactttttacttggatgtctgatagagtgccgtaatatatcaagacgctcgaaattgaaagaggaacctcttt

SEQ ID NO: 13548 - DNA, 488 bp, Glycine max
  unsure (1)..(488): unsure at all n locations
nngacattaaatntccctctaatattaaaagccaataaataattaaattagccaaaaattaaaanaattaaattttttcttaatatacatttgattaaatattaaatttccttttaataattgaaaacacttaaaatatctttaaatgataaaatgctagtcaattattctaaaataaaaattattaaattaaattaattntaatcttatccaatattatattttttactaaacacttttcattcattcatgaactaatctactatccaaaattattaaatagcattattcaatttaatcaattcattaattaatcatgatactataagtgagacaattttttatttaaaaataattataattntttaggtatgacattaaataattaataattaanaaatgattcaagactaanaggattcattacaatattcanaatagtccatcgaatcttccatgacannatagtcaatgactaactcaatatc

SEQ ID NO: 13549 - DNA, 440 bp, Glycine max
  unsure (1)..(440): unsure at all n locations
ctccaacacttaagatacttagctcgcacttccttagccaatcttatgtcggctaaacggacttcatacttgacttgattgttcatcgtcccaaacttgaaccttagggattgctctacgattatttcatttgggctttctatgatgacaccagtcctactccctttttcattggatgaacccatctgcatacaaattccaccactcggattgtagctctgtagttgttgtcaattcgacgatgaagtctgctaagcattgagccttcgttagatcccttggtttgtacttgatcccaaactcgaacaactagaccgactaacatatcattcggtttgcaagttctggtttcatcatgactgttaagatatggtggttggcttaaactatgatttgatgactntggaagtatggtcttagtctcctagcaactgtgacta

SEQ ID NO: 13550 - DNA, 391 bp, Glycine max
  unsure (1)..(391): unsure at all n locations
tccttaatcacctcattaaggactagaacaccatgtatgatgtgtctgttttttatgaaagttgtctgcctctcatcaataagaccagatatcacttgtctcaatctatttgctaataacttagctatcaccttgtacatacatccaatcaaggagatgggtctgtagtcatcaaatgactggggatgtttaattntgggaatgagagctatgaaggaagcattactgcctctagggaaactgccatgtacatggaattcatcaacaaatcttctgaagtcagctntcagcatatcccanaattctntaatgaatttgaagttgaaaccatcaggtccaggacatttgtccccatcacaactccatactgcttctttgatctccaaatctg

SEQ ID NO: 13551 - DNA, 413 bp, Glycine max
  unsure (1)..(413): unsure at all n locations
ttttttcaattttgcttcaatattccttcaaagcactagaaatcttcttcttttaacttctgctaataaaaaactgcaaagatattaatntctttattatttcattaaanacaacaatgaagtaaagaacttgcaatcattcttagccaaaatngactatcaaattaactcaaatntcgtagttatcattgtgttatacagaaggaaaacacatcaaactcaacgttaaatattcaattntatagatatagaattctgtgttgatcaaatggtgatcgatcttcccttttgtttaactatatgtataaaaaaataatttatatattaaattatatgactccctaactataatctacttntgaatgggaaaaaaatatgaaatactatccactaactcactaccctttcatcaa

SEQ ID NO: 13552 - DNA, 388 bp, Glycine max
  unsure (1)..(388): unsure at all n locations
tatacttaacagaaatacatataacattacataataaccacatatcgcgagagctcgatacaatntatacaagttttatacacaaaagttagtcattttcaccgactaacacctggctagcccagaaaactcctaatcttaataacagaattaggactctcccactcaagaatggcttctatcttagagggatctacaactatacccncttgagatatcacatgtcctagganactaactntctctaaccaaanatcacactttggacacctataaataaagttgtcgtgtcctaaaggtatgcagcataatcctcaagtgttcttcatggtcctctctagtctgggagtatactaaaatatcatctatgaatactaccacacaacta

SEQ ID NO: 13553 - DNA, 216 bp, Glycine max
  unsure (1)..(216): unsure at all n locations
aacaatatttcttggatacttctccccganataaaacatgtctgataatgagagatcacatcnggcatgacagggtttaaccgattaactaagatcttagttaagatcttataagctatgctacacaaggagatatgtctgaattgactaacacacttatgctttgcacacttaggaattagacagatgtcagtcatatttaccgtactaacctca

SEQ ID NO: 13554 - DNA, 198 bp, Glycine max
gaacaatggaagctctcgagaaattcatattgtcataacttctcactcagaggacccattcatgcggataatatatatagacgcttcaaattgaacaacggaagctctcgagatactcagatggtcattacttttcatctggaggtcctattcaagcgcatcatatatagagacgcttcgaatagtcaacggaagctc

SEQ ID NO: 13555 - DNA, 353 bp, Glycine max
aatcatgagtcaacacataaagaactttatctttacacggtgcataaatccttatggcaactctcatgtagtcaatgacgacaaagaaagttgcatactatggaatgaatctggtgctatgaagagcagtaccattacagattgctctcattccatgttctgtatcaccaaatgtaacattgcgctcttcaatagtattcttttggtgatctccatatgatttcaacaaggtcatgagggaagaggcaagatctacaccgccactgagtagaccaagaagaaccttaagacgcgcattcagattttgttgagacagatctcttgtaacattagcagggttttctggagtgtat

SEQ ID NO: 13556 - DNA, 408 bp, Glycine max
tgctctattggttggcgagttggtccattctctctaagtctattcgaatcatgagtcaacacataaataactttagctctacacggtgcataaatccttatggcaactctcatgtagtcaatgacgacaaagaatgttgcatactatggaatgaatctggtgctatgaagagcaataccattacagattgctctcattccatgttctctaacaccaaatctaacattgcgctcttcaatagtattcttttggggatctccatatgatttcaacaaggtcatgagggaagaggcaagatctacaccgccactgagtagaccaagaagaaccttaagaggtgcatttagattctgttgagacagatttcttgtaacattagcagggttttctggagtgtatgtcggaagt

SEQ ID NO: 13557 - DNA, 314 bp, Glycine max
cgacaatatcgttttactcagaagtctgattgagacccgttatatatcgagacgatcgaaattgaattctgaagctctgagctaattcaaacgacaataactttttttctcggatgtctgattaagtaccgtaatacatctagacgctcgaaattgaatgatgaagctctcagcaaattcaaacgacaataactgttttactcatatgtctgattgaatcccgtaatatatcgagacgatcgaaactgaattctgaagctctgagctaattcacacgacaataccgttatgctcggatgtctgattgagttccg

SEQ ID NO: 13558 - DNA, 342 bp, Glycine max
  unsure (1)..(342): unsure at all n locations
ctgcagctcaacatgaattagagcgtctcgatatattatctgactcaatcttacatacaagaaanaagttattatcgtttgaaaatcctcagagcttcggtattcaatttcgagcgtctcgatatattacgggactcaatcagacatccgtgtaaaaagttattgtcgtttgaattagctctgaggttcagaattcaatttcgagcgtctcaatagattacgggactcaatcagacatccgagcaaaaagttatttgccgttgaattagctcagagcttcagaattcaatttcgatcgtctcaatatattacaggactcaatcagacatctgagtaaaaacg

SEQ ID NO: 13559 - DNA, 431 bp, Glycine max
  unsure (1)..(431): unsure at all n locations
agctnttagaaatcttcggtgtctggtatataccgtcttctntccatgcttgagttggatgaagcttgtgtttttctcaaatataggacatgcatgatgccctttcccactgtatccacttaaatttccatatgctagaaaatcattaatagtacaaaacaccattgtgcgtaacctgaatgtctactgcacatttgcatcccacacatctacctcttcttcccacaattgtttcaagtcttcgattaatggcgtaagatacacatcaatatcattccctggctgccttggacccgcgatcatcatacacaggataatgtatntacgcanaatgcacaaccatggnggaaggttgtaaatcatcagtaaaacaggccaggaactgtggttgctgttaagctaccataaggattcattccatcagaagcaag

SEQ ID NO: 13560 - DNA, 482 bp, Glycine max
  unsure (1)..(482): unsure at all n locations
gcatatggatcttnttggtccttctagaactatgagaattggtttaaattattatgctcttgtcatagtagatgattattctaggtttacatggactctatttcttgctcacaaaagagatgcatttcatgcttttaagaaacttgccaaaatcattcaaaataagaaaaaccttaacattgcatccattagaagtgatcatggaggggaatttgagaataaaaactttgaattatttagtgatgaaaatgggatagaacataatttttctgcacctagaacccctcaacaaaatagagtagttgagaggaaaaatagatcattagaagaattagccagaatcatgcttaatgatacaaatattcttaaatatttttggaccgaggctattaatattgcatgttatataatgaatagagcattaattagaacctatttaaagaanacaccatatgaactataagaggggagaaaaccaaata

SEQ ID NO: 13561 - DNA, 505 bp, Glycine max
  unsure (1)..(505): unsure at all n locations
gcttgaagatgaacttcactagcacaatgcatgaactcttgaaagtatacttactgcanacaaaatgtcaggtctgngtgcagtaagatatattaagcaaccaatcaagcttctgtaatgcatttcgtcaactttatcagctccatcatccttgctaaatttctccttttagttcattggagatgtagtgcttttgcagtcctccatatngaaacttcttgagtatttcccttacgtacttcttttggtgaatgaggattccatcatgatcttngttcacctccattcccaanaagaaactcatcaagccaagaattgtcatttcaaatgctntaaacatttcagctttaaactcctttatgagtttctcatcacttcctggcacaagtaaatcatcaacatagatagcaataatgatntaaattgcatctaccaatttcacatatatggcagcctcacttggactttngacaaatccaagatcttgaagatgatcatctatcct

SEQ ID NO: 13562 - DNA, 508 bp, Glycine max
  unsure (1)..(508): unsure at all n locations
atctaagccaccgcggctgcagcttcactgattacacgttccaataattctaatggtgtaatctgttacaagatattggtaatcgattaccagtgtgtttgaacgttgaaatcanattcaattgtgaagagtcacatcctttcacaaaatgctntgtgtaattgttacaagaatttgataatcaattaccagtgacanagtttggacaaaaatcanaagatgtaactcttccaatggtttntcagtttttttaaaggttataactcttctaatggttatcttgaccagacttgaagagtctataaaagcaagaccttgacttgcattntaatattcattacaatctttgacaacctttacaaaanannatttcacatacctttttacaaccttngaatctctntgaacttcttcttcttcttcctttgccaaaagctntctaaaaagtttttggttntcaaacctaganaacaaaaagtgtgtattcatctttntcattctcttctcc

SEQ ID NO: 13563 - DNA, 342 bp, Glycine max
  unsure (1)..(342): unsure at all n locations
atgagcgtctcaatatactattagacacaatctgtacacccgagttaaaagttatggtcgnttgaatntgctcagagcttctattttcaattacgagcgtctcgacatattatgggactcaatcggacatccgtgtaaaaagtaatcatcgtttgatttttctaatagcttctgttcttaattccgagcgtctcgatatattacgggacacaatcggacatncgattcaaaagttattgtcgtttgaatttgctcagagcttctgttntcaattacgagcgtctcgatatattatgggactctatcggacacccgangaanaagtatcgtcatttgattttc

SEQ ID NO: 13564 - DNA, 471 bp, Glycine max
  unsure (1)..(471): unsure at all n locations
agctggggatgcatttgtgagttgtttgtacatatttattataggctntgtgttccatttcagtatgtttgtacatatattatccttattgtcttacgaagtagactcttacgagtctacgagtcgactctacgaagctgttacgagtctgcgtaaactctcgatattgataaccttgcaatatatatgtgttntaaaaatagttgagattataatacacataatacatatgcttggtattcacatgagattctaattgtaatatacatgttacaagagtgcatcagatgtatgacttaaattataactcatgttaataatatcatattatgcatgttagtttggaaaggtatcttcaatgacaactctagttactatataaatatttacttacaatattgtgcttatataattgagtccattagatttgctntctacattgtcttatatattcgaagtggttactcttat

SEQ ID NO: 13565 - DNA, 446 bp, Glycine max
  unsure (1)..(446): unsure at all n locations
cttcttatttccagaaggaaattctatcaatagacctccaatctttaatggagagggttaccactactggaaaacccgaatgcaaatttttattgaggcaatagacttaagtatttgggaagccatagaaatagggccttatatacccaccacaatagaaagaattacaatagatgcaagcacatcaagtgaaagcataacaatagaaaaacctagagatagatggtctgaagaggatagaagacgagtacaatacaatttataagccaaaaacataataacatctgccctgngaatgtatgaatattacagggtttcaaattgtaagagtgctaaggaaatgtgggacactctacaattaacacatgaaggaactacaaatgttaaaagatctatngataacacactaactcatgagtatgaactggttangatgaatgcaaatg

SEQ ID NO: 13566 - DNA, 422 bp, Glycine max
  unsure (1)..(422): unsure at all n locations
caaggcctgatcttaacactgctctatttgtgctgtcacagttcccacagacacaccttgctgaggcaagaatngcattcattgattcaagtactagtaggagtgtaagctatggtgaagctaaaaggtctatntactcccttgcatcagctntgttccatggacttgagattaggaaaggtgaatgttgtattgtattgtcaccaaactcaaccttgtactcagccatatgcctagctgttttatcagttggagcagttcttaccactgccaaccccatcaacactgcaacagaaaatgcgaagcangtgcatgattcgggtgctaaactagccatctcagcacctgaggagctacacaaatnggtcccaactggggttcctataattctcacttctcgtccttctgatggcaacatgtta

SEQ ID NO: 13567 - DNA, 457 bp, Glycine max
  unsure (1)..(457): unsure at all n locations
gcctaaggctgttcaccatgttgctcatgttgctcccnctatatttaacaatttccacctcaagacccctagttntattaaatcttgatatattnggtctaaccaaaaccctcttatttagtggttcaggggtaaaaggtatggtctagttgtggtggacgactactctagatgaacatggattatttttcttacccacaaaaatgagtattntagagtcgtctttataatttacaaaagaattcaaagtgaaaaaggagtatacattacttcaattagaagtgatcatggtggacaatttgaaaatgaaaattttcttctattatgtgaagaanatggcattctttgcaatttctcaacacctagcacaccccaacagaatgaggtagttgagagaaagaatagatcattgtacgaaatggaaggaccatgcttagtgataatttacacctaaaca

SEQ ID NO: 13568 - DNA, 325 bp, Glycine max
atggtctaaacttatcagacggaagtccgattcaggcgcataatatatcgagaagctcggaatagaacaacggaagcactcgagatattcaaatggtcataacttttcacacggaagtccgattgatgcgcataatatatcgagaagctcgaaattgaacaacggaagctctcgagaaactcgaatggccatcacttatcacacggaagtccgactcaggcgcgataaatatctagacagtcgaaattgaacacggacgctctcgagagattcaatggtcgtacttatcacacggatgtcaacttaagcgcaaatatatcgagac

SEQ ID NO: 13569 - DNA, 447 bp, Glycine max
  unsure (1)..(447): unsure at all n locations
atcttggtcatcttgttataatacgtggtcttccttttttgaagttgatggcgcaacatattactttggcctaacaggaactccaatattattacagcttctaatgttatgattggtttggccacaccttccacatgtaaactcagccaatttcctctttagcttatgtcctgtgacattgtcctcatctacagatctccttctatttttctttggcctttctctctggacccttctatgtggtggaacagggtgtgtatactgtgtctgggcccaatattgtggtccttggactggttcaataaaatgttggtatgtcttattataaacttctattgacagncactcatgacacatgtnctcaggcttcccttctttgtgagttatagttgcaatggcatgtcggcatggcatccctacatcatagttgtataatcagcacacatg

SEQ ID NO: 13570 - DNA, 472 bp, Glycine max
  unsure (1)..(472): unsure at all n locations
gcttgtccactntgcttctctgccatcaccttgaatttctagannattgttaacacgtcatctttntccttgatcaagtataaccacatcattctgttgtgctcatctacaaatgatgtgaagtacttgttcccacctagtgatggtacctcaaaaggaccacacacatctgaattgcacaacaccaagtaccactagaaagcttctcattggggcaaatgggaaacttaaaggaactttcttggttgcttgccaatgagacacacatcacacaccttctntgctacatttaattgtggcagacctataaccatattattaattactaacatattcacaactttgatattttagtgaccaaacctgagatgccaaagccagctcaatnggntaatctctatagtcattaaacacttgtactttgatgccttaatgntggcttgaaaggttatatttcttgagagtggagatc

SEQ ID NO: 13571 - DNA, 484 bp, Glycine max
  unsure (1)..(484): unsure at all n locations
agcttctatagaaggttcgttcctaatntctctacatttgcatcacctctcaatgagctagtgaagaagaatgtggcatttacctgnggtgaaaaacaagagcaagcctttgctntgctcanagaanagcttactaaggcacctgttctagctcttcctgactnttctaaaacttttgagctagactgtgatgcctctggagtgggagttggagctgttttgttacaaggtgggcaccctattgcttattttagtgaaaaacttcatggtgccacccttaactaccccacctatgataaagagctttatgccttaataagagcactccgaacttggaaacattaccttngttccaagggaattgccattcatagtgatcatcaatcacttaagttcattagagggcaaagcangttatacaaaaggcatgcanaatgggtagagtacctagagcaatttcccatatgtatcanatacaaaaagg

SEQ ID NO: 13572 - DNA, 422 bp, Glycine max
  unsure (1)..(422): unsure at all n locations
gacgtncttgattaattaattattgtattatctagtgttatactaactaanaaaaacttataaaatttcgtataagtaatgtacaaatccaaaaataattgataaacaaaatcatattgaattcaagtcgttaaagcacaaagtatatcaaaagaaaataaaaagagcatgatattaaaaaatgtatggattaggtcctcagccccaaagcttacaaatctantttaagtccaagcccataaacaaaataaaataaaatctggacaagataagataagattggatgaaataaaatctggacgaaataaaatttagatggaataaaatctggataatataaaatctagatggaataaaatctggataagatatgattcgataaaatgaagctgtattattatattattattatattattatta

SEQ ID NO: 13573 - DNA, 489 bp, Glycine max
  unsure (1)..(489): unsure at all n locations
agcttacaaccnnctgttcattactaaacaaactattattaatcacaatcacaatcaagatatcctaactacatgcaagaggtaataatgaaaatagaacagggaaagaaaagctatgttgcctcccagtaagcgctcttttaacgtgactagcttgacgcatcgtcctgttatccaggaacctagagagttcctacttcaaggaccttcttctcaggtctcttttcctccatcacatgcactntaaaataaacattttggctaggtggatccttgttctcctgaaacaaatcaaagctgatcttctgatcttctatgcccatccgcagtatcttttttcccatgtccaccacacagcttgcagtagacatgaatgggcggccaagaatgagaggaatgtcagcatcctcttctatgtctatgacaacgaaatcagctgggaatataagggtgttaaccttcaccagatcattcttagtcgatgaatac

SEQ ID NO: 13574 - DNA, 436 bp, Glycine max
  unsure (1)..(436): unsure at all n locations
agcttangcacattanggacacatattctatctcatagtctcatgactccatttgatcccacatataaactaccatctttccctgacactatagnctttaattgagtcttntgcaaaggatcagacttttggccctctctgatctctcttaacaacttaccagtaatcctcaaagatccaagtctcatactattaagagtgacctcacacgcaaggccaagggctctaaattgttctaggagatctaactcccaatccatcaaggcagatatatgtatggatttccaactcaaggcattagccactacattagctntgtcaggatgataactaagctcaaaatcataattcttaagaaactntaaccatatcctctaacgcatgttcatctctttctagctaaacatgtacttaaggctcttatgatcgctaaaca

SEQ ID NO: 13575 - DNA, 412 bp, Glycine max
  unsure (1)..(412): unsure at all n locations
agctntatcatatggatgtataaagcgcattcttatttggctntattcaagaggaagtatatgtagatcaaccccctgtatttgaaaactcagagaagcctaatcatggttttagattaaaaaaggctttatatggcttatagcaagcccctagggcttggtatgagcgtctgagtaagttccttttagaaaaggatttctctagaggcaaagtagatactactctnttcataaagagaaaattacatgatattntattggttcaaaattatgttgatgatattatttttggatctactaatgaattattgtgcaaggaattctctcatgacatgcaaagtcagtttgaaatgtcaatgatgggagaacttaatttcgttcttggattacanattaaacaaaccaagactag

SEQ ID NO: 13576 - DNA, 491 bp, Glycine max
  unsure (1)..(491): unsure at all n locations
ctgcagcttctcaaatcaatttcgaccaccatccattattttctactcttcttgtttcttattggggaaaatcttctgagccacaataattctgtcaccactttaatgaccaggaacaaagctagattaaaaatgatgtttcaacttacttatatagggtctaatcctcanagagagtaacccgataatcacattatatgtcacattacataaactaataggcttaaaatctttcataagactaacctcatctttcttaggaatgagagtgataaaggtctggttccttctgaaattgcatgaagatttttaaaanaatttcggacaaaattgtagaggtcatcaccaaccacaactcaatacttgtagaagaaaactgctgaaaatggtttcaatgtaggtaccttgctgaanatgtatcagtcattanaagagcaatctanttatcccattantgtgtatgtngaaatccgagttatgcacttgattac

SEQ ID NO: 13577 - DNA, 479 bp, Glycine max
  unsure (1)..(479): unsure at all n locations
tcttcttcatcaatggagttctttgcttgttgtattttaatggcagtggagtgaagaaggaataaagatgattagagatgccacttcaaggagaagatgagtcaagaagaagttcaccaccatagggagccatggataagagcttgagggtaggagaagaagaatagagggagaaagagatagggagcatgaaatttgtgcctcanaagaggtctgaactntgaagtgtaattcttcaatgaataaagttgaaaaaatgcacacacatgacctctatttatagcctaagtgccacacaaaattggaggaaaatttgaatttctattcaaatttcacttgaagtttgaaatgaatntgtggagccaaaatttcactagttatgattagtgaatttcagttatggctcagcccactaatccaagatcaagtccaagattctccactaagtgtggttaggtgtcatgaggcatgttaagcat

SEQ ID NO: 13578 - DNA, 495 bp, Glycine max
  unsure (1)..(495): unsure at all n locations
agcttacaaatctgttntaagtccaagcccataaataaaataaaatctagataagataagataagacaaaatctagatgaaataatatctagatgaaataaaatctagataagataatatctagatcatataatatctagatgagataaaatctagatatgataagataaaatcttgattaaataatatctagatgagataaaatctagtaagataagatttggtagaataaaattgtctgttctcttcaagtccaagcccaattttggattcaaacccaattacttataattctcctgaaattaaattaaaaacacaaaattaatccagtaggcccaagtgataaaactgcataattaatttgaccattaaggctaatcagtaattaaaatggtgacaaaaaggggtaagaaatatgaganaatgatgacacatcattcatgtttcatacttcatatggcatggaaatagtataaactntntcagtaagtactc

SEQ ID NO: 13579 - DNA, 473 bp, Glycine max
  unsure (1)..(473): unsure at all n locations
atattgatttctntaatttgcacaccatgtgtttctgtccttctactgagaaccccattgactaatccatataaacattctcatctaaatatccattaagaaagagagttttcacatccatctgatgtagctccaagtcataataggctactaatgtcatgataatcctgaaagaatcctttcgtgaaaccagggaaaatgtctctntataatcaatgttatctttctaagtaaacctcttaacaacaagtctagccttgtaacgttcgaagttggcatgagagtcacatttagtcttgaagacccacttacaaccaactctcttacaaccctttagcaattctataaggtcccaaacaccattatgttccatggaatnntattttcccttcatggcatntaaccagttctcanaattatcacaacttacagcttgtgaaaacgaaactggatcattatcattaatgcttaag

SEQ ID NO: 13580 - DNA, 315 bp, Glycine max
gacccttaggggctatgctgatggcttcttaccgtcccaagcttcaattggagacttgtctttacagacttagtaggacatctggtgagtatgtaaactgcagtgtagactgcttcagcccagaatgtgttagagagtccctcttccttgagcatcgatctagccatctccataactgtgcgattctttctctcggacactcgcatttgttgagtagaatatgcgactataagttgtcgctcaatgccttcatcctcacaaaatctttcatactcgcgagaggtgtactctgtgccgcgatcacttcttagtact

SEQ ID NO: 13581 - DNA, 314 bp, Glycine max
  unsure (1)..(314): unsure at all n locations
acataaatntgcacattatccaactcattatttgttctctcgataaacaatgttatgtcaacttgacctcttacaaaagattgcccaataaagaaattgctcaatctttcataccaaggtctaggtgctagctttaaaccatacaatgcctttctcaacttgtaaacacgattatggtgttcactgtctacaaaacctagaggctggaccacatatatgtgttcttcaacgtatccattgagaaaaacactttgtacatacatccgatacaacctgatattcatactacatgcttaagcacacaacaacctaat

SEQ ID NO: 13582 - DNA, 468 bp, Glycine max
  unsure (1)..(468): unsure at all n locations
agcttaagctccttcaactgcacaaggctcttaatatttgaagagtatccttgtggaaccttcacctgacgaagacactgacaaaaacttatcttctncttcttggacaaagtatggcaggctgggggcaagtaaattntcttcccatcagaccttggatgcaactgtgatcttatacccatatcagctagatcttgacgggtattcaagccatccttcgtcttgccttgaatgttaaggagcatcccaatcacactgtcacanaacattttctccacatgcataacatcaatacaatgtctaacgtcaagatcacaccagtacggaagatcaaagaanatggacctcttcttccatatgcaactctgacttttatccttcttttgnngtcttccaaatacagtgttcaggtgttgaacccgctgatatacctgctcaccagtcaatggtatcggcgcaatatcatgc

SEQ ID NO: 13583 - DNA, 456 bp, Glycine max
  unsure (1)..(456): unsure at all n locations
gtcttgtaatcgattaccagaggggattttcataatattatttccaagtcacatctattcagatgttttatgaatgacaatcaaaggtgacttggaaacacgaatttaaagagacttttcattgcccaaacagctttatcctctcaaaaagattccttggtcaaccacttgcatactcaataaagaattttgattgatcttcattatacaatctatctcttttaagagagatttcttcttctcttcttcttatttctgacaagggattaagagaccgtgggtctcttggtatagaggactcctgaatacaagggaagggttgtccctgtgtggttcagactntgtaaaaagagtcttacaaagagaatggaatatctcaagtgggttgttgatgactggacgtangcaccagaagtggccgaccagtataaatcaagtttcattcctctcttccct

SEQ ID NO: 13584 - DNA, 336 bp, Glycine max
  unsure (1)..(336): unsure at all n locations
ttcaggtgctggaactactttacatggtcttgatggttcctatgcaagnngaaagccttggatgaaaaaggtatgcctatgtttgtgtggatgatttctccagaattacctgggtcaactttatcagagaaaaatcagacacctttgaagtattcaaggagttgagcctaagacttcaaagagaataagactgtgtcatcaagagaatcacgagtgaccatggcagagagtttgaaaacagcaggtttactgaattctgcacatctgaaggcatcactcatgagttctctgcagccattacaccacaacataatggcatagttgaaaggaaaaaca

SEQ ID NO: 13585 - DNA, 476 bp, Glycine max
  unsure (1)..(476): unsure at all n locations
tggtctcatcaaattatttattntctgtagggaattctataaataggccttctattattaatggtgtgggttaccattattggaaaactcgcatgcaaatttttatagaggcaatagatctgaatatttgggaagccatacaaatagggccctgcattccaactatggtggcaagaaatacaaccatagaaaaacctatggaagaatggagtaaggaggaaaaaagattatttcaatacaatttacaagccaaaaatataattacatctgctctaggaatggatgagtactctagggtatcaaattgtaaaagtgcaaaagatatgtgggataccctacaagtaacacatgaaggtacaacagatgtaaaaagatctatgataaatacattgactcatgaatatgaattatttagaatgaatccaaatgacagcatacaggacatgcnatagaggttcacacatataattaatcat

SEQ ID NO: 13586 - DNA, 439 bp, Glycine max
  unsure (1)..(439): unsure at all n locations
agtcatcaagagattataaatatgttaccatggcataagtttcataanaagatcaatcatcaatcatctttgaatcatctatctttcaatctttttcaacatcatctctcaaacatctttcaatcaatctttcaatatctttctacagaattttctgattcatttctcttcatctttctaaaaagtttttgatcaacactttctcttccaagaaaagttctttgttcaaaaacttgtgctattcatctttntcattctcttctcctttttccaaaagaacaaaggactaaccgcctaaatntctttgtgtctctcttctccctttgccaaaagaacgaaggactaaccacctgaattcttttgtctctcttctcccttacaaaagaatcanaggactaaccacctgagaattcttttgatcttcccttcccttaagaaa

SEQ ID NO: 13587 - DNA, 370 bp, Glycine max
  unsure (1)..(370): unsure at all n locations
ttatggacttaaacatgcaccgatgcaatggtatggtagacttagaaacttccttcttgaacaaaaatttgagagaggaaaagttgataaaacacatttcattaaaaagttctctcataacattttactcatgtaagtttatatggatgacatcatttttggttctactaatcgatctctttgtgaagattttgtacacaagatgcaggaggagtttgaaatgccaataatggggggggggattaaattactttcttggtctctatgtgaagaanattgaccatggaacatttctctatcanacaaagtattgcacagaacttctcaagaagtttaagatggacaaaagcaaggaggatgaaactcctat

SEQ ID NO: 13588 - DNA, 456 bp, Glycine max
  unsure (1)..(456): unsure at all n locations
tatgagaccaanacatgacatagaacatttccaacaatctaattctcacgttaatctagtaaatcttgtccaagacacaaacgaattatttagaaatgtttctcacagcatggggaacaaaacccctcaaatcattttacataatcatatcaaaatcaaaggaatcaaaatcataggttcaaaaacaagaaaacaccaagagtacttaattttatcaatgtagtcggtgctgtacaagacctgatattgcttatgtagtcggtgttgtgagttaattcttgtgtaattctaagaaggaacattgngctgctataaaatagatactcaaatatcttcgtagcacaactagcagtgtttgtgcttntataanggaaagcatgtgttagaaggatacacatatgtgggcatggctagagatgtnattctagaaatcaacatangatatctactacttta

SEQ ID NO: 13589 - DNA, 473 bp, Glycine max
  unsure (1)..(473): unsure at all n locations
cactcagcttggctcccaacactttttagactttcccaanatctagaagtaaatctaggatctctattagacactatgctagatggcacaccatgtagtctgagaatctcactaatatacagggaggctaacttctccaatgaaattttgatattaattggaataaagtgagtaggcttggtcagtctgtcaacaataacctagatagaatttaaacctatgagggtcctagatagtcctacaacaaattcatggaaatactgtccatcttccactgtggtatctctaaggattgtaacttacctgaagttctttgatgttctatcttagccttctgatagactagacatgcatacacaaattcactaacctctctcttcatgttgggctaccaaaacattgtctttagatcttgatatatctcggtagcacctgngtggatgctcaagttgtttctttgtgatgcaatccta

SEQ ID NO: 13590 - DNA, 447 bp, Glycine max
  unsure (1)..(447): unsure at all n locations
agctntggagaaccaagccaatcagaatgctagacgaaatatagatgggaatagaggtaacaatggtggtaatgacggaccgaggcagaaccgggttgagggagtaaagctcaatgttcctcccttcaaaggtagaagtgatccagatgcctacctggactgggaaatgaagactgagcacgtatttgcctgcaatgactacactgatgcgcagaaagtcaagctagcaacagctgaattctccgactatgcccttgtttggtggcataaataccaaagagaaatgttgagagaggaaaggcgagaggtagatacatggactgagatgaaaagggtgatgagaaaaaggtatgtgcccactagctataacagaaccatgcgacagaaactccaagggctgtcccaagggaatttaaccgtggaagaatattataaagagatggaaat

SEQ ID NO: 13591 - DNA, 395 bp, Glycine max
  unsure (1)..(395): unsure at all n locations
agcttcaaccaaggagagatggaccatntctagtgctagaaagaatcaatgacaatgcttacaaagttgagctgcccggtgagtataatgttagttccaccttcaatgtctctgatttatctctttttgatgcagatggagaatccgatttgaggacaaatccttctcaagagggagagaatgatgatgacatgaccaagagcaagggaaaggatccacttgaaggacttggatgacctatgacaagggctagagcaaggaaagccaaggaagctcttcaacaagtgttgtccatactatttgaatacaagcccaagtttcaaggagaaaagtccaaggttgtcagttgtatcatggcccaaatggaggaggactaaatgacaccactttgtttc

SEQ ID NO: 13592 - DNA, 294 bp, Glycine max
  unsure (1)..(294): unsure at all n locations
gaacctaaagacgatactgaagttcctgagcttctttgccccctttgtcgccggcaggtgaaaggttggacagtggttgaagtggcacggaagtgtctgaatgcgaagaaaagaagttgcatgcaagatgattgctcttttgtggggaattacaaggagcttatgaagcatgttaggtctaagcatccatttgcacgaccacgagaagtggacccactataagaagaaaaatggaagagatttgagtgtgagagagaacggaatgatgtgattagcacaantttatcttcaaca

SEQ ID NO: 13593 - DNA, 425 bp, Glycine max
  unsure (1)..(425): unsure at all n locations
agcttgaaattgatcaacgcatgctctcgagaaaatcgagtgggtcataaatttcacacagatgtccgattcggggaaataatatatcgagacgcacgaaattgaacaacggaagctctcgagaaatncgaatggtcataacatttcactcggatgttcgatccggggacataatttatcgagacgctcgaaattgaacaaccgaagctctcgacaaattagaatggtcgtaacttttcacgcgaatgttcgattcggggacataactcatctagacgctcgtaaatgaacaacggaagctctcgagaaattcgaatggtcataagttttcacacggatgtccgattcgggaacataatatatcaagacactcgatattgaacaacggaagctctcgagaaaatcgaatggtcataacgtttcac

SEQ ID NO: 13594 - DNA, 510 bp, Glycine max
  unsure (1)..(510): unsure at all n locations
tcgacccggatccttttgtcacctgctgcatgcgagctnntttctctatacacctacgttcctatacacgagaaanaagactnttgtctctatatacgcncgcnttgaaaagctctttctctttatactgacatggtatatatacaacctctattccttttcaaatatttctttntcctttttcaatatacactcgttgtttatataaaaacttcctttatatacacttattgctcatatacaagaatttcttttcacacattgtttatatacaaaaatttcttttcttttctttatatacagatatgacatttgttcacaacgcctctttctttntttattcttggcgttatcatgatgtttgttcattntattttaggacgacgttcctaaatgaaaactctacacggttccggaattccaacaaacactatcgacaataacgaagtaagcactaacgcaacaacccanacanaatgtatgcataaaacanatgacaatcaaaacaac

SEQ ID NO: 13595 - DNA, 363 bp, Glycine max
  unsure (1)..(363): unsure at all n locations
attaaagtntagatgaccatacctcaagtgctacagtatggactcatccatattctcacatttcaatgcattggtttgcccaaatggcataaatagaggaaatactttattaagagccattttgatagaaataatttggccctttcttttatgaatgatattacatttatcatcatcaaagatgactctataatatttatgaataagttgaccaacacttagaagattttgagtaagacctggcacataanatacatcatggatatatttcttgctaccattttgagtttaacagcaatggtggccttttcttcaactttntgaacatttccatcaccaagtgtaactttgaaatttattgct

SEQ ID NO: 13596 - DNA, 407 bp, Glycine max
  unsure (1)..(407): unsure at all n locations
agctngcagtgatccttgaagttgttctatcatcatggtttctaaatctttggtttcctcgattctcacaacaatgtgctcaaatttgggatctaacgagcgtagtatcttctccataattgttacttcttctaacttctcacaatttttttagttgatttgaaactgcaagaattcttgaaaaataatcggaaatggactccgactctttcatatgtaaggattcgaactcagctcttagagtttggagacacactntctttactttgtctcctcctttttcaaccatttcctgaacatcatgtgctccaagaagtgctttcttttttacgggccaatggtcataggtgctcccctttagaagtggaacttggaaggatgtcactccattggcttgccatactcta

SEQ ID NO: 13597 - DNA, 348 bp, Glycine max
  unsure (1)..(348): unsure at all n locations
agcttggatttccttntagtagggaatctatccttcctaagatggagccaaacccagtcaccctcattaagaactagctcttttcttcctctattgcctttagttgaatacacctttgtttggttctctatttggttcttaaccctctcatgcatcttctttacaaattctaacctagattccccttctttatgtataaaagaagtgtccagtgggaggggaatgaggtctaacggtgttaggggattgaacccatagacaacctcaaaaggggactgcttggtggttctatgaacccccctattgaggcaaattctacatgaggaagatactcatcccaagacttat

SEQ ID NO: 13598 - DNA, 399 bp, Glycine max
  unsure (1)..(399): unsure at all n locations
ttttggaatcattcgcagacatgtcttctgaacctgaaaccagcatctcaagcttgatggtgggtgagccgtccatggattgactatgctggtgtctaactctgggcctttcattaatcccaataacaacattctcggtagaagaggtgggtgcccctgacgccggtgttgaagccgatgctcccacagcattagacggctcaaccatttgaaacgtggacgttgccgacgatgaattgaacttatccatatcaaggtacatggacagcaagtcctcctcggcatcatcggagaaggaaggaccatcaccacctccaacaacaccaaggtcactgtcgaaactaatatcatccggtaaagtgagaatctncgaatgagcacgcctatgacctctatttc

SEQ ID NO: 13599 - DNA, 473 bp, Glycine max
  unsure (1)..(473): unsure at all n locations
atacctcggtttccactaaggagctaaagatcttaattaagaaatcttatctctntactttggttactagtatttaagccttctaaggagccttaaatatgtttgagctgctttatgataaataactgactttaattttaaatactaataaattntttcttgcattgaattttttatatatgaaacttttgttttgagtctcaatcatttagtaagtgataatgtgacactntgcaattagattttctcaatttactagtatttttgcaagtatagtgatgaggctaaatgtttattttatacaactaaaatatataataaataaacatctctaaatatataaattatattataattaaaatttgtaatntataaatgttgatatacttatnaaatatattntagatttaagataattaattatacctctgatatattattattttaatattgatgaatttttaaaaaatatg

SEQ ID NO: 13600 - DNA, 470 bp, Glycine max
  unsure (1)..(470): unsure at all n locations
agcttctattggattcatataccagagcagttctcttgggattntttgggtataattgtgatgctntagaaacttgataagatttgaaacttttcttcctggatcattcacacaaaaagttacctctgattttacctctgttatgggattttttttttcttgaaaagttacttctgttttgatcttcattccattatttctacaaacttcccagtatatgttccaccaatatttatctaaagtgttatgttctttttctacataatctttcatttttttaactccattactattttgatattgatcctagattgtgggtaaattgtcttattatttatcataaattcctttcattttgtcttttgttgttttcgaatattaattatttaatttgtattaataatatttcaaatagcagtcaacctgttcctgatatctttntgtagtgttctttgagttggctgctatgt

SEQ ID NO: 13601 - DNA, 472 bp, Glycine max
  unsure (1)..(472): unsure at all n locations
ctcgcttgcttcgaatttctctatttcttctacaaagatcctatatgcaaagcaatttcaagtttacaacttgtaatagtaatcatataattagctataaaaacaattcaataattaaaacaatctaattgtaccaatgttgatggtttatgacgataatgaacaaaatgagcccattgatctttatctatgcctatcggcacattttttatgatttcatctctagttttggttggatcgttgaattcattccataagctntgcctatttgtagcccattttcttcccatactcaatatgcaataccattttgcaccagcttcattaatcttaaaataaaatcgaggctaataaaaagataatattatcacatatcagtatgcaaataatatatatatgaaaaatagttaagataggggctctaagtggtgtagatataaaatagtatatataactaatcggcataccttta

SEQ ID NO: 13602 - DNA, 468 bp, Glycine max
  unsure (1)..(468): unsure at all n locations
agctntagcttcctgaaggttctcgtattcattctgttttccattgttctcttctcaaaccttttcattcctcctccccgaaacttgtcatggaattgccaccaaaaatcattgaaaaccaacctttgatcattcctctcgcaattcttaatactcgttgggactacttttcaggggaacccaaattactggttttagttcagtggaagggtctctctccagacgatactacttaggaagcctgngatcacttgaaggagacatagcaccttgaggacaaggtgttctttgaagttggaggggatgatagggttgcgcaccatcagcctcatgctaccagcactatccaccacccgttcgacatgaccactaattccaagcccaaacgaaggatcatcgctcccaaacatctaacggattacatttaacagaatcctgtagatgttgtcgagctggaaacacgttagt

SEQ ID NO: 13603 - DNA, 421 bp, Glycine max
  unsure (1)..(421): unsure at all n locations
cttgaagatatcttaacaatttctttgcagttgtccagtgctctattcctggattactntgatatgtctcaagcattccaaccacaaaatcaatgccaggtcttgcacacacttgtgcataggcttcctacaatagaagcatatggaatgtttctcatttgttccatttcaagctcatttttaggacattgattcaaattgaatccatcacctttcacaataggtaccatgttgggtgaacaatctttcatccgaaatatttctagaactttattaatataggccttttgagacaagctgagaatcccttgagaatgatttctatggatctctatgccaatgaaatatgttgcatcacccacatgcttcatgtcanaattcttagaaaggaattatttacatcatgtaacatcccaaaatc

SEQ ID NO: 13604 - DNA, 359 bp, Glycine max
  unsure (1)..(359): unsure at all n locations
gtctcacgattgtcacgtgctcatgcaacaattgttagctgtggctatacgagacatcttgccaaacaaagtcaggttcacgataactcgtctgtgctttttcttccatgctatatgtagcaaagtgattgatccagtaatgtttgatgagttggaaaatgaggccgcaattatactgtgccagttggagatgtattttccccctgctttctttgacatcatgattcacttgattgtgcatctggtcagagaaatcaaatgctgtggtcctgtttatctacgatggatgtnacccggtgagcgatacatgaagatcttaanagggtatacaaagaatctatatcgttcggaagcatcta

SEQ ID NO: 13605 - DNA, 493 bp, Glycine max
  unsure (1)..(493): unsure at all n locations
caagctttgacggtctataccatgctctacgatctcaggacggagaaagatctatatataggctngctaagggtagagagaggaagactagagatttggatcaagtaaagtgtgttaaggatgaagaaggcaaagtcttagtgcatgaaaaagatatcaaggaaaggtggaaggcgtatttccacaacttatttaatgatggatatggatatgactctagcagtctagacacaagagaagaggaccggaactataagtactatcgtcggattcaaaaacaggaagtaaagaaagcgttgaaaagaatgagtaatggtaaggcggtggggccagacaacatacatattgaagtgtggaaaactcttggagatagaggtcttgagtggctcaccgaactctttaacgaaattatgaggtcaaaacgcatgccggaggaatggaggagaagcacgttagtgccaatctataagaacaagggggatatacaaaattg

SEQ ID NO: 13606 - DNA, 476 bp, Glycine max
  unsure (1)..(476): unsure at all n locations
agcttctggtgggacatcttgactcgctttcttatctgacattcaccacagattctgtcttcttctattttcagattgggaatgcctctaacagcacctttgtcaatgattttcttcatgcctcttaagtgcagatgtccaaatctttgatgccatattctgacttcatcttctctggagaatagacatgtggaggagtaactggtttcttgaggtgtccataggtaacagttgtcctttgatctgttgcccttcattaggacttcactcttctcanttgtcaccaagcattctgactttgtgaagattacattgaatccttcatcacacagctgactgatgctgatcaagttngcagtcagtcccttcaccagcagtactttgtccagactaggaagtccatcatggactatctttcccattccagtgatctttcctttagagccatcttcaaatgtcacatagctagtggagca

SEQ ID NO: 13607 - DNA, 458 bp, Glycine max
  unsure (1)..(458): unsure at all n locations
agcttcccgtcaatggtattacaagttccatcaagtcattacctcatatggttntgaggcaaatgcagttgatgattgtgtataagtttagtaggagtaaatactcattcttggtgttatatgtcgatgatatactacttctaccaatgatataagcttcttacaagagactaagaaatttctaacgaaaaattttgaggtgaaagatcttggggaagtctcttttgtattaggaatcaagatactaagagatcgctctcaaggtatcctaaggttgttacaagagagttataccgataaggtcctagatagattcggcataaaatataataaaccaggagatacccgatagctaaaggagacaaatntagtctcaaacaatgccttaataatggccttgaaagaacagagatgcaaaagaatccttatgcatcagcagtaggaagtctaacatacac

SEQ ID NO: 13608 - DNA, 429 bp, Glycine max
  unsure (1)..(429): unsure at all n locations
tatgaactcnncttttttcaatattaatcacacttaaatctcacacaatcacaagcaatcaaccacactaaatgcaaacacaacaaaaattaaaaatgattgngttgcctcccagcaagtgcttgtttaacatcattagcttgacacatcgttctattatcctggatcaatcttggttctctcctttagaaccttctcatccaacaccttgacctgcaaacacacatcctggtccattaattctcttccttcattaaatagatcaaaactaatttgttgattntcaagactcatttccaaatttttcttccccatgtccaccacacagctagtagtggacataaatggacgtcctaaaatgacaggaatatntgcatcttcctcaatgtccattacaacaaaatcggtaggaaaaataagatgcttgac

SEQ ID NO: 13609 - DNA, 430 bp, Glycine max
  unsure (1)..(430): unsure at all n locations
agcttctttgagttaacttccttgagaagctagagcttagctacacacacccatctaanaactaagctcacctccttgacaaaatacatgaaaatacaaaaaaaagtccctactacaaagactactcaaaatgccctgaaatacaaggctaaaaccctatactactagaatggccaaaatacaaggcccaaaagaaggaaaaacctattctaatatttacaaagaagagtggatccaaccttgacccatgggctcaaaaatctaccctaaggctcatgagaaccctagggccttcccttggatctctggcccaatctactaggagtcttctatccaatgcccttgcggggtaagattgcatcaagaacacacattacttgtcgatgccccaccaacgaaaacatgattatgaggtgccgaaacatttata

SEQ ID NO: 13610 - DNA, 433 bp, Glycine max
  unsure (1)..(433): unsure at all n locations
tcagaattcaatttcgcgcgtctcaatatattacgggactctatcagacatccaagcaaaacattattgtcgtttgaattagctcagagcttcagaattcaatttcgatggtctcgatatattacgggtctcaatcagacatctgagtaaaaaagttattatcgtttgaatttgctgagagcttcaacattcaatttcgagcgtctcgatgtattacgggacttaatcagacatccgagtaaaaagttatcgtcgtttgaatntggtcagagcttcaacattcagtttagagcgtctcgatatattacgggactcaatcagacatccgagtaaaaagttattgtcgttggaaaatcctcagagcttcngtattcaatntcgagcgtcttgatatattacgggactcaatcagacatccgagtaaaaagttatt

SEQ ID NO: 13611 - DNA, 395 bp, Glycine max
cactcaagcttcttagtatcagctgatgaagatgaattcgtggctacttcatgcactcctcttatgacaatagcatcatttctggcactaaactgttgggagttggaagccatcttctcaattaaatttctggcttcagcaggggtcatgtctccaagggctccaccactggcaacatcaatcatactgatctccatgttactgagtccttcataaaaatatcggagaagaagctgctcacaaatctggtggtgaggtcaactggcacatagttctctaaatctctcccagtattcatataggctctctccactgagttgcctaatgcctgaaatatcctttctgatggtcatggtcctggaagtagggaaaatgttctctaagaatactttctc

SEQ ID NO: 13612 - DNA, 484 bp, Glycine max
  unsure (1)..(484): unsure at all n locations
acatggattaaaaatggtgtaaggtatgggaagctatatcgtgtagagtgttggaagcaacacatgtgagaatcctagtgtcattttattataccctctttcctttntattatctttatggcaatagtattttgaataatgtgaacttattatctttatatttatgtcctgtatttttcctttaactattcggcttatggtttattatacttctgtcaatattttttgttttatgtcaacaattatgttatgttaactaataaatgaaaataacaattaagatatagtcaaatgtgttctttgttattgaaattcaattntattagttcatgttgttctatatctatatcttaattataatgtcttataatganaataattatagtttaaagtaaattgttttataaaataatntattgaagtaaaagaaacaaatgaatantgttgttagattttaaaattatttatataananaatattcta

SEQ ID NO: 13613 - DNA, 432 bp, Glycine max
  unsure (1)..(432): unsure at all n locations
tcgtcttcttctctagtccagtcttcttctggtttcaatccatcagtgggctttccttctgtgtccagcatcttgggatgttcccagcctttgatgacagctttccaggttctgctatccagtgatttgaggaaggccaccatccttgctttccagtattcatagttggttccatccagaattggtggtctgttcactggtcctccttctttctccatgttcatcagaatttatctccctaggtctcactncagtgattcgagtgcctgctctgataccaattgaaattctgataccaatgccagatgtcgtacaggatgtcacgacatcacgcttcagaacatgcagattatctctgagtgtatgaacagattaaacaagtaaattacacaagagaattgtaacccgagtcggtcaacctcacctacatct

SEQ ID NO: 13614 - DNA, 451 bp, Glycine max
  unsure (1)..(451): unsure at all n locations
atgcttactctggatacaaccagatcaagatgcactctccagatgatattaaaacaacattcatcactgaagatgtcaacttttgctacagggtcatgccctttggcctaaaaattgcaggtgctacatactagagattgatgaaccaaattntcaagcaacaaatctgatgaanagtcgaggtctatgtcaacgacatggtcgtcaagtctcatagcatagcccaacacgtggcagacctgcaagaagtctttggaaagctctacaaatgcaacaaanaggccaatggcaaatggtgaatgtgcacanactacactgatctaagaaaggtgtgccccaaggatgcataccttctgcccagcattgacaggctagttgatagagcgatcgggttccanngtgctagcttcctggatgcttactctggatacaaccagatcatgatgcacac

SEQ ID NO: 13615 - DNA, 342 bp, Glycine max
  unsure (1)..(342): unsure at all n locations
atgtagcttatacacacaaagacccaggtgttggacaagtgacctcaataacttaagagggggtgaattaagtttcaaaatttcccactaacaaacttttaacctccttccaaatgataggctcagaatgcagaagaagaagcaacgatcaatttaataatgttctttaaacatgcaagacaaaattaattgcaataacataaatgagataagggaagagagaaatgaaaactcgatttatactagttcaaccacttcccgtgcctacttccagtcctcaagcaacccacttgagatttttcattatctctataaatgctntacagactntgaacacacctt

SEQ ID NO: 13616 - DNA, 491 bp, Glycine max
  unsure (1)..(491): unsure at all n locations
ggtacctccttcttcactacatcaagaatcaccgggtttagtcttctctgtggctgtcttactggtttagccccatcctctaaatntatccgatgcatacatgtggatgggctaataccaggaatgttcgctagggtccagcctatagccttcttgtgcttcttgagaactgataatagcttctcctcttgctcatcagcaagggaggtagatgtaattactggaaaactnttgctatcatccaagtaagcatatttntaaattgatggcagaggcttcaattctggtgtgggcggctggataatggtagaaagagatggtttctcagcctgtacctcanaaataaagtcagaggtatgtgtatttcctgaaacatggttagttctatctgactctagaaaatcaatctcaagaggtaaacatcaccagacatgtaatcaatatcaatttcagattcactctcagcatcanattcattccatatgatcaac

SEQ ID NO: 13617 - DNA, 490 bp, Glycine max
  unsure (1)..(490): unsure at all n locations
ggacaagtgttgttcagtgttgagagtggttttcttgacaagtgttgtccgggttgcttctgtcaagttgtctggggtggacaccctttctgatgcaagaggctccaagaggattgggctagagctgctgaagaaggtcctaaggttctcatgaactttaggatagatttttgagcccatgggccaaggttgggtccaattatctttgtacgtattagattacgatgtcactatatttggttcttgtaattagggctccataatgtaggtagggtaccctagaaatataggatntttcagcccttgtattttatggcacctagacntagttttgtattacgggtagttctgtaatttcacatgcactaagtgaatatttaatgtgtgtgttggcaaataaatttaattgaattggtagaagcccaatccaattaatatttagagggggaggtgagcattngcttactacaccccattgccacatcatata

SEQ ID NO: 13618 - DNA, 441 bp, Glycine max
  unsure (1)..(441): unsure at all n locations
gattgcatgatgatatgctcagaacacgtagcttgtgcaatgaagataaagcatganctccattcctgtcctttgcagatattgctacaccatctagatacaattctgtgatatctgtaaggttttgaaacattgctatgtttggctttgcaagtttcacgcagtgaggtgaggtatatgaacaagacaaatcaagagtaattaaccttctgaggtgagaaatcttttgtggaatctgcccctcgaagctagtattagacatgttcaaatacctcaaattgttcagcttgtaaagctctgaaggaatcaccgaacgaaagttattgaaagccatattaaagctctgaagatattgaaggctgaaaagaaagcttgtattaacaagtcctttgacatagagtcacgtgatatttaacattntctctaacacttagtaaaaat

SEQ ID NO: 13619 - DNA, 502 bp, Glycine max
  unsure (1)..(502): unsure at all n locations
tatgcaanaatcaaaatcatttcttataactnttgaataaaatacgtagatcggtagaataatacgtaatttaggatggtttttttaaaaatcaatcatattttagagaataaaacactttccaaacaatttgatggacaaagaaaagaggtgcccaaatatgttaattttgttctttagtctattttctttgtggtgtgtttgtctaagatcccttgcgcaggtaagtgattatgttgatctgtgtaattttctcaatattttttacatacttattttcttctcatctatcaaatatatttctaaagtattttaagaaaaaaatatcacaaactactttaagtatattgatttaatagtcatntttatcttggcaaatgagataaaaaaaataaaagganaaagaaattaanagaatatttaaacatganaattatattacaataattntaagataaaattataatggattaaatatatctttntatctnaaaataatata

SEQ ID NO: 13620 - DNA, 500 bp, Glycine max
  unsure (1)..(500): unsure at all n locations
tatctctctcattcttgatcactgtgaggcctgtcttcttatgaaccacttggactagactcacccactgactgtcagaaatggggtaaatgattcctgcttgcaagagcttggtcacctcctttttcaccacatctagaatgatggggttgagtcgccgttgtgactgcctcactggcttagctccatcctctaaaagtgtcctatgcatgcangtagatgggctaataccatgaattcctgctaaagtccatccaatggctttcttatgcttcttgagcactagcaacaacttctcctcttgctcagcagcaagggaagcagagatgatcnattggaaattttccttgtcctctccaagtatgcatacttgaggtttactggtaagggcttcaactctggtgtgggtggtggctgaacagtggaaggaactatggtaggagaagaggaggaggggtccttaccctgtacctcataaagcaagtcagaagtatatgtac

SEQ ID NO: 13621 - DNA, 500 bp, Glycine max
  unsure (1)..(500): unsure at all n locations
ctcgacccggatccttaagtcacctgcggcatgcaagcttgccaatccaccgtgccgtatgccttctgaatatccatntgcaccaagcatctaggagacacatntttcctaccataccctctcaccagctcctgagcaagtaatatgttatcctggatattcctaccaggaataaaagctgattgagtgtcttccaccacactatttatcacatcactcagtctgctagtcaaaatcttcgatatcaccttataaattatgctacaacatgatattggtctcatgtctttgatggtttttgcctccggggacttagggataagtgagacaatagagcagttgacaactctgtacaacttactagaattaaaaaattccaggatagcattctgcacatcattntttacaataggccaggcggcttnanaaaatgagaaganaaccatctataccaggagctgtggttcaccaatatcactagacattcanatctctttgat

SEQ ID NO: 13622 - DNA, 513 bp, Glycine max
  unsure (1)..(513): unsure at all n locations
tctgcagttcagacatcatanaagttcaataaattgacatgattcaattgtggatattcatagatctgcaattacagagacaatatttaacaatgcttgtattattttaaaacacaaacgcaaaattggatgaaaaccaataagaacaacttcactaatttctccataaaacccaaaaatctattttagttcatcattcagaaagggagaaaggaattatgcatacatgagaagttattaaaatgatacctttggaattcaaaatataaaaaatgatgccaggtgatgtcgccatttcactcttccctgaaaattcaaatataaaaattactttatccgaaaattagttacatattcagtagatgaactacttattaatggaatacaagtaaagaaacataaatatggatacacatagatgttactgcattcaaaattagcatgattaanataaacagcagattcttaataatatntataccaaaatcatgcataagctccagtccagcagag

SEQ ID NO: 13623 - DNA, 478 bp, Glycine max
  unsure (1)..(478): unsure at all n locations
atctctgagtcacctgcggcatgcaagcttgtaattcttgatccgcagataacataggtggtaaagtttgggactggaacgagtcaccaatggctttcttgaggaaagagaaataaaatgtcagatgaattttactgtgagatggaagatccaacttataagcaacaacaccaaccttgtttaacacctggaaaggaccataaaaccaaggggagagtttttcattaatccttttagccaaggatcttctcctataaggttgcatcttcaagaacacccaatcaccgactgcatattctatgtctcggtggcatttgttggcatttgctcacatgatatcttgagacttcaacaaattttctcttagagtagccaataattcattccaagagnattttagtttattgacttcttcaaggcgggaaggaatggtggatcccttgagaatgtgaggnggatcatgtccatacaaagcttt

SEQ ID NO: 13624 - DNA, 451 bp, Glycine max
agtcacctgcggcatgcagcttcacacagtttattttctcataccttgagtttgttataccaattactaagactttcctaactagatgattaagatgatgcatattaatgtgtgcatccctacgatgccacaaccaagaatcatctattttacttaccaagtaactcagctcatgaaatgatgcatgcttaacattcagcatatagatattacctattctcttgccaatgtggacaactttatcggacatggcttcacttgtaagacaacaatttttgttgaattcaattttgaagcctttgtcccaaagttgactaatgcttagaaggttgtgttttagtccatccacatataacatgttctttatttgagttgtgtgttgatttccaatatttccttctcctattatttttcctttggtattggctccagatgtgacatgtcctccatc

SEQ ID NO: 13625 - DNA, 477 bp, Glycine max
  unsure (1)..(477): unsure at all n locations
cgtgcattgtgtgcaatacacaattcccggtacaccacatcaaaatggtgtatcagaaaggcgtaatagaactttaatggatatggttaggagtatgttaatcaattagactttacccgtatctttgtggatgtatgccttgaaaactaccatgtatttgttgaacagggttcctagtaaggcagttccaaagacatctnttgaactgtggacaaataggatacctagtataaggcacctgtatgtttggggttgctagacagaaataaggatttataatccgcaagaaagaaaattggatgcaagaacaatcagtggatatttcattggttatccagaaaagttaaaagggtgtatgttttattgttctaatcatagtatgagaattgtcaaaactggaaatgcaagggttattgganattatgaaatcagtgggagtacagttccacgagaaatgganattaaagaaagtagagt

SEQ ID NO: 13626 - DNA, 422 bp, Glycine max
  unsure (1)..(422): unsure at all n locations
agcttcttagtttcagatgatgcagatggagccatcttctcaattaaatntttggcttcagcaggagtcatgtctccaagggctccaccactagcagcatctatcatacttctctccatattactgagtccttcataaaaatattggagaagaagttgttctgaaatctgatggtgggggcaactggcacatagtttcttaaatctctcccgagactcatacaggctctctccactgagttgtctaatacctgagatatccttcctgatggctgtggtcctggaagcagggaaaaatttctctaagaatactctcttaaggtcatcccagctcgtgatggaccttggagcaaggtaatacaaccagtcctttgccactccctctaatgaatgaggaanagccttcataaatatgtgatcctc

SEQ ID NO: 13627 - DNA, 489 bp, Glycine max
tgtcttggaatcaaggcttgggaattgcattggagctgccaaaggtcttcattaccttcacaaaggagtagtggtacggggaatcattcaccatgatgtgaagtcctcgaacttattgcttgatgagaaccatgttgctaaagttgctgattttggcctttggggtatcttgaacctgaatatttaaggtggcaaaagctgacagaaaaatctgatgtctatgttaaaattaatgtctcatcagatacatattatttgtataaagattaataaataaataattaataatcaaagattaaattgtattttagttaaataaaaaaagttcttaaagataactactacttgatgaaagtaatgatcttataaaaggggttaatacccactaatatgagacaatgttcccttcctgacaaacaaagtattatccctaatctagtcatcacaaacgtaaagagacagaaagaatagtcaaggaagtgaaatctt

SEQ ID NO: 13628 - DNA, 453 bp, Glycine max
agcttatgctgcaaatatttacaatagactctttcaacctcagcagcaaaatcaaccacaacagagcaattatgacctttccagcaacagagacaaccctggatggaggaatcaccctaacctcagatggtccagccctcagcaacaacaacagcagcctgctccttccttccaaaatgctgctggcccaagcagaccatacattcctccaccaatccaacaacagcaacaaccccagaaacagccaacagttgaggcccctccacaaccttccctcgaagaacttgtgaggcaaatgactatgcagaacatgcagtttcagcaagagactagagcctccattcagagtttaaccaatcagatgggacaattggctacccaattgaatcaacaacagtcccagaattctgacaagctgccttctcaagctgtccaaaatcccaaaaatgtcag

SEQ ID NO: 13629 - DNA, 509 bp, Glycine max
  unsure (1)..(509): unsure at all n locations
tctngaataagatatgccaatgttgtaccacagtcaactatattccctcctcggttgttagatatagaaaatacagctggattaattgggagaagttgtccattgacagcaatactctgaagattcaagttgtaatgaggcctgatcaacaagtcaaatacataaagaattgcaaattatttgacagaaaaaaaaagaagcataacaagcattttaagaacatgattatttatctaatacaaaagcttacctccccaaactatcagatcatactatatatatatatatagatagatagatagatagataggttctaatttatattaatgacttagattaattcactaaacatacatcacgtgacagatctcattctttccctgtatgcggaaaacacaacagcttggtcatttgagtgttcctcttcccattttctctganatgtgtgtgcctccctcttcttaaatggcttgttgcgctctggctctggtgtcatgcgctgcatgctc

SEQ ID NO: 13630 - DNA, 497 bp, Glycine max
  unsure (1)..(497): unsure at all n locations
tgtgccatagtaggccagatattgcttatggtgtgggtctggtaaatagatatatgaatgatccgaggacttctcatatggctacagcaaagagaattttgagatatgtgaagggcacacttgattatggtttgttattctccaaagcaaatcataatcaaggaataaggttaattggcttttctgatgcagattggagtggtgatgtagaggacaacaaaagcaccactggatatgtcttcaaattacttgatccacaatctgttggagttctaagaagcaagaagatgttggactttcaacttgtgagtcagagtacatggctgctgcctcagcagcttgtcaatcagcctggttggagtccctctttgcagaatngaagattcagcttgattcagttgttcaacttaacatggacaacaagtctgctatatgtcttgccaacaacccaattccacatggaagaacaaagcatattgtgacaaagtaccactatc

SEQ ID NO: 13631 - DNA, 437 bp, Glycine max
  unsure (1)..(437): unsure at all n locations
tcttgagaatacttccatgagaagctagagcttagctacacacacccctctcataactaagctcatctccttgagaagcttccttaagaagattcctaaagaagctagagcttagctacacacacatctataatagctaagctcacctccttgagatgagaagctagagcttagctacacaccccctataatagctaagctcacccccatgacaaaatgcatganaatacaaaaaattccctactacaaagactactcaaaatacctcgaaatacaaggcataaaccctatactactagaatggccaaaatacaaggcccaaacgaaggagaaacctattctaatatttataaagataagcgggctcatacttagcccatgggctcgaaatctaccctaaggctcatgagaacccgagggccttcgctgggatctct

SEQ ID NO: 13632 - DNA, 478 bp, Glycine max
  unsure (1)..(478): unsure at all n locations
agcttgttcttgactcatcttctccttgaagtgtcgtctccaatcatctttcctccttctccattccgcttccattgatcttcaagaagcaaaggactccattgatgaaaaagatccaaggcctacaagctccacatggagctacatcaattaggatcttcatcaagctttctccttctaaatttatttggcctactacgaccctttttgtattttggtggttgaatctcatcaaatctataactggccacatattcataccattaattgatgtcaccttacgtccataacaaacaccatatgtatcccttgaatattaattattcacataatcgacaaccttaanaaaatttaattgtattgcaaccactacatgtgtgcaaggtatgccaaccaatctccanaagttacatgaacaactcnntgttgttataccaataataaattnttcaatagaataaatatatgacttcaaaat

SEQ ID NO: 13633 - DNA, 494 bp, Glycine max
cggttcatatcattattagattacatattattctcttatttatgattagatactaaatagtgatttagtccttattactctttattaaattgagggcgagccctggtgcagcggtaaagttgtgccttggtgacttgttggtcatgggttcgaatccggaaacagcctctttgcatatatgcaagggtaaggctgcgtacaacatccctcccccataccttcgcatagcgaagagcctctgggcaatggggtacagaagttttattttttactctttatataattgatcctctataatcaatattaatcctatttgttcattataaataaagacttagtgtggtcatccaacacacacacaacactacagtaaaatacttgtatatattaacatctttgagagaaatatcatatcatgtacacttaacaataacagcaatataatgagttgcctgatatacatatcggaatagtctttattttcgctatgtcac

SEQ ID NO: 13634 - DNA, 152 bp, Glycine max
tatgaccatatcaatcgctggagagtttccgacgtctaattatgagcgtagccatatatgatacccctggagaggacctccgagcgaaaagatatgaccatagcaatcgctggagagcttccggcgttcaattacgagcgtctctatatatg

SEQ ID NO: 13635 - DNA, 436 bp, Glycine max
  unsure (1)..(436): unsure at all n locations
agctataatatatcgaanatgaacaacggaagctctcgtatattcaaatggtcataactnttcacactgaggtccgattcaggtttataatgtatcgatacactcgaaattaaacatcggaaactctctagaaattcaaatggccataacttttcacacggatttccgattcgggcgcataatatgtcgagaggctcgatattgacaacggaagctcttgagaaatcaaatggcataactntcacacggatgtccgattcgggcaaatcacatctcgagacgctcaaaactgaacaacggaagctctcgagaaattcaaacggtcataacttttcacacggatgtccgattcaggcttataatatatcgatacgctcgaaattgaacatcggaaactctcgagaaattcaattggtcataacttttcacacggatg

SEQ ID NO: 13636 - DNA, 471 bp, Glycine max
  unsure (1)..(471): unsure at all n locations
cgttattaatatagttaataaaaataataactaacatgagctacgcctctgttttactaaaggtatactctgatataattaattnttccattgtttctagtctaggaattaggatataaacatggttttaaaaaaagtttgtggtcatcaatgtgtgtagttacactctaagtttgtaaggagaggatatatatttgattttaaaagaatatattatggtgaagataattggagatccaactgaggaaccaaagaatnttaattactgtgttaacgatggtgcaaaacatatatggtgattacaatttaaaaccatttgaattaaaagataattaaccatgtatgaaacgtaaaataaattaagagaaatattaatttaatttttgtgtgaatatgttagctagagttggaatttcaatcgtgttgaagtgggttctgcatgattggaacgatgaactctctgtgaagata

SEQ ID NO: 13637 - DNA, 491 bp, Glycine max
  unsure (1)..(491): unsure at all n locations
tctcacgcccttgacatttattggaggaggaagtttctcaatatcatcaatcttagccttgtccccctcaatccccctcactaaaattttatgtcccaacactatgccttcttagaccataaagtgacatttttcccaattaagcaccagattagactcttcacatctctgtaatactctttctaaattccatagacaacaatcaaaagatgagccaaaaacaaagaaatcatccatgaaaacttcgatacatttctccaccatatcagagaaaattgccatcatgcacctctgaaatgtagttgaagcattacaaagatcaaaaggcatacacctataagcgaacacaccaaacgggcaagtgaaagttgtcttctcctgatccttaggatccactatgacctgattataatcagagtatccatccagaanacagtaaaatgctnggccctgcagtctttcaagcatctggtccatgaagggaagtggat

SEQ ID NO: 13638 - DNA, 389 bp, Glycine max
tggtcataactgttcgcacggaggtcttattcatgcgcataatatatcgagacgcaagatattgaacaacggaagctctcgagaaattcaaatgctcataacttttaacacggaagtccgattcaggcgtataatatatcgagactcacgaaattgaacaacggatgctctcgagaaattcaaatgggtataacctttcactccgatgtcagattcatgtgcataatatatcgagactgctcaaaatttaacaatggaagctatcgagcacatctaatggtcataacttttcacttggaggtccgattctggcgcataatatatctaaacgcacaataattaactacggaagctatcgagaaattcaaatggtcataacgtttcacttg

SEQ ID NO: 13639 - DNA, 490 bp, Glycine max
  unsure (1)..(490): unsure at all n locations
ntccattctctnggaagttcatcattgggattgacttcttctggaggatcttcattgtttcctttatcatttcctttggaatcttgttcatgaatattcatatgttctaaagaatctgcaatatcatctagcatattctttcttgacaagatagcattagattcatcaaaggtaacatgaatggattcctcgatattcatagttcttttattatatatcctatatgctntgctntgtaatgaatatccaagaaaaataccttcatcagattttgcatcgaattttcctagattatctttaccattattaagcacaaagcatttgcaaccaaaaacatgtagatgagaaatatttggttgtctaccattatataactcatatggngttttctttaaaatgggtcttattaaggccctattcatgatgtaacatgcagtatgtcgcttcagcccanaaatactntggaagagaagtatcatttaataaagtt

SEQ ID NO: 13640 - DNA, 488 bp, Glycine max
  unsure (1)..(488): unsure at all n locations
agctaagtttattcttcttggtgatgcacctttcgatccccaccaaattcaattcaacatcctctgaatcacatcctttagagttgctggaataaagtagatactcatggtgtatgaaggcatttgctcttctccaagtcactatttttcttaaaaaacagaccttttccaggatttctctttaaatacctaaaaatttggtagaatgcctcaatgtgtttttcataaggagagtgcataaactgatgtacaacactcactgaaaaaacaatgtgttcgggtataagacaagtaaatcaatttgccaactaacctttggtatcttccaacatcaataggaaccacttccttttcccacaatttcccattgggatcgatggnggtatctgctggtctacaaccgctcattccagtttcttccaagaggtctagaatatccttctgtanggaaacaacaattcctctttttgagcanacaaactccattc

SEQ ID NO: 13641 - DNA, 492 bp, Glycine max
  unsure (1)..(492): unsure at all n locations
nttcctttgngttctctgctagagtttccaagtgttagagagtagaagaaggaattgaagccttaatttcactgtgtccctgcaaggggcatttatctctctttactggcattatttcgcaaatcccaacagtgggaatgtgtaaaaataagttttaaagggggtgtccaaatttcaggacgatccaatggttaataagtccaggattgtagttttactgggataggtttgggtgtatgtgggaaaaagagagggttttgggagaggaagaatggaggacgaatttgggagaaagagagagcgtagaaacatatcgtaaatgtaaaagctaacttaatatgtctctatttatagttagggtactctaagcctattatttactctatttttctttattntattaatttataaaaatgaactctatntttctatttcattaaataaataaccaattaaaaacccctttattgtctanaacatcactgtactcta

SEQ ID NO: 13642 - DNA, 397 bp, Glycine max
  unsure (1)..(397): unsure at all n locations
nntgatttccttgttccggagacctttcatttctcatgtgcacccaaacccaatctacgggttcgaagacaaccttctttctccctttgttggcttgtttagcatagcttttatttttcctctcaatttgatctttgactctctcatgaagcttcttcacatagtccgcctttgcttgaccttctttatgcttaaaaacagaaacattatgcataggcaaaagatcaagaggagttagtgggttaaaaccataaacaacttcaaaaggagaacaattagtggtgctatgaacaactntattgtaagcaaattcaacatggggtaaacaagcttcccaagttttaagttcttcctcaaaactgtcctaagcaaagttcccaaagtcctattaacaact

SEQ ID NO: 13643 - DNA, 502 bp, Glycine max
  unsure (1)..(502): unsure at all n locations
tgtaatcgattacacaaatactgtaatcgattaccagagcagattntcttataatattctcatcagtcacatctttttatttggttcttgaatggccatcaaaggattatatatatgtgacttgagacacgaatttgctaagagtttttcagaacaaaaaggtcttatcctcttaaaaagcaaaattgtttcatcctcttaaaaattccttggccaaaacacttgtgattcaataaggaattatttgagtgctcaaattgttcaatctatctctttcaagagagattacttcttctttattcagaanaaagaattaagagaccgagggtctcttgttgtaaagaaatctaaacacaaaggaaggattgtccttgtgtggttcagatcttgtaataggctnttacaagatagtggaactctcaagcgggttgcttgtggactggacgtangcacaagggtgtgactgaaccagtataaatctgagtntgcattctctcttccc

SEQ ID NO: 13644 - DNA, 454 bp, Glycine max
  unsure (1)..(454): unsure at all n locations
cttggagtttccaagtgccaattcgtcttcttctttagtccagtcttcttctggcttctatccatcagtgggctttccttctgtgtccagcatcttgggatgttcccagcctttgatgacagctttccaggttctgctatccagtgatttgaggaaggccaccatccttgctttccagtattcatagttggttccatccagaattggtggtctgttcactggtcctccttctttctccatgttcatcagaatntatctccctaggtctcactcagtgatttcgagtgcctgctctgataccaattgaaattctgataccaatgccagatgtcgtacaggatgtcacgacatcacgcttcagaacatgcagattatctctgagtgtatgaacagattaaacaagtaaataacacaagagaattgtaacccagttcggtgcaacctcacctacatc

SEQ ID NO: 13645 - DNA, 391 bp, Glycine max
  unsure (1)..(391): unsure at all n locations
gtctgattgagtcctgtaatatatcgacacgctcganattgaatgttgaagctctgagcaaattcaaacgacaataaatttttattcggatgtctgatattgtcccgtaatataacgagacgctcgaagttgaatgctgaagctctgagcaaatacaaacgacaataacattttactcggatgtcggattgagtcccgtaatatatcgacacgctcgaaattgaatgttgaagctctgagcanattcaaacgacaataactttttactcggatgtctgattgagtcccgtaacatatcgagacgctcgaagatgaatgttgaagctctcagcacaatcaaacgacaataactatntactcggatgtctgattgagtcccgtcatatatcga

SEQ ID NO: 13646 - DNA, 367 bp, Glycine max
atgttcttaagcaaaagctatctattgccctcatacttgcgttgccaaactttcaaaaatcttttgaaattgagtgtgatgcttcaaatgttgggattggggctgtgttgatgcaagaaggtcatccaatttcttattttagtgaaaagttaagtggtcctacccttaactattcaacttatgataaggagttgtatgtcttagtacaggctttgaaaacatggcaacactacctttatcccaaggaaattgtcattcatagtgaccatgagtccctcaaacatatcaaggggcaaggcaagcttaacaaaaggcatgcgaagtgggtggaattcctagagcaattcccttatgttatcaaacataa

SEQ ID NO: 13647 - DNA, 495 bp, Glycine max
  unsure (1)..(495): unsure at all n locations
tgtgcctcttcacattnggaatatgaatgcaacatatagatccatagacccataggtgctntgctgatggcttcttcccgttccaagcttcaattggagtcttgtcttttacagacttagttagacatctgttgagtatgtaaacagcagtgtagactacttcagcctagaatgtgttaggtagtcccttctccttgagcatcaatctagccatttccgtaactgtgcgattctttctctcagacacttcattntgttgagaagaatatgcggcagtaagttgtcgctcaatgccttcatcctcaaaaaatctttcaaactcgcgagaggtgtactctntgtcgcgatcacttcttagtacttttatccgttgtccacttcgatttcagcaagggccttgaacttcttgaatactccagagacttctgattattcttttagaaaatatacccatgtcattctagagaattcatcaatgaagagtatgaagtacct

SEQ ID NO: 13648 - DNA, 507 bp, Glycine max
  unsure (1)..(507): unsure at all n locations
tctaagggagtgggtatcctatttactaataacagtttataacagttcatccaggctactattctatccactctntgcagtgtcttcatggaccaaagtggctgaaagctgaagttcttttttggttagtataggcttaatttttcagtgcaatctgtcttagtcttactgcttactctgattatcattattctatctaatttatcagcaacataaatactggcaaacatgaagaatgaatttctctgtatacctgtatggtgggcagttactgtatccaaaagtgtgttggtagtataactattggattgcagtcttattcgtcttggctcaacaacatccaccgagctcttagaccaaaatgcanaggtagatgaatcgaatntctgcataattcaattagaanatgttatattgagattgactacaaattaatttcaaaatttcacanaggaaaacaacaagcttacatcacatcttgttatgttctcaattggatatattctc

SEQ ID NO: 13649 - DNA, 483 bp, Glycine max
  unsure (1)..(483): unsure at all n locations
gcttgtacctcatcactttcttccgaagctntaacctcattgtctctcacagtctttagatttgggagccaatccaatccttgtgtccgaactctcagccacttatgataaccgccgatgatcccattactgcttcccctaagctctctgtcctttcttcacaccgcatcccatgccttgcgaactccttggagtacccttgcgttgtggtcactgaaaccccgtgcgatgaaaggcgtgatgctttcatctgatggcactcctctcatggggtagccaagctgtcttatggtgaggacgggattatatgtgtgccatctctagatgatttgaaagttcagatnttggaggaagcacataaaagtcgtcttagtttccatccaggaatgactaagatgtaccaagatttgaagaagaagttttggtggcatggcatgaagaaagatgtagccgaatatgtagcaagatgttcgacatgtcaaa

SEQ ID NO: 13650 - DNA, 439 bp, Glycine max
  unsure (1)..(439): unsure at all n locations
tgtaatcgattacacacatacagtaatcgattaccagagcacattttcaaaaaatattctcaacagtcacatctttttatgtggttcttgaatggctatcaaaggcctatatatatatgtgacttgagacacgaatttaagaagagtttttggagaacaaaaaggtcttatcctattaaaaagcaaatcgtgttatcctcttacaaattccttggccaaattacttgtgattcaataaggaattatttgagtgctcaaattgttcagtctatctctttcaagagagatttcttcttttcttcttcttcattctgaaaagggattaagagaccgagggtctcctgttgtgaaagaattctaaacacaaaggaagggttgtccttgtgtgtntagaacttgtaaaaggaatntacaagatagtggaactctcaagcgggtt

SEQ ID NO: 13651 - DNA, 328 bp, Glycine max
  unsure (1)..(328): unsure at all n locations
agaatcagacatccgtgtgaagagatatgtgcattagaatatctcaagagctttcgcaggacaatttccagcttctcgacatattatgcgcccgaatcggacatccgtgtgagaagctatgaccatttgaatatctcgagtgctttcgatgtagaatttccagtgtgtcgatatattctaaacctgaatcggacctccgtgtgaaaagttatgactatntgcatatcaggagaggtatcgatgtagaatttcgagcgtatcgatatattataagcctcaatcggacatccgtgtgagaagttatgaccattagaatttgtcaagagct

SEQ ID NO: 13652 - DNA, 490 bp, Glycine max
  unsure (1)..(490): unsure at all n locations
cagactcanaacagcanaactcaagccataattcgaatgaaaatagatccatgacaagatagggtgctataacctttagcaccgactaactaccataaagatcaagaaagaaagaccctcttagcgcaaccttctagcttccctttcagactcgagtagggtgagaatgtctccttctctcactggtcctttaacattcctcatgatgtgacggttctgatcatccagaaacttcactctaacctgggtcacctgtcctctggatccagtacgacccattactttgacaacaagtgcgtgcttcacctgagactccatcctgctcaaacacaatcaaaccgttatgagatgaaagtggaanacaaatgtgtttaatgaatcaatgacagataaatcaggaataacatcttccaaatgcaaaaggactcaaaccttaaatcattagctcttcaactttcaattntcacagaatcatcctaacagcgaatga

SEQ ID NO: 13653 - DNA, 497 bp, Glycine max
  unsure (1)..(497): unsure at all n locations
ctaagcttattctacacctganaagaggatgagatggttgcacaaaagagatagctccttgatcatgagggagctaacaaaaattttcatgcagatggaccttcttctactagctctgacttgcagtagcctcttatccctcttccatttccacctagagcaattccaaacaaaaaaatggaagaagtggaaaacgagatcttgaagaccttcaggaaagtagaggtgaacatacctctgctagataccatcaagcagattccaagatatgccaagtttctaaaggagttgtgcacccacaaaaggaagctcaaggtcaatgaaaggattagcatgggtagaaatgtgtcagcattgataggtaaatctgttcctcacattcttgagaaatgttaggacccaggaactttcagtataccttgtattattgggaataataaatttgagaatgccatgctagatctangagcatcaattagtgtcatgcctctgtccat

SEQ ID NO: 13654 - DNA, 475 bp, Glycine max
  unsure (1)..(475): unsure at all n locations
cctatntctcatacatgcatgacagtcacgttgtattcaactattgcaacaccaccggtgatgtcatacacatatgtcgtaagcacagcagaaccccttgcatatttgaagatcccagtacccccaacaattggcatttctctaacttttataaatgtagggtttctgccaagaatgctgagggtgctgccattgtaaatgcccaaagtgaagagaaaatttgtcaccatgagcaacccaggctcatgttgtgaagccaaagcgtatattccctgagatcttcccacaagctntgaagttggacttggtccttcagttagagggtcatccatcatgtaagtagccccaaaaccatgaatggaccccttangaggcaaaacagttttcatagcagttgggtgttcccccgttatgttgttatggaaatagaagtggagttgggtgaagttttctttcacgggttctgtggatggat

SEQ ID NO: 13655 - DNA, 405 bp, Glycine max
  unsure (1)..(405): unsure at all n locations
ataactnnttactcgatgtctgattgagtcccgtaatatatcgagacgctcgaactggaataccgaagctctgagataattcaaacgacaataactttttactcggatgtctgattgagtcccgtaatatatcgaaacgctcgatattgaatggtgaagctttgagcaacttcaaactacaataactttttactcggatgtctgattcagtcccgtaatatatcgaaacgctcgatattgaatagtcgaagcttgagcaaattcaaacgacaataactttntactcggatgtctgattgagtcccgtaatatatcgagacgctcgaactggaataccgaagctctgagataattcaaacgacaantaacttttactctgatgtctgattgagtccgaatatatcg

SEQ ID NO: 13656 - DNA, 392 bp, Glycine max
gcttcggtcttaatttcgagcgtctcgacatattttatactcaatcagacatctgagaaaacgtattgtcgttgaatttctcagagattcggcataccatttcgagcgtgttgatatattacgggactcaatcatacatccgagtaaaaaagtgatggtcgtttgaatctgttcagagcttcggtattcaatttcgaccgactcgatatattacgggactgaatcagacatccgaccaaaaagtttttgtcgtttgaatatgctcacagcttcggtattccatttcgagcgtcttgatatatcaccggactcaatcagacatccgagttaaaagttattggcgtttgaatttgctcaaagacctcacattcaatatcgagcgcttcgatata

SEQ ID NO: 13657 - DNA, 399 bp, Glycine max
  unsure (1)..(399): unsure at all n locations
aggacnnctttgagggccaccaacaattttcacctcacacctccattggaagaggtgggtttgggttggtttacaagggcattctacctgatggctcaatggttgcagtgaaaaggcttgaagaatcatattctcaaggagatgctttgttctaaagcgaggtggagaatgttagcaacttgaagcaccgtaatctggtgccattaaaagggtgttgtgtggttgatgaggaggatgataaccacaattttgagtactgaaggtatctagttcatgaatatatgccaaatggtagccttgaagaccatctcttttcaaccatattagacaaccaatatacaaagaagtcccttacttggactcaaaagaaaagcataatcttggatgaggcatatgctt

SEQ ID NO: 13658 - DNA, 372 bp, Glycine max
  unsure (1)..(372): unsure at all n locations
agtgtccgagcgccaattcgtcttgttctatactccagtcttcttctggcttcaattcttcagggggctcttcttctgtggccaacatcttgggatgttcccagcctttgatgacagctctgcatgctctgctatccagtgatctgacgaaggccaccattcttgctntaccatattcatagttgcttccatcgacaataggaggtctgttcactggtccgccttctttctccatgttcatcataatctatctgcctagatctcactctgtgattacgagagcaggctttgatccaatagagattctgataccatgggacagatgtcgcacacgatgtcacgacatcacgcttctaacatgcagatatatgt

SEQ ID NO: 13659 - DNA, 423 bp, Glycine max
  unsure (1)..(423): unsure at all n locations
tgcaagcttcattggagcttgtaggcctaagatctttcatancattggattcctttacttcttggaagataaatgtcagcggaatggagaccgcaccacagagaggagacgccacttnaaggagaagatgagtctagaagaagctcaccaccataggaggccatggataagatcttggaggaagaaggatatgaatgaagggagagggagagaacagcacgatattttgtgctcaaaaggagctctgacatctgaagttaatattcgaatgatcaaagttgnaaaaaatgcacacacatgacctctatttatagcctaactgtcacacaaaattggagggaaattcaaacttcacttgaatctgatattgaatttgtggagcctaactctggagccaaaatttctctaattatgattagtgaa

SEQ ID NO: 13660 - DNA, 398 bp, Glycine max
agcttgcaattgaacaacggaagctctcgaaaattcatatggtcataacttttaactcggaggtctgattgaggcgcattatatatccacacgctcgaaattgaacaatgggagctcttgagcaattccaatggtcataacttttcactcggaggtccaattcaggcgcataatatatcgagacgctcgaaattgaacaatggaagctcttgagcaattcaaatggtcataacttttcactcggatgtccgattcaggcacataatatatcaggacgctcgaaattgaacaacggaagctctcgagaaattcaaatggtcataacttttcactcggaggtccgattgaggcgcattatattttcagacgcttgaaattgaacaaccgaagctcttgag

SEQ ID NO: 13661 - DNA, 493 bp, Glycine max
  unsure (1)..(493): unsure at all n locations
taacacgtatgtgatgcaatccaaccccgcaagggcatnggatagataactcctagtagaatgcgccagagatgtaagagaaggccctanggttcttatgagccttanggtagatttcggacccatgggctaagtacgagcccacttatctttgtaaatattagattaaggtttcattatttttgggccttgtatttagggctccataatgtaggtagggtaccctagaaatatangatttttcagcccttgtattttagggcacctagactacgttttgtattaggggtagttttgtaatttcacatgcactaagtggatatttgatgtgtgtggctggaaataaatttaattgaattggtagaagcccaatccaattaatatttagagggggaggtgagcatttgcttactacaccccattgccatatcatatagtcacactttgtgcatgtncttcatngctttcatgcctcatgacacctaagcacact

SEQ ID NO: 13662 - DNA, 425 bp, Glycine max
  unsure (1)..(425): unsure at all n locations
tgtgtagtccaccatctnttcatagtatattactggtaatgtgtctactatcattatcantttttcttcgtcattgaggtgccacttgagttgccaggtctctccacctttgggcgtattctttgaaagatctgtgcccctttttgcacatgttctattgttgcatcctatccggaaccatatcaaaattgtactgatagtgcctaatgaaggcaaccattangtccttccaagagtggactcgagaaggttccaggttagtgtaccaggtaacagctaccccagtaagattttcttagaaggaatgtatcangagttcctcatcttttgcgcatgcccccatctttcgctaatacatctttagatggttcgttgggcaagtagtccccttgtacttgtcaaagtccatcaccttgaacttgata

SEQ ID NO: 13663 - DNA, 479 bp, Glycine max
  unsure (1)..(479): unsure at all n locations
tgcaagcttcacatagctcccactctcgtactcctttttacaccctattcattcggatagagagtgaataatccaaagaanatcagcatctatcatgatgtgcacaaatttctgcaacttcatttgcattactttcttgcaaaatgtgtggaaatgctattatttttttggcatcttaattctgatttccttattgatttggctaataggtcattttaatacgttgatattccagagatgcatgttagtagtaacttttcccaaaaaattataattattagagctatatacaaatgaagttcacacctgaagattaagctcattgtatagggcctttactttagcaacattttctggatctggcttaccatagttctcctgcaaaccacaaaaaaatagtgacttattgcagtctaatcatggcagaaaataaggaaagaaatangaaataataagacgctcacttacttgtagaaatt

SEQ ID NO: 13664 - DNA, 429 bp, Glycine max
  unsure (1)..(429): unsure at all n locations
agtaganagagganacagacatggaaccttgtttttgtgtgttcttttcatgcttaagttgaaaaattaaaggaccatttcgttgctcaatacgttcttgaagatcatcccagattgctttggcagaagaacaatgtaagatactgacttgcatttctttggataaagaattaatgagccaggaagaaacgatactatcattgcgatgccacaaagcatgagtggagtgacccaaagcaggtttaggaattgaaccatcaacaaacccatatttgttcttcccatgaagagccatgcacattgctttcttccaagaattgtagttatcaccggtaagaggatgagaaactaaggcaatgccaggatggtcggaagaatgaagaatgaaggggttagaatcatcaatggcagccatggtcatgagataaa

SEQ ID NO: 13665 - DNA, 436 bp, Glycine max
  unsure (1)..(436): unsure at all n locations
gaaaagctagtaaatacttgtatattattcatttgcaacatgttggtataaaaaagtaacaacgataataaaattaattaaggcgtacccaacaagctttctcttgctttgaaaagtcattaatcgtaatgaaaaataacaattaaacaacaattaataaaagagaagtcaagcttattgaaaagctagtaaatacttggaaaatatccatntgcaacatgttggagtaaaaaagtaccaattatctcactaatgaaacttatatataaaaaacattaataaattaatcaacatgcacctttcaataagcgataataaattaatcaaagcgtataactagagacatgttgacagtaaatattaatcttcatctattattgatcttatttataaagaaactgtaatgaataatactatcatgttagaagtcgggtat

SEQ ID NO: 13666 - DNA, 463 bp, Glycine max
  unsure (1)..(463): unsure at all n locations
gtactctagagtgctaagctgctaattaatattgttcattcaactggttcacaatgaggttaatatcagtgttggaggaacccgcgatgattatatcatctacataaatgagattaagcaggcagcaaccatgtttgttgaatacgagaagagagggatcacacttggattgttgaaaaccaaaggagatgagagtatttgtcaaactctcataccaagcccttggggcttgttgtaaaccatatattgccttgtgaagtttgcatacaagagtggattcaccctgaataaagccttgaggtttttgcatgtagacatcttcatggagttgcccattaagaaaggcattgttgacatcaagttgaataaggcgccatttggaagtaagagcaatggtgaggacaattctcagtgtgattggtttcaccactggagagtangtgtcactgtaatcttgaccata

SEQ ID NO: 13667 - DNA, 422 bp, Glycine max
  unsure (1)..(422): unsure at all n locations
agcttgngatgaaacagatgtgattcatcaaaaatttcttctctgctgagtagaactttcttttcggatgatgaccagatcctatagcctctcaccccatcaccataacccatgaacagaccctttcttgatctaggtaccaactttccttcattgacatgataataagcattgcagccaaatactcttaggtttgagtagtttgttgttttgccattccaaatttcaataggagttttaagtcctatagcagtagagggtgttctattgattagaaaacaagttgtattgatagcttcttcccaaaaacttctgctgagaccagcattatacaatagacatctttgtctttccagaagtgttttgttcattcttttagcaactccacttttctgaggagtgttactaacagtaagctgtct

SEQ ID NO: 13668 - DNA, 475 bp, Glycine max
  unsure (1)..(475): unsure at all n locations
gagnngcaagagacatgttagagagatctcttgantttgcatttgcaannacctnnggntggctttccctgcttaaacatcttagaactttgcccatgaaatccttattaggaaatatctttcctaatgatgcaagatgaataactatatgtgtaaatctcttttgcatatcttgtatgatctcattttgattcattctgaaaagttcatattcatgtgttagggtgtttattctagatctcttaacatctgttgttccttcataggttacttgtaatgtatcccatatttcttttgcattcttacaatttgagactctaaagtattcatccattcctaatgcagaggtaattatatttttagcctttaagttatattgtaccctttntgtttccccttcatcccactgtttcctaggtttttctatagttgcatttcctactaccattgtggggatgtaaggaccggtttcaat

SEQ ID NO: 13669 - DNA, 449 bp, Glycine max
agcttaacatgttgtgcttggctactctcaatgatttcatgttgatttctaaaggaaaaactacttcatgctcgtatgtcatccgaaatacggtacaaccagttgctttggtgggcatatttcgacaagcccataatgcttcttgtcatattttcagatgatcttataaattcttcttaattatatcaatcaagatcttattggtagcttcaactttctcatttgcttgtttataataatgtgttgaatgtacaagcttgatgtcgaattgttgtacgaacaaattcaccttgtctccagtaatcataattccttggtcagatgtgatagactcacgtatgcggagcaataaaataatggtatgtttaatgaatctaaaaacaacttcttgagtcgcaataaccaatggcttagcttccacccatcttgtaaaataattagtggatact

SEQ ID NO: 13670 - DNA, 444 bp, Glycine max
  unsure (1)..(444): unsure at all n locations
atgtctggatatactgtcttctttccatgctttagnngtangaagctngngnnnnnctcacagataggacatgcatgatgccttttcgcactgcctccacttaaatntccatattctagaaaatcattaatagtacaaaacaccattgtgcgtaacctgaacgtctgctgcacatttgcatcccacgcatctaccccttcttcccacaattgtttcaagtcttcgattaacggcgtaagatacacatcaatatcattccctggctgccttggatccgcgatcgtcatacacaggataatgtatttacgcanaatgcacaaccatgtgggaaatgtgaaatcatcagtaaataggcacgaactgtggttgctgttaagcaccataagataatctcatagaacaagagcagccttagttcttgatcatccaaacttaatacaacat

SEQ ID NO: 13671 - DNA, 318 bp, Glycine max
agcttctcactcggatgtccgattccggagcataatatatctagacgctcgaaattgagcaacggaagctcttgagaaattcaaatggtcataactttccacatggatgtctgattaagacgcataatatatcaagatgttcgaaattgaacaacgaaagctctcgagaaattcaaatagtcataactcttcactcggaggaccgattcatgcgcataatatatcacgacggtcgatatagaacaacgaaagttcttgatagattcaaatggtcatatcttttaaccctgataacctatttagagacattacatatag

SEQ ID NO: 13672 - DNA, 384 bp, Glycine max
  unsure (1)..(384): unsure at all n locations
atgtcagcttcccgccagaactctatgggcngattgtgtgatttattatacatcaanacaagccccttaaaaaaagtgacttgacaaaaacacgccctaaaacatgagaaaaggaacacaatcacggttggggattcataggcaagttaccagcctttcttgttctgaagatcgaccagcgaaacagcttttctttattcttttaattgcaacatgcgatcctctccattttccatggtacacagtcccaaacgtaccagaacgcagctctggcaactcttctagatattcattctttatgaactgccatgtgcactttanatatatgtgataaattaaatgtcactaatcttatgaacgataatctataatgtgatttgagaa

SEQ ID NO: 13673 - DNA, 345 bp, Glycine max
  unsure (1)..(345): unsure at all n locations
tgttcatcatcggaatctcgttagacttcttggntgttgcgcatatgccccgagagaatcctagnttatgaatatatggcaaatagcagccttgacacattcttatttggtaactcacttcaaccatcaatggaataatatgttgaatttttattgccttttcttctcttctccacaatcttacgtatatataaaaacatgggaagcacgttccaaaaaaggttccctcaattggaaacaacggtatgatatatatttgggcacagcaaggggactagcatatctacatgaggaagtccatgtgtccatcattcataaagatataaagaccggtaatatccttct

SEQ ID NO: 13674 - DNA, 411 bp, Glycine max
  unsure (1)..(411): unsure at all n locations
agcttcttagtctcggctgatgaagatgaattcgtggctacttcatgcactcccctaatgacaatagcatcacttctggcactaaattgctgggagtttgaagccatcttctcaattaaacttctagcttcagcaggggtcatgtctacaagggctccaccactagcagcatctatcatacttctctccatgttactgagtccttcataaaaatattggaggagaagctgctcagaaatctggtggtgaggacaactggcacatagtttcttaaatctttcccagtattcatataagctctctccactgagttgcctaattcctgaaatatctttcctgatggccatggtcctggaagcaagggaaattntttctaagaatactctcttgaggtcatcccaacttatgata

SEQ ID NO: 13675 - DNA, 403 bp, Glycine max
  unsure (1)..(403): unsure at all n locations
ataccttntngtatgagtatgctttagcaactattcttgttttgttacttacaactntaccagtttcatccagtttggtgggaaagacccacttcgctcctacaactttttttcctttnggcaattcaactaacttccaaacatcattcttctgaaactgatcaagntctgtttgcattgctgtaacccatttgtcatcttccattgcatcaacaatgtggttaggtgccattttagagaccagcgcaggaagcgcttgtgttttgagtgatgatcttgtttgaacatgatctactagatcaccaatgatttgactatctggttgatttattctcatgatgcatccagtgggttactcgaccgtcttctgaactatctgttgagaggacactttctatcctgg

SEQ ID NO: 13676 - DNA, 476 bp, Glycine max
  unsure (1)..(476): unsure at all n locations
tgtctctgatcaaacacattgtgctgtacagaaagtttctttataatangaattctccccanaaatattanggttgtcaagactatgaagtcaacttcattcactntgttgccagagtcactggtatcttccattcacacagatgttcaaaaaggattggttccttgttatctttgtgccactgtgggaacaacttcaaccactgcaattgatccattangaccactgtgcaaggtggcaaaagaatatggcatgtgggtccatgttgatgctgcttatgctggaagtgcatgcatttgtcctgagttcagacacttgattgatggagttgagggtgcaaactctntcagtctcaatgctcacaagtggtttctcactaacttagaattgtgctgtctttgggtgaaggatccagcttctgtgattaagtccctatcaacaaattcagtgtacttagaaaacagtgcttctgattc

SEQ ID NO: 13677 - DNA, 403 bp, Glycine max
  unsure (1)..(403): unsure at all n locations
gctntgaatgcactattcaatggagttgacttgatttcttcagactgatcaacacttgcacagtgtccaaagatgcatgggagatcctgaaaatcactcatgaaggaacctccaaagtgaatatttccagattgcaactcttggctacaaaattcgaaaatctgaagatgaaggaggaagagtgtgttcatgacttccacatgaacattcttgaaattgccaatgcctgcactgccttgggagagaggataacagatgaaaagctggtgagaaagatcctcagatccttgcctaagagatttgacatgaaagtcactgcaatagaggaggcccaagacatttgcaacatgagagtatatgaactcattggttctcttcacacctttgagctatgactctcgga

SEQ ID NO: 13678 - DNA, 382 bp, Glycine max
  unsure (1)..(382): unsure at all n locations
agcttatgctgcanacatatacaatagacctcctctacctcaatagcaaaatgaaccacaacagaacaattatgacctctctagcaacagatagaatcccggatggaggaatcaccctaatctcagatggtctagtcctcaacaacaacaacaacaacctgctccttccttccaaaatgctgttggtccaagtagaccatacattcctcctccaatgcaataacagcaacagcagcaacaaccctagaaacagcaaacagttgaggcccagaatcctgacagattaccttctcaatctgtccagaatcctaagaatgtgagtgccattacattgaggttgtganagcagtatcaaggacctcaaccagtatcatcttcctca

SEQ ID NO: 13679 - DNA, 477 bp, Glycine max
  unsure (1)..(477): unsure at all n locations
taagctcgaggtcacaatgacattgactgggctagagatgaagatgatcatattagttttattggatatatgtttttcatgggaaatacaaccttcacttggatgtcaaaaaagtagtcgatatatagtcattcttttgacttgtaagccaaaatacgtagcagttgcttcatgcatttgtcatgcaatatggctcaagaatttgttaaaagagttgggcatgtcacaagaagagttgaccaagatcnttgtcgataattaataagtcagtcattgctctagcaaagaatccaatgttccatgatcgaagcaaacatattgatacccgttaccactacataaaggagagcacaacaagaaaggatgtacatgcaggatatgtgaagtctcaagaccaagtagttgacatcttcaccaagccgctcaagcaagaagactntatcaagttaaaaagcttacttggaatgataaatcaag

SEQ ID NO: 13680 - DNA, 409 bp, Glycine max
  unsure (1)..(409): unsure at all n locations
gcttaatgaattactgttgtattgaaaaatgtcttttgagataacacgttaccaaagactcattacgaggcaaagaagatattatgtcctgttggaatggaataccaaaaaatacatgcttgccgtaatgaatgcattttgtatagacatgagtttgctgaattgtgcaactaccctacatgtggggtgtcacgctacaaagtgggttctggcgcttccagtgaagctggatccacatacattgatcggccagcaaaagtgtgttggtatcttccagtaataccaaggtttaagcgattgttngctaatgcagaagatgcgaagaacctaacatggcatgctgatggtaggaccaaagatggatngctccgtcatcctgctgattcttctcagtggaagaaagttgatc

SEQ ID NO: 13681 - DNA, 415 bp, Glycine max
  unsure (1)..(415): unsure at all n locations
tacactacgaacacacaccctatcttgtacttctttactccatcagntcccactctaaaactactctctctccttgcgactatcgactctaactgggctgacaagaatgggtcagacttctgacccccacggatctcgctcaagagttcgaaggtgactctcaacatacccaacttaatgctactagaggtgatctcacatgccaaactcatgtctctaaactgctctaagaggtccagctctgtaaccatcaaagcagacatttgaagggatttcctacttaatgcatccgctactacacttgctatacctgagtgaaagctaagctcaaaatcgtgatccttaaggaactctaaccatcttctttgcctcatggtatgctctttttgatcaaacaaatatgtaaggctcttat

SEQ ID NO: 13682 - DNA, 488 bp, Glycine max
tactaagcccgatggtgaccaagtattggccatgcacctgaaactgtaggagcttctttttatctttgggcaagtttgaggggattatacagaaacaaacagaagaggattagagaaacaaatccaatggcagtgacatttaggtaattgagaataaaatccatccgagttaattaagtttgtgaattgtaaggcctgaagagatatgcaataatgctgtccttaaatagattattcattgatatgtaaagaatgaaaaagtcaagtgtatggcaaggggtgaagaggacgtacattaaaatttagggctctaagtcaatattaataagacaagataagtttataggataagaattgaacttgattttcttgcacatatttgatgaagaggaatgaggagtttaagtgcatttaagctcctaaacaaaaattagtcttataattaattagtctaaaaaaataaaacttgtaaattctttaaagattta

SEQ ID NO: 13683 - DNA, 278 bp, Glycine max
tctagactctttctgacttatctaaaacttttgagcgagaatgtgatgcctctagagtgtgagttggagctgtattgatacaacgtgggcaccctattgcttattttagtgaaaaactttatagtgccaccctcaactacaccacctatgataaagagctgtatgccttaataagagcccttcacacttgggaacattaccttgtttccaaggaatttgtcattcatagtgatcatcaatcacttaagtacattagagggcaaagcaagttaaacaat

SEQ ID NO: 13684 - DNA, 427 bp, Glycine max
  unsure (1)..(427): unsure at all n locations
gctatgctganacattacaatagacctcctcatccttttatcaaaatgaaccacaacagaacaattatgacctctctagcaacacatccaatcccggatggaggaatcaccctaatctcagatggtctagtcctcaacaacaacaacaacaacctgctccttccttccaaaatgctgttggtccaagtagaccatacattcctcctccaatgcaataacagcaacagcagcaacaaccctagaaacagcaaacagttgaggcccagaatcctgacagattaccttctcaatctgtccagaatcctaaaaatgtgagtgccattacattgaggttgggaaagcagtatcaaggacctcaaccagtagcatcttcctcatccgcaaatgaacctgcccaactttactgtactctagaanaagaggatga

SEQ ID NO: 13685 - DNA, 440 bp, Glycine max
  unsure (1)..(440): unsure at all n locations
tgctgataataagggaaacaaactcaccaatctagtccatatcttgacaaatataaggcctaatgcccagtcttgataaaggaggaatactggactttcatccactggaactctcattggcacaatgaccaaaagctcaaagagaagcccaataagcactgggataacaaatatctgtgaccaaaaaaagatggattaatcacttaaaagcaaatacagatctatgcaaaatcaaagggtcagccttggtaacatgatcagcaagaggaatcatccttacccatatagacagaagtgcagaactcttcacaagaatgccacaccacttccataattggccaaacaaaaccgaagatctcctttttcttattngctcaattgagtatctaactccagcaacagcagtccagatcacatagcttccaatgataaatgcatac

SEQ ID NO: 13686 - DNA, 383 bp, Glycine max
agcttgagggacaacttgatgccttggtctttctttaactcagcttgccatgaatcagagatctgcatctacacctgttgcacgagctcgtggtctatattcttctacaaatcatgatacagatctctgtccttctttgcaacaatctggagtcaatgagcaacctgaagcttatgctgcaaacatttataatagaccctctcagtagcaaaaccaacaacaatataataattatgatctttcaagcaacagatataatccaggttggaagaatcatccaaatctgagatgggcaagtcttccacaacaacaacagcctgtcccttctttccagaatgctgctggttcaagcaggccatatgttcctcctccaatgcagcagc

SEQ ID NO: 13687 - DNA, 467 bp, Glycine max
  unsure (1)..(467): unsure at all n locations
ngatgatgcttcatacatctcanaactcttcttagggaagttgtgagactccatggttngcctaggaccatagtgtcagatagagatgcttagttccttagccacttctggaaaaccttacgggccaagctaggaactaagtttcttttctctgctacttgccatccacaaactgatgggcaaacagaggttgtgaataggtctatatccacccttataagggcttttctgaaaggcaaccataagtcttgggatgagtatcttcctcatgtagaattctcctataacagggggttcatagaaccaccaagcaatccacttttgaggttttctatgggttcaatcctctaacacccttagacctaattcctctcccacttgacacttcttntatacataaagaagaggaatctatgtcacagtttgtaaagaagttgcttgagatggttatgaaccacatagagaac

SEQ ID NO: 13688 - DNA, 452 bp, Glycine max
  unsure (1)..(452): unsure at all n locations
tatgccaaaactgtcattatattcttcggatatagtatcttcaaagcttgagtgttgaagtgaccaaatcttcaatgccataaccatgaatcatctattgtaactctcatggcaatgccagtattagtagtatacttaaagcttattggaaaaaacttatatttcctttctccattttaacattggcaatctcttggcctttgttatttntatcatagataatgcacgtatcttcttcaaggtgaagataatagcctttctccatcatttagccaatgctcaagagattttctttatgatctggaactagtaagacatttttttatgatctctttaccttctttgtctccaccatgacagagccttttcctcttgactctaccatggtgtcatattccatttgaactttgactttgacagtgtcgtcaatttcctaaaaatgctccataatt

SEQ ID NO: 13689 - DNA, 334 bp, Glycine max
gctctccagacattcaaattctcatatactttcacactggaacaccgattcatgcgcataatatatcgagactctcgacattgaacaacgaaagctctctatatattcaaatggtcataactaatcacacagaagtccgattcacgcgcatattctatggagacgctcctaattgaacaacggacgctctcaagaaatttaaatggcataacttgcacacggaagaccgaacacgcgcatatatacagagacctcaaattaacaacggagctctcgaaattaaacggcatacgtataacggagaccattacgccctataaccagacgctcaaat

SEQ ID NO: 13690 - DNA, 374 bp, Glycine max
  unsure (1)..(374): unsure at all n locations
atgaaccttgtatccctgtcagatacaatactatgaggaattccatgcaaccttactacttgcaagacatacaactccactaacttattcattctatacctcatattcactgtgatcaaatgagcagatttggtgagtcgatctactatgacccacacggaactttgcccaccactagtcttgagtggaccatagaccaaatccatatatatgctcttccatgcgcattccggaatctgctatggcgtcaattctccccatggtcgtttgagcgtcaaccatatccttctgacatgacacacatcttgctacatattacgctacatctttcttgatgccatgccaccaanaacttctcttatatcttggacatc

SEQ ID NO: 13691 - DNA, 424 bp, Glycine max
actgatgaagatgaattctttgctacttcattctctcctctaatgacaatagcatcattattggcactgaattcctgcgagttggatgccatcttatcaattaaatttatggcttcagcacgggtcatgtctccaagggctccaccactggcagcatctatcatacttctctccatgttgctgagtccttcataaaaatattggaggagaaactgctctgaaatctggtggtgagggaaactagcacataattttttaaatctctcccaatattcatataggctctctccactaaattgtctaatgcctgaaatatctcttttgatggtcgtggtcctggaagcacggaaaactatttctaataatactctgttgaggtcatcccatctcgtgatggaccctggagcaaaggtatataaccagt

SEQ ID NO: 13692 - DNA, 398 bp, Glycine max
  unsure (1)..(398): unsure at all n locations
cgagcgtctcgatctattacgcgactcaatccgactntcgagtgaaaagttattgtcgttagaatttgctacgatcttcgattttaaatttcgagcgtctcaacaagttacgggactcaatctaacttccgagtgaaaagttattgtcgatcgaatttgctacgagcttcgattttaaatttcgagcgtctcgatatattacaggactcaatcggacttccgagtgaaaagttattgtcgttcgaatatgctacgagcttcggttttaaatttcgagcgtctcgatatattacgggactcaatcggactttcgagtgaaaagttattgtcgttcgaatttgctacgagcttcggttntaaatttcgaacatctcgatatattaagcgactcaatcgga

SEQ ID NO: 13693 - DNA, 451 bp, Glycine max
tctctcagtcgtctgtagagatgatagtgtgttagaaagcggcgatgcctactgtagactgtttctctcccatgtttcagttgtgtgtaacttgtattttcttcacacatggggcatgcgtgatgacccttaacactgtaaccgctgagattcccatatgctgggaagtcattaatggtacaaaaaagcattgcacgcatttcaaatgtctccttgcgaaacgcatcaaacactacaaccccctcgtcccacaactttctcagatcttcaaccaacggacttagataaacatcaatgtcatttcctggctgtcttgggcccgatatcatcatagacaacatcatgtattttcgcttcatgcacaaccaatgaggccaattgtaaattacttgcagaactggccatgaactgtgttgagtgcttaaggtgccatatggattcattccatcac

SEQ ID NO: 13694 - DNA, 430 bp, Glycine max
  unsure (1)..(430): unsure at all n locations
agcttgtgcacatcaagtgactcccgcattttatctctagcatgcaggccccccctctgcatctacgataccagaataactctgatggtagtaatctttacaactggagagaatatctctnnnnnacaattccttgtttctgctgaaaccctttcactacaagtctcgccttgtatctttntctaccgtcagattcttcctttagcctatagacccacttattttgtaacgctttcttttcttctagcaatttagttaaagaccatgtcttattcttcttaagggaggtcatctcatctatcattgctagctcccactcaatagagtcattcccctgcatagcctcactgaaatattatggctcaccagcatcagttaacaacatataatgcaatgaaggggaatacctatctggtggtactagaattct

SEQ ID NO: 13695 - DNA, 412 bp, Glycine max
  unsure (1)..(412): unsure at all n locations
tatgctgcanacatttacaacagacctcctcaacctcagcagtctaatcaaccacagcagaacaattatgacctctccagcaacagatacaatcccggatggaggaatcaccctaatctcagatggtctagccctcaacaacaacaacagcagcctgctccttcctttcaaaatgatgctggcctaagcaagccatacattcctccaccaatccaacaacagcaacagccccagaaacaacaaacagttgaggctcctccgcaaccttccctcgaagaacttgtgaggcaaatgactatgcagaacatgtagtttcaacaagagaacagagcctccattcagagcttaactcgccagatgggacaattggctacacaattaaatcaacaacagtcccagaattcttgacaag

SEQ ID NO: 13696 - DNA, 455 bp, Glycine max
  unsure (1)..(455): unsure at all n locations
tgtccaatcaagtacggganatgccttcataagcatatctgcatattgatcacttgcaaggtagatgaaggaattgtagttgcttatcgagttccaaatgcttggttcaagcatggagtacatgattatgagcatgagaaatagtggtcaaattatcaccacaaagttcaggaatagtgtgaggaattttcagcttaaacaacaaggtctgaaatcgttggacctctaaagtacctggagcaaggttccactacttagcttgagtactgcttgaaccagcaatgacagtttggtttttggaccaccaagagaccatgcttggtcctagaaagataaaagcattgaatgtagacctcctgtcattaggatccgaggccgaatgtacatcacaataggcttgaagaataaaagagaatgagagggagcnacaagaacatgaagtctcccatttcact

SEQ ID NO: 13697 - DNA, 433 bp, Glycine max
  unsure (1)..(433): unsure at all n locations
cgtntgtcgtcttcaacggtccctctactggcttaaacaagccagctgacaatggttcacaaagttatctagtttcttagtctctcatgggtttcagcaatctaactcagaccaatctctcttcttaaaactcactaagtcagtcactaccatactcttggtgtacgtagatgatatcatactcacggtgaacagtatactggaaatacaagatatcaccaccctcctggatcaggaattcaaaataaaagaccttggcgacttgaagttctttctgggactcgagattgcccgcaccactgatggaattcatttatgccaacgaaagtatgccttagacattntattngattcaggtatgctaggttgcaagccacactcgacacccatggattattccatgaagttacaaatgaactcaggcaactctctt

SEQ ID NO: 13698 - DNA, 395 bp, Glycine max
  unsure (1)..(395): unsure at all n locations
cgagacattatatattaaaactagactcaatatcactgagactcgccataattctatattaattgccatatatatgttactatatattntacctttctaaatttatatatgaatttaatcagttgtaataataagccaatgtcgattaatagttaatttatgtaatatatgtctaattttatttaattaagatgtcagaaatacttttttgcaaatgaaaaaacactatatctgaaaattaatccaagaatactgtaaatattatgaactcaaacagaattgttttatatataaaaaaaaaactgtgattntaatagtacttaatccatcatatgatgcatatatctatgaaactacatgaatatctgcacgtatctataaactctaattaaact

SEQ ID NO: 13699 - DNA, 457 bp, Glycine max
  unsure (1)..(457): unsure at all n locations
agcttaagggtttggaataattgttctacttcttcaatgttcaagtcttctttatatagcttgccccccaacttatnntgggggngatacacctaagaagaatggctagatgtttgtgatgaagcaagaattgggccgggttgacaccaccctacactccacaacacaatgggttagcagaaaggaagaatagaaaaattatgaatgcggttaggagaatactcaaatgcaaggatctgccacaaaacttgtggagtggagctgcttccactgatgtgtatgtgctgaataaaagtgctacaaaaagactaaatggtgtgactctagaagaagcttggtcaagcatcaaacccaatgtgaagcatttgagaatttttggtgctatntgctacaaacacattactagctagttgagacagaaactggatgacacaggtgaattgatggtatttcttgg

SEQ ID NO: 13700 - DNA, 401 bp, Glycine max
taaggctgagcgtgatagaggaatcacaatttatattgccttgtggaagtttgaaaccaccaagtactattgcacagtcattgatgcccctggacacatggatttcatcaagaacatgatcactgggacatcccaagctgactgtgctgttcttatcattgattccactactggttggtttgaagctggaatttcaaaggatggacagactcgtgaacatgctctgctttcattcacccttggtgtgaaacagatgatttgttgctgtaacaaggtaaattatgtgctgtaatttaaggcccttatgtctcctttacatcacacaatatcttcattccttttgtgtgttcatatgagattaaatagtgttctcttctcattttatacagatggatgctact

SEQ ID NO: 13701 - DNA, 403 bp, Glycine max
cttgaatgctctattcaatggagttgacaagaatatcttcagactgatcaacacttgcacagtggccaaggatgcgtgggagatcctgaaaaccactcatgaatgaacctccaaggtaaagatgtccagactgcaactattggctacaaaattcgaaaatctgaagatgaaggaggaagagtgtattcatgacttccacatgaacattcttgaaattgccaatgcttgcactgccttgggagagaagatgacagatgaaaagctggtgagaaagatcctcagatccttgcctaagagatttgacatgaaagtcactgcaatagaggaggcccaagacatttgcaacatgagagtggatgaactcattggttcccttcaaacctttgagctaggactctcggat

SEQ ID NO: 13702 - DNA, 429 bp, Glycine max
  unsure (1)..(429): unsure at all n locations
ctttgaatctatgcttgttatntgatcactntgtatagtatgacgcacctagttgctcatgatcctgtgaatntaaataaaacaagcgcaagctcggaaggtagtcatacctcacaaaatatatatttgtatgtttaggtagtgaaaataccttaaatatgcatgtatgtaaaaaaaaaaaaaaacacttcacaaaatatatatatgtatgtttaggtagaaagataccttagatatgcatgtatgtaaacaaaaaatacttcacaaaatatatatatgtatgtttaggtagaaagataccttgaatatgcatgtatatagcaaaaatatctcacaaaacatatatgtttaggtagcaagataccttggacacgcatgtatatggcaaaatacctcacanaatatacgtatgtttatggtagcaaatac

SEQ ID NO: 13703 - DNA, 364 bp, Glycine max
  unsure (1)..(364): unsure at all n locations
agcttccatgagtcangcaaaggagatggcttgaccctgtcctttgagatggtcatgatggcacctctcacacnnatgtcccgctatgcttataatatatcgatacgctctaaattaaacatctaaaactctcgctnnntcaaatggacataatatttcatacggatgtccgattcaggcgcatcatatgttgagaagcttgaaattgaacaacggaagcctatgagaaattcaaatggtcataactttaccacggatgtccgattctggcttatcacatatcatgacactctaaattgaacaatggaagctcttgagaattcaaatggtcataacttttacaccgatgttatattaaggcgca

SEQ ID NO: 13704 - DNA, 351 bp, Glycine max
tcaacatcagaccacttccaggtgctggaactacttcacatggacttgatggggcctatgcaagttgaaagccttggaggaaagaggtatgcctatgttgttgtggatgatatctccagatttacctgggtcaactttatcagagagaaatcagacacctttgaagtattcaaagagttgagtctaagacttcaaagagaaaaagactgtgtcatcaagagaattaggagtgaccatggcagagagtttgaaaacagcaagtttactgaattctgcacatctgaaggcatcactcatgagttctctgcagccattacaccacaacaaaatggcatagttgaaaggaaaaat

SEQ ID NO: 13705 - DNA, 426 bp, Glycine max
  unsure (1)..(426): unsure at all n locations
cagcttatccttatggcttgcctccggacttcactccccgtaccgccctcccnccctcccattattggacatcgcgtgatatgttatgaccatttgtatttgtctagagcttccgttgannaannnaagcgtctacatgtattatgtccccgaatcggacatccgagtgaaaactgatgaccattcgaatttctcgacagcttccgttgttcaattttgagcgtctagatgagttattttcccgaatcggacatccgtgtgaaatgttatgaccattcgaatttctgcagagcttatgttgttaaatttcgagcgtctcgatatattatgtccccgaatcgaacatcctagtgaaatgttatgaccacttgtatttctcgagagctttcgttgttcaatntcgagcgtctcgatgatatatgttcc

SEQ ID NO: 13706 - DNA, 430 bp, Glycine max
  unsure (1)..(430): unsure at all n locations
agctggaaattgaacaactgtagctcttgagaaattaaatggtcatactcccttctcactcntatgtccattcatgcgcatcacatatagagacgctaaaaaatgaacaacggaggctctcctaggttaaaatggtcataagttttcacactgatgtccgatacaggcttatgttatatcgagacgctcaaatataaacatcgaaagctctcgagaaattcaaatggtcataacttttcactcggatgtccgattcaggcgcatnanatatacagacgctcggaaatgaataaaggaagctcttgagaaatacagatggtcataactttttacactgaggtccgattcatgcttataatatatcgagactcttgaaattaaacatcgggagctcttgagaaattaaatggtcataatctttcacacggat

SEQ ID NO: 13707 - DNA, 444 bp, Glycine max
gcagctgcatttgaattttaccatcaaattctcaataatacatgttccctccttcaaaattgctatgtgagaaccatgaagggagagaagtcgaacttccagatcagagcatctttcttttagccaaacacgatacggattgtgatagaaacagcataaattgtgtagttcttcatcctctggaagatagccctgcttgtcaacacagcactcacaatcacactgagtccgggctccgtcaagacaatgtcagaggcactccttgctgcgtcggttgcatcatacactgcaatgccaatgtctgctttcttcaatgctggtgcatcgttcacaccatcttcggtcattccaacaatggtgattctatcctggaacctcttcacaatctcatacttatgctctgcacatgtagaaaatctcactcagttttcttattaaccttat

SEQ ID NO: 13708 - DNA, 441 bp, Glycine max
gctctttcaactgcacaaggctcttaatatttgaagagtattcttgtggaatctcttacccgacgaagacactgacaaaaacttatcttctccttattggacaaagtatggcaagctgggggcaagtaaattctcttcccattataccttggatgcaactgtgatcatatgcccatatcatctagatcttgacgggtattgaagccgtgcttcgtcttgccttaaatgttaaggagctgtccaatcacactgtcacaaacatatttccccacatgcataacatcaatacaatgtctaacgtctagatcagaccagttcagaagatctaagaatatgaacctcttcttccatatgcaactcttacttttatccttcttttgggtctttcgaaattcagtattcaggtattgaacccgctcatatacctgctcaccagtcaac

SEQ ID NO: 13709 - DNA, 417 bp, Glycine max
  unsure (1)..(417): unsure at all n locations
agcttgtcgtcgagatcaccaaaagcagttgtggcaaaacgagactccaaagcctggaggagnccnnccccctncttttgcttgatttgtttggtgtaaggcatattagatcntgtctgtgctattatgtgcgtatttannaaattcttcaactgaaactatatgttccaagtactctatctacaatacaccaaaagagcatttagacaacttagcaaacataacattttctttcaacactgtcgaaacaacctatagatggcataagtgttcatgccatgtggaactatataccaatatatgatgaaaaaacactaacacatatttccttaaagcatgttggaaagtatggttcacaaacattgaatagaagccggagcattggttaaaccatatggcattacaaccactcataat

SEQ ID NO: 13710 - DNA, 313 bp, Glycine max
acaccactcagatttccatatcgggaaagtcattaatggtacagaaaagcattgcatgcatttcaaaagtctccttggaaatgcatcaaacactaaaaccccctcatcccataactttctcaggtcttcaatcaacagacttagataaacatcaatgtgatttcctgactgtcttgggcccgatatcatcatagacaacatcatgtattttcgcttcatacacaacctatgaggcaaactggaaattactagtagaactggccataaactgtgttgagtgcttaaattgccatacggagtcattccatcactg

SEQ ID NO: 13711 - DNA, 427 bp, Glycine max
  unsure (1)..(427): unsure at all n locations
gcttgtggggacagtaaagaaagaccattctctggaatacacaatgtcaggcaaaaatattagcagaacaaggagaaaaattgcacctataaggattacgcgagcaatagccatggtgtaagagaaggaatataagaagaggaggtagaggcctgtgacaagggcaaggatgttgaggcagagaaaaaccgatgtatcgcgctgaatggtgtcaacagaatgtggttgaggctgtggttgattgagaattgggatgagtactagtccagaaattagcacaggaacaatggcattgagtaatagatagacagtgtcatcattngtgtttattgcattggcaatgagagtgtacaaagctgcactcacaccattgaaactaatgctcaaggataatgcaagggaacggtttgccggaaaatgtctgatg

SEQ ID NO: 13712 - DNA, 403 bp, Glycine max
  unsure (1)..(403): unsure at all n locations
gagttntccgactatgctcttgtgtggtggaacaagctacaaaatgagagagcaagatatgaagagccaatggttgatacatggatggagatgaaaaagatcatgatgaagcggtatgtgccggctagttactcaagggacttgaaattcaagctccaaaaactaacccaaggcaacaagggggttgaggagtatttcaaggaaatggatgtgctcatgaatcaagcaaatattgaagaagatgaggaggtaactatggctcgatttcttaatggtttgactaatgatatccgtgatattgttgagctgcaggagtttgttgaaatggatgatttgcttcacaaagcaatccaagtggagcaacaattaaaaaggaagggagtggctaagaggagttttacca

SEQ ID NO: 13713 - DNA, 390 bp, Glycine max
  unsure (1)..(390): unsure at all n locations
catgcaagctngaggatagagacttcttaagctatttatcttctctcttagagaggcttactcaagccaaaccccttaccttcttgataacagataagctgattaacaccagttgtgatggatgcaacccctattggtntaaanttaggggatagtagctctgatgttcccaagaactcgacctttaagagagctgacatggtgtttgttactatctggtctgcgtgccctcgtaatgaccttatgactgaatgtacatttttcctggtggaattaatccaaggaaaggatatgtgggttcctgcttatgatgaagatgatttttgcctgcgctataagtggtcaaaacctttcagactcagtttacatagtaaagctactcatataatg

SEQ ID NO: 13714 - DNA, 356 bp, Glycine max
  unsure (1)..(356): unsure at all n locations
caaaaactttgtcatccctctgtaagatagcaatgggaataaagacatcacattctttattcatcttacgaataaagaaaactaaattatatttgatggtcaaaaaaggaaattatcaacatgccttaagatacaatgtaaggcgaagttctcttggaatcagcttctcaggatctgtctcctcagatattgtatatgagctaacatntgcctctacttcccaaacatattgcttatcggattctggactctttgttgagacaaccaccttcatacaaccaaaaattatataaataccagatgacacagatagtactacagcatcacatttacttttaccaaaatgcatacccgat

SEQ ID NO: 13715 - DNA, 401 bp, Glycine max
gaattctactctaataatttccatgagtgctcacgtacatgccaatattacaattcatgcatagatatcatgaagaactatataatcatctgtcatagatattactctcttgaactattaaatatataatgagagattcacttgcttcactccaagagtataacagcattgcccattcgtattatttatctttctataaatctaatgatgaagactagttacttattaaataataaaaataaaagataactctaacagaattatctttggaataagtggatctctcctctctttaatataattagcttaattgtagttgtgtagttcttactttatgtctattcataaaacttagtctaattgttgtatatattctgttgtggaccggaatcacatggaat

SEQ ID NO: 13716 - DNA, 265 bp, Glycine max
acaacaacagcttatccttactttctagaatgctgctggttcaagcaagccatatgttccttctcatacaaaacaacagtcacaaaaaagacaacaaacaattgatgctcctcctcaaccttacttataagagttaacgatgcaaatgaccatctcaaatatgcaatttcagcaagagacaagagcctccattcatagtctaacacataaaatggggcatatggctactcagatgaaccaagctcaatccaaattctgacaaatt

SEQ ID NO: 13717 - DNA, 332 bp, Glycine max
gcgtctcgagatattatatcctcgaatcgaacatccgagtgagatgttatgaccattcgaatatctcgagagcttccgatgggcaattttgagcgtctagatatattatgtccccgaatcggacatccgagtgagaagttatgaccattcgaatttctcgagagcttccgttgttcaatttcgagcgtctagatgagttatgtccccgaatcgaacattcgtgtgaaaagttatgaccattcaaatttctcgagagctttcgttgctcaatttcgagcgtctggatatattatgtccccgaatcgaacattcgagtgaaatgttatgaccat

SEQ ID NO: 13718 - DNA, 486 bp, Glycine max
  unsure (1)..(486): unsure at all n locations
ntcactctntgaacanatacccctcagccaaatagaatccatcttgtgtccttttcccacaactctcgtaaatgggagagaaatattcatctaaagcatacaagtccctaatattatcaaatcttaaaatttgagctcctaaggagaaaaacaatgtgtgtctcctagagaaggcatcagctaccacatttgtttttccctttttgtatttgataacatatggaaattgctctatgtactctacccattttgcatgcctcttgtttaacttgctttgccctctaatgtacttaagtgattgatgatcactatgaatgacaaattccttggaaacaaggtaatgttcccatgtctggagggctcttattaaggcataaagttctttatcatacgtagggtagttgatggtggcactgtgaagcttttcactaaaataagcaatagggtgcccacctttgtacaatacatgcttaacttccactcttg

SEQ ID NO: 13719 - DNA, 471 bp, Glycine max
agatggcctcagcatattccttatctccagaatgtgaattctatcaatagacctccaatctttaatggagagggttaccactactagaaaacccgaatgcatatctttatcgatgcaatagatctaaatatctgggaagccatagaaatagggccttatatacccaccacagtataaagagtttcaatagatggtagttcatcaagtgatagcataaccatagataaacctagagatagatggtctatagaggatagaaaacgagtacaatacaacttaaaagccagaaacataataacatcttgcctaggaatggatgaatattccagggtttcaaatagttagagtgctaaggaaatgtgggacactcttcgattaacacatgaaggaactacaaatgttataagatctatgataaatgcactaactcatgagtatgaagtatttagaatgatgtaaatgaaatattca

SEQ ID NO: 13720 - DNA, 471 bp, Glycine max
ttctccttgcctagcacttcagaaccttctagttgggtcatatagatgtcttcctctaaatgcccatgcaagaatgcagttctaacatctaactgctccaagtgaagattctctgcagctactatgctcagaataactctgatggtagtcatctttacaactggagagaagatctctgtgaaatcaattccttgtttctgctgaaaccctttcaccacaagtctcgccttgtatcttcttctaccgtcagattcttcctttagcctattgacccacctatgctgtaatgccttcttttcttctggcaatatagttaaagaccacgtcttattcttctgaagggatgccatctcatctttcatcgctagcgtccactcaatagtgtcattcccctgtgtagcctcattgaaacattctgactcaccatcatcagttaacaacaaataatgcaatgaatgcgaatacctatct

SEQ ID NO: 13721 - DNA, 308 bp, Glycine max
tactcaagctaacaatccttgtgatctattatggaatatttctatgcctatcacatagcttacctcatccatatctttcacttcaaagtttctagagagaaatttcttagtctcatgaagaagacccagatcgttagttgcgagcatgatatcatctatatacagaattagaaaataaccttacgtccactgaccttcagatacatataccgataaatagtattgtccttgatctaaaggaaacaatggtatattaaacctcaaataccattggcgggaaggttgctttaagactggatattgatttc

SEQ ID NO: 13722 - DNA, 472 bp, Glycine max
  unsure (1)..(472): unsure at all n locations
gtatcgtgaagtgtcgagggcatntacattttctgcagaaggaaagacgcaatcatgtccggggcttccagctcgcgtgtttatatcgcacgttcctgaatggacctccaatgttggttactacaataaaactgagtacttaaggttggagcacgcaaggaatcacgagattcgtggatctattgctcttcctatatctgatgtgcactctcaagtgccatgtgctgtattggaactagttactacaaaggaaaagcctaactttgacagagaattacaaattgtttctcaagcactccaggtggatttttctttgtgctacttctagcatatacttcaatttcttatattgattctgtctggcaaatctgtgttattctattagagatttggatgtcttattaaaaagggtatcatggagaagttcttaccttgtctgacaaacgatgcttgattttttatttatatgatg

SEQ ID NO: 13723 - DNA, 416 bp, Glycine max
tgcctaattatcctgaaattgagagacaatgattattatacacacacagtgaaaatattaagtatttattacctctacttaacagaatatacttataacattacaaaataaccataaatggggagagtatgatacaattgatacagatcttatacacgacagttagtctgtttcaccgactaacattattcggcactcaatgagccctttctccaatctaatcatcttggttgagaagaaagacgaatcttggcacatgtgtgtgtattttttaactctgaacaaggcttgtgtcctatataggtaccttatcccaaccattaatgagttactagatgaactccatgtttctaaattcaatgtgaagagtgatcttaaatcacgatttcactagattcatatgcacgacagtgaca

SEQ ID NO: 13724 - DNA, 309 bp, Glycine max
  unsure (1)..(309): unsure at all n locations
ctcagcttctcatatattatgcgcctgaatcagacttccgtttcaaaagttatgaccatatgaatntctccactgtattccgtgtgacaagttatgaccatttgaatttctcgatagcattcgctgatcaatttcgagcgtctcgatatattatgcgcctgaatcggacttccgtgtgacaagttatgaccatttgaatttgtcgagagcataccgnggttatatttcgagcgtctcgatatattatgcgcctgaatcagacatccgtgtgacaagttatggccatatgaatntctcgagagcattcgt

SEQ ID NO: 13725 - DNA, 415 bp, Glycine max
atgccttgacatttgttggtcaagcaatttctaatgacttccaccttggctttatcaacttcaatcccaccaacaaagatcttgtggcttaaaacaatgccttcagttaccataaaatggcatatttcccagttaagtacaagattggtttccatacactgctttagtacggtgtcaagtttataatggaatgaatcaaatgaagacccaagaacatagaaatcatctatgaacacttcaatgctcttttcaacaagatccacaaatatggcaagcatgcattgttgaaatgtagcatgagcgttacaaagaccaaaaggcatcttcctgtaagcgaaaacactataggggcaagtaaaagttgtcttcccttgatcttcaggtttaacagggattcgattatatactgaataac

SEQ ID NO: 13726 - DNA, 438 bp, Glycine max
  unsure (1)..(438): unsure at all n locations
tttcttaatcttacanattaatgcaataaatattatattttgagactaaaatttcttaattaccatttctattaactttattaataattactattcgctaagaaaacctgactcatcagtgttaatgaagcttcctgtctctttaataatctccaagactcacttttaagactttgttcggtgactgatgatatggtggttcttgacggactaaaatagtaatttaataaaaaaaactgttttttaaagaaattactttttattatcttcaagtgagccataagtacaagtagttaatgtgtaaattaaaattaaatcatgttagatattatttaaatataattattaataaaaacaaattttaatcagatttatcttaccttttaccaaattacataacagtcacactctcattacacgaatttggattaatactaa

SEQ ID NO: 13727 - DNA, 348 bp, Glycine max
attttttttgaatctactctaatcagtcatacaaaccacacgacaatggagaatatacatggagaataagatcaagaacaaggaattaaagagaattcaccgaacaaaaagatagaggaagcaaaagaacatcacctagatgaagatgctcttgataccacatgatgtaagctccatcggagcttgtaggcctaagatcttcttcatcaatggattcctttgcttcttggaagatgaatggcagcggaatggataacgaagagagagaggagatgccacttcaaggagaagatgagtctagaagaagctcaccaccatacgaggccattgattagagcttggatgaag

SEQ ID NO: 13728 - DNA, 421 bp, Glycine max
  unsure (1)..(421): unsure at all n locations
tcngtattcaatttcgagcgtctccatatattacatgactcattccgacatccgagtaaaaatttattgtcgtttgaatttgctcagaacttcggtattcaattctgagtgtcttgacatattacgggactcaatcgcacatcagagtaaaaatttattgtcgattgaatttgctcataacttcggtattcaattccgagcgtctcgacatattactggactcaatcgcatatccgagtaaaaagttattgtcgtttgaatttgctcagagcttcggtattcaatttcgagcgtctcgatatattacgtgactcaatccgacattcgagtacaaagtttttgtcgtttgaatatgctcatagcttcggtattctatttcgagcgtctcgacatattacgtgacttaatccgacatccgagt

SEQ ID NO: 13729 - DNA, 381 bp, Glycine max
  unsure (1)..(381): unsure at all n locations
cttttganagacacatctcttcataccatttgaaaaggcacgaatggcctatatatatgtgtgtatgacttccaaaagcaagagagagatattccaagagaatttcattgtcaaacgctctctcgacaactcttgggcaaacacttgcaaatctattgagagttcattcaggaacttcaaattggattatccactctataggagcgaaatctttttgttcttctcacaaagtcaattgtaatcaagagactggttgtctcttgaattgtgagtttcctaaacacaagggaaagggattccttgngtgttcaacagttgtaacaaatatttttacatagatagtggaaaatctcaagtgggttgcttgaggactggacgtat

SEQ ID NO: 13730 - DNA, 443 bp, Glycine max
  unsure (1)..(443): unsure at all n locations
ttacggacctttaatctcagcttcacattcaattcaagcgtctcgatataatacgggactcaatcagacatcggagtaaaaagttattgtcgtttgaattgcctcagaggttcaacattcaatttcgagcgtctcgatatatttcgggactcaatcagacatccgagtaaaaagttattgtcgtttcaattggctcagaggttcaacattcaattatgaccgtcccgatatattacgtcactgaattcgacatccaagtaaaaagttattgtcgttggaattgctcaaagcttaaacattcaatttcgagcgtctggatatattacgggactcaatcaaacatacgagaaacatgttattgtcgnttgaagttgctctcaactacaacattcaatttcgagcgttccgatatattacgagagtcaatcatacatccgagtaaa

SEQ ID NO: 13731 - DNA, 472 bp, Glycine max
  unsure (1)..(472): unsure at all n locations
tgcgaagacaaacattcggaaagttagtttacaagataacgcttattttagagcacaaacgacatgctaatctttccgatttagaacaaactggtgcacacatttccttaacgtaaaacatttatgaacatgcgtatgtgtaaactatcctactatttacctcaacatacaaggatattcaaaatattctagttactacacatatatatactgttttgaaaagaatacatatgcacacgctcaaaatattgtgtcaagaatacacatgttcatatcctaagcatttcgttaccacaaactacacatttgaagtattttatttaacatacaaatctttgctgttttattcacattatttatacacatatgcacatcggagagccaatctcacgtcacgcacacacttgcatttgaatagagactttcatgtcatctatttacactngaagggcaatcccacatcatatatcca

SEQ ID NO: 13732 - DNA, 453 bp, Glycine max
  unsure (1)..(453): unsure at all n locations
gaacttttctttacatgtgctatgtggctcattctcctttgcaagcaagtaaaattttttggaagttcttctaatgtagaaccatttctcatcaatgaacacaatattttccatagacttaaactntggatcataaggcatgatcctatcatcgagcattgacaagaaaaactttaagcaagcaatcatgttctcaggctttaaatatggcttaagtgcatttgaatggcatngtataactcctgctnttngcaatctaaacaatgatgtcgtgttaatattcaaagcacaagataaagaccgaagggtagtactatggaacttcacatagtctctcaccgtttagttgaactctttttctttcatagttctttgttttgttatgagaagcatcacccacaaccttcaattgattccaaatactaccaatgacacttatattcacatcgtaca

SEQ ID NO: 13733 - DNA, 460 bp, Glycine max
tcttagtttcagatgatgcatatgggtgtggagctacctcatgcactcctctaatgactatggcatcatttctggcgctaaactgttgagagttggaggccatcttctcaattaaatctctggcttcagcaagagtcatgtctccaagggctccaccactggcagcatctatcatacttctctccatattactgagtccttcataaaaatattggagaagaagctgttctgaaatctgatggtgagggcaactggcacataatttcttaaatcgctcccagtactcatacaggctctctccattgagctgtctaatacctgagatatctatcctgatggttgaggtcctggaagcagggaaacagctttctaagaatactctcttaaggtcatcccagctcgtgatggaccttggagccaggtaatacaaccagtcctttgccactccctctaatgaatg

SEQ ID NO: 13734 - DNA, 426 bp, Glycine max
  unsure (1)..(426): unsure at all n locations
tgtatatngtcttattctatacaagaccactttcatattcttcctttgcattggcataatgttcaattactgtcaaggcttttggagcatctataacttgttcaactatattttgtgcaacatttcggttgataagctgcatcaaatctctctttttcctctgtattctttcagcacgaaagtattttttggttttcaattgcttggcaactttagtttgtatctctcctttgacaatcttcttccgtatcgcatccagagaagcccccttctcaagctcttctaacaattctnttcttgcttcctcaaattccatctaattcaattaagcagtgagtgccacaaagtattgttagagaaaatgaaatatgatcgacaatctaagtaattaatatttaatactcagcagaagaaagaagaaatcat

SEQ ID NO: 13735 - DNA, 417 bp, Glycine max
  unsure (1)..(417): unsure at all n locations
gaagtatagcaatataggagatctgttttggttgattgataaggactcaaattntaatcatgggttaaggagttgtacaattgatggagatatattacattagagggatgcttttgaaaatgagaatgagataaatttttattttcatcatgaagtagatccaattatagaagaagtcccacagatgttgtacttggaatgtcatccaattccagaccctgttgctggtgagtagagggatgttgatgttggtgagcaaagagatgctgatgctggtgagtagagggatgctgatgctggtgagcagagggatgttgacgctggtgagcagatagatggtggtggtgaagagagagatgttggtggtggtgcaagcctattatcaccatgcttgaagaaattagaagttacatcatg

SEQ ID NO: 13736 - DNA, 448 bp, Glycine max
  unsure (1)..(448): unsure at all n locations
tgagaagctagagcttagctacactcacccctctcataactaagctcacctcctggagaagcttccttaagaagattcctaaagaagctagagcttagctacacatacctctctaatagctaagctcacctccttatgatgagaagctagagcttagctacacaccccctataataactaagctcacccctatggcaaaatacatgaaaatagaaaaaaaaaatccctactacaaagactactcaaaatacctcgaaatacaaggctaaaaccctatactactagaatggccaaaatacaaggcccaaacgaaggaaaaacctattctaatatttacaaagataagcaggctcatacttagtccatgggctcaaaatctaccctaaggctcatgagaaccctanggccttcccttggatctctggcccaatctacttggagtcttcta

SEQ ID NO: 13737 - DNA, 457 bp, Glycine max
  unsure (1)..(457): unsure at all n locations
agcttgtaatcaattacacacatactgtaatcgattaccagagatagttttcagaaaatattctcaacagtcacatctntttacttgattcttgaatggctgtcaaaacctatatatgtgtgacttgggacacgaatttgctaagagattttcagaacaaaaaggtcttatcctcttaaaaagaagaatcgttttatcctcttacaaattccttggctaaaacacttgtgattcaataaggaattatttgagtgctcaaatcgttcaatctatctctgtcaagagagatttcttcttttcttcttcttcattctgaaaagggattaagagacctagggtctcttgttgtgaaagaattctaaacacaaaggaagggttgtccttgtgtgtttagaacttgtaaaaggaatgtacaagatagtggaactctcaagcgggttgcttgtggactggacgt

SEQ ID NO: 13738 - DNA, 469 bp, Glycine max
  unsure (1)..(469): unsure at all n locations
gcttattagtgcacaactccttcaagtatttagcatatcttagaatttgctntattgcatccagcagaggtatgtttacctctactttcctaaatgcttncagatctccttctctgcctcttccatttttttgttggaaattgctcttggagggaatggaagagggatatgctgcttctctttatattcacctgcatagaaattggtaggtaacttactcttttaatttttgtcttcatctttttctggagtagagtgaggttgggcaggttcatttgcggatgaggaagatgctactgtgtgaggtccttgatgctgccttcctgacctcaatgtaatggcactcacatttttgggattttggacagattgagaaggtaatttatcataattcagggactgttgttgatttaactgtgtagccaactgtcccatctgattatgtaagctctaaatggaggctctggtc

SEQ ID NO: 13739 - DNA, 456 bp, Glycine max
  unsure (1)..(456): unsure at all n locations
ntctggttgtacataaaagggttatttctatgtttatttctattattntatttaagctatgccacatgtctccgtttgagtggagcaagaagggcccactttctcttttgattgtgacccatactgatgcaagctccattggagcttgtaggcctaggatcttcttcatcaatggattcctttgcttcttggaagatgaatggcagcggaatggagaaaggaagagagagaggagacgccacttcaaggagaagatgagtctagaagaagctcaccaccataggaggccatggataagagcttggaggaagaaggagatgaatgaagggagagggagagaagagcacgaaattttgtgctctaaatgagctntgaaatctgaagtttaatattcaaatgatcaaagttgaaaaaaatgcacacacatgacctctatttgtagcctaagtgtcacac

SEQ ID NO: 13740 - DNA, 391 bp, Glycine max
agtgaccatgtgaataactcaagagcttccattgttcaattttgagcgtctcgatatattatgcgccttaatcggacctccgagtgaaaagttatgaccatttgaataactcaagagcttccattgttcaatttcgagcgtctcgatatcttatgtgcctgaatctgacctccgtgtgaaaagttatgaccatttgaatttctcgagagcttccgttgttcaatttcgagcgtctcgatatcttatgcgcctgaatcggacctccgagtgaaaagttatgaccatttgaataactcaagagcttgcattgttcaattacgagcgtctcgatatattatgtgcctgaatcggacctccgagtgtaatgttatgaccatttgaattgctcaag

SEQ ID NO: 13741 - DNA, 211 bp, Glycine max
gcctcgctacatatatgcgcccggctcggacatccgcgtgagaagctatgaccatatgaatatctgcagagcttccgacgctgaagtccgagcgtgtcgctatataattcgccagactcggacctgcgcgtgagaagctatgaccatattaatatggcgagagcttccgcagctcatgatcgagcctcgctaaatatgatgcgccacaatc

SEQ ID NO: 13742 - DNA, 217 bp, Glycine max
  unsure (1)..(217): unsure at all n locations
gtgtgatgcattaattattcatnggtgtgctgtccttgctcaaaataatgatatatagcctatggtgatatattatgcttctaggactttatacgcccccaagcgaattatactactactgagaaagagttactagccgtaattgttgctcttgaaagcctatgttgattcgatggatgctctggctccaagagtttgacttggagatccgtgatat

SEQ ID NO: 13743 - DNA, 465 bp, Glycine max
  unsure (1)..(465): unsure at all n locations
agcttttgatgaggatgaattaataaaatattgtattaatcttgaaattnttttaaggtttaatgaatactctgatattaatagtcttgatttattttcgaattgtaagtattaagagaaatgttaagagaagaaattaacacaccaatagaagtattgagttatattaaaactttagattcttttccaaatgtttacattgcatataaaattntattactgctgaaagaagtttttcaaaattaaaattgcttaaatcatatctaaaatcaacaatattataagatagattgaatgagttagttattntatctattgaaagtgaagtgttagaattgtttgattataaaactctaataaatgattntgcagctaanaaagctacaagattaatataaaaattagtattttatgtaatatactaagtctctctaaaattcttggtaaaaatagacccctttaaca

SEQ ID NO: 13744 - DNA, 466 bp, Glycine max
  unsure (1)..(466): unsure at all n locations
tanacattcaacttcgagcgtctcgatatattacgagtctctatcaaacatccgagaagaaagttattgtcgtttgaatttgctcagaggttcaacattcaattttgagcgtctcgttatattacaggactcaatcagacattcgagtaaaaagttattgtcgtttgaattggcttagagcttcaacattcaatttcgagcgtgtcgatatatgatgggactcaatcagacatccgtgtaaaaagttattgtcgtttgaattggctcagagcttcaacattcaattttgagcgtctggatatatgacaggactcaatcagacatccgagtaaaaagttattgtcgtttgaattggctcagagcttcaacattcaatttcgagcgtctcgatatattacgggactcaatcagacatccgagtaaaaagttattgtcggctgaatntgctcagagcttcaacattcaa

SEQ ID NO: 13745 - DNA, 378 bp, Glycine max
  unsure (1)..(378): unsure at all n locations
agctttgaaccaattcaaacgacaataactntttactcggatgtctgattgaggcccgtaatatatcgagacgctcgtaattgaatgtgaagctctgagccaattcaaacgacaatnaacttttactcggatgtctgattgaggcctgtcatatatcgagacgctcgaaattgaatgttgaagatctgagccaattcaaacgacaataactttttactcggatgtctgatggaggcccgtatatatcgagacgctcgaaattgaatgttgaacctctgagcgaattcaaacgacaattactctgtactcggatgtctgattgaggctcgtgatatatcgagacgctcgaaattgaatgttgaagctctgagctaattc

SEQ ID NO: 13746 - DNA, 475 bp, Glycine max
  unsure (1)..(475): unsure at all n locations
acacatacctctctaatagctaagctcaccttcttgagatgagaagctagagcttagctacacacccnctataatagctaagctcacccccatgacaaaaaacatgaaaatacaaaaaaaaagtccttactacaaagactactcaaaatgcctcgaaatacaaggctaaaaccctatactactagaatggccaaaatacaatgcccagacgaaggaaatacctattctaatatttacaaagataagcgggctcatacttagcccatgggctcgaaatctaccctaaggctcatgagaaccctagggccttcccttggatctctagccaatctacttggagtcttctacccaatgcccttgcggtgtaggatagcgtcattccctccaccttggacagatttgacctcaaatcccgaggttcttcatactctgggctccttccctcaacacctgtaaaaagaacaaaaacatatgt

SEQ ID NO: 13747 - DNA, 390 bp, Glycine max
  unsure (1)..(390): unsure at all n locations
agctntacaaggagatattactcttgatgcatagttggatgaaagggataagattatcttgatggataatgctcacaatgcaatcatcttgagtcttaagacaaagtactacgacaagtctcgaaggagaagacaacaactgaaatttggttgaaactagaaggtttatacatgaccaaatctctggtaaatcatctttatcttaaacaagccttatattcatttaagatgcaagaagatataaatgtggaatctcaattggatgtctttaataaactgattcttgatctagaaaatatagatgtgactattgatgatgaatatcagaccctgttactattgtgtgctttgccaaagtcttcctctcattttaaagaaactctcttgtat

SEQ ID NO: 13748 - DNA, 449 bp, Glycine max
ctcttccaatttatggttattttgtagtgttataagtattttctgttaagtataggtaataaatacttagtacttccattttgtgtgtttaataatcatattctctcaatttcaggttaattatgcaagctctgaaaagtgttgtgtttcaccttctcgctaagtcaatctgccttggtgtgggcggcccaccgtctaaggcaatacatgctgagccatactacctgtttggtgtccaagatggatccagttaagtatatgtttgataagcctgcccttacgggatagatcactctatggcaagtgttgctatccgaatttgacatcgtctatgtcaccctgaaagtgataagggaagcgccttggcatatatctggccatctatcaccaattattatcaccctgcatctatgtttcatataggacatcatggcctatcatggaaaact

SEQ ID NO: 13749 - DNA, 472 bp, Glycine max
  unsure (1)..(472): unsure at all n locations
tacctgtgcttccgtacacttcagtttaggatgtgatgcatgcccagccaaatcatgctccatgtattcgaaaacaaggtataagctgcaagacatccttgatgtaacaaggccttccagttttatgacatttggatgatcaagcctacgtagaatgtgaatttcccttgccatgaagcgaacactctctggctcaagattatcaaacctgacttttttcaaagcaacaatattattttgctcaagatcacgagccctataaacattactataagttccctgtccaatctgaaaaataaggaggaaaatcttaccattcaaggaaaactaaaacaggctgaagacaatatcatcatttaattgcaatccaagacaaaaaanaacaaanaggatatctataaatctagaaactacaagtattgtacctcaatgttgtgttatctacatcagaggatgaaatcaagaatattaa

SEQ ID NO: 13750 - DNA, 450 bp, Glycine max
  unsure (1)..(450): unsure at all n locations
ntctcaaaatccttatctatctacccctctattaactaaattaacttccttaaaaataattacggatgaaaataacgcaacagataatcaaacatcaaacataattactaataatatatagatatatcagggtgttacagagactaaagtagtctcggtgttctttcactaagatgtgagcacgcttagcatagaagcaaacctccaaaccgatcagagcagcacatactttttttttgaagaanaacaatgtgtctactggagaaggaaagcatgctgatagaactttctcacaaccacaaatgagatttaggatattagcatttcgtttctaaatgatcatttagaggaaagactgggtccaactganatagaagaaaatcactcacagtgtataaatcttacacaggcaagtgtttcatcctaattccgaaccatagatatgttatg

SEQ ID NO: 13751 - DNA, 433 bp, Glycine max
  unsure (1)..(433): unsure at all n locations
tcacattctatacaaagtcaagtccattgcgtttgttacantattctgcaccaacagaataatgcacaagttctaagtaacagatacaagtgcatgatgtatagtgttaaacaaatagagacattgagaccgagtctaacctgcatcttctgtggtgaaacacaagggaggtgtaattctgaagacatttccatagtaaccacccttaccaataagtactcctagttctgtagtaattcagaatgaccggttagtaataatatagaagataactatagctaggatcaaaatatgtgtctagactagagggatatggatattacctttcatttggtccattacatgcaatgtttcattttttgctggagttgtaagttcacgatcagtgacaagttcaactcctagcatcaggcctctttctctgacatcacca

SEQ ID NO: 13752 - DNA, 315 bp, Glycine max
  unsure (1)..(315): unsure at all n locations
tctgctgaccaccatacaaacctttgcccttccatgcagcaacctggagcaattgagcagcctgaagcttatgctgcaaatatgtacaatatacctcctcaacctcagtagctaaaccaaccacagcagaacaattatgaccttgtcagcaacagatacaaccctggatggaggaatcaccctaacctcagatggtccagccctcagcaacaacaatagcagcctgctccttccttccnaaatgctgctggcccaagcagaccatacattcttccaccaatccaacaacagcaacaaccccagaaacagtcaaca

SEQ ID NO: 13753 - DNA, 450 bp, Glycine max
  unsure (1)..(450): unsure at all n locations
tctncacttgtatcttgngcctaaattcaaanagtatggttatcactngnngaagagcttccttggccttctttgttctagcccttgtcatacgtcctccaagttcttctaaaggttccttgcccttagtccttaccatgtcctcatcactctctccctcttcaaaaggatttatgctcaaatcggcttctccatctgcatcaaaaagagttaattcaaacacattaaatgtagtactcacattatactcaccgggcaattcaatcttgaatgcattgtcatttaccctttcaagtacttgaaatggaccatcccctcttggttgaagcttggattactttgctccagaaacctctcctttctcatgtgaacccaaacccaatctccgggttggaaaaataaccttttgcgcccctttgttgcttgctagcatagctctcattcctcttt

SEQ ID NO: 13754 - DNA, 188 bp, Glycine max
cgcctgaattgtaccatggcgtgcatagttatgaccatttgaatatatcgagagctctcgttgttcaattccgagcgtctctatatatgatgcgcctggatctgacctccgggtggaacgctatgaccatttgaatttctccagagcttccattgttcaagttcgagcgtctctatatattgtgcgcc

SEQ ID NO: 13755 - DNA, 467 bp, Glycine max
  unsure (1)..(467): unsure at all n locations
agctntgtagcagatgccactctactcatagtttttgaaagatatgttgtcaaagaagcacaaatacattcactatgagaatatcattgtggaatgcactgtagcgctgcgatacaaaagatccttccaccaagacacaaggaccctataagtgtgactattccttgttcaataggtgaagtcacatagagaaaggctctcattgactngngagccaatatcaacttaattccactctccatgtgtagaacggtgagagagttggaaatcatgcccaccataatgactttacagcttgctgatcgatccatcacaaggtcttacagggtaattgaagacgttctgataagagttaagcatatggtctctccagctgacttcgtggtcatggatatggaggaagaccatgacgttcccatcattgtaggatggcccttatgttaactgcaagttgagtagttgacatg

SEQ ID NO: 13756 - DNA, 360 bp, Glycine max
  unsure (1)..(360): unsure at all n locations
taatatattttgggtttatattaatatactgccattttnntttttctttataattcgagcttttatttgtgatttgtattttggtaacaaagcaaatatnttaagtctattaccatagatccattatatgttgaaatgtcagggagagttgaaaactcattcaatataaacttacgaagacaatattcataataaataaactatctattaatacgataatactttttaatcacatatcatatcttaatttgaataaagaagatatgaaacatattaataattaccatcttagtgtaacaataacataaaaatatattaacacaaatccattttctggattactcggagaagtaagccttg

SEQ ID NO: 13757 - DNA, 408 bp, Glycine max
  unsure (1)..(408): unsure at all n locations
tgaacctgctaatcaaaagcccttcttctgagcccaaaatcatttctttaatttatctgatattttggaaacacgtcaatttctgaaatatatactttatgaaaaacgattcttaaaattaattagattgatctcaataatgcagattttaatctaatgccctttgtttgagtttatcttttaaatattaaaagatatgtttaaaaaatgttgcaataattgtgattaatataaataacttaaaagacgtctccaatgctttttccatatttgataacgcacatttaaaatagtttgtaacaaagctgcataaagaaatacttaattnttaataataaataaacaagcagatctcanatctatcagcgactggtatagacatcatacataaagagcagacatactatg

SEQ ID NO: 13758 - DNA, 364 bp, Glycine max
  unsure (1)..(364): unsure at all n locations
tcaagagatcatccnctggacaacattattggtgatatctctaaaggggtaacaactagacattctcttaaagatttatgctataatatggcttttgtatctatgattgaacctaaaaatataaaagaagccatagtagatgataactggatcattgccatgcaagaagaactgaaccaatttgaaagaaacaatgtgtggaaattagtagaaaaacctgaaaattatcctgtcatatggacaaaatgggtttttagaaataaattagatgaacatggtataattattagaaataaagccaggttagtagcaaaagggtataatcaagaagaaggaagagattatgaagaaacatatgctcctg

SEQ ID NO: 13759 - DNA, 422 bp, Glycine max
agcttgcacatcttctcgatcaggttgacaatttaaatctaattgtcccttggcagcttcagccaccgcatggttgtgactccttgaatccaattcattttgcacccgtacctcattctccaatctgtcaactggagttaaatgtcgtaaggtgctatctacttctgattcatctttggtccgccatgataactgatttctctgagcaatctctgcttcacgttcggattgccgcttcttctttcgcatcatcacggttgtaaaccgacgtttaactgtcatgcacacattgcaggtgcatgtgggtttgtgtttgcccttcccacttggtggctggatacagacaatgcaagagcacccacgtctatgccgaggatgttttgtggtgctaacaactgatgtcctgccagagtcacttgcat

SEQ ID NO: 13760 - DNA, 429 bp, Glycine max
  unsure (1)..(429): unsure at all n locations
agctagacatctgatgtgtggacatcttgtacttctgaagttatatttcattaactgcgcattatgttgatgcaaattggaagttgaatagtaaaatggttaatttttcttattttcctcctccacactaggggcgtgagatggctaaagttatatatggtttttttggaagaatgggggattgagcanaaaatattttcattaactctagatgatgcttcttccaatgataaaatgcaagactatttgaaggaaagacttttgcatactaatggtttagtaagtggtggtgaattttttcatatctgatgttgtgctcacattttanaccttaaatgtcaagaggagtgaaagtagtcggtcctgcttgtaaaaaaattagtgaaagcattaagtatgttaagggatcagagggagaatgaaagtttt

SEQ ID NO: 13761 - DNA, 477 bp, Glycine max
  unsure (1)..(477): unsure at all n locations
gcttaagaataatggcctcagcaaacttcttattcccagaaggaaactctataaataggcctcctaattttaatggagagggttaccactactggaaaacccgaatgcaaaatttcattgaggcaatagacttaaacatttatgaagccataaaagttggaccttatgtacccaccatggtggctggtaatacaacaattgagaaacctatagaagagtggtctgaagaagaaagaagattagtgcagtacaatttaaaggctaaaaatatcattacttctgccctaagaatggatgaatattttagggtgtcaaattgtaagagtgctaacgatatgtgggacactctacaagttacacatgagggaacaactgatgttaaaagatctaggataaatactataactcatgagtatgaattatttatgatgaagacaaatgagagtatacaagatgtgcataanagaatcatacata

SEQ ID NO: 13762 - DNA, 343 bp, Glycine max
  unsure (1)..(343): unsure at all n locations
agctattctaatgaaacaagaacaaagtctcttgtgcacgttattgaagntgtgcggctagctacctgttgttatctacttatacggtacaaaggaaaatgaataaattaatgagataataagtgaataataacacatgcctaatggaaaaatttcttttctcaaatctagcacttcatggtagctttctcaataccgatggttggaaattgctgtgcatacgtcacaacataaatgaagatctttgctatctccgattgaaaggtagaagatgattgaattgcggtctatatatccttcagcggtgctgctcgtgctaaaatgtcaacatcgaccacatatt

SEQ ID NO: 13763 - DNA, 402 bp, Glycine max
  unsure (1)..(402): unsure at all n locations
ntgagccaagtctttgcaatcctgccctcagttcctcatatgtgattgtaccactattgtcagtgtcgatatttgtgaacattgccttcaagccttggatctcttcttcagaaagattntcagcaatgacctaaaagattatttaaaatccattcagtttatttttgaattggtagaaatatgtacccctaaagttacacagactcaagcaatttagagtcataatgagcactggaaaaatatttatgtctctcaatgtttaattatgccatcaaatacaataagcataaaagagcattgtgatcacttcatgcagctagtggctggactaaccttgagggctagtctttttagattattcattgctctgaatngcttattctggaaagcactgcactgtct

SEQ ID NO: 13764 - DNA, 399 bp, Glycine max
  unsure (1)..(399): unsure at all n locations
tactagctcactgattactttgttattgaagaatatgctttctgtatataacacattacccaagaatcattacaaggcgaataagatattatgtcctgtgggtatggaatactagaaaatacatacatgccttaatgattgtaatttgtatagaaatcactttgccaaaatgcgtaactttcctacatgtggggtgtcacactacaaagtgaantttgacaaatgcagtgatacagtctgatcgatgccgcacctgaatcaaataaacattataatgcattaactaggaagtgatcctaggtcgtttcccaacgagcaatgataaactagatggtcataacagataataggaacatagtaacgaattgtggggggattgtttgcttttgtgaattaaac

SEQ ID NO: 13765 - DNA, 494 bp, Glycine max
  unsure (1)..(494): unsure at all n locations
cgtgtcacactntcaactgccgaagctaaatatatagccgcatgaagttgttgtgctcaaagtctctagatgaagcaacaactacaagactttagagtaaaccttgatcacattcctctaaaatgggacaacacaagtgttatcaatctaaccaaaaaccctgtcatgcattttatgactaagcacatagaaattatgcatattaaatgcatcaagcatagaataacattctgtttgtacaagtatgtgattcacattgctattcatatcattttttttgtttagtttgtgtcttagttattgatttatgtgcatactcattagtttgtttgaatatcacatgtatttcttagtaatttcgtgatttctctgtgttctaatagattatgctcggttctaatcaactattgtatgatatctgtttggtaagttttcaaaaccttctattttaatcaatacaccatgatttaatcgattacgatngcttaatgtgt

SEQ ID NO: 13766 - DNA, 404 bp, Glycine max
agcttaacatatcatcagcatctcttggaatttatattgctttgctgtggctccgtccaataccacttcatctcatttccaaacacagcccagttaaaatgctttacaatgaagttaacatagtccttgtcgttaatgatcgttctgctgatgcatgctccaattgggaaatcattatgcgtttgtataacttttaccgatgtgttagcatagctgccagagtccagtccatagaatttcaggataacttcacgtttacgaatctgcaacccagcatgtcagtataaattaaaatatataaaaataatgcgaatcatctcatattccatcaatgaagaatggatcatgttatattaagacaaggcactatagtctgaaacatactcagctttatgtaccattta

SEQ ID NO: 13767 - DNA, 429 bp, Glycine max
  unsure (1)..(429): unsure at all n locations
gctngaatcttctaccgcatttctgacagcctatgggtgtgtccagtttaagcggttcctaagaatacatgcctcacagtgattaagaatgagaagaatgagcttatccccacaagagtgcagaacagctggcgagtctgcattggttataggaggctgaaccacgtgaccagaaaatatcattttcccctgccattcattgatcaaatgcttgagcgcttggcaagaagtctcattactattttcttgatggtttttctggttatttacaaattcatattgctcctgaggatcaagaaaagaccatattcacctgttcctttagcactttttcctataagaggatgccctttggtctatgcaacgcccctgataccttctagtgatgtatgcttagcattttcagtgattttttagagaggtgcatat

SEQ ID NO: 13768 - DNA, 391 bp, Glycine max
tctgtagggttaaagtctcatgattgtcacatgctcatgcttcttttgttagccgtggctatacaagacatcttgccatacaaagtcaggttagccataactcgcctgtgcttattcttccatgctatatgtagcaaagtcattgatcctgtcaagtttgataagctggaaaatgaagccgcaattatgctgtgccagttggagatgtattttccccctgctttcttagacatcatgattcacttgattgcgcatctggtcagagaaatcaaatgttgtggtcctgtctatctatggtggatgtacccggttgggagatacatgaagatcttataaggctatacaaagaatctatatcatccacaagcatctattgttgagaggtacattg

SEQ ID NO: 13769 - DNA, 327 bp, Glycine max
tataatatatcgtcgcgctcgaaattgaacaacgaaaggtcttgtgatattcacatggtcataactattaactcggatgtccaattcatgcgcattatatataaagacgctaacaaatgcacatcggaagctctccacataggaaaatgcgtcatcagtcttcacactgaggtccgattcacgcttataatatatcgacgcactccaaatcgaacaacggaagctcttgagaaattcaaaaggtcataacctctatctctgatgtgcgattcatgcgcataatatgtcgatatgatggaaactgtactacggaagctctcgacaaat

SEQ ID NO: 13770 - DNA, 412 bp, Glycine max
  unsure (1)..(412): unsure at all n locations
tgtatactaacatggataaatgtgtgttctatttggaccatgttgttttccttggntttgttgttatctcacagggagtacaggttgatcaagaaaaggtgaaagccattcaagaatggccaacccccataactattagtgaggtaagaagctttcatggttaacaagttgctacacgagatttgttatggaatttagtactatggaagcacctcttactaagatttccaagaaaaatgtaggatttaaatggggggaaaaacaagaacatgcattcgctgcactcaaagaaaaattgatgcatgcaccaattcctacattacctaattntggcagattctttgaaatcgagtgtgatgcatctggcgttgggatatgggttgtttaatgcaagaggacatcccatacctac

SEQ ID NO: 13771 - DNA, 466 bp, Glycine max
  unsure (1)..(466): unsure at all n locations
tctaaactntatacaagaatgaagctctgataccacttgttagacattaagatattacaaactatntccccaattaaaattctattttaatttcaatgcangttacaagttcccttaaaaatgaactattaaataattattcaaataaaacaatctgaatataaatgcaaagcaataataaataaaagagtttaaggaaagagaaagtgcaaactcagatttatactggttcgaccacacccttgtgcctacgtccagtccccaagcaacccgcttgagagtgtcactatcttgtaaaatccgtttacaagttctgatcacacaaggacaatccgttctttgtgttcagatttctttacaacaagagaccctcagtctctctatctctttngacgaattagaaagatgagaagaataaatctctcttgaatagatagaatgacaatttgacactcattaattccta

SEQ ID NO: 13772 - DNA, 371 bp, Glycine max
  unsure (1)..(371): unsure at all n locations
tgtaggctacatttacaaccatacattggctgtgaacaccatgaggaaattcacacaaaanactgaattggtgagacatggagttacaagatttgctaccactttcttaactttgcaaagattgcataagcaaaaggccaatcttagaaggttgtttacttcagatgaatggttgaagtctaaggtagctaaagagcccacagggaagcaagcaacagatgttattcttattccatcattttggaatgatgttgtttatgctttaaaagctatgaggcctcttgtaagtgtgttgaggctggtggataatgaaaagaaacctgcaatgggtttcatttatgaagcaatggatagggccaaaaaagcaattc

SEQ ID NO: 13773 - DNA, 389 bp, Glycine max
agcttcaaacctcttacaagggagcagatctggtcaagatggtacatcttcaaactttacatatgaaagaaggtgaagtcatctccgaatgaagaagaagagagtagtcacaataattactcaagacgcaagttaattcgatcaacaaagaaagtagtcacaataatagaagccaacgaaggcgaggtcgtgatggagatcgatgaagaggacaaggtcatggacaaggaaaaggatgaggttggaggccttatgacgataactacaacttccaaagaggttatgggcaaggcaactgaagatcgaggtatcacaagtcaaatgtgaaatgttacaattgtgagaagtttgattattatgcttctgaatctagagcccttagcaacaat

SEQ ID NO: 13774 - DNA, 368 bp, Glycine max
  unsure (1)..(368): unsure at all n locations
acgagcaataacttttactctggtgtcctattgtattcagtaatatatcgagacactngaaatagaaaacgaaaacttgtatcaagtgcataccacaatcacatttaacttgtcgcgaaatatgttgagatgctcgaaatttgaaaagaaatttcatagcaaattcaaacgacaataactctttacacggatgttcgattgagtcccgtaatatatcgagatgctccaaattgataacggatgctcgaatcatattcaaacgactataactctctacacggatgtctgattgagttccgcaatatatcgagacgctccaaattgaaacggaagctcctaacaattcaacgaccatacttttactcgat

SEQ ID NO: 13775 - DNA, 319 bp, Glycine max
agcttccattttcaatttggagcgtctcgatatattacggtttgtcttccggacatccgcgcataaagatattgtcttttcaatttgctcatagcttcagagctaaatattgagcgtctctaaatattacaggactcaataagacatctgagtaaagagttattgtagattgaatgtgctacgagcttccgctttcaacttggagcgtctcgatatataacgggactcaatcggacatacgcgtataaagttatatgtcgtttgaatttgctacgagcttcaagtatcaatttggagagtctcgatatatttcgggact

SEQ ID NO: 13776 - DNA, 475 bp, Glycine max
  unsure (1)..(475): unsure at all n locations
agctagccgccagtagtaatggcggattgcatgttaattacatacccccaccggaatttgttttgaaacggaccctctttcgtaaattgtttttaaaaggaaccccatacagtaaatttgccaagaaattagtgttgtacccataaaataattttttaaaatgaataaaaatgttataagagataaaaaaaattgatattaattatatcattctattttttaattttatagtatcgacaatgagaaaattatataatatttttgaaaatatataaatgcgtaaagaataattataatttgtaataatataagtattttgaatttctttatcatgagattatatatcttataacaaattataataatcttcttctataaaaaaatttatatatatctgtactgaattcagcaaagcataatatttagaaaacaaataanatagtatctaatatatttatttcaagtttttcaaaag

SEQ ID NO: 13777 - DNA, 344 bp, Glycine max
  unsure (1)..(344): unsure at all n locations
ntgagccaattcaaacgacaataactntntactcggatatctgattgagtcccgtaatataacgagacgctcgaaattgaatgttgaagctcttagcaaattcaaacgacaataagtatttactcagatatcttattgtgtcccgtcatatatcgagacactcgaaattgaatgttgaagctctgagccaattcacacgacaataactttttactcggatgtctgattgagtcccgtaatatattgagacgctcgaaattgaatgttgaatctctgagcaaattcaaacgacaatagctttttactctgatgtctgattgagtcccggaacatatcgagacgct

SEQ ID NO: 13778 - DNA, 419 bp, Glycine max
  unsure (1)..(419): unsure at all n locations
agcttcaacattcaatnttgagcgtctcgaatataacgagactcaatcagacatccgagtaaaaagttattgtcgcttgaattggctcagaggttcaacattaaatttcgagcgtctcgctatattacgggactcaatcaaacatccgagtaaaaagatattgtcgtttgaattggctcagggcttcaacattcaattttgagcgtctcgatatatgacgagactcaatcagacatccgagtaaaaagttattgtcgtttgcatttgctcagaggttcaacattcaatttcgagcgtctcgatatgttacgggactcaatcagacatccgagtaaaaagctattgtcggttgaattggctcagagattcaacattcaatttcgagcgtctcgatatattacgggactcaatcagacatc

SEQ ID NO: 13779 - DNA, 420 bp, Glycine max
  unsure (1)..(420): unsure at all n locations
agcttctaatatctcccacactntntgaggtgtttcattcttggatggccttgattntctcaaggtccacttggaccccatttctaccaactacaaaccctaagataactatattttctacacaaaaagtacacttctctatatttgcatagagggtgtttttcctaaggactgaaagaacttgtctgagatttcataagtgatcatctaggcttctactgtacactataatatcatcaaaataaacaactacaaatctacctatgaaatcccttaagacatgatgcataagcctcataaaggtgcttggtgcattagtgagcccaaaaggcatcactagccattcatacaaaccaaacttggtattgaaagcggttntccactcatcactccttttcatcctgatttggtgatacctac

SEQ ID NO: 13780 - DNA, 280 bp, Glycine max
  unsure (1)..(280): unsure at all n locations
ngctaacccacggnagctcctaatatctcccacactgtatgatgtgggccactcttggatgaccttgatcttctcaaggtccacgagtacctcatttctaccgactactaaccctaagataactatattatctacacatgaggaactcttctctatattgtcatagagagagcttgtcttaaagactgacataacttgcccgagatgtcctaatagagcatctaagctcctactgatcactgaagtatcatcataattatcaactgcacatctacctatg

SEQ ID NO: 13781 - DNA, 368 bp, Glycine max
  unsure (1)..(368): unsure at all n locations
tactggtaatgtgtctactatcattggtattatatttttctccgtcattgaggtgccacttgagctgccaggtctctccacctttgggcgtattcttttgaaagattcgtgcccnccttttgcacatgttctgtagttgcatcctatctgaagacattatactgacactgcctaacgaaggcaaccactaggtccttccaagaatggactcgggaaggttccaagttagtgtaccaggtaacagctaccccagtaagactntcttggaaggaatgtataagcaattcctcatcttttgcgtatgcctccatcttctgataatacatctntagatggttcttggggcaagtagtccccttgtacttgtc

SEQ ID NO: 13782 - DNA, 398 bp, Glycine max
  unsure (1)..(398): unsure at all n locations
cgtctcacgaatgtcatgtgctcatgcaataattgttagccatggctatacgagacatcttgccaaacaaagtcaggttagacataactctgcctgtgcttttcttccatgctatatgtagcanagtcattgatcttgtgaagtttgatgagctgganaatgaggctgcaattatactgtgccagttggagatatattttccctctgctntctttgacatcatgattcactagattgtgcatctggtcagagaaatcaaatgttgtggacctgtttatctactgtggatgtacctgattgagcgatacatgaagatcttaatatggtatacaataaatttatatgcgttaaagcatctatcgtgaaaggtacatggagaagacgccatgaatttgtta

SEQ ID NO: 13783 - DNA, 241 bp, Glycine max
  unsure (1)..(241): unsure at all n locations
taatgtatcagaaaggcataatagaactntaatggatatggctacgaccatgntaatcaatttgactttacccgtatcnttgtggatgtatgccttgaaaattgtcatgtatttgttgaatatggttcctagtaagacagttccaaagacacctttngaactgtggacaaatatgacacctagtataagacacctgcatgtctggggttgtcangtanaaataatgatttataatccacaa

SEQ ID NO: 13784 - DNA, 317 bp, Glycine max
ataggtatacctccttgcatataaacatgtaattttcaaggtctgtgaaatattctgtacaagggttcaaaaggaaaagggttttgcatttcttccatcaaaagtgatcatggaattgagttagagaatgctgagttcatatcattttgtgaaaggaatggcatttcttgcaacttctcttaatctagaacacctcaactgaatggagtaattgatagggaaaataaaactctacatgacatgggtacgaccatgctttgggataacttacttcctaaacacttttgggtagaattagtgatcatagcttgctatga

SEQ ID NO: 13785 - DNA, 347 bp, Glycine max
  unsure (1)..(347): unsure at all n locations
agacatggagttacaagatttgctaccactttcttaactttgcaaagattgcataagcaaaaggccaatcttagaaggtgtttacttcagatgaatggttgaagtctaaggtagctaaagagcccaaggggaagcaagcaacagatgttattcttattccatcattttggaatgatgttgtttatgctntaaaagctatgaggcctcttgtaagtgtgttgagggtggtggataatgaaaagaaacctgcaatgggtttcatttatgaagcaatggatagggccaaaaaagcaattcatagagctttcaataacaatgaagggaagtataacgatatccttgcaatc

SEQ ID NO: 13786 - DNA, 352 bp, Glycine max
  unsure (1)..(352): unsure at all n locations
gccatgcacgatgtgtctgttntagatgaaagttgtctgcctctcatcaataagaccacatatcacttgtctcactctatttgctaataacttagatatcaccttgtacatacatccaatcaatgagattggtctgtactcatcagatgactgtgggtgttcggttctgggaattacagctatgaaagaagcattactgcctctatggaagctgccctgcacatggaattcatctacaaatcttctgaagtcagttttcatcatttgccaaaattctttaatgaatttcaagtttaagccatcatgtccaagacanttgtgcccatcacaactgcacactgcttctttgatc

SEQ ID NO: 13787 - DNA, 374 bp, Glycine max
  unsure (1)..(374): unsure at all n locations
tgacattcaccacatattttgccttcttctatttctaatcgagaatgcctctaacagcaccttcgtcaatgattctcttcatgcctcttaagtgcagatgtccaaatctttgatgccatattntgacttcatcttgtttggagaatagacatgtggaggagtaactggtttcttgaggtgtccatacgtaaacagtggcctttgatctgctgcccttcattaggacttcactcttctcatttggcaccaagcattctgactttgtgaagtttacattgaatccttcatcacacaactgactgatgctaatcaagttcgcagtcagtcccttcaccagcagtactgtgttcagactaagaagtccatcatggact

SEQ ID NO: 13788 - DNA, 415 bp, Glycine max
  unsure (1)..(415): unsure at all n locations
aatggcgatgactagtggcacacatgtatgggcgacaacccttatcataagatgaacaaaggagaaggatagcattgtgggggacctccatacagactgagcaggttgcatcttcccaatctttcttctccaatgctttagaagagctcttcctaacattaacatctttcagattttttcttccacaagacaaaagatgtgggcttgccctgtgacctcgagccttgctccgcaacttaccaactntagccatcaacaaactgaacctgaaactgatcaaggaaagacaatcatcatagtagaatcttttaaaaagcagagaaattctagcataatanattanaatgatcattccanacacaatanatcaaatgtctagaattgacatgatatcattatacgacttcgtagtaat

SEQ ID NO: 13789 - DNA, 207 bp, Glycine max
  unsure (1)..(207): unsure at all n locations
gtataataaccatgactcacatgcncctcagaaggcgaatcaagacccataatcctatccacgggatgcagaatcccagtgtacacagcgacattagcagaagtacaagaataatgttgaacattaacaccccactcgttgaggtgaagatcaaaagccaacaacgcacgctggctacagagaaactcaatctcatcaatgtattga

SEQ ID NO: 13790 - DNA, 235 bp, Glycine max
  unsure (1)..(235): unsure at all n locations
ttcgagcttctcgatatgtgatntgcctgaatcggacattcgtgtgaagagttataccagttgaatttctcaagagctgtctgtgtacaggtttgagcgtctcgatatgtgattagcctgaatcggacatccgtgagaanagttatgaccatttgaatatctctagatcttccgttgctaacttcgagcctctcgacatattatgcgaccgaatctgacattcgtgtgacaagta

SEQ ID NO: 13791 - DNA, 337 bp, Glycine max
  unsure (1)..(337): unsure at all n locations
tgtagcanatgcanaccacaatatcttgtagctctgatatccgactgagttccgtaatatatcaagatgnctcgaaatgactacagaagctcttagcanattataacgacaataactntctactcggatgtccgattgggtcacgtaatatatcgagtcgctcgaaactgaatacagaagctaagagcaaattcaaacgacaatgactnttaactcggatgttcgatngagtcccgtaatatatcaagacgctcgaaattgtatacggaagctcgtagcaaattcaaacgacaataaatttgaactcggatgttcgattgagtcccgtaatatatcg

SEQ ID NO: 13792 - DNA, 363 bp, Glycine max
  unsure (1)..(363): unsure at all n locations
gaagatggtgtcatccgcanactggagaatattcactgttaccttattcttccctaccanaaagctctgaaataagtttctagacactgcttccctcatcaaacctgttaacccttcagcaaccaagacaaataataaaggggccaagggatccccttgtctcaatcctctntgaggcttaaattcctcagtcggacttccatttacaaggatggatattgaagctgatgaaaggaagcctttaacccaaccaatccacctttcatggaaccccattcttctcatcatataaaataggaattgccaggacacagagtcataagctntntcgaagtccactttanacaccgagcaagatttctt

SEQ ID NO: 13793 - DNA, 365 bp, Glycine max
  unsure (1)..(365): unsure at all n locations
tttatgttgtgaaaaattggtcacattttgactttgccttaaagttgtgtatttatttgaattggtgcatttntatttttgtggcatgcttgtgaaggcttgctaagatgtggaaagagctgcagattgagatgggatatatatctgaggccagacctcaagagaggtggatntactgaaatggaagaggatcaaattatacagctacattcatgtctaggtaacaggtatatatgttatatgttctgaattgctttgcacccaaaacacanaaagatggtagattnttggacattatgtgaagaaagccttgaaatcaanggtttaaattgtggtcgtgggttcatcacgatccttaacactac

SEQ ID NO: 13794 - DNA, 434 bp, Glycine max
  unsure (1)..(434): unsure at all n locations
attatatannggttannggttatggtacctatagtatgaaaacttttgcattngcatttgcattctaatgtgggttatgtcattccatcatggacaatcttatgtttcactaacatattattcttgacctacatataagcaacaaaaaataaatgatttttaaatataagtaaattttaactatttttatcttatttaatgatattaatataaaaatatctttcaattagttcagtatttattntcaatgaattttttattcataatattaaattccaatgaagagtatattatganaaanaattctaaaataaaaagaattaaatataanatttacagttatttaaatttgtngataaatttgaacgtggagtttcggcctgcanacactatccattactcattagaatcctaatccataatgaataaatatt

SEQ ID NO: 13795 - DNA, 249 bp, Glycine max
  unsure (1)..(249): unsure at all n locations
cacccgangaagacactgacananacttatactactagaatggccataatacaaggcttataccctatactactagaatggacataataccaggcccagacaaaggaataacctattctaatatntacaaagataagcgggctcatacttagcccatgggctcgaaatctatcctaaggctcatgagaaccctanggccttnccttggatctctagcccaatctactnggagtcttctatccaatgccc

SEQ ID NO: 13796 - DNA, 403 bp, Glycine max
  unsure (1)..(403): unsure at all n locations
cttcactcggatgtccgattccggatcataacatatcgagacgctctanattgagcaacggaagctcttgagaaattcaaatggtcataactttccacatggatgtctgattaagacgcataatatatcaagatgttcgaaattgaacaacgaaagctctcgagaaattcaaatagtcataacttttcactcggaggtccgattcatgcgcataatatatcaggacggtcgaaatngaacaacgaaagttcttgagaaattcaaatgggcataactnttaacccggataaccgatttagaaacatcacatatagagaagctcgaaatgaacaacggaagctctcgagaagttcaaatgggtaaaactnttcaacggaggtcccattcgggcgcataatatatc

SEQ ID NO: 13797 - DNA, 513 bp, Glycine max
  unsure (1)..(513): unsure at all n locations
tatgacgttgtacgtcagcgatttgaaggagagacttcttatgatcctgttgtcacattatcaacatttagttatttgaaggaagaaaaatattctacgttttgtatcactatattagtcgtattgatcaatagttgtttatatattntaataaaatgaataacttctcaccttanaaataatttaaattatttntaatatttaattgtacatattaaattaatatgaagaanaaattattanataaaataaatataaaaatttacactaatttaatattactatctatgcacaaatntatttatttttataattagntactgtaaaatatatttctggaaaaattaaattaaattcatgactctaaagttataaaataatataatataatatgaaaattanaaaaatatatcaaacatagatatatatatatatatatatatttagttatgtatatctatatctatatatatatttatatatatatatatatctatatatatatatatatat

SEQ ID NO: 13798 - DNA, 413 bp, Glycine max
  unsure (1)..(413): unsure at all n locations
gctctcctttatctcttcctagtgagctatgatagttcttttgttgcaccctagctatcgtgatgagcctatataatataacctatgctatntagtggcaaaaaggatatgagactaaactactggttattaaactntatccctaagtaacaaggattgctagggatttataaaagcataaagctcagaagtgtgccttggtgacttgttggtcatgagttcgaatccggaaacagcctctttgcatatgcaagggtaaggctgcgtacaacatccctcccccataccttcgcatagcaaagagcctccgggcaatggggtacgaagtttataaagctcagaagtaatactgtcccaaaatcttaatttgacagaaaattatccattgatgcaaatcaagatacattaactat

SEQ ID NO: 13799 - DNA, 404 bp, Glycine max
  unsure (1)..(404): unsure at all n locations
ctagcgccatatgcttctatttttagtcctttgataaggctaagcgtagctgttgcgctaagcccttgttatgtgttaaggaggttgagctaagcgtgccttgctgcactaagctctgttggatcaagtggcctcggaataattaagaagggggggttgaattaattattaacgaacctttactaattaaaaatctatccttcttaatgttaccaaaagtaaaagcaataataaactgcacaacaaatattaaagagtgtagggaagaagaaacaaacataagagttttatactggttcggcaacaacccgtgcctacatccagtccccaagcgacctgcggtccttgagatttctnttcaaccttgtaaagtcctttacaagcaaagatccacaagggatgta

SEQ ID NO: 13800 - DNA, 324 bp, Glycine max
  unsure (1)..(324): unsure at all n locations
gatgttcacatgcaggcagctgcatccgaagctgaattactctataagaatctcacggtcatgaatgagacgtgaatgtatcaaacaaacgaaaccattattgagaagtatggcaatgcactcgatgatgacaaacttccaagagaacttctgctgggccaaagtgacaagcaagatgagtctgatcgtgcangtataattattaagggccatgtaagatatgcattctaaatctttacggtgcagcatatgtatataaatcttaaatattcttcttgagagtgtattggcagtgggatntcatacatgatctagcaacatatt

SEQ ID NO: 13801 - DNA, 251 bp, Glycine max
ctcaactatgcggcaatattacaatagacctcctcgacctcagcagcgatatctaccacagcagaacaattatgacctttccagcaacagatacaaccctggatggatgaatcaccctaacctcagatggtccagccctcagcaacaacaatagcagcctgctcctgtcttccaaaatgctgttggcccaagcagaccatacattcctccaccaatccaacaacatgaacaaccccagaaacagccaacag

SEQ ID NO: 13802 - DNA, 396 bp, Glycine max
  unsure (1)..(396): unsure at all n locations
cttcctgagaagcttctntgagaaacttccttgagaagctagagcttagctacactcactcatctaanaactaagctcgcctccttgagaagctagagcttagctacacacacccatctaaaaactaagctcacctccttgacaaaatacatganaatccaaaaaaaaagtccctactacaaagactactcanaatgccctgaaatacaaggctaaaaccctatactactagaatggccaaaatacaaggcccaaaagaaggaaaaacctattctaatatttacaaagaagagtggatccaaccttgacccatgggctcanaaatctaccctaaggctcatgagaaccctanggccttcccttggatctctggcccaatctacttggagtcttcta

SEQ ID NO: 13803 - DNA, 384 bp, Glycine max
  unsure (1)..(384): unsure at all n locations
tctggtgggacatctngacttgttttccaatctgacattcaccactgattctgccttcttctantttcagattgtgaatgcctcttacagcacctttgtcaatgattttcttcatgcctcttaagtgcagatgtccaaatctttgatgccatattttgacttcatcttctttggagaatagacatgtggaggagtaactggtttcttgaggtgtccataggtaacagttgtcctctgatctgctgcccttcattaggacttcactcttctcatttgtcaccaagcattctgactntgtgaagtttacattgaatccttcatcacacaactgactgatgctgatcaagttcgcagtcagtcccttcaccagcagtacttttgtca

SEQ ID NO: 13804 - DNA, 193 bp, Glycine max
  unsure (1)..(193): unsure at all n locations
atcgagacactcaagagtggaaaacagacgctcacgagaaattcanatgggtataactcttcactcggatgtctgattcacgcgcataatatatcgagaccctcgatattgtacagggaagctctctgccaaatcaaacgaccataacatttgactcgaatgtatcatcgacgcncacgatatttcgagacgc

SEQ ID NO: 13805 - DNA, 248 bp, Glycine max
actattcacacggatgttcgattatggcgaatcacatatcgagacgctaaatattgaacagcggaagctctcgagaatatcaaatggtcattaactttaacactgagttccgattcaggattataatatatacagacgctcgacataaacattggaatgtctcgagaaattcaattggttatcactcttcacacggatgtccgattccggcgtataatatgtctacacgctctatattgaacaaccga

SEQ ID NO: 13806 - DNA, 488 bp, Glycine max
  unsure (1)..(488): unsure at all n locations
tgatgtntgtgttgaatgcattaaaggtaaacagaccaaaagcaagaaattaagtgcacatagggctacagacgtcttggaattgatacatatagacatttgtgggccatttcatacaccttcatggaatgatcaacaatattttatatcattcatagatgattactctagatatgctgatgtgatcttgactaggagcggatcgcttgatacaggctacagagaatttggatgacgtcacttccagtgaaggaagataagtcagggtagacgccacaaggattaccttgataagtctgagattggttcaacaaggaacccaaagagaagctctcaccaaattntatgaaaattccaatagtcctttcattgaaaacaaaaaccaatacttatagtgtatctgaacaaaaagataaaaatagacatgggccttcaaaacagtttgggccaaaanaattatatataaaaaaatagaacatatttattat

SEQ ID NO: 13807 - DNA, 437 bp, Glycine max
  unsure (1)..(437): unsure at all n locations
agcttagccctagaggggatggaccttntcaggttntggagagggtcaataaaaatgcctataggttggacctcccagatgagtatggaatcaacaccacttttaacatttcttatttaattccttttgcaggtggagctgatattgaggaggaggaactaacagatttgaggtcaaatcctcttcaaggggaagggaatgatgcaatcctccctaggaagggaccagtcactagagccatgagcaagaggctccaacaggattgggttagaactgctgaagaaggccttangattctcatgaacctcaaggtaaatttcttagcccatgagctaaggttgggtccaattatctttgtacatattagactaggatgtcattatatntggtccttgtatttagggctccataatgtaggtagggtaccctagaagtat

SEQ ID NO: 13808 - DNA, 386 bp, Glycine max
  unsure (1)..(386): unsure at all n locations
agctnntacaaaaaaccacacttatgccttagtttctctgccacccaagaggaaagttgtgggttgctagtgggttttcataatcaaagaaaatccagatggttcagtcaacaagtataaaacccatttaatggctaaaggctttcatgaagtagttgggtttgattttaatgaaacattttctcctattgtcaagcatgtaactattagaatagttcttgcttttgccatcacttatcagcaggagatttttcaattgggtgttgataatgcattcctcaatgggctacttgaagaggatatctttatgcaacaaccttctggttctgagcatcaaaataagacattagtctgcaaactcaacaaggcactttatggtcttaaac

SEQ ID NO: 13809 - DNA, 450 bp, Glycine max
  unsure (1)..(450): unsure at all n locations
agctngccttgccccttgatatatttgagggactcatggtcactatgaatgacaaattccttgtgataaaggtagtgttgccatgttttcaaagcccgtactaaggcatacaactccttatcataagttgaatagttaagggtaggaccacttaacttttcactaaaataagcaattggatggccttcttgcatcaacacagccccaatcccaacatttgaagcatcacactcaatttcaaaagatttttgaaagtttggcaacgcaagtatggggacattagttagcttttgcttaagaacattgaaagcttcttcttgtttctctccccaattgaaaccaacatttttcttgagcacttcattgagaggtgctgccaatgtgctaaaatccttcacaaatcgtctataaaaacttgctaagccatgaaaactcctcacctcggtcaca

SEQ ID NO: 13810 - DNA, 479 bp, Glycine max
  unsure (1)..(479): unsure at all n locations
ggcttctacatctntggcaaggcatgtcatcttcctgtatagagcacanagcctactgggctgtaaagacttgcaacttctctatggaccaagctagagaagaaaggaagttgcaactaagtgagctagatgagatccgtttagaagcctatgagaattccaaattctacaaggagaagacaaggaagttccatgacagattcatagctaagaaggactntgtggttggacaaaaagttttattgtataactctaggctcggactcatgagtggtaagttaaggtcaaagtggattggtccttttgtggtgactaatgtttttccttatggtacagctgagatcaaaagtgaatccacagatacaagcttcaaggtcaatggacaccaactgaaaccattcctcacaaatccctccttagtggatgtagtggtggaggagacctccttacttcaccctacttctttctcaccatgactc

SEQ ID NO: 13811 - DNA, 502 bp, Glycine max
  unsure (1)..(502): unsure at all n locations
ngaatcatgcagccactnntgctttcaatccactgcttaaatatccaaaatacacctgcaacttctgacttagacttgagaaagtaaatccaacacattctagtgaaatcatctataaagatgatgtaatatttactttttttaagcaaagtagtcctttgaggttcggccaaatctgtgtgaatcaattgcagcttctctgttgctctccaggttgattgtttgaagggtaatcttgcttgcttgccatattggaatgcttgacaacatggtaatttagaatctaagtgaggtaagccatgaaccaactcctttcgtttcatgttcaacacagttgcatgatgaaaatggtctaatcttttgtgccaagcttctgtactatttacagtagctggataggctgcttgctcctacttcagtgggttaaatgagaaaattttgcctctcactttgatactgaaaatttccttgtcattgacatctttaatcaaacagtgcttat

SEQ ID NO: 13812 - DNA, 345 bp, Glycine max
  unsure (1)..(345): unsure at all n locations
gctgacttccttnagtagggaatctatccttcctaagatggagccaaacccagtcaccctcattaagaattagctcttttcttcctctattgcctttagttgaatacacctttttttggttctctatatagttcttaaccctctcatgtaacttctttataaactctaaccttgattccccttctttatgtataaaagaagtgtcaagtgggaggggaatgaggtctaacagtgttaggggattaaacctatagacaacctcaaaagggtactgcttgtgtggtctatgaacccccgtgttataggcaaattctacatgaggaagatactcatcccaagacttac

SEQ ID NO: 13813 - DNA, 447 bp, Glycine max
acggaagttctaagacaagtcagacgacaataacgactgactcggatgtacgatatagtatcgtaatatatcgagacgctcgtaattgaaaacagaagctctgagcacatttaaacgacaataacttttgactcggatgtccgattgtgtcccataggatatcgagacgctcgtaattgaaaacggaagctctgagagaaatcaaatgacaataacttttaactcggatgtccgattgagccttgtaatatatcgagacgctcgagattgtaaacggaagctctaagaaaagtcaaacgacaataacttttgactcggatgtccgatatagtctcgtaatatatcgagacgctcgtaattgaaaatagaagctctgagcaaattcaaacgacacataactttgactcggatgtccgattgtgtcccgtatgatatcgagacactcgt

SEQ ID NO: 13814 - DNA, 344 bp, Glycine max
  unsure (1)..(344): unsure at all n locations
agcttctgttntcacttacgagcgtctccatatattacgggactcaatcggacatccgagttaaaagttattgtcttttgacttttcttagaacttccgttttcaattatgagcgtctcgatatattaataggctcaataggacatccgagttaaaacttattgtcgtttgattgttctctgaggatgcgttttcaattacgagcgtctcgatatgctacgggactcaattggacatccgagtgagaagttattgtcggtcgaattctctataacatctgtgttcattacgagcatctcgatatattatgggactcaatcggacattcgagttaaaagttattg

SEQ ID NO: 13815 - DNA, 455 bp, Glycine max
  unsure (1)..(455): unsure at all n locations
tattgcaagaagagatggatagcagaagactttatgtaggtgagtattggaaaattgcaaggagaaatgaatcccttctacctcaaaaatcaagaagtaggtggataaaggaaggtgatggtaatacaaagttttttcgtggtgtcataaattggaagagaaggaagaacaacatcaaagggatttccatcaaaggaagatgggaggaggaaccaagacttgtgaagaaagaggtgttggaattttatcaaaaaatattctatcaagaagcatggatgaaaccatgacttgatggcatgtccttcanacacttgngggttggtgacaatgattcactttgttgttgttttaatgaatgggagataaaanaggcaatgtggaattgtgaaggtgataaaagtcatggtcccgatgggctcaattataatcttataaagagatattangacactatg

SEQ ID NO: 13816 - DNA, 430 bp, Glycine max
  unsure (1)..(430): unsure at all n locations
agcttccattgttcaatttcgagtgtctcgatatattatgcgcctgaatcggacctccgaatgaaaagttatgaccatttgaatttctcgagagctacctttgttcaatttcgagcgtctcgatatattatgcgcctgaatcggacccccgagtgaaaagatatgaccattggaatttctcgagagcttccgttgttcaatntcgagagtcttgatatattatgcgcatgaatctgacctccgagttaaaagttatgaccagttgaatttctcgagagcttccgttgttcaatttcgagcgtctcgatatattatgcgcctgaatcggacctccgagtgaaaagttatgaccatttgaatttctcgagagcttccgctgttcaatttcgagcgtctcgatatattatgcgcctgaatcggacctccgagt

SEQ ID NO: 13817 - DNA, 435 bp, Glycine max
  unsure (1)..(435): unsure at all n locations
agctntcncgctctatgatcttatgtggcttcctctcaaactcgccatacgaggtcgccaggttgaaaggctcatgattgaacctttatattgtatcttttggttggcaacttcttctctaatccttgtcatttcttggactttatcaatgatttcaagttccaccctcatattttcttcatttttttgttgctgaaataatagtctctatgtcgatgataccccaccttctatggggatcatggtgtctgtgccatatgtaagttggtaatgagtttcattggtggctgtttagggtgtacaatggcacgcctagagtatgttgtagagttcttctttccataagcctttagacttgtcaagtctagtacgcagggccctgagaatgactcgattagttgcctctgcatgtccgttattctaaggatgttcaac

SEQ ID NO: 13818 - DNA, 489 bp, Glycine max
  unsure (1)..(489): unsure at all n locations
agcttctgttttcaattacgagcgtctccatatattacggttctcaatccgacatcggagtaaatagttattgtcgttagaatttgctcacagcttctgttctgaattttgagagtctcgatatactacggaacacaatcggacatctcagtaaatagttattgtcgtttgaatttgctcagagcttctgttcttaattacgagagtctcgatatattacgggattcattcggacatccaagtaaaaagttattgccgtttgaatttgctcaaagcattcgttgtcaattacgagcgtctagatatattacgggattcattcggacatccgagtaaaaagttattgtctttttattctgctcatagcttctgtttcaatttcgagcatcttgatatattacaggactcaatcggacatccgagtcataagttattgtcgnttgaattngctatgagctatcggtttccttacgagcatctaatatgcta

SEQ ID NO: 13819 - DNA, 499 bp, Glycine max
  unsure (1)..(499): unsure at all n locations
ntactatgcagagaatatccaagggaaataccttcatctgacttagcatcaaatnttcctaagttatcttttccattattcaatacaaaacatttacaaccaaagatatgaagatgtgagatgtttggttttctgccattgaacaattcatatggagttttctttaaaatgggtcttattaaagccctatttaaaatgtagcatgcagtgttaatggcttcagcccaaaagtattttggaaaaggagtatcatttaataaagttctagcaatctcttccaaagatctatttttcctttcaacaacaccattttgttgaggggttcttggtgcagaanagttatgctcaatcccatgcttatcacaaaataattcagatttnttattttcaaactcacccncatgatcactcataatagatataatcattagattnttcttattttgaatgagttttgcaagtnttctaaatgcttgaaatgcatcattcttatgagtga

SEQ ID NO: 13820 - DNA, 450 bp, Glycine max
  unsure (1)..(450): unsure at all n locations
agcttgtggatggtgaccaatcccagaggacttttgtgtatattaaggatgctattgaagttgtcttattgatgattgtaggttcccatatccaatctttttatacaactttatatattttaagttctgattttctgattgtagaatttcatctttaaactattactcttgttggatggttcaactaaatgtgaacgataatttttaacaggaaaatcccgccagggccaatggacatatttttaatgtgggaaacccaaacaatgaggttatagttaggcagcttgctgaaatgatgactcangttagaggattaagtttgattgtttgatcctattagaatttcaacatggtatttgggaccattcaacatttattttcgttcaattctgcaggtntattcaaaggtaagtggagaagcacctctggaataaacctatattgatgtga

SEQ ID NO: 13821 - DNA, 489 bp, Glycine max
tcaggttgcttaattgctccaggttgctgcatggaagggcaaaggtctgtatggtggtcagcagaggagcacaaaccacaaacccttgcgacaggtacagatttctgattcaaggccagctgggttaccaagttgaccaacgcatccagtttgccttcaagcttcttagtttcagatgatgcagatgggtttgtagctacctcatgcactcctctaatgactatggcatcatttctggcgctaaactgctgggagttggaggccatcttctcaattaaatttctggcttcaacaggggtcatgtctccaagggctccaccactggcagcatctatcatacttctctccatattactgagtccttcataaaaatattggagaagaagctgttctgaaatctgatggtgggggcaactggcacatagtttcttaaatctctcccagtactcatacaggctctctccactgagttgtctaatacctgagata

SEQ ID NO: 13822 - DNA, 419 bp, Glycine max
  unsure (1)..(419): unsure at all n locations
agcttctatattgcatgtcctagttggccctgacttctccgttttnttttaattgtggattacagaatttggatagggcaattgaccacaaggcattgcatgataccttttctacatttggaaatatcctttcgtgcaaggtagctacggattcatctgggcaatcaaaaggctatggctttgttcaatttgataatgaggaatctgcccaaaaagctataaagaagctgaatggtatgctgttgaatgataaacaagtgtacgtgggacccttccttcgcaagcaagagagagaaagtgctgctgacaaggcaaaattcaacaatgtttttgtgaagaatctatcagaatcaaccaccgatgatgagttgaagaacacttntggttgaattggaactattactagtgctgtagtaatg

SEQ ID NO: 13823 - DNA, 322 bp, Glycine max
  unsure (1)..(322): unsure at all n locations
agctngtcttcaacatataaatcaaaatctattttctgatcttctatgcccagctacagcttctttctccccatatcaactatgcagctagcagctaacatgaatggcctccccaatattaccggaatgtcattatcttcacagatatccattaccatatagtctgtcgggaaaataaaactgttcactctgaccagcacatctncaattactccatatggtctggtgatggagcggtcaacaagttgtaaagtcattctagtgggcatgatctccaactctcccaaccttttgcacatggagagtggaattagttaatact

SEQ ID NO: 13824 - DNA, 408 bp, Glycine max
  unsure (1)..(408): unsure at all n locations
ctaagcttcaactngcacanaggagttgagcaggtaaaaaagattcgtcttcaaactcttagaggtgactttgagcgtttgtttatggaggagtccgagtcaatttctgattatttttctcgagtattggccgtagtcaatcaacttaaaagaaatggtgaagatgttgatgaggtgaaggtcatggaaaaaatacttcgaactttaaatccaagttttgacttcattgttaccaacattgaagaaaacaaggatttaaagaccatgactattgagcaactcatgggttccttacaagcatacgaagaataacaaaaaagaanaattaaacaaaatgaggctacggagcaactactacaactcaacgtaaaggaagcaaactatgcaaattacaagagccaaagagga

SEQ ID NO: 13825 - DNA, 463 bp, Glycine max
  unsure (1)..(463): unsure at all n locations
ntacaacanatgccactntactccaagttntaaaaggatatgttaacaaggacacacaagtatattcaccaggaaaacattgttgtggaaggaaattgtagtgttgtgattcaaaagatccttccacccaagcataaagaccctgtgagtgtaaccattccttgttcaattggagaagtcactatggaaaggcacttattgatctgggagctagtattaccataatgccactctccatgtgcagaaggttgggagagttggagatcatgcccactatgatgactttacaacttgttgaccgctctattaccagaccatatggagtaactgaagatgtgctggtcagagtaaaatattntatcttcctggcagactntgtggtaatggatatctgtgaagataatgacattcatgtaatattgtgaaggccattcatgttaactgcaagctgcatagttgatat

SEQ ID NO: 13826 - DNA, 497 bp, Glycine max
  unsure (1)..(497): unsure at all n locations
aatttcgagcgtntcgttatattacgggactcaatcagacatccgagtaaaaagttattgtcgtatgaattggcttaaagcttaaacattaaactttgagcgtctcgatatattactggactcaatcagacattcgagtaaaaagttattgtcgtttgaattggctcagaggttgaacattcaatttcgagcgtctcgatatattatgggactcaatcagacatccgagtaaaaagttattgtcgtatgaattggcttatagcttaaacattcaactttgagcgtctcgatatattacgggactcaatcagacatccgagtaaaaagttattgccgtttgaattggctcagaggttcaacattcaatttcgagcgtctcgatatattacgggactcaatcagacatccgagtaaaaagttattgtcgtttgaatnggctcataggttcaacattcaatttcgagcgtctcgatatattactggactcaatcagacat

SEQ ID NO: 13827 - DNA, 398 bp, Glycine max
  unsure (1)..(398): unsure at all n locations
canattcaaacgaacaataacttttatctcggatgtctgattgagtccagtaatatatcgagacgctcgaaattgaatgttgaaactctgagccaattcaaacgacaataactttatactcggatgtccgattgagtgacgtaatatatcgagacgctcgaaattgaatgttgaacctctgagccaattcaaacgacaataactttttactcggatgattgattgagtgccgtaatatatcgagacgctcgaaattgaatgttgaacctctgagccaattcaaacgacaataacttgttactcggatgtctgattgagttccgtcatatatcgagacgctcaaaatngaatgttgaagctctgagccaattcaaacgacaataactttntactcggat

SEQ ID NO: 13828 - DNA, 422 bp, Glycine max
  unsure (1)..(422): unsure at all n locations
ccctgagagatntagtgaacatgtcctccagttggtcactagagttgacaaactcaatggtgatttttcctgagagcactttctctctcacaaaatgacagtcttctactgtgtttagtccattcatggaagaccggattagatacaatgtggagaacggcttgattatcgcaaataagattggtggcttgagtgtctccaaattggaactgctggagaagtttccttagccatgtaatttcacttgtagttgcaggcatggcacggtattcagcttcagcactggatctagtgactatattttgtttcttgcttccccatgggatcaaatttcctcatataagaacacaataaccaatcatggacttcgtggctgatggtgagtctgcctaatcagcatcagagtaaaacanatgatcttg

SEQ ID NO: 13829 - DNA, 495 bp, Glycine max
  unsure (1)..(495): unsure at all n locations
tactactctntcgtcttgttagggtgttcacaactcattgtgtctcattaacccagtttgtttcaaggttaattntgatgcgttcagggttaaaattagactctgtattttttaagatagatttgagttatgttttgagtcatctcaacatgcatgagttgatgtcttatttttgtttaaaaagtattgaattttaaataattgtacatcaataataaaaaaaaatattgatagataatattttgtgtacataatattatatttaattatgatgattntatttaatatataatatacattgtaaaatatattttaacttttttaaccaatatgttagttcgagtcgtgtcgagcaaactagtttgttatataacaaaatatgagaatttgagagtaggttttgaagaaataagtacaagattactctgaagtnttaccttaaaatattattttatccaagtacatgaanaggaaaagttgtactcctataagtct

SEQ ID NO: 13830 - DNA, 425 bp, Glycine max
  unsure (1)..(425): unsure at all n locations
tatgttgcatatattacaatagacctcctcaactctcagcatctnaatcatccacaacagaacaattatgacctttccagcaacagatacaaccctggatggaggaatcaccctaacctcagatggtccagccctcagcaacaacagcagactgctccttccttccaaaatgctgctggcccaagcagaccatacatatcttcaccaatccaacaacagcaacaaccccagaaacaaccaacagttgaggcccctccacaacctatcctcgatgaacttgtgaggcaaatgactatgcagaacatgcagttacatcatgagaccatagcctccattcagagcttaaccaatcagatgggacaattagctacccaatngaatcaacaacagtcccataattctgacaagctgccttctcaagctgt

SEQ ID NO: 13831 - DNA, 383 bp, Glycine max
tgctcattacttttcactcagaagtccgattcatgcgcatcacatatagagacgctcgaaattgaataacggaagctctcgagatattcaaatggtcataacttttcactcggaggtccgatttatgcgcatcacatatagagacgctcgcaattgaacaacggaagctctcgagatattaaatgggcctaccctttaactcggaagtgccaatcatgcacattaaataccgagacgctcgtaattgaacaaaggaaggccttgagcaattcaaatgggcttaacttttcactcggaggtgcgaatcaagcgcattacatatagagacgcctgcaattgaaccacggaagctctcgagatattcaaatggtcataacttttaa

SEQ ID NO: 13832 - DNA, 467 bp, Glycine max
  unsure (1)..(467): unsure at all n locations
atatattcaatatattntatatgttntatttatgttcatgtttatattttgataaatgaataattctaggtagtataagtcaatatatttgatatcttttatttatgtacatgtttatattttgataaatgaataattttaggtagtataagataataattttgtatagggctctttgtattgttaatgttatatatgctagattatattttgataaataaatagttctaggtagtataagattatagtttgaattgttaatgttatatggtagattagatttaggtttatatgataaattangaatacttttacatactctaagttattaattttatatggtagattaggaatatttttaattatgatatggtagattaagtttagttggaaatttccttataatagattagaaataattatagattagctttagtctaaatgttgtatatggtagaatacattta

SEQ ID NO: 13833 - DNA, 425 bp, Glycine max
  unsure (1)..(425): unsure at all n locations
ctgatagcgatgccattttanaaccagccaaacactcctgttggacctgatctcaaatggagatacttttggaggatcggtcctcgaccgtcaaatactcgttttcaggtctcatgctttctcttttttcttatccgtaagacatttgtcctagttcttaaacctaatgtttattataaatgtacaggaacttaatgctgagccagtaatacctgaaggtttccctgaatggaaagaaactatggattcctgnggatacaaaatgatagcagcaattgaagtcagtcattntttttcatgctatttctaatgtgtggtgatctaaatgtgcatatttgttcttaggtggttgctgaaatggcagctattgggtttggtcttccaaaggatgcattcacttctcttatgaagctggtgagcacatc

SEQ ID NO: 13834 - DNA, 445 bp, Glycine max
  unsure (1)..(445): unsure at all n locations
agcttatgctgcanatatttacaatagacctctctaacctcagcagcaaaatcaaccaaagcagaacaattatgacctttccagcaacagatacaaccctggatggaggaatcaccctaacctcagatggtccagccctcagcaacaacagcagcctgctccttccttccaaaatgctgctggcccaagcaaaccatacattcctccaccaatccaacaacagcaacaaccccagaaacagccaacagttgaggcccctccacaaccttccctcgaagaacttgtgaggcaaatgactatgcagaacatgcagtttcagcaagagaccagagcctccattcagagcttaaccaatcagatgggacaattagctacccaatngaatcaacaacagtcctagaattctgacaagctgccttctcaagctgtccanaaatccaaaaat

SEQ ID NO: 13835 - DNA, 493 bp, Glycine max
  unsure (1)..(493): unsure at all n locations
ggatgcctcctaccactgtttatgatgcaatgaagctgagttatgatgatctagatcgtaaagagcaacaactttttctagatctagcatgtttctttcttagatcacatataatagtaaacgtgagcaatgtaaaatctttattgaaagatggtgaaagtgataattcagtggttgttgggttggaaaggttgaaagataaagctcttataactatctccgaggataattgtatatctatgcatgattgtttacaagaaatggcctgngagattgttcgtcgcgaagaccctgaaagtcgtagttggttgtgggatccaaatgatgacatttatgaagcattggaaaatgacaaggttaaataccagctacatataacaatttttgaatcacgttagaatttgttttttgcaagaaaaattggctttgatgattaatattttgcttctacattgatgcagtgtactgaggccattataagcatacgaattca

SEQ ID NO: 13836 - DNA, 460 bp, Glycine max
  unsure (1)..(460): unsure at all n locations
tgtcactctactcataatttctgaaagatatgttgaggaggaaaaacagatacatccaccaggagaatattgctggggaagacaactgcaatgctgtaatatagagaattcttccaccaaaacagaaggaccctggaagtgttactattcattgttcaatcggtgaagtcactgtgggaaaggctctcattgatttgggagccagtatcaacctaataccgctctccgtgtgtaaaaggttgggagagttggaaatcatgtccacgagaatgactttacaacttgctgatcgatccatcacaagacctcacagggtaattgaggatgttctgataagagtgaaacatatggtctttccagctgattatgtggtcatggatgtggaggaagtcattntgggatgtccctttatgtcaactgcaagctgcataattgatacnggaagaaagacactggagat

SEQ ID NO: 13837 - DNA, 441 bp, Glycine max
tatgaagagttcttgacgatgctagttgtcaagcaccttgtgacttctgtcgaatatccctagaccaacaatcaggagaaggcagcaaacagagttatccttaaggccttgcgcacaagacatgacaagcccaagggtctatggaaggaggaactccccagcatactttgggcttatcattgttcgcctcagacaacaaccaatgaaaatcctttctgacttacatacgacacaaacaccatgatccccatcgaagttggggagccatcgacaaggaggatgtttttccaggaacaacaaaataaagaaaacatgagggtggaactagagataaagcaagcctagacaacagagcatacatgctacatgaactagatggttaagtaattccaagaacatggaatgctacccatctaaagttttacttcagttaatcgacta

SEQ ID NO: 13838 - DNA, 370 bp, Glycine max
  unsure (1)..(370): unsure at all n locations
agcttctatactntgtacaagaatgaagctcngtttccacttgttagacaagtggcctcagatatcttaagaagggggggttgaattaagatattccaaactgtttcccctaattaaaaatctatttcactttntactcaagttatgaattcccttaatgacaatcttcttaaatattaattcaaacgaagcaacttgaatatgaatataaagcaataataaataaaagagattaagggaagagaaaatgcaaactcagttttatactggttcggccacacccttgtgcctacgtccagtccccaagcaacccgcttgagagtctcactaacttgtaaattccttttacaagttctaaacacacaaggac

SEQ ID NO: 13839 - DNA, 487 bp, Glycine max
  unsure (1)..(487): unsure at all n locations
agctngcatgatgggagcctttctccttctcctttgagttttactcagccaagtagtaatcttcctctgtgacctttntagatgaaggaccagagaacatgccaccccattggggaaagtagattaagcatattggcaggctgcatattatgatcatggctcccattagagtgattcctctttcttttgaaaacctggatcctttgaagaaaattaggtgggtgacaactgctcccacgttgcctcctcctcctgtcattccagatataactcctaatgacctgaaaatgcatattgttagaattaatcacaaaaaaattatttagataggatntggttggataaatctctctagaagtacttgtaggagaagaaaataataagaataaaaagagatgaatttctccataacgtaaaatgaactctacattaattaatttggagatgtcctctcatctcttagaagaattacgagagttttacaatc

SEQ ID NO: 13840 - DNA, 372 bp, Glycine max
agcttcaacctagaggagacgaaccattccaagttttggataatatcaacgacaatgcctacaagaatgacttgcctagtgagtataatgtaagtgccactttcaatgtgtctgatctatctctttttgatgcagatggaggagccttggatttgaggacaaattcttttcaaggagggagtgatgaggacataaccaatggcaaggaccatgaagcacttgaaggtcccatgaccagaggcagacttaaacaagcccaacacatcatagagacaaggctggtcatttgtatagctgtcattgatgatgattgaaggcccaagtggagaaagatgaaggcccagaggcagaggcactaccaagactactaat

SEQ ID NO: 13841 - DNA, 412 bp, Glycine max
  unsure (1)..(412): unsure at all n locations
agctatgttgcnatattacaatttatccttctctcctcagcagcaaaatcaaccacagcagagcaattatgacctttccagcaacagatacaaccctggatggaggaatcaccctaacctcagatggtccagccctcagcaacaacaacagcagcctgctccttccttccaaaatgctgctggcccaagcagaccatacattcctccaccaatccaacaacagcaacaaccccagaaacagccaacagttgaggcccctccacaacctttcctcgaagaacttgtgaggcaaatgactatgcagaacatgcagtttcagcaagagaccagagcctccattcagagcttaaccaatcagatgggacaattagctacccaatngaatcaacaacagtcccagaattctgacaag

SEQ ID NO: 13842 - DNA, 396 bp, Glycine max
  unsure (1)..(396): unsure at all n locations
agcttagtactgggaacctggatgctccatcgttcaacttgtcgatgctnggcaaagggtatgcatccttgggacacgcccggttgagatcggtgtagtcagtgcacatccaccattttccattggccttttttaccatgatgacgttggcgagctaggtagagtgcctgacttctctgatgaaattgtctttgaggagctcatctacttcctatcttatggccttacatcattcttctcccatcttactcttcttttgtgatactggtttggcctanggacaaatggcgagcttgtggcatataatgctagggtagattcttggcatgttagatggctgccacgcanacaggtctacattatggtgtaagacatcaactatgcatctgtgttcat

SEQ ID NO: 13843 - DNA, 451 bp, Glycine max
  unsure (1)..(451): unsure at all n locations
atctctgagtcacctgcggcatgcaagcttctgttntcaattacgagcgtctccatatattacggtctctaatccgacatcggagtaaaaagttattgtcgttagaatntgctcagagcttctgttctgaattttgagagtctcgatatactacggaacacaatcggacatctcagtaaaaagttattgtcgtttgaatttgctcagagcttctgttcttaattacgagagtctcgatatattacgggattcattcggacatccaagtaaaaagttattgccgtttgaatttgctcaaagcattcgttgtcaattacgagcgtctagatatattacgggattcattcggacatccgagtaaaaagttattgtctttntattttgctcagagcttctggttttcaattcgagcatcttgatatattacaggactcaatcggacatccgagtc

SEQ ID NO: 13844 - DNA, 418 bp, Glycine max
  unsure (1)..(418): unsure at all n locations
agcttatgttctcaatttcaagcgtcttgatatattacaggactcaacctgacattcgacttaaaagttaatgtcgtttgaatttgctacgagcttccgttttcaattacgagcgtctagatatattactggactcaatcagacatccgngtaaaaagttattgtcgttagaatttgctcagagctttcgtcttcaattacgagcgtcttgatatattacgggtttcatttggacatccgacttataagttatcgtggtttgcatttggtcagagcttctgttctatatttcgagcgtgtcgatatactacgggtcacaatcggacatccgaacaaaaagttattgtcctttgaatatgctcagagctnttgctatcaattctgagtgtctggatatattactgcacataatcgaaca

SEQ ID NO: 13845 - DNA, 429 bp, Glycine max
  unsure (1)..(429): unsure at all n locations
agatctctgagtcacctgaggctgcagcttaaggatgaggactacccttggttcaatatcatggcttactntaaggccacgggacaaccaccagaaggtatgaaatttcacaagagaatnaggttcttccaagaagccaccaagtatgtttgggatgatgttattctttttcgcattgcctatatattttcgtattggttctaacaatttgttaattgatgtgtaacaaagggagaagtcaccatatagaggccacttcaacaaagagagaacaactacaaagatccttcgagcttgattntattggcctacattcttcaaagatgctcataaccatgcatgatcatgcgatagctgtcaaagaatcaacgacatatctagacgacatgaaatgtcatcacataacatgcaagaggcataagtctttga

SEQ ID NO: 13846 - DNA, 475 bp, Glycine max
acttaaactccttcatctgcacaaggcttataatatttgaagagtatccatgtggtaccttcacctgacgaaaacactgacaaaaacatatcttcttcttcttggacagagtatggctagctgagggcaagtaaattatctttccatcagaccttgggagcaactgtgctcttatacccatatcaactatatattgacgggtttttaagccatccttcgtgatgccttgaatgttaaagagcgtaccagacacactgacacaaacatttttgtccacatgcataacatcaatacaatgtctaacgtcatgatctcacctatacggaagatcaaagaaaatggacctcttctacatatgcaactctgactttgatccttcttgtgggcgttccaacaacaatgttcatgagttgaagccgctgatatacctgttcacaatcaacgggatccgcgcaataaatgcttttgacttcat

SEQ ID NO: 13847 - DNA, 564 bp, Glycine max
agcttaacaaattgactagaaaaagttattgatttaatgacaccccaaagtgaatgctagctttcctgactttttcctataatataaaggtcaaatgtttaacactgtatctcgaccgtatataaatgcggcacgaaatgatatgtaaatacacttggatgaaaaacaacttcataaaataacatcctcctaatgatgtcactgtattaccgtaatattttattcaaaacataaaatagatatgctgaatgattcttaattttgtaagtcaattaaatattaacttaactacaaatccgataaactcgtccaaaattaaaaagaataagataaacgtgattaaagaagatcacaataatcttttaatatttaatttatcggaaaaaaaaaagttttttaacagagaagtttattttatttactttgcaattaaagaaataattatggagtaattaagtgcacttttacagtttagtcattcaatagaaaatgaataaaaagatttttaattgtaataaaaaagggaattgaatacccataatgttcggagcttgatatgcacta

SEQ ID NO: 13848 - DNA, 512 bp, Glycine max
  unsure (1)..(512): unsure at all n locations
tggatattntaaaaaatatatatgaattgttatccataatattatccattggttaattaataactatgtttattcaaattatttatttagagaatattaataattagtttaatattggaaggcttaaagtaaagactttgattccttgagttggccccatgagttgggctagttaaaagctaataataaagctatgttagaatcctaataataagtaaataatgtacaaaacttaaaatattgatatgaaccaacaagaatttaagtattaaacttaaaatagatcaggtatgttaaattcacggtaaatagcaggagcatgcgatagaggtgctattgtgattgataacaatgactacaataggaaccacaaatatacctcatgacaaccaggatcaatgcctatcaagaccaaccattgccagtactattttatatgctccatttcacttgtaaattatgtttaacagttccaccacgtgcgaaagctagataacccaaaagccttatgc

SEQ ID NO: 13849 - DNA, 525 bp, Glycine max
actaagcttgcactcttttgcatggaatataaacctgccaccacctcccgtgagccgagttactcgcgaaaacatggtgatcctgtatgtcccagttacaatcatagtccctataacacatccacggcttcaaacccaagtagtgtatggtgtacacgtcatcaaggagctcgtgcttattcccataaccaatactacgaaaagtcgtgagctgattcaccttggccggcaaacggtgccaccacgtgaagatctcgttcagaaaaccctggtcgccgccgttgtaagaacgcaccttggaagtcatgttcatcattctctggaacatgcattgcgacggctcgattaccatcgaccccgagttgaataacgctttctcgttaggtgctgcggataattgacggagcatgaataaatggtcgatgcttctgagaagtaagaggttggagtcaataatgaagatgatcgattctgtcgtacgttgtgagctgccacattcgtagcatgctggttgtatgcaccctt

SEQ ID NO: 13850 - DNA, 410 bp, Glycine max
agctttttatttttagtagatgaagatgaatctgtggccacctcatggactcctctaaggataatagcatcatttcttgcactgaattgttgggagttggaagccatcttctcaatcaaattcctagcttcagcaggggtcatatcaccaagagctccaccattggcagcatcaatcatattcctatccatgttgttaagtccctcatagaaatattgaagaaggagttgctcagaaatctggtggttaggatagcttgcacacaatttcttgaatctttcctagtactcatacaagctttctccactaagttgcctgatgcctgaaatgtcttttctgatggcagtggtcctagatgcagggaagattttctccaagaacaccctcttaaggtcatcccagctgaaaac

SEQ ID NO: 13851 - DNA, 561 bp, Glycine max
  unsure (1)..(561): unsure at all n locations
tcttggttggaaagaataaggaacctatcaacattttacagtatgctgatgatactgttttttgtggagaggctgtgtgggacaacattcatgttattaaagccttattaaaaagatatgaattagtttctggtttaaagattaattttgctaaaagtcagtttgggattattggtggtggtgtcaattgggctttggaagcagctaataccctgcactgccgacagctggagtatcctttcctctatttaggcatacctattggggctaatccctcaagccagctggtgtgggagcctatcatcactaaattcaagtcaaaattagccaaatgggctcagaaaaatatatccatggctgggaagaatactctgataaattctgtcctcaatgccctccccaattatctcctctccttctttaaaatacctcaaaaggttgtcaaaaaactgatatcccttcaaaggaanttttctgtgggtggagacaatgatcataaaaaaatcctttggtgaaatgggctgatatttgtttgcctaagactgatgggggactggggat

SEQ ID NO: 13852 - DNA, 516 bp, Glycine max
tctacattcaatttcgagcttttcgatatattacgggactcaatctgacattcgagtaaaaagttattgtagtttgaatttgctcagggcttcggtattccatttcgagcgtctcgatatattacgggactcaatcggacatccgagtaaaaagttattgttgtttgaatttgctcagagcttcggtattccatttcgagcatctcgatatattacgggactcaatcagacatccgagtaaaaagttattgtagtttgaatttgctcagggcttcggtattccatttcgagcgtctcgatgtattacgggactcaatcagacatccgagtaaaaagttattgtcgtttgaatttgctcagagcttctacattcaatttcgagcttctcgatatattacgggactcaatcagacatccgagtaaaaagttattgtcgtttgaatttgctcagagcttcagaaatccatttagagcgtctcgatatattacaggactcaatcagacatccgagttaaa

SEQ ID NO: 13853 - DNA, 367 bp, Glycine max
tgctttatgggaagagaggggtctatttttattcccagctgcaggaacacggtggagagatattcgaaagagatgggatattatacgactgtgccttctctgcttgtgaccaagggctaggactgaatgagctatagtatgaagaccaacttcatttttagtcaataatgacatttataaaacaactatactaattggcggtgttaatttggggcagctattgcgtcatgcaactgatcggtgtcccatataaccctttgcatctgtactgtaaaaaagggagagctggcgatgatccacatgcagaggagcaatgagaagagtgtgacaatgcggatggtgctctgaaagaattgcgaggctcttt

SEQ ID NO: 13854 - DNA, 483 bp, Glycine max
  unsure (1)..(483): unsure at all n locations
tgcanaaagtgaaaatgaagcctcagctgatggaaccttgttcatacaaattgttggtagnctaaaattcatctgccacaacaaaccagagatcacattcaatgttggactggtgagcagatttatgggtgaccctaagcaatcacacttgctggatgctaaaagagtcatgaggtatctaaaggggacattgggatatggaatcattttccctcatcaaaccaaagaggatgataatctacatcttgtagcctattcagactctgattggtgtggagatttggttgataggaaaagcactgtgggacaagtattcctactgtctggctctcccatatcctggaactcaaagaagcaactagtggtggcactatcaacttgtgaggaagaatatattgcagcttgttcagctccttgccaagcactgtggctttcatccttgattaatgaattgaaagtatcttcgaatgaagttgttgaact

SEQ ID NO: 13855 - DNA, 583 bp, Glycine max
agcttgcttaagttcgaatattgatttctttaatttgcacaccatgtgttccttcccttcaactgagaatcctattggctggtccatgtaaacattatcctctaaatctccattaagaaagataattttcacatatatttgatgtagttctaagtcataatgagctatcagtgtcatgataatcctgaaggagtcatttcgtgaaactggtgaaaatgtctgttaatcaacaccatttctttgagtaaaacccttagcaacaagtttgaccttgtaatgtttaacgtttccatgagggtcatgtttagtcttaaagaacaacttacaaccaactctcttacaatcttctaacaattctacaaggaccaaaacaccattctgttccatggatcttaactcttctttcatggcttccaaccacttattagaattatcacaacttatagcttgtgaaaaacaaactagatcatcattaataatgcttaattaatttctaatcatgtggatggaccacatactcatttgaaataattggccttcattctcgttgagacctcctaaatgtacttcttttgattcttct

SEQ ID NO: 13856 - DNA, 483 bp, Glycine max
  unsure (1)..(483): unsure at all n locations
agcttgttcatcttgagataataggtgtttgtcctcatttgaagntgatggtgcaacatatttctttggcctaacaggaactccaatatttttacagcttctaatgttatgattggtttggccacacctttcacatgtaaagtcagccaattttctctttagcctatgtcctgtgacattgtcctcatctaccgatctccttctatttttctttggccttcctctttgtacccttttatgtggaggaataaggtgtgtatattgtgtctgggcccaatattgcggtccttggactggctcaataaaatgctggtatgtcttataataagcttctattgacagtcactcatgacacatgtcctcaggcttcccttctttgtgagatattggtgcaatggcatgttggcttgtcatccctacattaaagttggaaaataatcacacatgtaggttacgaatgaaaaaaaaaactgtaaagaacac

SEQ ID NO: 13857 - DNA, 448 bp, Glycine max
tctgttttcaatttggagcgtctcgatatattacgggactcaattttacatccgaatataaagttttcttcggttgaatttgctcagagcttctgttctcaattccgtgcgtctcgatatattacgggactcaatcggacatccgagtaaaaagttattgtcgtttgaatttgttcagagcttctgttttcaatttggagcgtcttcatatattacgggactcaatcgcacatccgaatataaagttattttggtttgattatggtcagagcttctgttctcaatttcgtgctcctcaatatattacgggactcaatcagacatccgagtaaaaagttatagtcgtttgaatttgctcagaacttcttttttcaatttcgagcgtctcgatctattatggaactcaatcatacatccgagttaaaagatattgcgggttgcatttgct

SEQ ID NO: 13858 - DNA, 576 bp, Glycine max
agcttggattcctcaaatgtacaactaagcatggtgtttatataaagggcagcaatactactaacttgactgtagtgtgcctgtatgtagatgacttgcttgtgacaggaaataatgagattgaaattgccaactttaaaggagagatgatgagagaattcgaaatgactgatttggaccttatttcttattttcttggaattgaattcaagagaactgatgagggagtgatcatgcatcaagggaggtatgcaagagatgtactgaagaagttcagaatggttgactgcaattctgcagacacacccactgccactggtgtgaacttggtgaaagatcctaatgaagaagaagtagatgtaattttgtatagacaaatggtgggctcactgaggtatcttttgttactagacctgacttattgtatgttgttggcttaattagtagatatatggagaatcctaaactttctcacttctgtgctgccaagagaataatgaggtatgtgaaaggtactctcgattattgtatttctgtttcccagtgctgccaaaaaaagtaatggtctggggatat

SEQ ID NO: 13859 - DNA, 582 bp, Glycine max
tgtgtagagttgtcacagacaaagggatctaaaaattataaactaaaaaattaataatcaaatagtatggataaaaaaagtgcataaatcaagtgcaaacccttcaaaacaaagtaagatcaaatagtaattttagctgaaaagagaaaaagaagcaaaaagaaaaaaaggataagcaactaaagttggaagctaaatgtaagaacaaaaccaaaacccttgaaatttaaggcactattagaaattacactttcaacatcggttatttagagcattctacatcggctctaaaaccgatgttgaaagtgacgatgttgaatgtatcatcgttaacatcgattttcaaaaactgatgttaacataaatatgataacatcggttttctaaataaccgatcttaaacacaaagaactacaacaaaaaaagtgtatgcatgatgaaagttgaccatcggtttgtagtaaaactgatgttaatggtatatattgacatcggtttcagtagaaaaccgatgtcaatgttgatgatgcatatacttatttgttgtacatctttgtatataacatcgactattcatagaaa

SEQ ID NO: 13860 - DNA, 634 bp, Glycine max
tcatgaaataagtcatcaaaatgttgaaatattttattttattatgataggaaatgatcttgttttactaccagagaaatatcaatgtgctttttcatttttgttttaccagattttttttcattaatttattgctatattttagttactattaattacagttccaaaaatttatgtcacagacataaaaatatttaatggcaataaattccacaaagatacatgataaattgtgaatataatcaatttttatattgatttttaattacttgtcataaatttttttatttgaatatattttaatagtctattttttgtgaaaagtattaattattaaatatttaatttaataaattatacaataatgaatactagtatactaaaaaagatattaatttttgtgtatgatgtatacaaagttttgaatttaatttgtattaaaagcaataaaaaattcaataaatttattacatatgtgaattcctaattcgtttagaatgaaaaaattatattaaaaaataatttaaaataattattataaaaatcaataatttatcatccacatttatttataaaaataatattataaacattatatttaatgactataaagagttattatatatgctgacta

SEQ ID NO: 13861 - DNA, 564 bp, Glycine max
tgctatcacagggcggatcgcccggtggcaagttttgctatccgagttcgatatagtctacgtcacccaaaaggcgataaaaggaagcgccttggcagattatttggctcagcagcctctcaacaactatcaacccatgtatcccgaattcctggatgaggacatcatggccttgtttgaggaaaagctagacgaggaccgagataagtggattgtgtggtttgatggagcgtcaaacgttctatgccatggcgttggagcagtattggtctctccagacaatcaatgtatacctttcacaaccaggctggggtttgactacaccaccaatgtggctgagtatgaagcatgtgccctggccgttcaggcggcaattgactccaatgtcaagctactcaaggtgtacggggacttagcactggtgatccaccaactgagaggggaatgggaaactagagaccccaaggtgataccctaccaagcctatatcaaggagttggctggttcctttgatgagatctccttccatcatggttccccgagaggaaaatcagatggcggatg

SEQ ID NO: 13862 - DNA, 407 bp, Glycine max
cagcttatattcattaatttctagagttttttgtggatgcaataactcttttattttttcatgtgctcttgaaagcgagatttatttttggctgtaaacctaacaggctacaataagccaccagtagtcagaatatgatgaaagccctgtattttcagtttactgtaggagctctgccattatatctgcgaacctttgcaggatactgggcttatggatcttcaacagccaacctatttgatgagtgatgtgaatggtccagtttgggctaaagccattgcccattattgcagacttttttccatcagtcattgcattgcattgagtaacttttaaacttcaattttgtgctactaaatattctatctacaatggggtcctggcctaataatctatcttttgctttt

SEQ ID NO: 13863 - DNA, 493 bp, Glycine max
agcttaactacacatacctctctaatagctaagttcacctccttgagatgagaagctagagcttagctacacaccccctataatagctaagctcacccatatgccaaaaaaacatgaaaatacaaaaaaaagtccctactacaaagactactcaaaatgccccgaaatacaaggctaaaaccctatactactagaatggccaaaatacaaggcccaaacgaaggaaaaacctattctaatatttacaaagataagcgggctcatacttaacccatgggctcgaaatctaccctaaggctcatgagaaccctagggccttcccttggatctctagcccaatctacttggagtcttctatccaatgcccttgcggggtaggattgcatcattccctccaccttggaaaggatttgacctcaaatcccaaggttcttcatactctgggctccttccctcgacacctgtaaaaagaacaaaaacatatgtattagtg

SEQ ID NO: 13864 - DNA, 545 bp, Glycine max
agcttttgaatgctctattcaatggagttgacaagaatatcttcagactgatcaacacttgcacagtggccaaagatgcatgggagatcctgaaaatcactcatgaaggaacctccaaagtgaagatgtccagattgcaactgttggccacaaaattcgaaaatctgaagatgaaggaggaagaatgcattcatgacttccacatgaacattcttgaaattgccaatgcttgcactgccttgggagagaagatgacagatgaaaagctggtgagaaagatcctcagatccttgcctaagagatttgacatgaaagtcactgcaatagaggaggcccaagacatttgcaacatgagagtagatgaactcattggttcccttcaaacctttgagctaggactctcggatagggctgaaaagaagagtaaaaatctggctttcatgtccaatgatgaaggagaagaaggtgaatatgacctggatactgatgaaggtctgactaatgcagttgtgctctttggaaaacagttcaacaaagtaatgaac

SEQ ID NO: 13865 - DNA, 517 bp, Glycine max
tcggattgtcaattgcaccatgttccaagaagagtagagggtgccacctttgttgagtggttttattagcattttgttagttgaaataaaggcccaaacttgtgttaaagtggatgtcaattctcttttgattttcaccacctatgggcttgttttaatttaaagaaattaaggtttaataagatggaaactctaggcttgtggctgcctctttgatgcaagctccattggagcttgtaagcctaggatcttcttcatcaatggattcctttgcttcttggaagatgaatggcagcggaatgaagaaaggaagagagagaggacacgccacttcaaagagaagatgagtctagaagaagctcaccaccatatgaggccatggataagagcttggaggaagaaggagatgaatgaagggagaggaagagaagagcacgaaattttgtgctctatatgagctttgaaaatctgaatttaatattcacatgatcaaagttgaaaaaaatgcacacacatg

SEQ ID NO: 13866 - DNA, 667 bp, Glycine max
tgtgatatttttctttgccttaaatataattttagtttccctattttttaaaattcataaattattttttatttaaaaatagagacatttagttctcattttttaaaaaattataattttaatccctctattttaattagagacatttagttttcacttttgtaaaatttgtgatgttagtctttcaaaaatattaattggtaaaagattaatctaatgagacccaaatttaatgatgtgacacaagattatttgtttaatctatatcataatcaacttaatctcttaatagtcaacacttttagtttaactaaataaccaaaatcgtagatgtaataaaattacgggttaaatgtctctattttaaaataagataatcaaaattatagattttaaaaaatataaacatttaagcatttttttttctattgtataaactattttttgtccccactagtaaatttttttggatctgtcactggctgagggtactcttaaatcctaagagggtgaaaaaaatagttgcataaaaatatgaaagagtaatgtgaccctactataaatataaatacttgtacctgcgttagtatagataactttctatgtttcgtcaatgagtaatgtatctttcttttattgtaagaatactcttacctaacggaatgat

SEQ ID NO: 13867 - DNA, 402 bp, Glycine max
tggatttcctcttattagggaatctatccttcctacgatggagccaaatccagtcccccacattaagaactagctcctttcttcctctattgtctttagttgcatacacctttgtttggttctctatttggttaaccctctcatccagctcctttacaaactttgacctagattccccttctttatgtataaaagaagtgtcaagtgggaggggaattaggtctaaggatgttagaggattgaacctatagacaacctcaaaaggggattgcttggtagttctatgaacccccttgttgtaggcaaattctacatgaggaagatactcatctcaagacatatggttgcctttcagaagagcccttaaaatggtggataaagacctattcactacctttgttt

SEQ ID NO: 13868 - DNA, 464 bp, Glycine max
agcttatgaagaaaagaaaaggaagaaggaagggatcatggagcaactactcaagacacaagttaactcaatggtgagcatcaaggagcttgatgaatcagtgagctgcaacgtggcctttggagattaatccaaggtagaaatgaaaggaaaaggtaacattcttattcgtttgaagaatggtgagcatcaattcatctcaaatgtttattacgttctaaatatgaaaagtaatatcttgagcctggggcaactcctagagaaaggttatgagattcgcttaaaagacaataacctttctacaagagacaatgaaaataacttgattgctaaggtgttgatgtcaagaaatggaatgtttgtgctcaacattcaaaatgatgttgcaaaatgtctcaagatgtgctacaaagatgcatcttggctttggcatcttcaatttgggcatcttaattttggagcat

SEQ ID NO: 13869 - DNA, 500 bp, Glycine max
ctgaatgctctattcaatggagttgacaagaatatcttcagactgatcaacacatgcacagtggccaaggatgcatgggagatcctgaaaaccactcatgaaggaacctccaaagtgaagatgtccagattgcaactattggccacaaaattcgaaaatctgaagatgaaggaggaagaatgtattcatgacttccacatgaacattcttgaaattgccaatgcttgcactgccttgggagagaggatgacagatgaaaagctggtgagaaagatcctcagatccttgcctaagagatttgacatgaaagtcactgcaatagaggaggcccaagacatttgcaacatgagagtagatgaactcattggttcccttcaaacctttgagctaggactctcggatagggctgaaaagaagagcaagaatctggctttcatgtccaatgatgaaggagaagaagatgagtatgacctggatactgatgagggtctgactaacgt

SEQ ID NO: 13870 - DNA, 401 bp, Glycine max
aatacgcctgtagtcatttaaggattgaggatgatttgatttggtgataaaggccatgaaggaagcattgctgcctctaagaaaacttccatggcagtggaactcatccacaaatctcctgaattcaggtctcagaatcttccaaaaagccttaataaagttgaaattaaaaccatcgggacccgggcatttatcaccaacacaactccaaacagcatatttaatctcttgatcagaaaaaggggcaatgagtccctctctttgattctgatcaatggagtggaaaaaaaccccatcaagggtgggtctgaaactctcattttcagaaaatctatgaaagaaaaaattacaagcttcattcttaatttcggtcaggctgttgaacccaattcccatcaatg

SEQ ID NO: 13871 - DNA, 530 bp, Glycine max
agcttgtagatgctggaaatccttctggaatattagtggagagcactgatgggtggaacacagcttctgttgtgggaacattctcagggcctaagcatcgcttggccacagcagcaactgtgaaggacgggaaggtgtatctgaaccatatggttggaattggatacccaaaaaagaagcatgcaattgttgaggcacgtttttaacgcatactttctagaaatctaaacattggggaactgggaatgtggggatcatacatttacaggacgtttagttgaaatttggtgtacctttgcttatttatgtttggttttgttgcattacttggcctcagacctcaatgcttttcccttgaatctcaacctaacataagatgctcgatcgagtcagctaaattagccttctgtcttggaaaaattattaggtaattccgaattatgaaagatctagaggttccagattaatctctattagatatacatttaagtttttcaatttaagaaagatagttaataacactctttaca

SEQ ID NO: 13872 - DNA, 453 bp, Glycine max
agcttggattcctcaaatgtacaactaatcatggtgtttatataaagggcagcaatactactaacttgactgtagtgtgcctgtatgtagatgacttgcttgtgacaggaaataatgagattgaaattgccaactttaaaggagagatgatgagagaattcgaaatgactgatttggaccttatttcttattttcttggaattgaattcaagagaactgatgagggagtgatcatgcatcaagggaggtatgcaagagatgtactgaagaagttcagaatggttgactgcaattctgcagacacacccactgccactggtgtgaacttggtgaaagatcctaatgaagaagaagtagatgtaattttgtatagacaaatggtgggctcactgaggtatctttgttgtactagacctgacttattgtatgttgctggcttattaataaatatat

SEQ ID NO: 13873 - DNA, 292 bp, Glycine max
ataatctccgctgccacccatggaactctaaatctcccaccttttggggtgggccattcttggatggccctgattttctcaaggtccacttggaccccatttctaccaactacaaaccctaagaaaactatattatctacacacaaagtacacttctttatatttgcatatagggtgtttttcctaaggactggaaaaacctgcctgagaggtcctaagtgatcatctaggctcctactgtacactaaaatattcatacaataaacaactaccaatctacctatgaaatcct

SEQ ID NO: 13874 - DNA, 328 bp, Glycine max
tccgtgtttaattacgagcgtctcgatattctatctgacacaatttgacatccgagtccaaagctattgtcgtttgacttttcttaaagcttccgtttttgatttcaagcgtctcgatatattatagggctcaatcggacatccgagttaaaagttattgtcgtctgactattcttagagattccgctatcaacctcgagagactcgatatattacagggctcaatcgaacatcccgagttaaagctattgtcgctagatttttcctaaagcttccgttttcaattacaagcgtttcgatatcctacgcgaaacaatcggacattcga

SEQ ID NO: 13875 - DNA, 385 bp, Glycine max
tgcaagctacacagcgggagaggaaataacacctgctcttttgaaagccaataacgattccagaattggcatcactgggctctctgaagactttgcttcttcctcattttgcttagatgaactcacattcattgttcactgcgcccagaataatgggatgatgattataccaatgctttataacgtgtattcttctgatgtcacacacccagaggggtcttatggagaagcattggctaagcataagataagatctcccgaacagctccacaattgggagatggctctcgcgcaagttgctgacttgcctgggcttcatttcaaatacaggtaccccatgatacccacctttttatgttttaaattttcattggattaattaagt

SEQ ID NO: 13876 - DNA, 520 bp, Glycine max
agcttttgggaggggctgaagctcctgctatctccctaaaacccatcattgtgcatgtgttgttcattttattttattttacatttttaaagaaaagttagttgtgtctgaatgtcatctttataaaaactaaaaactagttgtgtgtaagtgtgtattattcttttttttagtgtatatgttaggagtttcacattaacaagaataaattacttaagagtgtgtttggatagagaattttaatttaagaaggtaatttatcagagaatttgaatttttgtaatttagaattcattgtttggatgctttttatgaagaatttaaaattttgaaattttaaaacagaattttaagcaactaaaaatctggaatttcaatctccttctaataattgagaaattgaaattattctttttttaccgctttttcagaaacacgtatacctaacacacccatcatatcttctcttttttttatcctcataatttaatttctttatccaatacaaattttgaaataa

SEQ ID NO: 13877 - DNA, 506 bp, Glycine max
agcttgaccaatgaaaacaatatgatcagcgttttttgagaatattaataggctctttttggtttccaaccaagtagctacggcacagattttttacaatggcctgtctcatcattccaatgagaccttcccccactaagttaaacaacaaaggggctagaagatccccttgtctcacacctcgagtaggagcgaattctttagtcggactaccattaactaaaatggaaatagatgctgattgaaggcaggcagcaatccattgtctccatttagtacagaatcctagtcttgacagcatgtagtccaagaaagaccaagatactgtatcataggccttttcaaaatccactttaaagaccataactggctgctttgtcttcataagcttcctccaccacctcattaaggatcagaattccatgaaggaggctgattgcctttcatcaacaatacccgaaaaacgggcctcaacctgtttggcaaagcttggatatgactttgta

SEQ ID NO: 13878 - DNA, 455 bp, Glycine max
agcttgctgaagatatggaacatgtggtctatgctatttcaaaagctgttgtacatagcaaggtgcaacaactatatactgaagaaagcaaggtgcaacaactatatactgaagaaagcaaggtgcaacaactatatactgaaatccaaggtcgtaatgttgagggggctatagaaaaggtaggtactcttgaaggggagcatgtcattaatgaaatttcttcctccattcagcaaacagactgcctgagaaaagtggttcctgttggtgttcttgctgggtccatcttagcttccttgaggaaatattttaatgtaactacacttcaagatgatcacagaagatctctgatccatgatgatgaggaaaaacctaccacgaataaatatggcaatcgaacgtggcacaaaaatagatcaagtacctgacgagaaaactagtttggaacatcctat

SEQ ID NO: 13879 - DNA, 280 bp, Glycine max
  unsure (1)..(280): unsure at all n locations
aaaactcttttcttagtatanacgttgtttctacttcaataccctgtgaactacttcacatagacgttattggtgcctctagaactatgaggttgggtggtaattactatggcttagttatagtagatgattactcaagattcacatggactttgttattgaaaaccaaagatgaaacttttgatggtatttgcatacttgccaaggtcattccaaatgataaaaggtcttaacattgtttcacttaaagttatcatggaggtgaatttcaaaatgagtc

SEQ ID NO: 13880 - DNA, 401 bp, Glycine max
  unsure (1)..(401): unsure at all n locations
tcactatgaatgacaaattccttgggataaaggtagtgttgccatgntttcacagcctgtactaaggcatacaactccttatcataagttgaatagttaagggtatgaccacttaacttttcactaaaataagcaattggatggccttcttgcatcaacacagccctcatcccaacattttgaagcatcacactcaatttcaatagatttttgaaagttggcaacgcaagtatggcggcattagttagctatcgcttaagaacattgaagcttcttcttgtttctctcctcatttgataccaacatatttcttgagcacttctatgagaggtgcttgccatgtgctaaaatnctacacaaatactctataaaaacttgcatagccatgaaaacttctcacc

SEQ ID NO: 13881 - DNA, 354 bp, Glycine max
  unsure (1)..(354): unsure at all n locations
ttcgtttaattacgagcgtctcanaatcctactggacacaattggacatccgagtcatatgttattgtcgtttgaatntgtttagagcttatgttttcaattacgagagttntgatatcccacgggacacaatcggaaatccgagttaaaagttattgtcggttgatttttctcagagcttccgttntcaattacgagcgtctcgatatccaacgggacacaatcggacatccgagagaatnattattttcctttaaatttgctcagagcttcatgtttcaattaggagcgtctcgatgtattatgggtctaatcggacatccgagttaaatattattgtcgttgacttttata

SEQ ID NO: 13882 - DNA, 360 bp, Glycine max
  unsure (1)..(360): unsure at all n locations
cctctcttcccttanacttcttttatttattgctatttatcttttgctntaaagaagtnntatttgaatngtctttngagtaattcatgttaagggtgcattgttaatccgaaaagagagagtgaaagtttaattgtggaatagtctttatatcttaattcaacccccctttttcttaaggtaactgaggctatttgtccaacatcctattcttgataactcacttctctcttaaaagacagactttccggaatgaggtcacatgaacgtcttgaaacacagtcaatcaaatgctctgtttttntatttattttattgtcttaaccccttcttttattttggaacttatttgttttggac

SEQ ID NO: 13883 - DNA, 472 bp, Glycine max
  unsure (1)..(472): unsure at all n locations
acctgcngcatgcaagcttaacatcagaccacttccagggtgctggaactacttcacatggacttgatggngcctatgcaagttgaaagccttggaggaaagaggtatgcctatngttgtgtggatgatntctccagatttacctgggtcaactttatcagagagaaatcagacacctttgaagtattcaaagagttgagtctaagacttcanagagaaaaagactgtgtcatcaagagaattaggagtgaccatggcagagagtttgaaaacaacaagtttactgaattctgcacatctgaaggcatcactcatgagttctctgcagccacacaccacaacaaaatggcatagttgataggaataacaggactttgcaagaagctgctatggtcatgcttcatgccaaagaacttccctataatctctgggctgaagccatgaacacagcatgctatatccacaacagagt

SEQ ID NO: 13884 - DNA, 461 bp, Glycine max
  unsure (1)..(461): unsure at all n locations
gctccttcaactgcacaaggctcttaatatttgaagagtatccttgtggaaccttcacccgacgaagacactgacaaaaacttatattcttcttcttggacaaagtatggcaggctggnggcaagtaatatttcttcccatcaaaccttggatgcaactgtgatcatatacccatatcagctagatcttgacagatattcaagccatccttcngtcttgccttgatgttaaagagcgttccaatcacactgtcacaaacatttttctccacatgcataacatcaatacaatgtctaacctcaagatcacaccgtaaggaagatcaaagaaaatgaacctcttcttccatatgcaactctgactttatccttcttttgggtcttcccaaatacaatattcaggtgttgaacccgttgatatacctgctcactagtcaacagtatcggcgcaatatcatgctc

SEQ ID NO: 13885 - DNA, 355 bp, Glycine max
  unsure (1)..(355): unsure at all n locations
tgcaagcttgtgactcttgtcaatttcttaaaactagtttctgaaaaagctgngactnttgcaagaatcttcacaaacaagctactcgaagaattgtgacttttggaaatgtatttttcgaaatcagtcactggtaatcgattaccattaaggtgtaatcgattacacattaacagatgtgacttctcactttaaattttgaaaatcataacatttagaagctctggtaatcgatcacaagttttgtgtaatcgatacacaagttcaaatgatttaaaatattaacacaagtgtaatcttgaaatcgaaatctactgtttaaacacnggcatcgatactacctctggtatcgata

SEQ ID NO: 13886 - DNA, 411 bp, Glycine max
  unsure (1)..(411): unsure at all n locations
agctntnntatttcagcagatgaaaatgaatctgttgtcacctcatggactcctctaaggacaataacatcatttcttgcactgaattgttgggagttggaagccatcttctcaatcaaattcctagcttcagcaggagtcatatcaccaagggctccaccactggcagcatcaatcatactcctctccatgttgctaagtccctcatagaaatattgaagaaggagttgcttataaatctggtggtgagaacagctngcacacaatttcatgaaccattcccagtactcatacaagctctctccataagttgcctgatgcctgaaatgtcctttctgatggcaatggtactagatgcagggaagaatttctccgagaacaccttcttaaggtcatgccagctganaatgg

SEQ ID NO: 13887 - DNA, 281 bp, Glycine max
  unsure (1)..(281): unsure at all n locations
aattgctctgagcttcaacattcaatttcgagcgtctcgttatatcacgggactcatatgtcaatgatgggagaactaaagtactntctgggattacaaatcaagcaaactcaagaaggtatattcatcaatgaatccaaatactgcaaggaattgatcaaaagaattgggatggatagtgcanaacacatgtctacaccgatgagcactaattgttacttagataaagatgaatctggtcagtctatagacatataacaatatcgaggtatgatcggatc

SEQ ID NO: 13888 - DNA, 251 bp, Glycine max
  unsure (1)..(251): unsure at all n locations
atatggaagaagatgttgatattggttaatcttccatactagtctgatctagatgttagacattgtatngatgttatgcatatcgagaaaaatgttngtgatagtgttattggcacgcttctaaacattcaaggcaagacanaggacaatntcaatactctccaagatctagttgagataggtatacaagatcagttacatccaaggtctgatggtaacaaaatatacttgccctcaacttgtcatacttt

SEQ ID NO: 13889 - DNA, 238 bp, Glycine max
  unsure (1)..(238): unsure at all n locations
gcatgtagagtccatggtaacttaaattctgagagaggacaactacanatctntntgagtnggaacccgtgaatgctatgccttatgttatgttgtctaacatgcattatgaatctcgganatgggatgatgttgtganaatacgaanggtggtgaaatcaataggaataacanaggagcctgtgatgtagtggatcaagatgaactacagagtgcatacattcatttctgaagatag

SEQ ID NO: 13890 - DNA, 109 bp, Glycine max
aatgcctctaacagcacctttgtcaatgaatttcttcatgcctcttaagtgcaaatgtccaaatctttgatgccatattctgacttcatcttctttggaggatagacat

SEQ ID NO: 13891 - DNA, 388 bp, Glycine max
  unsure (1)..(388): unsure at all n locations
ctctataattacctcacctctcaatgagctggtgaagaagaatgtggcatntaacttgngtgaaagacaagagcaagtctttgttcttcttaaagaaaagctcaccaaggcacctggtgtagctcttcctgactnttctaaaacatttgagctagaatgtgatgcctctaaagtgtgagttggagcagtattgttacaagggtgggcacctctattgcttattntagtgaaaaaattcatggtgccacccttaactaccccacctatgatanagcactntacgccttaataagagccctncanactnngggaacatactcttgttncaaggaanttgtcattcatagtgatcatgaatcacttaagtacattataaggtaaagcaagt

SEQ ID NO: 13892 - DNA, 235 bp, Glycine max
  unsure (1)..(235): unsure at all n locations
taactcgcctatgcnttttcttccatgccatatgtagcanagtgcgtgatcctgtcaagtttgatgagctgganaatgaggctacaattatattgtgccagctggagaatgtatttccccatgccttctttgacatcatgattcacttcattgtgcatctcatcagagaaatcaaatggtgtggtcctatttatctgtggtggatgtacccggtttatcgatacatgaagatctt

SEQ ID NO: 13893 - DNA, 217 bp, Glycine max
  unsure (1)..(217): unsure at all n locations
ttaaattctgagagaggacaactacanatctntntgagtnggaacccgtgaatgctatgccttatgttatgttgtctaacatgcattatgaatctcgganatgggatgatgttgtganaatacgaaggttggtgaaatcaataggaataacanatgagcctggatgtagttggatcaagatgaactacagagtgcatacattcatttctgaagatag

SEQ ID NO: 13894 - DNA, 315 bp, Glycine max
  unsure (1)..(315): unsure at all n locations
gctgtagttgctgcacatgatgtccaacgttatgtcaaagaataagatcgggctgcacaatgcacaaggcaagatatagtgtcaaatgaagaaatgaagctgcaggattcacgatgtcggatataatgtccacgacatcctgcctgaaaatactggaattgctaaaagcattgaagctgcaggatccacgatgtcngatacaatgtccaggacatcctgccccgaaatactnggagtgctaaaagcattgaagttgcaggatccacgatgtcggatacgatgtccaggacatcttgcccanaatacctgacatat

SEQ ID NO: 13895 - DNA, 242 bp, Glycine max
  unsure (1)..(242): unsure at all n locations
ttctatctcactntcaatgcaagttatanattcccttaanaatgaactcttaaataatgattcanatagaacaatctgaatataaatataacgcaataataaataaaagagttcaagggagaagaaagtgcacactcggatntatactgtgtcgtgcacacncttgtgcctacgtccagtccccaagcaacccgcttgagagtccactatcttgtaaatctctttacaagttctacacacac

SEQ ID NO: 13896 - DNA, 199 bp, Glycine max
  unsure (1)..(199): unsure at all n locations
ctatccaatggccatgaaagaagacagatcagctgcacaacanatcggaatgaatacctgcatgaccatntgcagaagatgcatgccagtaaattgagcttgatagccacccactggtngcacaaatatcaatcatggcctgaaatacgcgtatactctgatctaatactgatttcaagtctgtgacatatgcactaat

SEQ ID NO: 13897 - DNA, 247 bp, Glycine max
  unsure (1)..(247): unsure at all n locations
gctatgctgcnacatctacacagacctcctaacctagctganaattatccacaacagaataattataacctctccagaaataggtacaatcccgaatggaggaatcatcccaaccttagatggtcgaatccttcacaacaacagcagcaacaacaacaaccttattttcaaaatgatgctggcccaagcagaccatacgttccttcaccaatccaacagcaacaacaacaacagccccagaaacaac

SEQ ID NO: 13898 - DNA, 313 bp, Glycine max
  unsure (1)..(313): unsure at all n locations
caattccttgaagatacacaaacagctaatggctcatggtatggaagttggngagttngctacatttatggcacttggttngcacttcgtggtcttgcagcggcgggtaaaacatacactaattgtgctgccattcgcacaggcgttaaatatctactttcaacacagaaagaggatggtgggtggggagaaaagtatctctcatgcccaanacaggtttgtaattgaatggccatggtcaatacttaatgttcttcactttcactangaanttataataatagtagtaataatgtcttactaaatgaaaaca

SEQ ID NO: 13899 - DNA, 206 bp, Glycine max
  unsure (1)..(206): unsure at all n locations
atggtgtggataccctgtgcacaatcccatactntntaagcaaggcatgcattganttngtgcanaaatgggttccttgatcactaacgatngctntaggtactccaaacctgcaaaacagattagatctaacacaatctacaacaaccttagcatcattagttctagtaggcttagcttctacccattttgaaacataatcaact

SEQ ID NO: 13900 - DNA, 176 bp, Glycine max
  unsure (1)..(176): unsure at all n locations
atacagacctttgctcttccatgcagcaacctggagtaattgagcagcctggagcttatgctgcannacattacaatagacctcctcaacctcagcagcanaatcaaccacaacagaacaattatgacctctccagcacagatacaaccctggatggaggaatcactctaatctca

SEQ ID NO: 13901 - DNA, 405 bp, Glycine max
  unsure (1)..(405): unsure at all n locations
ttcaatcaatagacctccaatctttaatggagagggttaccactaccggaaaacccgaatgcagatgtttattgaggcaatagacttaaatatttgggaagccatagaaatagggccttatatacccaccacagtagaaagaatacaatagatggaagcacatcaagtgaaagcataacaatagaaaaacctagagataaatggtctaaagaggatagaagacgagtacaatacaatttaaaagccaaaaacataataacatctaccctgngaatggatgaatatttcagtgtttcaaaatgtaagagtgctaaggaaatgtgggacactctacaattaanacatgaaggaactacagatgttaaaagatctangataaacacattaactcatgaatatgaacta

SEQ ID NO: 13902 - DNA, 419 bp, Glycine max
  unsure (1)..(419): unsure at all n locations
ttatttccagaaggaaattcaatcaatagacctccaatctttaatggagagggttaccactaccggaaaacccgaatgcaaatttttattgaggcaatagacttaaatatttgggaagccatagaaatagggccttatatacccaccacagtagaaagaattacaatagatggaagcacatcaagtgaaagcataacaatagaaaaacctagagataaatggtctaaagaggatagaagacgagtacaatacaatntaaaagccaaaaacataataacatctaccctgggaatggatgaatatttcagtgtttcaaattgtaagagtgctaaggaaatgtgggacactctacaantataacatgaaggaactacagatgttaaaagatctatgataacacattaactatgatatgacta

SEQ ID NO: 13903 - DNA, 399 bp, Glycine max
ttaagtcacctgcggcatgcaagcttgttatcccagctgatgtacccattatcatggcctccccagaaggcaccagcatgcttggccaggccaggagcagtagcaagcttaaggtacgatgaatttccagttgcaaagtacatccatgcgcctccccaaacatactcatcccagtaactggtagaattgtaaaatatagaagcttccgaactccctgcactgtacctgcctctctgctccctagaaaacttgaacagcgtggtagcaccatgaactagtttcttcgaataggccttgttgtccttgaaaacaatggaagcagatgccaaggcagcagccatctcagctgcaagatcagaacaactatggcattcagtcacagggcggtcatagtccatg

SEQ ID NO: 13904 - DNA, 378 bp, Glycine max
  unsure (1)..(378): unsure at all n locations
agcttcagttntcaattattatcgtctttatatattacgggactcaatcagacatccgagtcaaaagttattgtcatttgacatttcatagagcttccattttcaattccgagcgtctcgatatattaaagggctcaatcggacattcgagttaaaagttattgtcgtttgatttttctaagagcttccgttttcaattccgagcgtctcgatatcctatgggacacaatcggacatccgattcaaaagttattgtcgtttgaatttgctcagagcttcacgtttcaattacgagcgtctggatatattacgggactcaatcagacatccgaataaatagtattgcatttgactttcatagagcttccgtttcaattt

SEQ ID NO: 13905 - DNA, 402 bp, Glycine max
  unsure (1)..(402): unsure at all n locations
acctgaggcatgcaagctngcattcctctcttcccttaaacttcntttatttatngctatnnatctntggctntaaagaagtttattatgaattgtcttttgagtaattcatgttaagggtgcattgttaatccgaaaagagagagtgaaagtttaattggggaatagtctttatatcttaattcaacccccctttttcttaaggtaactgaggctatntgtccaacatcctattcttgataactcacttctctctaaaaagacagactttccggaatgaggtcacatgaacgtcttgaaaacacagtcaatcaaatgctctttntttttaaatttatttatttttttaaccccttttttttatttggaacttatttgttttggactttactcngttgttta

SEQ ID NO: 13906 - DNA, 281 bp, Glycine max
  unsure (1)..(281): unsure at all n locations
actcacaacaataaggtataaatcatactaaaacttttgctctttgtgctcgtctaaaggcaattcacatttttctatcctttgttgctcatcatggcatgatgttgtatcaaatggacataaaaagcatattccttaatggacttatcaaggaagaagtcaatgtggaaaacccccctaggtttgagagttctatctaccttcatcatgttttcaaacttaacaaggctntgtatggtttaaaaccagttcctcgagcttggtatgaaaagttaagttca

SEQ ID NO: 13907 - DNA, 374 bp, Glycine max
  unsure (1)..(374): unsure at all n locations
agctngaatagatgaggattatcctaattatatgaatgtgctatcacgaaaaacttcttctgttgatgccagttaaggtcatgagggataatctcagctaccttgaagttagcaatggctagtaactcttgtttagtggtagcaaagttcatatgtgcatcattntggactttactggcatagtaaattgagtgaagcatcttatttgcctctgtcctagcactgcaccaacaacgtagtcactagcaccacacattatttcaaactcttggctccaatttggggccacaatcactgnggctgacaccagcctccctttcagggtgtgaaaggctagcatacattcttcatcaaacttaaacacaacatctttg

SEQ ID NO: 13908 - DNA, 446 bp, Glycine max
  unsure (1)..(446): unsure at all n locations
gtcacctgacgcatgcaagcttctaaactntgtcaataataaagttactgtttagaagtggcctcagaaatcttaaagctctgataccacttgttggacaagtggcctcagaaatcttaagaaggagggggttgaattaagaatttacaaactattcctgaattaaaatttctatatagattntgacccaagtcctaagattccttttaaaatgaatttctaaataataattcaaattaaacttactgaatagaaataataagcaacaataaataaaagagtttgagggaagagagaatgcaaacacagttttatactggtttggcaaagtccattgcttacgtccagtccccaagaaacccgcttgggagtccaatatctcacaaatccttacanattctgaaacacacaaggacaacccttcctttgtgttcagatgctttaca

SEQ ID NO: 13909 - DNA, 336 bp, Glycine max
  unsure (1)..(336): unsure at all n locations
agcttcaacatcagaccacttccagggttctggaactatcttacatggacttgatggggcctatgcaagttgaaagccttggaggaaagaggtatgcctatgttgttgtggatgatttctccagatttacctgngtcaactntatcagagagaaatcagacacctttgaagtattcaaagagttgagtctaagacttcaaagagaaaaagactgtgtcatcaagagaattaggagtgaccatggcagagagtttgaaaacaacaagtttactgaattctgcacatctgaaggcatcactcatgagttctctgcagccatcacaccacaacaaaatg

SEQ ID NO: 13910 - DNA, 360 bp, Glycine max
cactcggaagtctgattgagtcctgtaatatatcgtgacgctcgaattttaaaaccgaagctcgtagctaattcgaacgacaataacatttcactcggaagtcctattgagtcccgtaatatatcgagacgctcgaaatttaaaaccgaagctcgtagcaaattcgaacgacaataacatttcactcggaagtcctattgagtcccgtaatatatcgtgacgctcgaatattaaaaccgaagctcgtagcaaatttgaacgacaataacatttcactcggaagtcctattgagtcccgtaatatatcgtgacgctctgaaattaaaccaaagctcgtagcaattctaacgacaataacat

SEQ ID NO: 13911 - DNA, 234 bp, Glycine max
  unsure (1)..(234): unsure at all n locations
cttatgagccttanggtatattttgggcccatgggctaagtaccaacccacttatctttgtaaatattagattaaggtttcatattnttgggccttgtatttagggctccataatgtaggtagggtaccctaaaaatataggatttttcagcccttgtattttagggcacctagactagtttttgtattaagggtatgtttgtaatttcacatgcactaagtggatatttgatg

SEQ ID NO: 13912 - DNA, 315 bp, Glycine max
  unsure (1)..(315): unsure at all n locations
caataaaataaanaagataagggaagagagaattgcaaactcgatttatactggtttggccacttcccgtgcctacgtccaatcctcaagcaacccacttgagatttttcactatatctgtaaatcctttacagactttgaacaaaccttgngatccctcacccttgtgttcaagattctccaagagacaacccgtttcttgattacaattctcacaatccaagagacaactagtctcttgattacaactgactttntgagatgaacaaaanaatttttctcctttagagtggatgaatacaaattaagaatcta

SEQ ID NO: 13913 - DNA, 306 bp, Glycine max
  unsure (1)..(306): unsure at all n locations
ctctcnngcatagctaagatccaatggtcatcaattatggcttctttcaaattttaggttcaatcgaagaaacaataaccatattattgcacatatctttgagagagtgtctagttgttacccctttagatatatcaccgataatctcgtcaacaggatggtatctagaagtttccactctcttggaagacagcatttgttcttgttcatgaatgtgaaaatcttcatcattgtcctctcctttgcctttggatttcaccatgaatatgcatttcttctaagattctaanatatcatctagtatat

SEQ ID NO: 13914 - DNA, 381 bp, Glycine max
  unsure (1)..(381): unsure at all n locations
taagtcacctgcggcatgcaagcttctaactgaggcagccaacanaattaatgcaatataaagttctttcctgaagagacgaattttcttcgtcttcccagttntttttgacaattctagtttgcttagttcctcaatgcctgaatctgaggatgatctatgaagactattagatcgcattagaggctcagcttctttctcanaggcaaccaaatcagtctcagacgatcttcccaacttttttgtaaccacccactcgtaagaacttccaaagcgaagtaatccagatatcatggcattaaatttagttaccgacatagtgttctcaaatagaaggtaaggaactataaacggaaatgaccgtggagctggtagaacact

SEQ ID NO: 13915 - DNA, 237 bp, Glycine max
  unsure (1)..(237): unsure at all n locations
aagcttctctgctttctttcccaaggcttgttcccgtatcacaactntctcctccgcgtgagtgatttcagcctccttcttttccacttccaccaatttattcttcaatccatcttcaaaggattttctnttctcatccaattccacctcaaactcctgcttcttcacatcaagaaatagtatttgttcatcaagaagtttctgcatctcaacctgcatagtgtccaatctgaattc

SEQ ID NO: 13916 - DNA, 328 bp, Glycine max
  unsure (1)..(328): unsure at all n locations
attatatatnttcattacacttacttataattaagatgtaatcacatttatttgtaataattgttcgactttatcggtgtaattatgtctatacaatagtgttattacacacttcaagacatgtgttgtttttatttctatgattattatttaactaacaattttttcaatataaataatataatgtcaagttacagaataatatgtacaaattatcatcactaacttattatttatttctaacttactaaatatataatttgtaaatttatttaacttatttggtgagatttatatattaattatagttgataaaaagtacaaattt

SEQ ID NO: 13917 - DNA, 368 bp, Glycine max
  unsure (1)..(368): unsure at all n locations
agctntgacggcgacgacagttntatttaaactgatgttgagtattttatttcaacatcatttttgttaaaatcgtctttaaatagacgtttcaaagacggttttcacaaaaccgtatttgaaaagttgggattatttataaaaaagccacaacattntttaacacatcatttttgtagtagtgttataccggtataatttgattcctccttatataaataactactaattgaatacaatttcaaattattttagttattacttaattntgattgtaacgatattataatattgccacaaatcatatatctttatatatataanaggagataggtgaggtggtcatggaagaaaaacaaaataataat

SEQ ID NO: 13918 - DNA, 444 bp, Glycine max
  unsure (1)..(444): unsure at all n locations
ttgaccccgatcttaagtcacctgccgcatgcaagcttattctatgggaattaccaagcacacaatgatcattaaattcaagtttatctagtttatcaccacctaacagatnttgtttctcaagttcatgtaatcctctttcactaacatgacctaatctcaaatgccaaagttttgttttatcaatcaatgtattactagctaccgatgcatgtccaacaatggtggaaccttcaagaataaacaagccattacttttattcttgttacccttagctatgattaaagatccatttgaaatattaagaacaccatttaaaattctagttgaatatcctagatcatcaaacatgtttatggaaataatatttcttttgagttctggaatgtaccttacatttntcagtagatactctctattatcaaacatcttcaatctcacag

SEQ ID NO: 13919 - DNA, 185 bp, Glycine max
  unsure (1)..(185): unsure at all n locations
atctctcgagtcacctgcggcatgcaagcttaaatatatcgatacgctcgttattaacatttgatactctttttaaanncaaanagncataactnttcacacggatgtccgattcgggcgcataatatgtcgagaggctcgaaattgaacaacgcaagctcttgagaaattatactggtattact

SEQ ID NO: 13920 - DNA, 392 bp, Glycine max
  unsure (1)..(392): unsure at all n locations
tacttgacgatgctaattnttgttattatcccttatgagcatagcatctccaaatgaatntggtgaaggatttcttaagtaaaaaaataatttcttataaattttttttattggaataaatctatgtgacatgaagagttgttataaaataagaattttatctttcataaaatattatttcttaataataaaataatatttgtttaacacataacaacatcataattaagtgaaaataaaaaagatataaaaatgaatttttgaagtttcttattattgaaacaaaaatatatataaatttcttataatcatataacactctctagatcagaacaatattatataaactatataaaataacttaacaaatttatttaatacattctctatta

SEQ ID NO: 13921 - DNA, 400 bp, Glycine max
  unsure (1)..(400): unsure at all n locations
caatgatcaaacggttatcaaatntttatatcatagttntactaagacatgtntgagtgttcatganaaagagagggttttgaaaggcgggaaggaaaaacgaatttgagagcatgatagagcgtaaagacatatggtaaatgtaaaactgacctagtatatctctatttcgaactattatactctcaacctattatttactctatttttctttattatatnnatttataaaaataaactatattttactcccaatcaaatgaataaattaaatattcattttattttataagaacatataattatnttatttaccttaaaatcattattctaaataataaaaatatcttttcttatttattaattacgaaaatctattaatttcctaaaactctattta

SEQ ID NO: 13922 - DNA, 422 bp, Glycine max
  unsure (1)..(422): unsure at all n locations
gcttcggtattcactctcgatcgtctcgangnnatacttgtactcaatttatatctgtttaaaaacgttattgtcgtttggaattgctgagagcttctaacattcaattcgagcatctcgatatattacgggactcaatcagacatccgagtaaaaagttattgtccgttgaatgttctgagagcttcaacattcaatctcgagcgtctcgatgtattatgggactctatcagacatctgagtaaaaaagttattgtcgtttgaatttgctcagagcttcaacattcaatcttcagcgttttgatgttttacgggattcaatcagacatccagtaaaaagctatttgcgcttgaattagctttgagcttcacaacttaatttcgagcgtctcaatatatgactggactcaatcagacatctg

SEQ ID NO: 13923 - DNA, 417 bp, Glycine max
  unsure (1)..(417): unsure at all n locations
gctcctaaactntatacaagaatgaagctctgataccacttgtttgacaattggtctcagatatcnnaagaaggggggggtggaattaagatatcccaaactactctccacaattaaaaatttatttcactttcttttcaagttatagattcccttaacaatgaacttcctaaatattaattcaaataaaacaatntgaatatgaatgtaaagcaataataaacaaaggagggttacggaagaganagtgcaaactcagatttatattggttcggccacacccttgtgcctacgtgcagtccccaagcatatccgcttgagagttctactatcttgtaaatttcttttacaagttcttaacacacaaggacacatccttctttgtgttagaattctttacacaagagaccacagtct

SEQ ID NO: 13924 - DNA, 283 bp, Glycine max
  unsure (1)..(283): unsure at all n locations
agcttccattgttcaatttcgagcgtctcgatatattatgtctccttattctgacctccgagntaaaagttatgaccatttgaattgctcaagagcttccattgttcaatttcgagcgtctcgatatattatgcgcctgaatccgacctccgagtcacaagttatgaccatttgaatttctcaagagcttccattcttcaatttcgagcgtctcgatatattatgcgccccaatcggacctccgagttagaagttatgaccatttgaattgctcaaaagcttc

SEQ ID NO: 13925 - DNA, 306 bp, Glycine max
  unsure (1)..(306): unsure at all n locations
gctataatatatctatacgctcgaatataaacatttgnatactcnntcggaaatcanatagtcataactttttacacggatgtccgattcnggcgcataatatgtcgagaggctcgaatatgaacaacgcaagctcttgagaaattaaaatggtattactttttacaccggagctctcgtgaaagtcatatggtcataacttttcacactgatgtacgactgaagcttataatatatctatacgctcgaaanttaacatccgaaactctctataaagtcaaatggttataacgcttcacacggatg

SEQ ID NO: 13926 - DNA, 476 bp, Glycine max
  unsure (1)..(476): unsure at all n locations
tgcaagcttatctttgaaatacagggcatcattgccttatatagcaacggtttttacagaanaataacagaataaacttccatatggtatttggtcgcacccgaacatggatgcatttgaaagtagttcatgataggctaattntagatattcaaggacatcaagctaggtttacttcttcatcatggtctgacttggactcttctaatgttatgttagccatcatacaaaagttagcttcttcgctatcctcatccgacaatgtgtcgtctatgtcttcccaagtactcataagctcattcttatctttagaattgataaataataacgagagagattattaatggatagtggtctcataaaaatttttattcctgaattattagtggtatatatatatctttaaataaaaatatttcattaatattatattanataaacattttctgtaaaaaatatatatcataaaaattaat

SEQ ID NO: 13927 - DNA, 178 bp, Glycine max
  unsure (1)..(178): unsure at all n locations
actaagtngactcgttagaatgagaagtttgttcggaatgagaagtgtgagcaaagtttccaagagttgaagaggcggttgacgacagctcctatgttaattttgcccgaccctaagagaacatttgaagtgtattgcgatgcaagctggcaatgctatgggtgtgtgttgatgcata

SEQ ID NO: 13928 - DNA, 281 bp, Glycine max
  unsure (1)..(281): unsure at all n locations
agcttctanagatgtacttaaccaggtccatcttgtttataaccaggtggatggctcagcatgtattgtcttagacggtgggacgcccagactaaagcacaacacgttctttcgagcaaggagtagttcatttcataagccgtgaactttntactcaagtagtagacagcgcgttctctcttnccggactcgtcatgttgccccaacatacatccaatcgactcattccaaatcattatatacaagatgagaggccttcctggtaccaacgacataagcac

SEQ ID NO: 13929 - DNA, 198 bp, Glycine max
agcttataataaatcgatacgctcgattttaaacatcttattctctctataaattcaaatggccataacttttcacacggatgtctgattctggcgcataatatgtcgagaggctcgaaattgaacaatggaagctcttgaaaaattccaatagtcataatgttttcacactgatgtccgattcatgcttattatata

SEQ ID NO: 13930 - DNA, 421 bp, Glycine max
  unsure (1)..(421): unsure at all n locations
atgggacaatnggctacccaattgtatcaacaacaatcctagaattctgacaagctaccttctcaagctgtccaaaatcccaaaaatgtcagtgccatttcattgaggtcgggaaagcaatgtaaaggacctcaacccgtagcaccttcctcatctgcaaatgaacctgccaaacttcactctattccagataaaggtgatgacaaaaanttacctaacaatttctgtgcaggtgaatcttcttccacaggtaattctgatttgcagaagcagcacattcccccgcttccattccctccaagagcagtttccaacaaaaaaatggaagaggcagagaaagagatcttggaaacgtttagaaaagtagaggtaaacatacctctgtnggatgcaataaagcaaatctcagatatgccaaatc

SEQ ID NO: 13931 - DNA, 212 bp, Glycine max
  unsure (1)..(212): unsure at all n locations
gcatgggagatcctgaataccgctcatgaatgaacctccaaagagaagatgtccagattgcaactattggccacanaattcgaaaatctgaagatgaaggaggaagagtgtattcatgacttccacatgaacattcttgaaattgccaatgcttgcactgccttgtgagatagaatgacagatgacaagctggtgagagagatcctcagatc

SEQ ID NO: 13932 - DNA, 261 bp, Glycine max
  unsure (1)..(261): unsure at all n locations
ctgtcgcagactctgtgggttatgctgctntgccgaccaccacacagacctttgcccttctgtgcaatcaattgaagcaatngaacagcttgaagcttatgctgcatacatctacaatagacctcctcaacctcagcagcaaaatcagccacaacagaacaattatgacctctccagcaacaggtacaatcccaggtggaggaatcatcccaaacttagatgggcgagtccttcacaacaacagcaacaacaacaacctta

SEQ ID NO: 13933 - DNA, 229 bp, Glycine max
  unsure (1)..(229): unsure at all n locations
caacggaagctctcagagaatgtanatggctcataactttaactcggaggtccgattcaggcggataatatatcgagacgctccaaatngaacaatggaagctgttgagcaattcaaatggtcataaatagtcactcggaggtccgantcatgcacataatatatcgagacgctcgaaattgaacaacggaagctctcataaaatcaaatggcataactttaactcgga

SEQ ID NO: 13934 - DNA, 208 bp, Glycine max
  unsure (1)..(208): unsure at all n locations
atactcagcccattaagacagcttcggtgctacactacaatgggaaaatgaaaccttggcttgatctgngaattccacagtataaaagctattggaagaagtttctgaacaaagaggatcagctcttaagtgattgcaatgtaaatntcataataagtngtgntcctgtggtgcatgtttgggaaattgtanggctgatctcttaaac

SEQ ID NO: 13935 - DNA, 249 bp, Glycine max
  unsure (1)..(249): unsure at all n locations
gtgactcgtaagaatgagaagtttggttggaatgagaagtgtgagcacagtttccaagagttgaagaggcggttgacgacagctccagtgttaattntgcccgaccctaagagaacatttgaagtgtattgcgatgcaagcgggcaaggcttgtggtgtgtgttgatgcaagagggaagagtagtggcgtatgcttcacatcaattacgtcctcatngaagtaactatccgactcatgacttggaacta

SEQ ID NO: 13936 - DNA, 451 bp, Glycine max
  unsure (1)..(451): unsure at all n locations
agctngcactagccagtgatggaatgaatccatatgtgaatttaagcacttaacacaattcatggccaattctactagtaatttacaattttcctccttggttgtgcatgcagtgaaaatacatgatgttgtcgatgatgatatcaggcccaagacagccaggaaatgacattgatgtttatctaagtccgttgattgaaggcctgagaaagctgtgggacgagggggttttagtgtttgatgggtttcanaatgagacttttctaatgcatgcaatgcttttttgtacaattaatgactttccagcatatatgaatttgagcagttacagtgttaagggtcatcatgcatgccccatctgtgaagaagacacaagctacatacaactganacatggtagaaaaacagtctacactaggcatcgacattttctaaaacctcatcaccctta

SEQ ID NO: 13937 - DNA, 439 bp, Glycine max
  unsure (1)..(439): unsure at all n locations
agcttcacacaatnnnattttcttatacttgagttttggatgaccaattntgaggtacttcctaactagattatttagatgatgcatgttaatgtgtgcagtcctacgatgccacaaccaagaatcatctattgtacttaccaaacaaatcaactcatgaaatgatgcatgttcaacatttaacatatatatatatatatatatatatatatatatatatatattacctattatctttcaatgtggaaaactttacatggcttcacttataagacaaataatttttgttgaattcaattttgaagcctttgtcacaaatttgactaatgcttaggaggttatgctttattccatccacatatagaacattctttatttgagtnttgtgttgatttccgatatttctcttccattatttttcatggtattatctacaaac

SEQ ID NO: 13938 - DNA, 466 bp, Glycine max
  unsure (1)..(466): unsure at all n locations
agcttagcccaagaggggattgtccttttttatgcaatcctatgccgcaagggcattggatagaagaccccaagtagaatgggccaaagatgcaagagaaggccctagggttcttatgagccttagggtagattttgggcccatgggctaagtacgagcccacttatctttgtaaatattaaattaaggtttcattatttttgggccttgtatttagggctccataatgtaggtagggtaccctagaaatataggatttttcagcccttgtattttaaggcacctagactagtttttgtattaggggtagttttgtaatttcacatgcactaagtggatatttgatgtgtgtggttggaaataaatntaattgaattggcagaagcccaatccaattaaattttagagagggaggtgagcatttgcttactacaccccatttgcacatcatatagtcacactttgt

SEQ ID NO: 13939 - DNA, 452 bp, Glycine max
  unsure (1)..(452): unsure at all n locations
ttctccactaagttgcctaatgcctgttatgtcttctctaatggcaatggtcctagatgcacggaagaatttttccatgaacaccctattaaggtcatcccagctgaaaatagacctgngagcaaggtagtatagccaatcttttaccactcccttcagagaatgaggaaaagcctttagaaagtcatgatcttcttggacatcagggggcttcatggtggaacaaacaatatggaactccttaagatgtttatgaggatcttcacctgcaagagcatgaaacttgngctgcaaatgtattagtccagtcttgagaacatatggaacaccctcatcagaatattgaatgcacaagctctcataagtgaaatcaggtgcagccatctncctaagaatcctctcacgaagtggagggtgatccatgttctcagtataaaaattagtagtggaat

SEQ ID NO: 13940 - DNA, 428 bp, Glycine max
  unsure (1)..(428): unsure at all n locations
agctggaaccaatattnttcaatctctattccttcattaactaattgattagcaatacaagcactactttttgagcaaaacaacttacagcaaaaataatacactttatctaaatcctttgaatacactagccattttttatcatatttttctccatatggcattactttttggtagtaaaatgaagaaaaatgtctattattttcatcttttggatactgcatatcattatatctaattggatcataaatattnttagaaacttcatttgatgtactattgagctccttatttgtttctaaacaatcttcttataaatnttcattatcctcttgttcttgactaggattaagactattcatattgttaagaatttctatctctagaaattntcattatcagtattntgctctaccgtattaatatta

SEQ ID NO: 13941 - DNA, 332 bp, Glycine max
ctctctgaatccactgtattgctaggtttatataatgtgtattcattaatggtgcattcaaatctctattgtatctattaattattcatttaataaatcataatcccttttaaacaactaatgttttgaccagtcaagcacgtttacatctttgtaatgcatatataaaaaagtatttgtttgagttgctatacatatttttgaagaattaaattaataaaatatagaatataaataattttcacaaaggtaaattaaaaattttagtttttaattataggtaatataaaactgtaattgtaataaaaaaatgcttttgaaatacatattca

SEQ ID NO: 13942 - DNA, 346 bp, Glycine max
tcaagcttgatgcaacatttggagaggttattgaaacaacgagatgatgcgctccatgagaggttggatcaaatggagaatagagatcataatgaagaagaaaggaggagaagagggaatgatagtgttcctagacaaaaccgaattgatggtattaaactcaacattcctccatttaaaggaaagaatgatccggaggcctacgttgagtgggagatgaaaatagagcatgttttctcatgcaacaactatgaggaggaccagaaggtgaagcttgccgccacggagttttccgactatgctcttgtgtggtggaacaagctacaaaaggagagagcaagaaatg

SEQ ID NO: 13943 - DNA, 381 bp, Glycine max
  unsure (1)..(381): unsure at all n locations
caacggaagctctcgttaaaattttgttgtcataaacnttcacacagatgtccgattcggggaaataatatatcgagacgcacgaaattgaacaacggaagctctcgagaaatttgaatggtcataacatttcactcggatgttcgattcggggacataatttatcgagacgctcgaaattgaacaaccgaagctctcgacaaattagaatggtcgtaacttttcacgcgaatgttcgattcggggacataactcatctagacgctcgaaattgaacaacggaagctctcgagaaattcgaatggtcataagttttcacacggatgtccgattcggggacataatatatcaagacgctcgatattgaacaacggaagctct

SEQ ID NO: 13944 - DNA, 342 bp, Glycine max
agctggaccttatctcacatggatgttatctatgtattcttgaatgggaccatctaagaagacatttacattgctcaaccatatatggttttgtgcatcctaatcacagcccaaccatgtttgccacttgaataaagccctttacttacaatgcttttatatcatttctcttggcttatggcttcaccaatgtcaaatctgacacttcacttttttatttataaaaatgatcatgttatggctattttcttgtgtatgtagatgatttgcgacttacaggaaacaagtttctcggtgactttcaacaactagctgtttccaacaacttttcacttaaaaatc

SEQ ID NO: 13945 - DNA, 457 bp, Glycine max
  unsure (1)..(457): unsure at all n locations
ttcccccacanagtcttataaaatgacttaagaacttataatccctattcgtcacaatgcttttgggcagtccatgaaggcacaccacctctctaaagaacaagtcttttaccacacaatcatcatccactttatggtaaggaatgaagtgagccatctttgagaacctatctaccacaacaaaaatagagtccttgcctctcttggaccttggaaaaccaagtacaaaatccatggatatgtcagtccaaggagatgtggggataggcaaaagggtatacaaaccatggcttatgaccttagatttagctctatgacatacaatgcatttgacaaaatatttattaacattatgtttcattntttgccaaaagaaatgatcatgcaaaatgcctaaagtcttgtaaaccctaacccatncaacctcctcatgggcttctctaatcaacaattcatg

SEQ ID NO: 13946 - DNA, 462 bp, Glycine max
  unsure (1)..(462): unsure at all n locations
gatgttgagagtgtntgtcttanatcactatctctatttgaagtcccctctttcaaaaaaatagaacatttaaaattgagattgatgtgatagaaaaaaagtgttttgccactatagtaaacaatgaagagtggttatggcattacagagttggccatttaaattttagagatctgattcagctaaactcaagagaaatggtgttgggtttgcctcagatcaagcctcctagtgaagtatgtgatggttgtttacagtgtaagcaatcaagaaccactttcaaacaaaatgtaccaatcanggcaaaggagaaacttgaagtgatttactctgatgtgtgtggccctatgcagactgaatctcttggtggaaacaaatacttcatatcctttattgatgaattgaccaggaaagtatgggtttatctaataagaaagaagagtgatgtctttgaagtctttg

SEQ ID NO: 13947 - DNA, 414 bp, Glycine max
  unsure (1)..(414): unsure at all n locations
ctccgcttcagctgagctntgggaaaaggctaacctttatgatttcttcttgagacaaaagtccagaagcaaatggattaagaaggaggacagcaacacgaattatttccacaaattgattaatcacagcaggagaagaaataacttgagagggttgacaattgacaactcttgggtggaagatcctaacctcattaaggctgaaatccttcagcattttcagagaagatttcatgaatcccagctgcatagacctaacttggatggagtctctttcaatgttttaacccatactcagagggatacattggttgaaccttttaaagaagaggangtgcgatgtgctgtgtggagttgtgggaatgacaaaagcccggggccagatggcttcaatttcagaattattaaacactt

SEQ ID NO: 13948 - DNA, 315 bp, Glycine max
  unsure (1)..(315): unsure at all n locations
gctctcgngaaattcaaatggttataacttttcacacggatgtccgattatggcgaatcacatatcgagacgctcaaaattgaacaacggaagctcttgagaaattcaaatggtcataacttttcacaccgatgtccgattcaggcgaatcacatatcgagacgctcaaaattgaactacggaagctcttgcgaaattcaaatggtcataacttttcactcagatgtctgattcaggcgcatcacatatagaggcgctcgaaaaggaacaacggaatctctcgagaaattcaaatggtcataacttttcacactg

SEQ ID NO: 13949 - DNA, 398 bp, Glycine max
  unsure (1)..(398): unsure at all n locations
agcttccgctgttcaatancatttctttttgatatatnatgcgcctgagtcggacatcggagtgaaaagttatgaccattggatatctcgagagcttctgtctttcaatttcgagcatgttggtatattatgtcccagaatcggacattcatgtgaaaagttatgacaatttgaatttctcgagagcttctgttgttcaattttatgtgtctcgatatgttatgcgtctgaatcggatatccgtgtgaaatgttatgaccatttgaatatcttgagagcttccgttctttgattccgagcgtcctagtatattatctccccaaatcgaacatccatgtgaaaagttatgagcatttgatttttagagagctgtcattttcaattcgagcgtctcgata

SEQ ID NO: 13950 - DNA, 432 bp, Glycine max
  unsure (1)..(432): unsure at all n locations
tagtaaagctaagcactaacaatatgttcaagtgcatattcagattcaatgcatgaagagtgacaggcatgcagattanaatgaagatcagtcatgtattcatcaacaatatggtcaattatttcaacacgaaatacagaaagatcttcagatgggtgtttcatagcatcaagaatattaaaatgaacagttatatcaccaaactccatagatagtgtgcatgcatatacatctatcttagttctagcagttttcataaaaggtctgcctacaatgatgggaactgatcctttagaatatccctcctccatattcaaaatataaaaatcaacaaggaaaatcagctcaccaactctaactaggacatcctctatgaaaccagcaggataagcaacacttctattagctaaatgaattatcacatcagctgac

SEQ ID NO: 13951 - DNA, 402 bp, Glycine max
  unsure (1)..(402): unsure at all n locations
aaaactacgcttctatccaagctatcttgtggtgaagcttcacttctatggcttattccttaatggatggcgcctcctctcacctcgttttctttgtcttccgctgcatctccatggtggaaaatcaccattaaaggaccccattgaagctcaaagatccagccctcatagaagccccacaagcaagctttcatcaagtggtaatcagagcacaagagctgcaaattgccatatatggaattggaaggaggattggtgccatcccttgaagaatttgagtcaagaagcacggagccaaccaccttatgagctattggactaagaagcactccacattgngtgaatcaccaaagagagaaataccaccacaattgaggaccttgttgcaatattgtaattgac

SEQ ID NO: 13952 - DNA, 379 bp, Glycine max
  unsure (1)..(379): unsure at all n locations
acactgcaactcgagcttttggtgatccagcacttgcaattccattgccgaagccaaatacactagctccaggaacaaagttaccacctgcgggtgataaagtatgtgaaccagctacgttcatagtcacgtacactaagctctgaggcattcagttttgtacctgcatttgcctcataacctttgtagaaatatcttgctccaataagcttcctacatatagtaaaaacgtcaatttaattcaaatatcaaagacctttaaaacttaatggaatttctcatgatgcaagttaattcaaatgcctaccgaaacatctatntataactgaagctgatactaatngaactaatattaacacgtaaagaatgattacctacc

SEQ ID NO: 13953 - DNA, 429 bp, Glycine max
  unsure (1)..(429): unsure at all n locations
agtttcttgtgatttcactttataatatatcctccaatattctgttctacttttaaagatttagtactgtacatttttgaaagaatgcattatgttttgcagatatgtggaaattgggttagagtcagggcttcctgtttcagtcaatggtaagagtctttcaccagcgtctttacttgctgagctcaatgagattggtggaaggcatggaattggccggatcgacatggttgagaatcggcttgtaggtatgaaaagccgtggagtttatgaaactcctgcgggaacaatcctgtttgctgcagcacgtgagttggagtcattgacacttgatcgtgaaacaatacaagtcatagattcattagcccttanatatgcagaggtagtgtatgctggcagaatggttgatccgcttccggagtccatgga

SEQ ID NO: 13954 - DNA, 400 bp, Glycine max
acagcttctgttatgaatttcgagtgtctcgatatactacgggtcactttcggacatccgagtaaaaagttattgacatttgaatttgctcatagcattcgctggcaaataccaacgtctagatatattaaaagattcattccgacatccgagtaaaaaagcattatctttttattttgctcagagcttctgttttcaatttcgagcatctcgatatattacaggactcaatcggatatccgagtcaaaaagtattgtcgtttggatttgctacgagctttcgggttcaattacgagcgtctcaatatgctacgggacacaatcggacatccgaataaaaagtattgtcgtgtgaattactcagagctttcggcgcaattacgagcgtctcgaatattac

SEQ ID NO: 13955 - DNA, 346 bp, Glycine max
  unsure (1)..(346): unsure at all n locations
tcacaatttcctcactcataattggtctgccaccacttctgtatgccattgggttggtgtcacttgtgatgcttaccatggaagggtaaggacattgaatcttggcgacatgtctcttagtggcaccatgccctctcacttgggaaaccttaccttccttaataaacttgaccttggcggaaacaaattccatggtcagttgccagaggaattagtccaattgcataggttgaagtttctcaacttgagctacaatgaatntagtggaaatgtttcagaatggattggaggattatctacactcagatatttaaaccttggaaataatgactntggtnnggttttt

SEQ ID NO: 13956 - DNA, 373 bp, Glycine max
atctatcgctcctaatatggagcccttctcaatcaccctcattaagaactagcttttttcttcctctattgcctttacttgaatacacctttgttgggatctctatttggctcttaactctctcatgaaacttcttcacaaactctgacctagattccccttctttatgtataaaagaagtgtccactgggaggggaatgaagtcaaactgtgttaagggattaaacccataaacaacctcaaaaggggactacatgaggaagatactcatcccaagacttatggttgcctttcacaagagctcttataaaagtggatgaagacctattcactaccactatttgccaatcagattgtggatgacaagtggtag

SEQ ID NO: 13957 - DNA, 414 bp, Glycine max
  unsure (1)..(414): unsure at all n locations
ngtagtactaccacaaagaaagaanacaatcagcgcttaatgggtgtttataaacaagctacatgaggcaggtaagattgtgagaaataaggcaagactattttccaagggttattcacaattggaaggtatatattatacagaaaccttggcccctattgctcgtctagaggcaatacacattttactctcatttgtagctcatacaaaaatgagactatatcaaatggacgtaaaaagtgcattccttaatggactgatacaagaggaagtctatgtagaacaacccccggtgtttgagagtaacatatntgcacaccatgtatttaaactctgtaaaacattgtatggacttaagcaagctcctaaagcttgatatgaatgtcttaggtcatttcttttacacaatgactt

SEQ ID NO: 13958 - DNA, 434 bp, Glycine max
  unsure (1)..(434): unsure at all n locations
taagctgctagcattttctggttcaatcattttagaattagcttgatattttccctgatgaaaaggtggactgattttgtcttaaattaagtggcctgctgtgataactgatactccaagtctcatcgttctgactagtgagagcaagacatctagtatgccattcagtatgtttgaaatgtgaatgccaagtgcataaaatctgtattgattgttacttatatccatagggtaacaagagaagtgctgggtttacagatgaagagaggaaatcatttgcaaagaacttcttatctaggggatttgtagatacctttagaaggcagcatcctggtgttattggatatacatattgnggttaccgtcatggtggacgcaagttaacagaggtatttctagcacactcttaaaaatnngattatatataatttact

SEQ ID NO: 13959 - DNA, 460 bp, Glycine max
  unsure (1)..(460): unsure at all n locations
tcttacaagagactaagannattttgatgtaaaatttttagtataaagatcttggggaaacctcttttgtattagaaattaagatactaagagatcgctctcaaggtatcctaaggttgtcacaagagagttatatcgataaggtcctagatagattcagcatgaaaaatagtaaaccaggagataccccaatagctaaaggagacaaatttagtctcaaacaatgccctaataatgaccttgaaagaacaaagatgcaaaagatcccttatgcataagtagtaagaagtctaatgtacgctcaagtttgcactcgtgccgatataacatttgtagtaggaagtttgggcagatatttgagtaatcctggaatgcagcattgganagaagcnnaacntctgattcngtacctanagagaacanaaggatacatgctcacttatcagaagtctaaattttg

SEQ ID NO: 13960 - DNA, 418 bp, Glycine max
  unsure (1)..(418): unsure at all n locations
agcttgtttaccccatgttgtattngcttacaatagagntgntcatagcaccactaattgttctccttttgaagttgtttatggttttaacccactaactcctcttgatcttttgcctatgcctaatgtttctgtttttaagcataaagaaggtcaagcaaaggcggactatgtgaagaagcttcatgagagagtcaaagatcaaattgagaggaaaaataaaagctatgctaaacaagccaacaaagggagaaagaaggttgtctttgaacccggagattgggtttgggtgcacatgagaaaagaaaggtttccagaacaaaggaaatcaaagcttcaaccaaggggagatggaccatttcaagtgcttgaaagaatcaatgacaatgcttacaaaagtgagctgcccggtgagtat

SEQ ID NO: 13961 - DNA, 339 bp, Glycine max
aaattcaaatttcaagtctgaagaatcacaactctttaaaaactacctgtgtaattgaataccacatttatgtaatcgattagcagtaaagaattttcgaaaataacccccaagaatcacaattggtcaagaatttttgaatggccatcaaatgcctttaaataggtgacttgggatacgaaattccttagagtttttctgaacaacattatcttatcctctcaaaaccaaattatcttatcactatcaaaatattccttggccaaaacacttgcaaattcaataaggaatcatgatcgatattcaattgtaatatccttatcttaaagagagaaaatt

SEQ ID NO: 13962 - DNA, 450 bp, Glycine max
aatggtcgacaatggaatataaactgcggcagttattgtcgttttacctactccaccaagcccatggatccccagcatgtggatgacatcatcagatccaacatccagaagttcttttacttcttgcatacgtgactcaagtccaactggataatccgcaacatgtaaaggagcacgattaatcttcttagagaccaactcaacaatcctctgaataaacttatattcgtattcttccctattcaatcagagaaatcagagaaaagtcaaacaaaactagtcatcctccatatcttgatatgtatgtatgctgttcaaggtaataaactttattcatccctctaaatttcaacattatgtttaattattaatcttggctctatattggtctacacctttatgttttgacctatacgcaaaaaatgtatgtttagctctagacagcatatt

SEQ ID NO: 13963 - DNA, 445 bp, Glycine max
  unsure (1)..(445): unsure at all n locations
gtcacctgcggcatgcagcttgagcaattcaatgtctttnattttttactcagatgtccgaatgagtcccataatatatcgagatgctcgaaattgaattcgtaatctcctaaccaattcaaacgacaataactttttactaagaagtctgattgagtcacgtaatatatcgagacgctcgaaattgaatacaaaagctctgtgcaaattcaaatgacaataactttttacttggatgtccgattgagtcccgtaatattttgagatgctctaaattgaaaatggaagctcctagaaaactcaaacaacaataactttctactcggatgtctgattgagtcccgtaatatatcgagacgttcaaaattgaatacggaagctcctagtaaattcaaaccacaataacctttgactcggatgtttgatngagtcccgtaatatatcg

SEQ ID NO: 13964 - DNA, 378 bp, Glycine max
  unsure (1)..(378): unsure at all n locations
ngagaatggagaattgcactaagcaattattacgcatatctttttactcgaaggtggaggacacatgaacgaaaacacaattcatggggctccgaaaaaggggttgagaatggagaattacactaagcaatcactacgcatagctccaaactcgaaggtggaggacacatgaacgataacgcaattcatggggctccgaaaagattgataatggagaattgcactacgcaatcactacgcatagctccaaactcgaaggtggaggacacatgaatgaaaacgctattcatggggctccgaanagattgagaatggagaattgcactaagcaatcactacgcatagctccaaactcgaatgtggaggacacatgaatga

SEQ ID NO: 13965 - DNA, 227 bp, Glycine max
cttgggccagccacatcaaaagtgttagatttcaacttaaaactaattggcactaaatgaaagtgtccaacagatatataagctgtatcccaaaaattgaggcaggtgatgtgggacttcctaacccccccctccacaaatgcctgccaatacaagcaagcctacaagaataggcaagaactaagatgggctataggctctgatatcatgttagatttcaacttaaa

SEQ ID NO: 13966 - DNA, 443 bp, Glycine max
  unsure (1)..(443): unsure at all n locations
tgtatggtagaaggggtaggacacctctatgttggtttatgccctgagaagacctcaccttangacttgaagtggtacaacaaaccaccgagaaggtcaagttgatccaagaaaggatgaggactgctcagagtatgtagaaaagttatcaggataagaggaggaaagacttggaattcgaggttggtgatcatgtattcttgagagtcactctgtggactggggttggtcgagcattgaaatcccaaaaactaacacctcgcctcatcggtcctttccaaattcttaaaagagtcggtcctgtggcataccaaattgcattacccccatcacattctaatcttcacaatgtctttcatgtgtatcaactccataagtatatccatgatccatctcatgtggtcgaattggatgacgtacaagtaaagagaacttgacatatg

SEQ ID NO: 13967 - DNA, 308 bp, Glycine max
  unsure (1)..(308): unsure at all n locations
acaaaaaactgaccaaaacctatcttctcctttttggaccaaatatggcaaggtgggggccaagaaattttcttcccatcaaaccctggatgcaactgtgatcgtatgcccatatcaactagatcttgacgggtattcaagccatccttcgtcttgccttgaatgttaaggagcgtcccaatcacactgtcacaaacattnttctccacatgcataacatcaatacgatgtctaacgtcaagaatcaaaccagtaagaagatcaaagaanatggacctcttcttccatatgcaactcttacttttatc

SEQ ID NO: 13968 - DNA, 472 bp, Glycine max
  unsure (1)..(472): unsure at all n locations
gatccttaagcacctgcngctgcagctatagtcattactgttaaactttaactcaagnngaatgttcctttgatatagtaaataatttgttttgtggccttgagatgagtaatggttggagtctccatgtattgactgatgagtcgagtaccatataaaatgtctggtcttgtggacgtcaaatatcacaaactacccaccaaactcttgaaatttgtagcacccatcttttttgcttcgtcaaactttgataacttcattttgcactccaccggtattccaattggcttgcatagttttgctatgaaatgaagattcaatcttccttttgctttacctcaataccaagatagtatgacattagtccaatatcggtcatcttgaactccttgaccattgctttcttgaacttttcanacatacttggattacttcccatgaagatcaagttatccacatatatgaacatgat

SEQ ID NO: 13969 - DNA, 369 bp, Glycine max
agcttcataaatccatcactttttatgttctatgcacaaaaacttaaatgatgttaatttaacaattatttgctcaaaaaggaaaaagtaggagggaaaaattacaaattcctatataatttatgatgcaatactaccccgcaagggcattgggtaaaaaactccaagtagattgggctagagatccaagggaaggccctagggttctcatgagccttagggtagatttcgagcccatgggctaagtatgagcccgcttatctttgtaaatattagaataggtttttccttcgtctgggccttgtattttggccattctagtagtatagggatttagccttgtatttcaaggcattttgagtagtcttt

SEQ ID NO: 13970 - DNA, 460 bp, Glycine max
  unsure (1)..(460): unsure at all n locations
tctntgaganaacttccttgagaagctagagcttagttacacacacccctctcataactaagctcacctccttgagaagcttccttaagaagattcctaaagaagcttgagcttagctacacatacctctctaatagctaagctcacctccttgagatgagaagctagagcttagctacacaccccctataatagctaagctcacccccatgacaaaaaacatgaaaataccaaaaaaagtccttactacaaagactactcaaaattccccgaaatacaaggctaaaaccctatactactaaaatggccaaaatacaaggcccagacgaaggaaataactattctaatatttacaaagataagtgggctcatacttagcccatgggctcgaaatttaccctatggctcatgagaaccctagggccttcccttggatctctagccaatctacttggagtct

SEQ ID NO: 13971 - DNA, 455 bp, Glycine max
  unsure (1)..(455): unsure at all n locations
ctgcagcttacagcaatgcacttctcatttttcaaacgatatgttgacaagaaaacacaagtatattcactangaaaacatttgtgtggaaggaaattgtagtgctgtgattcaaaagatccttccacctaagcataaagaccctgggagtgtaaccattccttgttcaattggagaagtcactatgggaaaggctcttattgatctgggagccaatattaacttaatgccactctccatgtgcaaaaggttgggagagttggagatcatgcccactangatgactttacaacttgttgactgctccattaccagaccatatggagtaattaaagatgtgctggtcagagtaaaacattntatcttcctagcagactttgcggtaatggatatctatgaagataatgacattcctgtaatatggggaacgccattcatgttaactatgagctaca

SEQ ID NO: 13972 - DNA, 420 bp, Glycine max
  unsure (1)..(420): unsure at all n locations
cgaatgttgctagaaattgcaatttatgggcaagcctatactctaatatactgcaagcagggatttttgcttttttgtctagtttgcttcaactcgattttaggtgtggtgcattttccgtttgaactatacatatcgcaaataaattgaccaagactcattattgtaaaggttttttcacaataattatggtggagaaaatgccaattcaaatagaatgtccatgattttgactaggctaacaagttttgacagggaatcaagtcctgttatgttaatgaaatgaacttgcagaaatttgaacctctcaacagatggagaataagtgtataattgctttagtcactgttgatgttgatcancgtctttagaactacnntctttcttatctattaatntcaagtttgaaatgatacatat

SEQ ID NO: 13973 - DNA, 420 bp, Glycine max
  unsure (1)..(420): unsure at all n locations
acaaagcaccctacggcctcatgtgctaaaactnttagctgggagcaccatgacactaccaagcctttctctgacttcttttcgaagtttttagggagtttagtctcttcagaagctctaaccacccacaagaagtaactttcactatctcttaaaccataagctagttcttctatttgctcctcactaagtattgccatactcccaaaagaaacataaataacagactcttttatcttatcatctaaccattttatgcattcttcacttgtgaatngtgcaacaccatagtcttcatcatcttgggtttgcttgtctaanaacatggatggaatggatggtcctatnngtcctaaatttggccagatcttcatcgtccaatcagccacctacaagcaaaataagtaatgtcacattcta

SEQ ID NO: 13974 - DNA, 214 bp, Glycine max
  unsure (1)..(214): unsure at all n locations
gctgcaccctcaattgattattactatctgtgcatcacctctacttatatcaattgcataattctacgacggtctttcaaacagaggattatcttatnttaataaatatatccaatcaatcccaatccttttaccgattaacatcttgtaagatnttcacaaatccctaccttttaattttcgactttctcaaaatatatcagctgatgaatta

SEQ ID NO: 13975 - DNA, 470 bp, Glycine max
  unsure (1)..(470): unsure at all n locations
gtacgctaaagatattatgaatgcttcaactgagcgtatgngtttgaagaaaatgtgcacaatgtncattggctttcttttataggatcgtggcctcataatccctaaacaatgtgcacatgagtaatttgctctcaagcccattatacatttaaccctaaacaatgagtatataaacttaaaaaaatagaatctaatttccatatatggctatggtannnaaaatatttatcaacgaagtgaanactataataaatataactgataagataattattataaaaataaatgaaataattatacataccaatttgtgataaaaaataatgtgaattcttttacanaataatatattgctacttctcttaaagtatggcttcattaactgatagaaatctacattaacagttatttacacgacaaataaattagactattctgcacattgcgcttatggtcaaacactacta

SEQ ID NO: 13976 - DNA, 251 bp, Glycine max
  unsure (1)..(251): unsure at all n locations
tatatcgagacgcacganattgaacaacggaagctctcgagaaattcgaatggtcataacatttcactcngatgttcgatccggngacataatntatcgagacgctcgannatgacaaccgaagctctcgacannatatgaatggtcgtaactnttcacgcgaatgttcgattngngacataatcatctagacgctcgatatgacaacggaagcttcagaaatttaatggtcatacgtttcacacggatgt

SEQ ID NO: 13977 - DNA, 196 bp, Glycine max
  unsure (1)..(196): unsure at all n locations
tcataatgatcattgngatgtagtaattcgaattttgaaatacattaaaaggacctcaggacaaggactactctatgaagacaaangagacacttcaaatagtggattttgcgatgcagattggacataatcacccattgataggcgttccacttcaggatattgtgtgtctggtggaggaaatcttgtctcatgg

SEQ ID NO: 13978 - DNA, 269 bp, Glycine max
  unsure (1)..(269): unsure at all n locations
tcttcttcatcaatggagtcctntgcttcttgaatatcaatggtagtggaatggagaaggaagaaagattattggagacacgaattcaaggagaagatgagtcaagaacaagctcaccaccataggaagccatggataatagcttgaaggtaggagaagatgagtggagggaggaggagagaaggagcacgannatttatgcctcanatgaggtctgaactntgaagtgtaattctcanatgatcaaagttgaanaaaattgcacacat

SEQ ID NO: 13979 - DNA, 346 bp, Glycine max
  unsure (1)..(346): unsure at all n locations
ctataaatctatctaagaaccctgttcggcactcaagaacccaacacatagaaatangacatcatttcttgagagaatatgttcaaaagggagattgtgttctagaattcggtgatacaaagaatcaagtagctgatatctttaccaaacctctccataaagaaacgttctttgctattagaagagaantanngtctttagatatcaatgatctagacaagtaggtaactcattgagctntgtcctcttatgttcatatantggcttgagtgtagtgtagcgttataatagtcatataattgttgttggctttaataatggnccttgataccttgttgaatataat

SEQ ID NO: 13980 - DNA, 368 bp, Glycine max
  unsure (1)..(368): unsure at all n locations
cttgagaggcttctttgagaagctaacactttatctactaacacccntttaataactaaactcacatccttgaaaataattacggataaaataacataacaaatataatcaaacatcaaacataattactaataatatatagatatatatcagggtgttacaactctcccaccctttttgaaatttcgtcctcaaaatttacctgactcaaacaaggatggatgagcttctcgtatctgactctctaattcccacgtggcatcttctcctgatgcacctccccagatcaccttgaccaacagaatctttntccctcttaagtgttttgttcacctatcctcaatcctcagaggcaatgtttcatatgt

SEQ ID NO: 13981 - DNA, 355 bp, Glycine max
  unsure (1)..(355): unsure at all n locations
taataaatctatatatggtttaaaacaagctccttgtcagtggtactttaagtttcatgggataatttctttatttggttntaatgaaaaccccatggatcaatgcatataccacaaggtcagtaggagtaaaatatgttttcttgttttatatgtagatgatattttacttgtagtcaatgatcggngtttgctacatgaggtgaaacaatttctctctaagaantttgacatgaaggatatangtgatgcatcttatgtcatcgacattaagattcatagagatagatctcgaggtattttgggtctatcacaagaaacctatattaacaaaattctagagagatttcagatg

SEQ ID NO: 13982 - DNA, 399 bp, Glycine max
  unsure (1)..(399): unsure at all n locations
caccatccattttaagatgtatgcataattntcaaaataacagaggcagcaccttagcagctccagtgctgctgggaattatattgaaggaagcagctcttccacccctccagtccttgtttgatggaccatcaacagtcttctgagtagctgattcatcacaaaaagtatataatgaataccatatcttcatctaaaattgaaaaggataatagattaattcaagaagttatatagccaaatgacaaacctgtgatggcatgaacagtggtcataagaccctccacaattccaaatcggtcgttgataacctgtacaaaattaaaatntaataatttcattaagaaaaatgcaaatttataatacagatggaagcagcaatatataaatatatcacaa

SEQ ID NO: 13983 - DNA, 336 bp, Glycine max
  unsure (1)..(336): unsure at all n locations
cgtagggttaaagtctncacgatgtcacgtgctcatgcaacaattgttagccatggctatacgagacatcttgccaaacaaagttaggttagcgataactcgcatgtgctntttcttccatgctatatgtagcaaagtcattgatcctatcaagtttgatgagttggaaaatgaggccgcaattatactgtgccagttggagatgtattttccccctgctttatttgacatcatgaatcacttgattgtgtatctggtcagagaaatcaaatgttgtggtcctatttatctacggtggatgtaccccgttgagcgatacatgaagatcttaaaagg

SEQ ID NO: 13984 - DNA, 380 bp, Glycine max
  unsure (1)..(380): unsure at all n locations
tctagagtagtataatgtagtcggctatgatactttttaatatcttgcctccaatactaaatgccgattcataagctacagcggagatcggaatatctaacacatcccttgcaatagctagtagtgttggatacattagctcgttcaatttccaccacattaagatatcagaatctgaatttcttggtgaaacttcatcctctaagtaatgatccaacttcgttttcatagttgaggttcttgccctttctttctttcaatgtatctatcataatcacacaatttactctttccatcactaaccacatctagtgattcaaaagaactagtagaatctggatgctttttggcttgatattccgaaatanaatcataacaca

SEQ ID NO: 13985 - DNA, 248 bp, Glycine max
tccctatgttatcacacatatcaagggaaaacgtaatattgtagttgatgctctttctcggcgtcatgccttactttctatgcttgaaacacaattgattggtcctgaatgtttgaaaagcatgtatgaaaatgatgaaacttttggagaaatctttaaaaactgtgaaaattcttcagaaaatggtttccttatacatgaaggctttcttttcaaagaaaacaaattgtgtgtgcctcaatgttcta

SEQ ID NO: 13986 - DNA, 261 bp, Glycine max
  unsure (1)..(261): unsure at all n locations
cgccgcgaaggtatagtacgatgatccttgtgtgcggcgcagcttttctgcgggtgctgcgcgtggngtgttttcttcacaggattgtttgcgaagaaagtgtacgtggaggagaattacagagttggaaggccgttcggggctctgatgggtggcggaaggaggctgctggcggcgcacgtgattcacatattggtggtgtgcgggtgggttactgtgaccatggcgccgttggtctatgtgcttcatatgatgaaactg

SEQ ID NO: 13987 - DNA, 468 bp, Glycine max
  unsure (1)..(468): unsure at all n locations
ttgtatacactatgacacgtatattttattaactcatcccttataattatatttgaaggacaaaacttatagtatccagtaagtgcttatagtgttctccaattaaatgttagagtttcatctcagtaatttctttaataaatgtttgcatacaaattacgaagatgaaactctaattatgattagagaacaaaataaaacatacctatagaaattctttcacacacaaacttaatgccattcaatagaacacaaaaagtctagatatggtggcttatctaacatcctcaacatgtctcttagcttgttcaataatctctgaaaacactttgtaattgttcttgtgaatgaaaaggttgcctgtntcgggtggctgaagactatgaagagttctctgttatgttgccactatgcttctctccgttgtctgcatagtctctttgtagtgatggtagtctttcataaata

SEQ ID NO: 13988 - DNA, 472 bp, Glycine max
  unsure (1)..(472): unsure at all n locations
tatagaaggttcgttcctaatttctctacaatngcatcacctctcatatgagctggtgaagattattgtggcatttacctgnggtgaaaaacaagagcaagcctntgctttgctcanagaaaagcttactaaggcacctgttctagctcttcctgacttttctaaaacttttgagctagaatgtgatgcctctggagtgggagttggagctgtattgttacaaggtgggcaccctatngctttatttagtgagaaacttcatagtgccaccctcaactaccccacctatgataaagagctntatgccttaataagagccctccaaacttgggaacattaccttgtttccaaggaatttgtcattcatagtgatcatcaatcacttaagtacattagagggcaaagcaagttaaacaagaggcatngcaaatgggtagagtacctagagcaatttccatatgttatcaaatac

SEQ ID NO: 13989 - DNA, 385 bp, Glycine max
  unsure (1)..(385): unsure at all n locations
gcaagctntcgcactctcttcttcttctaatctccgnctatttaaaccgtttctgtgtgcatttgagcatcgngttcggcgcactcgagcatcgtcacaagtctctgcttcttctccttcgctaccatacctagggattgttcgtctcttgtagtgcttaactctactgagctttaaaagattggctaagattttggtaaaacataagcacttaaacaatgaaggaaagctggagttgctgcacatgatgtccaacgttatgtcaaggaataagatcgggctgcacaatgcacaaggcaagataaaatgtcaaatgaagaattgaagttgcaggatccaccatgtcggatacaatgtcctgacatcctgcccgagaatactggcg

SEQ ID NO: 13990 - DNA, 354 bp, Glycine max
cgcacaagccccgagccaattctaacgataataactttttactcggatggccgaaatagatctgtaatatatcgacacgctcgaaactgaatgatgaagctctaagcctattcaaacaacaataacgtgttactcggatgtccgattcagagacgtaatatatcgagacggtcgaaattgattgctgaacctatgtgccaatttaaacgacaataactatgtactcggatgtctgattgagtcccatcatatatcgagacgctcaaaattgaatgttgaccctctgagccaattcaaacgacaataactttttactcggatgtctgaatgagtctcgtaatatatcgagacgct

SEQ ID NO: 13991 - DNA, 449 bp, Glycine max
  unsure (1)..(449): unsure at all n locations
ttccttggaagctaggtgctgtgaacaaacttctattgaaacagcttgttcaacccttgttttaacaagggcactagagaaaccagcttctctcatgaccctactaatgctagggtcatcaaggatagagactatgagctgctccatctcaatcttcaaggccagaatgggttgctgctggttctcaatcgaaccgcggcgttggtgagcctgagcacgcttgaaggctgcaaccaaagcatnggaaagtgagggagtggtggaatatggaggactcacaagagggcttggtgtgggtgctggcaaacggttgatggaaacattgaagcaaagttctagtgccttgtattggagagggtgagagtggcattgaacgaaaacattgcggagaaggcctgtggaagtagcaagcatgacagtggcaatgtgaagaggggcacttgagcatg

SEQ ID NO: 13992 - DNA, 365 bp, Glycine max
ctatgctgcatagtgttacaatagacctactctacctcagcagcaaaatctaccacagccgaacaattatgacctctccagcaacagatacaaccctggatggaggaatcacgcttatctcagatggtccagccctcagcaacaacaacaacagcctgctccttccttacaaaatgctgctggcccaagcagaccatacattcctccaccaatccaacaacaacaacaaccccataaacaaccaaccattgaggcccttccacaaccttgcatcgaagaacttgtgaggcaaatgactatgcagaacatgcatgttcagcaagagaccagagccttcattcagagcttaaccaatcagatgggac

SEQ ID NO: 13993 - DNA, 345 bp, Glycine max
  unsure (1)..(345): unsure at all n locations
agcttgaccttcggcaaggcattcaccatatacgtattgtcgacgaggacatcccgaanatggattntcgtactcaccatggacattntaagtataaagtcatgtcgttcggactctgtaatgcccccttcgacatttcaggcgactatgcatgatcatgttagaccatttcttcgcanaattgtcgtggtctttnttgacgacatctttgtcttcagctcatcactttcaaaccacctcaaccacttggaagttgtccttaaaaatctatatcagggccaattatttctatgccattctaagtgtttgtttactcataacaacttacactacctaaggcatatt

SEQ ID NO: 13994 - DNA, 366 bp, Glycine max
  unsure (1)..(366): unsure at all n locations
gcttctgatttcaatttcgatcgtcttgatctnatactgtactcaatctgacatccgagttaaaagttattgcggtttgcattggctacgagcttccgctttcaactacgagcgtctcgatatattactggactcaatcgaacatcggagtaaaaagttattgtcgttagaatttgttcagtgctttcgctttcaatttggagtgtctcaatatattacgggactcaatcgaacatccgagtaaaaagttatcgtcgntagaatttgctcatagactttgtttgaatttgctacgagctttcgttttcaatgtggagcgtctcaatatattacgggactcaattggacatccgagtaaaaagttat

SEQ ID NO: 13995 - DNA, 427 bp, Glycine max
  unsure (1)..(427): unsure at all n locations
tgatgatgtcgagaagacatcacatgtntgtcatcatcaaaaaggtggagaatgtgaatgtatgtatacatgatnttgatgatgtcaaagaagaatcaaacaaggctgcttcaaatgataagcatttgcttcaacaaacaaagccttgtttcaagattcactaaagaccaagccttgccttataacagagtgctttcaagatatgcaaggctctggtaatcgattaccagaagacagggttgagaaatagctgttgaaaaagatntatgaatttgaatttcaacatgtaatcgattaccagcaacgaaactcctgaaattcaaatcaaaagtcatgactcttcaaattataactgtgtaatcgattactcanacattgtaatcgattaccaggtgaaaagttttcagaaaatatgctaacagtcaca

SEQ ID NO: 13996 - DNA, 280 bp, Glycine max
gatagatgaccatttgctgagcatagttttttaaaagcttgtctgaagccactctttatgttaaacatcagagcaatgaagttccgatgatttcactttatgtcgatgatcttttggcgacaggaaataatccagggatgattcaggaattcaaacaagaaatgatgaaggtttttgagatgacagatctcgggttaatgaccttctttcttggatttgaaataagcaggctgagtatgaagtcttcatctgccagaagaagtatgtcaaggaaattttg

SEQ ID NO: 13997 - DNA, 349 bp, Glycine max
acatggtctgatggggcctatgcaagttgaaagccttggaggaaagaggtatgcctatgtttgtgtggatgatttctccagaattacctgtgtcaactttatcagagagaaatcagacacctttgaagtattcaaagagttgagtctaagacttcaaagagaaaaagactgtgtcatcaagagaattatgagtgaccatggcagacagtttgaaaacagcaagtttactgaattctgcacatctgaaggcatcactcatgagttctctgcagccattacaccacaacataatggcatagttgaaaggaaatacacgactttgcaagaagctgctgggtcatgcttcatg

SEQ ID NO: 13998 - DNA, 364 bp, Glycine max
  unsure (1)..(364): unsure at all n locations
gcttgtgtcgcactttcaactgccgattctgaatatttttctgtaagaagntggggggctcaaagtctttggatgaagcaatgacttgaagactctggagtaattcttaatcatattcctatgaaatgtgataacacaagtgctattaatctaaccaagaatcctgtcatgcattctagaactaagcacatagaaataaggtatcattttctaagagatcatgtgtccaaaggtgactactactttgagttcattgatagtgaacataattagcagacattttcacttaaccttttgttagagatagattctctcatattagaaatgaactacgcatattggatgcatctagcatagaataaca

SEQ ID NO: 13999 - DNA, 409 bp, Glycine max
  unsure (1)..(409): unsure at all n locations
tcgagcanaatcagtccacgaaggaggcatatttgatatcatgaaatctccaagcataatgtcaggcaaaacgattcctttcaatttcatgtcatagacaatgttttgaaattcatggatctgatctgaaatagattntccatcaatcatttgaaactcaatcattttttcacaagagtaacgacttaaacctttgtcagcagatccatatttcaattcaagtgcttcccataactcaacagaagntttggtatggcaaacaatcttatatatgttatcagccaaagcacttaaaatgcgtccatgacataaaatatctntatcaganacatcatgcttaatggttgcatcagtttgaactatatcagtagaggaagtgaagttttatttctctttagaaatacagagt

SEQ ID NO: 14000 - DNA, 346 bp, Glycine max
cgtaatcgatatcacatatacctgaatcgattaccagagcagattttcataacatattatcaacagtcacatctttttatgtggctcttgaatggctatcagaggcctatatatatgtgactcgagacacgaatttgctaagagttctttagaacaaaaaggtcttatcctcttaaaaagtaaaatcgttctatcctcttacaaattccttggccaaattacttgtgattcaataaggaattatttgaattctcaaattgttcaatctatctctctcaagagagatttcttcttttcttcttcttcattctgaaaagggattaagagaccgagggtctctgtgtgt

SEQ ID NO: 14001 - DNA, 265 bp, Glycine max
ttatgaccatttaagcaacatatacaatccaggatggaggaatcatccaaaatatgagatggacaagtcctccacaacaacaacaacctattccttctttccagaatattgttggtccaagcaagccatatgttcctccttcaatgcagcaacagcagcaacagtcacaacagagacaacaaagcattagatgagttagtgaggaaaatgacaatccagaatatgcaatttcagcaagagacaagagcctctattcagagtctga

SEQ ID NO: 14002 - DNA, 459 bp, Glycine max
  unsure (1)..(459): unsure at all n locations
ctgaatggaggctctggtctcttgttgaatctgcatgntttgcatattcatttgcctcacaagttcttcaagggaaggttgcggaggagcctcaactgtttgctgttttggggctgttgctgttgtttttgttgctactggattggtggaggaacgtatgctctgcttgggccagcaactttctgaaaataanggtgctgttgttgttgttgttgctgctgttgtgaaggaattgaccatctaaggttgngatgattcctccacccaagattgtacctgttgctggagaggtcataattgttctgttgtggctgcttttgctgctgaggttgaggaggtctgttgtagatgtttgcagcataagcttcaggctgttcaattgcttcagattgttgcacagaagggcaaaggtttgtatggtggcccacagaggagcatanaccacagagtctggcgata

SEQ ID NO: 14003 - DNA, 399 bp, Glycine max
  unsure (1)..(399): unsure at all n locations
cagttgcatgaaccacacatgatgactcattaattcaatggtttatgttatatttntttttcttccattntctttcttagataaactcaaagtaaaaaagaaaacttttatctgtttctgggacaccctnttttgagtaaagttgtttgtacctctttctaaccactttatttttcagcattggaagtctagggaaagacaactcaacaggcatagtcacgaaagtgatcttggatacagcagttcttagggagactaccaacggtctcagaattaagacttggcaggtagtatctcaatcttgatgaaaattatcttaatctttcaataaatatataatgtcattattctagtttttatcattattatcccttggtgaaagaatatgtcacacccctt

SEQ ID NO: 14004 - DNA, 241 bp, Glycine max
  unsure (1)..(241): unsure at all n locations
ctgcatctgacaaagatgatggcaaatcttcttcangatatgcnctctctgtaaatggnggngcattcagttggaaaagttccaagcaagctacggtagcagattcaactactgaagcagaatatatagcggcaagtgaagccgctaaagaagttgtctggattaataagttcatatatgaacttggtgtggttccttcaatagaagagtcnggcccattattgtgcgacaataatggggc

SEQ ID NO: 14005 - DNA, 224 bp, Glycine max
caatcaaattaaatcttagagggggaggtgagaatttgcttactatttcccattgccacatcatatagtcacactttgtgcatgtacttcatgctttacatgcctcatgacacctaagcacacttagtggagaatcttggaattgatcctggatcattgggctgaaccataactaaaattcactaatcataattagtgaaatcttggctccaaagtttggctcc

SEQ ID NO: 14006 - DNA, 264 bp, Glycine max
  unsure (1)..(264): unsure at all n locations
ttggatagttaagccttattctaggccatacagacttcagtggcttagtgaagataaagaggtaanagtgactcagcaggttgaggtgtgtctcaccatggaagatataatgatagggtgttgtgtgatgtgcgtccaatggaggcgactcatatactgttgggaagaccatggcaatataacaccaaagcagtgcatgatggcttcaccaacaagaattctttccagcaccatgaccagaagaatattcttaaacctctaccc

SEQ ID NO: 14007 - DNA, 327 bp, Glycine max
  unsure (1)..(327): unsure at all n locations
gagttccagtgcacattcgtcttcttcttgtgtccagtcttcttctgatcttcattcatagtgnngcttccttctatgtccagcatcttgggatgttcccagcctttgatgacagctntccaggttctgctatccagtgatntgaggaaggccaccatccttgctttccagtattcatagttggttccatccagaattggtggtctgttcactggtcctccttctttctccatgttcatcagaaattatctccctagatctcactcagtgacttcgagtgcccgctctgataccaattgaaattctgatactggggacagatgtcgt

SEQ ID NO: 14008 - DNA, 186 bp, Glycine max
  unsure (1)..(186): unsure at all n locations
gtactatcangccaagaagatattgtgtatgatgggtatggaatattacaagaatcatgcttgtccgaatgattgcatactgtacagacatgaatttaagatatgtgcaaatgccctatgtgtgttgtatcacattacanagtgaaggatgatgactactgtaatagtgatgaaaactcaaagaac

SEQ ID NO: 14009 - DNA, 252 bp, Glycine max
  unsure (1)..(252): unsure at all n locations
tttggtcagagcttcaacattcaatttacagcgtctcgatatattacgggactcaatcagacatccgagtaaaaagttattctcgtttcaatttgctctgaggttcagaattgaatttcgagcgtctagatatattacgggactcaatcanacgtcctagtaaaaacttattatcgtttgaattagctcagaacctcanaatttcaatttgatcgtctcgatatattacgggactcaatcatacatctgagt

SEQ ID NO: 14010 - DNA, 222 bp, Glycine max
  unsure (1)..(222): unsure at all n locations
tcattcagcttgaagagaatgtcatganacactgtatataccagaaggtcagtgggagtaagaattgtttccttgtattatacgtagataatattctacttgccggctaatgaaagggtatgttatatgaagtgaaacaatttctctcanagaattttgatatgaaggatatangagaggcatcttatgtcatangcatanagatccatagagaaagatctc

SEQ ID NO: 14011 - DNA, 274 bp, Glycine max
  unsure (1)..(274): unsure at all n locations
tcttattcctctccatagttcataataagtctntttaatcaatggtcccatctatattatgttttgaacatagcangctatgtttaccgcttctccctagaangttttaggaaagtgagtttcacaaagcatggtcctagccatttcttgcagaagtttatnntttcctttcaactacccgatttgttgaggtgttctcggtgaagagaagttaaggaagataccattctnttcatagaatgatttanactcaacattctcaaactcaatttca

SEQ ID NO: 14012 - DNA, 336 bp, Glycine max
atgaaatgtgagaaatgttgatataaagatttttggattagattatttatatatctaataattacatatatattaaacttaatttctttttgtaaatgtacttattccccctgcatttgcttcatttagtattactaatcatctatgtaaattaatttagatatgaaataaataaagataccagatatgctacctatttctttccagatcactatgtagagtcacctcgttatcaatgaccatgctgataggaagtaaatccgatgatgaaaaatgaacaggacatatgtcatctaaatatttatatataaagaattatctgacaaaaaatactta

SEQ ID NO: 14013 - DNA, 212 bp, Glycine max
  unsure (1)..(212): unsure at all n locations
ggagacccattgaccagcactaatataaatgatgatctcagacactcagctatccaacatacccattntacatagaagcccatatgctctagcatgtagaggaggaactcccagctcactgagtcatatgctttcttatagtctagcttagagactaagcatcttttcttacatctccttgcttcatcaatagcctcattagcaacaacact

SEQ ID NO: 14014 - DNA, 235 bp, Glycine max
  unsure (1)..(235): unsure at all n locations
cagttgaatattcctgtgttccctgtatgccttctcatcaaaattcagaaaatttagagcccaatatgctgtgtgttccatttcaactcggaaatgacatgattctccatacaccagttgataaggagataagccaatcggggtcttgtatgaagttctgtaagcccacagtgcatcttccaatntggttgaccaatcttttctagttgacgccactgttntctctaatatcttc

SEQ ID NO: 14015 - DNA, 248 bp, Glycine max
  unsure (1)..(248): unsure at all n locations
ctctcgagaaatccaatgctcattatctntaactcggatgtctganttangcgcataatatatcaagacgctcgaaatngaacaacggaagctctctagaaattgaaatggtcataacttttcactccgagggtcgantcaagtgcatgatatatccagacgcctcgaaatgaacaatagaagctctcgagaaattcanatggtcataacctttaacttcgaggtccgattatgcccataatatatcg

SEQ ID NO: 14016 - DNA, 114 bp, Glycine max
  unsure (1)..(114): unsure at all n locations
gatacagcangggagaatctaacacantttcctctgacanacactntgtgatactcatcactctttctgtctgtatgtcagagggaatgttgacaatgaattccctgactagac

SEQ ID NO: 14017 - DNA, 202 bp, Glycine max
  unsure (1)..(202): unsure at all n locations
tcatcacttgcgggaatggattcgtgtggaggacccctcantatntgagacagcccacggaacaagtgcttggtggcttcttgagaaanaccctgaatatnttggtctcttcaatgaggctatggcaagtgattcccgaatagtatacttggcactcanaaatagcacttcagttattgaggcgctagattccatggtggat

SEQ ID NO: 14018 - DNA, 206 bp, Glycine max
  unsure (1)..(206): unsure at all n locations
tgcatggagtggctgaaagaatggcagaaactcccttatacttcaccttacatcaatgcctctcattnggatccccgtactgatgtatctgagagaaagatagtnggagtcttccatgagctccttcatctcacactccataagcanactgagcgcaagaacgttagcaacttgcgtagacccttggccctacctcatgaagttac

SEQ ID NO: 14019 - DNA, 417 bp, Glycine max
  unsure (1)..(417): unsure at all n locations
ggtgttattgaagaacatgcttcctgaacataacacattgccgaaaaatcactacgaggaaaaaaaagattttgtgtccagtaggaatggagtacaggaagatccatgcatgccctaatgattgcatattgtatagaaataagtatgcaaaactacggcaatgccccacgtgtggggtatcacgatacaaagtgtagtctgacgaattaactgatgatgcaagaaccaaaaattgtcgtcctgcaaaggtttgctggtatcttccaatcataccaaggtttaagcgattgcttgctaatagacatgattcanaanacctttcatggcattcagtggacagaaaaagtgatggcttactacgacatcctaccgattcttcataatggaagacaattgattgtttgtatccagagttta

SEQ ID NO: 14020 - DNA, 370 bp, Glycine max
actaagcttcaatggtcaccgcttcattcttgtggcaatagattacttctatcaatgggtcgaagcggcttcttatactaacgtcacgagaagtgtggtggtcagattcataaagagggagctgatttgtcgatacggactccctaggaagatcattactaacaatggcaccaatctgaaaacaaaatgatgcaggaaatgtgcgaggatttcaagatccagcatcataactgcaccccttattggccaaagatgaatggggttgtataagctgcaaataataatattaagaagattgttcagaagatgacggtgtcatacaaagattggcatgagatgttgcctttcgccctgcacggatatagaacct

SEQ ID NO: 14021 - DNA, 415 bp, Glycine max
  unsure (1)..(415): unsure at all n locations
taagcttacttactcccatacttctaccatgtgtaaaagtgttgttttcttcattctgccacaccattctgatccggagaactatgcatagtgtactgggtaataatcccatgttcttgaagaaatgttgcaaatggacctggtgcttgtccatcctcggtgtatctaccatagtactctccacctctatctgatctcacgatcttaatttgttttccacattgtttctcaacttcagccttaaaaactttaaagacatctaaagcttcattcttataatgaaggaagtagagagacatatatcttgaatgatcgtctataaaggttatgaagtcattcagactatgtgcattcatgtctggacaacatatgtctgtatgtatgatntctaataaattagaacttctttttgcac

SEQ ID NO: 14022 - DNA, 371 bp, Glycine max
  unsure (1)..(371): unsure at all n locations
atgatgttantttatgggaagtgaaagatggacctcaaggttctctcattccatgattaatcttatattgttataacacttgctataaaatttgttaagatgttattgttgctgctattattattactaaatttgaatggattgatatgttgatatggaatgaacatcatgatgaacttctacaaatttgcatgaacttgtatgtatgcctatgaacaagatgaacataagaggaattaaaaatatctagccctttgatctttatgcgggatgtgactttagctactaatgctagtacttacttattttaattattattattataactataatgagaatatttatttgaagacaaaaatggtctttatata

SEQ ID NO: 14023 - DNA, 424 bp, Glycine max
  unsure (1)..(424): unsure at all n locations
agctntgcaactnnttgtccctggctcttttgtcaggattcaaactattcctatactggacgagtccaaccaaccaatcccaaacaaggtcatattccatcgacttttttggtcatttaaggcatgcattgatgtgtttgcattttgtaaacccattgtgcaaatcgatggaacatggctatatggaagatacaaaaggacattgttagttgcaattggacaagatggtgctaataacatatttccattggcatttgccattgtcgagggtgagatagcagatgggtagcactttttttttgcaaaacttgatagcacatatgacaccacaacatggtatatgcttaatctctgacaggcacgattcaatcaaaagtgcatacagatgacttgacagtgggtggacagcagacaactacatgtg

SEQ ID NO: 14024 - DNA, 409 bp, Glycine max
tgaaggagaactggatgccatggttaacttggtaacctagctggccttgaatcagaaatttgtatctgtcgcaagggtttgtggtttgtgctcctctgctgaccaccatacagacctttgcccttccatgcagcaacctggagcaattgagcagcctgaagcttatgctgcaaatatttacaatagacctcctcaacctcagcagcaaaatcaacctcagcagaacaattatgacctctgcagcaacacatacaaccctggatggaggaatcaccctaacctcagatggtccagccctcatcaacaacaacagcagcctgctccttccttccaaaatgctgctggcccaagcagaccatacattccttcaccaatccaacaacagcaacaaccccagaaacatccaaca

SEQ ID NO: 14025 - DNA, 400 bp, Glycine max
  unsure (1)..(400): unsure at all n locations
agcttaacaaaaggcatgcgatatgggttgttttcctagagcaattcccttatgttatcaaacataaaaagggaaaagggtatattgtagccgatgctctttctcggcgtcatgcattactttctatgcttgaaacaaaattgattggtcttgaatgtttgaaaagcatgtatgaaaatgatgaaacttttggagaaatatttaaaaattgtgaaaaattatcagaaaatggtttctttagacatgaaggctntcttttcaaagaaaacaaattgtgtgtgcctaaatgttctactagaaattttcttgtttgtgaagcacatgaaggaggtttaatggcgcattctggggtccataagactctataaacattacaagaacgattttattggcctcatat

SEQ ID NO: 14026 - DNA, 381 bp, Glycine max
tgatggaaaaggaggtgttagagaaagctggagtctatgtgttatgcccatcgttctggtaaatagaaatttatcttaacttataacgcgtttggtagggaagaatttgaaagcttggaagcaatgcctactccatgctgaattttcttataataaggtattaagctgtactacttattctccttttgaggtagtttacgggttctagtccactgccctttcttaatttgttaccttggcctaacacttctgctttgatgaatacgaatgggctttctaaagccaattttgtaaagaggttgcatgatatagggaaaacacaatttgagaataagaatgaacaatatgctggatattccaataaggcgagaaagacaatga

SEQ ID NO: 14027 - DNA, 252 bp, Glycine max
cggaagctctcttgataatctagtggtcataaattttcacacagatgtccgattcggggaaataatatatcgagacgcacgaaattgaacaacggaagctctcgagaaatttgaatggtcataacatttcactcggatgttcgatccggggacataatttatcgagacgctgcgaaatgaacaaccgaagctctctacaaattagaatgggcgtaacttctcacgcgaatgttccatttcgggacataactt

SEQ ID NO: 14028 - DNA, 336 bp, Glycine max
  unsure (1)..(336): unsure at all n locations
tctatggtctatngtcttctgcagatcaccatacagatctctgtccttctttgcagaaatctggagtcaatgagcaacctgaagcttatgctgcaaacatttataatagacctcctcagcagcaaaaccaacaatagcagaataattatgacctttcgagcaataaatacaatctaggttagaggaatcatccatatctaagatggacaagtcctccacaacaacaacaacatgtccctccgttccagaatgctgctggtccaagcaagccatatgttcctcctccaatacagcagcaacaacaacatctgtcacaacaaagacaacaagcaactg

SEQ ID NO: 14029 - DNA, 411 bp, Glycine max
  unsure (1)..(411): unsure at all n locations
cttgatatattttatggacttatgggcactatgaacgacaaattccttgggataaaggtagtgttgccatgttttcaaagcccatactaaggcatacaattgttcttctctaagcacagtcaagacagattttaaataatcaatatgcaaatcaagtgaagcgctatagataagaatatcataaaagtacaccacaacgaactttcctatgaactctctcaagatatggttcattagtctcatgaaagtgctatgagcgttagttaggccaaaatgcataaccaaccattcatacaaaccatattttgtttaaaagcagtttccattcatccncttctctaacctaattgattgatccacttttaaatcgatgtagagaagtacatgcatcatgaattcatcaagcaatca

SEQ ID NO: 14030 - DNA, 442 bp, Glycine max
  unsure (1)..(442): unsure at all n locations
actacgctgatctgaactgatctgatcctgaatcaatttcctgttgaaccttgaagtgttcttgattcaatcttgaactcattctttgattcttgagatcatcatctctgctatcatgaagtgttcttgacctttgagctntttttcatcacctttgttatcatcaaaacttctttgaatcaatcttgattcatcataaatcttgcttctacaagatggatactgttgcttcaagaatttgatttagtcatcaatgacaagaaaggttctgaaaatgtggtagcagaccacccatccatattggtgaatgaagatgtcacttcaaaagaggctgaaataagagataaatttcctgatgaatctttgtttttgatcgcaaggagaccctggttcactgatatggctaatttcaatgcggaaggtgtcataccaaaagatctaa

SEQ ID NO: 14031 - DNA, 408 bp, Glycine max
  unsure (1)..(408): unsure at all n locations
agctngctcgtcttgctgatnattatcatgtctacttttctgangatgaccgaggaacaattagggatcaacttgaaacttatgtgcttcaagtgagaagaaatgcttctttttccacttgtgaagatgttcaaagtttggctatgaagatggttcaaactgagaaacatttggtatttccattggtttataaacttattgagctagctttgatattgccggtgtcgacagcatccgttgaaagagctttttcagcaatgaagattatcaagtctaaattgcgcaataagatcaacgatgtgtggttcaatgacttgatggtatgttacaccgagcgggagatattcaagtcgcttgatgatattgatattattcgaacacttaccgcanagaagtctcggaaaggac

SEQ ID NO: 14032 - DNA, 412 bp, Glycine max
  unsure (1)..(412): unsure at all n locations
agcttcacanaagnntatatggcttgaattttgcaccgagggagnggtacaagaagtttaatgagtttatgagcaactcaggattcaaaagatgtgacatggaccattgctgctatngtaaaaaatatactaatagttatgttatccttgtcgtgtatgttgatgacatgttgattgcaggatctagtatggcagaaattaacaggttgaagcagcagttggcagaaaactttgaaatgaaggatcttggtccagctaaacaaatccttggtatgagaattcttagaaacagatcaaaaggaattttgaagttgtctcaggagaaatatatacacaagttgtttgacaagttttaccttgaagattctaagaccaggaatacccctttgggatcttatttgaaagtttcaag

SEQ ID NO: 14033 - DNA, 386 bp, Glycine max
  unsure (1)..(386): unsure at all n locations
taaattttgagaacaaaaaaaaacaatcaaaaataaaaattgttaccttaactccctcttcctctatttctaattatccaagttttttacttattcatgcatagttnttttactgaagtgtattattataagtatttatataactatttttttaattaaaattagagttttactgtggtaaagtgttcaatttttattgtctttattgtgcgagttactaagtgaaactctaattttagtttaaaaacattagaaaaaacatttaaggtactactcttacgttttataaaaaaataaatagaatagattntggcatatattatgaaatacaaaacaatacttagtcgataaattntaaatagacaaaaagtaatcaattcacctaa

SEQ ID NO: 14034 - DNA, 412 bp, Glycine max
  unsure (1)..(412): unsure at all n locations
gagtatgtaaaactcagatattgcactatgaacagtgttaaaattctgatgtcattctttctgaattatcagaatagtttatggtttgcaaattgcttgtaggaacaatgttttgaaggaccaaagatctaaaaccctcaaacaacagagagaggaaaaacggaaagctgatgaagctagtggagatactaaagcatggaatagtctgttcatgcgtcctgatacagtatgttcttgaaacttgataaatngcaaacccttattctagtatttcagtttttggtgaatagctgagtagtcaacagtaaattaaaattctgaattatgcttatcaatatcttaacttttcaaataaaataacaaccttttcttattagttntcagcttttccccaatatggtgcttgcccatg

SEQ ID NO: 14035 - DNA, 159 bp, Glycine max
taactcttcacactggtgtccgattcatgctcatcatgtatctggacactctaaattaaatcattctgaaactctcgagaaattcaaatggtcataacatttcacactgatttgcgattcgggggcataatacgtctagaggctcgaaattgaacaacg

SEQ ID NO: 14036 - DNA, 429 bp, Glycine max
  unsure (1)..(429): unsure at all n locations
aaacataagagatgagttcaattgtatatttgaattgtttgtgaaatttttttgacaagtcaaaactttgtctaagacagaagaaatgaacttttaaaaagattcatcctaaggtgaatatataaataattgggtctagctgggaggaacacaatttataaaatacttaagcaaaaatctttttgataacttacaaactgtacaattaaatctctcttttaattagggttaagtttaagacgattcaaccttatgttaatgataacaacaaagaaaaataataaaaataaaacacaattagccaacattatgtattcaaattgaattgattcttaaaataccccacatgtttatttttaaatntaccaatatcgcttaccgtacaatactatatcaatgtatgtatgaaacaaccatgtnanaatcaca

SEQ ID NO: 14037 - DNA, 392 bp, Glycine max
  unsure (1)..(392): unsure at all n locations
ttaagtcatcagagtcacctcccctatgccaacaatcttgcttgtgacaaggttgcccgtcttcactgtaccaaaatcccctttntgatatgacgagaaaaatccttcataagtagtaacatggaaggatgctctagattcaattatccatgtaaaataattagatgcaatatttaaataatattcattaccaataagaaaaacattctcatcgcctgatgtcacaacagtagtggttctaccttcattcttcttcttttggtcaatttgattagcatggacagttctagtcttctaacctctcttcaagaatctgcactcaaactttntatggcttgaatttccacagtagtagcaactcaagcctttggggtgagacttggatctttctc

SEQ ID NO: 14038 - DNA, 431 bp, Glycine max
  unsure (1)..(431): unsure at all n locations
accgggacatgtggatcgtgtgggtngatggatcatcaaacgttctagggcatggcattggagcagtattggtctctctagacaatcaatgtatacctttcatatccgggctggggtttgactgcaccaacaatatggttgagtatgaagcgtgcgccctggccatccaggcggcaattgactccaatgtcaagctactcatggtgtacggtgactcagcactggtgatccaccagctgagaggggaatgggaaactatagaccccatgttgataccctaccaagcctatatcaatgaaatggctggttcctttgatgagatcttcttgcatcactgttcccgagaggaaaataaaatggctgatgcgctcgccactttggcgtccatgttccaactaacaccgcacgacgacctaccgtacattgagttc

SEQ ID NO: 14039 - DNA, 318 bp, Glycine max
actgaatcagacatcagagtaaaaagttattgtcgtttgaattatctcagagcttcggtattccagtccgagcgtctcgatatattacggcgctcaatcagacaaccgagtaaaaaagttattgtcgtttgaatttgctcaaggcttcggaaatcaatttcgagcgtctcaatatattacggtactcagtcagacaaccgagtaacaatttattgtagtttgaagttgctcagagcttcggcattcaagtcctagcgtctcgatatactacgggactcaatcagacatccgagcaaaaagttattgtcgtttgaattt

SEQ ID NO: 14040 - DNA, 318 bp, Glycine max
ctatatgagacatcttgtctaacaaatgcacgttaacgagaactcgcctgtgctttttcttccatgctataggtatcaaagtcattgatccaatcatgtttgatgatcgggaaaatgaggcctgtaatatactgtgccacgtggagatgtagtttccccctgctttctttgacatcatgactgacttgagggtgcatctggtcagataaatcatatgttgtgggcctgtatatctacgggggatgtactcggttgagcgatacatgaagatcttaacatggtatacagagaatttataatgcacacaaacacccattg

SEQ ID NO: 14041 - DNA, 394 bp, Glycine max
  unsure (1)..(394): unsure at all n locations
acacttcttatgttggttagagctcggagaaagcctcaccttatgaccgaaagtggtacaacaaaccaccgagaaagtttatttaatccaggaaaggtgaggactgctcaaagtangcaaaaaatttatcatgataagaggaggaaagatctggaattcgaggttagtgatcatgtattcttgagagtcactccatggactggggttggtcaagcattgaaatcccgaaaactcacctcgctttattggtcctttccaaattcttaagagagttggccctatggcatacgaaattgcattacccccatctctttctaatcttcacaatgtctttcatgtgtttcaacttcctaagtatatttatgatccatcccatgtgattgaatnggatgat

SEQ ID NO: 14042 - DNA, 446 bp, Glycine max
  unsure (1)..(446): unsure at all n locations
tcttactcccttgacattcactgaaggaggtagcttgtcaatcacatcaatcttagctntgtctactacaatccccctcacagagattatgtggcccaatacaattccttcttgaaccataaaatgacatttttcccaattaagcactatgttggtctcttcacatcgttgcaagactcgctctaaatttgctagacagcaatcaaaagatgagccgaaaacatagaagtcattcgtaaacacttcaatgcacttctccaccatgtcagcaaatattgccatcattcatcgctgaaaattcttatgagcattgcaaagatcgaagggcgttcttctataagcaaacacaccaaaagggcaggtgaattctgtcttttcttggtcatttggatccatagcaatctgattgtaaccagagtatccattcaagaaacagtgaaatgatt

SEQ ID NO: 14043 - DNA, 353 bp, Glycine max
agcttataatatatcgaggcgctcgaaatgtttactttagctcttgagaaattcaaatggtcataacttttaactcggatgtccaattcatgcgcatcacatatagagacgctaaaaaatgaacaacggaagctcttcaaaagataaaatggtcttaagttttcacactgaggtccgattcaggcttataatatatcggggcgctcgaaattgaacaacggaagctctcgagaaattcaaatagtcataacgtttaactcggatgtccgattcatgcgcatcacatatagagacgctcaaaaatgaacaacagaagctctcgagaaattaaaatggtcaaaacttttgacact

SEQ ID NO: 14044 - DNA, 362 bp, Glycine max
  unsure (1)..(362): unsure at all n locations
gagccaattcaaacgacaataacaatttactcggatttctgattgagtcccgtaaaatatcaaaacgctcaaaattgaatgttgaagctctgagcaaattcaaatgacaatcacttttttactcggatgtctgatggagtcctataatatatcgagaggctggaaatggaataccgaaggtttgagcaaattcaaacgacaatattgttttactcggatgtctaattgactcccggaatatgtggagacgctcgatatggaataccgaatctctgagcaaattcgaacgacaataaattnttactcggatgtctgatncagtcctgtaatatatcgaaacgctcgatattgaatgttgaagc

SEQ ID NO: 14045 - DNA, 398 bp, Glycine max
agcttgctgtaggccataaatcgccttgttatgtctgcaaacttgttgcttgttggaagacacaaaaccagggggttgaatcatgtaaacctcttcctcaagaacaccattgaggaaggcattattaacatctagtttctgaagaggccagttgtgagacagcaagagaaagaataagtctgatcgtgacaggtttgattacaggggaaaaggtctccttataatcaaaccccaattgctgatggaagtctttggcaacaagcctggctttgtacttattaacagacccatctggattttccttgaccctaaaaacccatttgcacccaattgttgttctggaagcaggaagatcaaccaaggtccaagtgtcatttctcatgagtgcatcatactca

SEQ ID NO: 14046 - DNA, 441 bp, Glycine max
agcttatgctgcaaacatttataatagacttcttcagcagcaaaaccaacaacagaagaataattatgacctttcaagcaatagatacaatccaggttggaagaatcatccaaatctgagatggacaagtcctccacaacaacaacagcttgtccatccttttcagaatgttgttggtccaagcaagccatatgttcctcctccaatacagcagcaacaacagcagtagtcacaacaaagacaacaagcagttgaggctcctcctcaaccttccttagaagagttagtgaggcaaatgatcatccaggatatgcaatttcagcaagagacaagagcctccattcaaagtatgacaaatcagatagggcagtggctactcagatgaaccaagctcagtcccaaaattctgaccaattgcttcacaactgtgcagaatcaaaa

SEQ ID NO: 14047 - DNA, 391 bp, Glycine max
agcttagtggcttagtgaagatgatatttaaaagtgactcaacaggttgaggtgtgtctcaccattgggagatataatgacaaggtgctgtgtgatgtggtcccaatggaagcgacccatgtgctgttaggaagatcgtggcagtatgataccaaggcagtgcatgatggcttcaccaacaacatctctttcaagcaagctgacaagaagattgttctcaaaccgttatctcctcaagaggtttgtgaggatcagataaaaatgagagaaaagaaaaagagtgagacactcgagaggaaaaagagtgagacacttgagaacgaaaagtgaggaaagaataagagtgaaacactcgagagggaaaagagagaaaacaaaaagagtgaaacac

SEQ ID NO: 14048 - DNA, 222 bp, Glycine max
  unsure (1)..(222): unsure at all n locations
agcttctgttgttcaattntgagtgtctcgttatattatgcgcctgaatcgaacatccgagtgaaaagttatgagcatctgaatttcttgagagcttacgttgttcaatttcgagcggctccacatgtgatgatcctgaatcggaccaccgtgtgtatagttatgaccatttgaatttcacgagagcttgtgttgtcaatttcgacggtcttaatatgtgat

SEQ ID NO: 14049 - DNA, 436 bp, Glycine max
  unsure (1)..(436): unsure at all n locations
agcttgngcccattctgattcttcttatttctactcaactaggattctcaaagaaggagcctccaactcaaacgggagcacaaccttcatcccatacaccaaagagaaaggggttgccccaatagatgtgcacacagaagttcgataaccatgcaatacaaaggggagcatctcgtgccaatccttgtatgacacggtcatctcctaaactatcttctcgatatttttattggcaacctcaattgccctattcatctttggccgataaggcatggaattatggtgttggaatttgaaatccttacatatttccttcatcatcttggtgttcagattagtggtagtatcggtgattattttcctaggcaacctatatcngcaaattatctctttcttgatgaatctaatcactacattcttaggcacactagcatat

SEQ ID NO: 14050 - DNA, 359 bp, Glycine max
agcttgtaatcgattacacacttacttgtatctaataacagaggagattttcagaagatattctcaacaatcacagcttttcatatggttcttgaatggccatcaaaggcctatatatatgtgacttgagacatgaatctgctaagagtttttcaaaacaacaagtgtttattctctcaaaaagcaaaatccgtttatcctcttaagaactccttggccaattcaattgcaattcattaaggaatcatttgagtgctcagattgtaaaatctatctctttcaagagagagtcattcttcttctctttctaattcactaagggattaagagaccgagggtctcttgttgataagaattct

SEQ ID NO: 14051 - DNA, 387 bp, Glycine max
taaatatgagcagatgttatcagaccttacaaagaatctcctgctatgaaaagttgtcgcatgtaagttgatgctaattcctttttctgctactaacagataagttacttattgtgaattatgttttctttaatacctttctattaatgatatttggatacaactacagacatgtacacagtggaatatcaaaaacgaggacttcctcatgtccatttatttttatttttacatgccaacaacaaatatgcatctccaaacgatattgatcatattatatcagcagaaataccttgacagaaagatgatccagaactctataaattagtgcaaaatcacatggttcatggtccatgtggaattttgaggcccgcatctctatgcatg

SEQ ID NO: 14052 - DNA, 245 bp, Glycine max
tttcaatttcgagcgccacgatatagtacgggacacaatcggacatccgagtaaaaaggtatagttttttgaatttcctcagagcatcagttttcaatttcgagtgtctccatatattacaggactcaatcagacatccgagttaaaagttattgtcgtttgaatatgctacgagcttctgttttcaattgcgagcgtctagatatactaagggacacaatcgttcattcgagaaaaaagtgaat

SEQ ID NO: 14053 - DNA, 396 bp, Glycine max
  unsure (1)..(396): unsure at all n locations
agctntcattcctatttcttttctcacttctgcattcataattaaaacaaagtactagtgttacattacacacaaatatactttgtttcagtttcttctttaaatgaaatattaattatgcttgaagaatcttttaaaattccaatttcctcaatttgattatctttatatctcatggaagatttttaataacaagttaatacataatgtaattaaagttttcaattgattaattttttttttaaatgacatccataataaacaattactatatatacaaaagaaaacaaaaatcgttaaaacacatacttaaacaacaataatcataactagtatggatgtatgattntctaaatgttaacacaaatctatgttgtaattcaattntacatcatg

SEQ ID NO: 14054 - DNA, 318 bp, Glycine max
  unsure (1)..(318): unsure at all n locations
agcttctccataatttccacatgtctcacttacaggtacaagggaagtattctccaaattaaaaaccctatattacgctagcccttcactcttccctcactctaggtactcttcttcgtggtatccaaagcccagaaacaccccttcataatattgtcaatgtaggtgaaatcccttgccacagttcccccatcaagagactngaatatcggaatatgcttccccttgagaatgtccttcgtgggtaatggggacaacgccaaagagcatgcaaaggagggcaacatcattgaggttggtgtcaacgacaaagatgct

SEQ ID NO: 14055 - DNA, 397 bp, Glycine max
  unsure (1)..(397): unsure at all n locations
cccaccattttgtcatagaaaacactggttatgtgtctactattattgtgatcatctctttctccgtcattgtaggtgccacttgagctgctagatccctccacctctggacatattgcttgaaggattcatgctctttttcacacatgttctatagttgcatgctatccgaagccatatcaaaattgtactgatactgcttaacgaaggcaaccattatgtcccttcaagaatggactcgggaaggttccaagttagcgtaccatggaacagctaccccagtaagactttcttggaagaaatgtatcagtagttcctcatcttttgcgtatgcccccatcttccgacaatacatctntagatggtccttggtgcaagtagtccacttgtacttgtc

SEQ ID NO: 14056 - DNA, 364 bp, Glycine max
atccttaagcgacctgcggctgcagcttgagcaatgaaatgacatatcttatatcacggatgtccggttgagtcccgtaagatatcgagacgctcaaaatttagatccgaagctctgagaaaattgaattgacaataactttatacacggatgtccggttgagtcctgtaatatatcgagacgctgcaaattgaaaacggaagctcgtaggaaattcaaacgacaataactctttactcggatgttcgattgaatcgggtaatatatcaagacgatcaaaattgagactagaagctttgagcaaattgaaatgacaataactttatacacggatgtccgcgtgagtcccgtgatatatcgagac

SEQ ID NO: 14057 - DNA, 457 bp, Glycine max
  unsure (1)..(457): unsure at all n locations
cagcttaagaataatggtctcaacaaactgcttatttctatattgaaattcaatcaatagacctccaatctttaatggagagggttaccactactggaaaacccgaatgcaaagttttattgaggcaatagacttaaacatttgggaagccatagaaataaggccttatatacccaccacagtagaaagaaccacaatagatggaagcacaacaagtggaagcacaataatagaaaaacctagagatagatggtctgaagagtatataagacgagtaaaatataatttaaaagccaaaaacataattacatctgccctacgaatggatgaatatttcacggtttcaaattgtaagagtgctaatgaagtgtgggacactctacatgtaacacatgaatggcacatagatgttanaagatctatgataaacacattaactcatgaaatatgaactatt

SEQ ID NO: 14058 - DNA, 422 bp, Glycine max
  unsure (1)..(422): unsure at all n locations
agcttaagaaaaagatggcctcagtattcttcttatttccagaagggaattctatcaatagacctccaatctttaatggagagggttaccattactggaaaacccgaatgcaaatttttattgaggcaatagatctaaatatttgggaagccatataaatagggccttatatacccaccacagtggaaagagtttcaatagatggtaggtcatcaagtgaaagaataactatagaanaacctacagatagatggtctgaagaggatagaaaacgagtacaatacaacttaacagccaaaaatataataacatctgccctgcgaatggatgaatatttcagggtttcaaattgtaagagtgctaaggaaatgtggaacactcttcgattaacacatgaaggaactacggatggtaaaagatct

SEQ ID NO: 14059 - DNA, 332 bp, Glycine max
atttattatgaaaacattcaagttcaaagagacttggaactcatggcttttttacctgtttccccacctagcatgcgactctagaattatgctttcttcttgcggtgttattggaccctgcgtgtggtctggcctcaagtaattcacccatcttaatctgcagctcttcccatttcgtttagtggtgtggagagaataataattgatcaatcatttggacaaaaaaagagatgataaaaacgatgatgaagaatgatactcatgagtcaagagttaagaataatataaaacatgatctccaaaggctaaatgaaaaacttatgtgtaagggt

SEQ ID NO: 14060 - DNA, 326 bp, Glycine max
gaaggtcttaaattttgatgagactctatcaggggaaaagagaaagttgcaactcttggagctgatagagatgaggttgaatacttatgagtcttcaagattgtacaaagaaaaagtgaaggcttgtcatgacaagaagctgataaagaaagaatttaggctcaaccaacaagttctgctatttaactcaagagtgaagctatttccaggcaaggtaaagtctaaatgggctggaccattcaccatcaatgatgtcaagccttatggagcagctggaattattgacccttagtcagaaactttgaatataatatggatagtgaatg

SEQ ID NO: 14061 - DNA, 180 bp, Glycine max
  unsure (1)..(180): unsure at all n locations
tgatgctcagaaacagcaatatccaccactccttcagttggtctgcccangtatttgntgattacagcangggagaatctaacacattttcctctgacnaacactttctgatactcatcactctttcntgttgtatgtcagagggaatgtngacaatgaattccctgactagacttttat

SEQ ID NO: 14062 - DNA, 245 bp, Glycine max
  unsure (1)..(245): unsure at all n locations
gtaaattcgagcctctcgacatattatgcgcncgaatcggacatacgtgtgagaattcatgatcatttgaatntctcgagagnttccgatgtntaatntcgagcgtattgatatattataaccctgaatcggacctcagtgtgacaagttatgaccattttgaattgacgagagcttctcgtgttcaatntcgaatatcactatatgtgatgcgcctaaattggacattcgagttaaatgttatg

SEQ ID NO: 14063 - DNA, 252 bp, Glycine max
  unsure (1)..(252): unsure at all n locations
gcgtgtatatgagttatgtccccgaatcggacatctgtgttgaaagttatgaccattcgaatttctcgagagcttccgttgttcaacttcgagcgtctcgatatattatgaccccgaatcggacatctgtgtgaaactgatgaccattctattntctcgagagcttccgttgatcattccgagcgtctagatgagttatgtccccgaatcggacattcgagtgaacacttatgaccattctaatttctcgag

SEQ ID NO: 14064 - DNA, 477 bp, Glycine max
tggtgaagtaacccggcttctggtgtggcaagtataggttttgcttacaaatagtgtagttgcaaacaaaatctttagtgtcaaagtacatgtgttggatcgagtggcctcagaataattaagaacgaggggtttaattaattattcctaagcctttactaattaaaaatttactcttctaacgcttttactatgttgttaagagaataaggagtagaagagaaacttaaccaaaagtaaaagcggaaattaaaatgcacagcggaaagtaaaagagtacggaagaaggagacaaacatacaagagtttttatactggttcggcaacaactcgtgcctacatccagtccccaagcgacctgcggtccttgagatttctttcaaccttgtaaaaatccttgtacaagcaaagatccacaacggatgtaccctcccttgttctctgtgaacctactggatgtaccctccactagaactg

SEQ ID NO: 14065 - DNA, 452 bp, Glycine max
  unsure (1)..(452): unsure at all n locations
ntgattgtgaatgagttgttcacaatgctagcttntttcttctgtacatcctaataatgaatcaacaataaatggttgctgaatgaacaatagatggttaattaattaactagcactgcacaaaaaaaatgaaattttgttaagatctcattgatcagaaccaagcaacccactttcctcatcatcatttttattttcccgctctgttgttttctgagctagctccactgccctcttacattgctgctcccaatctgtttgaatcaatgtgtaaaccatcatacaaagacatgaagcctgtgcagccaccattccagaccacaaacccaccaattcatatttatatatgaatgtagcaaaaacagaaactggctatccaactagataaaatgcacatcaagttattctggcacccaaataatgcctagcagtgcctgactaaatcccacatg

SEQ ID NO: 14066 - DNA, 392 bp, Glycine max
tgtttcagtccatttagagatagtgctaaccttgacgctagatcggtgcacgggttgtgccaaatgtaccatatgctcagaaattattttgcacacccgatagaactcctaggtgacgtgggtcatgtggaatgtcgtttcagtctgtttgggggcgtgctattgtcactgcaagataggtgcacagattactccaaacgtaccataggctcataaatcattgtgatcgcacccgatggtactcctacgagacaacgcccaagtgcaagcacgtgtcaatctgattggagatagtgcttatcttgacacaagaatggagcacggttcgtgataaatgtactatatgctctacaatcattttggatgccctctattgaactaatcactgacct

SEQ ID NO: 14067 - DNA, 424 bp, Glycine max
  unsure (1)..(424): unsure at all n locations
aggacttcctgtgtttgngaacctctccttcctcaggtgtacccaaacccaatcacctggttcaagcacgactttctttctgcttttgtaggcttgccttgcatagctatcattattcttgtcaatttgaaccatcacttgctcatgcaacttcttgacatactcagctttagcctgtgcatncttatgcttatgcattgcantgttaagcatttgcaacaaatctagatgagtcaaaggattaaatccatacactatcttaaatggcgaacaattagtagtgctatggacagcccgattataagcaaactcatcatgaggcagacaggcttcccaagatttaagatttttctgtaaaacagtcctaagcagtgtgcctaaagtgctattgactacctcagtttgaccatcaattcgtgggtga

SEQ ID NO: 14068 - DNA, 466 bp, Glycine max
  unsure (1)..(466): unsure at all n locations
tcttgaagttgttttctttntgagacttcttcagaagatagttgtctatggcttgtgtcttcctctagtttatttatttcagcctccaccttcttaacccttttgagagtatctccaaactgttcctgattccagatcttcaaccttctttttagtctcttaatcttttctttcaagacatacccaccccagcctggttgctgatgcgaattccagctttggtacacaatctccttaaaggatttatctgataaccagcaatcaagtatcctaaaaggcttaagaccccaatctgttaccttggaacgaagaaggattggacagtggtctgaaaagtttcttgccaaagtagattgatagctgccaggccatctttcaatccactcatgagagaccaagaacctgtcaatcctgctcctagactccccatttggtctataccacgtgtagtttctaccaatccatg

SEQ ID NO: 14069 - DNA, 457 bp, Glycine max
tcacaacaattacttttaaagaattctttaatttctaaaattaatctccaccaaatatgtactaaatggaaaaataagaagaaaaataaaactaagctcaactattatgtgatactaaaagtaagtaataaacttatctataaacacatattaatatgtagttaggttctttggacaaacttccttataaatacttattaaaaaaagtaaaggtaaaatgtattgtgtttctttaagtaagcttaaaattaacttattaatttttggagaatttatgaaaagaaattctataaacgttaattatataagtttttgtaaagtaaatgtataagttaattctagtttataaaaaactgaatacattcttactttcttatctattatcctactataggtatttctagaagaatttatctatataagaccttaataccacaataaatattaatcaatgata

SEQ ID NO: 14070 - DNA, 447 bp, Glycine max
ctaaatcgaagaacaatctcataattattcccataaaactaaaacttaaaaaaaaattagatatggcctgtgcttatgaataaattataaggtgatataaatttgttgtatatacatgaaaatatgataacaatttttccattttttctactaattcatattttaaatctattaacttcatcttaaattatattataaattggacatttttacaatatttgtctttaaatttatattgaaaagacaaattgctataaagtacttaatttaccgtttgtaattacccttaactaaactaataaaaatataaacttatcttttcaatagaactttttaaaattgtatatttatattaaatatttatgttatattatatatttattattataatctaaatatgcatgaaggaaggcaataatattatcttaattaatatctttattgcgt

SEQ ID NO: 14071 - DNA, 467 bp, Glycine max
  unsure (1)..(467): unsure at all n locations
tgtaatcgattacacacatactgtaatcgattaccataatagattttcagaaaatattctcaattgtcacatcttttcatttggctcttgaatggctatcaaaggcctatatatatgtgacttgagacacgaatttgctaagagtttttcagaacaaaaaggtcttatcctcttaaaaagcaaaatcgttttatcctcttacaaattccttggccaaaacacttgtgattcaataaggaattatttgagtgctcaaattgttcaatctatctctntcaagagagatatcttcttcacttcttctttattctgaaaagggattaagagaagggattaagagaccgagggtctcttgttgtgaaagaattctaaacacaaacgaaggattgttgctgtgtgtttagaacttgtaaaaggaatttacaagatagtggaactctcaagcgggttgctcgtggactggacgt

SEQ ID NO: 14072 - DNA, 467 bp, Glycine max
  unsure (1)..(467): unsure at all n locations
actaagcttaacatcagaccacttccgggtgctggaactacttcacatggacttgatggggcctatgcaagttgaaagccttggaggaaagaggtatgcctatgttgttgtggatgatttctccagatttacctgcgtcaactttatcagagagaaatcagacacctttgaagtattcaaggagttgagtctaagacttcaaagagaaaaagactgtgtcatctagagaatcacgagtgaccatggcagagagtttgaaaacagcacgtttactgaattctgcacatctgaaggcatcactcatgagttctctgctgccattacaccacaacaaaatgacatagctgaaaggaaaaacacgactntgctagaagctgctatggttatgcttcatgccatagaacttgcttataatctctgggctgaagccatgaacacagcatgctacatacacatcagagtgacac

SEQ ID NO: 14073 - DNA, 387 bp, Glycine max
gacacttaaaactcagcttaacattcaacttcgagcgtctcgattatgacgagtctcaatcttacattcgagaaaaaagttattgtcatttgaatttgctcagaggttcaacattcaatttcgagcgtctcgttatattacaggactcaatctgacattcgagtaaaaagttattgtcgtttgaattagctcagagcttccacattcaattttgagcgtctcgatatattacgggcctcaatcagactttcgagtaaaaagttattgtcgtttggattggctcacagattcatacattcaatttcgagcgtctcgctctatgacaggactctatccgacatccgcgtccaaagttatcgtcgtttgaattggatcatagcttcaaca

SEQ ID NO: 14074 - DNA, 423 bp, Glycine max
actcatctgctttgcttcttcacaaacaaatattcggaaattttcggatcatataagatatgaatgcgcaatttatgtcaggaacatacctgtggaagtggttgagcagccattacatcaagccagaaatctcttcgcatgtacatcgatgcaattcttgaagagtctatgattagctctcctctaccagaaacacgagaggaaggagcaatatatgcagtttgaaaccgaaaataaatctgaataatgtaaaatgcatcaatcaatgaccggattatggtgaggaacacttcaagaccagttgacatatcaatgcacttgtctttcttagccctgggagtaaaagaataggggatgcacatataacgaaagctaacaagctgcttagaagattatgttccatgtatttactctatgtgccct

SEQ ID NO: 14075 - DNA, 412 bp, Glycine max
  unsure (1)..(412): unsure at all n locations
tgtaggcctaggatcttctntatcaatggatttctttgcttcttggaagatgaatggcaacggaataaagaaggaagagagagaggagacgccacttcaaggagaagatgagtctagaataagctcaccaccataggaggccatggataagagcttggaggaagaaggagatgaatgaagagagaggaagagaagatcatgaaattttgtgctctaaaagagctctgaaatctcaagtttaattttcaaatgatcaaagttggaaaaatgcacacacatagcctctatttatagcctaagtgtcacacaaaattggagggaaatttgaatntctattcaaatttcacttgaatgtgaaattcaatttgtggagtccaattttggagccaaaatttcactaattatgattagt

SEQ ID NO: 14076 - DNA, 442 bp, Glycine max
agccttgccccttgatatatctgaaggactcatgagacactatgaatgactaaatccttgggatacaggtagtgttgacatgttttcaaagcccgtactaatgcatacaactccttatcataagttgaatattataaggtaggaccacttaactatacactaaaattagcaattggatggccttcatgtatgaacacagccccaatgccaacattagaagcatcacactcaatttcaaaagatttttgaaagtttggcaacgcaagtatggcggcattaaatagcttttgcttaagaacatcgaaagcattatcttgtttctctacccattataaaccaacatctctcttgagcacttcattgacaggtgctgccaatgtgctaaaatccgactataacaacttgctaagccatgaaaactactcacctcggacacacactt

SEQ ID NO: 14077 - DNA, 478 bp, Glycine max
tacggacactatgaaactaagctatgctgctatattacaatagacctcctcaacctcatcagcaaaatcaaccacagcagaacaattatgacctctccagcaacagatacaaccctggatggaggatcaccctaatcttagatggtctagcccttagcaacaacaacagcagcctgctccttccttccaaaatgctgctggcctaagcagaccatgcattcctccaccaatccaacaacagcaacaacctcaaaaacaaccaacagttgaggctcctccacaaccttccctcgaagaacttgtgaggcaaatgactatgcagaacatgcagtttcaacaagagaccagagcctccattcagagcttaaccaatcagatgggacagttggctacacaattgaatcaacaacagtcccagaattctgacaagctgccttcccaagctatccaaaatcccaaaaatgtcagtgccatttca

SEQ ID NO: 14078 - DNA, 446 bp, Glycine max
  unsure (1)..(446): unsure at all n locations
ngaatacaatagaaattgctaacttaacagagctaagattcactcaattcactcaagtttcgtttgtccaataaaactgacaacattacaacactttgtttgttttgtcttaagttattctttgtgattcaacaacattaacacaaacatcttcaaactttatatagactttagagctttgatctgttgagagataaactatatatactttgtccaatataacttgggcatttctttgtgaaacattttaaaactccacttgactcacataaatgctttaagaagttggtttatcatgatgcaatcctaccccgcaagggcattggatagaagactccaagtagattgggccagagatccaagggaaggtcctatggttctcatgagccttanggtagatttcaagctcatgggctaagtatgagctcgcttatctttgtaaatat

SEQ ID NO: 14079 - DNA, 460 bp, Glycine max
  unsure (1)..(460): unsure at all n locations
taactactcagatatgggaactgatggaatgaagattcgcttcttttccttcgctgtcttggacttatgaaaatatttctttaggaactnttccacaacttcatcccaagtccttaagctattacctccgaatgaatgcaaccacctcttggcttctctagatagtgaaaaatgaaaataagctgagcctagtatcatcttctggcacaccaacaattctcgcagtgttgcatatttcaatgtatgttgctaggttcacgtaaggatattcatttggcaatccatgaaacaaattgccttgtattagctgaaccaaagaatgtggataggtgatattttgagcctgaacctctggccgcacaatactggtgaaaaattgtggcacacatgtactcgagtagtctttaagggttactcttctggngtgctcttcanccattatgtcagctacgggcactat

SEQ ID NO: 14080 - DNA, 335 bp, Glycine max
atgcatcagacaaagatgatggcaaatccatttcaggatatgttttcactttacatggtggtgcagtcagttggaaaagttccaaccaagctacggtagctgattctactactgaagcagaatatatagcggcaagcgaagccgctaaagaagttgtttggattaaaaagttcatatttgaacttggcgtggttccttcaataaaagagtcggtcccattattgtgcgacaataatggggctattgctcaagcaaaggaaccaagatcacaccagaagtccaaacatattttgcgaaggtgtcacttgattagagataatagaacgtggcgatgt

SEQ ID NO: 14081 - DNA, 423 bp, Glycine max
  unsure (1)..(423): unsure at all n locations
actctgttggaagatcattatttgctgttacttctactataggatcttcattgcttccttctccttttcctttagaatcttgcccatgaatgtgcattngttctaaagattctgcaatatcatctaaaatatcctttcttggagaaataacattagactcatcaaaagaaacatgaatagattcttcaatagtcatagttctcttattatatattctataagctttactatgcacggaataaccaaggaaaattccttcatctgacttagcatcaaactttcctaagttttcttttccattatttaatacaaaacatttgcaaccaaaaacatgaaggtgtgaaatgttgggttttctaccattaaacagctcatatgcgagtttctttataatgggtcttattaaagccctgttcatgatat

SEQ ID NO: 14082 - DNA, 401 bp, Glycine max
caattacaagcgtctagatatattacgggacttaatcgtacatcccagtaaaaagttattgttgtttgaatttgctcagagcatctgttttcaatttcgagcatctcgatatattacgggactcgatccgacatccgagataaaagttattgtcgttggaatttgcccagagcttcaattatcaatctcgagcgtctcgaaatattggagcactcaatcggacatcttagttaaaagttattgtcgttcgaatatgctacgagcttctattttaaattacaagcgtctcgatatactacgggacataatccgacatctgagtaagaagttattgccgtgcgaatttgctacgagcttctggtttcaattacgagagcctcgatttactacgggacacaatc

SEQ ID NO: 14083 - DNA, 480 bp, Glycine max
  unsure (1)..(480): unsure at all n locations
actaagcttacaccacattctactcttcaatcctcaacatcgacatgttgtggtctctgctcccgcaagaagtgaaggcctccaaggagaacaaggcatcgttcacacagtttgggtactttaaggttctcaaaaaaggtgttttgctgtagaactagtccgttgttgtcaaggccaagcttattatccaagatcgctaagaagaagatcaaggaggctggcagcgtcgttgttctcaatgcttgaatttgatggtgtcgcttttttgaatgatttaggttttttttattttgttccaatatgtctccttttggatgacattgttgttgttcaatctatgctatatttcatgatttaatttacgggtttattattttaatttatgcattttagaattttgcttatttatgttgaatntaatcacgtntaactatgatagcttgatgatgttaaaatctatcgaaattgttaaaattgtgc

SEQ ID NO: 14084 - DNA, 465 bp, Glycine max
  unsure (1)..(465): unsure at all n locations
tcaagaaaaagatggcctcagcaaattccttatttccataaaggaattctatcaatagacctccaatctttaatggagagggttaccactactggaaaacccgaatgcaaatttttatcgaggcaatagatctaaatatctgggaagccattgaaataggtccttatatacccaccacagtagaaagagtttcaatagatggtagttcatctagtgaaagcataaccatagaaaaacctanagatagatggtctgaagaggatagaaaacgagtacaatacaacctaaaagccaaaaacataataacatctgccctaggaatggatgaatatttcagagtgtcaaattgtaagagtgctaaggaaatgtgggacactcttcgattaacacatgaaggaactacagatgttaaaagatctacgataaatgcactaactcatgagtatgaagtatttagaatgaata

SEQ ID NO: 14085 - DNA, 401 bp, Glycine max
  unsure (1)..(401): unsure at all n locations
ntgaccataatcgcagggacaataactgttactcagatgtacgaatgaatcccgcaatatattgagacactcgtaattgagaacggaagctcgtagcatattcaaatgacaataacttttaactcggatgttcgattgagtcttgtaatatatcgagacgctcgaaattgaaaacggaagctctgagcaaattctaacgagaataacttttactccgatgttcgaataagtctccgtgatatattgagaggctcgtaaatgaaaacggaacctcgtagcaaattctaaagacaattactttttacttgaatgcgatggtggcccgtaatatatcgtgacactctacattttaaatggaagcttcttgcatatgctaaccacaatgacattttactctgatg

SEQ ID NO: 14086 - DNA, 407 bp, Glycine max
  unsure (1)..(407): unsure at all n locations
tctggtgtggacatctgacttgctttccaatctgacattctccacagattctgccctcttctattntcagattgggaatgcctctaacagcacctttgtcaatgattttcttcatgcctcttaagtgcagatgtccaaatctttgatgccatattttgacttcatcttctttggagaatagacatgtggaggagtagctggtttcttgaggtgtccataggtaacagatgtcctttgatctgctgcccttcattagaacttcactcttctcatttgtcaccaagcattctgactttgtgaagtttacattgaatccttcatcacacaactgactgatgctgatcacggttgcagtcagtcccttcaccagcagtactttgttcagactaagaagtccatcatgaact

SEQ ID NO: 14087 - DNA, 387 bp, Glycine max
tctaacgataataactttgtactcggatgttctattgagtctcgccatatatcgacacgctcgaaattgaatgttgaagctctaagcctattctaatctactataacgctttactcggatgtccgatacagtgacgtcatatatctgagaccgtcgaaatggatagctgaacctatgtgccaatctaatcgacaattactttttactcggatgtctgattgagtcccatcatatatcgagacgctcaaaactgaatgttgaccctctgagcctattcatacgacaataacttctttctcgtgaatctgattgagacctgcatatatcgagacgctcgaaatgaatggtgaacttttggcctatggaacgacaataactttgatctga

SEQ ID NO: 14088 - DNA, 240 bp, Glycine max
  unsure (1)..(240): unsure at all n locations
tccgaagctctgagcagattcaaacgacaatcactntntactcagatgtctgactgagtaccgtaatatgtcgagacgctcaanatngaatactgaagctctgagcaaattcaaacgacaataacttgtcacttagatgtctgattcagtcccgtaatatatcgagatgctcgaaattgaagaccgaagctctaagcagattcaaacaacaataacattttactcggatgtctgattgag

SEQ ID NO: 14089 - DNA, 239 bp, Glycine max
  unsure (1)..(239): unsure at all n locations
gagactatcgtgatgaattgttatgtgatataatccctatggaagcagggcacattntgatgggtatatgatgtagctccatgtggagcttgtaggccttggatcttcttcatcaatggaatcctttgcttcttgaatatcaatggaagaggaatggagaagacagaaagatgattggagatgccacttcaaggagaagatgagtcaagaagaagctcaccaccatagcaagccattga

SEQ ID NO: 14090 - DNA, 301 bp, Glycine max
  unsure (1)..(301): unsure at all n locations
atctccttcttactacatcaagaatcactgggtngagtcttctctgtggctgtcttactggtttatgctccatcctctagattattcgatgcatacatgtggatgggctaataccaggaatgttcgccagggtccagcctatagccttcttatgcttcttgagaacaaacaacaacttctcctcttgctcatcagtaagggaggcaaatataatcactgtaaaacttcngctatcatccaagtaagcgtatcttaaaattgatggcagaggcttcaattctggtgtggtcagctggatagt

SEQ ID NO: 14091 - DNA, 211 bp, Glycine max
  unsure (1)..(211): unsure at all n locations
actatccctgatttcaagcttttgcanattanggcatccttcaagcacatatttaaagccgacgtcagtgtccccagcaaaggcaactgacagcgtcctaaccaatntcccatacatcccaatgtactcaaaaacacgatcagtcagcaaaccagacatagcaagccgagtgagcttcttgcaattcataacaatagcaccaaaaccctca

SEQ ID NO: 14092 - DNA, 221 bp, Glycine max
  unsure (1)..(221): unsure at all n locations
tgagatgagtagtggttggagtctccatgtattgactgatgagtcgagtaccatatagaatgtctggtcttgtggacgtcaaatatcacanactacccaccagactctngatatttgagcacccatctnntttgcttcgtcaaactttgataacttcattgtgcactccaccggtattccaattggcttgcatacgtttgctatgaaatgaagattcaatc

SEQ ID NO: 14093 - DNA, 249 bp, Glycine max
  unsure (1)..(249): unsure at all n locations
agactggcctcacagtgatcagaaatgagaaggaggagctgattcctactcgggtgcagaacatgtggagagtctgcattgactataggaggctgaaccaggttaccaaaaaggaccactttcccctgccattcattgaccagatgcttgaacgcctggcaggtaaatcccactactgtttccttaatgagttttctggttatatgcaaattactattgctcctgaggatcanganaagaccacattca

SEQ ID NO: 14094 - DNA, 450 bp, Glycine max
  unsure (1)..(450): unsure at all n locations
ttctagtatttttctgttctttccttggagaacttatcatacgcaaaactatttatcttactcaacccgatgtaactccttaaacattcaagttctcaagatatgataacgacatctcttctaatatatntctntntattattgatcaatattngttaaatntaaaataatctttntgttggtatttaaaataatgtaaatcataatgaagtttactaataattacatatgtntgattaattgcaactaatatataatattggtagaaaaatttggtggtgagatccttccagtatatctatctcataatctaatatactaatttgatttaaaacgtaacataatacttgttcaagacagatttatatataaataatatttaaaatattatttaaataatggaaactatatcatgaccttatatatatctgttcgaaatcacttaattgt

SEQ ID NO: 14095 - DNA, 210 bp, Glycine max
  unsure (1)..(210): unsure at all n locations
tagtggtacttgacctgagcaaaccctttgtggtgtactgtgatgcatccaagatgggtttgggtggagtgcttatgcagtgnggacaggtagtggcctatgcttctcaacagctaaagagacatganaggaattatcccatgcacgatcctgagttagcaactgtagaatttgctcttatactntggaggcattacctntatggatcta

SEQ ID NO: 14096 - DNA, 364 bp, Glycine max
ttatgtagacttgaccatattctctaattgaaccttggatccctgtcagagacaatactaaaaggaattccatgcaaccttactactatcttgatatacaactccactagcttttccattctatacctcatattcactgggataaaatgagcagacttggtgagtcgatctactatgacccacacggcatcatgcccacgactagtcttgggttaactagatacaaaatccatagatatgctctcccattttcaatccggaatctccaatggcttcaattctcccgaaggtcgctggtgctcaaccttagcctattgacatgtcaaacatcttgctacatatttggctacatcttttttatgcc

SEQ ID NO: 14097 - DNA, 373 bp, Glycine max
gacctttcacccatcacatagagcttaccctcaaatgctcaagcaaaacaaccccatcttgggcggcgaaggctctctatcagtgcccacttgccggtatctggatcatacacctcagcactggagagactgtcaccattcaccccatagcctcccacagcataaaccaaaccattgacttcagcacaagcgaagtcataacgagacacattcatgtctgacaatctgctccagctgcaattgcaacagagaatggagcaagtctaaagccaacttatagacagacatataatatgagagaaattcataagtgtcacgacgtaacagattataaggccatctcttacaaaatcacaaagatgaatttatcata

SEQ ID NO: 14098 - DNA, 230 bp, Glycine max
  unsure (1)..(230): unsure at all n locations
actctncttctctnctctcccttgagcanngataaatcatgggtccgatgctgctgagccaactcgccaccggtctaagcgttctcgccggagccggtcttgtgaaatctggtatggaccanaagcccatggcaggcccattcactcgctgccncacgtgcaacggaaccggtcgagtcacgtgcnnctctgtcgcgtggtccgacggcgatgtcggatgctccacatgc

SEQ ID NO: 14099 - DNA, 361 bp, Glycine max
  unsure (1)..(361): unsure at all n locations
tcttgagaaaacttgcttgagaagcttcttttataaatctttcttgagaagctagagcttagctacacatacccgtctaatagctaagctcacctccttgagatgagaagctagaacttagctacacaccccttataatagctaagctcacccccatgacaaaatacatgaaaatacaaaaaaagtccctactacaaagactactcanaatgcctcgaaatacaaggctaaaaccctatactactagaatggccaaaatacaaggcctaaatgaagganaaaacctattctaatatttacaaagataaacgggctcatacttagcccatgggctcaaaatctaccctaaggctcatgagaa

SEQ ID NO: 14100 - DNA, 412 bp, Glycine max
ccagcatacacagtttcacatgcttaagagataaacatactattttaagaaagggagaaaaagtttaaggaaagcactgcagactagagtatgaataatctacctcaataaattgagtacagtaacggggaaggctgcgtttgaaccacaaaagagagattacatcacccacaccataaccattttcaataatggtagacattggtacaccagcatagcatggctcctcaccttcggaaaaataatggaagaaaagtttaatttagctatcaaatgtgtctaggacacctcagttccatgttacaacttataaattcgaaggatcccaacatacctttgtcatcagagatggtggaaataatgtgagttggagcacgttcttgttcactcctaatagctgtgttaaagtcct

SEQ ID NO: 14101 - DNA, 439 bp, Glycine max
cctgcccttgcagagattaatgttgtatctaatcatgtctttttatcaggagatgaggttgctctttcatgtgaaaagtatactgctttgacgtgcgcagctcgagattcagaggaacaatccaagaagagagttgctagtgctatgcttgaagttgacgaaacaaatttgtcgcacatggacattttgaagagggtagaagaagctacataagaagttaaaaccaccaagaatgcccttgatgaagctctataaagggtagaagctgcgaatagagacacagtacctgttgaagaggctttaaggaattggcgatctgacggacaaaagagacgtgtttctatacacaactctaccaagttcaaaaactgtggtttgtctcatcattggagagatcctcaattacttgatgtgaatggattgcatttggtaaatgatg

SEQ ID NO: 14102 - DNA, 482 bp, Glycine max
  unsure (1)..(482): unsure at all n locations
acactataaaaccccgcttcaagaaaagatggcctcagcaaactccttatttttattgggaattctatcaatagacctccaatctttaatggagagggttaccattactggaaaacccgaatgcaaatttttattgaggcaatagacctaaatatttgggaagccatagaaatagggccttatatacccaccacagtagaaagaattacaatagatggcagttcatcaagtgaaagtataactatagaaaaacctagagatagatagtctgaagaggatagaaaacgagtacaatacaatttaaaagccaaaaacataataacatctgccctgtgaatggatgaatatttcagggtttcaaattgtaagagtgctaaggaaatgtgggacactcttcgataacacatgaaggaactacagatgttaaaagatctangataaatgcactaactcatgagtatgaaatatttagaatgaatgca

SEQ ID NO: 14103 - DNA, 278 bp, Glycine max
  unsure (1)..(278): unsure at all n locations
tccatcatcacgataccgtgttctattggtgagggtgttgttgcaaagctcttanacttgggagctagtatcaatttaatgcctctctccatgtgctggcgactttgagagatagagataatgcccacacgcatgaccctccagttagctgaccgctccatcacaaggccatatggagtcattgaagatgctttggtgaagggttaaccccttatatttccagatgatttcattgtcatagatatataagaagatgctgacattcctctcattcttgg

SEQ ID NO: 14104 - DNA, 393 bp, Glycine max
ccttcataaaagtttatatggctcgaaacaagctctgtttctttgttacaagaagtttaatgagcttatgagcaactcatgattcaatacatgtgacatggaccattgttgctatgttaagaaatatactaatatctatgttatccttaccgtgtatgttgatgacatgtcgattgcaggatctagtatgacagagattaatatgttgaaccatcagttggcagaaaactttgaaatgaaggatcttgtttcaactaaacaattccttggtatgagaattcttagaaatagatcacaaggaattttgaagttgtctcacgaaaaaatatacacaagttgcttgaagagtttaccttgaagattctaagaccacgaatacacttttgggatctc

SEQ ID NO: 14105 - DNA, 455 bp, Glycine max
  unsure (1)..(455): unsure at all n locations
gatggcctcagcaaattccttatttccagatggtaattctatcaatagacctccaatctttaatggagagggttaccactactggaaaacccgaatgcaaatttttattgaggcaatagatctaaatatctgggaagccatagaaatagggccttatatacccaccacagtagaaagagtttcaatagatggtagttcatcaagtgaaagcataactatagaaaaacctatagatagatggtctgaagaggatagaaaacgagtacaatacaacttaaaagccaaaaacataataacatctgccctgtgaatggatgaatatttcagggtttcaaattgtaagagtgctaacgaaatgtgggacactcttcgattaacacatgaatgaactacagatgttaaaagatctaggataaatgcactaactcatgagtatgaattatntagaatgaatg

SEQ ID NO: 14106 - DNA, 401 bp, Glycine max
tgtcttcaagataagatgacagcttattaaattgcaacctggcttgcaatcatcaatcaagaggaggccttagcaagacagctataccctgattatatccccccattagcctcagctggaggtagtggatctttggtgatcaatgatagcaatgagtatgatgttgaagggggtgaggatgagcctaactttgacgtggaagactgcaaacatgagaatcttcacacatccaatcttgggatggaaagagtgagggtaactctgccagttcaacagccctctttttcaataaagggagagactgttacaaatctggatttcattcggaagaggaaggtttctaatgacttcgacatgatggatctgaaaatgacacatgtgaacaccctcagagcccttac

SEQ ID NO: 14107 - DNA, 393 bp, Glycine max
  unsure (1)..(393): unsure at all n locations
tttgatctttggaaagtaatggaaacaactgaaccttctttntgtaagagaatccaactgttgctcagatcagatttcacagtaagcaagttgccaaaagagcaaaggctcttaccatcttgcactcagttgtggatgatgatgtttttatgagaatttccaacttggatacagcaagggagatttgggagaaacttcaagaggagttctttggaaatgagaggaccaagaacatgtaggttctcaaccttaagagggagtttgaagccttaaagatgaatgaggctaaaaacataaaagatttcatgaccagactgatgaaggttgtgaatcatatcaagttgttagcggagaaatttctatacagtaggatagttgagaaagtcttcgttc

SEQ ID NO: 14108 - DNA, 339 bp, Glycine max
ccacatacaagggagtgaatccagtcaagattgtatgctctttaacattaagagccaagtgtaaaacattgcatatgaaataaaatgaagtcatctccaactatttctctagaattttaacaatcaccaatcaacttaagagaaatggtgaaaatgttgatgatctaaaaactatggagaaaattcttagatagttagatccaaagttcaaacatattgtcgcaatcatcgacgaaacaaaagatttgtaggatataaccattgagaaaattttgggctcattacaagcttataaaaaaaggaaaggatcaaggaataactactcgagacacaagttta

SEQ ID NO: 14109 - DNA, 384 bp, Glycine max
tttttgactgtattccacacaagattataattggattatgctaatgaacaaatgacatatataagtgttaagttaacatataacaactgttacattatatttcattcatgccttaagggtatgtagttatgtacaatactttacaactaaatcacataaaacttctgtcacatagtgtaatcataagataacagttaattattacacaatattttctatttcatgtcaacaagtaccatgaatattgtgacagggcactttcaatagtttggacagctcctttggttgctacattgggcatgtccttgacaattcccattgccatgatagctgacatggttatacatggtcacaagtactctgcaatgtacatccttggatgca

SEQ ID NO: 14110 - DNA, 405 bp, Glycine max
aaagggaaggatagagacttgggaatgatactggatagtggggagggttgctacgtgtgtgtgagggagagagagaatccgacccaggatgattatttccttaaaatatagtgtttacttattatagtgacgttcgagatattttaatgagtttaagatgaattgaattcttccctacaaaacccaaggccaccactcatgagtaataataatattatattttgatgtagcaacaaacttttcactttgaccatgtatgattcattgctcataagtatatattaaggctctagctcctgttcttaatgttcaactcaaccaacacttttaatgttgagttaatctagtgtttaattctgaatttatatagatcattgaataaattgggctgtatctaatctacag

SEQ ID NO: 14111 - DNA, 312 bp, Glycine max
ctcgatatattatgcgcctgaatcggacttccgtgtgttatgtttgaccatttgaatttctcaacagctttcgttgttcaaggttaagcttctcgatatattatgcaccttaatcggactgtcgtttgaaaagttatgaccatctgaatttctcgatagcttccgttgttcaatttcaggcgtctacacatagtatgcacttgaatcggacttccgtttgtaaagttatgaccattcgaatttctcatgagcattcgttgttcaatttccagcgtctccatatatatgcgccagaatcggacctccgtgtga

SEQ ID NO: 14112 - DNA, 437 bp, Glycine max
  unsure (1)..(437): unsure at all n locations
agtctcacgattggacatgttgttgcttcttttgttagcagtgggtatacgagacatcttgcctaacaaagtcaggttagccataactcgcctatgctttntcttccatgccatatgtagcaaaagacgtgatgctgtctagtttgatgagctggaaaatgaggctgccattatactgcgccaggtggagatgtatttttcccctactttctttgacatcatgattcacttgattgtgcatctggtcagagaaatcaaatattgcggtcctgtttatttgcggtggatgtacccgcgtgagcaacaaatgaagatattaaaagggtatacaaagaatctatatcatccaatagcatttattgttgagaggtacatcgcagaacaagacgttgaatcntgttataatacattgtagagctaacctgttgccttctgag

SEQ ID NO: 14113 - DNA, 338 bp, Glycine max
  unsure (1)..(338): unsure at all n locations
agcttctcgatatattatgtggctgaatctgatttttttttgaaaagncatgaccattggaatntctcgagagcttaggttgttcaatctccagtgactcgatatattatgcacctgaatcggacttacgtgtgacaagctatgaccatttgaatctcacgagagcatttgctgttcaattttgagcatttcaatatattatgcgcctgaatcggacttccgtgtgacaagttatgaccatctgagttcgctaagagctttcgttgttaaatatcaagcttcttgatatattatgtgcctgaatcggacttacaagtgacacgttatgaccatttgaa

SEQ ID NO: 14114 - DNA, 429 bp, Glycine max
agcttctaaactttatacaagaatgaagcttttgtactcatttgttggacaagcggcctcagatatcttaagaaggggggttgaattaacatatcacaaacttttcctaattaaaaaattctattttgattttaacccgtaaccctagattccttaacagtaaactcttaagaaaatatgaaagaaaaacttactgaaaagaaagaataaataataagcaattaaaggagtttaagggaagagagattgcaaactcagatttatactgattcggtcacacccttgtgcctacgtccagtccccaagcaacctgcttgagagttccactatcttgtaaaagcctattacaagatctgaatcacacaaggacaacccttcctttgtgttcagatttctttacaacaagagaccctcggtctcttaatccct

SEQ ID NO: 14115 - DNA, 434 bp, Glycine max
  unsure (1)..(434): unsure at all n locations
cctgccgcatgcaagcttgaatcggacctcagagtgaaaagtttgtccttttcaantacncgagagctngcggggggcaatgtcgagcatctcgacatgttatgcgctcgaatcggacatccgtgtgaaaagttatgaccatttgagtttctcgagagctcccgtggttcaatttcgagcatctcgttatattatgcgcccaaaactgaccttcgtgtgaaaagttatgaccatttgaatttctcgagagcatccgatgtttaatatcgagcgtctcaatatattgtacgcctgaatcgcagctcagtgtgaaaagttatgaccatttggatttttcgaaagcttccttggttcaattccgagcatctcgacatattatgtgcccgaatctgaccttcgagagaaaagttatgaccatttgaatttctcgagag

SEQ ID NO: 14116 - DNA, 423 bp, Glycine max
agcttctgttttcaattacgagagtctcgttattctacgggacacaatcggacatcggagtaaaaagttattgtcgtttgaatttgctcggagcttctgttttcaatgtcgagcttcacgatatactacgggacacaatcggacatccgagatataagattttttttttgcatttgctcagagcctatgttttcaatttccagcatcttgatattttaccgccgacaatcattcataccaggaaaaagttgttggcgctagaatttgcaaagagcttatgttttcaatttcaagagactcaatatattacggggcacaatcggacattcgagaaaaaagttatgggcgctagtatttgctaccagcttccgttttcaaattcgagcatgttgatatattacgggacttaatcggacatccgag

SEQ ID NO: 14117 - DNA, 427 bp, Glycine max
  unsure (1)..(427): unsure at all n locations
agcttgtagggttaaagtctcacgattgnctcttgctcatgcaacaattgttagccggggctatactagacatcttgccaaacaaagtcaggttcacgataactcgccagtgctttttcttccatgctatatgtagcaaagtgattgatccagtaatgtttgatgagttggaaaatgaggccgcaattatactgtgccagttggagatgtattttccccctgctttctttgacatcatgattcacttgattgtgcatctggtcagagaaatcaaatgttgtggtcctgtttatctatggtggatgtacccggttgagcaatacataaagatcttaaaagggtatacaaagaatctatatcgtccagaagcatctactgttgagaggtacattgcagaagaagccattgaattttgttcagaatactt

SEQ ID NO: 14118 - DNA, 415 bp, Glycine max
agcttgaaattgaacaacggaagctctctttattatgagtggtcataaattttcacacagatgtccgattcggggaaataatatatcgagacgcacgaaattgaacaacggaagctctcgagaaatttgaatggtcataacatttcactcggatgttcgatccggggacataatttatcgagacgctcgaaattgaacaaccgaagctctcgacaaattagaatggtcgtaacttttcacgcgaatgttcgattcggggacataactcatctagacgctcgaaattgaacaacggaagctctcgagaaatttgaatggtcataagttttcacacggatgtccgattcgggaacataatatatcaagacactcgaaattgaacaacggaagctctcgagaaaatcgaatggtcata

SEQ ID NO: 14119 - DNA, 409 bp, Glycine max
  unsure (1)..(409): unsure at all n locations
agctntcagcagggaagctaatgtgttttttattctattctacacaggattggtgctgcatactgggtacccaccaatcatacttccactgttgccacaggtttgggtaaatcttctgtatgctgttggaaccaaatcctaatttaatttcggaaactatattgttgatcaaactgctaaccattcataatcttttgctgacaaattacccattgccttccctactgtattgcggggcattatgatgactcaacactcccaatatgttaaactacactgactctgtgatgaagaaagaatctgctctatacctgcataacaaattgtttgaggggacacatgtcccatacattgtctcgacatcaaggatagctgctttacgcgttgtgtccaaagatgccttgattgc

SEQ ID NO: 14120 - DNA, 425 bp, Glycine max
  unsure (1)..(425): unsure at all n locations
agcttctacttcttatctcacatacaacttaggtctgtatcacgcgccgcaggtaagaatagncacacaagctttatcatttaaaattatatggtgtgctcttctatatctgtaaatctaatgattttttctgggagggggagattgccttggtgatattgcagatacaagcccatgatattcatgcctgtaatatagtatggctacgtgaaaatgatgaagtgccttgtgaccttgttttgattgtcacctctgatcctcaaggagtttgctatatagaggtaattatgtcgtgaaacatgctaaaactggtcttctctctctgcagcattgcagggaaattggaatgtcattccactattcttctctttttctctcatttggggcagacatnttattatatacattttaaggaccttatgata

SEQ ID NO: 14121 - DNA, 422 bp, Glycine max
  unsure (1)..(422): unsure at all n locations
agctntgaggaggctaaaatcaatgtatgtttctgtgattgtgaaatctctaagagtttgaggtcagatggatttaatttgaaattcatcaaagcctcttggagcttactgaaggaagatgtcaaaagatttcttaggaagtttcatgttaatggtgtgttccctagaggtcgcaatgcatcattcatcaccttgatacctaagattgaggatccacaaaatctgggggattttaggtccatttcactggtaggatgtatgtataagatccttgctaaaatccttgcatgaagactaaaaggtgctttggtagtgtgattgacaaaaggcaaatcgccttcttggaagggagaaacttacttcttggagtcttggtggcaaatgaactagttgataaggcaagaagaaaggaaaagaagtgc

SEQ ID NO: 14122 - DNA, 426 bp, Glycine max
  unsure (1)..(426): unsure at all n locations
ctgcagcttctgtggaaagcatgttcggttcctagnttatgtgatgattacacaatacttcaagcccttttcagccttgacatggtgattcttttcttagccacaatttgtggacttggtggtaccctcactgtgtcaaataacttaagccagattggcacatctttagggtattcggcacatagtataaccacatttgtgtcccttatggccatttggatctatatgggtaagattgtacagggagtggtctcaaaaattatcatagcaaaattcaaagtccctaggcctatgatattcacattaattcttgtattaccttgtgctggttaccttctaattgctttcgatgtcccaaatggtctctatgcggcctcaattataattgggttctgctttggggctaactggccactactatttacc

SEQ ID NO: 14123 - DNA, 390 bp, Glycine max
  unsure (1)..(390): unsure at all n locations
tcttctttctccttattgagtttcattgagtgtgagtgatagcgtgtacgtgtgtgctgcacttccattgtttagatgagtatttgtcttccataattcattatgggaagtgggtttcttaaataagatttatatattctgagttataatttctggtggtaatattataaaaatattaggttagttagtattaataggtattgtaaacttaggttaattacgattaatatatattataaggttaggttagtcactatgctgtttttaatttttatgtattaatagatacttgaaggtangttagttagttcggttcgttgatatatccttagatatatatatgtgatataatattattagctntagaaatattaggcacatgttatatac

SEQ ID NO: 14124 - DNA, 374 bp, Glycine max
  unsure (1)..(374): unsure at all n locations
gctgtgcgtcactatccactattgaagcataatacattgcagttggatgttgttgtgctcaaagtctttagatgaagcaacaacatgaagactttggggtaattgttgatcatattccactacaatgtgataacactagtgctataaatctgtctaagaatccaattatgcattcaagaaccaagcatataaaaattaggcatcatttttctaagagatcatgtatctaatggtgattgttgcattgaatntgtggatagtgataggttcttctctattagaaatgagctangaatcctagattagtttaacattgaatgatgttgtgctatggtgtgttcatcttgatatgtgctctntgaatctgtcaattc

SEQ ID NO: 14125 - DNA, 401 bp, Glycine max
  unsure (1)..(401): unsure at all n locations
cacaagtaagcttccatcatcctcacacatctccttcatcaatttgttgntcaaactggtggcattatcggtgattatctttctgggcaacccatatctgcaaattatttccttcttgatgaattttaccaccacattcctagtcacattagcatatgaggtagcttccacccattttgtgaagcaatcaatggcgactatgatgaaacgatgcccattcaaaccttgggttcgatagccccaatcacgtctatgccccacatcaagaacgaccatggtgctgacaagacattcaatggcgcaggtggngcattaacattatctacaaaggtttggcgcttggtggcatttctgacgtgaacacaacaatcactctncatggtgatctagtaatacccgac

SEQ ID NO: 14126 - DNA, 408 bp, Glycine max
  unsure (1)..(408): unsure at all n locations
gcttatccttgngctatcaatgtgtgttttattgggntatgcctttgacaaaatgggatagaaattatatcatccttcaactcatcgtttttaggtttctattgatgtcacctttcatgaagatgagtcatacttcattcatcctcagcttcaaagggataggattccagaagcctactccttctctgaatccttctttccttctaatggcattcctctatctttgcttcatgagcctgtaccaatgtgcatgtcaatcgaggctaccctttctaatgtgcatgtgatctagcacctcttcttggtgtaccacatgttaaatagataaagtgaacctacctaatgccccgacaccataggtggtgtatcaaaatgagagtggacctatattgcgatgattactatgat

SEQ ID NO: 14127 - DNA, 366 bp, Glycine max
tgttcctctaactccccctgcaacattgcaatcataccattctcaccgctcaaagtgaacactctctacagctgctctactccgaataactctgctggttgccatgtatacaactggagagagaagctttgtgaaatcaataccctgtgtctgctggaagcctttcccacctgtccatccatgtctctctcttctacagccagacttgtactgtagactatacacccaccgattctgttacgctttctttccttctgcgatgttagttaacgaccacgatttgttctcctgaatggatgtcgtctcatatttcatcgctagctaccacttcataaagtcattcccctgtgtagactcactgaaaca

SEQ ID NO: 14128 - DNA, 290 bp, Glycine max
gttcatgtgtttatttgtttattgtctaagtcgtagggtttagggtttaagccttatggtttagggtttagtgtcgaagctgtatggtttaggttttagggcttatggtttattgtttaaggtttaaaccttacggtttagaatttggggtttaatctctaagccttatggtttgggttttacggtttatgagttaagccttatggtttatggcttacggctttgggttatggttgaataaaattactcccacttctatgcatttatgaaataaaactacattataattt

SEQ ID NO: 14129 - DNA, 331 bp, Glycine max
gtcttcctctatagccccatgcaagaatgcaattataacattccactgctcacagggaagattctctacagctgctgtactcacaataactctgatggctgtcatctgtacaactggagagaagatcttcgagaaaacaccttctcgtttctgctgagacactgtcaccacaaggctctccttgtgtcttcttctaccgtcagattctgactttagcctatagacccacctattgtcggacgctttctttccttctggagagttaaataaagaccacgttttattcttctgaagggatgtcctctcatctttcatcgctagctcccactta

SEQ ID NO: 14130 - DNA, 369 bp, Glycine max
taacccagctggccttgaattagaaaattgttcctgtcgcaagggtttgtggtttgtgctcctctgctgaccaccatacagacctttgcccttccatgcagcaacctggagtaattgagcagcctggagcttatgctgcaaacatttacaatagacctcctcaacctcagcagcaaaatcaaccacaacagaacaattatgacctctccagcaacagatacaaccctggatggaggaatcaccctaatctcagttggtctagccctcaacaacaacaacagcagcctgctccttccttccaaaatgctgctggcccaagcagaccatacattcctccaccaatccaacaacagcaatagccccagaaac

SEQ ID NO: 14131 - DNA, 348 bp, Glycine max
  unsure (1)..(348): unsure at all n locations
agcttgagataaacaaacgacttatatcttgtactcggatgtcnganagagtcccgaaatatatcgagacgctcgaaattgaataccgaagcgcttagcanattcaaacgacaaaaactttttactcggatgtctgattgagtcccgtaatatatcgaaaagctcgaatgtgaatgtagaagctctgagcaaattcaaacaacaataactttttactctgatgtctgattgagtcccgtaatatatcgagacgctcgaaatggaataccgaagctcggagcaaattcaaacaataataactttttactcggatgtccgatagagtcccgtatatatcgtaacgcttga

SEQ ID NO: 14132 - DNA, 462 bp, Glycine max
  unsure (1)..(462): unsure at all n locations
tgcagcttgtacaaatatcgtcaactcgagtgctctttatttgtgagcatgtctgctagttggtctttggagctgacaaaatcagtggtgatttctgctgaaagtaccttctctcgcacaaagtgacaatcaatctctgtgttttgtccgctcatgaaagaccgggtttgaagcaatgtggatagcagcttcattgtcacatattagtccagcatcctgaacatctccaaattntatttgttggagaagttgcctaagccatgtgatctcacatgccgctgctgccatggcatgatacttctgtgtggtttggtgaggttgctgtatggttcgtttgtgtgatctacagctagttgggttgcagtattgcaacatgcagcaggggaagctataatctggtctggtgtggtgcagcttaanaaaaagtgcatgtgngtggtattatacattgtgctgcaactt

SEQ ID NO: 14133 - DNA, 364 bp, Glycine max
  unsure (1)..(364): unsure at all n locations
gacaaacagctgtatgctatggtaagagctctgccaacatggcaacactatttatggccaacggaattcataattcatttcgaacaccaaagtttgaagtttctaaaatctcaaggtaagcttcaaaagagacatgccaagtggctggaattcatagagatgtttccttatgtgatcaacgacaagaatggtaaagaaaacataatggttgatgctttggctagaaggaatgctntgcttacttctttgcanactaaattgcttggatgtgagtatagaaatgacttgtatgctaatgaatctgactntgacaaaggatgggattcttgtctacacatgtttgtgggaatattatgacacaatg

SEQ ID NO: 14134 - DNA, 127 bp, Glycine max
ttcattcgagagtatactctctcatcatactcatgagatttctagtgcctgctctgatacccacagagattctgattctgaggacagacgtcggaccggatgtctcgtcatcatgcttcacaacatg

SEQ ID NO: 14135 - DNA, 488 bp, Glycine max
  unsure (1)..(488): unsure at all n locations
atgcgaaccaagaagaatgaaatgaacagaagacgttgttgggattatcgnctacgggccttaaacagagaaacgaatcaaggacctaaaaagggattattaaagaggttaaaanaacggaaattgttaaacaagaataacataataacagtattttacttgagtcataacataatntcttttatatttattatttgataatcgatacacattataagtatttagttntactatttatattgtttactagatataaaacttagacggaatatacgcgttaaccgtaaaaatcataaaaatgtctttcgatagataattatattntcatgctagaatttattgacaaatacgaattttttttatcatgaatcactaaaattatattttgattgtaagttttttttatcaaatatataaatttcaacttaagataattgttatatgttgacaaaatagtattataattcgatatatatctatataaagat

SEQ ID NO: 14136 - DNA, 463 bp, Glycine max
  unsure (1)..(463): unsure at all n locations
agctngaagcgagagttaaatgagatctcttnttggccaatatggaactccttcctaagaatgctagagtcatgaaacctcttcactttctccttgtaaatcttggagttctcataagcctctaagcggatatcctcaagttcttgaaatcgaagcttcctttccatacttgcttcatcaaattccatgttacaactcttcaccgcccaataagcatggtgctcaatctccaccagaaggtggcatgccttaatgaaaaccaccttatagggagacatccctaaaggtgtttggtaagcggttctgtgagcccatagagcnatttcaagtagcttgctccaatccttcctattgagctacattactttctacaacacttgctngatctctctatttaaaaccttcacttgcccaatagttgggggatgataagttgtagcaactctatgcataaccatattct

SEQ ID NO: 14137 - DNA, 415 bp, Glycine max
ctatccaatactcaagcttgacaagaaagcagaacccggaatatctgtgggttatagtcttacttcataggcctactaaatctacctaccacagagaaacatagtaatcgtcagcaaggatgtcaaatatttggagtcagatagttgggactggaaaaatgataagaggtctgagtttcatgaggagaatgatgatgttgatgaacaacccatcatatgaaccagatcactttcagacatctatcataggtgtaatgttgttgtaatggagcctgagggatatgaagaagctacagctgatcagaaatggagaaatgcaatgaaagaggagcttataatgattgataaaaataaaacatgggagctggtggacagacctaaccacaagatagcgattggtgtcaagtgggtttat

SEQ ID NO: 14138 - DNA, 330 bp, Glycine max
  unsure (1)..(330): unsure at all n locations
gcttcaacatcagaccacttncattgtgcttgaactacttcacatggacttgatggggcctatgcaagttgatagcctaggaggaaagatgtatgcctatgttgctgtggatgatttctccagatttacctgggtcaactttatcagagaaaaatcagacacctttgaagtattcaaggagttgagtctaagacttcaaagagaaaaagactgtgtcatcaatagaatcaggagtgaccatggcagagagtttgaaaacagcaggtttactgaattctgcacatctgaaggcatcactcatgagttctctgcagccattacaccacaaca

SEQ ID NO: 14139 - DNA, 401 bp, Glycine max
  unsure (1)..(401): unsure at all n locations
cagaanataatttccaagagtcacatctgttgccatcaaaggtctatttatatgtgacatagaacacgaatttgcgaagagtttttgagaacaaaaaggtcttatcctctcaaaaaaagaaaaattatcttatcctcttaaaaattccttggccaatacacttgcaattcaataagggaattatttgagtgctccattgttcaatctatctctttcaagagagatttcttcttctcttcatcttatttctaaaaagggattaagagaccgagggtctcttgttgtaaagcaatctgtacacaaaggaagggttggtccttgtgtggtcagaactngatgcaatactaccccgcaagggcattggatagaagactccaagaagattgagccagagatgcaag

SEQ ID NO: 14140 - DNA, 432 bp, Glycine max
  unsure (1)..(432): unsure at all n locations
actcagctaatattgtaggcttcttccttgtgtcaacttgtcaaattgtgccctcttactaacaaagaggataggcttatatgcataagtgtccctcacctgagaagtgcttcacaggcaaatgctcttccagtcattggagtcaatcttgtagaaagcataatactcctcctttgtgatctcctaaggctctgtcatccaaatggccttatccttctttttgtaagtgggaaaacaaagtcctctataggtttccccctcacgaaggatttttcctttcacagcaaactaatgttcaatntacgaatggtaaccggcagatctgaatgaatttccttaccttaagtcttcctaattttttgtcactaactaactctaaaactaatattctaattatccctaattaactcccccttcctacggtcctaatgg

SEQ ID NO: 14141 - DNA, 339 bp, Glycine max
gctatgcaaaatcatcaaaggatagcagctgctgactcagattctggaacaaatgttgctgggaatctatcaaacaaactaaaatagcagaaaaaaaaggattcggccctgctatcagatgatgttgagatgatgagatcctcatcaccggagtcaagttcccccaaaaaatgcatgcattgtgaggtgacaaaaaccccacaatggagagagggacctgtgggtcccaaaacactgtgcaatgcttgtggtgttcgataccggtctggccgcctctttctgaataccgaccggcagctagcccgacttttgtagcatcactgcactcatactgtcaca

SEQ ID NO: 14142 - DNA, 432 bp, Glycine max
  unsure (1)..(432): unsure at all n locations
ttgattcaaccgagcattaaataacatgatcaatgtgcagatgcaaatataactaaaagtatagggttatattttacctcgaggagaacatcctgtgactcatccaagacaatttcatctaaattattaccaactactattttcacatcaccatcattctgtttccaagttaccatacacgttaagcatgaaaaactaaattaatatgacataattgacggtgggaaaattaaataacatacactttcaggaactggatctgacttgtaaaaaggtgttagctcgtcttcaacgaaatcttgcccaaatgcctgtggaaaaatgaagattagaacattactcaaaatattgctntcacacctctattaagtgatagataaaccatccatgcacattctctatcattaacatgttagcaatagtaacagaacc

SEQ ID NO: 14143 - DNA, 408 bp, Glycine max
  unsure (1)..(408): unsure at all n locations
tcggatgtctgattgagtcccgaaatatatcgagacgctcgaaattgaataccgaagcgctaagcaaattcaaacgacaataactttntactcggatgtctgattgagtcccgtaatatatcgaaaagctcgaatgtgaatgtagaagctctgagcaaattcaaacaacaataactttttactcggatgtctgattgagtcccgtaatatatcgagacgctcgaaatggaataccgaagctctgagcaaattcaaacaataataactttttactcggatgtccgatggagtcccgtaatatatcggaacgctcgaaattgaatgctgaagctctgagcaaattcaaacgacaataactctctactcggatgtctgattgagtcccgtaataaatcgagaagctcgaaa

SEQ ID NO: 14144 - DNA, 408 bp, Glycine max
  unsure (1)..(408): unsure at all n locations
ataacaccaagaatgactatctactcccactaaacttgtggtatacacaatcatcaactgcatttgcctcaaaaccatatgatgtaatgacttgatggaacttgtaataccattgacgggaagcttgtttcaaaccatagatggatttatttagtttacaaaccatagactttgagtcacctgatacaaagttntctggttgcatcatataaattagttcttcaatgtcaccatttagaaatgtagtcttaacattcatttgatgtagctctaaatcataatgagctaccagtgccattattggtctaaaagaatcctttgaagatactagagaanaggtttctttatactcaatgccttcctttaggtaaaatctttatggactagatgagccttatatctctcgac

SEQ ID NO: 14145 - DNA, 409 bp, Glycine max
  unsure (1)..(409): unsure at all n locations
tccttcttatcatgagataagagttccacttcttaccaaggaattagagaatacagaaattntgttgaaagaccataaggagcaatggggaagaattggatgttcaattatgtctgatgcatggacagacagaaaacagagatgtatcattaacttcttgatgaattagccgttttgattattccttttctatacaacaatagatgcatccaattttgtgaaatctggagaaaatatatttgagttgttggactctattgtggaagagaatgaagaagaaaagggtgtccaagttataacatacaatggaagcaactatgttttggcaggtaattactcaacaaaagatgcacatttatattggactccttgtgcagccactgcatagatttgatgttggaagacattg

SEQ ID NO: 14146 - DNA, 446 bp, Glycine max
  unsure (1)..(446): unsure at all n locations
cagcttacgccttaatcaattataaaaaatttttataatcatgtttcacaattgaaataatcagggttacttaagtgattattttataatttttaatagataaatgactaaattataagttaaaaataaagttaaagaaccaaatgagtaatttaatcaaataattgtgatgtttgaaaacactcacaagacttatatattntaattttgataattcattaagatataatggataatattaattcttctcacttttgcattaaaacattctcactaaatatttcatcttctctctttcacataaaaagcaaaaactcgctagatagagagagaggacttaaatttgngtttgataaaatctactgtgaagcttattaaaatatctataagaatcataaatcattctaacaagcttaacaaaatacatactcattattactataatc

SEQ ID NO: 14147 - DNA, 375 bp, Glycine max
acggagttttccgactatgttcttgtgtggtggaacaagctacaaaaggagagagcaagaaatgaagaggcaatggttgatacatggacggagatgaaaaagatcatgaggaagcggtatgtgccggctagttactcaagggacttgaaattcaagctccaaaaactaacccaaggcaacaagggggttgaggagtatttcaaggaaatggatgtgctcatgattcaagcaaatattgaagaagatgaggaggtaactatggctcgatttcttaatggtttgactgatgatatccgtgatattgttgagctgcacgagtttgttgaaatggatgaattgcttcacaaagcaatccaagtggagcaacaattaaaa

SEQ ID NO: 14148 - DNA, 397 bp, Glycine max
  unsure (1)..(397): unsure at all n locations
gcttctgttctgaatctcgagcttctcatatactactggaaacaancggacatccgagtaaaaatgttttgttgtctgaattntctaagaggttatgatttcaatcttgagcgtctcgatatattacgagactcaatcaagcatccgagcaaaaagttattgtcgctaaatgtttcttacagcttctatttccgattatgagcgtctcgatatattacgagattcattcggacatccgagtaaaaagttattgtcgcttgattttgctcaaagcttctgttatgaatatcgagtgtctcgatatactacgggacacaatcggacatccgagtaaaaagttattgacatgtgaattgctcatatcattcggtgtcaattacgagcgtctagatatatt

SEQ ID NO: 14149 - DNA, 160 bp, Glycine max
  unsure (1)..(160): unsure at all n locations
atcagagagagaacagacacctttgaagtattcaaagagtngagtctaagacttcaaagagaacaagactgtgtcatcaagagaattatgagtgaccatggcagagagtttgaaaaccagcaagttacttgaatctgcacatctgaaggcatcactcatg

SEQ ID NO: 14150 - DNA, 473 bp, Glycine max
  unsure (1)..(473): unsure at all n locations
tgtaacccaccatcttcgcatagtagaacaccgattacgtgtccactatcattgttatcatctccctctccatcattgggggcactacttgagctgccagatccctccacctttgggcgtattctttgaaagattcatgctccctcttacacatattttgcaggtacattcaatcaggagccatatcagaattggactaatgctgcctaataaaggcaaccattatgtctttccaggaacgaacccgggaagactccagattggtgtaccaggtggtggctaccccagtaagactttcctagaagaaatgcataaancaattttcatcttttgcatatgctctcattttcttgcagtacatcttcaagtgattcttggggcaagtagtccccttgtacttatagaagtctggcaccttaaacttcggaggaatgaccatgtcgagcactaagcacaaccttgccatgtcaaca

SEQ ID NO: 14151 - DNA, 431 bp, Glycine max
tggatctcctttagtagggaatctatccttcctaagatgtgagccaacctaatccccctaattaagaactagctcatttcttcctctattgctcttagttgaatacgcctttgtttggttctctatttaggtcttaaccctctcatgcaacttttttacaaactctgacctagattcgtcttctttatgtataaaagaagtgtcaagtgggagggaatgaggtctaagggtgttaggggattgaacccatatacaacctcaaaaggggattgcttagtggttctatgaaccccccctgttgtatgcaaattctacatgaggaagatactcatcccaagacttatcggtgcctctcagaagatcccataatagggtggataaggacctattcactacctctgtttgcccatcagtttatggataacaagtgg

SEQ ID NO: 14152 - DNA, 477 bp, Glycine max
  unsure (1)..(477): unsure at all n locations
tacggacactatgaaactcagcgttgctacccaaggaaccatcaggaaattacttgtgaatgagagccatgagggtgggctcatgggccactttgggatagacaagacccttgtcttactcaaagaaaagttntattggccccatatgaagaaagatgtccataagcattgcactaggtgtgtggcttgtttacaagccaagtctagggtgatgcctcatgggctatacacacccttacccattccatctgcaccttgggtagacattagtatggactttgtccttgggctccctagaagccaaagaggtgtagactctatctttgtagtggtggataggtttagcaagatggcacactntataccatgccacaaggtggatgatgcttcccatatctcanaactctnttttagtggaagtgtgagactccatggtttgcctacgaccattgtgtcagatagagatgctaagttcct

SEQ ID NO: 14153 - DNA, 414 bp, Glycine max
gctagaacaccgcctcatatgctgagaacaccacttattatggaccatcatgttggatcagcaccagttgttacagcctcgccctgtgaaaggcaaaattcttactttggagggtcccctgacgcttctggttttcgcttgggttctctaggaagtggaggttttcatggttcctggcaaatgcatccactggatataccttctcacaacatgttatctcatgttgtggggaatgtgtccgaactgacaaccaatgctgggcataactctcctaaacaactatctcatagtttcccatagagacatgctatgtcttctatgactaaacttgatgctctcaaagaacgctttataaaccttctaactcctaaaatgaatctagcaccaacaatgcttataaaaaactgtatgaac

SEQ ID NO: 14154 - DNA, 427 bp, Glycine max
  unsure (1)..(427): unsure at all n locations
catacaatactcaagctgggacttnctatgttctgggaacctctgcgtacttaggtgtattttaacccaatcacctggttcaagcatgactatctttctgcttgagttggcttgccttgcatatctcacagttttcttttcaattcgagccttcacttgctcatgcagcttcttcacatactcagctgtatcctgtgcgtccttatgcttaagcatatcaatgttatgcataggccacaaatcgagacgaggcaaatgatataatccgtacactactttaaatggtgaacaattagttgtgctatggacaggcctattataagcaaactcaacatgaggcaaacatcgttnccaagatgtaagaattttctttaaaacagtcctaaacagtggacctaaaatcctatgactaccacaggttgaccat

SEQ ID NO: 14155 - DNA, 445 bp, Glycine max
  unsure (1)..(445): unsure at all n locations
ntgagaatatggttgcagccattggtcaatatgggccatatttgcccattcatagctatcatgacattagagttccactcctgaagaaggaagttgaatatactgaaaatttgatgaaaggctatagggagcaatgggtcaagtatgtttgtactattatgtccgatgcatggactgatcggaaacaaagatgcatcattaattttttgattaactctcaagctggtaccatgtttntgaagtctgttgatggctctgattttgtaaagacaggtgaaaatctttttgagttgcttgatgccattgtggaggaagttggagaagcgaatgttgttcaagttgtaaccaataatgagagcaactatgttttagcggngaaagttgtggaggagaaaatgaaacatatttattggactccttgtgcagctcattgtattgatttgat

SEQ ID NO: 14156 - DNA, 474 bp, Glycine max
  unsure (1)..(474): unsure at all n locations
ngaatagannattttgggctgaggcagccagttcaacattctatctcatgaatcactcaccatccaatgccataggcttcaaaacccctattaaggtatggcctaacaaaccaactaaatactcaatgttgaaggtgtttggatctttggcatactatcacgtaagtgaaggtaagctagagtatagagccaagaagggattctttataagctttgttgatgaagtcaaaggattctaagtctggtctccatttgaaataaaagtcattctaagtagagatttcatctttaatgaattctctatgatgcattctaaatctgatgaagatttgggaaagcctgaggatgtcactaagcaagtggagttcgagatctcaataatcaggaacattagngatcagaagcaatttaaagcacctgatgagactgatcagaatcttcaaattcaccattaacatcatagtgaacaccaat

SEQ ID NO: 14157 - DNA, 409 bp, Glycine max
  unsure (1)..(409): unsure at all n locations
tttgttactcaatttcgagcgtctcgttatatatgttctttattcggacatgcgtgtgaaatgttatgatcatttgaatntctcgagggcttctattgttcaatttcacgcgtctcgatatattatacgcctgaatcgcacatccgtgtgaaaagttatgaccttttcgatttctcgagagcttccgttgttcaatttcgagcgtctagatatattatgcgccagaatcggacatccgtgtgaaaagttatgaccatgtggatttatcaagagcttctgttgttaaatttcgagcgtgtccatatattatgcgcttgaatcggacatccgagtgaaaagttatgaccatttggatttctcaagagcattcgttgatcaatttcgagcatctctatatattatgcacctg

SEQ ID NO: 14158 - DNA, 429 bp, Glycine max
tcaagaatcaagatcaatattcaagattcaaggttcaagattctcaagagaagacttaatcaagataagtatgaaaaggatttttcaaaaactgagtagcaaatggattttttacaaaacatgtttaccaaagagtttttactctctggtaatcgattaccagtagcaaaatgtttttgaaaaagttttcaaattgaatttgcaacattccaattaatttcaaaaagctgtaatcgattacaatgttttggtaatcaattaccagtgcatttgaatgttgaaattcaaatttaaatgtgaagagtcacatcgtttcacataaaagccttgtgtaatcgattacactaatttggtaatcaattaccagtgactatttctgaataaatcaaaagatgtaactcttcaaatagtttttttactttttcaaat

SEQ ID NO: 14159 - DNA, 229 bp, Glycine max
  unsure (1)..(229): unsure at all n locations
gacaacaacctcagcaccaggtttgacaatatctgtcaatgagatcatgagactccttccgtccaaggtggtgagatccaacgttntaccagtaagggcctcaagaagggttatctcttnggtgatcaccaaatcattaccatcccttctataaagagcatgcggcttctcatctatcacanaaatgagatctgctgggatgacaccaggctcacggttacctttctct

SEQ ID NO: 14160 - DNA, 375 bp, Glycine max
tcactcggttgttcgtattcaggagtatcacatattgagacgctcgaaattgaacaacggaagctctcgagaaattgaaatggtcataacttttcactcggatgtccgattcaggcgcatcacatatcgagacgctcgaaattgaacaacgggagctctcgagaaattcaaatggtcataacttttcacacggaggtcaaattcaggcgcatcacatatcgagacgctcgaaattgaacaacggaagctctgaagaaattaaaatgctgataacttttcactccgatgtccaattcaggcgcatcacatatcgtgacgctcgaaattgaacaacggaagctctccaaaaattcaaatggtcataacttttcacac

SEQ ID NO: 14161 - DNA, 421 bp, Glycine max
  unsure (1)..(421): unsure at all n locations
tcagaacttctgtagggtttcagggctttccatcagtctcttattaatctgccatatactcagccggtattaggcctcatgagctttctcatattcagcagcttattggatttagcttgggtgacttccctttcagatacttaggtgttccccttttatcatctagattaaatgtatgtcattatgctcccttgctttccaagattactgtcctgattcagggatggagcaaaaagtctttatcttatggaggtaagttagagttgatcagagcggttattcaaggaattgtgaatttctggatggggatttttcctttgccgcaatctgttctggactggatcaacgcttcgtgccgtaattntctgtggggcaaagcggatattggcaaacacaagcccttggttgcttggtcagtagt

SEQ ID NO: 14162 - DNA, 463 bp, Glycine max
  unsure (1)..(463): unsure at all n locations
ttcatgcaggtggaccttcttctagttattatgacttaccacaatcgtctttccctcttccattcccacctagagcaattccaaacaaaaaaatggaagaagcggaaaaggagatcttggagaccttcaggaaagtagaggtgaacatacctctgctagatgccatcaagcagattccaagatatgccatgtttctaaaggagctgtgcacccacaaaaggaagctcanaggcaataaaagaattagcatgggtagaaatgtgtcagcattgataggtaaatctgttcctcacattcctgagaaatgtaaggacccangtactttctgtataccttgcattattgggaacaataaatttgagaatgccatgctagatctangagcatcagttagtgtcatgcctctgtctattttcaatttnttatctcatagaccctngtaatctacagatgtggtgattca

SEQ ID NO: 14163 - DNA, 433 bp, Glycine max
cttgatgcaacagttggagaggttaatggaagaaggatatgttgcgctccatgagaggttggatcaaatggagaatagagatcataatgaagaagaaaggaggagaagagggaatgatgatgttcctagacaaaaccgaattgatggtattaaactcaacattcctctctttaaaggaaagaatgatccagaggcctacttggaatgggagatgaaaatagagcatgttttctcatgcaaaaactatgaggaggaccaaaaggtcacgcttgccgccacggagttttccgactatgctcttgtgtggtggaacaagctacaaaaggagagaacaagatatgaagagtcaatggttgatacatgggcggagatgaaaaggatcatgaggaagcggtatgtgccggctagttactcaagggacttgtaatcaagc

SEQ ID NO: 14164 - DNA, 475 bp, Glycine max
  unsure (1)..(475): unsure at all n locations
gaagctcctgttntagctntacccgattntactctttcatttgaagttgaatgtgatgctagtggagttggcattggggctgttttgatacaaaacaaaaggcctatagcttatttctcggagaaattgggaggagccagattgaactattgcacctatgacaaagagttctatgccattgtgagagctcttgatcattggaatcattatttgcgttctaatcactttatattgcattcagatcatgagtcattgaagtatatcaatgggcagcagaagttgagtccaacgcatgctaaatgggttgaatntcttcaatcttttaatttctcttcaaaatacaaggatggtaagagtaatgtggtggctgatgcactctcaaggaggtatgctttaatctcaattcttgaaactcgttacttggtttgagacttgaaagatatataaagaaatgtggatttggtgaaatactcta

SEQ ID NO: 14165 - DNA, 446 bp, Glycine max
  unsure (1)..(446): unsure at all n locations
ctaagctccaccattttgtagggtttcagggctttccatcagctctgtttaatctgccatatactcatccgatattaggcctcatgagctttctcatatttagcagcttattggatttagcttgagtggcttcccttttagatacttgggtgttccccttttatcatctagattaaatgtatgccattatactcccttgctttccaagattactggcctgattcagtgatggagcangaagtctttatcttatgcaggtaagctagagttgatcagagtagttattcaaggaattgtgaatttctggatggggatttttcctttgcctcaatctgttctggatcggatcaacacttcatgtcgtaattntctgtggggcaaagcagatattggcaaaaacaagcccttggttgcttggtcagtagtttattctccgacaaaagaat

SEQ ID NO: 14166 - DNA, 492 bp, Glycine max
  unsure (1)..(492): unsure at all n locations
tggacagcatcaaccttggccattctaaaatcttcctttttcttatcagtgccctctntaatgtatgcagctggttcagtaatatttgagtccatgccattgatgtttaccccaacatggtttccttcagtgtctgagtcatctttgtaaccattcattgtgtcaaactcaactgcaaagatgtggtttgactcattcccatcattggtggagttaacaaggccaagataatggccagcctcagccccaggaaactgtgttgagggtgctatggtgaaggcaaggccaaagccaccagaaccagaacttgtggacacaattgagaaaacaaaattggtgctgaaggaataagcatatggttggtttgtgttgttaagcatttggaagggtgtggcatagaatgcatggcctacaatattggttgatctgttggtgagtttaagtaaacggctggttttgatgatggaagatccttcaagaatgagttcactg

SEQ ID NO: 14167 - DNA, 209 bp, Glycine max
  unsure (1)..(209): unsure at all n locations
gagaatgtcatggatcactgtatataccanaaggtcagtgggagtaagatttgtttccttgcattatacgcagatgatattctgcttgcgactaatgataagggtatgctgtatgaggtganacatattctctcaaagaactttgatatgaaggatatgggagagacatcttatgtcataagcatacacatccatagagaaagatctcg

SEQ ID NO: 14168 - DNA, 345 bp, Glycine max
tcctccaaccacgagttggagccatgcgtaggggttttttgtgcttttctccattctcaatctttttgcgaagccccataaattgcgttttcgttcatgcgacctccacccacgagtttggagacatgcgcaatgattgcttaatgcaattctccattctcaatcttttttcggagccccatgaattgcgttttcgttcatgcgtcctccacccacgagtttggagacatgcgtagtgattgcttagtgcaattctccattctcaaccctttttcggagccccatgaattgcgttttcgttcatgcgtcctccaaccacgagttggagccatgcgataaggttgc

SEQ ID NO: 14169 - DNA, 440 bp, Glycine max
  unsure (1)..(440): unsure at all n locations
tatgttgcaaaatntataatagacccccttattctatgtttccaacaacaacaaaataattatgatctttcaagcaacagatacaatccaggttagaggaatcatccaaatctgagatggacaagtcctccacaacaacagcagcttgtccctccatttctgaatgttgctggcccaagcaagccatatgttcctcccccaatgcagcagcagcaacaacaacaaaggcaacaagcaactgaggatcctcctcaaccttccttagaagagttagtgaggaaaatgaccatccagaatatgcaattttagcaagagacaagagccttcattcagagtctgacaaataagatggggcagatggctactcagatgaaccaagctcagtcccaaaattctgacaaattgccttcacaaactgtccagaatcccaaaaatgtgag

SEQ ID NO: 14170 - DNA, 408 bp, Glycine max
  unsure (1)..(408): unsure at all n locations
cttgaggaaattcaaacgacaataccttgggactcgtatgttgtattgagtcacgnaatatctcgagacgctggaaattgaataccgaagctctgagcaaattcaaacgacaataactttttactcggatgtgcgagtgagtcccgcaatatgtcgagacactcggaattgaataccgaagatatgagcaaattcaatcgacaataactctttactctgatgtcggattgagtcccgtaatatatcgagacgctcgaaattgaataccgaagctctgagcaaattcaaacgacaataacttttgactcggatgtcggattgagtcacgtaatatctcgagacgctcgaaattgaatactgaagctgtgagcatattcaaacgacaataactctgtactcggatgtgcg

SEQ ID NO: 14171 - DNA, 304 bp, Glycine max
  unsure (1)..(304): unsure at all n locations
cacacttgagctttgtagctactatatcaaataagtgtaataagatatttgtcttttttttctgaattctcacatcaatgcaactatntgatgaattataagtaaaataatctggaattaanaagtataatagtttaaatctttntaacaatattctttttaatatttataaaaatgaaatananacataaaattttattcctggttatntaataaataacaaagaataataggaagatgttataataaattagctcataatttattattactcttaatagatgtggagaacattcaaaattat

SEQ ID NO: 14172 - DNA, 406 bp, Glycine max
  unsure (1)..(406): unsure at all n locations
agcttgtanggttaaagtctcacgattgtttcgtgctgatgcaacaattggtagcccgggctatacgagacatcttgccaaacaaagtcaggttagcgataactcgcctgtgctttttcttccatgctatatgtagcaaagtcattgattcagtcaagtttgatgagttggaaaatgacgccacaattatactgtgccagttggagatgtattttccccctgctttctttgacatcatgattcacttgattatgcatctggtcagagaaatcaaatgttgtggtcctgtttatctacgatggatgtacccggctgagcaatacatgaagatcttaaaagggtatacaaagaatctatatcgtctagaagcatcatggcagaacaagctagacatgtattttacgtg

SEQ ID NO: 14173 - DNA, 455 bp, Glycine max
  unsure (1)..(455): unsure at all n locations
agctnggcaaacatagttgacacagaaggtttttctcctctatatagaagcatnaaatcattggcaaaagccaaatgagatagctgaatacctgcacagtttatatataaatttaaaattggcataatccttgaggctgctcatatctctagaaaattactccaaacaaagcacaaacagataaggggagagaggatccccttgtctaagaccccgctgccctttgaagtggccataaatggatccattgactgccgcactaaaggaagtggaagaaacacattccatgatccaagtacagaactgggctgggaaaccaatggacttaagcatccaatccaagaatttccatgaaatggaatcataagctttatgcaagtcaattttcaggaggcatctcgaagaggatcttttcattcatatntacgcaaaatatcttgaactaggaagatgtc

SEQ ID NO: 14174 - DNA, 399 bp, Glycine max
  unsure (1)..(399): unsure at all n locations
agcttgttgagaaattgtacaaactttaggtatttgtttggcatgctattactagatttgccacttcttatctaaccttagaaaggctccacaaagagaaaactaatattggaaagatgnttattttttatgaatggatcttaaacaagttatctaaggagcttaaggggaaagaagctgtaaaggtagtgctcatgccttctttttggaatagtgtggtttacactcttaaagtcatgggtccacttgtcaaagtgcttcgtcttgtggatgatgaaaggaaaccatccatgggttatatctatgaagcaatggacaaagcaaaagaaataattaacaagtctttcaacaaccacgaaagcaagtacaaagatgtgtntgcaatcattgattaaagat

SEQ ID NO: 14175 - DNA, 397 bp, Glycine max
  unsure (1)..(397): unsure at all n locations
agcttaattcccaaaatcacatctacttgattcttgttcttttatgncaaagnttctaaacaatatggacttgacatcatttatgagggcatttacaatctttattgntgngncagccagatacaaacataaaatgacacatccattatcataaaaaaatttcacatacacacatttatcactatcattaatttgaaaatcatacgaaagaataacttgatcaaatttgtgtgtcattactttagggcttgtttcaaaccatataaagatttaacaatttatttttcaaggaaaaacattttcaaagaaagtgacatctctagatttcataatagtaccattagaaatttcagacatttctaaattaacaactaagaatctataagtagtattatgt

SEQ ID NO: 14176 - DNA, 310 bp, Glycine max
gatagagccaaacccaatccccctcattaaaaacaagctcctttcttcctctattgcccttagatgaatacaccattgtctggttctctatgcgggtcttaaccctctcatgcaacttttttacaaactctgacctagattccccttcttcatgtataaaaagaagcgtcaagtgggacgggaatgaagtctaggggtgttaggggattgaacctatagacaacctcaaaaggggattacttagctgttctatgaacccccctgttgtaagcaaatactacatgaggaagatactcatcccaagacttat

SEQ ID NO: 14177 - DNA, 350 bp, Glycine max
  unsure (1)..(350): unsure at all n locations
agcttctagaggttgtgcttatctattccttctctgacagtgcgtgggtaagcccagnacaggtagtttcaaagaaaagaggaatgacagttgtccaaaacaagaagaatgacttgatacccactcggactgtcactggctggtgaatatgcatcaactaccgcatgctgaatgaagccacaaggaaagaccactttcctctgcccttcatggatcagatgctggaaaggcttgtgggacaggcatactattgtttcttggatggatactcatgttaactaaattgtggtggaccccacggatcaagagaagatgacctttacatgcccttttggtgtctttgcctacag

SEQ ID NO: 14178 - DNA, 275 bp, Glycine max
gcagtaatatatacacaagttactcggaataactaacttataacttactaacgtggagtataagaactgaaaagcacccggcatgagtgctttggtgtatatatatgcaagttgattagcagaagttattggaagcaatttgacaagctcgacaaggatcttcttttgaacgatatgacaatcaattttgatatgttgggtcctttcatgacacacacgatttgtagcaatatgtaaagttgactgggtatcatatgacaaaatagcaggttgat

SEQ ID NO: 14179 - DNA, 403 bp, Glycine max
  unsure (1)..(403): unsure at all n locations
catgcaagcttctcttctaatatagaagcagctgatatacttttttttatcaggaatngagaagctttcactgttaacatgataattctgtttttgcacagcttttacagcagctactctagctgcattggctgctctattagaagctgctacagctctgttcaccccttcatctaccttggccatatcataggctttctctgcggcttgtcttgcttcctattttttaaacaaataaacacaattttataatgaaaattgactcataatgctgtaaaatatctaactgtctgcaattcttttcttctcctccattacaaggttgagctaattttatgcacaaaagacaagacatccaaattctgcatgtagactgtatccngacttcaataaaatttggttt

SEQ ID NO: 14180 - DNA, 287 bp, Glycine max
gctccaaaatttggctacacaaattcaatttcaaattcaagtgatatctgaatagaaattcagatttccccccaattttgtgtgacacttaagctataaatagaggccatgtgtgtgcatttattaaactttgatcatttgagaaattacacttcaaagttcagacctcatttgaggcacacaatttggggttctttctctccctctgcctccactcatcttctcctaccttcaagctcttatccatggctccttatgttggtgagccttctcttgactcatcctct

SEQ ID NO: 14181 - DNA, 430 bp, Glycine max
  unsure (1)..(430): unsure at all n locations
agctcgccgccacagagttntccgactatgtcttttttgtggtggaacaagctacaaaaggagagagcaagatatgaagagccaatggttgatacatggacggagatgaaaaagatcatgaggaagcggtatgtgccggctagttactcaagggacttgaaattcaagctccaaaaactaacccaaggcaacaagggggttgaggagtatttcaaggaaatggatgtgctcatgattcaagcaaatattgaagaagatgaggaggtaactatggctcgatttcttaatggtttgactaatgatatccgtgatattgttgagctgcaggagttcgttgaaatggattatttgcttcacaaagcaatccaagtggagcaacaattaaaaaggaagggagtggctaagaggagttntaccaactttgattctt

SEQ ID NO: 14182 - DNA, 436 bp, Glycine max
  unsure (1)..(436): unsure at all n locations
agctgtgaatgctctattcaatgggagggataagattattttttgactgancaacacatgcacaggggccaaggatgcatgggagatcctgaaaaccactcatgagggaacctccaagtgaagatggccagattgcaactattggctgcaaaattcgaacatctgaagatgaaggaggaagagtgtattcatgacttccacatgaacattcttgaaattgccaatgctcgcactgccttgagagaaaagatgacagacgaaaagctggtgagaaagatcctcagatccttgcctaagatattagacatgaaggtcactgcaatacaggaggccctatacatttgcccatgagaganatgaactcattggttcccttcagacctttgagctatgactcttcgatgggacgtgaaagaaagcaagaatctggcgctcg

SEQ ID NO: 14183 - DNA, 356 bp, Glycine max
agcttcactatttcaccatccatattttttttctgtttataatcaaacccttcatgaatttagcatatgttggcatctactctaacgcctcagaaaaaggaatgttattatgcaattgtttaaaagtatctataaaacgcttgtactatttttccttatctttctttgacagagcatgctgataacgatgatgctcaactggtgaatggtttactatagctttaccattattagtggtttgttcatttgatttcttcttctctttttcacttaccactatttcactggtcaccactgcatcatttttctaacgttcttcttcagctccttctttattctttttctcatcattaatt

SEQ ID NO: 14184 - DNA, 440 bp, Glycine max
  unsure (1)..(440): unsure at all n locations
agcttattctgtgccatagtgctcntgttggttatctctaataggcttctctctgtaggaatatgagtctgatcatgtaaaatagcatgatcactagcagccatattctcaataagctccatagcttcttcaggggtcttcaatttaatcttccctccaacagaagcatccaattactacttggattgtggtctcaaaccatctataaaaatatttagctgaattggctcagagaatccatgagttggtgtttgtcgtagcaagctacggaatctttcaagtgcttcactcaaagattcatctagaaattgatggaatgaggagatagctgccttgccttcagctgtcttaaactcangaaaatatttcttcaaaaatttctcaacaaccttatcccaagtcttcaagctatttcccttaaacgaatgcagccacctatt

SEQ ID NO: 14185 - DNA, 313 bp, Glycine max
  unsure (1)..(313): unsure at all n locations
actatcactagacctgangatatgcttgcagtgaacaacgtttgccaattcatggcaaatcctttggatacttcatggtcttcatcttaagacagctatttggggctttgtgatgcagactgggaatctgatatagatgacagaaggtctacttcatgcgcacccatctattttggtcctaatctaatatcctggtggtctggcaagcagcaagttgttgctatatcaaccacagaagcacaatatataacgttagctcagactactgcagacatatcctggattcacaccttattaactgaattaagagtct

SEQ ID NO: 14186 - DNA, 239 bp, Glycine max
  unsure (1)..(239): unsure at all n locations
tgaacctatgctganatattacaatagacctcctaacctcatctcanaatattcccagcagagtcaatatgacctgtccagcaacagatacaaccctggatggaggactcacnctaacctcagatggtccagccctcagcaacaacaacagcagcctgctccttccttacaaaatgttgctggcccaagcagaccatacattcctccaccaatccaacaacaacaacaaccncagaaac

SEQ ID NO: 14187 - DNA, 209 bp, Glycine max
  unsure (1)..(209): unsure at all n locations
aacagatgtgacatgaaccattgctgctatngtaagaaatatactaatagttatggtatccttatcgngtatgttgatgacatgttgatngcaggatctagtatgacagaaaataacaggttgaagcaacagttggcagaaaactttgaaatgaaggatcttggtccagctaaacanatccttggtatgagaattcttataaacagatc

SEQ ID NO: 14188 - DNA, 300 bp, Glycine max
  unsure (1)..(300): unsure at all n locations
ctctagcaagaggtttagtgaagatgtcagctagttgatgcccactatcaataaactcaatgcagcaatcaccctttgatatatgatctccaagacaatgatgtcttatctctatatngttggttctaaaatgaatgatnaggattttagatagattgatagcacttgtgttgtcacatttcaagggaatgtgatcaaggattacttcanagtcttcaagttgttgtntcatccagagactttgagcacaacaactnttagctgcagtgtattatgcttctgtagtggatagtgctacac

SEQ ID NO: 14189 - DNA, 229 bp, Glycine max
  unsure (1)..(229): unsure at all n locations
gtggttcatcattgccataccatacttgaacctaccttcattccaggaacttgtgagtcaagctgaggaagagtntggatatgatcattccatgggtggcctcacaattccttacagtgaagatgtttccaacatataactgatcacttgaatgtacaatacatctcgcactggtgcagacactgacttatttaatagacattttatacaatacgcatcttctcaacct

SEQ ID NO: 14190 - DNA, 256 bp, Glycine max
  unsure (1)..(256): unsure at all n locations
ggtgcgcggtagatgacgtatatctctgcacgtcacctgagttcagagtcagtgtgacaganattgtggggcggccgacanaagtgagtctcttgctcctacgtatcctcaatttgtgatgaggaactcanacttacgtagttcttgataactgtgagactaanatagtctcggtgttttttcactaaaatgcgaacatgcattagtaaagaaacaaaacttccaactgatcaaagcaacatatgcttttttttat

SEQ ID NO: 14191 - DNA, 183 bp, Glycine max
  unsure (1)..(183): unsure at all n locations
atgacactcacanttttcggattctgcacagtttgtgaaggcaatttgtcaaaatnttgngactgagctnggttcaactgagtagccatctgccccatctgattggtcagactctgaatgtangctcttgtctcttgctgaaatngcatattctggatggtcattngcctcactaactcttct

SEQ ID NO: 14192 - DNA, 246 bp, Glycine max
  unsure (1)..(246): unsure at all n locations
tctgcacctgtngcaagagtctgtggtctatgttcttctagagatcaccatacagatctctgtccttctttgcagcaatctggagtcaatgagcaatctgaagcttatgctgcanaaattataatagaccctctcaacagcaaaaccaacaacatcagaataattatgatctttcaagcaacagatacaatccaggttggaggaatcatncaaatctgagataggcaagtnctctacaacaacaac

SEQ ID NO: 14193 - DNA, 262 bp, Glycine max
gctgcagcactctaaggatcccgtaccgagctcgaatcgcctatagttgtctatacatttactggcgtcgttacaacgctgactggaaaacctgcgtacccactaatcgcttgcacacatccctttcccagctggcgaatagcgaaaggcccgcccatcgccttccacagttgccacctgatgggaatgggcctgatgcggatttctcttacctctggcggatttacaccgatatggtgcctctcagacaatctgtctgatg

SEQ ID NO: 14194 - DNA, 235 bp, Glycine max
  unsure (1)..(235): unsure at all n locations
acgggactctatcggacatccgagtaaaaagttattgtagtttgaatttgctcanggcttcagtattccatttcgagcgtctcgatatattacgggactcaatcggacatccgagtaaaaagttattgttgtttgaatatgctcagagcttccgcattccatttcgagcatctcgatttattactggactcaatcagacatcccagttaaaagttattgtggtttgaatttgctc

SEQ ID NO: 14195 - DNA, 356 bp, Glycine max
  unsure (1)..(356): unsure at all n locations
tcactcggaagtcctattgagtcccgaatatatcgatatgctcngaaattaaaaccgaagcccctagcaaattcgaacgacaataacttttcactcagaagtccaattgagtcccgcaatatatcgagacgctcgaaatttaaaaccgaagcttgtagcaaaatcgaacgacaataacaattcactcggaagtccgattgagtcccgtaatatatcgacatgctcgaaatttaaaaccgaagctcctagcaaattcgaacgacaataacttttcactcggaagtcccgatgagtcccgccatatatcgagacgctcgaaatttaaaaccgaagctcgtcgaanattaaaagacaat

SEQ ID NO: 14196 - DNA, 406 bp, Glycine max
atggcgtgagatatactgtgaggaaatggatgcatttggttatgaaaggaattacactcgcgcaagaaataatttgtgttcttctttcagtggcaaagcaaatccgttgattatactccccaaaatttctaatagctctgcaatcccattatgtttctcagtttcaaaaatgaactgataaaatatattggtgattgctttcctaatgaagggtcggtgcaccatatatttcccatatatacgatgaagaactggcttcaagtaatcccgctccctgcgatcttctgaatcacataggtctaatagtttgagaacaaatgaatgatcgacatatctttttgctaattttgcatcagtctcaggtgatgcgacaaaccttataaggagttcatatacaatttgaaag

SEQ ID NO: 14197 - DNA, 240 bp, Glycine max
  unsure (1)..(240): unsure at all n locations
agatgtgacatggaccattgcagctatgttaagaaatatactaatagttatgttatcctcgtcgtgtatgttgatgacatgttgattgcatgatctagtatggcagaaattaacaggtntgaacagttgttggcagaaaacttngaaatgaaggaatctggccagctaaacatatctttggtataagaattcttagaaatagatcagaaggaaatttgaagttgtgtcacgagaaatata

SEQ ID NO: 14198 - DNA, 469 bp, Glycine max
  unsure (1)..(469): unsure at all n locations
ttcacttatataataatatgatatgtaagataataaatgattttaatatgtatagagttaagaaattgaaattcaaaatttaaaattgtgttgacattaataatcaaatcaaatctgaatcaagtaattaatataaataataaaaaatcaaattatgtcataatgagagatataacaatgataaaaatttaaatttaaaattaaaaagtttaccatacattcataatcataaaatcaaatntgaattaagaattntaatataaaaatcaataaaaatgtgttctaatcaaaatttaaaatgtagtaatttattntagaactggtaatgaataatttaaatttttaaattgtatttaattatcagttaaatattgaatggtaattaattntgagagacttatatatnntattaaatatataatgtaaaanaatatggaatgattatatatatatatatatatatatatat

SEQ ID NO: 14199 - DNA, 419 bp, Glycine max
  unsure (1)..(419): unsure at all n locations
gtggactctaacatngttaataaaattactctgttggctgactaanaaanagatatttattattagagaaaggattatactttttttataattcgatatagaatgtaattnttatttattcaatcattaaattatatctatatactatcgagatcgtttgcatcanattttgttaaaattgaacgacaataaataggtaatcaaatgattcacatttagtatattttaaatttttttattacgtcgattttaatttatatgaacaaaatatcaaatgattctgcattgatataaaattntgcatgtgtaatctatgtgaaagagactttcaatccaacatcgaattntaatgaaacattatcccgttgaaagttatagatgggtgtaataattatcanagttactctagtgtaatttga

SEQ ID NO: 14200 - DNA, 379 bp, Glycine max
taaagtctcacgatcgtcacgtgctcatgcaacttttgttagtcgtggctatatgagacatcttgccgaacaaagtcaggttcacgataactcgcctgtgctctttcttccatgctatatgtagcaaagtgattgatccagtaatgtttgatgagttggaaaatgaggacgcaattatactgtgccagctggagatgtattttccccctgctttctttgacatcatgattcactcgattgtgcatctggtcagagaaatcaaatgttgtggtcctgtttatctactgtggatgtacctggttgagcgatacatgaagatcttaaaagggtatacaaagaatctatatcgtccgaaagcatctattgttgagaggtacat

SEQ ID NO: 14201 - DNA, 427 bp, Glycine max
  unsure (1)..(427): unsure at all n locations
ctacttcacatcgatttatttggtccctctagaactatgagtgtaggtggaaattactatggcttagtaatagtggatgattactcaaggttcactcggactnntgttttgagaaccaaaaaaagaagctcttgatgcttttcgcaaacttgccatggtgattcaaaatgaanaaggtctcaacattgcttcaattagaagtgatcatggaagtgaatttcanaatgattcttttgaaaacttttgtgaagaaaatggaatttaccacanattttatgccccaagaacacctcaatagaatggtgttgtggaaaggaaaaatagatcccttatagaaggtgcaagaacccttctaaatgaaacaaggttacctaagtacttttgggctgatggtgacatactaattgttacacctgatagagtaata

SEQ ID NO: 14202 - DNA, 283 bp, Glycine max
  unsure (1)..(283): unsure at all n locations
gttcacgataactcgcctgtgcttttacttccatgctatatgtagcaaagtgaatgatccagtaatgtttgatgagttggaaaatgaggccgcaattatactgtgccagttggagatgtattttccccctgctttctttgacatcatgattcactgaattgtgcatctggtcagagaaatcaaatgctgtggtcctgtttatctacggtggatgtacccggttgagcgatacatgaagatcttnaaagggtatacaaagaatctatatcatctggaagcatct

SEQ ID NO: 14203 - DNA, 466 bp, Glycine max
  unsure (1)..(466): unsure at all n locations
acatgtggcctcagatatcttaagaaggggggttgaattaagatattacaaactgtttccccaattaaaaattctactttgattctaatgcaagttccaagttcccttaaagatgaatttctaaatgatgattcaaattaaacaatctgaatgtaactgttaagcaacaataaataaaagagtttaagggaagagaaagtgtaaacacagtttttatacaggttcggcaaagtccgttgcctacgtccgatccccaagaaagccgcttgggagttccactatctcgtaatcctttacaccttctgaaacacacaaggacatcccttcctttgtgttcagatgctttacaacaagagactctcagtctcttagcccttngatcagaaagagaggaagaaagaaatgatcttcttgaagagacagatgttacaatgaagtgctcaattccttattgaatgtcacaagt

SEQ ID NO: 14204 - DNA, 437 bp, Glycine max
tctgtaatcgattatatgctatctattcttgtgtaatcgattatcagaacactaaatagggcttttcctcaacaaaatatctatgtctatgctaaaaacatctaactatagcagtcatcaatactgatactcatttaattcaatcaaacaagaatcaatcacacaataacacaccaatcaaacacaattaaaatcttataatcaaatacaatcaatcaatcattaaccataaatatttcaatcaaccaatcaatccttatttatccaaatcactaatatctaagaggcctaattctcttctaatggaaaagaatgtttctttggtgagagggtttgtgaagatatcaacaagttgattctttgtatcaacaaattctagcacataatctcccttcagaacatgatctcttagaaaatggtgtctaatttctatatgc

SEQ ID NO: 14205 - DNA, 377 bp, Glycine max
  unsure (1)..(377): unsure at all n locations
cacaacagtgagtgcagctataaatgcagctccaaagagtagtagtggaaggtatgtgatatatgtgaagggtggcgtgtacgatgaacaagttgaggtgaaagcaaagaatataatgttggttggagatggtattggaaagactataatcacaggtagcataagtgttggaggaggcaccacaaccttccgttcagccactggttggtaagcttttattattttttattattgttaattaattctaatcatttcttaagtcttatgtttgactgtgttacataanaataatttaaagaaaattaccaacaattatttaaattgtctataagaatcagaattcatgataaaattgtaaaaaaatgattatggtatta

SEQ ID NO: 14206 - DNA, 406 bp, Glycine max
  unsure (1)..(406): unsure at all n locations
attgtcgttcatgcatcctcatccattgagtacggtgccccatgaattgattgcctagcgctgttcatgcatcctccatcatcaaatcttattcggagccccatgaattgattgtcgttcatgcatcctccaccattcagttcagagccttacgaattgactgccaagctctgttcatgaatcctctatcatcaaatcttattcgaagccccatgaattgattgccattcatgcaacctccaccattgagtccggagccncacgaattgattgcctagtgatgttcgtgcatcctgcaccatcttattcggagccccatgaattgattgtcgttcatgcatcctccaccattgagtccggagccttacgaattgactgccaagctcttttcatgcctnctctatca

SEQ ID NO: 14207 - DNA, 466 bp, Glycine max
  unsure (1)..(466): unsure at all n locations
atcctgatgaggatgttccatatgttctcatgactggactaatacattngctgtccaagtttcatggtcttgcaggtgaagatcctcataagcatcttaaggagttccatattgtctgtcccaccatgaaaccccctgatgtccaggaagatcatatctttctaaaagcttttcctcattctctggagggagtggcgaaagaatggttgtactaccttgctcccaggtccattaccagctgggatgaccttaagagggtgttcttggagaaattcttccctgcatctaggaccactgccattagaaaagacattttaggcattaggcaacttagtggagaaagcttgtatgagtactgggaaagattcaagaaaatgtgttgcagttgtccttaccaccagattntttagcaactccttctgcaatatttctatgagggacttagcaacattggagaagagtatga

SEQ ID NO: 14208 - DNA, 394 bp, Glycine max
  unsure (1)..(394): unsure at all n locations
agaagatgctatctgagcttacatgtcaattcttacgtaacattaattaagggtttaatacacgaataaaaaaagagaaatactatgtacaatcaataatttctttttgaaagagtgctggtgtaatttattattttattaaatctcctatctttttcagtaaatagacacatattacattntatccataatttttttagaacttacttaatatgtattactttaacatatcacaagagataaaatcttacataaatatatgtatataaattatagagataaatggttataaaaagttataataatataacttacagaacatactttattataatgaatataatatggtgctatttaagtcttctttaagaattatatgacgaaatttataaca

SEQ ID NO: 14209 - DNA, 395 bp, Glycine max
  unsure (1)..(395): unsure at all n locations
tatggtccctttcaggacttagaatgctttggcaaagtggcctatcacctgcaattacctgaagaagcttgagtccactctattttccactgctccttgcttaaaccattcagaggttccctggaatagtcggaaatggctccattaccacaacaattcatcaattatcaacccttagtttctcctctggctatcctcaattatcgtcgggtacctggtacacctaatgctccatgggaggtgttagtccaatggcagggtctgtctccagatgagacctcttgngaagatnggtcccaactatgccanaaatatcaccttgaggacaaggtgatcttantagggctggggaatgatatgataccagaagcagataacatagcattcgaaataga

SEQ ID NO: 14210 - DNA, 439 bp, Glycine max
  unsure (1)..(439): unsure at all n locations
atgccgtaccaagaccttggagcctactttaagccatacaaggactntntcaaccgatatactttctcttcctgtccacgaactacaaatccttcaggctgctctacaaaaatttcttcttccaagtgtccattcaagaaggttgatttaacatccatgtgatgtataatccaacctttatgtgcagcaagagctaacaacagccttatggtatccaacctggcaactggaaaaaaagtttttgagaagtctaccccgaacatatgcacatatcccttcacaacaagccttgccttatgtttgtttatagaaccatcaacattaagctntgttctataaacccatttcactccaatgacattnttatctntaggtttctccgtgagctcccatgtttgatgtttntcaatcatatcaagctcctccttcattgcactta

SEQ ID NO: 14211 - DNA, 349 bp, Glycine max
  unsure (1)..(349): unsure at all n locations
gctatgctgtanacatntataatagaactcttcagtctcaaaaccaacaacaacagaataattatgatccttcaagcaatagatacaatccatgttagaggaatcatccaaaactgagatggacaagtcctacacaacaacaatagtctatccctcctttctagaatgttgctggtccaagcaagacatatgttcctcctccaatgcagcaacagtagcaacagtcacaacaaagacaaccatcaattgaggctcctcctcaaccttccttagaagagttagtgaggcaaatgaccatccaaaatatgcaatntcaacaagagacaagagcttccatttagagtctgac

SEQ ID NO: 14212 - DNA, 347 bp, Glycine max
  unsure (1)..(347): unsure at all n locations
tcataactcagctggccatatatcagaaattctgctgatcaccatacagatctctgtccttctttgcagctatctggagtcaatgagcaacttgaagcccatgctgcatacatttataatagactccctcagcaacaaaaccaacaacaacagaataattatgatctttcaaacaatagatacaatccaggttggaggaatcatccaaatctgagatgggaaaatcctccacaacaacaacagcagcaacaacaacagtctgtcccttccttccagaatgggtgtggtcccaagcaggccatatgtcctnnctcaatgcagcagcaatagcaacaacaaagacaaca

SEQ ID NO: 14213 - DNA, 321 bp, Glycine max
gaaccttcacccgacgaagacactgacaacaacttatcttctccttcttggacaaagcatggctggcgtgagggcaatgtatatcatattgccatcacaccgtggatgcaactgtgatcatatacccacatcaactagatcttgacgagtattcacgccatccttcgttttgccttgaatgttaaggatcgtcccaatcacactatcacaaacatttttctccacatgcataacatcaatacaatgtctaacgtcaagatcacaccagttcggatgatcagagaaaatggacctcttcttctatatgcaacatctgacttt

SEQ ID NO: 14214 - DNA, 445 bp, Glycine max
  unsure (1)..(445): unsure at all n locations
gcttccatcacttttgctcctacgtatcctcattntgtgatgaggaactcagacctacgtagttcttgataactgtgagactaaaaatagtctcggtgttttcttcaccaaaatgtgaacatgctttagtaaagagacaaaacttccaactgatcagagcaacatatgctttttggatgaaaaacaatgtgtctattggggaaggagagtatgctaatgaaattntctcataaccgtaaatgagattttggatgttagcatttcgtttctaaatgatccatttgaggaagcactgngttcaacaaaaatagaagataatcactcaaagtgtatcaatctcacacatgtatatgttttatcctaattccgaaccatagatatgtcatgacttgattntgcanatcatttnctatcaaatcaaagaatacatgcatgatcatggatc

SEQ ID NO: 14215 - DNA, 381 bp, Glycine max
  unsure (1)..(381): unsure at all n locations
gcagctgcagttttaatatttacttaattactctcaatnntagntnctctacttataattattcgcattntatcttcacataatttttaaattatntaaactaaatcactntaagttntattcaaaaactaatagaaatgtagtgaaggtatggcattattaacttatagtaatatatataaatgaacaaaaaatgtataatatgtaatgaattttttataattttatttaaatatttgtgcggacctatacaaatttataatatatcacacctctgttatattattattctttntatttggatttgaatntaaacaacaaactatntgtgttctttatcataaacatctattntttataagtaacatgctcaaatggaaa

SEQ ID NO: 14216 - DNA, 234 bp, Glycine max
  unsure (1)..(234): unsure at all n locations
gaaagtccgattcagctgcataatatatcaagacactcganattgaatgccggaagatgatgagaaatttanattggtcataacttatcacacagatgtctgattctgcccataatatatcgagatgctcgaaattaaccatggagctctcgagaaatcaaatggtcatacctttcaattggatgcccgatccatgcgcatctttatcgagactctcgaaattgacaacgaagc

SEQ ID NO: 14217 - DNA, 281 bp, Glycine max
  unsure (1)..(281): unsure at all n locations
cggatgcctgantgagtcccgagatataacgagacactcgaaattgaatgttgaacctctgagcanattcaaacgacaataactctcttctcagatgtttgagtgagactcgtaatatatcgagacgctcgaaattgaatgtttaagctttgagctaattcanacgacaataactttttactcggatgtctgattgaggcccgaaaatatcgagacgctcgaaattgaatgttgaagctctgagccaattcaaacgacaatatctttttactcggatgtct

SEQ ID NO: 14218 - DNA, 318 bp, Glycine max
  unsure (1)..(318): unsure at all n locations
ttaagtcacctgctgctgcagctatatgcatagaaatattatcatatattgttcacaanaaagacattaaaataatgctcttaagacaattatcaatgagaatatattctcaatatatcactcatattataattagatattgtatttaagtcttatcataaatataccacttaaatttatcaatgttgattgattaatttaatttatagtaccatcagattaatcaataaatatatcaaatttaagaacgattccatgagaagaagctcgtgtccaatggatctagctcagttgataatacacactatgtgctgagtt

SEQ ID NO: 14219 - DNA, 347 bp, Glycine max
  unsure (1)..(347): unsure at all n locations
agcttgttgnggccaaaaatgaccagcctctcctattagcctcactgctgagaccctctttgctacatctcagattctcaaaaacctcctcaatgggaatgttctcctgcattaaaaaaaaaaaaaaaccatcattgaaaccacaaaaggcacagcaaggaagaggcttatagagtggttcagatctgttaccaaaatctacagtttctttcaacacagcctccaatacttgagacttgtcacccatgctggaccacttcctctacctctctctcccaactgtgtttactaaaacaaatataataaaaacagctatgatattaacacaatgcgtgcacaccacatac

SEQ ID NO: 14220 - DNA, 375 bp, Glycine max
  unsure (1)..(375): unsure at all n locations
agcttgtcanaaaggaagcaagttaaatactcctttcaaagataaaacgttgtttccacttcaaaactccttgaactacttcacatatttatttggtccctcaagaactatgagtttaggtggaaattactatggcttattaatagtagatgattactcaaggttcacttggactttgtttttgaaaaccaaaaatgaagcttttgatgcttttcacanacttgtcaaggtgattcaaaataaaaaaaggttttaacattgtttcaattagaagtgatcatggagatgaatttcaaaataagtctttgaaaaacttttgtgaagaaaatggaattcatcacatnttttctgccccaagaacaccttagtagaatg

SEQ ID NO: 14221 - DNA, 349 bp, Glycine max
  unsure (1)..(349): unsure at all n locations
agcttagtanagctaggcactaacaggaagtgttgttgatataccaattaanactaaacccaaccaaatacacctttggtgtgaagtccgagaagctgttatgatttatcgtaagtcagaaagggatagagatagatcccgagatagtgaacgccatccttganatgccggaaccacgcacggagaagcatagtcgggggtttctgggcacgctgaattatatcgcgagatttatctcgcaactcacctctacctgtgagccgcattttaagctattacgtaagaaccaggcggtcctgtggaacagttactgcatagaggccttctagaagatcaaacagagtctcac

SEQ ID NO: 14222 - DNA, 174 bp, Glycine max
gcttatgacaattagaaattctcgttatcttccgatgaattaatttgatcggctcgatatattataagtctgaatcggacctacgtgtgaaaagttatgaccatttgaattttttgagagattcctgtgtttgagatttcgagcgtctagatatattatgcgcctgaatttgac

SEQ ID NO: 14223 - DNA, 359 bp, Glycine max
  unsure (1)..(359): unsure at all n locations
agcttgtatcttcatgccagatactttcctttatctttcttttnaatagtggattgtgcagaacaaggcaaaaaaaagaaaagtagcgctaaactttcgcttttaataaatatttttaatttaataaaattttcaaatacaaagtgacaaattatcatacatttaatcctgcaatattctatgtctctttaataaatggttttatatataattctgctcatatagaaataaagaaaccgttctttaatttattcattccatttcaaaattatactctcaatctaaactgtggagagataatattaatattctatttttatattattttcttgacaatctcaattactaattaaatttat

SEQ ID NO: 14224 - DNA, 306 bp, Glycine max
  unsure (1)..(306): unsure at all n locations
gctagacttgttgctaatgaatttactcagaaagatgacattgattataaagagacattttactggtctcacganaggattctttcatgattatcatgacattagtagcccattatgacttggagctacatcaaatagatgtgaaaaccacctttctgaatggagatttagaggagaatggttgtatggaccaaccaatgggggttctcagttgaaggaaatgaacacatggtgtgcatactaaagaaatcaatatacagtcttaaagcaagcttccccgcaatggtatttgaggtttaatgatac

SEQ ID NO: 14225 - DNA, 316 bp, Glycine max
  unsure (1)..(316): unsure at all n locations
agcttgaatgctctattcaatggagttgacatgtatatcttcagactgatcaacacttgcacagtggccaaagatgcatgggagatcctgataaccactcatgaaggaacctccaaagtgaagatgtccagattgcaactgttggctacaaaattcgaatatctgaagatgaaggaggaagaatgtattcatgacttccacatgaacattcttgaaattgccaatgcttgcactgccttgngagagaagatgacagatgaaaagctggtgagaaagatcctcagatccttgcctaagagatttgacatgaaagtca

SEQ ID NO: 14226 - DNA, 330 bp, Glycine max
tagtgctacaatatcaagatgaagaagttgcttgataaataataaataaagaattacactatgcaactactatttctctaacaccagtgatcttttataacttttagttaaattgaagtctggaggtaaagtcaatattacctacgaacaaataactaaaaatatgtatctttgctaaatataatcatgtttgatttgaaacaattaatttcgatgtttttatcaaattaaacacgcactaaataattaaattaacattaaagaaaaggattatttatatgcctcataaataaacacgcactaaataactaaatacaatattatttatat

SEQ ID NO: 14227 - DNA, 362 bp, Glycine max
agcttctttcaacgaacgcgactggtaatgtttatattatcctataagcaacgtatgtatttggaaaagaacctaacctttttatatagctcaactattttaatggtgtgttaatttcatttgttagaacttctttcaataactctaattctgaaaacaaatcatgacaatcaatattataacggtcctcataactcaaaatcttgtcaagattgatgcaatatattgttcaattcattttcactcagagttctaaatctatttgaatcaaataaaaagtcaaacatcgtttcatattctataaattgttcaaatcgactctcaatagaagaaatatactattctaatacataccataaata

SEQ ID NO: 14228 - DNA, 329 bp, Glycine max
  unsure (1)..(329): unsure at all n locations
gtcacctgcngcatgcaagcttatgctgcaanatatacaatagacctcctcttcctcagtagcaaaatcaaccacagcagaacaattatgacctcttcagcaacagatacaaccctggatagaggaatcaccctaacctcaaatggtccagccctcagcaacaacaacagcagcctgctccttccttacaaaatgctgctggcccaagcagaccatacatttcttcaccaatccaacaacagcaacaacctcagaaacagccaacagttgaggcccctccacaaccttccctcgaagaacttgtgaggcagatgactatgcagatcatg

SEQ ID NO: 14229 - DNA, 334 bp, Glycine max
  unsure (1)..(334): unsure at all n locations
atctctaagcacctgcngctgcagctatgctganatattacaatagacccnctcaatctcagtagcaaaatcaaccacagcagaacaattatgacctctccagcaacagatacaaccctggatagaggaatcaccctaacctcagatggtccagccctcagcaacaacaacagcagcctgctccttccttccaaaatgctgctggcccaagcagaaccatatcattcctcaccaatccaacaacagcaacaaccccagaaacagccaacagttgaggcccctccacaaccttccctcgaagaacttgtgaggcanatgactatgcagaacatgc

SEQ ID NO: 14230 - DNA, 345 bp, Glycine max
  unsure (1)..(345): unsure at all n locations
agcttcacagcanatgatagaatgtctatatttttatcatttgacaatttattggtattatatgacttatccttcatatatatagactctcttttttcatctttatcaactgtcgaattttacataattcataaattttatttgataccttgcatagcattgcatttagcaaatacagattaacatgcttggtttataagtattgacacaaaacaggcttattgaaataccttgtattgcatgttgctagggcttattaaaaatatcaaattattttacatgtgtctgtgatatcacacttattaatgatgcgataaattatgtaactatcatgtctctcgttga

SEQ ID NO: 14231 - DNA, 148 bp, Glycine max
  unsure (1)..(148): unsure at all n locations
tgctacttatatgacgntgattccctatataaacaagaattatgactatggtctaaatatatggctattgactttctacctgattgctgcgatgagctaccgggctgaacatgtcttgaatattgctcatgatcgcgtatacaccatt

SEQ ID NO: 14232 - DNA, 499 bp, Glycine max
  unsure (1)..(499): unsure at all n locations
tgtcggtggtaccgatgtccatatatgttatggtattttctccttctgnnttgnttagtaatagtatacattatgtgcctgatttcttttccttcatttgatgataaaggaacaattaatgtgttatcatggcagggtccattttgctcgtctctctaaaaagtgttcacaggaaatgcttaattataatattggtcaatgggtattaataatatctaataaatactgataaaaaaagtatctaataaatttttaaatatattaaaagataaacaacaaattttatattttaataaatacattctattaatgtattcgttttgttaactaacactctaaagaaaatggtcataatactctcttgaaaaaatatattatgtttattgcattaatatatatcaactcatgtatttttttcatagtagtataaagggaaacaaataagagtaaatcatactttcttctcctaataaatacaagtattcaatgtaacatcatg

SEQ ID NO: 14233 - DNA, 423 bp, Glycine max
  unsure (1)..(423): unsure at all n locations
atcaattgaggaagcctcgacaagttccccattgaaaaatgaaattctgataccaatgccagatgtcgtacaggatgtcacgacatcacgcttcagaacatgcagattatctctgagtgaatgaacagattaaacaagtaaataacacaagagaattgttaacccagttcggtgcaacctcacctacatctgggggctaccaagccagggaggaaatccactaaaatagtgtgagttcagggtctaacagccactgtttacaaccttctcacctaaccactacccgtgcgacctctacctaagagccactcttagatatgagaacccctctcactccctctcagacactctcccgtgtntacaattaaatcaaggacactccagagatggctctctgaacaaaagagatcaactctacacact

SEQ ID NO: 14234 - DNA, 499 bp, Glycine max
  unsure (1)..(499): unsure at all n locations
ctgatggtgtcgagaagaaatcacatgtntgtcatcaacatatagggggagaatgtgaatgtatgtatacatgattttgatgatgtcaaaaaaagaatcaaataaggctcattttgcttcaagattaatacaagattgtttcaacaaacaaagccttgattcaagatttcttcaagatcaagccttgcctcaaaatgtagagatttcaagtcatccaaggcacatgtaatcgattaccaatacatgcaatcgattaccaaggcacatgaaagtgtgtaatcgattacacatcatatgtaatcgattaccagagactctgaatgttgggaattcaaattttaaatgaagagtcacaactgttcaagaaaaacaactgtgtaatcgattacactaattntgtaatcgattactagagagggatttcaaggaatatcgccaacagtcacatcttatcatttggattttgaatggccatcanaggcctatatatatgtgtgac

SEQ ID NO: 14235 - DNA, 361 bp, Glycine max
  unsure (1)..(361): unsure at all n locations
agcttgtannggttaaagtctcatgatttgtttcgttctcgtgcaacaattggtagccgcgactatacgagacatcttgccaaacaaagtcaggttagccataactcgcttgtgctttttcttccttgctatatgtagcaaagtcattaatccagtcaagtttgatgagttggaaaatgaggccgcaaatatactgtgccagttggagatgtattttccccctactttctttgacatcatgattcacttgattgtgtatctggtcagagaaatcaaatgttgtggtcctgtttatctacgggggatgtacctggttgagtgatacatgaagatcttaataggtatacaaagaatctatatt

SEQ ID NO: 14236 - DNA, 496 bp, Glycine max
  unsure (1)..(496): unsure at all n locations
ccaagctnntgggtccacatgatgaacatctctactacacaccatangnttattcatnggattatacagtgtgtatgaaccaatggggttgtagccaataaagatcattacttcactcttgttgtctagcttcttccttttctgatcaggaatatgtttatagcataaagagccaaataccttaaagtgtttgatagaaggtttcaatccataccaggcttcttcaggtgccatcgaatctagcttcttagtaggacacctatttagcaaatagacagcaatagtagcagcttcaccccaaaaactgtgtggtagattctttgttttcaacatacttctcaccatattaagtatagttctgtttcttctctcaacaaccncattatgttggggtgtataaggtgcagtgacgtcatgcatgataccttgatcgttacagtacatgtcacactcacttgagttgaattctccacctgcatctcgtttgaggatcttc

SEQ ID NO: 14237 - DNA, 433 bp, Glycine max
  unsure (1)..(433): unsure at all n locations
cttgggcaaattcaaacgaacaataacttttactcggatgtctgattgagtcccgtaatatatcgacacgctcgaaattgaatgtcgaagctctgaggaaattcaaacgacaataaatatttactcggatgtctgatagagtcccgtaacatatcgaggcgctcgaaattgaatgttgaagctctgagccaattcaaacgacaataactttttacacggatgtctgattgagtcccgtcatatatcgagacgctcgaaattgaatgttgaagctctgagccaattcaaacgacaataactttttactcggatgtctgagtgagtcccgtaatatatcgagacgctcgaaattgaatgttgaagctctgagccaattcaaacgacaataactttttactcggatgtctgattgagtctngtnatatatcgagac

SEQ ID NO: 14238 - DNA, 252 bp, Glycine max
agcttcaacattcaacttcgagcgtcacgttatattatatgactcaattagacatccgagtaaaaagttattgtcggttgaatttgctcaaagcttcaacattcaatttagagcgtctcgatatatgacgggactcaatcagacatccgagtaaaaagatattgtccgcttaaatggctcagagcttctacattcaatttcgagcgtctcgatatatgacgggactcaatcaggcattcgagtaaaaagtta

SEQ ID NO: 14239 - DNA, 402 bp, Glycine max
  unsure (1)..(402): unsure at all n locations
agcttgttgagaaattgtacaaacaagagtgtatttgataaggcatgctattactagaattgccacttcttatctaaccttagaaaggctccacaaagagaaaactaatattggaaagatgtttattttttatgaatggatcttaaacaagttatctaaggagcttaaggggaaagaagctgtaaaggtagtgctcatgccttctttntggaatagtgtggtttacactcttaaagtcatgggtccacttgtcaaagtgcttcgtcttgtggatgatgaaaggaaaccatccatgggttatatctatgaagcaatggacaaagcaaaagaaataattaacaagtctttcaacaaccacgaaagcaagtacaaagatgtgtttgcaatcattgattaaagatg

SEQ ID NO: 14240 - DNA, 484 bp, Glycine max
  unsure (1)..(484): unsure at all n locations
taagctctntcaactgcacaaggctcttaatatttgaagtttatccttgtggaaccttcacccgacgaagacactgacaaaaacttatcttctccttcttggacaaagtatggcaggctgggggcaagtaaattttcttcccatcaggccttggatgcaactgtgatcgtatacccatataagctagatcttgatgggtattcaagccatccttcgtcttgccttgaatgttaaggagcatcccaatcacactgtcacaaacatttttctccacatgcataacatcaatacaatgtttaacatcaagatcacaccagtacggaatatcaaagaaaatggacctcttcttccatatgcaactctgactnttatccttcttttgggtctttccaaatacagtattcaggtgttgaacccgctgataaacctgctcaccagtcaatggtatcggcacaatatcatgctcttgacttccattaaaagc

SEQ ID NO: 14241 - DNA, 408 bp, Glycine max
catccttagtgagcaagtcgctcaatggtctggctatcttggagaagaccttgatgaatcttctatagaaacctgcgtgtccaagaaaacttctgatacccttggcatttactggtggtggtaacttcttaataacatcaattattgctttatgaatcttgatgccttgagctataattttgacgcccaagactatcgcttcttcaaccatgaagtgacacttctcccaattcagcatcatactggtcttaacatatctatatagtaccagctctagattcgtcaagcagtaatcaaaggaaggcccgaacactgagaagtcatgcatgaagacttctatgcatttctctaccatgtcagcgaagatggctagcatgcacctctggaaagtggcaggtgtgttcataa

SEQ ID NO: 14242 - DNA, 427 bp, Glycine max
  unsure (1)..(427): unsure at all n locations
tctggtgggacatctngacttgctntccaatctgacattttccacttattctgccttcttctattttcagattgggaatgcctctaacagcacctntgtcaatgattttcttcatgcctcttaagtgcagatgtccaaatttatgatgccatattctgacttcatcttctctggagaatagacatgtggaggagtaactggtctcttgaggtgtccataggtaacagttgtcctttgatctgctgcccttcattaggacttcactcttctcatttgtcaccaagcattctgactttgtgaagttacattgtatccttcatcacacagctgactgatgctgatcaagtttgcagtcagttccttcaccagcagtactttgttcagactaggaagtccatcatggactatctatcccattcattgattt

SEQ ID NO: 14243 - DNA, 394 bp, Glycine max
  unsure (1)..(394): unsure at all n locations
tacatgtgctatagtctcgagattatnttctgtcatgattatgtcgncaacataaacaagaatagctgttatatcattatcattatcagaatataataaaagcgagtgatcaactgaggattgacgaaatccctgtgagagaagaaatgacgaaagccgtgtgaaccatgggcgactggcttgtttgagcccatataaggaacgctgaatgcgacaaacaaagttgggattatccacaacaagtcctggagggagcttcatataaacctcttcattaagatccccatgaaggaaagcatggtttacatccagttgtcgaatgtgccagttatgaagagcatcaagggcaatgagtaaccggactagtggtagcttggccacaggggagaatgta

SEQ ID NO: 14244 - DNA, 456 bp, Glycine max
  unsure (1)..(456): unsure at all n locations
agcttagatggagaagaagacagcgagattgttattacagcgtgaaggagacgaaacatacctaggtatggtggcgaaggagaagaaccacagagttgtcacgatgctcgagtgcgacgaaaacgatgctcgagcttagacaaaacgattctcagatgaagaacagacaacttcaaggtaaatggacaacaaagagagcaagaaagcttagatggcgaagaagacagcgagaaggagaagacagcgtgaaggagacgaaacatacctaggtatggtggcgaaggagaagaagtagagacttatgacgatgctcgagtgcgacgaacacgatgctcagatgcagaacatagaccttcaaggtagacggagattataagaagaagaagagagcgcgaaagcttatatggagaagaagacagcgcgagcttcatagggctcancgatattttaaaatat

SEQ ID NO: 14245 - DNA, 371 bp, Glycine max
agcttagctaactctataggagacattctatttgagctatggatatggggccagtaccacgtactaagtctatggaaaactctatctctctctcacgtggcagatcagatatatcctcaggaaacacttcaagaaactctctaacaacagggaggtcacacatagaaacctttgtctctacttctaggctagacaagatcatgtacacttgagcatcttcctttaaagatgtcacaacttggttggcagagataaacatcatatccttactcactctagaatcatcaaacaccacactcttatcaaaacagttcaacaagacatgggtggaagataaccagtccataccaagaataacatcaatctgactc

SEQ ID NO: 14246 - DNA, 439 bp, Glycine max
  unsure (1)..(439): unsure at all n locations
agaaacatataaaccaatatacgtatctgcaaaattatcctcaagatgtgatcgctcattatcaattgttcgaccgtaattaaaattaacatgaatagacttatccattactaaagttcttgggttaaacaatctataagctttagatgtgtcagaataccctaagaagatccctttatccaccattgaatcaaactttgtgagtacatctatagtgctaacgatgaaacacttacatccaaatggatgaaagtatgaaataatgtgtcttcttgctttgcatagttcataaggagtcatttttatcatcggtcttatcaatattcagtgttgaacaaagcaagttgtgaaaagaatgtgcctagccttttcttgcnagttctattttactttaactaccctatttcttgaggggtctcgctaagacaagtatgaaaat

SEQ ID NO: 14247 - DNA, 447 bp, Glycine max
  unsure (1)..(447): unsure at all n locations
ggaccttgaaactcagctgccantaaaaggcatngttatatcatattgctgattatcccaatgaaaggaagtggataaagttagaatagttctgattgttataggtttcacaactggggaaaatgtttctttgaaatcaaaaccaggctgttgatggaagccttttggtacaagacgtgccttgtacttactgacggacccatctgaattatgcttgactctaaaaacccacttgcaaccaattggtttcctattaggaggtttaggaaccaattcccatgtattgttttgagtagtgcaaccattttttcatccatagcatctttccacttaggatctttaagtgttgttttgacagctttatgaacaacatgagttagaagcaagggtggttggagtctaggcttgacaattccattttttgatctcagtgtcatatgatgaatg

SEQ ID NO: 14248 - DNA, 447 bp, Glycine max
  unsure (1)..(447): unsure at all n locations
agcaatatctctaagggctaccgtgtcaacaactagcaaactaagaaactcgtcattagtcgagatgttggagntgatgagtacgcttcttggaattgggataaagaanaagtggagaaaaacgttcttatacctgctcaactacctcaagaagaaactgaggaagaagacccaggtgaaccaccttcaccttcacctccaccacaacaacaagatcaagaactatcatcaccagagtctactccaagacgagtaagatctttggtggacatatattaaacttgtaattnggccatacttgaacctaatagcattgaagaagcgtcaaagcacgaagtatgggtcaaggcaatggaagaagagatacaaatgatcgagaaaaacaacatatgggagttagtatatcgtccccctggaaaagatatcattggcgttaagtgggtctat

SEQ ID NO: 14249 - DNA, 437 bp, Glycine max
  unsure (1)..(437): unsure at all n locations
gaaaagatggcctcatcaaattccttatttccagtangtaattctatcaatagacctccaatctttaatggagagggttaccactactggaaaacccgaatgcaaatttttatcgaggcaatagatctaaatatctgggaagccattgaaatagggccttatatacccaccacagtagaaagagtttcaatagatggtagttcaccaagtgaaagcataaccatagaaaaacctagagatagatggtctgaagaggatagaaaacgagtacaatacaacctaaaagccaaaaacataataacatctgccctaggaatggatgaatatttcagagtttcaaattgcaagagtgctaaggaaatgtgggacactcttcgataacacatgaaggaactacagatgttaaaagatctanggataatgcactaactcatgag

SEQ ID NO: 14250 - DNA, 395 bp, Glycine max
  unsure (1)..(395): unsure at all n locations
gcttgatatgtctaaagcctatgtctttgttttatangtgtttctggagagaattcttagctctatgggattntcaagtcattgggttgattttattatgaactatgcgcagactgtttcttttgcagctatggtgaatggttctccccatagagttttcacaccaaaagggctctcaggcaaggggatcccttatcactatatttattcattttatatgttgaagccctatcagctatggtgactagatcggtggagcaaggagcattacatgggattagtgtccccttcagcccttatgataactcatttattttttgtagatggcattatcattntttgcacagcaaccactgaagaagcaagccatttatctacaattnccaagctctatg

SEQ ID NO: 14251 - DNA, 483 bp, Glycine max
tagggtatcatcggatccgggttgtttctgaagacaccttcagtctaacttttggacttgtaatgggcactatggatttttggtgatgccttttgggctcactaatgcatcttctacctttcagtctgccatgaatattctccacccatttctaaggaaatatgtcctagttttttttttatgatatccttatttccagtaaaataatgactgaccgtttaactcacttacacctggtttttcagttagttgttgctaaccagttttatgccaaattcaataattgtgctcttgcgttgattcggttcaatatttgggcaatgttattactgctaaaggtgtatcctcagatttggataaaattacagccatcttactttggccggagccatgttctttacaacataaggggcttttctaaacatttaataagaaattctgagtctctggccgctcctctcatcgatttcttatgttccacta

SEQ ID NO: 14252 - DNA, 401 bp, Glycine max
taacttggttacccatctggccatgaattaaaaatgtgcacctgtcgccagactctgtgctttatgctcctctgccaaccaccacacagacctttgcccttctatgcagcaacttggagcaattgaatagcctgaagcttatgctgcaaacatctacaatagacctccgcaacctcagcaacaaaatcaaccacaacagaacaattatgacctctccagcaacaggtacaatcccgggtggaggaatcatcccaaccttagatggtcgagtccttcacaacagcaaccacaacaacaacagccttattttcagaatgtttctggcctaagtagaccatatgttcctccaccaatccaacagcaacaacaacagcagcagcaacaacaacaacccaaaaaca

SEQ ID NO: 14253 - DNA, 417 bp, Glycine max
  unsure (1)..(417): unsure at all n locations
ttggtgacaactttattttcatccaaatgtnttttttgcatcagaaggttttaaacgggaaaaaaattaattttcatgagaaataacttttgaaaaaatatatgatgtacaactaacctcgttgaatattgtccaaaaattttcccaaattatttataaagtgatatgataatatttagaaattttgatgttaaaatacggttgtaggacaacaaagatacaataactatgaaaaatagattcttgtaatttgtttggcttgagaaaaatatgacatattattaaggttaaggaaattccctattaaagtttataaaattcagaggtgtgtaagtactttttctaaattaaaaatagcgtttaagaataatttcagtgttaacagttaaattggaagaaaagtttctataatgagtt

SEQ ID NO: 14254 - DNA, 387 bp, Glycine max
  unsure (1)..(387): unsure at all n locations
gcttgcataccccaaggatccattaggaaatcacttgtgaattagagccatgtgggtgggcttatgggccactttgggatagacaagacccttgtcttactcaaagaaaagttttattggccccatatgaagaaagatgtccataagcattgcactatgtgtgtggcttgtttacaagccaagtctaaggtgatgcctcatgngctatacacacccttacccatcccatctgcaccttgggtagacattagtatggactttgtccttgggcttcctagaacccaaagaggtgtagactctgtctttgtggtggtagataggtttagcaagatggcacactttataccatgccacaaggtggatgatgcttcctacatctcaaaactc

SEQ ID NO: 14255 - DNA, 446 bp, Glycine max
  unsure (1)..(446): unsure at all n locations
agctnggttacctcattcttcactacttatataatcaccgggttgagtcttctctgtggctgtcttattggtttagccccatcctctaaatttattcgatgcatacatgtggacgggctaataccaggattgcccgccaaggtccagcctatagccttcttatgcttcttgagaactgataacagcttcttctcttgctcatcagcaagggaggcatatataattattggaaaacttttgttatcatccaagtaagcatattttaaatttgatggcagaggcttcagttttggtgtgggcggctggataatggtagaaagagatggtttcttagcctgtacctcataaagaaagtaagaggtatgtgtacttcctgaaacatgtgtagttctatctgactctagaaaatcaatctcaagagggaaaacatcaccagacatgtaatc

SEQ ID NO: 14256 - DNA, 498 bp, Glycine max
  unsure (1)..(498): unsure at all n locations
ntagcttcttaaggaagttntctcaaagaagcttctcatggaagttttcttaagaaagcttctcaaggaagttacctagtctataaataaaagcatgtgtaacacttgttataactttgatgaatgagagtcttgtaagacacaactcaaagttcaacttctctccctttttcttccttcaatttcgtgctcccttctctcntttctttagcaaatgctcacccccccctctaaaatttaattggattgggcttctcccaattcaattaaatttattttcaaccacacacatcaaatattcacttaatgcatgccaaattagaaaactacccctaatacaaaaaactagtctaggtgccctaaaatacaagagatgaaaaatcttacatttctagggtaccttaactatattgtggagccctaaatacaaggcccaaaaataatgaaaccttaatctaatatgtacaaagataagcgggctcatacttagcctatggg

SEQ ID NO: 14257 - DNA, 253 bp, Glycine max
  unsure (1)..(253): unsure at all n locations
ctataatacacgcccgaagtaaatcctctagagcctgaatggttcgttcagtctgaccatctatttgaggatgataagctgaactaagctttagctttgtccccaaggcttcatgtagacttgtccaaaatcgcgaagtgaacctcggatccctgtccgatacaatacttgaaggaantnncatgcaccttacttactctttgatatacaactgtactaacttatccattctatacttcatattcaccggaat

SEQ ID NO: 14258 - DNA, 207 bp, Glycine max
tcggacatccgagttaaaagttattgtcgtgtaacttttcctagagcttccgttttcaatttcgagcgtctagatatatgataaggctcaatcgaacattcgagttaaaagttattggtcgttgacttttctgagagcttccgctttcaatttcgagcgtctcgatgtattatagggctcaatcggacattcgagctaaaagatatt

SEQ ID NO: 14259 - DNA, 161 bp, Glycine max
atcgagacactcgtaattgaaacggaagctctgatgaaaatctaaagacaataacttttaactcgggtgtctgatcgagcccttgaatatatcaagacactcgtaattgaaaacagaagttctgagcatattcaaacgacaataacttttgatactgatgt

SEQ ID NO: 14260 - DNA, 315 bp, Glycine max
  unsure (1)..(315): unsure at all n locations
cacaccatgtttgatgattcaccctgagcaacaaaacttggcggttgctccatataaacctctntctcaatatcgccatgtaggaaagctattcttttgtcaagctagaagagacgccaatgacagatgacagccattgacaaaagaagacgaacacaagccatntcggctactggagagaaagtatctatgtagtcctatccatagacctgagtgtaaccttttgccaccaaacgttccttgaaacaatcaatggttccatcagggccaattttaagagtatacaatcaccgacacctaacaacggattttcca

SEQ ID NO: 14261 - DNA, 317 bp, Glycine max
gcgtctcgatatattacgggactcaatcggacatcagagataaaagttattggttgttgaattatctcagagcttctgcattccatttcgagcatctcgatatattacgggactcaatcagacatccgagtaaaaagttattgtagtttcaatttgctcagggcttcggtattccatatcgagcgtctcgatgtattacgggactcaatcagacatccgagtaaaaagtattgtcgttgaattgctagagctctacattcaattcagctttcgattatacggactcatcaacatccagtaaaagtattgcgttgatt

SEQ ID NO: 14262 - DNA, 213 bp, Glycine max
  unsure (1)..(213): unsure at all n locations
cctcggatccctgtcagatacaatactagaaggaattccatgcaaccttactacttccttgatgtacaactccactagctttgccattctatacttcatccgagtgaaatgttatgaccattcgaacnnctcgagagccttcgctgttcgacttcgagcgtctcgatatattatgttcctgaatcgaacattcgagtgaaatgtatgacaatc

SEQ ID NO: 14263 - DNA, 162 bp, Glycine max
tgcctatgttgttgtggatgatttctctagatttacctgggtcaactctatcagataaaagtcagacacctttgaagtattcaaggagctgagtctaagacttcaaagagaaaaagactgtgtcatcaagagaatcatgagtgaccatggcagagagtttga

SEQ ID NO: 14264 - DNA, 230 bp, Glycine max
aatgcgccgataccgttgactggtgggtaggtcttccaacgggttgaacacctgaatactgtattttggaaagacccaaaagaaggataaaagtaagacttgcatatgaaagaagaggtccattttctttgatcttccgtactggtctgatctagatgttagacattgtattgatgttatgcacgtggagaaatatgtatgtgacagtgtcattgggacgctccttaaca

SEQ ID NO: 14265 - DNA, 453 bp, Glycine max
  unsure (1)..(453): unsure at all n locations
actaagcttggcctntcacgtctggaatatgaatgtggcatatagatccaaagacccttacgtgctttgttgatggcttcttctcgttccaagcttcactcggagtcttgtcttttacagacttagttggacatctggtgagtatgtaaacaacagtgtagactgctctagcccacaatgtgttaggtagtcccttcttctcgagcatacatctagccatttccataactgtgcgattctttctctcggacactccattttgttgaggagaatatgcgactggtagttgtcgctcaatgccttcatcctcacaatatctttcaaactcgcgagaggtgtactctttgtcatgacacttcttagtactattatccagttttcactttgatnttcagcaagggccatgaacatttagaatactccanagacttctgattgttctattagaaaata

SEQ ID NO: 14266 - DNA, 433 bp, Glycine max
  unsure (1)..(433): unsure at all n locations
gacgaaggaatgtatctaccttcactcacccaaagatgaatntggctatcgggcttgggatccaatcaataagaaggttgtccgtagcagagatgttgtattcttcgaagaccaaacgatcgaagacattaaaaattcagagaagccaagattgagaagcagtaagaacactgaacttactccagttcgacgtgaggataatgacacaacagaaaatagtgatgctgaagatcatgagcctatgttagagcaaaacaatcaggagactcatgatgaaccaggtcaggaagatcctcaatctagctctctatcagtgccagagccaagacgatcctctagggaaagaaggccatccacttgatataacacagatgagtacgtgatgctcactgatgatggggagcctcaaagcttatagaagccatctatgata

SEQ ID NO: 14267 - DNA, 401 bp, Glycine max
  unsure (1)..(401): unsure at all n locations
tagttccttgcttagcccataaaggtttccagataaggctaatgaacttagcatctctatctgacacaataatcctacgcaaaccatagagtctcataatttccccaaagaagagttttgagatgtgggaaacatcatcaaccttatgccatggtataaagtgtgccattnttctaaacctatccaccaccacaaagatagagtctacacgtctttaggttcaaggaagcccaagaacaaagtccatactaatgtctaccgagggtgcaaatgggatgagtaagggtgtgtatagcctatgaggtatcaccctagactagggcttgtaacaagccacacacctagtgcaatcactacaataaaaatgacctatacctacagacaaatactgtcactataag

SEQ ID NO: 14268 - DNA, 400 bp, Glycine max
  unsure (1)..(400): unsure at all n locations
cgacaaaccagcatgtntaagtaataataataataataataactattattattattattaaataaaaaaacttctaaataatcaaatatttgaggtaatctaacattagttgatgagtaatctattacatagagattactacagttatatagcccaaacgtaatctattacaaagtttttaattttcaagacaaaatttcaacataaatttcgataccagatgtcaaacataataatgttaggaagtcatacatcgtcggtatcaactctcggagtgcagtttatatatctattgggtaatttcacttgatgttaattgatgttatgataaaatctaacatagtatcggagcctataactcatcttggttctcgcctgtactggtaagctctcttgatct

SEQ ID NO: 14269 - DNA, 413 bp, Glycine max
  unsure (1)..(413): unsure at all n locations
acactatcaatctcagctatgtnttcaatacgagcgtctcgaaatcctactggacacaattggacatccgagtgaaaagttattgtcgtttgaatatgtttagagcttctgttntcaattacgagcgtgtgaatatcctacgggacaaaatcggaaattcgagttaaaagttattgtcgttagaagtttctcattgcttccgttttcaattaaaagcatctcgatatcctaccggacacaatcgaaaatccgagtcaaaagttattgtctgtcgaatttgctaagagcttcagttttcaattacgagcgtctagatatattacaagactcaatcagacatccgagttaaaagttattgtcgtntgacttttctgagagcttccgttttgaatgtcgagcgtctcgatatatta

SEQ ID NO: 14270 - DNA, 454 bp, Glycine max
  unsure (1)..(454): unsure at all n locations
tgtcttcaacanacaaatcaaaatcaaatttctgatcttcaaaacctagctccagcttcctctcccccatatcaactatgcagcttgcggtcaacatgaatggccttcccaatattacaaggatgtcagtatcttcagagatatccattaccacaaagtctgtcgggaagaataaaatgtttactctgaccaaaacatcttcaattactccatatggcctggtaatggagcagtaagctaattgtaaagtcattcgagtgggcattatttccaactcttccaatcttctgcacatggagagtggcatcaaattgatactggctcccaggccaataagagcttttcccacattgacttctccaattgaacaaggaatctgtacactcccaagatctttatgctagggtggaaggatcttctggatcacagcactgcaatntccttccactatgat

SEQ ID NO: 14271 - DNA, 340 bp, Glycine max
  unsure (1)..(340): unsure at all n locations
cgcttgaaattgaataacggatgctctctagaaatcagatggtcataactnttcactcgaatgccagatntaggaacaaaatatatagagacgctcgaaattgaacaacagatgctctctagaaatttaaatggtaaaaatttttcactcggatgttagattcaggcacataatatatcgagaacgttgaaattgaacactaaagctctggtccaattcaaacggccataactattaacatgggtgtatgattgaggcccatgatgtatcgagatgatagaaattgaataacggatgctctcatgacattcaaatggtcacaagtnttcactcgtatgtc

SEQ ID NO: 14272 - DNA, 278 bp, Glycine max
agcttcatggcttggtggtcttggacgtggtcctttgtctttggcttctcaactcaaggaacaaagatttcttattgttgaccccaattgatgacacacagatagtgtttgttgtggggtctttgggtaagtgaacgagcaaaagaagtggtgacatcaccttttcttagaaaccctttgcaaccttctttatactattcttctctagaaactatctctgtggggacactcgattgtccattgagaagtccacttttgaagtgggggatgatgggaat

SEQ ID NO: 14273 - DNA, 207 bp, Glycine max
tcatcatttataaagtggtacacccaaaaatacagataattcgccagctttatgtgcaatttgtgtcccattcaaattatcttcaatacgagtctaaggaataaacccctgttctatggtcttcagataaacgattctctcataagttctggttcgagctcaaattcccctcttccttaacctctgttattattctgatggagtgaa

SEQ ID NO: 14274 - DNA, 335 bp, Glycine max
  unsure (1)..(335): unsure at all n locations
tgaaaaannacaacgttttntttttcaaaatatttccatttttatagatgaggcgttatttgatttcgaaatccgattattatattcctaacccgaagtgctccttggtgtattcataaaaagtaataatttttcttcgaatcttagcaattgatatcctttcgaaacaccaattttttcttcatttgaattgacagtgaattctttccgattcttattcgaattatgtattcttttttctaaattaaacaaggcaaggactaacttccgaactgcaagtaaaataaatgatagaatacaacatagatttatctattagctctatgacttgtaat

SEQ ID NO: 14275 - DNA, 458 bp, Glycine max
  unsure (1)..(458): unsure at all n locations
agtctaaaagaaaaaagaatactcgttttataaactataaataacattnttacactctcatacttgatgaaagattcaagtaaaaaaaatgcttattgtaaagcattatagttaaattagacccatgaataatatttangaaaaattgcaattgcaatggcacttttaatttataaaaaacattcacctccttttgaataaattntttaagattatgattttttaaatgacgagtcagtaaaaaataattgtgtatgatttttaaaaaatttaaaaatcaacaaacttttattataattcgtaatttgatatcattgcatatactaatagacatttatatnttattatgaaaaaattattanaaacaatcaaataaatagtggttgattaaacaaaaacaatgaatttcttatncgtttatagtaatttttttctttttttctgtgtgataatattat

SEQ ID NO: 14276 - DNA, 404 bp, Glycine max
  unsure (1)..(404): unsure at all n locations
ctaagctgaagcaactggatgcatggtaactaggtnacccagctggccttgaatcagaaatctgtacctgtcgcaagggtttgtggtttgtgctcctctgctgaccaccatacagacctttgcccttccatgcagcaacctggagcaattgagcagcctgaagcttatgctgcaaatatttacaatagacctcctcaacctcaacagcaaaatcaaccacagcagaacaattatgacctctccagcaacagatacaaccctggatggaggaatcaccctaatctcagatggtccagccctcagcaacaacagcagcagcctgttccttccttccaaaatgttgctggcccaagcagaccatacattcctccaccaatccaacaacagcaacaaccccagaaaca

SEQ ID NO: 14277 - DNA, 476 bp, Glycine max
  unsure (1)..(476): unsure at all n locations
tcttacaagagactaaganatntctgacgannaaatttgagatgaaatatcttggggaagcctctnttgtattaggaatcaagatactaagagatcactctcaaggcatcctaaggttgtcacaagagagttatatcgataaggtcctagatagattcggcatgaaagatagtaaaccagtagatacccagatagctaaaggaaacaaatttagtctcaaacaacaccccaataatgaccttgaaagaatagagatgcaaaatatttcttatgcattagcattagaaagtctaatgtacgcttaagtttgcactcgtctcgatatagcatttgtagtaggagttctgggtagatatntgagtaatcctggaatgcagganaatgtgttatgcgttacctaaagagaaaaaaatgatacatgctcacttatcaaaagtatgagaatcttgagatcattggatactcagactctgatt

SEQ ID NO: 14278 - DNA, 376 bp, Glycine max
  unsure (1)..(376): unsure at all n locations
aacattacaatagacctcctcaacctcagcagctttattcaaccacagtagatcaattatgacgctctctagtaacagatacaatcccggatggaggaatcaccctaatctcagatggtctacccctcaacaacaacaacaacaacttgctccttccttccaaaatgctgttggtccaagtagaccatgcgttcctcctncagtgcaacaacaacaacaacaacagcaacaacaacatcaatagagacaacaatccactactgaggcccctcctcaaccttcattagaagaattagtgaggcaaatgacaatacagaacatgcagtttcagcaggagactagagccttgattcagagtttaacaaatcagatgggg

SEQ ID NO: 14279 - DNA, 454 bp, Glycine max
  unsure (1)..(454): unsure at all n locations
tgatccttcagtcacctgcggcatgcaagcttatggtcttaggtcttaaccactagtaatcacataaaacgaagtattattgggttactgtattttttattagcacatgatatatatacctttagcggaacagttatacaatggccctggaagaccattaatagtgtaggcatcagacacatttggtcctccacctgtttgcaatgcctgtgttatgactgcctcaggatctgtattccaccattctcctganatatgtngttatatgcatgttaaagataggtcactcctaagtacattaaggtaaatataggaacactatggtatgatgtcacagtcactttcttattaccaaagatgacgggaactttcttgtaagggttggtaaaaggatatggagctccttgcttgggaagaatgatgatacgaccatagagaagtgatcttaaccatg

SEQ ID NO: 14280 - DNA, 366 bp, Glycine max
ataagtggacggagagggagagagagggggcacgaaatgtatgcctcaaatgaggtctgaactctgaagtctaatttttcatatgataaaagctgaaaaaatgcgcacacaaggtctctatttatagcctaagtgtcgcacaaaattggagggaaatgtgaatttctattcaaatgtcacttgaatctgaatttgaattagtggagccaacattggagtcaaaactgcactgattgtgaattcaactatggttcatcttactaatccaagatcaaggcctagattctccactaagtgtgcttatgtgtcatgaagcatgttaagcatgaagggtatgcattaagtgtgactatacaatgtgtcaat

SEQ ID NO: 14281 - DNA, 355 bp, Glycine max
tcacatcttcaggaccaatgtctttcatatcataattactagacaatagagacttcacatcatgtatgaatagcatactactaccaaatatcagcatgtcgtgcacatacaagcataagatgacacattcactctcatcaggttgtttcgcacacactcatttagcaactatcattgatattgaaaagcatatgagagaacaacttgagctgacttttcgcgccattactttggagcttatttcatgaccatattaagatttaacaacctataatctataagtagtactatctagagaatatacaacagacacataatcaacagtttttggtccaacttttcttttcttattaat

SEQ ID NO: 14282 - DNA, 447 bp, Glycine max
  unsure (1)..(447): unsure at all n locations
attcctttagtagggaatctatccttcctaagatggagccaaacccagccaccctcattaagaactagctcttttcttcctctattgcctgtagttgaatacacctttgtatggttctctatatggttcttaaccctctcatgcaacttctatacaaatattgacctagattccccttctntatgtataaaagaagtgtccagtgggaagggaatgaggtctaacggtgttaggggattgaacccatagacaacctcaaaaggggactgcttggtggttctatgaacccccctgttgtaggtaaattctacatgaggaagatactcatcccaagacttatggttgcctntcagaagagcccttaaaagggtggataaagacctattcactacctcatgttgcccatcacgttgtggatgacaagtgatagagaatagaagtttagtt

SEQ ID NO: 14283 - DNA, 418 bp, Glycine max
  unsure (1)..(418): unsure at all n locations
ggatcttaagtcacctgcangctgcaagctgcatttaagaccatccccccaccccgaatgctgattctcaatccagcagtcccttaccaccttgtggtaatgcttgttattaagccatccatcanagaccttaanaggcttangaccccaatcaatgctcttagatttcatgaggatagggcagtgatcagagtagttcctttcaagggtgtgctgcgaactgtctggccacttaaaaagccaaccatcagagacaacagctctatccaatttgcttttacaggaaccattatgcctaacccatgtgaactgcttacccacactaggaatatcttccacctccatgatagcaagccaatcattgaaatctgacatgatgctggactctgaatttccatgattgcttcccattctctct

SEQ ID NO: 14284 - DNA, 343 bp, Glycine max
ctatcccgcacagatgactatataatcaatgccttcacctcatcctcacaattaatctgcactgactccaactgggtaagaatagtatctaattcattaatatgatcagttatagagataccttctcctatcttgatgatgaacaaccgacacatcaagtatactttgttggcttccaacgacttctcgtacatatctgataatgccttcattaagcccgcagtagtcttctcatttacaatgttgaacttgacgttcttagctaatgtcaatctgatcacgccaagagcctatcgatctagcaatgttcattcttctttgcttatgccgctcgacttaaccc

SEQ ID NO: 14285 - DNA, 463 bp, Glycine max
  unsure (1)..(463): unsure at all n locations
attctaatctagaaatccatgaaggtaccttaatgtctgaggtttatgggactaagatggtcattgaccagtccctattctatgatttaacccaattgccaagcgaaggtgtaccatttgaaggtgcactgattgatgattggaagttttatttctctgtacatgatgcccgccgattggtttgtaccaatcaagcagatatgaccggaaggcttcttgccagttcattggcttttgaaagccgcatcctccattaccttattgttcgcatcttgcttccgagatcttcaaaccttgctcatgtttctgaagaagatctcattgtcatgtgggcctttcataaaggtttacaaattgattgggcacatcttgttagatatcgcatgtataaggcattgcaattgaatgccccattgccttatcctcatcttgtatcctttncttaacactcaacatcctctga

SEQ ID NO: 14286 - DNA, 356 bp, Glycine max
tcaaaattaaaaatacccaggaatcttgctcaaaacataatgttgtggcatcggatgactgaactccgagaagtaaagcggtagctgcaagggtgaaccgctggaaacagtttgaccgtgtgataagaagatcatgcggctgagaagccctatgattctgtaacttagttggcgaatggacatgattatgatgcttacactctgtgcgattctctgtagcaccttcaccaccatgtatgcgctcgttgaatcaagtccatgttgccttgtccaggattagaaggtttttgtgaatctacccttctttattcaaccaacccacgcaagcgtccaacctcacaattttggatttgatg

SEQ ID NO: 14287 - DNA, 503 bp, Glycine max
  unsure (1)..(503): unsure at all n locations
cttgatggtgttgagaaganatcacatgtttgtcatcatcaataagggggagaatgtgaatgtatgtatatatgnatttgatgatgtcaaagaagaatctaacaagcctgcttcaaatgataagcatntgcttcaagaataattcaagattgcttcaacaaacaaagtcatgtntcaagattcattaaagaccaagccttgccttataacaaagtgctttcaagacattcaaggctcttgtaatcgattaccaggaagtgtaatcgattaccagaagacagggttgaaaaatagctgttgaacaatgttttgannattgaatttcaacatgtaatcgattaccatatgtgcgtaatcgattaccagcaacgaaactttggaaattcaaattcaaaagttataacccttcaaattataactgtgttatcgagtacccacacattataatcgattaccagtggagagttgtcagatnatctgccaacagtcacgatctttcatta

SEQ ID NO: 14288 - DNA, 394 bp, Glycine max
  unsure (1)..(394): unsure at all n locations
atgccttagtcaacctagtaactcagctggccataaataaaaaatctgcatctgcatctattactgttgcaagagtctgtggtctatgttcttttgttgatcaccatacagatctctgtccttctttgcagcaatttggagtcaatgagcaacctgaagcctatgctgcaaacatttataatagatcccctcagcagcaaaaccaacaatagtagaataattatgatctntcaagcaacagatacaatctaggttggaggaatcatccaaatctgagatgggcaaatcctccacagcaacaacagcctgtccctcccttccagaatactactggtccaagcaggccatatgttcctcctccaatgcagcagcaacaacaaagacaacaagcaac

SEQ ID NO: 14289 - DNA, 432 bp, Glycine max
  unsure (1)..(432): unsure at all n locations
agcttgctntatagactcttcatgtctggccaagaggaccatttagaagagttataacttttagaaaaacttannaaacaattgaaaagtcaaaaaccttttgaagagttacatcttttgatttattcagaaacaatcattggtaatcgattaccaaatcagtgtaatttattacacaaggcttttatgtgaaaggatgtgactcttcacatttngaattgaatttcaatgttcaaaggcactggtaatcgattaccaaaacattgtaatcgattacaactttntgaaattaattggaacgttgtaaattcagtttgaaaactttttcanatccattgtgctactggtaatcgattacaataatctggtaatcgattaccagagagtaaaaactctttggtaaacatgttttgagnancatcatgtgctact

SEQ ID NO: 14290 - DNA, 372 bp, Glycine max
  unsure (1)..(372): unsure at all n locations
tctcgatatattatgcgcctgaatcagacttccgtgtcaaaagttatgaccatatgaatntctccactgtattccgtgtgacaagttatgaccatttgaatntctcgatagcattcgttgctcaatatcgagcgtctcgatatataatgcgcctgaatcggacttccgtgtgacaagttatgaccacttgaatttgtcgagagcatccggtgatagatttcgagcatttcgatatattatgcgcctgaatcggacatccgtgtgacaagatatggccatatgatattctcgagagcattcgttgctcaatttcgagcgtcccgatatatgctgcgcgctaatcggacttccgtgtgacaagatatgaccatt

SEQ ID NO: 14291 - DNA, 384 bp, Glycine max
actcagcttcacattcaatttgagcgtctcgatatattactgggctcaatcagacatccgagtaaaaagttattgtcgtatgaattggctcaaagcttcaacattcaacttcgagcgtctcgatatattgcgagactcaatcagacatccgagttaaaagttatagccgcttgaatgggctcagagctacaacatttaattttgagcgtctcgatatttgacgggactcaatcagacatacgagttaaaagttattgtcgtttggattggctcagagcttcaacattcaatttcgagcgtgtcgatatatgactggactcaatcagacatccctgtcaaaagctattgtccgttgaattggctcagaagctcaacattcaattt

SEQ ID NO: 14292 - DNA, 339 bp, Glycine max
  unsure (1)..(339): unsure at all n locations
agcttgaaccaattcaaacgacaataactntntactcggatgtctgattgaggcccgtaatatatcgagacgctcgtaattgaatgttgaagctctgagccaattcaaacgacaataactttttactcggatgtctgattgagtcccgtcatatatcgagacgctcgaaattgaatgttgaagctctgagccaattcaaacgacaatatatcttttactcggatgtctgattgaggcccgtcatatatcgagacgctcgaaattgaatgttgaagctttgagccaattcaaacgacaataactnnttactcggatgtctgatagagtctcgcatatatc

SEQ ID NO: 14293 - DNA, 397 bp, Glycine max
  unsure (1)..(397): unsure at all n locations
atagctccttcaactgcacaaggctattaatattngaagagtatccttgnggaaccttcacccgacgaagacactgacaaaaacttatcttctccttcttggacaaagtatggcatgctgggggcaggtaaatattctttccatcagaccttggatgcaactatgatcgtatacccatatcagctagatcttgatgggtattcaagccatacttcgtcttgccttgaatgttaatgagcgtcccaatcacactgttgcaaacatttttctccacatgcataacatcaatacaatgtctaacgtcaagatgacaccagtacggaagatcaaagaaaatggacctgcttctccatatgcaactctgacttatatccttcttttgtgtcttcccaaatac

SEQ ID NO: 14294 - DNA, 364 bp, Glycine max
  unsure (1)..(364): unsure at all n locations
gctntctgtgtcttctntaataaagatctagtggtagaaacccctactagtggttctgtgttaacttcttatgtgtgtttgaattgtcctgtggagatatctggcacaacattcttgattgatttgatttgtttgcctttgaaccacattgatgttattcttgatatgacttggtcttttttagacgatgtactggtgaactgatttcatgaaagtgtggtggttcgatgattctggagtgagtaatgatatgtattctatctctgccaacccagttgtgacatcttttaaggaagatgctcaagtatacatgatcttgtctagccaggaagtacagacaaagggttctatgtgtgaacctcct

SEQ ID NO: 14295 - DNA, 378 bp, Glycine max
  unsure (1)..(378): unsure at all n locations
atcctccgagtcacctgcggcatgcaagcttctggtgggacatctngacttgctttccaatctgacattcaccacagattctgccttcttctattntcagattgggaatgcctctaacagcacctttgtcaatgattttcttcatgcctcttaagtgcagatgtccaaatctatgatggccatatttgacttcatcttctntggaggatagacatgtggaggagtaactggttcttgacgggtcataggtaacagttgtcctttgatctgctgcccttcattagaacttcactcttctcatttgtcaccaagcattctgactnntgtgaagttacattgaatgcttcatcacacaactgactgatgctgatcaagttt

SEQ ID NO: 14296 - DNA, 366 bp, Glycine max
  unsure (1)..(366): unsure at all n locations
ctcagcttaacatcagaccacttccagggtgctggaactacttcacatggactngatggcgcctatgcaagttgaaagccttggaggaaagaagtatgcctatgttgttgcggatgatttctccagatttacctgtgtctactttatcagagaaaaatcagacacctttgaagtattcaaggagttgagtctaagactctcaagagaaaaagactgtgtcttcaagagaatcaggagtgaccatggcggagagtctgaaaacagcaagtgtactgaatactgcacatctgaatgcatcattcatgaattctctgcagccattactccacaacaatatggcatacttgaaaggaaaaacatgacttt

SEQ ID NO: 14297 - DNA, 441 bp, Glycine max
  unsure (1)..(441): unsure at all n locations
agcttctgtaatcgattataggctatctattcttgtgtaatcgaataccagaacactaaataggctctttcctcataaaaatatctatgtctatgctaaaaacatctaactatagcagtcatcaatactgatactcatttaattcaatcaaacaagaatcaatcacacaataacacaccaatcaaacacaattaaaatcttataatcaaatacaatcaatcaatcattaaccataaatatttcaatcaaccaatcaatccttatttatccaaatcactaatatctaagaggcctaattctcttctaatggaaaagaatgtntcttttgggagaggttgtgtgaagatatcaacaagttgattctttgtatcaacagaattctacacataatctcccttcagaacatgatctcttagaaaatggtgtctaatttctatatgc

SEQ ID NO: 14298 - DNA, 344 bp, Glycine max
agtctcgcgattgtcacgtgctcatgcaacatttgttagctgtggctatacgagacatcttgccaaacaaagtcaggttagccataactcgcctgtgctttttcttccatgctatatgtagcaaagtcattgatcctgtcaagtttgatgagctggaaaatgaggccgcaattatactgtgaaagttggagatgtatattccccctgctttctttgacatcatgattcacttgattgtgcatctggtcagagaaatcaaatgatgtggtcctgtttatctacggtggatgtacctggttgagcaatacatgaagatcttaaatgggtatacaaagaatctatat

SEQ ID NO: 14299 - DNA, 425 bp, Glycine max
  unsure (1)..(425): unsure at all n locations
gcttccaacaactganacatatganatattcttcatatgttcccactcacaatcatttgttgggcactaactcaaatcgagtttgtcacccttcataatggaagctacactnggtgaacaatctttcatgttaaatatttctaaaactatattaatataagtctcttgagacaaacccaaaatgcctcgagactcttctctatggatcttaatgccaatgacataagctgtctctcccatatccttcatatcaaagttcttcgagagagattgtttcagctcatatagcatattcttatcattagttgcaagcaaaatattagccacgtataacactcgaaaacanatcttactcccactgaccttttggtatatacattgatccatgatgttttcttcaaaaccgaatgaagtgatgacctcat

SEQ ID NO: 14300 - DNA, 407 bp, Glycine max
  unsure (1)..(407): unsure at all n locations
actagatgccttggttaaccaggtaacctagctggccttgaatcagaaatctgtacctctcgcaagagtctgtggtttatgctcttctgtcgaccatcgtacagaccttttcccttctatgcaacaaccaggagcaattgagcagcctgaagcttatgctgcaaacatttacaatagacctcctcaacctcaacagcaaaatcaaccacagcagaacaattatgacctctccagcaatagatacaatcccggatggaggaatcatcccaaccttagatggtcgagtccttcacaacagcagcaacaacaacaacagccttattntcataatgctgctggcccaagcagaccatacattcctccaccaatccagcaacaacaacaacaacaacaaccccagaaacaac

SEQ ID NO: 14301 - DNA, 439 bp, Glycine max
  unsure (1)..(439): unsure at all n locations
acttggttacttattccaaccgtcatcctcgttgccactgtagagggtgactgaccaccacatccacttaattctacaagtcgcatcaatgagcgtgcgtccttatctgtacccccattaccagaagtaggaaattgagcttcaggtggaatcaatgttgcaaaaggggcttattagtccgagtacaagtcatttctcgtcactagtgctgctcatcangaaacatgatgactcttggcgattttgcgtggactatagagcactcaatgtggtgactgtctgtgactgggttcctatcctcaccatcgatgagcttctcgatgaattgngcaaagcttgttggatttcgaaattggatttattgcaaggctaccaccatattcggatgcattcaccgaacattgccaaaacagcatttcggacgcaccatgggcactat

SEQ ID NO: 14302 - DNA, 345 bp, Glycine max
  unsure (1)..(345): unsure at all n locations
agcttctatagaagaatcattcctaatttctctacaattgcttcacctctcaatgagctggtgaagaagaatgtggcatttacctggggtgaaaaacaagagcaagcctttgctttgctcaaagaaaagcttactaggcacctgttctagctcttcctgacttttctaaaaattttgagctagaatgtgatgcctctggagtgggagttagagctatcttgttacaaggtgggcaccctatngattattttagagaaaaatttcatggtgccaccctcaactaccccacctatgataaagagctntatgatttaataagagccttccgaacttgggaacattatc

SEQ ID NO: 14303 - DNA, 322 bp, Glycine max
atctgaagtacatctgctctaatcttggtaagacgatcatcaagaccatctaagaaggtgtagactctgtcttcttgcaaaattaaattatatctctgaatatcagcatcacacaacatatgatttggtcgacgaagatcgatctctctccatagtccttgtaggttgttataatacgtttcaatagatctgtcaccttgcatgagtctggtcactcttcttttgagatcatatacttgtgatgtatcaccgctatcaaagtatgttgtagcaatactatcccaaacaaccttagccgtcagaaatctatataaagttctca

SEQ ID NO: 14304 - DNA, 267 bp, Glycine max
  unsure (1)..(267): unsure at all n locations
caagtatagagntactattatacactaaagctccattaaaaactgaaccatgagtacataatatactacattgctactgcattaaacatgttattggtattaaccaactccaggacctacaggaccctttcccttatttgtgagaaaactagcgtaatataatctagttctataattaactaaagagttaagataagctatcccaaanacgcaatatctccttcttatgtctcgtcaacaagttgaatttggattaactaagtgata

SEQ ID NO: 14305 - DNA, 477 bp, Glycine max
  unsure (1)..(477): unsure at all n locations
cttgagtcccgcgatctctgagtcacctgcgggcatgcaagcttgcaatgaaattaacataacaatgtatttatatatgtgngacaaaataatacaaanatgatatataattcttaatatagaattgacattcatttggtccaagttaaatgcattttggtagttattatatgaggcaaggcttatgntttcatcttcctaacatgtaaaattaacatcattttttaacattccttttgataaaattgtatatagtcatttgtgtacaaattatttgcatttatgtttcaaatttgtacttaggcatggatcgtaagattacaaatctattctttcatactcgaaacgttctttcaatagtgcaccttaaacttatactggagtgataataattaaaaatttcattattatctgcaaactcagatctatgtctaanattaggatggtggtaacgttacatatgtacggacaacatat

SEQ ID NO: 14306 - DNA, 374 bp, Glycine max
  unsure (1)..(374): unsure at all n locations
aagcttccttgataagctagaggggtgctactcacatctctccaatagctaagttcaccccgatgccaaaatacatgaaaaatacaaaaagtctcttctacaaagactactcaaaatgccctaaaatacaaggctaaaaccctattgtactagggtacccttaacttgaaaggtagggtgcccttaattnttagcataccctataaacctaaaaattgccaaaatacaaggccccaaagaaggaaaccctattctaatatttacaaagaangtgggctcatacttagcccatgggcccaaattctaccataaggctcatgagaaccctaaggtcttctactgcatatctggcccaatattcttggagtcttcta

SEQ ID NO: 14307 - DNA, 426 bp, Glycine max
  unsure (1)..(426): unsure at all n locations
gctatgctgatatattacaatagacctcctcaacctcagcagctaaatcaaccacaacagaacaattatgacctctccagcaacagatacaaccctggatggaggaatcaccctaacctcagatggtccagccctcaacaacaacaacagcagcctgctccttccttccaaaatgctgctggcccaagcagaccatacattcctccaccaatccaacaacagcaacaaccccagaaacaaccaacagttgaggcccctccacaaccttccctcgaagaacttgtgaggcaaatgactatgcaaaacatgtagtttcagcaagagaccagagcctncattcagagcttaaccaatcagatgggacgaatggctacccaattgaatcaacaacagtccccagaatcttgacagctaccttctcaagct

SEQ ID NO: 14308 - DNA, 328 bp, Glycine max
  unsure (1)..(328): unsure at all n locations
attgtataatttatattcttcatttatatatnttggtactttataaaaatattctattaatctttctattatcaatattataaaaaataaaataataagattagtatcaagttattttcttattctttttctttatttaaaaaatacattatcttatggggagatttttttattacacatacaaataaaagaaaatccttgtgagagcaatggcccttgcaaaattatacatgcatcgccaatgatcattgtgcatgaaatacttgaatagttattaatcttgattgtctcaatanaataattaattaaaatttanagaatcatttat

SEQ ID NO: 14309 - DNA, 414 bp, Glycine max
  unsure (1)..(414): unsure at all n locations
ttattttcttcctccatctcccaatagcaaactttatagcagacatgagattattccataaaataaaaatatgatacaaacttacaagtgtctatatggcttcatagtcatctgctgcaggggctgngggagcatcagctagagcagataacacaacaaaggcaccaaataagattgtgataatggcagtgaagttgacaagcaaagcctcagaaccatatttgtccaatcctgagttctcaaggaaagtgagcttctccagatacccaagagcagcagtgcccacagccaagacatatacaaacagcccatatagcgcgtgccaaggaagtgaggcgcgtctaatgtctggagtcccaccagngaagaataagatcacaaacccatatatccacttcagggaaccaacacaat

SEQ ID NO: 14310 - DNA, 397 bp, Glycine max
  unsure (1)..(397): unsure at all n locations
tagttcctagcttagcccataaggttttcgagatatgtctattgaacttagcatctctatctaacacaatggtcctaggcaaaccatggagtctcacaacttccctgaagaagagttntgagatgtgagaagcatcatcaaccttgtggcatggtataaagtatgccatcttgctaaacctaccaaccaccattaagatagagtctacacctctttgggttctaggaagcccaaggacaaagtatatactaatgtctatccagtgtgcagatggcatgggtaagggtgtgtatagcctatgaggcatcaccctagacttggcttgaaataagccacacctagtgcaatgcttatggacatctttcttcatatgggaccaatagaacttttctatgag

SEQ ID NO: 14311 - DNA, 364 bp, Glycine max
  unsure (1)..(364): unsure at all n locations
tacgtgcttctactcctattgaaaatgtgttgctagtataaggtttgaaacatagtttattaagcgttagtcaattatgagataaaggatataaagtatctcttgattctgaaaaatgtgttattaagcatgagcatgacaaacatattgaacatacaggttttagagaatataatgtctacatgattgatctacaacacaaatctataaatgataaatgctctntaagtaaagattgtgatccatggttatggcataagagaattgctcatattaacatggatcatctaaatagggtaatttcacaagatctagttattggactgcctatattaatatttgaacaagataagttatgtgatgc

SEQ ID NO: 14312 - DNA, 331 bp, Glycine max
  unsure (1)..(331): unsure at all n locations
agagttgatgttttctgtatggatgggaactcangcggatgaagctttttctgaggcttggcattcagatgcatcagaggctagtggtgaaaacattgctcacactcgttccaaggtatatatttctcctaagctttggtatcttagaattaatgtgattcaagcccaggatttgttgctaacaaacaagagtggcaataataactcggaaattttcatccaaggtggtttggggaacttggctctgaggagccgttctataaagtgtagtacaagcccctcgtggaatgaggatatgatgttcgttgtggcagaaccctttgatgattgc

SEQ ID NO: 14313 - DNA, 344 bp, Glycine max
  unsure (1)..(344): unsure at all n locations
tgagaaaaatgagatgacattaactntttactcggatgtcttattgaatcccgtaatatatcgtcacactcgtatttgataacataggctctgagcaaaatcaaacgacaataactttcaacacggatgtccgaatgaatcctgtaatatatcgagacgctcgtatttgaaaacggaagctctgagcaaattcaaccgacgataacattttactcggatgtctgattgtgtcccgtagtatatcgagacgcttgaaatttataatagaagctctgagcagtatcaaacgacaataactntttactcggatgtccgattgtatcccgtagtgtatcgagaagctc

SEQ ID NO: 14314 - DNA, 392 bp, Glycine max
ctattccaagttcattaaccatacctttgttctagatttcttccttcactccttcagctagggccatgtattctgcttcagttgttgaaagagcaacaactgattgttgtaccaaacaaagtaaacacatatcctgttaaggatttccttgtgtctacatttcctgcaaaatctgcatctacatagcttgtgattgttgcctcttgtgctgtcttcttgtaccttaatccaacttgcaaagatccatttagataccttagtgtccacttcatagcttcccagtgtgcactgccaggatctcccatgaatctgcttattatgcttacagcatgagccaagtcaggtctgctgcataccattccatacattatgcttccaacaccactggcata

SEQ ID NO: 14315 - DNA, 420 bp, Glycine max
  unsure (1)..(420): unsure at all n locations
gctgcttctacatctgttngctntaattgcagagtgtatagttgcaacatgtggacaaattcgaaatacatcaatttattggattcagtcaatgttctcacatcaagttgagtatgaaaactgctagtcccaaatgtgattattacttgatgatccacattccccttgctgcaatctttgtaaaaagacaaatccctacacataagtcaggcacatgtcggatattgtacctacacaacccattnttgaagatttccatgagttggaatggagcagacaagatctttctgaacttccttaaatatatttaccanattggaagggactttgaccccttcaggaactgagaatgaaggccctattgcttggccaggcccatgataagggttctatgttagacaagtgtgctcagatatctta

SEQ ID NO: 14316 - DNA, 507 bp, Glycine max
  unsure (1)..(507): unsure at all n locations
tctanactntgtacaagaatgaagctctgataccacttgttagacaagtggcctcagatatcttaagaagggggggttgaattaagatattccaaactgtttcccctaattaaaaatctatttcactgtttactcaagttatgaattcccttaatgaaaatcttcttaaatattaatttaaatgaaacaatttgaatatgaatataaagcaataataaataaaggagattaagggaagagaaaatgcaaactcagttntatactggttcggccacacccttgtgcctacgtccagtccccaagcaacccgcttgagagttccactatcttgtaaattccttttacaagttctaaacacacaaggacaatccttcctttgtgtttagagatcctntacaacaagagactcacagtctcttaatcccttagagaatgagaagaagaagaagaacanatctctctagaaagagatggattttacagatngagcactcanataattcctta

SEQ ID NO: 14317 - DNA, 426 bp, Glycine max
  unsure (1)..(426): unsure at all n locations
agctntgtatgtgtataaggtgtaggacacccctatgttggttagagcccggagaatgactcgccttatgaccagaagtggtacagcaaaccactgagaaagttaagttaattcaggaaaggataagaactgctcagagtaggctgaaaagntatcatgataagaggaggaaagatcacgaattcgaggttggtgatcatgtattcttgagagtcactctgtggactgnngttggtcgagcattgaaatcccgaaaactcacatctcgctttattggtcctttccaaattcttaagagagttggccctgtggcatgccataatgcactacccccgtctctttctaatcttcacaatgtctttcatgtgtctcaactccgtaagtgtatctgtgatccatcccatgtgattgaattggatgatgtac

SEQ ID NO: 14318 - DNA, 419 bp, Glycine max
  unsure (1)..(419): unsure at all n locations
gcttcctgtttgctttacagntgatgctataattcatcattagaatatgccttttctttntattntaaagatgaaatctcatacaattgtctaatttccatcagaaggcaatgaatatgccaatcactgtggaaggaaatgagctgagtagatttattgacccgccaggagatgcctacttggatgatttatttcatccattggataaacaacctgtggaggttgtagcagaggcgtccacttctacatccacttcacatatgactaaaggtaatgcatctgcaattgatggtgtgaaaaatgacttggctaaagagttgagagctaccattgctcgaaagcaatgggagaaggatagtgaaatnggacatgccaacaatggcgggaatcttttgaccgagtgatgataggcgtctaaa

SEQ ID NO: 14319 - DNA, 248 bp, Glycine max
tcataagttatcacacggaggtccgagtcacgaacatcacatatcgagacgctcgataaggaacaactgaagccctttatatatagaaaaggccataacttttcactcgcatgtccttttcatgcgcataatatatcgagacgctcgaagttcacaacggaagctctcgagaaatgaaattggcttaactttcactcggaatccgattgggcacataacatattgaacactcgaaattgacaacagaa

SEQ ID NO: 14320 - DNA, 397 bp, Glycine max
agcttgaaactcgagggagggaggataatctgagactctattaaaagatctcaccttttgtcagttgtggaatgcacacacacatacacacaaacaatcagtacagataatgaaaatcatatgggcatacaatccatttgacatacctaagcaagctatcaaatatctttcaaagagtataatgcaaaagcttcatagcattcccggataatttcgctgttaaatgctgcatcataattcaatactgacaaaaactgcaccatacaaacatcagaacctacaaatgcattattacattctatttaaaagaagaaacaaaaaatgaaaagactaagaacttgattatcaattatgtacagatagctgaaaatgctagtattaatgcttgtagtactca

SEQ ID NO: 14321 - DNA, 409 bp, Glycine max
  unsure (1)..(409): unsure at all n locations
tcttctctgggttcttcgggggaagatgatgaatgggaaacagtggggccgaagaataaatatactgttacaaggactcaaagctttctcccatcagaattaagtggtatttttggaggacaacttanaagtttggtgagactaaaggtacaaaacaactctataatatattagtgaagggattttttttgttttaaatgtcaacttcattaagattttgggaaatttcatttgaccagtctgttgcttcgtgctgatattcttcaaagaaaaaatgaacatgtaaataaagtatgtattatataaaaaaaacattatggccattggcacgatttctttttgtcatttaagaaatagagcntctgctactgttcaaccatatctctggctccatcttgacatctatcct

SEQ ID NO: 14322 - DNA, 359 bp, Glycine max
  unsure (1)..(359): unsure at all n locations
actaagctntanaagattggctaagattttgttaanacataagcacttagacaatgaaggaaagctggagttgctgcacatgatgtccaacgttatgtcaaagaataagatcgggctgcacaatgcacaaggcaagatgaaatgtcaaatgaagaatcgaagctgcaggattcacgatgtcggatacaatgtccaggacatcctgcccganacactggaggtgctgtacaatgtacaatgcaagataaaagtcaagtgaagaagtgaaactgcaggatccacgatgtcggatacgatgtcctgacatccggcccgataatactggacatatgaatctgttatatctttaacagattatt

SEQ ID NO: 14323 - DNA, 401 bp, Glycine max
  unsure (1)..(401): unsure at all n locations
agcttgcaatccaaaggtaggaaactgagcgaatccgcaatcctgtgtccctgagaagaaccacttgaaaaaaccccacatgaaactgatggaaaaatacttcaagaacccaccaacttgcttcctgaaatacaagataattaatcaactcaatcattatctntaattaaatgattaattattaggacaacttataatccagttccttaactgttttttgtgttgatttttccagccagaattgaagttttacttcagtaacctgtattaatccttaatactacaaaactattataactctaactttaattggtgtaccaatatcaaaattacaaattatcatatcaattttattntaaattaanaagaacaagaatnttgatgactcaatgagaggagta

SEQ ID NO: 14324 - DNA, 256 bp, Glycine max
  unsure (1)..(256): unsure at all n locations
atggtccaagatcttccttctcgcctcttccatttttttgttgaaattgctcttggagggaatggaagaaggatatgctgcttctctctagaatcacctgcatacaaattgtaggaacttacccttacattttgccatcatatctttctggagtagagtgaggttgggcaggttccattgcggatgacgaagatgttgctggttgagggccttgacactgccttnccgacctcaatgcaatgacacctcacatttt

SEQ ID NO: 14325 - DNA, 410 bp, Glycine max
agcttcttagtctcagatgatgcagctgagtttgtagctacctcatgcactcctctaatgactatggcatcatttctggcgctaaactgctgagagttggaagccatcttctcaattaaatttctggcttcagcaggagtcatgtctccaagggctccaccactggcagcatctatcatacttctctccatattactgagtccttcataaaaatattggagaagaagttgttctgaaatctgatggtgggggcaactagcacatagtttcttaaatctctcccagtactcattcaggctctctccattgagttgtctaatacctgagatatccttcctgatggctgtggtcctggaagcagggaaaattttttctaagaatactctcttaaggtcatcccaactcgtgat

SEQ ID NO: 14326 - DNA, 454 bp, Glycine max
  unsure (1)..(454): unsure at all n locations
agctatgagcanattcaaacgacaataactctttactcggatgtctgattgagtcctgtaatatatcgagacgctcgaaatggaataccgaagctctgagcaaatttaaacgacaataacctttttactcggatgtctgattgagtcccgtaatatatcgagatgctagaaattgaatgttgaagctctgatcaaattcaaacaacaataactttttactctgatgtccgattgagtcccgtaatatatcgagacgctcgaaatggaataccgaagccctgagcaaattcaaactacaataactttttactcggatgtccgattgagtcccgtaatatatcgaacagctcgaaattgaatgtagaagctttgagcaaattcatacgaacaatactctttactcggatggtctgatgagtcccgtaatatatcgagacgctcgaaatgaataccg

SEQ ID NO: 14327 - DNA, 305 bp, Glycine max
atcttagagtcgactgcgctcgctgaatgacacgagcttcagaatttgattcttacctttcttccggaggccatcgggacttactgaggaaacgctcgaaatgacaacggagcttcgacaattcgatggtcataactttcaacggatgtgcgattctgggacataacacattcaagacgcttcgaatattgaacaacggaagctctagagaaattcgaatgggcataacattctacacaaatatccgatttgggaaaataatatatcgagatgctcaaaaataaacaacggaatctctagagaaa

SEQ ID NO: 14328 - DNA, 319 bp, Glycine max
  unsure (1)..(319): unsure at all n locations
agctngaatcagacatccgtgtgagaagttattgtccattgaatttctcaagagcttccgtagttcaatttcgagcttctcgacatattatgcgcncgaatcggacatccgtgtgaaaagatatgaccatttgaatatctcgagagcttacgatgtttaatttcgagtgtatcgatatattntaaacctgaatcggacctcagtgtgaaaagttatgactatttgcatttccggagagattncgatgntttatttcgagcgtatctatatattataagcctcaatcggacatccgtgtgaaaagttatgaccatttgaa

SEQ ID NO: 14329 - DNA, 405 bp, Glycine max
  unsure (1)..(405): unsure at all n locations
agcttgcccttcaactcattcttatacgagataaagtacttagttagactgaggggacacttgacacactcaaactaagtaccccctttgacaacatattcacatattntatacagcacgtcttgaccctcaacatatatggacaatgagaatcactcagccgtgattatcaccaataaactcacttaaggataattacttgattagaagtgtctaagcatgattagaaggtgtattacacaactggtaatcagccattgcagcagcacttcacttctcttttgacgtatgcaactatccaacactattagaaaatatgctttctacatcnggtatttatgactttcaacatcggtttttgaaccgatgttgaaagtaccgacgttgatagtattatcgttaaca

SEQ ID NO: 14330 - DNA, 450 bp, Glycine max
  unsure (1)..(450): unsure at all n locations
catgcaagctngaagcgacttccaatatatatgcatggatcttgttgctgncaattggattcaaatgtttttgcgttaggtctcaaccaagttatctgttgggtctcaatcaagagaaggtagctattttgaaggtttagatcttctacaatgatattttcattgtacaagatttttttaatagacaaataaaatatatattatataagtaaaagaattctggcaggatcatgaataattcccccacgaccccaggccactagacccttaattaacggcattgggaaagattntagtcatagaaattatttaatttaatttaatttataaaacaaatgttctannatataaagttaatgatcttaatttatactatatntaattataatcaacattttcttaagttatgttaacatcatgataatgagatcacttaattattcttgatgt

SEQ ID NO: 14331 - DNA, 308 bp, Glycine max
agctggtcagcaagggagataaatcataacttcttttaaatctaaagatgttgtttccacttccagaccattgtaggtattgcacacggatctatttggaccaacctgaacattgagtttgggaggaaagaaatatgatttttcatagttgatgactattcaagataaacttgggtatacttttttctcataattatgagtctttcaagggcttttaaatattttgtaaaagagttcacaatgaacaagacttttgtatctcttctattagccatgacactgagtttgaacatgttgagatcagatca

SEQ ID NO: 14332 - DNA, 343 bp, Glycine max
  unsure (1)..(343): unsure at all n locations
agcttgccaatgttcaaaggatgaaagccatctacatccttctcaaggctgatttcagtcagaactttctcttcatttatgtgcttangcaacggaagctgaaccaatatacctgcggatattaacaaaccaagcctcacaataaaaaaaaaggcccanaacataaaagtgtaatcgatattaaaaataacacatgcatgaattgaaaaagcatgtgttcaggcatgtaaagtaattgaggcacaaaaatgtgaagttaattgataagtatgatgaaaatcgaanagagtgtaataagtgacgaaccatgtacatcanggttaacattcaactcgtgaacttg

SEQ ID NO: 14333 - DNA, 376 bp, Glycine max
  unsure (1)..(376): unsure at all n locations
gcttgaatgcactattcaatggtgttgactataacatcttcagactgatcaacacttgcacagtggccaaagatgcatgggagatcctgaaaatcactcatgaaggaacctccaaagtaaagatgtccagattgcaactcctggctacaaaattcgaacatctgaagatgaaggaggaagagtgtattcatgacttccacatgaacattctttgaaatgccaatgcttgcactgccttgggagagaggataacagatgaaaagctggtgagaaagatcctcagatccttgcctaagagattngacatganagtcactgcaatagaggaggcccaagacatttgcaacatgagagttgatgaactcattggttctct

SEQ ID NO: 14334 - DNA, 207 bp, Glycine max
  unsure (1)..(207): unsure at all n locations
accatacagaccttttgcctttcatgcaagcacctggagcaattgagcagcctgatgcttatgctgcanatattacaatagacctcctcaaccccagcagncaaatcaaacacagcagagcaattatgacctttccagcaacagatacaaccctggatggaggaatcaccctaacctcagatggtgcagccctcagcaacaacaaca

SEQ ID NO: 14335 - DNA, 381 bp, Glycine max
  unsure (1)..(381): unsure at all n locations
gctngtcatcccacaactgataattccctttattttttgcataaantttgcctgctctaggtatttggaggttttcctgagtcaaaacgaattcgccatacatcgggtccaatgtaaacacaaacactccattatcaagggtgagaacaaagattattgagctagaatacatgcacgaaccagctgcaagaaaggtgcttccgggttggcacacgttcacaacacatctttgttctgttgtgtcatgctgcaaattagcatatgcatcacattaagcactgaattcactaacaatcctttgtgcaattgtttataactctttcttttaagatagtgattaggaggagggtggaagctccttccatgatcaaggtaatactt

SEQ ID NO: 14336 - DNA, 462 bp, Glycine max
  unsure (1)..(462): unsure at all n locations
tttattacttcccaaagcttgcanaggatgctgggtagggtaggagaatcaaaatccatggagcaatgcacaactatgattggccactctgatttgaatggagatggcctgctttgctttgatgaatttagagtcatgatgcagcgatgagtctttgtctttacttgatttaatgggggatggggttgaatttcattcatttatttgtaattagattttaaatcttgtgtgatgcacgaattctattacattatatattnttttatatttatataaaaatgaatatgcattaataaaattaaatcttataatacttattagaatataaatgtaattatactaaaattgagaaatatatgtattttaattgcgagatgtattaatataagtctaatgaattattttatgttaaaaagttggttgactgtnttgaccattaactcaatgtanatttacaacaca

SEQ ID NO: 14337 - DNA, 240 bp, Glycine max
  unsure (1)..(240): unsure at all n locations
atgaccattngaatttctcgagaggtttcgatgttcaatttccagcatccccatatgtgatgttcttgaatcggacctccgtgtgaaaagttatgaccatttgacattctcgtgacgctccggtgtttaatatccagcgtctcgatatgtaatgttcctgaatcggacctccgtgtgataacctatgaccatttgaatttctcgaaagcttccgttgttcaattatgagcatctcaatat

SEQ ID NO: 14338 - DNA, 430 bp, Glycine max
  unsure (1)..(430): unsure at all n locations
tgcagcttgtggattaaattatatttttttatatatagcataacaacggctaataatgctaattatttaaccatctaacatttaatcattgaattacaatgtgttatccatttactaagntattcatttacaacccatcccatcatatatattatgtttggtgtctattatataatattaagaataattttataagtcatatgataattatttattattgaatgataatttaaaattattttacattatttaagcatgattattaaatactagatatttgtttatgaatttatatattaaataaagtgatacgatcacacttgattttatgtcatgaattcgattaattcactgatttaattaacacaaaaatatttataatatgctacacgcacacgactcattgattacacctacaagaaaatacata

SEQ ID NO: 14339 - DNA, 359 bp, Glycine max
  unsure (1)..(359): unsure at all n locations
gcttgtaggccttgatcttctttattaatatagtctttngcttcttgaagatcaatggaagtggaatagagaatgaggaaaggtgattggagatgccactttaaggagaagatgagtcaagaacatgctcactaccataggaagccatggataatagcttgaaggtaggagaatatgagtggagggagaggcatagaggggggaacaaaatttatgcctcagatgaggtcagaactttgaagtctaatttctcanatgatcaaagttgaaaaaattcacacacaaggcctctatttatagcctaagtgtcacacaaaattggaggggaagattgaattctattcaaatctatcttgaat

SEQ ID NO: 14340 - DNA, 328 bp, Glycine max
gcttctcgatatgttatgcgtctgaatctgttatgcgagtgaaaaattatgaccatcttaatttcccgagagctctcgttgttcaatattctagcatctcgatacgctatgtgcctgaatccgacatgcgagtgaaaagatatgaccatttgaatttcttgagagcttccgttgttaaatctctagcgattcgatacgctatgcgcctacattgaacatgcgagtgaaaagttatgaccattttaatttctcgagagactccggtggtcaaattcgagcgtcttgatatggtatgcgcctgaatcggacatgcgcatgaaaagttatg

SEQ ID NO: 14341 - DNA, 491 bp, Glycine max
  unsure (1)..(491): unsure at all n locations
ctgcagctgaagagtttggctttacatgccttactcccttaagtagtatttgtattggttattatattgaatgttacatcttagtccatatcatatcttttgttcatcatgcatcatcatgagtgatgcaatcctaccccccaagagcattggatagaagactccaagaagattgggccagagatgccagagaaggccccagggttctcatgagccttagggtagatttcgggcccatgggctaagtatgagcccacttatctttgtacatattatattaaggtttcattatatttgggccttgtatttagggcttcatagtgtaggagaggtaccctagtaatgtaggaattttaagcccttgtatttanggcttcatggtatgtcttgatgggttaatcgatattgcctatataatcgatacacaactattttggacatgactgaatnttcaggagctcttcatcgatatatgtatatatcgatactta

SEQ ID NO: 14342 - DNA, 304 bp, Glycine max
  unsure (1)..(304): unsure at all n locations
agcttcatgatggtgctaagagagtcatcaataatgtaaggcttatcccagnattgaagagaaatttgatttctctgagtgagtttgacaaacaaggctatgtgttcanagaggagaatggagttctaaaggttctaaagtgctccataatattcatgaaagggatgcaaaagaatggcttgtattctctgattggagaagtgatgattggatcagctgttgcagtttctgtcaaaagggtgtcaaagactgaactatggcacagaaggttangacatgtgagtgagagggggttgattgaact

SEQ ID NO: 14343 - DNA, 372 bp, Glycine max
  unsure (1)..(372): unsure at all n locations
atgtcttagatctcaacgacactcttgattgcnaatttacttttcctattatcaattcccatacaaattccttagtcattctactagtatatgtagatgacatcatcctatcagggcccaatattgtcttcgtacaagctgttcagaccaaattacagtctctgttcaattgaagatccatgagcctttgaaatattctcttggcttagaaatagtcaaattcaacagaggcatctcactatcccaacgaanatatgctctatctctttnggaagatacaggtttcttggcctgcaaacctctcaatttaccaatggatcccaatctgagactcaatcttcatgatagagactctactcctgatccatcaat

SEQ ID NO: 14344 - DNA, 378 bp, Glycine max
  unsure (1)..(378): unsure at all n locations
gcatgcgagctagcacatatataagtatatcagcgtgacattgttcgtctaaatgtgacatgtttggataaattcccaataagcacggataaaagaaaataaattaaattaaatgtttttgacatattaaaattaacttatgcacatattaatttataaaatctctgtcatttaacttcttcaaaagacttttgacttgtttataaactaattntaatttatggaaaaaattaaatttattttactccttattctcttctcttacaaccgnttattgataagtttattcaaataaaacctaaatttacatcttctctgcaattctgaattagtgaatcactgattgaaatgaatntaactacacattactggttttca

SEQ ID NO: 14345 - DNA, 378 bp, Glycine max
  unsure (1)..(378): unsure at all n locations
agcttctagttggcattgattcttggtgtattcttttaacaccttcatgtaccgctcaactggatacatccaccgtaaaaaaaaggaccacataaccaaatctccctaacaagatgaacaattaagtgaaccattatgttaaaaaatgatggaggaaaatacatctctaattgacaaaggacaatgacagcctcattctccanatcatctaattgtcgagggttgatgactntgctatagatagtattaaaaacaaagcacanatgagttatggcaaccctaacgttgttaggcaggataccccgcatcgctacagccaatagttggtgcattaagacgtgacaatcacaagactttcaagccgaccaattgagatca

SEQ ID NO: 14346 - DNA, 496 bp, Glycine max
  unsure (1)..(496): unsure at all n locations
gcttcttagacttgatcacccttcctacactcgttgtangtgtaacctccaagaacacatgatcacccatttctaactctagcggtctncatcgcttatccatataagacttctnacctacttgtcatgctngcatccttttctgaattaagttgatcttctctatagttggttgtaaggactctagccccacaaccatgttcacaccatcttgataccaacaaagagatgtcctacacctcctatctagcatgattgttgtangtgaattccacaacaggtagaacctcttccccactcccaaggtgatcaaagacacaagccctcaacanatcctctaatgataggatcttcctcttggactgcacatncgttgatcgaggccgtacccgaatcanataaaaattaanaatgtagtatctaggaagtgatcctangtcatctcccaacgagcaatggtcaatcaaacattcataacagatagtaataaaatagt

SEQ ID NO: 14347 - DNA, 498 bp, Glycine max
  unsure (1)..(498): unsure at all n locations
agcttgaataaatatattattcaattttaatattatattttcataaaaaagaaaaaaaaagcacatcatcttaatgctttataaacaaatattaaataaataaaatgcatgaattaatattcactatcttaaaaacatttaatatttttatttaataagattaattaaaaaaatgtaactataagtagatntagaattatgttttattagaattatatacaaatccttccaatgaattagaatcataatggcaagagaccaactttngttattttttcttcaaaataataaaatataaaaaattattcaaattatttaaataacatttattgtatttaaaattaanaatngattcaccagttaacccgttattccacagacccacttaacctangagtngcatacatannatattgatccaacgtgtcatatttatatatttgaagaaatatactcatattanaaaatttaattatatctacacttgtgtattttata

SEQ ID NO: 14348 - DNA, 277 bp, Glycine max
  unsure (1)..(277): unsure at all n locations
agcttccattgttcaatattgggcgtctattatattatgtgcgtgagtcggacctctgagaganaagctatgaccatttgaatcgctcaatagctttcactatcaatttcgagcgtctcgatatattatacgcctgaatcggacctccgagtgaaaaggaatgaccatttgaatttctcaagagctctcgttgttcaatttcgagcgtctcgatattctatgtgcctgaatcggacctccgagtaaaagtcatgaccattagaatatctcgagagct

SEQ ID NO: 14349 - DNA, 449 bp, Glycine max
  unsure (1)..(449): unsure at all n locations
agcttgttgaatactcaatgctaaatgtgtttggatgttcgacatactatcatgtaagtgaaggtaagatggagtccacacccaccacaggattctttatgggatatggagatggagtcaaaggattataagtctggtcttcatctgaaagaaaggccattctgagtagagatgtcatctttgacaaactctctatgttgcattcaaaattcaatgaagaattgggcaaagctaacgatgtcattaagcaggtggattntgatagctctacaataaaaaaacataagcaattaggatcttcaaatgcaccttcaacatcaaaacacaacaccagttaaggcgattgactggacgagtcaaaaccattcatagaagctaagaaccacaacacccagatagacataaaggcatatcacagctcttgaaagatatgattctgagatagtgtc

SEQ ID NO: 14350 - DNA, 359 bp, Glycine max
  unsure (1)..(359): unsure at all n locations
agcttcaacatcagactccttncaggtgctttaactacttcacatggacttgatggggcctatgcatgttgaaagccttggaggaaagaggtatgcctatgttgttgtggatgatttctccagatttacctgcgtcaactttatcagagagaaatcagaaacctttgaagtattcaaagagttgagtctaagacttcaaagagaaaaggatcgtgtcatcaagagaatcatgagtgaccatggcagagaatttgaaaacagcaggttcactgaattctgcacatctgaaggcatcactcataagttctctgcagccattacaccacaacagaatggcatatttgaaaggaaaacaggac

SEQ ID NO: 14351 - DNA, 414 bp, Glycine max
  unsure (1)..(414): unsure at all n locations
catgcacgcctcttctagtgtttaaaaaaattgagttgtactatattatttctagatgtcataaattaatatcagcaagtcattaagataacaatattgtgattagcacttaattaaatttattagccaattttcatctttagcttaattntctgtcaccaatccgcaatcctcctttcaatntgtgtacatttgtattaattgactatcactgcaaatccattaaacaatgtttatagaaatattcaaaaatactttattaatttattcagaaaaaagatgtaatatttttgcatttcataaaggcaattgtcaatagaatntcatgatatatggaaataaaaattagtaaatacataactactaannaattataaaatttaaagtaagtgccaagtttagtataaaaaatac

SEQ ID NO: 14352 - DNA, 415 bp, Glycine max
  unsure (1)..(415): unsure at all n locations
agtcacctgcggcatgcaagctngcatacaagattctccttgcctggcacttcaaaaccttcttgttgggtcatatagatgtcttcctctaaatccccatgcaagaatgcagttntaacatctaactgctccaagtgaagattctctgcagctactatgctcagaataactctgatggtagtcatctttacaactggagagaagatctctgtgaaatcaattccttgtttctgctgaaaccctttcaccacaagtctcgccttgtatcttcttctaccgtcagattctttctttagcctatagacccacctattctgtaatgccttctttccttctggcaatttagttaaagaccacgtcttattcttctgaagggatgtcatctcatctttcatcgctagctcccactcaatag

SEQ ID NO: 14353 - DNA, 410 bp, Glycine max
  unsure (1)..(410): unsure at all n locations
agcttagactgagttcagcctaccatcctcatactgatgcccaaactgaacggaccattcagtcgttggaggaccttttaagagcatgtgtcttatagcagaagggaagctgggagaattttcttccattgatagagttcacttataataacagttttcactctaccattggcatggctccctatgaagctttgaatggtagaaggtgtacgacacccctatgttggttagagcccgcagaaggcctcattntagtgatgtgccatcattttcttctattttctaaaccctttttacaccactttaattactgattggtcttaattgtcaattaattaggcagttttattatttggtctcatntcagctaattgatgttctaatctaatttcacgaattaatgaaacatt

SEQ ID NO: 14354 - DNA, 254 bp, Glycine max
aatgagtttatgagcaacttaggattcaaaagatgtgacatggaccattgctactatgttgagaaatatactaatagttatgttatccttgtcgtgtatgttgatgacatgttgattacaggatctagtatgatagaaattaatagtttgaagcaatatgtggcagaaaactatgaaatgaaggatcttggtccacctatacaaatccttggtatgagaattcttagaaacagatcacaatgaattttgaagtt

SEQ ID NO: 14355 - DNA, 341 bp, Glycine max
  unsure (1)..(341): unsure at all n locations
agctntcaacgtattagacagggcaatatactttcttcacagagctgggcaatgtactaagtgtactttgttaaactatttaagtagagttgtaaacgtttgattgctagctgaaaagtttatttagctattcgataaataaatttttagtaacttttaatatttttacacaccattngaagcaatattatctagaatattaatatttaaaatctaactgtctatattgatatatctttattatcaatatatttattcatatgctttgatatctctttaaaaaaaatcatgatatcatttcttgtatcattgcataaatcttaactatcttaataattaat

SEQ ID NO: 14356 - DNA, 379 bp, Glycine max
  unsure (1)..(379): unsure at all n locations
tgcagctgcagcttacaacagattttgtttgaccctctttcctacaattaaaataactctttttcctctcaagtgtttccctctctttctcactctcaagtgttgtgctcaccttttctttatctcttttctcttgaagaagattctctctcattttcttttgatcctcacacacttctagtggactcaatggcttgagcacaatctctttgtcttgctgcatgaaagagatcttgttggtgtaaccgtcatgattgactcttttatcaaatggccatggtctccccaaaagtaagtgactggcctcataggaacaacatcacanagtaccttatcattgtattcccaatggaaacgtccacttacactgctgcctcac

SEQ ID NO: 14357 - DNA, 351 bp, Glycine max
  unsure (1)..(351): unsure at all n locations
agcttcatgggttccctcttatcatagtttcttacagggatcctctnttcattagccatttttggcaggatatatttcgattaagcggcactgtcctacgcatgagctcagcttaccatccgcagactgatggccaaactgaggtgctcaatcgcgtgattgagcagtacctgcgtgcgtttgtccacggcagaccaaagaattggggaagattcatcccttgngtagagtggtcgcataactcgtcctggtctgtgtggtccgggtctacaccgtatgagattacatatggacgganaccttttacattttctgactacctcttgngcacatcgagacttgacgcggtgg

SEQ ID NO: 14358 - DNA, 467 bp, Glycine max
  unsure (1)..(467): unsure at all n locations
ataaacttcagatttcagagctcttttagagcacannaattggtgctcttctcttcctctcccttcattcatctccttcttcctccaagttcttatccatggcctcctatggtggtgagcttcttctagactcatcttttccttgaagtggcatctcctctctctcttccttctcgatttctatgccattcatattccaagaagcaaaggaatccattgatgaagaagatcctaggcctacaagctccaatggagcttacatcatgtggtatcaagagcatcttcatctaggtgatgctcttttgcttcctctatctttttgttcggtgaattatctttaattccttgctcttcatcttattctccatgtatatcctccattgtcttgtggtttggtgctatttagagtaaattataaaaaataaaccgattaaatcttagatctacacttgttctngcatttctat

SEQ ID NO: 14359 - DNA, 393 bp, Glycine max
tcagcttctgacctgaataacacatcctcaatcacttcatatggttttgtgacagagcgatcaaccaactggagggtcatgcatgtgggcattatctctatctctccaagtcgtcgacacatggagagaggcattaaattgatactagctcccaagtctatgagagctttacccacaacaacctcaccaatagaacacgatatactgacacttccaggatctttgtgcttcgggggaaggatgcgttgaatgaccacactatagttaccttccacaactattgtgtcactgtggatataccggttattctttgtcagcatgtcttttaaaaatttggcatagagtggcatctgttggagagcttctccaaaaggcaaagtgatcttcatcttc

SEQ ID NO: 14360 - DNA, 316 bp, Glycine max
  unsure (1)..(316): unsure at all n locations
tcttgtcctgaatcaacacatcctcaatcacttcatatggtcttgtgacagagcgatcaaccaactggagggtcatgcatgtgggcattatctctatctctccaagtcgccgacacatggagagaggcattaaattgatactagctcccaagtctatgagagctttacccacaacaacctcaccaatagaacacgatatactgacacattcaggatctttgtgcttcnggggaaggatgcgatgaatgaccacactatagataccttccacaactattgtgtcactgcggatataccggttattctgtgtcaacat

SEQ ID NO: 14361 - DNA, 267 bp, Glycine max
tgactgctggagtcgctgcactagatgtccaacgttatgctaacgaatagatcgggctgcacacatgcacaaggcatagatacagtgtcatgtgaagaattgatgctgcacgattcacgatgtcggataccctgtggaggacatcatgccccaaatactggacatataaatcgtgtgtatttgtaacagatcattgcgcaattagcaccagattagatgatctatctgtacgaacgaattacatgatagttgacgtgtgaagtacaa

SEQ ID NO: 14362 - DNA, 381 bp, Glycine max
  unsure (1)..(381): unsure at all n locations
ctctcgtacttaagaggtattttatatagtcattgaaaattgtgatgttggtnttatggaacaacaatctaattaggagatagagaaaaagatatagaccattaactgcagttattctaaaaaaaatacctctatagtgatcgggattgtagttgttctaaaattaagtattattctatattgatactttagatgttaaatattaatttaaaaatataaaatgtttaaaaattctacattattgttctataattgttagaagataaaactaatttatttaaataaatttcacagtcaaattttcttgaaatgttcctcgatatataaatgtctaataaataaaccaaatacaacaatcaactgcagagaaccccaacaatg

SEQ ID NO: 14363 - DNA, 424 bp, Glycine max
tctccacttgtaactggggcctaaattatatagcatggtttacacttgttgaagagcttccttggccttctttgttctagccctggccataggtcctccaagtccttataaaggttccttgtcttgtcctcatcactctccccctcttcaaaaggatttgtcctcaaatcggcttctccatatacatcaaaaagagttaagtcagacacactaaatattgtactcacattatactcaccgggcaattcaatcttgtacgcattgccatttatcctttcaagtacttgaaatggaccatcccctcttggttgaagcttggattacctttgctccggaaacctctcctttctcatgtgaacccaaaaccaatctttgggttggaaaacaaccattttgcgccccttgttgcatgttagcatactct

SEQ ID NO: 14364 - DNA, 372 bp, Glycine max
ttcttctttatatcatcaattcttcatgatctacaagaaggtccacctgcatgaaattttctgctaggaagctctctcttttgtgcgactatgtcatcctctttctcacgtgtagaagcaagcttgacaggttcaggtgcaggtgctgctactagtggaggcacttgaatctggttggcagaccttaaggtgatggcactcacattctttggattctgcatagcttgtgaaggcaattcgtcagaatattgggactgagcttgattcaactgagtagccatctgccccatctgatatgtcacactctaaatggaagctcttgtctcttgctgaaattgcatattctggatggtcatatgcctcactaactct

SEQ ID NO: 14365 - DNA, 379 bp, Glycine max
tgcaagctgatgattacatctccccctttctattcttattcttcttgatatcatcaaaatcttcatgatcccgactcgttggtggaggatgcatgaatgacaatcaattcatggggctccgaataaaagtggagaatggaggataggcgaagagcgctacgcaatcaattcgcgggtctcccgactcggtggtggaggatgaatgagtgacattcatctcatggggctccgaataatagtggagaatgcacgataagagaatatcgctaaagcgtcaattcgcggggctgcatactcgactgtgggaagaagcaaaaatgacaatgatctcatatggctactaataaaagtggtcaatggagaataggcgaggagcgct

SEQ ID NO: 14366 - DNA, 487 bp, Glycine max
  unsure (1)..(487): unsure at all n locations
ttctcggtgggttgatgcactctatcatgtaaaatagcatattgattgttatacatattttcaatcaactcagtntcctcctcaggggtcttcagctttatctttcctcttgctgaagcatctaacaactgtttggtttgtggtctcagcccatctataaacatgttcaattgaattggctcagaggatccatgtgtgggagtctttctcaacataccctagaacctctccaatgcttcactcaaggattcatcagggaactggtgaaatgatgaaatagcagctctcccttctgcagtctttgactcggggaagtatctcttcataaatttataaccaacttcctcccacgtcttcagactgttacctttgaatgaatagagccatttctttgcttctcctgccaaagaaaatgagaatacattgagcctaatggcttcatctggcattactgctatcttcacagtgttacaaatttctatgtaca

SEQ ID NO: 14367 - DNA, 449 bp, Glycine max
  unsure (1)..(449): unsure at all n locations
agctntatcgtcaccaaagattggtattttattcttcatttacaaaagtcttgttatgctctttcaagaccctattcttcgatatttttgggttactttccttgactaaagcttcgtgacgaactatgtacgacataacttcattactgttattcagtatatacaaatgagcttgttgcaattcttctagacttggagtgataacagatagtccccttgaacccttacctctcactctctcgttatgccaagacttcggaaccccaataggtattttcttttccatgtactcggaacaaaactcaatagcttcttccgcaatgtacctttcaacaatagatgcttcaagacagtgtagattctttgtgtatccttttaagatcttcatgtatcgttcaactaggtacatccatcgcaaataaacacgaccacaacatttaatttccctc

SEQ ID NO: 14368 - DNA, 333 bp, Glycine max
  unsure (1)..(333): unsure at all n locations
cttgagccaattcanacgacaantaacttttactcggacgtctgatttagtcccgccatatatcgagacgctcgaaattgaatgttgaagctctgagccaattcaagcgacaatatccttttactcggatgtctgactgagctccgtaatataacgagacgctcgaaattgattgtcgaacctctgtacaaattcaaacgacaataactttttgctgggatgtctgattgagtcctgtcatatctcgagacgctcgaaattgtatgttgaagctctgtaccaattcaaacaacactaacttgctactcggatgtcagattgagatccgtcata

SEQ ID NO: 14369 - DNA, 367 bp, Glycine max
agcttcccaagttttaagttattcctcttttctgtcctaagcaaagttccaaaagtcctattaacaacttccgtttgcccatcggtttgtgggtgacaagtggttgaaaataacaatttagtgcccaacttgctccacaaagtcctccaaaaatgcaaatcatcaagcctaggtataggatgcctatatttaatggtgatgttattaagggctctacaatcagaacacatgcgccatgtcccatcctttttagggaccaaaatcactgggacagcacaaggactcatactatctcttacccaacctttgctaatgagttcatccacttgtctttgaatctctttggtttcttgtgaattacttctat

SEQ ID NO: 14370 - DNA, 415 bp, Glycine max
gaactacaatggaaccaccattatatttcgccaagaacacacatcctgagtggaaccaggttttcgccttctcgaaggaccggcttcaggcctctatgctggaggttaatgtgatagataaggatgttctgaaggatgacctcatcggccgggtgtggtttgacctgaatgagatcccgaaaagggtacctccggatagccctctggctcctcagtggtatagattggaggataggaatagcgacaaagcgaagggggagctgatgctggctgtttggatgggtacacaggctgatgatgcttttcccgaagcttggcactctgatgctgcgatggttagtgggagtgatgctcttgcgaacattagatcgaaagtttatctgtctcccacgctttggtatttgaggggtaatgt

SEQ ID NO: 14371 - DNA, 447 bp, Glycine max
  unsure (1)..(447): unsure at all n locations
agcttcataaggttatatatggcctcatataagctcctaaggcttggtttgataaactaaatgagactctactaatgtttgaattcaaatccaacaagtttgatccttcactatttgtttattttaaggcttcatccataatctacattccggtatatgttgatgacatcataaaaacatgaaatgatattcctttattacatcaactcatttctaagctaaatatagtattttctctcaaagatcttggatcctcagattatttcttgggaatgaaagtaaagcatctatctgatggttccattgctttaacttacaccaaatatattagagacttaatgggcaaaaccaacatgttagatgtcaaacctatatcttccncaatggtaactggctataagctcaactagaagtggtctaatccctttgttttatccctatatgtat

SEQ ID NO: 14372 - DNA, 377 bp, Glycine max
  unsure (1)..(377): unsure at all n locations
agctntgttagctctagaggtattactttataaattccattaacatttatgttaactaacaataagaataattatccttgatccattcaactaaccatgtgcaacaaagtaaataactacattacggcataatacaaagaaattattatgaatttatttattaacaaatgttcacaatatctctcaaacatatgcaactatactacttgttaaataaaaattatatcagtcctctatttgatttacatatactatagagacaagaatcatggtcaacaatttttttccagcattataaacaatcaaaggtatgttcaatcaataattaaatcatagtcaacaacacatgacaagctttgcacaatagaaaacactac

SEQ ID NO: 14373 - DNA, 404 bp, Glycine max
agcttgtctctcagatagtacaatcttgctctcctgaccttacggtggcttaccactctgatttctttgatgtttggtgagtaactgtaacagtaaatataagcatcatataagaaaactagctcacaagaaaaatctggtaaagactacatatgaaaaattagcttggccttaaacatcaattggtaatttaataaagtgaactgctgggtaatttcttgaataaataaattcagatcttcaaaatgataatttcataaacttttactatacaacatatagacttaagacaaacattgagcataaaactatagaagcatggcaaatgttcatctgcaaccaacaggaatgtaggtcacacattgaaacagatatgtttatctcaatctcatactccattcttc

SEQ ID NO: 14374 - DNA, 371 bp, Glycine max
  unsure (1)..(371): unsure at all n locations
agctngcatccnncattttccttattccttcaagctataacaataaaagtattatcaataccatcaaattaaaccaataattaattaaaatggtcacattaattatatgtcatgccatgttgtcaacaatactgcctgataattaaaatcaaaataaatacaaaactcatggtttttaactattagtatgattatgacggttagaaataatctaagttctacatcgattaaaaataatttcaaattagaatatataagtgagggaaaccctcactccttgaactaacttttgaaattgagttagacttttcacattatttattctaagaatatattagagtatattatcatatcttctaaccatgactatt

SEQ ID NO: 14375 - DNA, 414 bp, Glycine max
agcttcagtaaataggcattactcatatactctttcaggacaatatcgcgattcaggtgcagcatacactggtaaatttacaagttcaggaatctttgggtctctcaaacgaagatgaggaggttgatcatgttcatgatttgtgttgctcctgcgatggaactaaatataaatgcctatcgagaaagaaaatgaactgcaaactatatctgttgacaaaatagtcagtaatttctgtcattatttatcaaaaccataaacagagaggctgacacaaattattactacataaatcagtgaacattggctgtatttttcattcacaataaatcggcataaatcaaactgcattcttatataatataagcgtggttcttacacagcgaaatttttcatattgcacattgagtttac

SEQ ID NO: 14376 - DNA, 441 bp, Glycine max
  unsure (1)..(441): unsure at all n locations
agcttatattaactcttcttctagatgttattgttacgccaaacactcaaaatggaaatgctcttttgcacccaacatttaacttcctccattacatgccgtagataaatataacaaaattcaatcttagtcttactcacttatcacatgacataataaaatattggagcatatattcgactacctaacaagttgcctattttatatgatagtattgtttttctaccaatagaaaagatctacgtattatgttaagtaatttcaaattatgtcttatttataattaaaaaaatttatttcttgtctctatcaaaataattgaacttaaatcttaattgaaacataagtaagtgataataaacagtataaaactgtgtgtctttgaaaagtctctaanattaaatcattaaagtaacatgtgtatgagttggctttataccg

SEQ ID NO: 14377 - DNA, 426 bp, Glycine max
  unsure (1)..(426): unsure at all n locations
agctngtactcgaagccctctntctattgttgaggctccacaccgccagcggatactagctgctgagtctgcttccttcaatcgactttttgtggagcgggcatacaagtatcgccctgttaatgtggtggaatttgaacttccgcggcagcagtgtgtggtttacttggatctgaagcgggaggagtgcaccaatttgttcccatctggccgagtatattcacaggcattccatttacgtggacaagggtttttcttatcagcacattgcaacatggaccaacagagctctttccattgctttggcctgttcttaggaatgcaggaaaagggctcagttagctatgccgctgactatgagnttgctgctaggtcaacgccaacagaggaatttgttatcaagcacaaaggcaattatgtattcac

SEQ ID NO: 14378 - DNA, 246 bp, Glycine max
  unsure (1)..(246): unsure at all n locations
agctntcactcgcatgtccgattcaggcgttttctgttcgagacgctaganatctaacaaaggaagctctcgagaaattcaaatggtcataacttttcactcgcatgtgcgattcaagcgcataacatatcgagacgctcgaaattgaacaacgggatttttcgagaaattcagatggtcgtaacttttcactcgcatgtgctattcagcacattgagtattgagacccttgaaattggaccaagg

SEQ ID NO: 14379 - DNA, 444 bp, Glycine max
atcctctgagtcacctgccgcatgcaagcttcaagaattatggcctcatcaaactacttgtttcctgagggaaattctataaatagacctcccatctttaatggagtgggttatcactactggaaaccccgcatgcaaatctttataaaggcaatagatttaaatatttaggaagccatagaacaaggaccttatgttccccatataatagccggaagtgcaacaatagaaaaacctatagcagattggactgaggaagaaagaagattagtacaatataatttaaaggccaaaaatattattacatctgccttaggaatagatgaatactttagggtttcaaattgtaaaagtgctaaggatatgtgggatacactacaagtaacacatgaaggcacaacagatgttaaaagatctacgataaacactctaactcgtgaatat

SEQ ID NO: 14380 - DNA, 470 bp, Glycine max
  unsure (1)..(470): unsure at all n locations
agaggaatagctgtgacgaagaagagggacttgtatcttatttatagaccaactcatagnttggattgatgaatataaccttcatttttacttcgtaacttatacgaatttaagtataataatatcacatgaatccaagacaaaaaataagaactttctggagacttacaccttccaaatctcaaatataaacaaatgaataaatttcatatattaaaatcttatttaataagatgatcttaaaaataattttcatttaataagatcaattgttttatatttaatatcaagcttaaataaaaattaattaaaacattataaataactcaatttaataaaattaactaatttctttaataaatataaataatggtgttttataatcgagatgtagctaatatcttaaaaaacatatgagactcatttgagtttctcataatgtttggataagaattaattaatatgacaat

SEQ ID NO: 14381 - DNA, 394 bp, Glycine max
actcaagcttcttagtttcagatgatgcagctgcattcgtatcttccttatgcactcctctaatgactatagcatcatttctggcgctaaactgctgtgagttggaagccatcttctcaattaaatttctggcttcagcaggagtcatgtctgcaagggctccaccactggtagcatctatcatacttctctccatattactgagacctttctaaaagtattggagaagaagctgctctaaaatctgatggtgagggcaactggcacatatgtttttaaatctcttccagtactcatacaggctctctccactgagttgtctaatacctgagatatccttcttgatggctgtggtcctagaagcagggaaatattttctaagaatactctctta

SEQ ID NO: 14382 - DNA, 471 bp, Glycine max
  unsure (1)..(471): unsure at all n locations
gcgcacaagataaaaaggtatgggtatatacctctctatagttngaactccttagatggatgcccattcaccaagactgagaatgtaattgtagagacacacctcanaatcaaatccacctaatgagttgggatacccaattgttctagaactctcctcaagatgatccattctaccctgccataggctntagacatgtataacttgaaagccattgaacatttcctccccatgatctttttcttcatataataaaagcactcaaatgccaccaaagcattattagtaatcaatctatcaggcacaaaagcgttctatgtttctcgcccaatatgtggaaggatgatcttcaatttatttgccatagtcttagtcaccaattagaagaccacattacatagactaattgacatcaactcactagcatgtgtgagaattttcacctttggaatcaagggaatccaagtctta

SEQ ID NO: 14383 - DNA, 477 bp, Glycine max
  unsure (1)..(477): unsure at all n locations
agcttatcctgatgccaagaaccagccacatgttcttgttagtccaagctatttccattntgttgcttgaaatagtctgatctatgtttccttttgctgtgatctactcgatcctgaggatgtttttcttgatcaataggtggcacaaagattgaagcaacaaggctactcttctggttgctctgttggtgatacaatcccttatantaattgctatgagcaggtttgtcatttagtcactctcccaatcaaaggccaaatagtgcaactntgggaaattntttgcatcgagtatttggtgtatatgtntgtctcaattgtatttttaatattatgttctgctntgattagggtggtagtccaggcagtgcagctggcattgctcaacgtgccagacatcctgatgaacttaaacgagatcaagggacctggctgatngacattgattactatntatcacaacaggtctttatattt

SEQ ID NO: 14384 - DNA, 245 bp, Glycine max
  unsure (1)..(245): unsure at all n locations
tgtcgagagcttccgttgctcaatttcgagtatctctatatgtgatgcacctgcatcggacctcctagtgaanaattatgaccatttgaatttctcgagagctttcgttgttcaatttcgagcatctctatatgtgatgcacctgcatcagacctccgagtgaaaagttatgagcaattgaatctctcaagatcttccaatgttcaatttcaagcatctcgatatattatgcgcctgaatcggac

SEQ ID NO: 14385 - DNA, 309 bp, Glycine max
  unsure (1)..(309): unsure at all n locations
agcttgatatagtctgggtctgtcacttcccgctcctacgtacagtcctcaagcaacccacttgagattgtccactctctgtgtaaaactccttttacaaagtctgaaccacacacggacgacccttgccttgcgttcgagaatcctctacaacaagagactctcagtctcttaatgccttttgagaagtaagaagatgagaagaagacctctctcttatnagggatagattgtcaatgaagaccaatcanaattccttattgaatgtgcaagtggttgaccaaggaatcttattgagaggataagaca

SEQ ID NO: 14386 - DNA, 322 bp, Glycine max
  unsure (1)..(322): unsure at all n locations
tatgctgcanatatntacaatagacctcctcaacctcagcatcaaaatcaaccgcagcagaacaattatgacctctccagcaacaaatacaaccctggatggaggaatcaccctaacctcagatggtccagccctcagcaacaaccacagcagcctgctccttccttccaaaatgctgctagcccaagcagaccatacattcctccaccaatcgaacaacagcaacaaccccagaaacagccaacagttgaggcccctccacaaccttcccttgaagaacttgtgaggaaaatgactatgcagaacatgcagtttcagcaag

SEQ ID NO: 14387 - DNA, 362 bp, Glycine max
atctggaaactgatgagatgaagaaattctattcttgtcttatgccgccttggatgtcggaaagtatttctgcaagaatttctccataacctcttcccattttcttaggctatttcccttgaacaagtgaagccatctattaacttcactggcaagggaaaaggagaatatgttgaggcgaatagcaccttcacgaacaccaactatcttgactgtattacatatctctatgtaagtggccaagtgggtgtaaggatctttatatggcaatccttataataggtagctctgtattatctatattagagaatgtgggtaacagaatgttgcaacattgtacctctagccacacaatacttgtg

SEQ ID NO: 14388 - DNA, 374 bp, Glycine max
cgcttcatctcggtctactaactcggcagccttttctgcaccttagtatctccttgcgtaggaagaattatggcgggaggatctctaccgtaaactacctgaacaggtgtaattccgatacatacatggtaggaagtattataccataattcagcccaagacacccaatacgaccagtttttgggctgctcctatgcgaaacaacgcacataagcctcatgagatctatgcaccacgttggtttgaccatccatttccgggtgaaaagaggaactcatcttcaaggttgctccttgtagccgagatagctccttgcaaaacatactaatatataggatctaggacactagcaatggagtgtggcactccatgta

SEQ ID NO: 14389 - DNA, 298 bp, Glycine max
aacataagcacttatactatttatgaaagctggagttgctgcacatgatgtccaacgttatgtcaaagaataagatcgggctgcacaatgcacaaggcaagataaagtgtcaaatgaagaattgaagctgcaggattcacgatgtcggatacaatgtccaggacatcctgcctgaaaatactggaattgctaatagcattgaagctgcaggatccacgatgtcggatacaatgtccaggacatcctgcccgaaaatactggagttgctaaaagcattgaagttgcaggatccacgatg

SEQ ID NO: 14390 - DNA, 244 bp, Glycine max
gatgcatgggagatcctgaaaatcactcatgaaggaacctccatagtgaatatgtccagattgcaactgttggccacaaaattcgaaaatctgaagatgaacgaggaagaatgcattcatgacttccacatgaacattcttgaaattgccaatgcttgcactgccttgtgagagaagatgacagatgaaaagctggtgagaaagatcctcagatccttgcctaagagatttacatgaaagtact

SEQ ID NO: 14391 - DNA, 484 bp, Glycine max
  unsure (1)..(484): unsure at all n locations
catgcaagcttcatctcggtctactaactcggcagccataacttcaactcttgtttcttcttgtgtaaaatgaattatggtgggaggttntctaccgtaaactacctcanaaggtgtagttccaatagatacatggtaggaagtattataccataattcagcccaagacacccaatacgaccagtttttgggctgctccgatgcaaaacaacgcanataagcctcaagacatctattcaccacttcggtttgaccatccatttccgggtgaaaagaggaactcatcttcaaagttgttccttgtagccgaaatagctccttccaaaacatactanaatagaggatctaggtcactaacaatggattgtggcactccatgtaaccagacaatctctntggtaaacacctcggctattttcttggctgtataagggtgctngaggggtatgaagtgtccatactttgataatctgtccacaacaac

SEQ ID NO: 14392 - DNA, 279 bp, Glycine max
atctccttcttcactacatcaataatcaccttgtttatgtcttctctgggctgtcttactggtttagctccatcttctaaatatattcgatgcatacatgtggatgggctaataccacgaatgtccgccagggtccagcctatagccttcttatgcttcttgagaactgacaacaacttcttctcttgctcaatcagcaggggaggcagatataatcactggagaactcttgctatcatccaagtaagcgtattttaaatttgatggcagaagcttcaa

SEQ ID NO: 14393 - DNA, 348 bp, Glycine max
  unsure (1)..(348): unsure at all n locations
agcttcagaaagaaaatttggcactacagactgataanagagttgtaaggagcttgtatganaattcctatgaaaagcactgggaaattgaagaccagattacacaaatgcagaanagggtttgcagcttgcaagatgagtttggaattaatacattcatagaagataacgatgcacgagctctgatggctgcaacagctctgaagtcatgcaaagagaccctggctaagttgcaagaggcacaggcacaatcatctgaagaggctaaagaatcataccaaatggttaaggaagctcacagcaagtttgaaacccttagagacctattcattntctaacataagagtc

SEQ ID NO: 14394 - DNA, 255 bp, Glycine max
gctggagatggcccactctatctgagagactcctgttacacagactgaaccagactgggacaccccttccctggtgtacaataatcctatacaccaagatggctgtgagactctcagtcccttgccagaagcttgcatatgagatgaagatttctctcttaattgggattgatggaacattgaagaccagatcaaaagtccttattgaatgcgcaagtgcgagagcaatgtgtctttgtgagaggataagacatt

SEQ ID NO: 14395 - DNA, 351 bp, Glycine max
  unsure (1)..(351): unsure at all n locations
ttggagtttccagtgccaattcgtcttcttctttagtcctgtcttcttctggcttcaatccatcagtgggctttccttctgagtccagcatcttgggatgttcccagcctttgatgacagctttccaggttctgctatccagtgatttgaggaaagccaccatccttgctttccagtattcatagttggntccatccagaattggtggtctgttcactggtcctccttctttctccatgttcatcagaatttatctccctaggtctcactcagtgatttcgagtgcccgctctgataccaattgaaattctgataccaatgccagatgtcgtacaggatgtcacgacatca

SEQ ID NO: 14396 - DNA, 348 bp, Glycine max
  unsure (1)..(348): unsure at all n locations
cctcatggactcctctaangacaatagcatcatttcttacactgaattgttgggagttggaagccatcttctcaatcaaattcctagcctcagcaggggtcatatcaccaagagctccaccactggcagcatcaattatactcctctccatgctgctaagtccctcatagaaatattgaagaaggagttgctcagaaatctagtggtgagggcagcttgcacacaatttcttgaatctttcccaatactcatacaatctttctccactaagttgcctgatgcctgaaatgtcttttctgatggcaatggtcctagatgcagggaagaattccncaagaacaccctctt

SEQ ID NO: 14397 - DNA, 315 bp, Glycine max
  unsure (1)..(315): unsure at all n locations
tacgccagtcctcattcaacccacttgagattctccactctctgtgtaaaactccttntacaaagtctgaaccacacagggacaacccttcccttgtgttcaagaatcctctacaacaagagactctcagtctcttaatcccttttcagaagtaagaagaagagaagaagaaatctctcttaaaagggatagattgtacaatgaagaccaatcaaaattccttattgaatgtgcaagtggttgaccaaggaatctttntgagaggataagacatttcagttcagatnaactctgggactttcgagaggataaaac

SEQ ID NO: 14398 - DNA, 363 bp, Glycine max
  unsure (1)..(363): unsure at all n locations
atgaatcananatctgcacctgttgccagactctgtggtttatgctcctctgccaaccaccacacagacctttgcccttctgtgcaacaatctgaagcaatcgaacagcctgaagcttatgctgcaaacatctacaacagacctcctcaacctcagcagcaaaatcagccacaacagaataattatgacctttccagcaacaggtacaatcccgggtggaggaaccatcccaaccttagatggtcgaatcattcacagcagcagcaacaacaacaacaaccttattttaaaatactgcgggcccaacagacatatgttcctcatcatccacagcaacacagcacaacctagaacagaaacagt

SEQ ID NO: 14399 - DNA, 428 bp, Glycine max
  unsure (1)..(428): unsure at all n locations
agctttgcgcacaagatatatttgtatgggtatatacctctctatagtttgaactccttagatggatgcccattcaccaagactgagaatgtaattgtagagacacacctcanaatcaaatccacctaatgagttgggatacccaattgttctagaactctcctcaagatgatccattctaccctgccataggctttagacatgtataacttgaaagccattgaacatttcctccccatgatctttttcttcatataataaaagcactcaaatgccaccaaagcattattagtaatcaatctatcaggcacaaaagcgttctatgtttctcgcccaatatgtggaaggatgatcttcaatttatttgccatagtcttagtcaccaattagaagaccacattacatagactannatgacatcactcact

SEQ ID NO: 14400 - DNA, 456 bp, Glycine max
  unsure (1)..(456): unsure at all n locations
gaacaccctcagatagagggagatattgctagtgtaaaagatataatattggtaattaattaaaatntatnataaaaatatgactttaattaaacgttaaaaacatttacaatatcacaagtgtctctctctacctattgaatcatatattaatactnttatcgtacccacatagttgtcactcgtatagctgaattttgcatataaaanaaaattgaacgataatttttactttaaatacatcattttagtacatatgaatgcaatgagannntatagtattatacgaatcctatcatatatgataattataattgaataacaatgtaaatttgtttatatcatcttcttttggttgatgaataattattatatatcaatacataaaatattaccctaattaaataaatactattctgtcacatattatatatatatatataatatattatatta

SEQ ID NO: 14401 - DNA, 368 bp, Glycine max
  unsure (1)..(368): unsure at all n locations
gctgggtaatgtgaatgatagtatcaagattgtttgcctgtcatgataatgtcgtcaacatatacgagaataactgtgagatcatgagaatggttagtgtataagaaaagtgagtgatcagcagaggattgatgaaagccttgagaaagaaagaatgacgagagtcgtgtgaacccattgcgactcgcctgggttaggccatataacgaacactgaagacggcagactagattgggatngtccacaattaaacctggaggaagcttcatatatacctcttcgtggaagtccccatgaagaaaggcgttattgacatcgagttgtcgaagatgccagttacggagagcagcgagagcaaggagtaacct

SEQ ID NO: 14402 - DNA, 451 bp, Glycine max
  unsure (1)..(451): unsure at all n locations
catgcaacccttaaaacacccattcccctatctcatactgcagatctcttcttttcttgtctgcatactnnatcatctgatgctgagcccgtaacaaatgacttttaagctgattcaaagcttcatccctttcagttaactctaaggctacagcagccactntagtctcattacttaaaaacctcaacaaactgggtggttgtctgccatacactacctcaaaaggtgttttccctatggaaacatggaaagtagtgttataccaatattctgcccacgggatccagtatgaccaagtcttgtgctgctcagatgcaaagcacctcaagtaaccctctaagcatctattcagtacctcagtttgcccatcagtttctgggtgggaggcagaactcatcttcaactcggtaccctgtaactcgaacagttccatccagaaatggcttacaaa

SEQ ID NO: 14403 - DNA, 404 bp, Glycine max
  unsure (1)..(404): unsure at all n locations
agctngccaacccatggaagctcctaatatctcccacactntatggggtgggccattcttggatggacttgattttctcagggtccacttggaccccatttctaccaactacaaactctaagaaaactatattatctacacaaaaagtacacttctctatatttgcatagagggtgtttttcctaaggactgaaagaacttgcctgagatgtcctaagtgatcatctacgctcctactgtacactaaaatatcatcaaaatagacaactacaaatccacctatgaaatcccttaagacatgatgcataagcctcataaaggtcttggtgcattagtgagcccaaaaggcatcactagccattcatacaaaccaaacttggtcttgaaagcgggtttccactcat

SEQ ID NO: 14404 - DNA, 477 bp, Glycine max
  unsure (1)..(477): unsure at all n locations
gcttgttngacatccaaacttatcttgttagttttatttgatcaaaataaggatgaatttgtttaaacttaanaaaataactntaaaataaatattttttacataagtgtttttttaaaacatagataagatttttttcaacaaataagtgtaaacaaattaatcctaattttgtttggtactcaagtttaatttagtaacttaatttccataagttacttgaagtagcttatgacacacaaattagattataagctactagttnttttcttcttcctcaatttattcttattattttatttgaaattttattntatccttntattcaatntaaaaatcctcttatcttttatgttcattatggngaaaaccctggtatcanattttcatagtcatgtaagtgagagacatacacatctaagttcttaatttacaaataanaaatgaatggttaagaaaaaatataaagaataaaca

SEQ ID NO: 14405 - DNA, 299 bp, Glycine max
atagctggcatatagtaaagaaagatcttattgctgcagcgaatgatattttcgagagaggatctttattagaggattctaatactactcttgagactctcattcctatatctattactgctaagactgtcaaggattacaagcctattgcagtttgctctactttttataaagtgatctaaaattttttgactatgaggctagggatagtgatacaggatattgttcatactagccaagcaacttttgttcccggtcaagtcattcacaatcatattcttcttgcaactgagtagatg

SEQ ID NO: 14406 - DNA, 311 bp, Glycine max
tgctgctgagatgcttttgttcttacaatcattgggatctagagcaatcttttctattaccaattctctatgtaccatctgtaacaattacggacgtataatgctgccacttaacatgtcatctgatgatggaccacattacgtaaatgctaagcagtaccatggaatcattatacgtcggcagtcccatgccaaagctgtacttgatcacaaattgactaaacgctgcaaggcatgattcctcatataggagtatctaatatgtattctcatctttaaactaacaaacaaaatgtggcctcagcctcact

SEQ ID NO: 14407 - DNA, 475 bp, Glycine max
  unsure (1)..(475): unsure at all n locations
agcttataagatattatgttcttaattctnttaagccaaaccttngcacactttataagagattctcttaacatataaaggtctattgtaaatcgtttctcttgacttcgtagatcttgacttgaatcaatgatgaatatctctaatcttttggcatcatcaatatcttaatacagcatatgcacttacaaattcaacacaaacttagaacataatgtgataattattatgactaacaatgactctaagacaacatgaatgaagtgatttacacttagaattttgtgttttcttttctaatctatatttngcaagaatattttgactgacaacatgattcaagagtagatctatattatnttgactgaatatctttatgtcttctaatttacaggtttagcacaagactattctgattgaanaatgatagaacctacaatcaacatannaacatgattcaagagtagatctataa

SEQ ID NO: 14408 - DNA, 410 bp, Glycine max
tgtcgtggaaataagcatattttgctcgactgtataccctgtatgatcagcacggcttcgtaatacttgttggagaagggcctggtatgtcgtgtcctgcaaacaagtttgctggaactgctccatgaagagtgtgtggggcacaaataaaagtagaagagaggaagtcggaaccctatacaaggcgtctacgactacattatgggcaccgggtttatattgtatagtgtagtcgtaaccgagaagcttatccatgcagtgctgctgctcaggaagttgaataacctgagacatcaactcctttaagctccggtggtctgtcataatgacaaaggagtgcccgagcagatagtggcgccatttacgtaccgcagtggtgatagcatgtaattcgcggacatatgtggatg

SEQ ID NO: 14409 - DNA, 396 bp, Glycine max
  unsure (1)..(396): unsure at all n locations
actatagaaactaagctatctanaagagttcttcatcttcttccagatgcaataatattaatcttcctaggagcttctcacagaagaacccttccattggccgcaaatgcaccaaattagctaaggaacagatagcaaggttttacatcatgaggaggtgtgttgccatgttggtttgctggcacaagcatggggattcatgaaagaagtgcacagatcttgtgcttagttttattggttatgatcctttattgcccactttgaatactatagattcattgtattacgagttactaaggtgagtataagatttacacattgctggaaatatgtatatgatcaattggactccagattaatgtccccctcctacgtctgatgttatctcttacacct

SEQ ID NO: 14410 - DNA, 258 bp, Glycine max
catgcaagcttctattttcaattacgagcgtctcgatatattttgagactatgtcagacatccgagtcaaaagttattgtcggttgacttttcttagagcttgcgttttcaatttcgagcatctcgatatattacagggctcaataggacatccgagttaaaagttattgtcgttggatttttctcagagcctcctgtttcaattacgagcgtctcgatatcctatgggacacaatcggacatccgattcaaaagtta

SEQ ID NO: 14411 - DNA, 356 bp, Glycine max
  unsure (1)..(356): unsure at all n locations
agcttccatcactaccgggtcttgaaccgagccagtcctaaagacaattntcccctgccacgcattgatatattggtagataatacaaccaagttcgcccttttcttatttatggatggtttctcggggtataatcaaataaagatggcacccgaacatgtagagaagaccactttcgtcaccctatgggggacgttctgctataaagtgatggccttcgggctgaaaaatgctggggcaacctatcagcgtgtcatggtggcgttgttccatgatatgatgcataaggaaatagaggtctacgtagatgacatgattgccaaggctcgaactgaggatgaacaccttgtcaatct

SEQ ID NO: 14412 - DNA, 438 bp, Glycine max
agcttcactgaattactttttttttgaagaatatgcttcctgtagataacacattacccaagaatcattacaaggcgaagaagatattatgtcctgtgggtatggaatactagaaaatacatacatgccttaatgattgtaatttgtatagaaatcagtttgccaaaatgcgtaactttcctacatgtggggtgtcacactacaaagtgaagtatgacgaatgcagtgatacagcctgatcgaggccgtacctgaatcaaataaacattaaaatgcagtaactatgaagtgatcctaggtcgtttcccaacgagcaatgataaactaaatgttcataacagataataggaaaatagtaacgaattggggggggattgtttgcttttgtaaataaacaacgaatagatgtgaattcaaaaatagcaaaaataaaacacg

SEQ ID NO: 14413 - DNA, 284 bp, Glycine max
  unsure (1)..(284): unsure at all n locations
tatatcgatacgctcganataattatcggagactctcggaatattcaaatagtcataactattcacacggatgtccgattcaggcttataatatatcgacacgctcgatattgaacatcggaaactctcgcgaaattcaaatggtcataacttttcacacggatatccgactcaggcacataatatgtcgagacgctcgacattgaacaacggaagctctctagaaattcaaatggtcataacttttcacacggatgtccgattcaggcgaattacatatcgag

SEQ ID NO: 14414 - DNA, 246 bp, Glycine max
  unsure (1)..(246): unsure at all n locations
agctatanagactaaagtagttgatctcccactaatatatcttactntnttccttcaacaagactttttgtatactgatgtagctccatgtggagcttgtacgccttgaatcttcttcatcaatgaagtcttttgcttcttgaagatcaatgacgatggaatggagaacgaataaagatgattggagacaccacttccaggagaatatgagtcaagaacangctcaccaccatatgaagtcatgga

SEQ ID NO: 14415 - DNA, 290 bp, Glycine max
  unsure (1)..(290): unsure at all n locations
ctctgnagttggggctctacagaatgctactatcacacatncagaaattagtttctttgtcaacaaagtttgccaatttatgagtcagccaacagaacagcattgggtggctgtcaaaagaatcctcatgtatctaaagggcacacttctatttgggctgaaactggaacccaatttttctacaaagcactactttgttcatgccttttgtgatgctgaatgggcttcagatcctgatgatcgaaggtctacctcaagtgttgctgtgttcttaagcccaaatcttgtct

SEQ ID NO: 14416 - DNA, 332 bp, Glycine max
  unsure (1)..(332): unsure at all n locations
tctntcattgaagaaatcagtagaacagcaccaattaaatatcttcacaagtatcttgcatccaagggaattgtatcagagacttgccaagaattcaaaagaatgattaccagtctgtggtttgacctttatggccgtggtggcacttctggttcctcttctgcttttgaacatgtttttgttggagaaaccaaacaatggtggtgaagttctggctttcataacatgctgcagctatgacctcgtatttttctttctgcctgtttctaattatccattcacaattcatgccaaatttaaggtgtattaacttgttatattcgaagtcgtat

SEQ ID NO: 14417 - DNA, 250 bp, Glycine max
  unsure (1)..(250): unsure at all n locations
tccacttggaccccatttctaccaactacaaaacctaagaaaactatattatctacaccaaaggtacacttctctatatttgcatagagggtatttttcctaaggactgaaagacttgtctgagatgtcctaagtgatcatctangctcctactatacactaaaatatcatcaaaataaacaactacaaatctacctatgaaatcccttaagacatgatgcataagcctcataaaggtgcttggtgcatt

SEQ ID NO: 14418 - DNA, 487 bp, Glycine max
  unsure (1)..(487): unsure at all n locations
agctatgaatgcactattcaatggagttgacattaacatcttcagactgatctacactngcacagnggccaaagatgcatgggagatcctgaaaatcactcatgaaggaacctccaaagtgaagatttccagattgcaactcttggctacaaaattcgaaaatctgaagatgaaggaggaagagtgtattcatgacttccacatgaacattcttgagattgccaatgcctgcactgccttgggagagaggataacagatgaaaagctggtgagaaagatcctcagatccttgcctaagagatttgacatgaaagtcactgcaatagaggaggcccaagacattngcaacatgagagtagatgaactcattggttctcttcanacctttgagctaggactctcggatagggctgagaagaagagcaagaatctggctttcgtgtccaatgatgaaggagaagaagatgagtatgaacctgatactgat

SEQ ID NO: 14419 - DNA, 360 bp, Glycine max
  unsure (1)..(360): unsure at all n locations
agcttacatgaatagcttctctatctaccattgttntagagttataaactatgtatgccttagatgtttcagagtatccaagaaatgttccatcatcactctatgaataaaattntccaagttatctttagtgttaagaatgaagcatttacacccaaagagatggaagtatgatatgttggattttcgtcccttccataattcataaggagtcttcttcattatgtgtcttatgtaaattttggtttgaaataataggttgtattcattgcttcaacccataaatggttaggagtagcattgtcattaagcatggttcttgccatttcttgtaacgtcatgttctttctctcaactaaa

SEQ ID NO: 14420 - DNA, 325 bp, Glycine max
agcttcaattctgaatctctagcgtctcaatatactatggacacaatcggacatccgagtaaaaagttattgtcattagatttttctcagagcttctattctgaatatcgaacgtctcgatatacaacgggtgacaatcggacagctgagtaaaatgttattgtcgattgattttgcctaaagcttcaattctgaatttcgagcgtctcgatatcctatgggacacaatcggacatccgagtaaaaagttattgttgtttgaatctgcttagagcttctgttctcaatttcgagcgtctcgatatattacgagagtcaatcagac

SEQ ID NO: 14421 - DNA, 481 bp, Glycine max
  unsure (1)..(481): unsure at all n locations
agcttgtagaacggatggacatgatatatgttatggtgttgggctggttcaaggataaaagggaatgtccaccattatttccatgacacaaatgcaataatgatgatttggaaattttatgcagaactagtcatgcatgcacctatgtggacacaaatgtccaccattatttccatgaggtattgtgctacctaaacatatgtatattnttgtgaggtatnttgctatatacatgcgtgtccaaggtatcttgctacctaaacatacatatatatgttttgtgagatattnttgctatatacatgcatatccaaggtatcttgctacctgaacatacacatatatantttgtgaggtatctttgctacatacatgcatatccaaggtatctttctacctaaacatacatatatatatcntgtgaagtattttttngttacatacatgcatatctaanggtatttcactacctaaacataca

SEQ ID NO: 14422 - DNA, 465 bp, Glycine max
  unsure (1)..(465): unsure at all n locations
ttctctacaattgcatcacctctcaatgagctggtgaagaagaatgtggcatttacctgtgatgaaaaacaagagcaagcctctgtttgatcttctcgaaggcctcttggcagccactgttccacaggaccgcctagttcttacgtaatagcttaaaaatgggttcacatgtaggggtgagttgcgagataaatctcgcgatataattcaacctgcccaaaaatacccgaacctgcttctccgtgcgtggttctagcatttcaaggatggccttcactntctcgggatctatctctatccctttctgacttacgataaatcctagcagcttccccgacctcaccccanaggtgcatttggttgcgtttagttttaattggtatttccgcaaccttccaaacagcttacgcagattgacaaggtgttcgtcctcagtccgagacttggaaatcatgtcatctacgt

SEQ ID NO: 14423 - DNA, 433 bp, Glycine max
  unsure (1)..(433): unsure at all n locations
ctacttcacatggacttgatggggcctatgcaagttgaaagccttggaggaaagaggtatgcctatgttgttgtggatgatttctccagatttacctgcgtcaactntatcagagagaaatcagacaccttcgaagtattcaaggagttgagtctaagacttcaaagagaaaaagactgtgtcatcaagagaatcaggagtgaccatggcagagagtttgaaaacagcaagtttactgaattctgcacatctgaaggcatcactcatgagttctctgcagccattacaccacaacaaaatggcatagttgaaaggaaaaacaggactttgcagagggctgtanggtcatgcttcatgccanagaacttnncctatatctcntggctgaagccatgaacacagcatgctacatccacaacagagtcacacttag

SEQ ID NO: 14424 - DNA, 356 bp, Glycine max
  unsure (1)..(356): unsure at all n locations
cgtaatatatcgagacgctcgaaattgaatgttgaagctcgtagccaattcaaacgacaatatctttttactcggatgtctgattgacgcccgtaatatatcgagacgctcgacattgaatgttgaacctctgaacgaattcaaacgacaataactntttactcggatgtctgatagaggctcgtcatatatcgagacgctcgaacatgaatgttgatgctctgagctaattcaaacgacaataactttttactcggatgtctgattgagtcccgtcatatatcgagacgctcgaaattgaatgttgaagctctgagccaattcacacgacacataacttttactcggatgtctga

SEQ ID NO: 14425 - DNA, 365 bp, Glycine max
  unsure (1)..(365): unsure at all n locations
tatcaacatcaaacttggagaaagagttcttggtgtcaagacatgagaagcaatcaagtataatgttacttccttcactaaagcggggatccatctccacacatattttatcaatagcaacataaaaaatctctgcacgggaatgatgaagattagtgatagtcctcccttctgctcttgaacgaccccgaactggtatttcgtcatccatatttggtaccagaatacttttagcaacacaaaatccttggacatcggcaaaaaaattattccagccactctctctcattgtgcccaaccgagctntgacaacatcaactaattccatgacattcacaatattaagatcttttctttgcaatata

SEQ ID NO: 14426 - DNA, 283 bp, Glycine max
agatgagaaacaataaagtgtggtgtttcggacctctatcatttactaacaaggatcatttggataaggctgaaaagagtaaaaggcttcaattgacttgttccacctcaagtgttggattgattgtcaaaagcccaggactataatatatgcatgccttggaagcatatgtaatttaacacaagaacagttgatagaacttggtttagccttggaagcataaataaaaaacccttcatttgggttatcagggaagaaaatcagttagaagccctggagaaat

SEQ ID NO: 14427 - DNA, 434 bp, Glycine max
  unsure (1)..(434): unsure at all n locations
ctatgctgcanacatttataatagaaccccttcagtactcattccaacaacagtagaataattatgatctttcaagcaacagatgcaatccaggttggaggaatcatccaaatctgagatggacaagtcccccacaacaacaacagcctgtcccttccttccagaatgctgctggtctaagcaagccatacattcctcctccaatgcaacaacaacaacagcaacaaaaaagacaacaagcaactaaggctcatcctcaaccttccttagaatagttagtgaggcagatgaccatccaaaacatgcaatttcagcaagagacaagagcctccattcagagtttggcaaatcagatggggcagatggctactcagttgaaccaagctcagtcacaaaattctgacaaattgccttcacaaacagtgcagaatctg

SEQ ID NO: 14428 - DNA, 166 bp, Glycine max
ccttagatttgaatcatagtgatgtatggggtccagccccaatcttgtctccatctaatttcaagtactacgttcactttattgatgatttcatcagattcacttggatttttcccttgaaacaaaaatcagaaacaataacggcttttattcaattcaaaaacat

SEQ ID NO: 14429 - DNA, 439 bp, Glycine max
  unsure (1)..(439): unsure at all n locations
caatacgagcgtctcgatgtactacgcgactctttctaacatccgagtaaaaatttattgtcgtttgaatntgctcagagcttctgttttcaatttcgagcttctcgatattttacgggactcaattgggtattggagttaaaagttattggttgttgcatttgctacgagcttctattttcaatttcgagcgtctcgatatactttaggactcaatcggacatcgagtaaaaagttattatggtttgaatttccaacgagcttccgtgttgaattacgagggtctcgatatatcatgggaatcaatcggacattcgagttaaaatttattggtgtttgaattttctacgagcttccgttttcaattacgagcgtctcgatatactacgggacttaatcggacatactgaggaaaatgtattaccgtttgaatttccac

SEQ ID NO: 14430 - DNA, 323 bp, Glycine max
  unsure (1)..(323): unsure at all n locations
tcttgaagctggaatgatatatgccatctctgaaagttcatggtttatccttgtgcaagtagaccccaaaaaaggttgaataacagtgataaaaaaaatgacaacaattagttgattcctacaaggatcatggccagccggagaatgtgtattgattacctccttcttaacaatgcaacaaggaaatagcactttcctcttcccttcatggatcaaatgcttgagaggttagccagtcaagccttctattgctatctatatggatactcggggtataatcaaattcttgttaagttaggggatctagagaaanaacacttcac

SEQ ID NO: 14431 - DNA, 487 bp, Glycine max
  unsure (1)..(487): unsure at all n locations
ngccatttagtaatgaaatcgaatgaatatagtaacttacttattcccaagaactgcatgtaaattgatgatgagttgctcttcttcctcagagaattttcctcttttgatatcaggcctcaaatagttagtccatcttagcctgcaactcttcccacacctgttcaaccctgcatgttttggaagtgctctccaactcccatgcccatgtttctgaatataatccaccaatattctatcctcttctggngtccaaggccccttcttcaaaccattttcatcactgcatggagttctccccatcatcactcactgcataaacatgttagaaattaaatacttctagtataataagaattagttngattcanggtgcagcatgacaacaaaagagggcaaaagaaatcataccttnggattgagtgtatgaagtggagaatgaagatatatatatagacttagaagaatactctgtggaagttgatat

SEQ ID NO: 14432 - DNA, 369 bp, Glycine max
tatatcgagacgctcgaaattgaatggtgaagctctgagccaattcaaacgaccataactttttactcggatggctgattgactctcgtcacacatcgagacgctcgaaattgaatgttgaagctttgagcccattcaaacgacaataactttttactcggacgtctgattgagtcctgtcatatatcgggacactcgaaattgaatgttgatgctgtgagccaattcaaacgacaataactttttactcggatgtcttgatgagtcctatcatatatcgagacgcctcgaaatgaatgttgaatctctgagccaatccaaacgacaataactttttactcggatgtctgattgagtcccgcatatatc

SEQ ID NO: 14433 - DNA, 410 bp, Glycine max
  unsure (1)..(410): unsure at all n locations
atttctgatagagtgaattacctcatgtgatgataatattttatccctactatatatgtaggggacaaaaatgcgttgagtanggctgattaatttcaccataaccaatcttaaccttgaagccaacaccttagtaaaagctttgtaggacacattgcatagattgatcagtttcaattgagacaaaacactaacttcatcaaccttaggaatgagagtgatcagaagtttattaagagaattaatgtcagcagggtgcctaaacaaaccttttataagactgcanagaatagaacccaccaacttccattgagtcgggtagaacaaagccttgaaaccatcctctcttggagctntgaaaactctcgtattgagataacattcttcacctccccatcagtgattccact

SEQ ID NO: 14434 - DNA, 302 bp, Glycine max
gaactgcatgtaaattgatgatgagttgctcttcttcctcagagaattttcctcttttgatatcaagcctcaaatagttagtccatcttagcctgcaacttcttccacacctggtcaaccctgcatgttttggaagtgctctccaactcccatgcccatgtttctgaatataatccaccaatattctatcctcttctggggtccaaggccccttcttcaaaccattttcatcactgcatggagttcttcccatcatcactcactgcataaacatgttagaaattaaatacttctagtataat

SEQ ID NO: 14435 - DNA, 263 bp, Glycine max
cctcatcaaaagtaaccttaattccatgcctaataagcacctgctgcgaaaaattctggtaatataagcagcctcaacgcttcacgaatgagcagagttaatgtcatccttcgactcaagcaatggctcctgcgaggtctcgtgaacagagagcaaatcaagctgcgacccatcgcgcttatcgaagaagagcttattccccacacgctgaacgacaatgtcccacgaataaacagacctgtgagcacacatgagagtggaga

SEQ ID NO: 14436 - DNA, 319 bp, Glycine max
taatatttgaagagtatccctgtggaaccttcacccgacgaagacactgacaaaaacttatcttcttctttttggacaaaatatggcaagctgggggcaagtaaattttcttcccatcagacattggatgcaactgtgatcgtatgcccatatcaactagatcttgacgggtattcaagccatccttcgtcttgccttgaatgttaaggagcgtcccaatcacactgtcataaacatttttctcgacatgcataacatcaatacaatgtctaacgtcaagatcagaccaatacggaagatcaaagaaaatggacctctt

SEQ ID NO: 14437 - DNA, 179 bp, Glycine max
ggtcaatttcgagcctctcgacatattatgcacccgaatcggacatctgtgtgaaaagtcatgatcatttgaatttctcgagagattccgatgtttaatttcgagcgtatcgatatattataaccctgaatcggacctcagtgtgaaaaggtatgaccatttgaatttgacgagagctt

SEQ ID NO: 14438 - DNA, 366 bp, Glycine max
  unsure (1)..(366): unsure at all n locations
cttacagcagccttttatccctcttccattcccacctagagaaattccaaacaaaaagatggaagaagcggaaaaggagatcttggagaccttcangaaagtagaggtgaacatacctctgctagatgccatcaagcaaattccatgatatgccaagtttctaaaggagttgtgcacccacaaaaggaagctcataggaaatgaaaggattagcatgggcaaaaatgtgtcagcattgataggtaaatatattcctcacattcctgagaaatttaaggacccaggtactttctgtataccttgcattattgggaacaataaatttgagaatgccatgctagatctaggagcatcagttagtggcat

SEQ ID NO: 14439 - DNA, 271 bp, Glycine max
  unsure (1)..(271): unsure at all n locations
gtagatatttattttgacttggctcaccttattattttgaccaacaagaaacactcagcttattaaaattgtgcatactaatatttgtggaccttttgatggtagttctttcagaaaggaaggatactttatcactattattgatggttattcacattacggttatgtttacttactgcctgagaattctcagacaatggatgccttnagaaattactagaatgaagtaaaaaggcaattagacagaaatgtggaaattattagatatgat

SEQ ID NO: 14440 - DNA, 359 bp, Glycine max
  unsure (1)..(359): unsure at all n locations
acatggatcaatgtaataatggagatatttcggtggaaggaaatatgaaactggatacaggcgatcatgaagcttcagtagatgccacattgttcaagaagctagtgggatgcttgagattcgtctaccatagtagaccagaaatctcatatggatttggtcttgtcagcagattcatgagtaatccaaaacagtctcatttggcagcagcaaaaagaatcttgagatatctaaaaggaacacttaattatggcatattgtgtcctcatcagaaagaanaatgtgagctatacctcgtagcttattctgactcagactggtgangggataaagtggagagaagatctacttctgggtat

SEQ ID NO: 14441 - DNA, 306 bp, Glycine max
  unsure (1)..(306): unsure at all n locations
tactcggatgttttattgagtcccgcannatatcgagacgctcgaaattgaataccgaagctctgagccaattcaaacgacaataactttnttactcgggtggctggatgagtgcccgaatatatcgagacgctcggacttgaatgccgaagctctgagcaaattcaaactacaataactttttactcagatgtctgattgagtcccgtagtatatctagacgctcggtattgaatgtgaagctttgtagcaattaaacgacaataactttttactcggatgtctgattgagtcccgtatatatcg

SEQ ID NO: 14442 - DNA, 420 bp, Glycine max
  unsure (1)..(420): unsure at all n locations
tcattggtntgagtagtttctatcaaagaaccgatatctttatatngatggatttcttttagtttagtatgatcagtcatctgacataggttggcttcctcttctccttcttcatcagagggggtgttgtccaaacctgatgtaagctccattggagcttgtaggcctaagatcttcttcatcaatggattcctttgttcttggaagatgaatggcagcggaatggaaaacgaagagagagaggagatgccacttcaaggagaagatgagtctacaagaagctcaccaccatangaggtcatggataagagcttggaggaagaaggagatgaatgaacggagaggaagagaatagcccggcttcttgtgctctaaaagagttctgacatctgacagttaatattcanatgatcaaagttg

SEQ ID NO: 14443 - DNA, 315 bp, Glycine max
actgaatgacgactggaaatttgatttctcttgccatgatgcccggcagttggtttgcaccaacaatgcggatatgactggacgtcttcttgccgggtcattggcttttgaaagccgcatccttcactatttaattgtgtgtattctgcttccacggtcttccaaccttgcccaggtttctgaggaagatctaattatcatgtgggcctttcatacagggcgtcaacttgactgggcacacttagtcagatatcgcatgaataaggcattgcgattaaatgctccactaccatatccacagcttgttactctatt

SEQ ID NO: 14444 - DNA, 393 bp, Glycine max
  unsure (1)..(393): unsure at all n locations
tgtntaccccatgttgaattttcttacaatagagctgttcatagcaccactaattgttctccttctgaagttgtttatggttttaacccactaactcctcttgatcttttgcctaatgtttctggttttaagcataaagaaggtcaagcaaaggcggactatgtgaagaagcttcatgagagagtcaaagatcaaattgagaggaaaaataaaagctatgctaaacaagccaacaaagggagaaagaaggttgtcttcgaacccggagattgggtttgggtgcacatgagaaaagaaaggtttccggaacaaaggaaatcaaagcttcaaccaaggggagatggaccatttcaagtgcttgaaagaatcaatgacaatgcttacaaagttgag

SEQ ID NO: 14445 - DNA, 438 bp, Glycine max
  unsure (1)..(438): unsure at all n locations
gcttacaaagagaatcatcttgatatgacaactttggaagttctcttacaggctaagcttttgaagctntgagattaacctcaagcttgcaagaccaagtttcttatgccataccgagtgatgctttttttactgagaataatcatgacaccttttgactagaaagatcaccaagtttaatcttataaagatttccttgtcttttagcaaagaagagtgaagagttgtccttgttttggatgatacacatatccttgttaaagatgacattatatccactatcacataattgacttatgctcagcagattgtgcttcaaccctttaacaagtagaatgttattaatgagaggatagggagaaatacagatcttatctacaccaattatcagacctttctagatttgaatattacctcttcaccatcagagttaacagt

SEQ ID NO: 14446 - DNA, 343 bp, Glycine max
tcttagtcttgattgatgaagatgaattcgtggctacttcatgcactcctctaatgacaatagcatcacttctagcactaaattgctgggaatttgaagccatcttctcaattaaatttctggcttcagcaagggtcatgtctccaaaggctccaccactggcagaatctatcatacttctctccatgttactgagtccttcataaaaatattggagaagaagctgctctgaaatctggtggtgagggcaactggcacataattttttaaatctctcacagtattcatataggctctctccactgagttgtctaatgcctgaaatatcctttctgatggacgt

SEQ ID NO: 14447 - DNA, 348 bp, Glycine max
tatatgtgatgcgccaaaattggacattcgagtaaatgtatgacctttgaatttctaagaactttcgttgttcaattctgagccgctcgttatgtgaattgtctgaatcggacatccgtgtgaaaagttatgaccatttgtatttctcaagagctttcgatgttcaatttcgagcctctctacatattatgcgcccgaatcggacattcgtgtgaaaagttatgaccatttgaatatctccagagcttccgaggttaatttcagcctctcgcatatattcgcccaatcggacatcctgtgaaaagtttgaccattgaattctcacagctccgttgttaattcgagcgt

SEQ ID NO: 14448 - DNA, 441 bp, Glycine max
  unsure (1)..(441): unsure at all n locations
taagaaaaagatggcctcagcanattccttattttcagagtggaattctatcaatagaccttcaatctttaatggagagggttaccactactggtaaacccgaatgcaaatttttatcgaggcaatagatctaaatatctgggaagccattgaaatagggccttatatacccaccacagtagaaagagtttcaatagatggtagttcatcaagtgaaagcataaccatagaaaaacctagagatagatggtctgaagaggatagaaaacgagtacaatacaacctaaaagccaaaaacataataacatctgccctaggaatggatgaatatttcagagtttcaaattgcaagagtgctaaggaaatgtgggacactcttcgattaacacatgaaaggactacagatgtaaaagatctangataatgcactactcatgagta

SEQ ID NO: 14449 - DNA, 437 bp, Glycine max
tgaatcttgcttggtcgggtacatgagcatatgcaatgctcccaaatactctcaagtgatcaactcttggcttcactccactccatgcttcttgtggggttgatttttgacattctttgttggggagcgattggacaaataaacggcacatgcaacatcttctgcccaaaatttctctggcatatttttaaccttcaacatacatctagtcatattaagaatagttctattttttctctccgctaccccattttgttgtggagatctaggaaccgttagagggcgacgaatttcatatttttcacaaaattcattaaattcttttgatgtgaattcgccacctctatcagatcttatagctgtgattacataaccactctccttttcacaagagctttataattttaaaaactacaaatgcctcagattttgcttta

SEQ ID NO: 14450 - DNA, 277 bp, Glycine max
actttattggttttgcactagtattgtggcatagcaaaaagcaaaatagtattgccttatcaactgtagaagcggaatatatttctgttggaagctgttgtgcacaaatcctatggatgaagcaacaactctctgattacgggttaatgcttgatcacattcgtattcgttgtgacaatacgagtgcaatcaacctatccaaaaatactattttgcacttgatcgaggccgtacccgaatcaaataaacattaaaatgcagtaactaggaagtgatc

SEQ ID NO: 14451 - DNA, 388 bp, Glycine max
  unsure (1)..(388): unsure at all n locations
tctctctcgncnanancaactaactcatctgacatcattttcaataatggtcgatcggaatgtccatttgtttttgtactctagctgatngcaaatgtatttcgaccggaagtatagcatcgtgcccataagtcagtcgaaatggggtagtattagttgattccttangagaatntctacatgcccatagaacttgatctaacgttttattccaatttcttggcttttgggcaatgtgttttttaatcaagttgattacaatcttattggctgcttcgacttgaccatttgcttgcgcataatatggtgtcgaggttaataatcgaaagccagttttttgggcaaattctttcatttttcgtccagtaaaaactgaaccttgatcagt

SEQ ID NO: 14452 - DNA, 400 bp, Glycine max
tggtgcggagatgatggtacagcgggtgaaccagaagcggaagtttcttttggtgaggtagccatggaaaagcagagcgtttggaatgatttcgtaaatctcataaaactattgggaaatgctggtaaaaacacgaatgccaagcagatataaatttgaatgaagaatgtagaggggcgtgtgaagcaacggtcgaatttgctttgtagtgaacgtgctattaatgttaagtgattcgtttgggcacgttcagattgcagtagctgctataattcctctagcagacaaatgcccagcttgcccctcagtttttcaaactgatttgcatccaaagcctttgtgaaaatatctgctatttgttcctcagtgtccacatgcttcagtgtgatcactttatcat

SEQ ID NO: 14453 - DNA, 271 bp, Glycine max
  unsure (1)..(271): unsure at all n locations
aaatgaacaacaacaatcaaagtcaagaatagcanatgaataaaattcaccacaccaattaataaaaaataaaaacacagtaactgcttcaagtgtgcattntgcataccacatagattggttatggcatttgagatagccaaggctgtagcgaccccatttccacaacctgacatatcttctccaagtaacaattntgcaaacctctccttcatcatctcaatctctacaagtgagaatgaaaatcanatctcatcatactgatatcatc

SEQ ID NO: 14454 - DNA, 330 bp, Glycine max
  unsure (1)..(330): unsure at all n locations
ctactaaacagaaaaatggagagaccccacatcctaattaaaaagagattattttctaaaaatcagcatcatttgactctatgatcactcttgcatttaggtcataaaacctatacgctctgctattaatagcataaccaatgaacacacattcataggctctacttgcaagtttaaccctcttaagatctgggatccttacataggccaaacatccccaagttctcaaataagaacaaatttggtggcttttctttaatatctcatagggagatgtctntctttnttgattgtggattctatttagcacataacaaacagttaacaaaa

SEQ ID NO: 14455 - DNA, 334 bp, Glycine max
  unsure (1)..(334): unsure at all n locations
aacatgttgatgtgagatgtttggttttctaccattgaacaattcatatggagttttcttcaagataggtctgattacagccctattcatgatataacatgcagtattaacggcttcagcccaaaaatattttggaagaggggtatcattcaataaggttctagcaatttcttccaaagacctatttttcctttcaacaactccattttgttgaggggttctaggtgcagaaaaattatgttcaatgccattcttttcacaaaataaatcanattctttattntcaaattcacccccatgatcactcctaatagatataatcttgagacttttc

SEQ ID NO: 14456 - DNA, 384 bp, Glycine max
aataatggtcgatcggaatgtccatttgtttttgtactctagctgattgcaaatgtatttcgaccggaagtatagcatcgtgcccataagtcagtcgaaatggggtagtattagttgattccttaggagaatatctacatgcccatagaacttgatctaacgttttattccaatttcttggcttttgggcaatgtgttttttaatcaagttgattacaatcttattggctgcttcgacttgaccatttgcttgcgcataatatggtgtcgaggttaataatcgaaagccagttttttgggcaaattttttcatttttcgtccagtaaaaactgaaccttgatcagtggtaatttgtttctggaataccaaacctataaataata

SEQ ID NO: 14457 - DNA, 270 bp, Glycine max
  unsure (1)..(270): unsure at all n locations
tcactatgcacagttggtaattctgatgctgtgaccaagtcaaattaattttgaaactatattttgatcaactgtaagcattcagaatcttttgctgtcaaattacccatngccttccctactgtattgtgtggcattatgttgagtcaacatccaaatattttaaacaacattgactctgtaatgaagagagaatctcctctatccctgcattacaaactgtttgaggggacacatgtcccagacattgtctcgacatcagggaaagct

SEQ ID NO: 14458 - DNA, 383 bp, Glycine max
  unsure (1)..(383): unsure at all n locations
tctggtgggacatcttgacttgctntccaatctgacattttccacagattctgccttcttctattntcagattatgaatgcctctaacagcacctttgtcaatgattttcttcatacctcttaggtgcagatgtccaaatctttgatgccatattttgacttcatcttctttggagaatagacatgtggaggagtaactggtttcttgaggtgtccataggtaacagttgtcctttgatctgctgcccttcattagaacttcactcttctcatttgtcaccaagcattctgactttgtgaagtttacattgaatccttcatcacacagctgactgatgctgatcaagtttgcagtcagtcccttcaccagcagtactttgttc

SEQ ID NO: 14459 - DNA, 305 bp, Glycine max
  unsure (1)..(305): unsure at all n locations
atatcgacaaggggatcatcggccaactattnngaaggattgcattaattatgcaaaatcatgtgaagagtgccaaaaacatggtaccatacaacaagttctaacaagtgagttacattcgataaaaaaaccttggccttttcgaggatggacattaaatttgataggtcaaattcatccattttcctcgaaaggacataggtagatcttagttgttgttgattattttaccaagtgggtagaagcaattcccttaaaaaatgttgatcaaggggatataactaatttcatagaacaaaatatta

SEQ ID NO: 14460 - DNA, 403 bp, Glycine max
  unsure (1)..(403): unsure at all n locations
tattataatgaanttctcatgatatccttgtgtgngggtgatgcccganacacttgaataccctttacgatagctccacacttgcagtacatgtcaataattattgtgagaacaacgacattcaactcaaaattcccctttttacataatcatgaacccactccccatgttgaagtgcacctaagtgagcataaacacttaacaaactcatcactgtaaattcactaggctgaacccttcgtctctgcatcttgcggaaaagctccaatgcctccataagccttttattcctaacatatccactaatcatagaattctaagtaactntagttcttgtaggcatgttatcacacaacctcctagattatcaacctccccacacttagcaagccccatgatcata

SEQ ID NO: 14461 - DNA, 386 bp, Glycine max
  unsure (1)..(386): unsure at all n locations
tcggatccctgtcagatacaatactagaaggaattccatgcaaccttactacttccttgatgtacaactccacgagtttctccattctatacttcatattcactgggataaaatgagcggatntggtgagtcgatctactatgacccacacagcatcatgtccacgactagtcttgggtaaactagatacaaaatccatagatatgctctcccatttccattccggaatctccaatggcttcaattctcccgatggtcgttggtgctcaaccttagccttttgacatgtcaaacatcttgctacatattcaactacatctttcttcatgccatgccaccaaaaacttctcttcaaatcttggtacatcttagtcattcctggatgg

SEQ ID NO: 14462 - DNA, 427 bp, Glycine max
tatgatgatcgagatgtagaatgggtttatctacatactgagagatttaagctcttgttacttcgtagtgaagtttctggaaatgcaaagggtgaaagagccttaacgaaacttatgagttctgatcaccaaaagggaagcaaatccagtaaacaaaggcaaagaacagaagagaatacagaggatgatcgttgtggtgggagcagtatggactcagaacctataatttcctggttggctcgatcttctcatcggcttagatcttcttttcaaggcataaagaaacagaaaacttctgttacaattccaagtacaatgtcatcattcgtatatgatgaacctgttacagcaaaggggcatttagctaagagatctttgaggggtgctaaaaataatttctctagtgattctgtgtcacaaaataaaa

SEQ ID NO: 14463 - DNA, 498 bp, Glycine max
  unsure (1)..(498): unsure at all n locations
atccttgagtcacctgcggcatgcaagctntctccactaagttgcctgatgcctgatatgtcttttctgatggctgtggtcctagatgcagggaagaatttctccatgaacaccctcttaaggtcattccagcttgaaatggacctaggagcaaggtagtatagccaatcttttgtcactccctctagagaatgaggaaaatcctttagaaagatatgatcttcctggacattagggggcttcatggtggaacaaaaaatatggaactccttaagatgcttataaggatcttcacctgcaagaccacgaaacttgngcagcaaatgtattagtccagtcttgagaacatatggaacaccctcatcaggatattgaatgcacaagctttcataagtgaaatcaagtgcatccatctccctaagagtcctttcacgaggtggagggtgagccatgttctcagtatgaaaattagtagcggaatgttcaaaatcacaatat

SEQ ID NO: 14464 - DNA, 346 bp, Glycine max
  unsure (1)..(346): unsure at all n locations
cttggattagtgggctgaaccatagctaanattcactaatcataattagtgaaattttggccccaaaatttggctccacaaattcaatttcaaactcaagtgaaatttgaatagaaattcaaatttccctccaattnttgtgtgacacgtangctataaatagagtccatgtgtgtgcattntttggaactttgatcatttgagaattacacttaaaagttcagacctcatttgaagcacanaattntttgctccttttctccctttccctccactcttcttctcctaccttcaagctcttatccatggcttcctatggtggtgagcttcttcttgactcatattc

SEQ ID NO: 14465 - DNA, 337 bp, Glycine max
  unsure (1)..(337): unsure at all n locations
gcttatgagagagcaagatcnnatggaggaaaataaagcttgctaacaagccaacaagggagaaagaaggttgtcttcgaacccgaagattgggtttgggtgcacatgagaaaagaaaggtttccggaacaaaggaaatcaaagcttcaaccaaggggagatggaccatttctagtgcttgaaacaatcaatgacaatgcttacaaagttgagctgcccggtgagtataatgttagttccaccttcaatgtctctgacttatctctttttgatgcagatggagaatccgatttgaggacaaatccttctcaagagggagggaatgatgaggacatga

SEQ ID NO: 14466 - DNA, 464 bp, Glycine max
  unsure (1)..(464): unsure at all n locations
agcttaacaatccaagtgatctattacgggaatattttatccctatcatatatcttacctcacccatatcttttacatcaaagttgctagagagaaacttcttagtctcatgaagaagaccaagactattaggtgcaagtaagatatgatcaacatacagaattagaaaaataaccttactcccactgaccttcagatatatatacaccaatcaacaatattttccttatattcaaaggaaacaatgatatcattaacctcaaataccattggcgagaagcttgctcaagactgtatattcatttctntaatatgcacaccatgtgtttctttcctttaaccgagaaccccattggttggtccatataaacattctcctctaaatccccattaagaaagacagttntcacatccattggatgtagctctaagtcataacggacttctaatgtcatggatatcct

SEQ ID NO: 14467 - DNA, 326 bp, Glycine max
  unsure (1)..(326): unsure at all n locations
gctcagaggttcaacattcaatttcgagcgtctcgttatattacaggactcaatcagacattcgagtaaaacgttattgtcgtttgaattggcttagagcttcaacattcaatttcgagcgtctcgatatatgatgggactcaatcagacatccgtgtaaaaagttattgtcctttgaattggctcagagcttcaacattcaatttcgagcgtctcgatatatgacaggactcaatcagacatccgagtaanaagttattggtcgttgaatntgctcagagcttcaacattcaatttcgagcgtgtcgatatattaccggcgtcaa

SEQ ID NO: 14468 - DNA, 419 bp, Glycine max
agcttagagccaattcatattacaataactttttactcggatgtctgattgagtcccgtcatatatcgagacgctcgaaattgaatgttgaagctctgagccaattcaaacgacaataatcttttactcgaatgtctgattgagtcctgtaatataacgagacgctcgaaattgaatgttgaagctctgagccaattcaaacgacaataactttttactcggatgtctgattgaggcccgtcatatatcgagacgctcgaaattgaatgttgaagctttgagccaattcaaacgacaataactgtttactcggatgtctgattgagtcccgtcatatatcgagacgctcggaattgaatgttgatctcttaacgaatcaaacgacactactttttactcggatgtctgattgagtcccg

SEQ ID NO: 14469 - DNA, 388 bp, Glycine max
  unsure (1)..(388): unsure at all n locations
agcnttgatgcaacatatggagaggttaatgatacaacgagatgatgcgctccatgagaggttggatcaaatggagaatagagatcataatgaagaagaaaggaggagaagagggaatgatggtgttcctagacaaaaccgaattgatggtattaaactcaacattcctncatttaaaggaaagaatgatccggaggcctacttggagtgggagatgaaaatagagcatgttttctcatgccacaactatgaggaggaccagaatgtgaagcttgccgccacggagtnttccgactatgctcttatgtggtggaacaagctacaaaaggagagagcaagaaatgaagagccaatggttgatacatggacggagatgaaaaagatcatg

SEQ ID NO: 14470 - DNA, 437 bp, Glycine max
  unsure (1)..(437): unsure at all n locations
agcttaactatctccttacataacacatcatcaatgcttcttgctgtataaggatgcttaagtggtataaaatgtgaatacttggacagtctatccacaactactaagatagcttcataccctctggatttgggcaatccagtaataaaatccatcgatatgtcatcccatatttgctctggaataggtaatggttgtagcaaacctcctggagcagtagccatatatttctgtctttgacagatatcacaactcctcacatactcctgaatagtccctttcattcccatccaatatacatttgttgcaatcctcctatatgtcttataaaaacctgaatgacccccttgnggagtggcatggaattcttgtagcaacacaggaatcaattgtgactgactggataaaactaaccttccattgtacatcaacacacc

SEQ ID NO: 14471 - DNA, 488 bp, Glycine max
  unsure (1)..(488): unsure at all n locations
gtgatctctaagcaccgcggctgcagctgacccttacgagtcagttagtcatatgtaaagcttgacccttacaagacacaccatgtctaacaaactgcttatccaacaactcctctaactgtttcttaagctcagttaactctataggagacatcctataaggggctatgaatatgggtccatcaccgggtactaactctatagaaaactctatctctctctcggatggtagaccagatatatcctcagggatactttcaggaaactctctcacaacagggaggtcacacatggaaacctgtctctatttctaggttagacaagatcatgtacactngagcatcttctnttagagatgtcnataactggttggcagagataaacatcatatccttactcactccaaaatcatcagacaccatagttttatcaaaacagtttaacaagacnatggtggaagataaccaatccatacccaggataacatc

SEQ ID NO: 14472 - DNA, 385 bp, Glycine max
  unsure (1)..(385): unsure at all n locations
agctntanggtttatggtttagggtctaagtcttatggtttatggtttagtgtctaagccttagggtttanggtctatgccttagggtttatgttttagggctatgggtttagggttttgggttttgggtttagtgtccaagccttanggtttagggtttatggtttaaggtgtagtgtctaagtcttaagttttagggctgagggtttatggtttagtgtctcagccatagggtttaggttntagggcttagtgtttagggtttagggtttaagcctaagggtttagggtttagtgtctaagccttanggtttgggggattagggtttaagccttacggtttatgattgaaataaaattactccatactcatatgcatctaatg

SEQ ID NO: 14473 - DNA, 456 bp, Glycine max
  unsure (1)..(456): unsure at all n locations
agctttctataatcaacgctcattctccatcacgtggctattctggtaggaattagttcatttcgatcatttcttattactgtcatccctcctttttttggaacaacttgaacaggactaacccatgagttgtctgaaattagatagataaggcctgcctctaataacttgagcacttcttttcttacttcctccttcattataggattcaatcttctctggggttgtttcacaggcttataattggcttccaaattgattttgtgcatacaatatgatggactgattccttttagatcagaaatgtgccaaccaatagccgctctacgtcgatttagaatctgcaccagttgatcttcttcttcttccttcaaagagttgctaattataacaggtttgatctcatcttcttccaagaatacatactttanatgtgccggaagggtctttaattct

SEQ ID NO: 14474 - DNA, 313 bp, Glycine max
  unsure (1)..(313): unsure at all n locations
acactactagaanatgaggttnttacatcggttatttaagactttcaacatagattattaaccgatgttaaaagtaccaatgttgaaagtattatcgttaacattggttttccaaaactgatgttaacgaataaatacaacatcgattatttaaatagccgatgttatatgataagaattatcataaaaagaaagttataaatctatatatcaacatcggttttttaaaaaaatcgatgttaacctccacagttaacatcagttntttaaaaaatcgatgttaactggcactaacaacatttgttttctatta

SEQ ID NO: 14475 - DNA, 362 bp, Glycine max
  unsure (1)..(362): unsure at all n locations
tgaaatttaaaatatggtatttactctctggtaatcgattaccagaggatgtaatcgattatcagtggccaaaacgctntctgaaatgttnttaaatatttttgaaagcatgtaatcgattacacaattcttttaatcaattaccagcagttgaaactgtttataacagctattaaaaatttgaattcaaattttaaagcctgtaatcgattacacaatgcttgtaatcgattactaggaggaattttcgaaaataactctcaagagtcacatctgttcaagagtttttttaatagctntcanaagcctataaatgggtgacttgggacacgaatttccttagagtntttctacacaaagag

SEQ ID NO: 14476 - DNA, 361 bp, Glycine max
ctgagttgtagctacctcatgcactcctctaatgattataacatcatttctggcgctaaactgctgggagttggaagccatcttctcaattaaatgtctagcttcaataggagtcatgtctccaagggctccaccactggcagcatctatcatacttctctccatattactgagtccttcataaaaatattggagaagaagctgctctgaaatctgatggtgagggcaactagcacatagttttttaaatctctcccagtattcatacaggctctctccactgagttttctaatacctaagttatccttcctgatggctgtggtcttggaagcagggaaaatgttttctaagaatactctc

SEQ ID NO: 14477 - DNA, 458 bp, Glycine max
agcttctcacaaattcaatggtatgacttttacacaattgtccgattcggggacataactcatctagacgctcgaaattgaacaacgcaagctctcgagaaattcgaatggtcataacttttcacacggatgtccgattcggggacaaaactgatctagacgctcgaaagtgaacaacggaagctctcgagaaatttgaatggtcataatatttcactcggatgtccgattcgaggacataatatatcgagatggtcaaaattgaacaacggaaactgtcgacatattcgaatggtcataacatttcacacagatgtccgattcggggacataactcatctagatgctcgaaattgaacaacggaagctctcgagaaattcgaatggacataactcttcacaccgatgtccatttcagggacataataatatatctagaacttcgatattgaacagcg

SEQ ID NO: 14478 - DNA, 344 bp, Glycine max
tgacaatgcttactaaggcgagctgcccggtgagtataatgatagttccaccttcaatgtctctgatttatcttattttgatgcagatggagaatctgatttgaggacaaatccttctcaagagggagagaatgatgatgacatgaccaagatcgagggcaaggatccacttgcaggacttggagggtctatgacacgggctagagcagggaaagccaaggaagctcttcatcaagtgttgtccatactatgtgaatacacacccaagtttcaacgagaaaagtccaaagttgtgagttgtatcatggtccagatggaggaagactagatggcaccactttgtc

SEQ ID NO: 14479 - DNA, 407 bp, Glycine max
  unsure (1)..(407): unsure at all n locations
ctgagttgtagttaccttatgcactcctctaatgactatagcatcatttctggcactaaactgctgggagttggaagccatcttcttaattaaatttttggcttcagcaggagtcatgtctccaagggctccaccactggcagcatctatcatacttctctccatattactgagtccttcataanaatattggagaagcagctgctctgaaatctgatggtgagggcaactggcacatagttttttaaatctctcctagtattcatacaagctctctccattgagttgtctaatacctgagatatcctttctgatggatgtggtcctggaagcaaggaaaatgttttctaagaatactctcttcaggtcatcctagctcgtgatggaccgtggagcaaggtaataca

SEQ ID NO: 14480 - DNA, 448 bp, Glycine max
  unsure (1)..(448): unsure at all n locations
agctntcttgaganaacgttcttgagaagctagagcttagctacatacacccctctaataactaagctcacctccttgagaagattcctaaagaagctagagcttagctacacacatctctctaatagctaagctcacctgcttgagatgagaagctagagcttagctacacaccccctataatagctaagctcacccccagttccaaaatacatgatagtacaaaaaaagtccctactacaaagactattgaagatgcgctataatacaaggctaaaaccctatactactagtgggagtgcttagctctactgagctttagaagattgggctaagatttggtaagacataagcacttaaacaatgaaggaaagctggagttgctgcacatgatgtccaacgttatgtcaaggaataagatcgggctgcacaatgcacaatgcaagat

SEQ ID NO: 14481 - DNA, 319 bp, Glycine max
  unsure (1)..(319): unsure at all n locations
cacctgcggcatgcaagcttcatgaacaacttgtgataactctctctcttccaacctatagttctaaaaatgaaatctcttggttttacaagtttgagaatgttgtctcagcttcaatgggattggaaaatggagggaaatttgaatttctattcaaatttcacttggatttgaaattgaatttgtggagccaaattntggagccaaaatntcaaattatgattagtgaattttagttatggttcagcccactaatccaagatcaagtccaagaatctccactaagtgtgcttaggtgtcatgaagcatgtaaagcatg

SEQ ID NO: 14482 - DNA, 314 bp, Glycine max
  unsure (1)..(314): unsure at all n locations
acctgctgttcgacgggcatcgttcacggctagccaagcagcttcaaaatctgtacaagttccaaagggctatcttgcagtgtatgttgnggaagaaacaaaagcggttgtggttcccgtatcatacttgaatcagccttcattccaagatctcttgtatcaagctgaggaagagtttggatatgatcatccctcgggtggcctcacaattccttgcagtgaagatgttntccaacatataacttctcacttgaattgagaccacacatctcactgtgggagactcacatagattagtagacattntacactat

SEQ ID NO: 14483 - DNA, 401 bp, Glycine max
  unsure (1)..(401): unsure at all n locations
aatacacttncaaggcattcaacacttactatgagcaacatggaataattcatgaggtaacgtcaccttatacatcacaacacaatggcttggcagaacgaagaaatagaactatccttgacatggcaaagagcatgcttaagcagaagaagctacctcattcattctggngagaagctatgagcacaacaacttatttgttgaacaaatgtcctactaagagattgaaagagaaagtcccagaagaggtttggtctggaagaaagccactggttagtgatcttaggatctttggatccctatgctacaaacacattcctgatgccaaaaggaggaaattggaagacaaaagtgaaccaatgatactgataggctatcatggtactggtgcctatagactc

SEQ ID NO: 14484 - DNA, 473 bp, Glycine max
  unsure (1)..(473): unsure at all n locations
gcttgtaggttaaagtctcacgattgtcatgtgctcatgcaacaattgttagccgttgctatacgagacatcttgccaaacaaagtcaggttagccataactcgtatgtgctttttcttccatgctatatgtagcaaagtcattgatcctgtcatgtttgatgagctggaaaatgaggccgcaattatactgtgtcagttggagatgtattttccccctgctttctttgacatcatgattcacttgattgtgcatctggtcagagaaatcaaatgttgtggtcctgtttatctacngtggatgtacccggttgagcgatacatgaagatcttaaaagggtatacaaagaatctatatcgtccagaagaatctattgttgagaggtacatcgcagaagaagccattgaatcttgttcataatacattgagaaggctaaacttgttggccttcctgagtctcgacatgatgacag

SEQ ID NO: 14485 - DNA, 362 bp, Glycine max
  unsure (1)..(362): unsure at all n locations
tatttcagaagggaattctatcaatagacctcccatctttaatggagaggggtaccactactggacaacccgaatgcataattttatcgaggcaatagatctaaatatctgggaagccattgaaatanggccttatatacccaccacagtagaaagaggttcaatatatggtagtncaccaagtgaaagcataaccatagaaaaacctagagatagatggtctaaagaggatagaaaacgagtacaatacaacctaaaagcccaaaacataataacatctgccctangaatggatgaatatttcatagtttcaaattgcaagagtgctatggaaatgtgggacactcttcgattaacacatg

SEQ ID NO: 14486 - DNA, 471 bp, Glycine max
tggttacctctttcttcactatacttcatgaatcaccgtgttgagtcttctctgtggttgtcttactgggttagcctcatcttctaaatttattcgatgcatacatgtggatgggctaataccaggaatatctgccagggtccagcctatagctttcttatgcttcttgagaacaaataacaacttctcctcttgctcatcagcaagggaggcggatataattactggaaaacttttgccatcatccaagtaagcatattttaaattagatggtagaggcttcaattctggtgtgggcggctggatagtggtagaaagagatggtttctcagcctacacctcataaagaaagtcgaggtatgtgtacttactgaaacatggttagtttgatctgactctataaaatcaatctctagaggtaagacatcaccagacatgtaatcaatatctaattcatattcactctcaaca

SEQ ID NO: 14487 - DNA, 454 bp, Glycine max
  unsure (1)..(454): unsure at all n locations
atcatgaaactacctttacttactcttcattctgagatcacaatagaatacgcccagttacctacgagtcaaaagacatctttacttggaagaatgaacatagttaaggtaaaaatgaactcatttcacctgaagcaagcaagtccttccatctattagaaggtgagtttcagctgcttcttcctccgcatatatttatagaaagaaagtgaagtataaaaactcaggcagaattcagcatcttatacctttcgccgtgttccgccattgattacttaccactgaaacatatatgccttgtcaaaattgtgaagcataacattcacgagaataaagtgaagtgcagtaacaacaaccattgatttaatgtgcaagcacgcgaaaaatgacacgttgctntggcatatggcttcgaggcacttcactgctttccctatttcccatagcccctctc

SEQ ID NO: 14488 - DNA, 343 bp, Glycine max
agcttgcttcaaggtggatgcaattgagcgagaagttgaccttggaagtacttgtcaatgcgactgtaccatgctctcagtgcttgttttagtccataaaaagccttctttagcttgagaactttgtcttcttctaatttcacctttaatcccaacggttgttcgatgtacacttcttccacgaggactccattcacgaaggtagacttcacgtccatttgatgaattctccactagtgttgagttgcaagagagattattagtacgatggtctccaggcgagcgaccagagcaaacacctcaacataattgataattgtgaaatttgagttaatttgatagt

SEQ ID NO: 14489 - DNA, 272 bp, Glycine max
catgaatggtacaattcttagcaccttcgacagagttcattgaataaccacatggctcaaagtcaaagtcacaaatctcagaatctggaagaattattctaatgccagaattaacagtcataatggcagctgaagctgattgttctttgtagaaaacctgtgctatctctctatcaggccagtcatgcacatctctagagtgtaaacattgtcgcatggagttacagaatctgcagatgcagagtagacatgccagttctgtgatttgtctt

SEQ ID NO: 14490 - DNA, 492 bp, Glycine max
  unsure (1)..(492): unsure at all n locations
tactcagctgacctctagaatanaaaataagggtgctctctgtaatatatacaaaaganagatgaagaatntacttgctacttttacaagaaatttggacacatgaaaaaagagtgtccaaggtacgttgcatggcgtgtaaagaaaggtaaatctcttgctcttgtttgttttgaagttaatttagcagtctttcccatttatttgcatatctaatgatttgtttaattaaattgattgacacaatatattgtaaagtaatccctattgttaaaattgatttgattaaaattacatagattttgtataaaattatttatgcgaattgtgttcagcttaaaggaagacacaatttggccaaaaatattttgtacttgtgatgataaatgtgtgacaattataaggtgttttcatgtgaataatagtaaatccaaagaaagactgttatttgacagaatntattgtcaaaatattngcatgttctattatata

SEQ ID NO: 14491 - DNA, 326 bp, Glycine max
  unsure (1)..(326): unsure at all n locations
acaatggaagctgtctaganattcanatggttctatcttctcaaacggatgttcgatttggacacataatatatcgagacgctagaaattgaacgattgaacctctcgagaaattcaattggtcataacgtttcacacggatgtccgattcgggcgcattatatatcgtgacgctcgaaattgaacaacggaacctcttgagatatttaaatggtcataactattcacacgaatgtccgattcagggacttaatatatcgagacgttcgaaaattaagaacggaacctctcgtgaaattcatatgggaataacttttcacatggat

SEQ ID NO: 14492 - DNA, 469 bp, Glycine max
  unsure (1)..(469): unsure at all n locations
tagaatgcanaagaagaagaagaagcantcaatttaacaatgttttttnaatgcgtaagaataaattgattacaataaaataaatgagataggggaagagagaaatgcaaactcgatttatactggttcgggcatttcccgtgcctgcgtcaagtcctcaagcaacccacttgagattttcactaactttgtaaaatcctatttacaacttttgaacacccgaggaatccctttcccttgtgttcaggaaacttcacaattcaagagacaaccaatctcttgattacaactgactttctgagatgaacagaatgatttctctcctttagagtggatgatacaaattgaagttcctagatgaactctcaatagatntgtaagtgtttgccgaagatnttttaagagagcatttggcaatgaatntctcttagaatatctctctcttacattttgaagtcagacacacata

SEQ ID NO: 14493 - DNA, 467 bp, Glycine max
tatgcacgcagagttggagatgagtatgattagagaattatagttctttcttggacttcaaatcaagcaaacagatgaaggcatatacatacgtcaaaccaagtatgtgaaggaacttctgaagaagttcaagatggacgatgcaaagtcaatgaagaccctatgcatccaaccattatagttggactggatgaagaatcaaagcaggtggacaaagagacatacagaggaatgatagaatctcttttgtagctcactatgtccagacctgacattatgttcagtgtatgcctcttccaaaaggaaccaagggaagttcatatatctattgttaaatgcatatttagatatttagttggaactcctaaccttggtttgtggtttaagagagaaaaggaatacatgttgcttgattattgggatagcgaatttgtccgagatagagtggaaagaaagagcacacatga

SEQ ID NO: 14494 - DNA, 376 bp, Glycine max
  unsure (1)..(376): unsure at all n locations
agcttccacattnttacatagaatngatgttatttctcttatggaattggttatgcaaacatgcaataaatgaaactccaattcagattggagaatagcataaaaaatactcaattaattaatttggtccaggttttgttcttttaacttagggtaacaattattgcatagggtttatgttgaaatggaaattgtttgttgacgacatgttgcttgtntggttggtggatcaatcacgaggctaaggaacaagaagagaagagggccactactcagttgatgtttgatttgggttataaggcctatgggaagggcttctatggacatgccattgaatatcttgaagttgcactcactatcatacccaggcctacat

SEQ ID NO: 14495 - DNA, 263 bp, Glycine max
gagaccttatagtgatgagctcttcgtgtatgaccgtcatacctggttcatatctattgattgcaatccctctccacgtgtgagaattatggcatgattctgattatctggcttaccctcacacaatattgctggtccaggacgctttatcttatatatgatctgattgaaacaatcatatatagtatattattaagataataaatgatagtttacgtaagactcgaacagttaacgttaagagttccatttagttatataga

SEQ ID NO: 14496 - DNA, 392 bp, Glycine max
  unsure (1)..(392): unsure at all n locations
agctntacacattatatagaatcaaatgttatctctcatgagaattaccaatatccggaataattgctagcataaatctctaaggttatattcacatgagattattttaaagtacataattcattctaaagaataaagctaataatgttatatatcaataaacaaataatgatcgagtttatattacattatacatacatatatatatatatatatataattagtatataattataattaaggagtctagtctatttaattaaacatgtgttgagttagagtatactctcttatactcgtctctaattcttatgaataagaaaatataacaaagtataaataaaatataatattaatcattaatttttttacagaattactaaagtgatata

SEQ ID NO: 14497 - DNA, 367 bp, Glycine max
  unsure (1)..(367): unsure at all n locations
tcaagctnttgaaccttggaattgtaaatgactgctcatataaaggcttgattaaacttccatcttccaacgagcacagtaacaccctatgaggacaaccacaggaatcatgaatatcaacaaaatttcgcatatgatgatcaaggaccacaatgtgcttccccttgctgtgcgtaagtctgacagggacctgaagtggttgactttcatcaacaaaaangttggaacaatacaaattggactccacaggaccatctaatgtcccagtaaaatatattagacctgtatcctcattcacaccggcaatatgctcaaccatccattcaccttcagtgatgggtcctaaacaagtcgcatttgcatcatg

SEQ ID NO: 14498 - DNA, 386 bp, Glycine max
  unsure (1)..(386): unsure at all n locations
tctagatgagttatgtctgcgaatcggacatcctgtgaaatgttatgaccatntgaatntctcgagtgcttccgttggttaatttcaagcgtctcgatattttatgtcctcaaatcagacatcggagcgaaatgttatgaccattcgaatttgtcgagagcttccgtttttcaatttcgagcgtctagatgagttatgtcaccgaatcagacatctgagtgaaatgttatgaccattcgaatttgtcgagagcttccgttgttcaatttcgagcgtctagatgagttatgtcaccgaatcggacatccgtgtgaaaagttatgaccattcggctttgtcgagagcttccgttgttcaatttcgagcgtctcgatatattatgtccc

SEQ ID NO: 14499 - DNA, 235 bp, Glycine max
  unsure (1)..(235): unsure at all n locations
gctgttaccccatggttgaattgcttactatagagctngtcatagcaccactaaattgtctccttttgaaagttgttatgggtttaacccactaactcctcttgatcttttgcctatgcctaatgtttctgtttttaagcataaaagaaggtcaaagcaaaggcggactatgtgaaaaagcttcatgagagagtcaaagatcaaattgagaggaaaaataaaagctatgctaaac

SEQ ID NO: 14500 - DNA, 413 bp, Glycine max
  unsure (1)..(413): unsure at all n locations
cgcttctntnggtgcatagaatgctgtanaaaaaatagtatgtgtcatgaatctctgacataagcttgaaccaattaacattgtttgaatgacaactgttgtagttggacaacaatcacatagtttgtccacaatggtatgctttatgttcctattggttatagttttggtatgcttttgttcctattggttatagctttggtgctagaatagttcaattggagtccacaagaggaggatctccatatggtgctggagtttttgctggagatggtacaagacaagcaagtgaaatggagctggagcttgcagagtatcatggcaagtatatatgaaattagcccataaaagctagattgaattatgtgattaanattccattaagcccttctagctacgtcaacattctagtt

SEQ ID NO: 14501 - DNA, 393 bp, Glycine max
  unsure (1)..(393): unsure at all n locations
tattctataaccgacgacatctctatgtggtgtgtcagttttcactactataaaaagagggttntacatcggatatttaagactttcaacatagattattaaccgatgttaaaagtaccaatgttgaaagtattatcgttaacattggttttccaaaactgatgttaacgaataaatacaacatcgattatttaaatagccgatgttatatgataagaattatcaaaaaagaaagctataaatctatatatcaacatcggttctttaaaaaaatcgatgttaacctccacagttaacatcagttttttaaaaaatcgatgttaactggcactaacaacatttgttttctattataaagtaaacgaatggagttttttgaattgaggggggggg

SEQ ID NO: 14502 - DNA, 311 bp, Glycine max
actcagcttcttgtcattacgagcgctttattattatgtgcctgtttcagacatccgagtgaaaagttatgagcatttcaatttctcaagcactaccattttttaatttcgagcgtctcgatatatcatgggcctcaatcgaacacccatgtcaaaagttatggccgtttgaataggactaaagattccgtgttcaattacgagcgtctcgatatatcatgggactcaatcggacatccatgttaaaagatatggccgtctgaattggactagaacttccgagttcaaatttgagcaggtcgatatattat

SEQ ID NO: 14503 - DNA, 475 bp, Glycine max
  unsure (1)..(475): unsure at all n locations
ntgagaatatggttgcagccattggtcaagatgagccacatttgcccattccttgctatcatgacatcagagttccactcttgaggaaggaagttgaatatactgaaaatttgataaaaggccacagggagcaatgggtcaagtatggttataatattatgtccgatgcatggactgatcggaaacaaagatgcatcattaattttttgattaaatctcaagttggtaccatgtttttgaagtctgttgatggctctgattttgtaaggacgggttaaaatatttttgagttgcttgatgccactgtggaggaagttggagaagagaatgttattcaagttgtaaccgataatgggagcaactatgttttagcgggtaagttgttggaggagaaaaggaaacatatttattggactccttgtgcagctcattgtattngattgatgcttgaagatattgggaagcttcccttgat

SEQ ID NO: 14504 - DNA, 388 bp, Glycine max
  unsure (1)..(388): unsure at all n locations
tactcagcttactatacctatagttnacaatgtttcttaaatatcttacaactgtttttataggaaagtgataggaagggaagacatccagatactatccagaggatgtaaataacatgctgaagtttctagcaagtttatctaaaagattaatgtacaagtctaaattgttagtcgttttatccatcaagtaagattntagtatggttaagagaaatatcaaattcacatttatgaaaaagataataattaattttcaattcttaagtacttgtaccatctcacaatgacataaatcctataacttactacgtatattcatatttttgtgggacaacaaaagaaaatatataattagtaattntctgaggcccaccanaagttaaaa

SEQ ID NO: 14505 - DNA, 424 bp, Glycine max
  unsure (1)..(424): unsure at all n locations
tactaagcttgagcaggantaaatgacaatacttttacacggatgttctgttgagtcccgnaatatatcgagacgctccaaattgaaaacggaaactcctagataattcaaacgacaataactttttactcggatgcccgacagagtgtggtaatntatcgagggatgctccaaattgaaaacggaagctcgtatcanattcaaacgacaataactttttactaggatgtctgattgagtcccgtaatatatcgagacgctcaaaattgtgatccgaagttctgagaaaattgaattgacaataactttatgcacggatgtcaagttgagtcctgtaatatatcgagacgctgcaaattgaaaacggaagctcgtaggaaattcacacgacaataactctctactcggatgtccgattgaatcg

SEQ ID NO: 14506 - DNA, 347 bp, Glycine max
  unsure (1)..(347): unsure at all n locations
agcttataccanattcaaacgacaataactttatacacgngatgtccgatgagtcccgtaatatatcgagacgcttaanattggaaacggaagctcgtagacaattcaaacgacaantaacatttactcgaatgtcctacagagtccagtaatatattgagatgctccaaatnganaacggaagctcgtaccaaattcaaacgacaataactttttactcggatgtctgattgagtcccataatatatagagatgctccaaatggaaaacagatgctcgtgtcaaattaatagacaataactttttactcgaatgtataattgagtcctgtaatatatccaggcact

SEQ ID NO: 14507 - DNA, 415 bp, Glycine max
gggcggcgttgcaatcgcatggtgatgtcatggctcactctttccatgagtcctgctatcaagcaattggtgatgtggatggattcagcttttgaaatctggaaagatctcaaagatcaatcttcgcattcagataagtttcacattgttgatcttcaagatcaaatccaaaattgtaagcaagttaactcaagcatttctgagtaatatactcgtctaaagattttgtggaaagaactagaattgtatagatgttttttgttgtgtacatgttctagtccttgttcttgtgggctcatttctaaacttaagaaagaatgtgaagatgactgtgtgatccatttttgcgtggcctcaatgatgtgtatgcacctgtcagatctcaagtcatgcttatggaacctatgccttcctt

SEQ ID NO: 14508 - DNA, 479 bp, Glycine max
  unsure (1)..(479): unsure at all n locations
gcgagacaacaactttngcaccatctaactcttcaatacaagcctgcacttcatcttcctccttcttggtcaaacattctacatgattattcagtgctttttccaaaggagactgtagtaccatggcaagctgctaattctatctcccgttctaccttcttcacatcaaaataggccttctgatcacttgagtgcttcattgcttcaaataagttgaatgaaattttctgatcctccacactcagttctaacttacctttccccatatctattacacaactggcggttgacatgaaaggacgttccaaaattatggggatttcaatatccctctctatatccataaccacaaaatctgtagggaaagtaatatgtttaactctgaccaaaacatcttctatcactccatacggtctgatgatggagcgatcagctaactgcagagtcattctggttggcattatctctagctctcccat

SEQ ID NO: 14509 - DNA, 384 bp, Glycine max
  unsure (1)..(384): unsure at all n locations
actggatgcgttggtcatcttggtaacccagctgttcttgaatcagaaatctgtacctgtcgcaagggtttgtggcttgtgctcctctgctgaccaccatacagacctttgcccttccatgcagcaacctggagcaattgagcagcctgaagcttatgctgcaaatatttacaatagacctcctcaacctcagcagcaaaatcaacacagcagagcaattatgacctttccagcaacagatacaaccctggatggaggaatcaccctaacctcagatggtccagccctcagcaacaacaacaacagcctgctccttccttcaaaatgctgctggcccaagcagaccatacattcctncaccaatccaacaacagcaacaacccc

SEQ ID NO: 14510 - DNA, 353 bp, Glycine max
  unsure (1)..(353): unsure at all n locations
actcagcttagcacttctgtagggtttcagggctntccatcagctcttattaatctgccatatactcagccggtattaggcctcatgagctttctcatatccagcttactggatttagtttgggtgacttcccttttagatacttaggtgttccccttttatcatcgagattaaatgtatgtcattatgctcccttgctttccaagattactggcctgatttatggatggagcaagaagtctttatcttatgcaggtaagttagagttgattagagcagctattcaaggaattgtgaatttctggatggagatttttcctttgccgcaatctgttctggaccgaatcaacgct

SEQ ID NO: 14511 - DNA, 397 bp, Glycine max
  unsure (1)..(397): unsure at all n locations
agcttcaagaaaaatatggcctcagcanatttcttatttccagaatggaattctatcaatagacctccaatctttaatggagagggttaccactactggaaaacccgaatgcataattttatcgaggcaatagatctaaatatctgggaagccatagaaatatggtcttatatacccaccacagtagaaagagtttcaatagatggtagttcatcaagtgaaagcataaccatagaaaaacctaaagatagatggtctgaagaggatagaaaacgagtacaatacaacttanaagccaaaaacataatagcatctgccctaggaatggatgaatatttcagggtttcaaattgtaagagtgctaaggaaatgtgggacactctttaattaacacatg

SEQ ID NO: 14512 - DNA, 417 bp, Glycine max
  unsure (1)..(417): unsure at all n locations
ataactggagattattattatgttaactaaactagttaataagtatataaaagttactctttttgaacattataaaatgacttattcaattataatagttgattaaaactgggaattgaagtagtgtaagataataaaaatggacatatanttttacatatattntagagtaaaatatgtttttagtccttcaaaaaatatacaaatttgattgtagtcattaaaaaatcttattnttgtccccctaatatagaaataataatgtcacaaaatatactatcaagatcngaaatagagtatttccaatttagaggagcaaaaacaagacaaaagaattntagatgactctaanatcaattaagtttacgtacatttaaaataatataaaatgtattttatcctaaattctaatatcat

SEQ ID NO: 14513 - DNA, 331 bp, Glycine max
tcaccataactcgcatgtgctttttcttccatgctatatgtaacaaagtgattgatccacgaatggttgatgaattggaaaatgaagccgcaattatactgtgccagttggagatgtaatttccccctgctttctttgacatcatgattcacttgattgtgcatctggtcaaagaaatcaaatgttgtggtcctgtttatctacggtggatgtacccggttgagcgatacatgaagatcttaaaagggtatacaaagaatctatatcgtccggaagcatctatttgtgagaggtacattgcagaagaagccattgaattttgtcagaatac

SEQ ID NO: 14514 - DNA, 300 bp, Glycine max
  unsure (1)..(300): unsure at all n locations
tcatataggtgaatctcaaaataagtatcttgaaatcatttgtgaagaaaatgggaatcaccacaatttttcaacccaagaatacctcaacaaaatggtgttgtggagaggaaaaatagatcccttgaagaaggtgcaagaacccttctaaatgaaacaagtctacctaagtacttttggacaaatgttgtacatactatgtgttacaccttgaacagagtacttattatgacctatttgaagaaaaatccttatgaactgtatanaggaagaaaattggacatcacctgagagtttttg

SEQ ID NO: 14515 - DNA, 268 bp, Glycine max
  unsure (1)..(268): unsure at all n locations
atacagatctctgtccttctttgcaactatctggagtcaatgagcaacctaaagcttatgctacaaacatttataatagaccccctcagtagcanaaccaacaacagcagaataattatgatctttcaagcaacagatataatctatgttggaagaatcatccaaatctgagatgggcaagtccttcacaataacaacagcctatccctcctttccagaatgttgttggtccaagcaagccatatgtttcttctccaatgcagcagca

SEQ ID NO: 14516 - DNA, 355 bp, Glycine max
  unsure (1)..(355): unsure at all n locations
agcttatgttgcaaacatttataatagactttccttagcagaaaaaccaaccacaacaaaattattatgatctttcaagcaacagataccatccaaggtagaggaatcaatccaatctgagatggacaagtccttcacaacaacagcagcttgtccctccattctgaatgttgctggcccagcaagccatatgttccttccccaatgcagcaacagtacaacaacaaaggcaacaagcaactganggatcctcctcaccttccttagaagagttagtgaggaaaatgaccatccagaatatgcaattntagcaagagacaagagccttcattcagagtctgacaaatcagatggg

SEQ ID NO: 14517 - DNA, 323 bp, Glycine max
  unsure (1)..(323): unsure at all n locations
agcttgccttgcctcttgatatattngaggtattcatggtcactattaatgacaaattccttgggataaaggtagtggtgctcatgtttcaaagcccgtactaaggcatacaactccttatcataaagtgaaatagtaagggtaggaccacttaacttttcactataatnagcaattggatgggctttttgcataacacagccccaaatccaacatttgaagcatcacactcaatttcaaaagattttgaaagtttggcatgcaagtatggggcattagttagcttttgctaaaaacatgaaagattcttcttgttctctccc

SEQ ID NO: 14518 - DNA, 276 bp, Glycine max
cctttttcgaaagcccatgaattggcgtatcggtcatgtgtcctccaccttcgaggttggagctatgcgtagtgattgcttagagaaattcttcattctcaacccctttttcggaccccatgaattgtgttttcgttcatgtcgcctccaccttcgagttgtgagctatgcgtagagattgcttagagaaattctccattctcaacctttttcggagccacatgaattgcgttgtcgttcattgtgcctccaccttcgaatttgaagctatgcgta

SEQ ID NO: 14519 - DNA, 360 bp, Glycine max
ctgcagctatgacgctatccagctcttgaaccaggacggagaatgatctatatataggcttgctaagggtagagagaggaagactagagatttggatcaagtaaagtgtgttaaggatgaagaaggcaaagtcttagtgcatgaaaaagatatcaaggaaaggtggaaagcgtatttccacaacttatataatgatggatatggatatgactctagcagtctagacacaagagaagaggaccggaactataagtactatcgtcggattcagaaacaggaagtaaaggaagcgttgaatagaatgagtaacggtaagggcggtagggccagacaacatacctattgaagtgtggaaaactc

SEQ ID NO: 14520 - DNA, 326 bp, Glycine max
  unsure (1)..(326): unsure at all n locations
cgagcgtcacgatatattatgcncctgtatcggacctccgagtgaaaagttatgaccatntgaattgctcaagagctttcattgttcaatntcgagcgtctcgatatattatgcgcctgaaactgacctcctagtgaaaagttatgaccatttgaattgctcaagagcttccattgttcaatttcgagcgtctcgatatattatgcgcctgagactgacctccaagtgaaaggctatgaccatntgaattgctcaagagcttccattgttcaatttcgagcgtctcgatatattatgcgcctgaaaccgacctccatgtgaaaagt

SEQ ID NO: 14521 - DNA, 429 bp, Glycine max
  unsure (1)..(429): unsure at all n locations
tggatccaccanatccatntattacagaaacccattcgggacatcatatagctaagaaaaccccaggaaaccgcatcataggctctctcaaaatccactttgaacaacatacaaggtttttgccccctttttgcttccttcaccacctcatttgcaacaataacactgtgtagcagctgtctgccttctatgaaggcagattgtctctcgtcaatgatgtttggcaaaattttcttcaacctgcttgataagagctcggccacaatcttgtatatgcatccaataagcgagataggtctgaactcatttagtgtttggggatcggaaaccttatgaattaaggtgatgaatgatgcgttgcttcctttagggaaaatcccacttgcgtggaattcatggaggaagcgaatgatttgtcatacatttgac

SEQ ID NO: 14522 - DNA, 338 bp, Glycine max
  unsure (1)..(338): unsure at all n locations
tctcttttgaagttgttatggttttaacccactaaactctcttgatcttttgcctatgcctaatgggttctgtttntaangcataaaagaaagtcaagcaaaggcggactatgtgaagaagcttcatgagagagtcacagatcaaattgagaggaaaaataaaagctatgctaaacaagccaacaaaggaagaaagaaggttgtcttctaacccggagattgggtttgggtgcacatgagaaaagaaaggtttccggaacaaaggaaatcanagcttcaaccaaggggagatggaccatntgtgcttgaaagaatcaatgacaatgcttacaaagttg

SEQ ID NO: 14523 - DNA, 389 bp, Glycine max
  unsure (1)..(389): unsure at all n locations
gtcacctgcggcatgcaagcttccaagtgtcaaaggtaaagtcccagatagtgaatttctacttatatcaagaattaataactcgcctaatgcactaaaaatatctggaatgtgtccactaaaatggnttccagcaagaacaagcctcttcaacttgttcaagttaccaatatctggtggaattttacctgttaaaccattttctaatagtactagtgactgaaggttcttgagggcaccaaaacttgaaggaatttttccaatgagacctctgtttgatctaaactcaagtgattctaagctgccagcaagctttttccagtttgcattgnggatggtaacttgatgcctgtgttgtgattcacagcattngaatagggatagagctt

SEQ ID NO: 14524 - DNA, 368 bp, Glycine max
gctccttcaactgcacaaggttcttaatattcgaagagtatccttgcggaaccttcacccgacgaagacactgacaaaaacttatctttaccttcttggacaaagcatggcaggctgggggcaagctaaatttctttccatcagaccttggatgcaactgtgatcgtatacccatatcaactagatcttgacgggtattcaagccatgcttcgtcttgccttgaatggtaaagagtgtcccaatcacactgtcgcaaacatctttctccacatgcataacatcaatacaatgtctaacgtcaagatcacaccagtacggaagatcaaagaaaatggatctcttcttccatatgcaactctgactttta

SEQ ID NO: 14525 - DNA, 432 bp, Glycine max
  unsure (1)..(432): unsure at all n locations
agctagaaggtgtgtatcccaccatctnttcatagtagaatactggtaatgtgtctactatcattggccctcatttttttccgtcattgagggtgccacttgggttggcaggtctctccacctttgggcgtattctttgaaagatccgtgcccctttttgcacatgttctgtagttgcatcctatccggaaccatatcaaaattgtactgatactgcctaacgaaggcaaccattatgtccttccaagaatnggactcggaaggctccaagttagcgtaccaggtaacagctacccagtaagactttcttggaagaaatgtatcagcagttcctcatcttttgcatatgcccccatcttccaacaatacatctttagatggttcttggggcaagtagtccccttgtacttgtcanagtccggcaccttgaac

SEQ ID NO: 14526 - DNA, 403 bp, Glycine max
agctttgagccaattcagacaacaataactttttactcggatggcttaatgaagcccggaatatatcgagacgctcgaaaatgaatgttgaacctctgaccaacttaaacgaacataacttttactccgatgtctgattgaggcccgtcatatatcgagacgctcgaaattgaatgttgaacctcttagccaattcaaaccacaataactttatactccgatgtctgactgagtcccgtaatatatcgagacgctcgaagtgaatgtttaagctttagccatttcaacgatataacttttactcggatgtctgattgagtcccgaatataacagacctcaaattgatgttgagctctgactaatcaaacgacatacttttactcgatgctgattggcccgaat

SEQ ID NO: 14527 - DNA, 419 bp, Glycine max
ataatagctaagcacacctccttgagatgagaagctagagcttatctacacaccccctataatagctaagctcacccacatgacaaaaaacatgaaaataacagagaaaagtccttattacatagacaactcatcatgccccgaaatacaatgctaaaaccctatactactagaatggccaaaatacaaggcctagacgaaggaataacctattctaatatttacaaagataagcgggctcatacttagcccatgggctcgaaatataccctaaggctcatgagaaccctagggcctttccttggatctctagcccaatctacttggagtcttctagccaatgcccttgcggggtaagagagcatcattacttttcactcagatgtgcgattcaggcacatcatatatcgagacgctcg

SEQ ID NO: 14528 - DNA, 468 bp, Glycine max
  unsure (1)..(468): unsure at all n locations
agcttgctaacccatggaagctcctaatatctcccacactttttgnggtgggccattcttggatggccttgattttctcagggtccacttggaccccatttctaccaactacaaaacctaagaagactatattatctacacaaaaggtacacttctctatatttgcatagagggtgtttttcctaaggactgaaagaacttgcctgagatgtcctaagtgatcatctaggctcctactgtacactaaaatatcatcaaaataaacaactacaaatctacctatgaaatccattaagacatgatgcataagcctcataaaggtgcttggtgtgttagtgagcccaaaaggcatcactagccattcatacaaaccaaacttggtcttgaaagcggntntccactcatcaccctttntcatcctgatttggtgataaccacttttaagaatcaattttgaaaagatattgg

SEQ ID NO: 14529 - DNA, 446 bp, Glycine max
  unsure (1)..(446): unsure at all n locations
tgagcncatatgctatgcccatcatcttggtgccaaagtattatgatactntgagaatatgcacaaattgtagagccatcaataacatcactgcaagtgatcatgaatcccttaagcatctaaagggccagggcaaactcaataagtggtatgccaaatgggtagagtatctagagcaatttccttatgtgatcaaacataagcaagacaatgctaatgttgtggctgacgcctcttctaggaggtattatttactttccatgcttgaaactaagatgcttgcatttgatcatataaagaagttgtatgcttgtgatgatgacttctttaatttgtttaaattatgtaaaaagggtgctcataatagatactttagacatgatggttacctattcaaagataagcaattgtgtgtgcctaagagttccatgcttgagttgtttatt

SEQ ID NO: 14530 - DNA, 373 bp, Glycine max
  unsure (1)..(373): unsure at all n locations
agctntgaaacatacatcatggttatttattgttgcaatngctngnagaaaagncatactaggtaaccataaggatgcatggacatttggagcggttgatcccaatagtggcactgcagcactgcttgaggtaacaatggatttgtttgtaggcattgctttgcttatttatatcaaaccaatggcacaagtgacatgtctcatgaaattaggtggctcaaaggctacggaagcttcagaaaaaagggtggagacctagaagaacaattttattatgtaattgggatgctgaggaatatggcctctgaattntctttacttctttngtctctccttgntactcacaaaggtgtgtgcaacatgaaagtttgat

SEQ ID NO: 14531 - DNA, 507 bp, Glycine max
  unsure (1)..(507): unsure at all n locations
tgtagaanattganacgacananatnnnnatctaatagttcctatataattccgtagtatatcgagacgctcgaaattcaaaataaacctctcagcaaaatgaaacgacaataactttttactcgaatgtccgaatgaatcccgtaatatatcgagacgctcgtaactgaaaacagaagctctgagcaaattcaaaagataataacgttttactcgtacgtccgattgtttcctgtagtatatcgagaccctcgtaattgaaaccagaagcccgtagcaaactcaaacggcaataaatttttactcggatgcccgaatgaatcccataatatatcgaggcgatcgtaattgaaaacagaagctatgagcaaattcaaacgacaataactttntactcggatgaataccgtaatatatcgagacgctcgtaattgataacaaaagctctgagcaaattcaaacgacaataactnntttacttgatgtccgaatgttcccgtagtatat

SEQ ID NO: 14532 - DNA, 435 bp, Glycine max
gattgccgctcaagacatttatagaacatgttgaagatatttgttattgatgatcattaagtgtaatttaccttatttattttactgacactcttagttcatttatgatatgtttctaaatatttgtgctctatgtttgcatgaatatttgtattagaataatgttagcaggttttgttttgaataaagacattatgttgtatcaattatgtactcctaactaatgatcatatttaggagaagactaatttgtaatacatggaaggaactatgtagattaagtgatgtacaaccgccacgacttgaattggtttctatttttaataatgaaattatgatgtatccaatgtatagaacaatttactcatcttaatgtgcattatgttagtttaatctatttatctatatagaccacaacgtgtagtaatgttacac

SEQ ID NO: 14533 - DNA, 493 bp, Glycine max
  unsure (1)..(493): unsure at all n locations
actcagcttctatccaggctcatcttggtggtgaagctctttcttcctgtcttattccctagtggatgacgccgcctcttacctcttctcctttgtcttccgctgcatctccaggtggaaaatcaccattaaaggacctcattgaagctcatagatccagcctccatagaagctccacaagcaagcttccatcacatgggcaaaggctgtgtccactattctttgtaaatgttagaataggttttccttcttttgggccttgtattttgatgcaatcttaccccccaagcttattggatagaatactccaagaggattgggctagagcagctaaagaaggccctaggattctcatgaacctcagggtagatttctgagcccatgggccaaggctgggtccactcttctttgtaaatattagaataggttttctttcttttaggccttgtatnttgatgcaatcctacccctcaagcttattggatagaagact

SEQ ID NO: 14534 - DNA, 409 bp, Glycine max
  unsure (1)..(409): unsure at all n locations
catgcaagcttgaaattgaacaagggaagaacnngattattcaatttttcttaacttttcactcggaagtccgattcgggcgcataatatattgagacgctctcgtgaaattcaaatggtcataacttttcactcagaggttcgattcaggcgcataatatatcgagaggcgcataattgaacaacggaagctgtcgagaaatacatatggtcataccttttaactgcggagttctgatttaagcgcataatacatagagacgctcgaaattgaacagtggaagctctcgagattttcagaggggcataacttttaactcggaggtccgagtcaggcgcataatatatggagacgctcaagattgagctacggaagctctcgagaaattcacatggtcgtaacttttaa

SEQ ID NO: 14535 - DNA, 498 bp, Glycine max
  unsure (1)..(498): unsure at all n locations
ccctctttgaacaaatacccctcagccaaatagaatctattttgtgcctttntcccacaactcttgtaaatgggagagaaattttcatctaaagcatacaagtccctgatattatcaaatcctaaaatttgagctcctagggagcaaaacaatgtgtgtttcctagagagggcatcaactaccacatttgtttttccctttttgtatttgataacatatggaaatttctctaggtactctacctattttgcatgcctcttgtttaacttgctttgccctctaatgtacttaagtgattgatgatcactatgaatgacaaattccttggaaataaggtaatgttcccaagtttggaggactcttattacggcataaaactctgtatcataggtggggtagttgagggaggcactatgaagtttttcactaaaataagcaatagggtgcccaccttgtaacaatacaactccaactcccactccagaggcatcacattct

SEQ ID NO: 14536 - DNA, 535 bp, Glycine max
  unsure (1)..(535): unsure at all n locations
agaaactaagcttacttgcnagaataccaagaaattccttatctgtctttctatcatatttcctatgttntcttttccattgtttaatacaaaacacttgcaaccaaagacatgaagatgtgagatgtatggtttcctaccattgaacaattcatatggagttttctttaagatgggccttattaaagccctattcatgatgtaacatgcagtattaacggcttcagcccaaaaatattttggaagaggaatatcattcattaaggttctagcaatttcttccgaagacctatttttcctttcaacaactctattttgttgaggggttctaggtgcagaaaaattatgttcaatgccatgcttttcacaaaataaatcaaattctttattttcaaactcacccccctgatcactcctaatagatataattntaggattnttcttattttgaataacttttgcaagtttcctanatgcttgaaatgcatcattcttatgagtgataaatagtgtccaagtgtatctagaatagtca

SEQ ID NO: 14537 - DNA, 500 bp, Glycine max
  unsure (1)..(500): unsure at all n locations
acactataaaactcagctgtttcttgaattccagacacaagagagcttccttttttgggatgtaatttgcaacctgcacaatcagaatctctatatcttgactcatccactgatttacctttctcatctaagtcaaggtaggttgaagttgtcgttggagtatatggttctttgcattttttatgccaaatttcttaattagttctataaagtatttggtttgacatangaaggttccatgtttcatctactggacttggagtccaaggaagaaatttaactcacccatcatagacatctcaaattccttctacatacaactagaaaattccttacacaaaatttcattactagcaccaaatataatatcatcaacatatatttgaacaattaacaactcactatttactttcttaataaacaatgttttgtcaacttggcctctagtgaaagaatgcttaattataaaactgtttaatctatcatacgatgaccttggt

SEQ ID NO: 14538 - DNA, 535 bp, Glycine max
  unsure (1)..(535): unsure at all n locations
tactcaagcttggatgcttgtccaanaggcaaacaagtcaaagtcncttttttataaaaaggtgtaagtttctacatctaaacctttggaacttttacacttggacttgcttggcccctctagaactatgagtttgagagttgactattatgctcttgtcattgttgatgattactcaagatttacgtggactttttttcttgctttaaaaagtgttgcttttaaagctttcaagaaacttgcaaaagttattcaaaatgaaaaagatttgaaaattaagaccttgagaagtgatcatagaggtgaattccaaaatgaagattttaaaactttttgtgaagaaaatgggatttcacgtgatttttctgctactagaacttcacaacaaaatggggctgcagagaggaaaaatttgtgtttgcaagaactagcaagaactatgttaaatgaaactaacttagcanattatttttggacggatgccataagtacaactggctatgttctcaatagggaatttaataatacctattta

SEQ ID NO: 14539 - DNA, 436 bp, Glycine max
  unsure (1)..(436): unsure at all n locations
tcacattgaattagcacctaaggcatatagatggtttngtgtatcttaacataagagatttcagatggactttgatcctaatcccacagccgaccttttcacgagatctctacttaaccctttggttaaatgatcggccaaattctgctgagttctcacaaactccactggtatcacaccatgcatgattaactcccgaaccatgttgtttctaacacccaagtgtctagacttcccattatacacttgactatatgccttagccaaagtagcctgactatcgcacctgatagacatgggaggtataggtttgggccacaatggaatctcatagatcagatttcttagccactcagcttctttaccagctgctgctaaagctacaaattcatattccattgttgaaattgtaatgcaggtctgtttcttggatgcc

SEQ ID NO: 14540 - DNA, 373 bp, Glycine max
  unsure (1)..(373): unsure at all n locations
tcttcatcaaatnngaaaacaatgtctttgtttagcagattactcagcagccttgcaatcttagagaagtccttgatgaacctcttatagaaccctgcataccctaggaaactcctgatgcctttaacatttgatggtggtggcaacttttcaatgatatctatctttgcctgatctacctcaattcctcgggctaaaattttatggcccaagactatgccttcttgaaccatgaagtgacacttctcccaatttaacaccaagtttgtttctacgcacctttgtagtaccattgagggccttacactggaatggnggtataagaactgattgaaaaaggggtgaaagaaagaaatggagaaaatggtgaaaa

SEQ ID NO: 14541 - DNA, 357 bp, Glycine max
  unsure (1)..(357): unsure at all n locations
accatgacccttgctcaaagtaanttaattacctcctaagtttaaagacccagttagttttttgtaccatgtgttattggatacacgatgtttgaaaaatcctcgtgtgatttgggggctaatgttaatctaatgtccctattntaattgtttcaaaaagcttgctattgatgagctgcaacctaccatatgttattgcaaaagacgaatcgacccgtcaaacatcctgtgagaattgtggaggctgttccagttaagatgaggggttgttctattccatgtgattttgtggtgttagaaataatggaggagacatncaaaatctccattatcttaggtaaacccttcttatcaacg

SEQ ID NO: 14542 - DNA, 483 bp, Glycine max
  unsure (1)..(483): unsure at all n locations
agtcacctgcangctgcaagcttggccttttacgtctggaatgtgattgtagcatatatatccaaagaccctcaggtgctgtgttgatggcttcttcccgttccaagcttcaattggagtcttgtcttttacagacttagttagacatctgttgagtatgtaaacagcagtgtagactgcttcagcccagaatgtgttaggtagtcccttatccttgagcatcgatctagccatttctataactgtgcgattctttctcttggacactccattntgttgaggagaatatgcgactgtaagttgtcgctcaataccttcatcctcacaaaatctttcaaactagcgagaggtgtactctntgccgcgatcacatcttagtacttttatccattttccactntgattntcagcaagggccttgaactctttgaatactccaaagacttctgattnttcttttagaaaatatacccatgtcattct

SEQ ID NO: 14543 - DNA, 428 bp, Glycine max
  unsure (1)..(428): unsure at all n locations
aaaaaaactctagattctcaagtcataggcatttacaacaacgatcacattagagaggttgaataatatattaataaaaaataataactttttgcaaataaaagttttatcacaggtttagaaatatatatgntttggagtcatctactcatcagtaaaataagtttaataaaacatagtttgatcatccaatatatctatgaagtaatatttccaaaaaaggtttttaagaaaacacttggtcagaaaaaaaggtaacaaagaaaactaagataatacttaataaaatggtttaatagagatatattagcatttgatttgtactagttcacttaaataaaactaccttcaattcttctttacacaactataaagggttccattaataaaaaaaactttgattacaaataagtattttgtcttgtcac

SEQ ID NO: 14544 - DNA, 440 bp, Glycine max
tcctgatatgacagtcaccgctttatgagcactgtacaccagcagcgcttcgaggccatcaagggatggtcgtttctccgggagcgacacaaaatataagcaaaaaaacacttcacaaaatatatatatgtatgtttaggtagtgaaaataccttagatatgcatgtatgtaagcaaaaaaacacttcacaaaatatatatatgtatgtttaggtagaaagataccttagatatgcatgtatgtaaacaaaaaaatacttcacaaaatatatatatgtatgtttaggtagaaataaccttggatatgcatgtatatagcaaaaataccttacaaaacatatatatgtatgtttaggtagcaagataccttggatatgcgtgtatatagcacaaatacctcacaaaaatatacacatgtgtaggtagcaaaatacctcatg

SEQ ID NO: 14545 - DNA, 514 bp, Glycine max
  unsure (1)..(514): unsure at all n locations
ntatctnttaagatctttaagtgcagaatttcaggaataatttatatctcatccagcgcaagttgctgcagcccagatacgcacactgctatataaacatgaaggctgcacgagttctgtaccaagtccgggattgaagagttattttgtgagttttgggacttgagtgttttgtgagccaccttgatgtcaccctaacatcaagtgttggacctgagtgtgtagagttgatctctattgttcagagagcaatctctggtgtgtatttgatttaactgtaaacacgggagagtgattgagagggagtgagaggggttctcatatctaaaagtggctcttaggtagaggttgcacgggtagtggttaggtgagaaggttgtaaacagtggctgttagatcttcgaactaacactattttagtggatttcctccctggcttggtagcccccaaatgtaggtgacgttgcaccgaactgggttaacaattcacttgtgttatttactatgttaatct

SEQ ID NO: 14546 - DNA, 397 bp, Glycine max
  unsure (1)..(397): unsure at all n locations
ttgaattagaatttcaaatgattttaaaagacttttttaatcaggattttataaaaaaaagtcttgtggtattcaatcatgatttttatatagtataaataagtattttgctattcaattaagacatttgagattttttaaggaagacaacaaaatccggttgtatttaatcgggattttttttataacttataaaaagtcttttggtattaaaaaatatatgaattttgatggatttttttaaagaagatttttgatagatttcattgaattttactagattttttctttctttttctanttggtaccagactttattttctctcatcgtcacacatanccgcttctctctttaatattttttaatatacgtgtgttatatatatttgccctattc

SEQ ID NO: 14547 - DNA, 478 bp, Glycine max
  unsure (1)..(478): unsure at all n locations
ctggttccaatgctctgtttaggctctcccatatcttatgtaaatctaggatctttatcagacactatgctagatgacacaccatgtaatctgataatctcactaatatacaaggaggtcaacttctctaaggtaaatatgatattaatgggaataagtgagtagacttggtcagtctgtcaacaataacccagatagaatctacacctctaggggttctaggtagtcctacaacaaaatccatggaaatactgtcccacttctattgggttatctccaagggcggtaacttccctgaaggtctctgatgttctatcttagccttctgacagactaagcatgcatacacaaactcactaacctctctcttcatgttgggccaccaaaacatcatcttcaaatcctgatacatcttggtagcaccaggatggatgctcangttactcctatgtccttcctctangatcatcttcctatg

SEQ ID NO: 14548 - DNA, 411 bp, Glycine max
  unsure (1)..(411): unsure at all n locations
atgntcaaaggacactttatatccctttttaatcaactgacctacactcagcaagttttggtcaatgttaggtacataaagaacatttgatattaatttggtacctgaacacgttgaaattgcaatagttccttttccttttactggaatatagccactatttccaattctaacctttgagacactagttggcttcaaatctttgaataaagtcttatcatatgtcatgtggntcgtacaaccactatcaatcaaccaactttcacttgattcgctactcaagaagcatgtggccacaaacagttggtcctcctcttcttgattagcaatctgagctccctcatcatggtgaattttgttggcgcagatcaccatttcatgccctatctggttgcacttgttacattttgc

SEQ ID NO: 14549 - DNA, 408 bp, Glycine max
agcttgctaacccatggaagctcctaatatttcttacactttttggggtgggccattcttggatggccttgattttctcaaggtccacttggaccccatttctaccaactacaaaccctaagaaaactatattatctacacaaaaagtacatttctctatatttacatagagggtgtttttcctaaggactgaaagaacttgcctgagatgtcctaagtgatcatctaggcttctactgtacactaaaatatcatcaaaataaacaactacaaatctacctatgaaatcccttaagacatgatgcataagccttataaaggtgcttggtgcattagtgagcccaaaaggcatcactagccattcatacaaaccaaacttggtcttgaaagcggttttccactcatcac

SEQ ID NO: 14550 - DNA, 300 bp, Glycine max
  unsure (1)..(300): unsure at all n locations
gacacgannaataagataaatagagtgtttaatggcataaaaccaatatcgttttggtaattgagattgaaacattaaagcccgggcaacatttaaaatatgttgatgcttacgttcaacacgtccattctgttgaggagcatacacgcaactagtgtgatgtataattccttttgaagagaataaatctttgagaagaaattatgtgccgttgtttgaacgtatgcattttattttggaatcaaatagactttctattagaacaatgaagtgttggacatgggttttaacctcagattt

SEQ ID NO: 14551 - DNA, 353 bp, Glycine max
  unsure (1)..(353): unsure at all n locations
tcatcaatatcatttcatgttctagtaactttccaaacaaagtagcaagagacatattagatagatctcgcgattcaataatggttggtaccttgggttgccattccctgcttaagcatctcaaaactttatttggaaatttttttcctaaagatgcaagatgattaattatgtgtgtgaacctcttttgcatatcttgtatgctntcatctggattcattctaaataattcatattcatgggttagtgtatttatcctagatctttttacatctgttggaccttcatgtgttacctatagggtatctcacatatnctttgcacttctacaatttgataccctaaagtactca

SEQ ID NO: 14552 - DNA, 416 bp, Glycine max
  unsure (1)..(416): unsure at all n locations
catgcaagcttctaaactttatacaagaangaagcnctgataccacttgttggacttttggcctcaganatcttaagaagggggggggggttgaattaagatatcacaaactattccccaattaaaaaattctactttaaatntaactaaacaacccaagattccttttaaaaaggaactcctaaataataatgcaaattaatcttactaaataaaaataaaaagaaataaacactaaaggagtttaagggaagcgaaaatgcaaactcagatttatactggttcagccacacccttgtgcctacgtccagtccccaagcaacccgcttgagagttccactatatttcaaaatccctttacaagatctgaaccacacaaggacaatccttcctttgttttcatatttctttacaac

SEQ ID NO: 14553 - DNA, 438 bp, Glycine max
agcttatgctgcaaatattttactttagactcttctcaaccttatgtatcaaaaacaaccacagcagagcaattatgacctttccagcaacagatacaaccctggatggaggaatcaccctaacctcagatggcccagccctcagcaacaacaacagcagcctgctccttccttccaaaatgctgctggcccaagcagaccatacattcctccaccaatccaacaacagcaacaaccccagaaacagccaacagtggaggcccctccataacctttcctcgaagaacttgtgaggcagatgactatgcagaacatgcagtttcagcaagagaccaaagcctccatttagagcttaaccaatcagatgggacaattagctacctaattgaatcaacaacagacccagaattctgacaagctgccttctcaagctgtcta

SEQ ID NO: 14554 - DNA, 532 bp, Glycine max
  unsure (1)..(532): unsure at all n locations
ctcagcttgtggccttggatcttcttcatcaatggagtccttttcttcttgtttatcaatgacagnggaatgcagaaggaggaaaggtgattggagatgccacttcaaggagaagagagtcaagaacaagttcaccaccataggaagccatggataagagcttgaaggttggagaagatgagtggagggagagggagagaatgggcacgacaattatgcctcgaatgaggtctaaaatttgaagtgtaatttctcaaatgatcaaagtagaaataatgcacacaaaaggcctctatttatagcctaagtgtcacatgaaattggagggaaatttgaattntattcaaatttcacttgaatttaaatttgtggagctaaatttggagcctaaagttcactaattatgattagtgaattttagctatggtttaggccactaatccaagatcaagtccaagattctccactgagtgtgtngttattcgtcttgtacgactaacttttgtatagaaaaatattttcaaaatatggg

SEQ ID NO: 14555 - DNA, 450 bp, Glycine max
  unsure (1)..(450): unsure at all n locations
agcttatgctgcannaattttatagacctttctaaccttatcagcaaaatcaaccacagcagagcaattatgacctctccagcaacaaatacaaccctggatggaggaatcaccctaacctcagatggtccagccctcagcaacaacaacagcagcctgctccttccttccaaaatgctactggcccaagcagaccatacattcctccaccaatccaacaacagcaacaaccccagaaacagccaacagttgaggcccctccacaaccttccctcgaagaacatgtgaggcaaatgactatgcagaacatgcagtttcagcaagagaccagagcctccattcagagcttaaccaatcagatgggacaattggctacccaattgaatcaacaacagtcccagaattctgacaagctgccttctcaagctgtccaaaatcccaaaaatgtca

SEQ ID NO: 14556 - DNA, 459 bp, Glycine max
  unsure (1)..(459): unsure at all n locations
atagaactctntacatatcaaatacattcgttagaataaatgaaacaaattagataaagcagaagctcataataacactttcacaagttaagtatggtcaaataactgacatatctcacattagaaggtgaaacataacattttcttgcctccatatcctatcttgcatctaactctgtgatagaagcttcattgaccgaccacagtttgtgatttgccgacgaagaagttgcttcagatgtaacatttgttccggagtaaaagccaggagccattggctntggcaacaatttatcaccactcaacattgaaagaactgatgacatgtgtggcctatcttgtggtctttgttgcacacataataggcctacctgtatgcatcgtatgacttcatagggcttacattgttctcctaccacatcatccagtagttccagtgccctatcttcagtccataat

SEQ ID NO: 14557 - DNA, 472 bp, Glycine max
  unsure (1)..(472): unsure at all n locations
cacactctttataacacactctcttctgttggtcctcaatagatggagaactataaaatcagaataatgactgatcatatgagtagtgggacctgtcaaatttgtgatttttaagaaatatgcgccaacaaaaaagagtggtcaagagaatgtgttatagacagaggagctaccatttctctgtttaggaatggtgttngtagctattagtgaaaatagaaatagagaatattttccttatgtcaaacaggcttctgcattactatatttagttattacaacatgatgatagatcattatatattttttctttctataaaacaaatgatttctttattgacttggggtggtgtatataaaaacttatcaacacattttacttttctttctatgcctgttcattccaatgtacaaatgattggcttatgatgcaacaaaatctatatcaggaactaactagctcttttaatat

SEQ ID NO: 14558 - DNA, 524 bp, Glycine max
  unsure (1)..(524): unsure at all n locations
cgcanagcagtagtacttgtaatagtgactcctcatgtttttttctttctcagcaaaagtggtgaagctctctctaacttttagacaagggtacaacaaactatgaaattcttttttaactctcagtttttattttgcactttttatttaggtcataaatataacgatgagggatagtaaaaataaaagtgtactagtaggtaaaatatgccatgaaatgaaaatagataatttcacaaatatctatggtttgcagtaaaataaattatttttcctctacttgcttattaatgaagcatggataagtaacaatgtacacgaacctacgggtacagtaatttgaaattacttaatttgttctaatttaattaaaatataaataattcagaattatttatttttagtttaaatatatgtttgaaaagtatttaattttttataatacattcttcaaactntnttagttntatttaattaacagatattcaggtataaccgtagatatactcacaaatatntataaa

SEQ ID NO: 14559 - DNA, 453 bp, Glycine max
  unsure (1)..(453): unsure at all n locations
ctcagcttgaatgcctattcatggagttgcaagaacatcnctgatttatcaacactngcacagnggccaaagatgcatgggagatcctgaacatcactcatgaaggaacctccaaagtgaagatttccagattgcaactcttggctacaaaattcgaaaatctgaagatgaaggaggaagagtgtattcatgacttccacatgaacattcttgaaattgccaatgcctgcactgccttgggagagaggataacagatgaaaagctggtgagaaagatcctcagatccttgcctatgagatttgacatgaaagtcactgcaatagaggatgcccaagacatttgcaacatgagagtagatgaactcattggttctcttcaaacctttgagctgggactctcggatacggctganaagaacagcaagaatctggctttcgtgtccaatgatgaat

SEQ ID NO: 14560 - DNA, 473 bp, Glycine max
  unsure (1)..(473): unsure at all n locations
actcagcttaacatcagaccacttccagggtgctggaactacttcacatggtcttgatggggcctatgcaagttgaaagccttggaggaaagaggtatgcctatgttgttgtggatgatttctccagatttacctgggtctactttatcagagaanaatcagacacctttgaagtactcaaggagttgagtctaagacttcaaagagaaaaagactgtgtcatcaagagaatcatgagtgaccatggcagagagtttgaaaacagcaagtttactgaatactgcacatctgaaggcatcattcatgagttctctgcagccattacaccacaacanaatggcatagttgaaaggaaaaacaggattttgcaagaggctgctagggtcatgcttcatgccaaagaacttccctataatctctgggctgaagccatgaacacagcatgctacatccacaacagagtcacacttaga

SEQ ID NO: 14561 - DNA, 432 bp, Glycine max
  unsure (1)..(432): unsure at all n locations
agttgagcatggtaaaaagattcgtcttttttctcttagaggtgactntgagcgtttgtttatggaggagtccgagtcaatttctgattatttttctcgagtattggccatagtcaatcaacttaaaagatatggtgaagatgtcgatgaggtgaaggtcatggaaaaaatacttcgaactttaaatctcaaattttgacttcattggtaccaacattgaagaaaacaaggatttaaagaccatgactattgagcaactcatgggttccttacaagcatacgaagcaaaacaaaagagaaaaattaaacaaaaggaggctacggagcaactactacaactcaacgtaaaggaagcaaactatgcaaattacaagagccaaagaggacgaggtcgcggccaatatcgtggacttggactatgacatggaggag

SEQ ID NO: 14562 - DNA, 258 bp, Glycine max
aacctataaagactatattatctacaccaaaggtacacttctctatatttgcatagaaggtgtgtttcctaaggactgaaagaacttgcctgagatcgcctaagtgatcatctatgctcccactgtacactacaataatctcaaaatgaacaactacaaatctacctatgaaatccattaacacatgatgcataagcctcataaaggagcctggtgtgttagtgagcccaaaaggcattactagccattcatacaaac

SEQ ID NO: 14563 - DNA, 437 bp, Glycine max
  unsure (1)..(437): unsure at all n locations
taagcacctctntccttacctcttccttcattgttgggtctagccttctctagggttgtcgaactggcctatagtcttcttccatcattatcttgtgcatgcagtagacagggctaatacctttgagatctgatatatgccacccaattacttccttgtgtttcttcagaatttctactaacctattttcttctttggatgtgagtgcattgctgatcaccacaggcttagcctcatcttcttccaggaaaacatactttagatggttggataatatctttaattcttccttcttcttctcagatggagtcttgctctttagttcctcaaatctggtttcctcctcagggatgctatcttatcaatccaagtcttctaagcaagccttgagatcttcttcttcttcactggttaggcaatctaccgcattcaccatg

SEQ ID NO: 14564 - DNA, 350 bp, Glycine max
  unsure (1)..(350): unsure at all n locations
agctngagaatggaggatttccttgagggtcctctcttaggcaatcatggaacacagctccaaactcaaaaatggaggacacatgaatgacaacgcaattcattcatggggctccgaaaaagggtaagaatggaggatttgcttgagggtcctctcttangcaatcatggaacacaactccatactcgaaagtggaggacccacgaacaggcctaagcaataacattcatgtggctccgaaaaaggatgagaatggaggattgcgttgagggtcctatcttangcaatcatggaacacagctccaaacttgaaaatggaggacacatgaatgacaacgcaattcattcac

SEQ ID NO: 14565 - DNA, 444 bp, Glycine max
  unsure (1)..(444): unsure at all n locations
gttgccaatntagttntcgctagcgaaaggatcgaagtgggtctgaanagaggcaaattagatcatcttactttgataaataagaagcctgcggcaaatggagagagtaagaatgagggaggtgttatacaagtggcctcagatatcttaagaagggggggttgaattaagatattccaaacttttctcctaattaaaaatctatcttactttttactaaagttatgaattcccttaataacaatcttcttaaatattaattcaaatgaagcaacttgaatatgaatataaagcaataataaataaaggagattaagggaagagaaaatgcaaactcagttttatactggttcggccacacccttgtgcctacgtccagtccccaagcaacccgcttgagagttccactaacttgtanattccttttacaagttctaaacacac

SEQ ID NO: 14566 - DNA, 370 bp, Glycine max
  unsure (1)..(370): unsure at all n locations
tactcagctntactctctggtaatcgattaccagaggatgtaatcgattaccagtggcctaatacgttntataacagctataaaaatttgaattcgaaattttaaaagctgtaatcgattacacaattgtggtaatcgattaccagcagttagtaaacgttttaattcaaattttaaaagcttgaatcgattacacaattgctgtaatcgattaccagacaggaatttcagaanaataatttcaagagtcacaacttttcaaaggctttactcatgaccaccaatggtctatatatatgtgacttaaacacgaaattgctcagagattttcagaacaacaaagtgtttatcctctcaaaaagcaatttca

SEQ ID NO: 14567 - DNA, 318 bp, Glycine max
  unsure (1)..(318): unsure at all n locations
catttacctggggtgaaaaacaagaaccagcctttggttttctcaaagaaaagcttactaaggcacccggtctaacttttcctgacttttctaaaacttttgaactaaaatgtgatgcctctggagtgggagttggagttgtattggtacaaggtgggcaccctattgcttattttaatgaaaaacttcatagtgccacccttaactaccccacctatgataaagagctttatgccttaataagagccctccanacttgggaacattaccttggttccaaggaatttgtcattcatagtgatcatcaatcacttaagt

SEQ ID NO: 14568 - DNA, 442 bp, Glycine max
  unsure (1)..(442): unsure at all n locations
tgctctgtttaggctctcccanaatctagatgtaaatctaggatctttatcagacactatgctagatgacacaccatgtaatctgataatctcactaatatacaaggaggtcaacttctctaaggtaaatatgatattaatgggaataagtgagtagacttggtcagtctgtcaacaataacccagatagaatctaaacctctaggggttctaggtagtcctacaacaaaatccatggaaatactgtcccacttctattgngttatctccaagggcggtaacttccctgaaggtctctgatgttctatcttagccttctgacagactaagcatgcatacacaaactcactaacctctctcttcatgttgggccaccaaaacatcatcttcaaatcctgatacatcttggtagcaccaggatggatgctcanngtactcctat

SEQ ID NO: 14569 - DNA, 327 bp, Glycine max
  unsure (1)..(327): unsure at all n locations
agcttagcccactagaactaatgatgctaattgtgttgcagattttgtcagatctaatctggtttgcatggttggagtacctaaagcaatcgttactaatcaagaaacccgtttttgcaacaaatcaatgcatgccttgcttaaaaagtaccgggttgtacatagggtatccacaccataccacccccaaaccaatgaacaggtagaaatttctaacagggagatcaagagaattttagagaagattgtgtagccaagcaggaaagattggagtaccaggcttgatgatgctctntgggaacatcggactggctacaaagcacccat

SEQ ID NO: 14570 - DNA, 410 bp, Glycine max
attcacggatgtctaattgagttctgtaatatatcgagacgctgcaaattgaaaacggaagctcgtacgaaattcaatcgacaataactttttactcggatgtccgagtgaatcaggtaatatatcgagatgctcaaaattgagactataagctctgagcaattgaatgacaataactttatgcacggatgtcctattgagtcccgtgatatatcgagacgctccaaattgaaaatggaaactcttagaaaattcaaacgacaataactttttactcggatgcccgacagagtgtcgtaatttatcaagagatgctccaaattgaaaacggatgctcgtatcaaattcaaacgacaatgactttttgctcggatgaatgatttagtccccgaatatatcgagacactcaa

SEQ ID NO: 14571 - DNA, 405 bp, Glycine max
  unsure (1)..(405): unsure at all n locations
agcttgtagtctcaattntagcgtctcgatatattacccaattcaatcggacatccgagtaaaaagttattgtcatttgaatttcctacgagcttccgttttcaatttggagcatctcgatatattagaggactcaaccggacatccatgtataaagttattgtcaattcaattttcttagagcttcggattaaaattttgagcgtctcgatatattacgggactcaatcagacatccgagtaaaaagttattgtcgtttgaatttgatacgagcttctgttttcaatttggagcatctctcgataaaatacgacactctgtcgggcatccgagtaaaaagatattggcgtgtgattttctaagagtttcgtttaatttggagcgtctgatatattacgggactc

SEQ ID NO: 14572 - DNA, 393 bp, Glycine max
  unsure (1)..(393): unsure at all n locations
tctaagtcacctgcggcatgcaagcttgctcgtcttgctgatatttatcattctacttttctgatgatgaccgaggaacaattagggatcaactngaaacttatgtgcttcaagtgagaagaaatgcttctttttccactagcgaagatgttcaaagtctggctatgaagatggttcaaactgagaagcatctggtatttccattggattataaacttattgagctagctatgatattgccggtgtcgacagcatccgttgaaagagctntgtcagcaatgaagattatcaagtctaaattgcgcaataagatcaacgatgtgtggctcaatgactggatggtgtgttacatcgagcgggagatattcaagtcgcttgatgatattgatatta

SEQ ID NO: 14573 - DNA, 430 bp, Glycine max
  unsure (1)..(430): unsure at all n locations
aattcatgcaggtggacgttctactaattattctgacttgcagcaacctnctatcccacttncatttccacctagagcaattccaaacaaaaagatggaagaagtggataaggagatcttggagaccttcaagaaagtagaggtgaacatacctctgctggatgccatcaagcagattccaagatataccaagtttctaaaggagttatgcacccacaaaaggaagctcacaggcaataaaaggattagcatgggcagaaatgtgtcagcattgataggtaaatctgttcctcacattcctgagaaatgtaaggacccaggtactttttgtataccttgcattattgggaacagtataattgagaatgtcatgctagatctangagcatcagntagtgtcatgcctatgtccatttacaattctttatct

SEQ ID NO: 14574 - DNA, 375 bp, Glycine max
  unsure (1)..(375): unsure at all n locations
agcttcaactgtgaagctatcttcgtatctatcatggccaaatatgcatgacagtcggtttgcgctttacaagttgccattgcgggttcccaaagatgaccaagaatatgctggtttatggngaggaacttttggttggcctcctgganagccttctgaagacaagcctgganaggctntattctttcttctgctctcttatgaggagttccagggacaacagcttctcattgcaacaaaaattttggaaggcacacactatgtgttacatcctaacggttcagcaatgtttacagcanatatcaatgatccttcatccgaaccctttccctgggacactgatgcagactcngttccagtgaatatcaagcaagc

SEQ ID NO: 14575 - DNA, 393 bp, Glycine max
  unsure (1)..(393): unsure at all n locations
ctcagcttagaggttgcttgatgagctttacgacaagactgccattgtgtttgttaacaccaagaggaatgcggatcatgttgccaagagtttggataaggaagggtatcgcgtgactactttgcatggagggaagtcgcangagcagagggagattagtcttgaagggtttaggaccaagagatataatgttcttgttgctactgatgttgctggacgtgggattgacatacctgatgtggctcatgtcatcaactatgatatgcctgggaatattgaaatgtacacgcaccggattgtgcgtactggtcgtgcaggaaagacgggtgtggctaccacgttcttgactcttcaggactctgatgtcttctatgacctcaagcagatgcttat

SEQ ID NO: 14576 - DNA, 388 bp, Glycine max
ggggtacactaagaacacaaaccctatcctgaaatctcattactccattaggccccactctaaaactactctctctccctgtgactatggactctaactgggctgacaagaatgggtcagacttctgaccctcacggatctcgctcaagagttcgctggttactctcaacataccaaacttaatgctactagaggtgatctcacatgccaaactcatgtctctaaactgctctaagaggtctaactctctaaccatcaaagcagacatctgaagggatttcctactcaaggcatcagctactacattggctttacctgggtgatagctaagctcaaaattgtaatccttaaggaactctaaccatctcctctgcctcatgttaagctc

SEQ ID NO: 14577 - DNA, 313 bp, Glycine max
  unsure (1)..(313): unsure at all n locations
cgatccttaagtcacctgcggcatgcaagctntgacaatgcaatctttcccanaactttatcatggtcatgttctgagcctcccatttctgtgtgcaaagatctaagctgtttctcanagtcctttctaagatactctgctttgattctctggcgttgcgcttcatcttgcttttcccataactcatgtagttttagagcaaattcatgcatggcctctgccaccccagtttctgatattctactcattgcatgattccaatcattgcaaattataaaaactggtggggcatcaagctgacttggagagaaag

SEQ ID NO: 14578 - DNA, 393 bp, Glycine max
  unsure (1)..(393): unsure at all n locations
agctngaaggcaaactggatgcgttggtcttcttggttacccagctggccttgaatcagaaatatgtacctgtcgcaagggtttgtggtttgtgctcctctgctgaccaccatacagacctttgcccttccatgcagcaacctggagcaattgagcagcctgaagcttatgctgcanatatttaccatagacctcctcaacctcagcagcaaaatcaaccacagcagaacaattatgacctctccagcaacagatacaaccctgaatggaggaatcaccccaacctcagatggtccagccctcagcaacaacaatagcagcctgctccttccttccaaatgatgctggcccaagcagaccatacaattctncaccaatccaacaacatcaaca

SEQ ID NO: 14579 - DNA, 394 bp, Glycine max
  unsure (1)..(394): unsure at all n locations
ttaagtcacctgcggcatgccaagcttgaaggtgcgntagcccaccatttttcatagtataatactggtaatgtgtctactatcattatcattntttctccgtcattgaggtgccacttgagttgccaggtctctccacctttgggcgtattctttgaaatatctgtgcccctttttgcacatgttctgttgttgcatcctatccggaaccatatcaaaattgtactgatactgcctaatgaaggcaaccattatgtccttccaagagtggactcgagaaggttccaggttagtgtaccaggtaacagctaccccagtcagaatttcttggaaggaatgtatcagcagntcctcatcttttgcgcatgcccncatcttccgataatacatcttt

SEQ ID NO: 14580 - DNA, 442 bp, Glycine max
  unsure (1)..(442): unsure at all n locations
tgtgaagtgtgtggaattcctatagcaattcccttatgttatcaaacataaaaagggaaaaggtaatattgtagccgatgctctttctcggcgtcatgcattactttctatgcttgaaaaaaaattgattggtcttgaatgtttgaaaagcatgtatgaaaatgatgaaacttttggagaaatttttaaaaattgtgaaaaattttcagaaaatggtttctttagacatgaaggctttcttttcaaagaaaacaaattgtgtgtgcctaaatgttctactagaaatttgcttgtttgtgaagcacatgaaggaggtttaatggnngcatttggggtccaaaagactctagaagcattacaagaacaattntatatgcctcatatgagaaaggatgtgcagaaattttgtgaacattgcattgtatgtaaaaaggcaaagtct

SEQ ID NO: 14581 - DNA, 397 bp, Glycine max
  unsure (1)..(397): unsure at all n locations
gtgtgtcttgtgatgngagctgaaaaagactcttctttataggtgtgtaagctcgatcacaaaggatggcatggccactagctgccatgttttcaatcaactccgtaacttcatcaagtgtcttcaatttgatctttccaccagtggaagcatcaagtaattgcttcgaatggggtcgcaagtcatcaatgaatatatttaactgaatcgactcgctaaacccgtgggtaggagtcttccggagtaaaccatggaagtagtcaagagctttactaagtgattcatcggggaattgatggaataaagagatttccaccttcccctcagcggtcttggactctggaaaatatttctttaagaacttctccaccatctcttcttatatctgcaagttatt

SEQ ID NO: 14582 - DNA, 382 bp, Glycine max
  unsure (1)..(382): unsure at all n locations
ggcagcaagcttgagggttaaagtctcactatngtctcgtgttgatgcaacaattgttacccgtggctatacgagacatcttgccaaacaaagtcaggttagccataactcgtctgtgctttntcttacatgccatatgtagcaaagtcattgatcctgtcacagttgatgagctgcanaatgaggccgcacttatactgagcctagtggagatgtattttctacctgctctctttgacatcatgattcacttgattgtgcatctggtcagagaaatcaaatgttgtggtcctgattatttgcggcggatgtaccaagttgagcgatacatgatgatcttataagggtatacacagaatctatatcatctagaagcatctat

SEQ ID NO: 14583 - DNA, 358 bp, Glycine max
  unsure (1)..(358): unsure at all n locations
agctntgaggatattcanacgactttaactttttcactgatgncngannnagncccgtaatttatcgagactcacganatcgaatggtgaagctcagagcaaattcaaacgacaataactntttactcggatgtctgattgagtcccacaatatataaagacgctcgaaattgaatgttaaagttctgagcaaagtcaaacgacaataactnnttactcggatgtcggattgagtcatgtaatatatcgagatgctcgtaattgaataccgaagatctgagcatattcaaacgtcaataactntntacacggatgtgctgatgagtcccgtaatatatcgagccgctcgaaattgaat

SEQ ID NO: 14584 - DNA, 118 bp, Glycine max
  unsure (1)..(118): unsure at all n locations
gaactacttcacatggacttgatggtgcctatgcaagttgaaagccttggagganaaaggtatgcctatgttgttgtggatgatttctctagatatacctgggtcaactttattagag

SEQ ID NO: 14585 - DNA, 361 bp, Glycine max
  unsure (1)..(361): unsure at all n locations
agctngaaattgaacatcggatgctctcgataaaatcgagtggtcataaattttcacacagatgtccgattcggtgaaataatatatcgagacgcacgaaattgaacaacggaagctctcgagaaattcgaatggtcataacatttcactcggatgttcgatccggggacatatattatcgagacgctcgaaattgaacaaccgaagctctcgacaaattagaatggtcgtaactcttcacgcgaatgttcgattcggggacataactcatctagacgctcgaaattgaacaacggaagctctcgagaaatttgaatggtcataagttntcacacggatgtccgattcggaacataatata

SEQ ID NO: 14586 - DNA, 340 bp, Glycine max
  unsure (1)..(340): unsure at all n locations
agcttgtaaaatagatntagttattcactctacttgcaaaagagagagttctagctgtctaggaacttatacgttgatgaactttgtttaagataaattgaaaagtattcctagaagctatcttatgaaagatagacactccaaggtactttccaagatccttagtccaagcaatacccatttctccacttagttgatccttgacttgagtctccacatttttggaaaagaacattcaagatttctccaagcttaatttctgcttagaactcttgcaaaatagattcaaaatattcttgatagaatggacctgctccactaaagccttcataaataaaat

SEQ ID NO: 14587 - DNA, 457 bp, Glycine max
  unsure (1)..(457): unsure at all n locations
tatatctaatttatacgtgcatcttgattctaagggtggatgttaatagttacatgagaaataaagtatatgggttgatatttgtgtaggcagagaaagcaacggcaagaacagaagaggagagggtgatagcccatgagcacgcaaaggcaaaggaagctggagcaaagatggagctgcatgaagctaaagcaaggcatgcagcagagaagctaagcgccaaccaatcacattatggtctccaccatggccacaacaaccctcccttagtaggaacaactcagactcactaccagcaagggcaccagcaccagccacttggggcagttcctatgcctggaaccacttatccatcttatccactaggaggaaaccctaaccctccaaggaacaaacatatataatagatctatctgtgttntgctgtagtacgtctacttcttgtgttattactcct

SEQ ID NO: 14588 - DNA, 484 bp, Glycine max
  unsure (1)..(484): unsure at all n locations
ctcggcttctcctatntgtatctaagggtagcatatcatntttatgatgaattgcatctcttctcaagtccaggtgtgaatgagtatcagtgcacacatgacaaatgtattaagctggacatatatattgatgattgagtagtagctgaatttatgcagtgtataggagcctcaacaatggatgaatatacgaagcacattgaaaaggatccagctctggagaggcgattccagccagatgaaaccatacaaatactgaaaggacttagagaacgctatgaaattcaccacaagctccgttatacagatgtgcagttgtcacatttaaacgttctgctcccttttctgttcattttacctattctattcatttatgctggagatcagacaagtttctttatttcttataatatttatgtagctggaaatttttcaaatgtatattaatttatctctttgaattgtatacaatagttagattatt

SEQ ID NO: 14589 - DNA, 445 bp, Glycine max
  unsure (1)..(445): unsure at all n locations
atgagaaataactttgactcagatgtttgattgagtcccgtaatatatcgagacgctcgtaattgaaaacaaaagctctgagcaaattcaaacgacaataactttttactcggatgtccgattgagtcccgtaatatatcgagacgctcgtaattgaaaacagaagctctgagcaaattcaaacgacaataacttttaactcgggtgttcgattgtgtcccgtagtatatcgagacgctcgtaattgaaaagggaagctctgagaaaaatcaaacgacagtaacttttaactcggatgtccgatagagccccgcanaatatcgagacgctcganattgaaaacagaatctctgagcaaattcaaacgacaataactntngactcggatgtctcgatgtgtcccgtagtatatcgagacgctcagaattgaaaccgaagctctgag

SEQ ID NO: 14590 - DNA, 490 bp, Glycine max
ccttctattctcaatttcgagtgtctcgatatattactttactcaatcggacatccgagtaaaaacttattgtcgtttgaatttgcttagagcatatattctcaatttcgagtgtctcgatgtattacgtgactcaatcgaacatccgagtaaaatgttattgcagtttgcatttgcaacaagcttctgatttcaatttggatcgtctcgatctatgatgggactcaatcggacatccgagttaaaagttattgcggcttgcatttgctacgagcttccgctttcaactacgagcgtcttgatatattactggactcaatcgaacatcagaataaaaagttattgttgttagaatttttttcagagcctctgttttccattacgagcgtctcgatatattacgggactccatcagacattctaaaaaaaagttattgtcgtctgaatttgctcagagcttctgtctgcatattcgagcgtctcgatatat

SEQ ID NO: 14591 - DNA, 418 bp, Glycine max
  unsure (1)..(418): unsure at all n locations
gcatgcatctcatcanaataaaaaataaaaactgtttagttaaagggtactgcactntttttaatgagacaaaattcttttgcgacgtatgaattgaaacttgacatgacgtacgtgaatgtgataatcaggagagaggaagaattttgctgaaatgggcagagctaatagaggaaaacgcagaagaacttgcggcactagatgccattgatgcggngaagttgtaccatatgtgtaggaatttggaagttccagcagcagcaaacactcttcgttactatgcaggtgctgccgataagattcatggcgaggtgttgaaaatgtcccgagacttccatgcctatacattgcttgaaccacttggtgttgtgggacacattactccctggaatttccccaataccatgttctacatcaa

SEQ ID NO: 14592 - DNA, 484 bp, Glycine max
  unsure (1)..(484): unsure at all n locations
tctcgcttttcttgtttaattattatattttgtttttaagccttgtatttggctatgttttcatgacatttgaatacttagtatttcttttattacttgattagtataactgaatatgatgattatatttacttgctcttgggtgtttatggttatgaagttttaaacttaattattttgatgatatatgactagaggtatgcacttttatttggttattatgaatgactttctggataatatgatattctatgaagtattatctttctaagattgatgaatggttaagatatcttgtttgattgattttctattcttgtgtatgtcatttatgtatggnttttatatatatttgatctattcatgtttcttgcttcatgattggtttatatttttccatgactggtgtgtgaatgattagttgtatttgtatgtttcatactttgtacgcactttggcttttctgtgatgccaaagggggggg

SEQ ID NO: 14593 - DNA, 225 bp, Glycine max
gatgatttctctagaattacctgggtcaactttattagagaaaagtcagacacctttgaagtattcaaggagttgagtctaagacttcaaagagaaaaagactgtgtcatcaagagaatcacgagtgaccatggcagagaaattgaaacagcaggtttactgaattctgcacatctgaaggcatcactcatgagttctctgcagccattacaccacaacagaatg

SEQ ID NO: 14594 - DNA, 348 bp, Glycine max
agcttggatatcctttgctccggaaacctctcctttctcatgtgaacccaaacccaatctccaggatggaaaacaacctttctgcgcccctctgttgcttgtttagcataactctcattcctcttatcaatttgggccttgactctatcatggagccttttcacataatctgttttggcttgtccttccttatgcttaaaaactgaaatattacgcattggaaacaaatcaagaggagttagtggattgaaaccatacacaacctcaaaaggagaacaactagtggtgctatgcaccgccctattataagcaaattcaatgtgagggaagcaaactttccacatttta

SEQ ID NO: 14595 - DNA, 392 bp, Glycine max
acatactcctcatgcttctcaccatgtctaataaggttcgatttcttcgttctgcgacaccattctgatccggagaaccaggcatagtgtattgggcaacaatcccatgttcttgaagaaattccacaaatgaacctggtgcttgtccatcctctgtgtatctaccataatactccccacctctatctgatctcacgatcttacattgtttccacattgtttctcaacttcagcctcaaaaactttaaaggcatctaaagcttcattcttagaatgaagtaagtagagatacatatatcgtgaataatcatctataaaggttatgaagtatttcggactatttgcatctatgtctggacaacatatgtctgtatgtatgatttctaataaat

SEQ ID NO: 14596 - DNA, 421 bp, Glycine max
  unsure (1)..(421): unsure at all n locations
tctanactntgtacaagaatgaagctctgataccacttgttagacaagtggcctcagatatcttaagaagggggggttgaattaagatattccaaactgtttcccctaattaaaaatctatttcactttttactcaagttatgaattcccttaatgacaatcttcttaaatattaattcaaatgaagcaacttgaatatgaatataaagcaataataaataaaggagattaagggaagagaaaatgcaaactcagttttatactggttcggccacacccttgtgcctacgtccagtccccaagcaacccgcttgagagttccactatcttgtaaattccttttacaagttctaaacacacaaggacattccttcctttgtgtttagagatcctttacaacaagagactcacagtctcttaa

SEQ ID NO: 14597 - DNA, 455 bp, Glycine max
acactattaatgcattactgttaaatccaatatatataagtaaagtttatagattacgtactaagtttcagaaaataattatttattttttttaaaaaaaaattagtaagcatactttttcattctgaaaaagataattcagaattaaaaaccttcgttttggattaccttttctgaattgatcaaaaggagtggtgactgataataaacttctggactaaaatttctataaagttatttatattaataacatatttgtaaatctcattaagattttatttatatttcttaattttctcattactaaatattataaatcatgtataaataatattgaatataccaataaaataaagattgaaataaaacactttttaagagaacaaaatatttaagtaaaattctttttttttctatacgtaccatagacttattattaagaataataaatctag

SEQ ID NO: 14598 - DNA, 423 bp, Glycine max
  unsure (1)..(423): unsure at all n locations
ctaagctgaattgacaacggagcttcagagattcaatggtcatacttatacacggaagtccgattcaggcgcataatatatctagacagtcgaaattgaacaacggaagctctcgagatattcaaatggtcataacttatcacacggatgtccgattcatgcgcataatatatcgagacgctcgaaattgaacaacggatgctctcaagaaattcaaatggtcataacttatcacacggaagttcgattcagacgcataatatatcgagaagcttgaaatngaacaacggaagctgtcgataaattcaaatggtcataacttatcacacggaagtccgattcaggcgcataatatatcgagaagctcgaaattgaacaacggaagccgtcgagaaaatcaaatggtcataacttatgacacag

SEQ ID NO: 14599 - DNA, 121 bp, Glycine max
tcataacttatcacacggacgtctgattcagccgcataatatatcgagaagctgagaattgaacaaccgaagctctcgaaaaactaaaatggtcataacttttcacacggaagtccgattt

SEQ ID NO: 14600 - DNA, 487 bp, Glycine max
  unsure (1)..(487): unsure at all n locations
ntaatntatcgtggctganattgagtntacaatccaaagttctaagtattaacaaaggaaattgtggccaataaatttaagggataaatgatcatttgattctagatgtataaattggtgacatttgaattcttataaaaaatgaaaattgtgattttcatccttatgtaaaaaaatgtgacaattatattttatcatacaacttaattaataacaaattatattaatattttaattntataatttaatgtcaaattaatcataaaaaatataacttaatctcaaacttgtcccataaaatttagctacaggacatttgttaaaaattttatacatttaaggattaaatcaatttttgttttctttcaacacctaatggttaccaatttacactctcaagaatcanatcgtttatcctaattataagtataagtataacaataaaaataattaatacgtatattaggcacccatgatanattaatac

SEQ ID NO: 14601 - DNA, 412 bp, Glycine max
  unsure (1)..(412): unsure at all n locations
cgacaataactntntactcggatgtctgattgagtcccgaaatatatcgagacgctcgaaattgaataccgaagcgctaagcaaattcaaacgacaaaaactttttactcggatgtctgattgagtcccgtaatatatcgaaaagctcgaatgtgaatgtagaagctctgagcaaattcaaacaacaataactttntactcggatgtctgattgagtcccgtaatatatcgagatgctcgaaatggaataccgaagctcggagcaaattcaaacaataataactnnttactcggatgtccgattgagtcccgtaatatatcggaacgctcgaaattgaatgtagaagctctgagcaaattcaaacgacaataactttttactcggatgtctgattgagtcccgcaatatatc

SEQ ID NO: 14602 - DNA, 367 bp, Glycine max
atccttaagtcacctgcggcatgcagctatcactcggagatctgattcatgctcattatatatcgagacgcttgaaaatgaacaacggtagctctctagacattccaatgctcattacccttaactcggagggtcgatttatgcgcctaatatattcagacgctcgcaattgaacaacggaagctttctatatattcaaatggacataactttctactccgaggttcgattcaagtgcatgatttattcagacgctcgaaattgaacaatagaaactcttcagaaattcaaatgggcataatcctaaactcggaggtcccgattaagcgcatactaatcgagacgctcgaatttacaatggagctct

SEQ ID NO: 14603 - DNA, 389 bp, Glycine max
  unsure (1)..(389): unsure at all n locations
ctgcagctggcatcatccttgtaggattcccaatgttctaaaactggactgattcatttgcttccaaagattcatggccttgcaagtgaagacccgcacaaacatttgaaagaatttcacattgtctgctccaccatgaaagccccagatgtccaagaggatcacatatttctgaaggctcttcctcattcattagagggagtggcaaaggactggctgtattaccttgctccaaggtccatcacgagctgggatgaccttaagagagtattcttagaaaaaattttccctgcttgcaggaccacaaccatcaagaaggatatctcangtattatacaactcagtggagagagcctgtatgagtactgtgagaagatttaaaaactatg

SEQ ID NO: 14604 - DNA, 450 bp, Glycine max
  unsure (1)..(450): unsure at all n locations
gtcagtttagtcaaaggtaaagctaactatgagaaaccttctatgaatctcaggtagtatcctgctaagcccaaaaatctcctaatctcaaaaatagatttaggactctcccattcaagaacgacttctatcttagagggatctacaactatacccccttgagatatcacataccctaggaaactaactttctctaaccaaaactcacactttgacaagttagcataaagttgtcggtccctaagggtatgtagcacaatcctgaagtgttcttcatgttcctctctagtcttggagtataccaaaatatcatctatgaatactaccacaaaactatctatgtaagggtgaaagactttattcatgaagtatataaacacacctggagcattagccacaccanaaggcatgactagatactcatagtgaccattaacgggtcctaaagca

SEQ ID NO: 14605 - DNA, 430 bp, Glycine max
  unsure (1)..(430): unsure at all n locations
atattaccataatctcanaaaaaggggagtagtgagtagttattgcaagaagaaaaaaatgttgatttcaattgtattctttaaataacaagtaataaatgccatgtaatcaacgtttcagatcaaatcaatcaaatgttgtttttcctctangtttattatctctatctatcaatcacctcttgcaaatttatatttttgtgatgatgttattattatgacgtgacacatctaattgtgtcattatttgtatatgtagtgcttgatgatttcatcaaattgtgacatcattattctaaaatatgctcatcattaatgaaatattttttcaaaaaatatatatattatagggacgataaacatacaagactaaagcttaacttaatatataacgattacaaaattatttaaatctttttttatatatata

SEQ ID NO: 14606 - DNA, 351 bp, Glycine max
  unsure (1)..(351): unsure at all n locations
atggtccatttcaagtacatgttatgattatttacattgcacacaagattgaattgcctggtgagtataatgtgagtactacatttaatgtgtctgacttaactctttntgatgtagatggagaagccgatttgaggacaaatccttntgaagagggagagagtgatgaggacatatcaaggactaatggcaatgaacctttataatgacttggaggacctgtgccaagggctagaacaaagaaggccaaggaagctcttcaacaagtgttaaccatgctatttgaatttaggcccaagttacaagtggagaatgttcggattgtcaattgtaccatgttccaagaagtgt

SEQ ID NO: 14607 - DNA, 487 bp, Glycine max
  unsure (1)..(487): unsure at all n locations
ctttgtggagagggacgtgactgttaatcaattggacagtatagtatgaaacattactgcctgcaataatttaagttttagtgatgaagagcttcctgaggaggggaggaaccacaatctggcgttacatatatcggtgaactgcaagtcagatgctctgtcgaatgtacttgtggacactggttcctcattgaatgtaatggccaaatccacattagatcaactttcctaccaggggccccccatgagaagaagcggngtggttgtcaaagcgtttgatggatcaagaaagtccgttatcggggaggtcgatttgcccattacaattgggccgtttgttttccaaattacattccaggtgatggatatccaagccgcatacagttgccttttgggtaggccgtggatccatgaagcggnggccgtgacatccaccttgcatcanaaagctgaagttgtcagaaatgggagattgatcactgtgagt

SEQ ID NO: 14608 - DNA, 235 bp, Glycine max
aattaatccaatttggcatggcgaagtatggagatccgggatgttgagacgtccaagcaccaaaaacctttgtgcatactgctatatccaaaaaagaaacatggaatactccgtggtgataatttatgaggagcataatctcgcaaaccagggataacccgacacccaatgggtgaaagtgagcataatttggagaaacatcatgtaagagctcaaaaggagatataccttttaa

SEQ ID NO: 14609 - DNA, 454 bp, Glycine max
  unsure (1)..(454): unsure at all n locations
gacaattgaagagtctatacatgtttcctttgatgagtctaatgccattcttccaaggaaggattttttagatgatatttcaaattccttagaagatacacatattcatggaaatgactctaaagaaaaagatgaaggaagcaatgaggattctcaagataatggagttagagcacataatgaaccttcaagagaatggagagcctcaagagatcttcccctcgacaacattattggtgatatatcaaaaggggtaacaactagacattctcttaaatatttttgcaacaatatggcttttgtatttatgattgaacctaanaatataaaacaagccatagtagatgataactagatcattgccatgcaagaagaactgaatcaatttgaaagaaacaatgtgtggaaactagtagaanaacctaaaaattatcctgtcatatgaacaaaatgg

SEQ ID NO: 14610 - DNA, 293 bp, Glycine max
  unsure (1)..(293): unsure at all n locations
atatgaaccctgctatataattcaagtggtctaaaaatccttggacttgcttttcagtgcgcgactcggcatttaaggatggctttcaccttgtcggggaccacctctatccctttctggcttacgatgaaaccgagtaattctcccgacttgaccccaanagtgcactaggcgggacttattcttaactaatactatcgtagtctctcgaacaactagttttagacttgccaatcatgtcagcacatagacttaatttctttgcgcatcatatcatggaataatgctaccat

SEQ ID NO: 14611 - DNA, 397 bp, Glycine max
taacaaaaggcatgtgaagtgggtggaattcctagagcatttcccttatgttatcaaacataaaaagggaaaaggtaatattgtagccgatgctctttctcggcgtcatgcattactttctatgcttgaaaaaaaattgattggtcttgaatgtttgaaaagcatgtatgaaaatgatgaaacttttggagaaatttttaaaaattgtgaaaaattttcagaaaatggtttctttagacatgaaggctttcttttcaaagaaaacaaattgtgtgtgcctaaatgttctactagaaatttgcttgtttgtgaagcacatgaaggaggtttaatggggcattttggggtccaaaagactctagaagcattacaagaacaattttatatgcctcatatg

SEQ ID NO: 14612 - DNA, 377 bp, Glycine max
tctggctgcttattgcaggttgacaaagttagtgatccccagaaactcaggctagaagctgaaaaaagagatgatgttgtatgcatatctgctttaagaggtaatggctcgcaagaattttgaaatgcagttcaagacaagctaaaggtgcaaagttgaaaccaatctggatgtcaatttaaatataccattgtactatttgatatcgaataacccgtttgtttgaactacgaactatttacatttgttaaatcaaaattctattattcattaacaggactccatggtttgggtggaagctctggtcccatttgaatatggtgaccttctcagcaccatacatcaagttggaatgggtgatgaaactgtgagtatac

SEQ ID NO: 14613 - DNA, 378 bp, Glycine max
gtctcacgattgtcacgtgctcatcctttaattgttagcccgggctatacgagacatcttgccaaacaaagtcaggttcacgataactcgcctgtgctttttcttccatgctatatgtagcaaagtgattgatccagtaatgtttgatgagttggaaaatgaggccgcaattatactgtgccagctggagatgtatcttccccctgctttctttgacatcatgattcacttgattgtgcatctggtcagagaaatcaaatgttgtggtcctgtttatctatggaggatgtacccggttgagcgatacatgaagatcttaagagggtatacaaagaatctatatcgtgcggaagcatctattgttgagaggtacattgc

SEQ ID NO: 14614 - DNA, 418 bp, Glycine max
  unsure (1)..(418): unsure at all n locations
tgaggacacatgaacganaacgcaattcatggggctctgtanatgataagtatggagaattgcactaaccaatcactacgcatggctccaaactcaaaggtggaggactcatgaacgaaaactcaattcatgggctccgaaaaagggttgagaatggagaattgcactaagcaatcactacccatagctccaaactcgaaggtggaggacacatgaacgaaaacgcaattcatgggtctccgaaaaaggttgagaatggagaattgcacttagcgatcactacgcatagctccaaactcgaaggtggaggacacatgaatgaaaacgaaattcatggtgctccgaaaggattgagaatggagaattcaactaagcaatcactacgcatggctccaaactcgaaggtggaggacacatg

SEQ ID NO: 14615 - DNA, 428 bp, Glycine max
  unsure (1)..(428): unsure at all n locations
ntgagataattcanacgacaataactntgtactcggatgtctgattgagtcccgaaatatatcgagacgctcgaaattgaataccgaagcgctgagcaaattcaaacgacaaaaactttttactcggatgtctgattgagtcccgtaatatatcgaaaagctcgaatgtgaatgtggaagctctgagcaaattcaaacaacaataacnttttactcggatgtctgattgagtcccgtaatatatcgagatgctcgaaatggaatagcgaagctcggagcaaattcaaacaataataactntttactcggatgtccgattgagtcccgtaatatatcggaacgctcgacattgaatgtagaagctctgagcatattcaaactacaataactttttactcggatgtctgattgagtcccgtaatatatcg

SEQ ID NO: 14616 - DNA, 417 bp, Glycine max
  unsure (1)..(417): unsure at all n locations
ggctccaaacccgatgccataatctatgtgtttntgggagtctatgttatccatggctacgcccttactcaaatagaagcatgccatgtgtgtttctaggtccctctccccaacaccatgcatacgaatgctatcatattctaactcanaaaatatacctctctagacatgttgtctttcatgaatcaatcttcccctcactacgcctcatttggtccctaccttcccaacctcaaaccatgatatgaccttacttatctcttgccatcctctcatactacaacaactccatacaaacatgccccctaaatactccaccaatcactcctcanaactccaatgcatccttccccaccccttctatatctacaaatctaccacaaacacctacatcatccacacctttggctgatctaa

SEQ ID NO: 14617 - DNA, 387 bp, Glycine max
  unsure (1)..(387): unsure at all n locations
gccgatgctctttctcggcgtcatgcattactttctatgctngaaacannaatgattggtcttgaatgtttgaaaagcatgtatganaatgatgaaacttttggagaaatttttaaaaattgtgaaaatttttcagaaaatggtttctttagacatgaaggctntcttttcaaagaaaacaagttgtgtgtgcctaaatgttctactagaaattttcttgtttgtgaagcacatgaaggaggtttaatggggcattttggggtccaaaagactctagaaacattacaagaacatttntattggcctcatatganaaaggaagtgcagaaattttgtgaacattgcattgtatgtaaaaaggcaaagtctaaggtaaagcctcatgga

SEQ ID NO: 14618 - DNA, 429 bp, Glycine max
  unsure (1)..(429): unsure at all n locations
ctaagctctcgatatatatgcacatgaatagacttcgtngttattatgacattgaattctcagagcttcgttgttcattntgagcgtctcgatatattatgcaccagaatcggactttcgtgtgacaagttatgaccatttgaatttctcgagagcattcggtgttaatttcgagcgtctggatatattatgcgcctgaatcagacctccgtgtgacaagttatgaccatttgaatttctcgagagcttccggtgttcaatttagagcgtctcgatatgtgatgcgccagaatcggactttcgtgtgacaagttattaccatttgaatttctcgtgagcattcgttgttcaatttcgagcgtctcgatatattatgcgcctgaatcggacattcgtgtgacaagttatgaccatttgatttctcgagag

SEQ ID NO: 14619 - DNA, 442 bp, Glycine max
  unsure (1)..(442): unsure at all n locations
caataaagnaagagcacgcctagtaacaagcacatctccatttaaaggttcagcaacatcaacatcactacaatcctccaatggcagcatttcatcatcacttgagctctcgttctctatgtctccattatccagcaatatcatgaatcttttatttcgacattgagaagcaatatgtccaactccttgacacctaaaacattctatatcacaagatctagaagatgaattaatttctattttacctttatgtgcaacaaatgaatttttggacatagcttcatctgttgactntgtcattgatttgttgtttcaccaatttgacttccatgaagaagtggaagcaacattggaagtactcttagctgtcaatngcctctctacttgaataaatntgtgcagcaagtccctcatctcaacataatgttgcaagtctatcaca

SEQ ID NO: 14620 - DNA, 351 bp, Glycine max
  unsure (1)..(351): unsure at all n locations
tctgnacctgtcgcaagggtttgtggtttgtgttcctctgctgaccaccatacagacctttgcccttccatgcagcaaactggagcaattgagcagcctgaagcttatgctgcaaatatttacaatagacctcctcaacctcagcagcaaaatcaaccacagcagaacaattatgacctttccagcaacagatacaaccctggatggaggaatcaccctaacctcagatggtctagccctcagcaacaacagcagcctgctccttccttccaaaatgctgctggcccaagcagaccatacattcatccaccaatccaacaacagcaaaaacccagaaacagccaacagttg

SEQ ID NO: 14621 - DNA, 381 bp, Glycine max
  unsure (1)..(381): unsure at all n locations
taacagaagctctcgagaaattcgaatggtcataacttttcacacggatgtccgattccggcgcataatatgtcgagacgctcgaaattgaacaacggaagctctcgagaaattctaatggtcataacttttcactcggaggaccgattcaggcgcataatatatcgagacgctcgaaattgaacaacggaagctcccgagaaattcaaatggtcataactnttaactcagaggtccgattcaggcgcataatatatcgagacgctcgaaattgaacatcgaaagctctctagaaattcaaatggtcataacttttcacttggaggtccgattcacgcgcataatatatcgagacgctcgatattgaacaacagaagctct

SEQ ID NO: 14622 - DNA, 456 bp, Glycine max
  unsure (1)..(456): unsure at all n locations
tgatctgttaagttatcttatttagccattgtctaatagcttgagcactttacacgaggcacgttactgtgcagagaaagagtgtgacgaccacaaacattttctatagcaaatcttcaaagaagtacaacttgtcagagtcgctaatgcaatccttcctcccaagggcattggatagaagactccaagaagattgggctagagatgcaacagaaggccctagggttctcataagccttagggtagattttggacccatgggctaagtatgagctcacttatctttgtacatattagattaatgtttcattattttttggccttgtatttagggccccataatgtaggtagggtaccttaaaattctaggatttttcagcccttgtattntagggcacctagactaggtttttgtattaagggtagttttgtaatttcacatgcattaagtgaata

SEQ ID NO: 14623 - DNA, 328 bp, Glycine max
  unsure (1)..(328): unsure at all n locations
tcttatggcttccacgagtttcatgatggtatcagagctcttcaactgaagagcttttgtgtacaactcgatctatcttccttcttcttcgttntcatgattttcaactagtgttgtgtcgcatatcctattgtgttcatcatgagtgcaacacaggttcaagatcaagcatcttatgtgcatagcccgtattaccttcattcaacttggaaaaggtgcaacaatatggttgtgtcatggcttgtacactcagtttcaccttcaatactacagagtatattgtggatggacaatgctcatgatatatggaaagaattgaagtcatgat

SEQ ID NO: 14624 - DNA, 306 bp, Glycine max
  unsure (1)..(306): unsure at all n locations
gatgaacaacgtttggtggaggtttaggtgcangattatgaaattntgacttcaactcaacaaccattatggttaggatgtaaaaatacatcaaagttgtttgttgttgttcagatgttgagcaaaaaatttacacataacatgtcacangcctgcgtcaatgatgtgatgattttttttaaagagtcaaaccaaattgagaatgtcattccttctagtttcaagaaagcaaatatacttgtagtagggctaggtttatcgagtataaaaatagattgttgcattgatgggtgtatgttgtattac

SEQ ID NO: 14625 - DNA, 424 bp, Glycine max
  unsure (1)..(424): unsure at all n locations
tactcagcttacgcaatgcactctactcagttttataggatttgctaacaattaaacataagtatattcaccaggaaaacattgttgtggaaggaaattgtagtgttgcgattcanaagatcctgccacccaagcataaagaccttgggagtgtaacaattccttgttcaattggagaagtcactgtgggaaagacttttattgatctgggaaccagtattaacttaatgccactctccatgtgcagaaggttgggagagttggagatcatgcccactangatgaccttacaacttgttgaccactccattacgagaccatatggagtaattgaagatgtgttggtcagagtaaaacattntatctttntggcagactntatggtaatggatatctgtgaagataatgacattcctgtaatatt

SEQ ID NO: 14626 - DNA, 483 bp, Glycine max
  unsure (1)..(483): unsure at all n locations
agctggtatctccttcttcactacatcaagaatcaccgggttgatgtcttctctgtggctgtcttactggtttagctccatcctctaaatntattcgatgcatacatgtggatgggctaatactangaatgtccgccagggtccagcctatagccttcttatgcttcttgagaactgacaacaacttctcctcttgctcatcagcaagggaggcagatataatcactggaaaactcttgctatcatccaagtaagcgtattttaaatttgatggcagaggcttcaattctggtgtggtcggctggacagtggtagaaggagatggtttctcagcctttacctcataaagaaagtcagaggtatgtgtacttcctgaaacatggttagtcctatctgattctattaaatcaatctcaagaggtaaaacaccaccaccangcatgcaatcaatatcactctcagattcactctcagcatcaaatt

SEQ ID NO: 14627 - DNA, 372 bp, Glycine max
  unsure (1)..(372): unsure at all n locations
actcggatgtttgattgagtcccgccatatatcgagacgctcgaaattgaatgttgaagctctgagccaattcangcgacaatatctttttactcggatgtctgattgagttctgtaatatatcgagacgctcgaaattgaatgttgaacctctgagcaaattcaaacgacaataacttttttctcggatgtctgattgagtcctgtcatatatcgagacgctcgaaattgaatgttgaagctctgagccaattcaaacgacaataactntntactcggatgtctgattgagtcctgtcatatatcgagacgctcganattgaatgttgaagctctgagccaattcaaacgacaataactctntactcggat

SEQ ID NO: 14628 - DNA, 465 bp, Glycine max
  unsure (1)..(465): unsure at all n locations
taagctccttcaactgcacaatgttcttaatattngaagagtatccttgtggaaccttcacccgacgaagacactgacaaaaacttatcttctccttcttggacaaagtatggcaggctgggggcaagtaaattttcttcccatcagaccttggatgcaactgtgatcttatacccatatcagctagatcttgacgggtattcaagccatccttcgtcttgccttgaatgttaaggagcgtcccaatcacactgtcacaaacatttttctccacatgcataacatcaatacaatgtctaacgtcaagatcacaccagtacggaagatcaaagaanatggacctcttcttccatatgcaactctgacttttatccttcttttgggtcttcccaaatacagtgttcaggtgttgaacccgctgatatacctgctcactagtgaacggtatcngcgcaatatcatgct

SEQ ID NO: 14629 - DNA, 391 bp, Glycine max
  unsure (1)..(391): unsure at all n locations
ctttatagaaacaagccgagccgagccttacataggccgagccaaagaccctcgacaagcaggtcgactcatttccacccctatctgtaatcatacctactaaataattagattataagtgaatattataattataatcataactaatttttaaaaaatggatacaatttgatataactagttattgtttttaaaatatgaatatataattaattatgaataaactagttatataacaactatataacaagttgcatctaanaccaattaaatagttatgaatgaatacaaataagttatttgaaatactcatttctataaaattagttatagttntataactataattatttntaaataagaatgagttatttacaatactcattaccat

SEQ ID NO: 14630 - DNA, 351 bp, Glycine max
agcatggatccacccaccagcttcttcgcccaatgcaccatgctcctggagtaactcgatggcgaccgcggtggaggatcctttcatcaatcatcgccagcacacgattattaagttgaaactgtcttgcaaaagcagccccactttttgccatgtgattgtaaacagaggcgttaaagaagtgaggctccatctttggaggattgtcccagatcatatatcgtaagtcaccatttactgttgtgttcttaaattctggcgcattgcaaacgactgagtgaaagtagccttcttgagataacttcacatttgtaaaatacatcagtagggtccgaggtaaattgtcccaac

SEQ ID NO: 14631 - DNA, 352 bp, Glycine max
ctgcagctggattcctttagtagggaatctattcttctattatgtgaccaaacccagtcaccttcattaagaactagctcttttcttcctctattgcctttagttgaacacacctttgtttggttctctatttggttcttaaccctctcatgcaacttctttacaaactcttacctagaatccccttctttatgtataaaagaagtgtccagtgggaggggaatgaggtctaacggtgttaggggattgaacccatagacaacctcaaaaggggactgcttggtggttctatgaacaccccttgttgtaagcaaattctacatgaggaagatactcatcccaagacttatgg

SEQ ID NO: 14632 - DNA, 325 bp, Glycine max
  unsure (1)..(325): unsure at all n locations
tagccaccaaagcatgccaaaaatntccttggcactatctttcttgctacgaaactntgaagcagnctcctctaggtcgataaattcttcccttctctgagcctcaacaattgcttttttctcttctgctaaccggnggatttcagcaattttattcttcattctttcaacatattcggccttctttntttccatgctttcctgataaaagaatttcttttttaaagtaacatacagctaatttataaaaccaatcatattgatgcattaattgaacataagtctggtgacacaaagaagatccaattctcttgccaattgtcat

SEQ ID NO: 14633 - DNA, 417 bp, Glycine max
  unsure (1)..(417): unsure at all n locations
tctatagaaggttcgttcctaatntctctacaatggcatcacctctattgatctggtgaagaagaatgtggcatttatctggggtgaaaaacaagagcaagcctttgctttgctcanagaaaagcttactaagacacctgttctagctcttcctaacttttctaaaacttttgagctagaatgtgatgcctctggagtgggagttggagctgtattgttacaaggtgggtaccctattgcttattttagtgaaaaacttcatagtgccaccctcaactaccccatctatgataaagagctntatgccttaataagagccctccaaacttgggaacattaccttgtttccatggaatttgtcattcatagtgatcatcaatcacttaagtacattagagggaaaaacaagttaaacaa

SEQ ID NO: 14634 - DNA, 438 bp, Glycine max
  unsure (1)..(438): unsure at all n locations
agctntctattcatacctagaaatccaagtttgctctntattttatgaagtttatgggattaagatggtcattgaccaatccctattctatgatttaacccaattgccaagtgaagatgtaccatttgaaggtacattgattgatgattggaagtttgatttttctgtgcatgatgcccgccggttggtttgcaccaaccaagcggatatgaccggaaggcttcttgccggttcattggcttttgaaagctgcatccttcattatctaattgttcgcatcttgcttccaagatcttcaaaccttgcacaggtttctgaagaagatcttattgttatgtgggcttttcataaaggcctacaaattgattgggcacatcttgttagatatcgcatgcataaggcattgcgattgaatgctccattgccatatccacacct

SEQ ID NO: 14635 - DNA, 386 bp, Glycine max
agctggagttgctgcacatgatgtccaacgttatgtcaaggaataagatcgggctgcacaatgcacaaggcaagttaaaatgtcaaatgaagaattgaagctgcaggatccacgatgtcggatacaatgtccaggacatcctgcccgaaaatactggagttgctgcacaatgcacaaaagctgcaggatccacgatgtcggatacgatgtccaggacatctggcccgaaaatactggacacataaatctgttatctctttaacagattattgtgcagttagcaagagataagatgatctatctttatgaacgaattaaaagataattaaagttcgaattacaaactagaagagttcgttcagggattaaagattaaagattaaaga

SEQ ID NO: 14636 - DNA, 400 bp, Glycine max
  unsure (1)..(400): unsure at all n locations
ctataaaactcagcttgatgcctattcaatggagtgcaagttcncttagattgatcacactgcacagnggcaaagatgcatgggagatcctgaaatcactcatgaaggaacctccaaagtgaagatttccagattgcaactcttggctacaaaattcgaaaatctgaagatgaaggaggaagagtgtattcatgacttccacatgaacattcttgaaattgccaatgcttgcactgccttgggagagaggataacagatgaaaagctggtaagaaagatcctcagatccttgcctaagagatttgacatgaaagtcactgcaatagaggaggcccaagacatttgcaacatgagagtagatgaactcattggttctcttcatacctttgagctaggactc

SEQ ID NO: 14637 - DNA, 327 bp, Glycine max
cttggacttgagcggcaatggatttcttggagaaggtatgtcaattccttctttccttgggacaatgacttccttgactcacctcgacctctctcatactggattctatgggatgattcctcctcagattgggaatctctcaaatttggtgtatcttgacctgagttcagatgttgccaacggaacagtaccttctcagatcgggaatctctctaagcttcgatatcttgacttgagcgacaattattttgaaggtatggcaattccttctttcctttgtgcaatgacctccttgactcacctcgacctctctgatactccattcat

SEQ ID NO: 14638 - DNA, 428 bp, Glycine max
  unsure (1)..(428): unsure at all n locations
gcagctggcctttacgttggacatatttgttcttatatatccaaacactcttatgtgctntgctgaaggctncttcccattccaagcttcaattggagtcttgtcttttacatacttagttggacatctgttgagtatgtaaacagcagtgtagactgcttcagcccagaatgtgttaggtagtcccttctccttgagcatcgatctagccatttccataactgtgcaattctttctctcagaaactccattttgttgaggagaatatgagactataagttgtcgctcaatgccttcatcctcacaaaatctttcaaactcgcgagaggtgtactctttgccgcgatcacttcttagtacttttattcattttccactttgatttcaagcagggccttgaacttttgaatactccaaagacttttgat

SEQ ID NO: 14639 - DNA, 424 bp, Glycine max
  unsure (1)..(424): unsure at all n locations
cacaagcattaccttaatgaanaatatgagtaattttatatctcttgattaaaaacggaccaaggcactgatctcgggtgtccaatttacattgaacgacttgngaaagcacatccaagcaagctaagtatgtatttcacaacgataattcgatatttgaaatacttcatcgaggagtttgagagtgccctgtaggagaaatttctagtatgacccattgaagcaaattgacaaatttcttcaaagtaacaatagctccaattatattacaagtcatacaaatatctcctatatggcaagtctatttgaatgtgtactctatctcttcctgttaatgccatgaggagttattatcaagttagtatatgtttgaataagcttatataanaacactctatagacaantttcttttaaaaaaaatat

SEQ ID NO: 14640 - DNA, 495 bp, Glycine max
  unsure (1)..(495): unsure at all n locations
ttcaaactaagctttcttgcgggtgatgggtntatcgcacagaaaggtttattattgtctgacatattctcaattagctcaattgcttctttcggngtctttagctctattttccccctacagaagcatctagtagttgcttggtttgtggtcttagtccatctatgaacatattcaattggattggcttggacaacccatgggtgggagttcttctcaataaacctctaaacctctccaatgtttcactcagacattcatcatagaactgatgaaattaagagattgtagctttcccttccacattcttggactttgggaagtatttctttagaaacttttcaacaacttcttcccaggttttcagactgttacccttaaacgagtgaagccacctcttggcctctcctgccaatgagaatgagaataggctgagtcttatagcttcatctggcacactagcaatcttaacagtgttgcatatttcgataaaag

SEQ ID NO: 14641 - DNA, 370 bp, Glycine max
  unsure (1)..(370): unsure at all n locations
agcttgtctctcanatcattggtacaacaatgattcctgttcttggtcatgctggtaatatatgatttacatttcctatttttgattaatattacaaagtaggaatttataaaattgttatttttgtcatgcagatggaatatgtcatgtatatgtagacaaaacagctaatattgatatggcaaagaagattattagggatgcaaagattgattaccctgcagcctgcaatgcaatggtaatttcagtttacatacccaggaatgcctcctctaatgcatgttcatttacatccatatcttcgtttgagttntcttcatttntcattcnattatgtaaatgaatctacagactcagctcattacaatat

SEQ ID NO: 14642 - DNA, 221 bp, Glycine max
  unsure (1)..(221): unsure at all n locations
tcacctggntcaagcatgactttctttctgcttttgttggcttgccttgcatagctcgcatttttcttttcaatttgggccttcacttgctcatgcaacttcttcacatactcagctttagcctgtgcatccttatgcttaaacatagcaatgttaggcataggcaacaaatcaagaggagtcaaaggattaaatccatacactatctcaaatggtgaaca

SEQ ID NO: 14643 - DNA, 376 bp, Glycine max
  unsure (1)..(376): unsure at all n locations
aaccacaacagaacaatgatgacctctctagcaaaagatacaaccctggatggaggagacaccctaatctcagatggtctagccctcagcaacaacaacagcagcctgctccttccttccaaaatgctactggcccaagtagaccatacattcctccaccaatccaacaacaacaacagccccagaaccagccaacagttgaggctcctccgcaaccttccctcgaagaacttgtgaggcagatgaccatgcagaacatgtagtntcaacaagagaccagagtctccattcagagcttaaccaatcagatgggacaattggctacacaattaaatcaacataagtcccataattctgacaagctgtcttctcaatc

SEQ ID NO: 14644 - DNA, 350 bp, Glycine max
  unsure (1)..(350): unsure at all n locations
gacacatagaaactaagcttgatgcacattgnagaggttatgaaacaacgtttatttctttccttgagaggtgaatcaaaggagntagagatcataatgaagaacaaggaggagaagagggaatgatggtgttcctagacaaaaccgaattgatggtattaaactcaacattcctccatttaaaggaaagaatgatccagaggcctacttggagtgggagatgaaaatagagcattatttctcatgcgacaactatgaggaggaccaaaaggtgaagcttgccgccacgaagttttctgactatgctcttgtgtggtggaacaagctacgcaacgagagagccagaaatg

SEQ ID NO: 14645 - DNA, 371 bp, Glycine max
  unsure (1)..(371): unsure at all n locations
agcnttgatggtccgnaatgtatttaaaggtgagttcgaggaggnaaaggcgccattgacgcacggcggcggcaatggcgtgaagctcacgcacataagttgaggaacactgaagcttgtggcaaaaaatcttactgaaaaacgcaatgggatgagcgttttgagaaagcatagctcccatagcgagaccagaagcatccgtctcgacgtcgaaggggatagtgaaatccggcggaacgagaacggtggcggtggtcatcacctgcttgagtttgaagaaagcagattgagcatcatcatcccaatgaaagttatccttgcgaagcagggaagtcaatggngcatccaagagcgcgtaaccgcgtatgaaa

SEQ ID NO: 14646 - DNA, 380 bp, Glycine max
ttcatgttgacaatgtacaaatccaaaaataattgataaacacaaatcattattgaatttcaaatcgctaaagttcgaagtataacaaaagaaaataaaaagagcataatattaaaaaatgtatggattaggtcctcagccctaaagcttacaaatctattttaagtccaagcccataaatgaaaaaatataatttggacaaaataagataaaattggatgaaatagaatctagatgaaataaaatctagatggaataaagtctggataaaataaaatctagatggaatataatctggataaaataagattcgataaaataaagttattattatcgctagttaaacaggtcggcttgtcaagctaacaagcattttttat

SEQ ID NO: 14647 - DNA, 439 bp, Glycine max
  unsure (1)..(439): unsure at all n locations
tcggtattccatttcgagcgttcggatatattacgggactcanctgatattctagtaaaaagntattggcggttgaatttgcttagagcttcggtattccatttcgagcgttcggatatattacgggactcaatcagacatccgagtaaaaagtttttgtcgtttgaatttgctcagagtttcggtattccatttcgagcgtctcgatatattacgggactcactcagacatccgagtaaaaatttaatgtcgttcgaatttgctcagagcttcaacattcaatttcgagcgtttcgatatattacgggagtcaatcgaacatacgagtagaaacatgttgtcgnttgaatttgctcagagcttcggtattcccatttgagcgttcggatatattacaagactcaatcagacatccgagtaaaaagttttggtcgttga

SEQ ID NO: 14648 - DNA, 354 bp, Glycine max
ttaagctgcagatagagaatacgtcttgtgcttatccattctgattgcttcttttctgtcagtgcatgataaaagtgagcaacttgaaaaggaagtgtcaactcttcagtccgagttggataggatatgctacttgctgaagattgctgacccaacaggagaagctgccaagaaaagggagttgaaagtacatgaacccaaaccaaaaaaatctgaagtaaccattaccatcaagaagaaaccacctgcagaagcacagaatagcagcgggccttgtgcaaaagcagataacaagaatcctcctgtggaaaccctgaaaatccgcgagacccctgtcaaggaagatggctctat

SEQ ID NO: 14649 - DNA, 422 bp, Glycine max
  unsure (1)..(422): unsure at all n locations
agcttcttagtttcagaagattcagntgtgtttgtatctacctcatgcactcctctaatgactatagcatcatttctggcactaaactgctgggagttggaagccatcttctcaattaaatttctggcttcagcaggagtcatgtctccaagggctccaccactgacagcatctatcatacatctctccatattacggagtccttcataaaaatattggagaagaagctgctccgaaatctaatggtgagggcaactggcacatagtttttttaatctctcccagtattcatataggctctctccattgagttgtctaatacctgagatatccttcctgatggctgtggtcctggaagcanggaaatttttttctaagattactctctttangtcatcccagctcgtgatggaccttggagc

SEQ ID NO: 14650 - DNA, 399 bp, Glycine max
  unsure (1)..(399): unsure at all n locations
agcttgcaaaggagggntgatgngttgtttgttgcaagaatactcttgatagacttcagctgaattctgcaaagacaactgatagcctggatgatttgaactccactaatcaagttaaagatatagacatggatgaaaatgctgattcttttgtggatgaatctgttatggaaaaggttctccacaagaggagtttgaggatgcgtaacatgcacagagcttggcagggtttgtttgatttcttgaatattccatttggatattgcatttggtatcacatgtgcttggaatggaatagtaatgatcaagagtgtgcgactgttgcgttatcttttggaatatggtaattttcttttccattccaattcatatccaaactatgagttagtctgtgtagtt

SEQ ID NO: 14651 - DNA, 323 bp, Glycine max
  unsure (1)..(323): unsure at all n locations
tagactgaatcctangtcctcgcaataacttattctaatatctactgactgancannagagctaatgaactcagtgacaatttctttggacaatagcttctcccgaatgaaatgacagtcaatttctatgtgcttggttctctcatgaaagactggatttgaagcaatatggagagtggcttggttatcacaatataacttcatctgcccaacttcacagaatctcaattcttcaagtagttgtttgatccacataagttcacatgtagccatggccataggtctatattcagcctctgcactggaccgggcaacaacagttt

SEQ ID NO: 14652 - DNA, 456 bp, Glycine max
  unsure (1)..(456): unsure at all n locations
agctgctggtgggacatcttgactggctnctatatctgttattcaccacagaatctgccttcntctatggtcagattgggaatgcctctaacagcacctttgtcaatgatattcttcatgcctcttaagagcagatgttcaaatctttgatgccatattttgacttcatcttctttggaggatggacatgtggaggagtaactggtttcttgaggtgtccataagaagacagtgtcctttgatctgttgccctacattataacttcattcttctcatttgtcaccaagcattctgactttgtgaagtttacattgaatccttcatcacacaactgactgatgctgatcaagtttgcagtcagtcccttcaccagcagtacttttgtcagactaagaagtccatcatggactatctttcgcattccagtgatctttcctttagagccatctccaaat

SEQ ID NO: 14653 - DNA, 415 bp, Glycine max
  unsure (1)..(415): unsure at all n locations
ctatgtcccangattggtcattcaaaagttacgttatgaccattcgaatttctcgagagcttctgttgttcaatttcgagcgtctcgatatattatctcccagattcagacatccgtgtgaaaagatatgaccattcgaatttcatgagtacttccgttgtgcaatttcgagcgtctagatatattatgtcccaaattcacacatccgtgtgaaaagttatgaccattcgaatttctcgagagcttctgttgtttaattttgagcatctagataagttattcccgtgaatccgacatgcgagtgaaaagatatgaccattccaattgctcgagtgctttcgttgtgcaatttcgagcatctagatgagttatgtacgcgaatcagacatcgttgtgaaatgatgaacatttgaat

SEQ ID NO: 14654 - DNA, 343 bp, Glycine max
cttctacattcaatttcgagcgtctcgatatgttacgggactcaatgagacatcccagtaaaaagttgttgtcgtttgaattggctcaaagcttcaacattcaatttcgagcgtctcgatctattacgaggctcaatcagacatccgagtaaaaagttattgtctgttgaattggctgagagcttcatcattcaatttcgagcgtctcgatatgttacgggactcaatcagacatccgagtaaaaagttattgtcgtttgaattgtctcatagcttcaacattcaatttcgagcctctcgatatattacgggactcaatcagacatcccagtaaaaagttatt

SEQ ID NO: 14655 - DNA, 359 bp, Glycine max
  unsure (1)..(359): unsure at all n locations
tctacactntatacaagaatgaagctctgttaccacttgttagacaagnggcctcagatatcttaagaagggggggtcgaattaagatattccaaactatatcccctaattaaaaatctatttcactttttaaccaagttatgaattcccttaatgacaatcttcttaaatattaattcaaatgaaacacattgaatatgaatataaagcgataataaataaaggagattaagggaagagaaaatgcaaactcggttntatactggttcggccacacccttgtgcctacgttcagtccccaagctacccgcttgagagttccactatcttgtaaattctttatacaagttctaaacaca

SEQ ID NO: 14656 - DNA, 384 bp, Glycine max
  unsure (1)..(384): unsure at all n locations
tttcgagcgtctcgatatattatgtccgttaatcggatatcctatgataagttatgaccatntgaatttctcgagtgcttccgttgttcaatttcgagcgtctcgatattttatgtcctcgaatcagacatcggagtgaaatgttatgagcatttcaatttgtcgagagcttccgttgttcaatttcgagcgtctcgatatattatgtctccgagtcggtcttcattgtgaaaagttatgaccatttgaatttctggacagcttttgttgttcaactttgagcgtctcgatatattatgtccgcgaatcagacatccgtgtgaatagttatgaccattcgaatttctcgagtgcttccattgttcaatttcgagcgtctcgata

SEQ ID NO: 14657 - DNA, 483 bp, Glycine max
  unsure (1)..(483): unsure at all n locations
ttgttgatgactaatatctgttggcacactcggttgtccttcttttggtattattnttccacccaactacattntctccatctattagactcgaacttaagaccttacttaaggaaactgaggtcactatcactcagactaacgactcattggcaatgtaattaacaaaatttattgtttattaaagtctaattntaattttttggtagtgtatatattcttacaccatcaatcaaatagaaagtattttaaatacgaattttaaagtaatataaaatacaattatcctaccatatgtggttatccataattggattagaatgtattttctttttacataatgttactcaacaataataactattggtaaacttaccctcttgaataactcttaacatgtntaaatttattaatntaaatattaactatatgtttaattaactatgaatattaangttatatannatttgatgctcacaatca

SEQ ID NO: 14658 - DNA, 425 bp, Glycine max
tcttagtctcacctgatgaattcgtggctacttcatgcactcctctaatgacaatagcatcacttctggcactaaattgctgggagtttgaagccatcttctcaattaaatttctggcttcagcaagggtcatgtctccaagggctccaccactagcagcatctatcatacttatttccatgttgctgagtccttcataaaaatattggagaagaagctgctttgaaatctggtggtgagggcaactggcacataatttcttaaatctatcccagtattcatataggctctctccactgagttgtttaatacttgaaatatcctttctgatggtcgtggtcctggaagcaggaaattttttttcctaagaatactctcttgaggtcatcccagctcgtgatggaccgtggagcaaggtaataaaa

SEQ ID NO: 14659 - DNA, 292 bp, Glycine max
gaatagcagcactatctccagcatcagcataatgtccatgaattacatatggccagacaggttggcccccaccaacttgttcactcaatacttttgacatattgagaatgtgagctaatgctccatccacaaattcttgaatataaggccaaagaagttctttccggaggtatttattgcgtggaccgaagggtattcttatgatatatgcaccactgctctccccaaggttatcatcatcatcatcacccggagttagcatttctgtaggctctccatagctccagtcaat

SEQ ID NO: 14660 - DNA, 484 bp, Glycine max
  unsure (1)..(484): unsure at all n locations
gcttttatccaggctcatcttggtggtgaagctccttcttctatggcttattccttaatggatggcgcctcctctcacctattttcctttgtcttccgctgcatctccatggtggaaaatcaccattaaaggaccccattgaagctctaagatccagcctccatagaagctccacaagcaagcttccatcaagccttgaaaacaaaaggtaaaagatactatggttgaaactagccaaataaacactaaaagaggtgtgaaagataaggtaaaaaaactaattggtaaaatgcaagctatctaggcggttttaccttatctactagaatggccaaaatacaaggcctagacgaaggagaaacctattctaatatttacaaagataagcgagctcatacttagcccatgggctcgaaatctaccctaaggctcatgagaaccctanggcctntccttggatctctagcccaatctacttggagtc

SEQ ID NO: 14661 - DNA, 439 bp, Glycine max
  unsure (1)..(439): unsure at all n locations
tgatgcctctntgtataactccttttacttttgggatctttccaatatcttctagcatcaagtcaagacaatgtgcagcacatggagtccaaaatatttttggtctcgtgacttctaaaattttacctaaaaagaccaaaatcaataaacttgtatgagtagtgtaacaattaaaagttataactataaaaaaaaacttcattaagcatgattgaattctcgcccaccaacacataattacttccattgtccgtcaccacttgaataacattcttttctccaatctcctcaacaaagctatccaaaagctcaaagatcttctgaccagtcttcatgtattcagaagcatccgcactcctcacaaactgtgttcccaatgaacaatttaccaaaaagttaatcaaagttctattcttcctatccgttcaaccatctgaca

SEQ ID NO: 14662 - DNA, 473 bp, Glycine max
  unsure (1)..(473): unsure at all n locations
gagataaacaagaaggctgaagcagagttgactgtgaatggtaatcatgggagctgatctggtgaggtcaaaagcctggagcagggaatagatgaataagctctcagcatctctgctctcattctgaccccttaaagatctgtttgaaaatgactgtagtttttgttaatgttatttatctgattgtttattaaaataacaatatacaattatagagcatagccctatcatgtaccatccttgggtgtattggacagacgtgtagcttctagttgctattgtaacattatgttgtaagacatgtgatatagacctgtaatcatatatataaggaagtgatcctatattatcataggtggtgttaagtaatttggtcctgccgaagaacggtgcatatgcaagtaccatctttttcatnggattggattatctcactntntgaaatcaagtgatagtgattaatcatgaaatac

SEQ ID NO: 14663 - DNA, 435 bp, Glycine max
tgtaataaagataccaattatcgatacaaattctccatatggttgatttatttaaaaaaaaaaaagtcaaaaacaacatgtatggaatagagatatttgaaccaccaaagtaaagaactgttacaaataaggaagaaatgaataggtttaaataggaagcaacataaaataaaccaaatttgagtggtttaaccctatatgctacactcgtttgctacctactattattggttacctgtgatgacagttaattcaaaatgtaatttataatattaatatcttatttttgatttttttaatttgtggttggttgaatactttggtgcatttgtcaagtgattacgattctttgtgttaaaaggtattatcgatcaacttctttatttctaactacaaagttttacatggactgtttatagaaaatatttgttatgt

SEQ ID NO: 14664 - DNA, 369 bp, Glycine max
  unsure (1)..(369): unsure at all n locations
attcatagtgacaccatagtcgtggagggaaactgcagtgttgtgattcaacgtatccttccaccaaaacataaggatccaggaagcgtcactataccttgttatgtatgtcaagtttcagtagtcaaggctcttattgactcgggagctagcattaatttgatgccgctttccatgtgtcgaaaacttggggagttggagataatgcctactaagatgacttntacagtagcagatcgctctatcaccagaccctatggagtgattgaggatgttctggttcaagtcaaacatcttatctttcctgcagactttgtgggtatggatatagaggaggatcctcgaattcccataattttgggacgttct

SEQ ID NO: 14665 - DNA, 302 bp, Glycine max
agtgaagtctgacgatattccgaagactatctttaggacccgttatggtcactacgagtatgtagtcatgccctttggtgcgactaatgcaccaggtgtgtatatggactacatgaataaagtctttcacccttactttgatagattcgtggtcgtattcatagatgatattttggtatattcaaagactagagaggaacatgaagagcacttgaggattatgctgcttacccttacgaatctacaactctatgctaagtagtccaagtgtgagctcttggttagagaaagttagtttccta

SEQ ID NO: 14666 - DNA, 451 bp, Glycine max
  unsure (1)..(451): unsure at all n locations
gcttctagacatcatcctatctaaaatggtttctcttttcttgcataagcttgacccaggggtcaccagacataacatcatctatgtgttttggctcaatctcttgagaaagctccttctctagactttgtccctaggatcaccaatgatctacgactntggatgatgtttcctcggcaaacgtctagttggttctctgacttcttcaagttgatcgtccactagtgagttggacgcaagcctatctttactggacatagtagcaaacttgacgatattttcaattttcatttctgcaaaggactcatccaactttgacatttgagtggcaggtttattgtcattatatcttacatgaatagactcttccacagtcaagggtttggagttattcactctatatgccttggacgaattagagtatccaagtaagaatccacaatcacatttt

SEQ ID NO: 14667 - DNA, 395 bp, Glycine max
  unsure (1)..(395): unsure at all n locations
agctntatctaatgggaatctggcanaatctgtctatgagaatgaatcgatggcccttgtgctttgtattcagcactggagacattatttattgggcagagaatttattgtgcacacagatcataaaagcttgaagcattctttacaacagagagtttcatctccagatcagcagtgttggttggccaaactgctangctatcaatttgaagttaagtacaagcctgacttagagaatagagccgatgatgctatgtccagatgtcatggttaggtagaaatgaattctattatttcttttcccttgtgggctgatagacagaaacttttggatgaaataactaatgacccgtacatttaaaagttactgagagaagtgtaggagtctcctaatg

SEQ ID NO: 14668 - DNA, 405 bp, Glycine max
  unsure (1)..(405): unsure at all n locations
gggataattcttcatttggttttgatgaaagccccatggatcaatgcatataccataaggtcagtaggagtaaaatatttttccttgttttatatgtagatgatattntacttgcaaccaatgatcatggtttgttacatgaggtgaaacaatttctctctaagaattntgacataaaggatacgggtgacgcatcttatgttactgacattaagattaatagagatagacctcgaggtattttaggtctatcacaggaaacttatattaacaaaattttagaaagatttcggatgaaagaatgtcagcaagtgtcgctcccattatgaanggtgatacatttaatttgaaccaattcccacagaatgactttgtgaggaaacatatggaaaacattcattatgc

SEQ ID NO: 14669 - DNA, 317 bp, Glycine max
  unsure (1)..(317): unsure at all n locations
gagaagggaaagtaaaattaatcaaatttggcatggcgagtaatgtagatccgggatgttgagacgtccaagcaccaaaaacctttgtgcatactgctatatccaagaaagatacatggaatactccgtggtgataatttatgaggagcataatctcgcaaacaaggataaacccgacaaccaaatgggtgaaagtgagcataatttggagaaacatcatgtaagagctcaaaaggagatataccttntaacaagggagtaggtaaccgatttataatataaacaacacaacaaaaagcatcgagccaatacgtagt

SEQ ID NO: 14670 - DNA, 330 bp, Glycine max
agcttgaatcggacatccgtgtgaaaagttatgactcatttaatttcacgagagcttgcgttgttcaatttcgagtgtcactatatgtgatgcgccataattggacattcgagttaaatgttatgaccatttgaattactcaagagcttccgttgttcaattctgagcgtctcgatatgtgaattgtctgaatcggacatccgtgtgaaaagttatgaccatttgtatttctcaagagcttccgatgttcaatttccagcctctcgacatattatgcgcccgaatcggacatccgtgtgaaaaatatgaccatttgatttctcaagagct

SEQ ID NO: 14671 - DNA, 410 bp, Glycine max
  unsure (1)..(410): unsure at all n locations
naagcttttatcattgnggtaagtgaaaaggatgattcctaataagcaagaacgttcagtcattccagcctcccaggtgaatggcacatagaagttggccatagtaaatgggtaacaggcaaaatgtgacattgatcactaaatgggtagtcacttaatgcatatgacaaaaagatacatacctgaatggctagaaatgcagccatgcaaatgcagttccctatcaagcacaaaactccaagatgaaaattgtcaaacccaaggttctgtaagccaccaattaaccatccagatggctctggctgacctctggcacttatttcattntgtgttacatgaccgagttcggcatatcctatcanagctggaccacgatacaaaaccatatatatggcaccagagacacagat

SEQ ID NO: 14672 - DNA, 255 bp, Glycine max
  unsure (1)..(255): unsure at all n locations
ctatcaccttgtacatacaaccaatcaatgagattggtctgtaatcatcaaatgactgagggtgtattactttgggaattagagccagaaaggaagcattactacctctanggaagctgccatgcacatggaactcatccacaaatcttctgaagtcaggtttcaccactccccagaattctttaataaaactgaaattaagaccatcacgcccaggacatttgtcncaccacagcttgcttgatctcatgatct

SEQ ID NO: 14673 - DNA, 381 bp, Glycine max
  unsure (1)..(381): unsure at all n locations
anngctttaactgaattgcaacgttccaattgttttttaaatggtgtaatcaattacaatatattggtaatcgattaccagtgtatctgaacattgaacttcaaattcaattgtgaagagtcacatcttttcataaaatgctttgtgtaatcgattacatnggtttggtaatcgattaccagtgacaaagtttgaataaaaatcatgagatgtaactcttccaatggttttcaagtttttctcgaggttataactcttccaatggttttcttgaccagacatgaagagtctataaaagcaagaccttgacttgcatttcaataactttttaacaattctttagaacaacttttgagaaacctttgctacttattcttcttc

SEQ ID NO: 14674 - DNA, 403 bp, Glycine max
  unsure (1)..(403): unsure at all n locations
agcttaggctaaattagtctaaactttcatatgctatttaagctaagtctagtccaacaagagggatcatgatgcaatcctccctaggaagggaccaatcactagaaccatgagcaagaggctccaagaagattgggctagagctgctgaagaaggccctanggttctcatgaaccttagggtagatttctgagcccatgggccaaggttgggtccaattatctttgtacatattagactaggatgtcattatatttggtccttgtatatagggctccatattgtaggtagggtacccttgaaatataggatttttcagcccttgtatttttgggcacctagactagtttttatattaggggtagttttgtaatttcacatgcactaagtggatattngatat

SEQ ID NO: 14675 - DNA, 401 bp, Glycine max
  unsure (1)..(401): unsure at all n locations
tcatatatgcaatttgaagatattntagcaaatttccagacagccaaattagcccaatattgagtactcaagatgcatatataggatgaagtttgttgggtggattacttagcttttgtgctgaataattaattaagttcatgttaaacaagtggcctcaataacttaaaaagggagggtgaattaagtttaaaaaatttctcctaacaacattttaattctctctttaaaatgattatgcagacttaatatgcagaanagaagtaacgaacaatttacttgatgcttctttaaatatgcaaagtaaaattaaactgcaataaattaaaagagnttatggaagagagagttgcacactcagttttatattggtttgaccacgttctatgcctacatccagt

SEQ ID NO: 14676 - DNA, 440 bp, Glycine max
  unsure (1)..(440): unsure at all n locations
agcttaagctccttcaactgcacaaggctcttaatatttgaagagtatccttgtggaaccttcacccgacgaatacactgacaaaaacttatcttctcctttntggacaaagtatggcaagctaggggcaagtaaattttcttcccatcagacattggatgcaactgtgatcgtatccccatataagctagatcttgacgggtattcaagccatccttcgtcttgccttgaatgttaaggagcgtcccaatcacactgtcacaaacatttttctacacatgcataacatcaatacaatgtctaacgtctagatcaaaccagtacagaagatcaaagaaaatggacctcttcttccatatgcaagtcttacttttatccttcttttgggtcttcccaaatatagnattcnagtgttgaacccgctgatatacctgctcacc

SEQ ID NO: 14677 - DNA, 418 bp, Glycine max
  unsure (1)..(418): unsure at all n locations
agcttcatgattgcctaagtgtggaccctttttgcaatcctccattctcccctntnttcggagccccatgaatgtcattgcctagcgctgttcatgtgtcctccaccttcgagtttggagctatatttcatgattgcctaagtgcggaccctcaagggcaatcctccattctcccccttttttggagccccatgaatgttatttcctagcggtgttcatgtgtcctccaccttcgagtttggagctatatttcatgattgcctaagtgcggaccctcaaggcaatactccattctcacactttttcggagccccatgaatgtcattgcctagcgctgttcatgtgtcctccaccttcgagtttggagctatgcttcatgattgcctaagtgcggaccctcaaggcaatcctccattct

SEQ ID NO: 14678 - DNA, 461 bp, Glycine max
  unsure (1)..(461): unsure at all n locations
agcttaatccagaaaggactactactattagttttgttcaagtctctcattataacattntagnaatagtgatatttacaatttaaataagcaaaaaaacatctgttgggaccatttaatgaacaaacttaagtaaattgaaaactttcacattgtttgataaaaataaaatttaatgatcaactcacaatttattgntaatataaattttaaaattattattataaaaattaataaatttattatacataaagaattataattagatgataatataaaattttgtataatgttaatatataattttttttctcataaaaataaatgaaacaaagtttgaatctagaaaaaatacatgttttaattatactttcaaagagtgtctttatgataataattgataattgattaagtcgcaatctttaaataatattataattagattatggtataagaataat

SEQ ID NO: 14679 - DNA, 335 bp, Glycine max
acaaaagagctatattgataaagtacttgatagattcagcatgaaagatagcaaaccaagggataccccaatagctaaaggagacaaattcagtcttaaacaatgccccaataatgaccttgaaagaactaagatgcataagattccctatgcgtcatcagtagaaagtctgatgtatgctcaagtttgtacttgtcccgacataccatttgtcgtaagagttatgggcagatacttgagtaatcctagattgcacattggaaggcaagatatgcgtaatgcgtacttgaagagaaaaaagctacatgctcactatcagaagtctgaaaattgga

SEQ ID NO: 14680 - DNA, 456 bp, Glycine max
  unsure (1)..(456): unsure at all n locations
agcttttaaactntatacaagaatgaagctctgataccacttgttagacaagtggcctcagatatcttaagaagggggggttgaattaagatattccaaactgtttcccctaattaaaaatctatttcactttttactcaagttatgaattcccttaatgacaatcttcttaaatattaattcaaatgaaacaatttgaatatgaatataaagcaataataaataaaggagattaagggaagagaaaatgcaaactcagttttatactggttcggccacacccttgtgcctatgtccagtccccaagcaacccgcttgagagttccactatcttgtaaattccttttacaagttctaaacacacaaggacaatccttcctttgtgtttagagatcctttacaacaagagactcacagtctcttaatcccttagagaatgagaagaagaagaagaac

SEQ ID NO: 14681 - DNA, 199 bp, Glycine max
tactgaatactgcacatctgaaggcatcattcatgagttctctgcagccattacaccacaacaaaatggcatagttgaaaggaaaaacaggatttttgcagaggctgctagggtcatgcttcatgccaaagaacttccctataatctctggggctgagccatgaacacagcatgctacatccacaacagagtcacactt

SEQ ID NO: 14682 - DNA, 438 bp, Glycine max
  unsure (1)..(438): unsure at all n locations
agctntgagccaattcaaacgacaataactgtttcctcggatgtcagttagggtcccgtaatatatcgagacgctcgaaattgaatgttaaacctatgagccaattcaaacgacgatgactctttactccgatgtccgattgagtcccgtgatatttcgagacgctcgaaattgaatgttgaagctctgagcccattctaacgacaataatcatttactaggatgtttgaatgagtcccgtaatatatcttgacgctcgaagatgaatgtttaagctctgagccaattcaaacgacattaactttttactcggatgtctgattaaggcccataatatattgagacgctcaaaatngaatgttgaagctctgagccaattcaaacgacattaactttttactcggatgattgattgagtaccggaatataacgagactc

SEQ ID NO: 14683 - DNA, 232 bp, Glycine max
aactttatggccttaaacaagcaccgagagcttgctacaacaaaatagaggcctattttattcaaaatggatttggtagatgcctttgtgaacatacattgtttacaaaatcacaagagggagggaaacatttaattgtaagtctctatgtcgatgacttactatatactggaaacgatggaagtatgtgtgatgagtttagaagatccatgatgacaaacattgatatgtc

SEQ ID NO: 14684 - DNA, 417 bp, Glycine max
  unsure (1)..(417): unsure at all n locations
agcntttgaaccttgaattgaaatgactgctcatataaaggcttgattaaacttccatcttccaacgagcacagtaacaccctaggaggacaaccaagggaatcatgaatatcaacaaaatttcgcatatgatgatcaaggaccacaatgtgcttccccttgctgtgcgtaagtctgacagggacctgaagtggttgacttccatcaacaaaaagtttggaacaatacaaattggactccagaggaccatctaaggtcccagtaaaatatattagacctgtagcctcattcacaccggcaatttgctcaaccatccattcaccttcagtgatgggtcctaaacaagtcccatttgcatcatgaagataaagatgtctaaatcctggtttctcactagcccagataaatccacccgaa

SEQ ID NO: 14685 - DNA, 443 bp, Glycine max
  unsure (1)..(443): unsure at all n locations
agcttaagcanaaacattatatggttntntgtctgttggattctactcagttggatagttttctgttgattgattgcgtttgaaatgggtctcttgcagattctctcatgttttttttttatgtttttttggatttcattatatgtgtcatgtacgttgcttaatgttctttatctatttatttatagattcattttttcttcttaaaatgtcaattttatagacattttgtaggagattctgtaattaagagctctttgaatgaaagtacatatcggtaattcactatgctgagttggatttttaagcatgcttagatacccttcatggagtcacctattaatggagttggttccttatcagaggtgtgtatctagcttaattgggttgtggagacgtaaggagtgtgtatctagctgaatagagtggcacaagaacttctt

SEQ ID NO: 14686 - DNA, 430 bp, Glycine max
  unsure (1)..(430): unsure at all n locations
agctnnggatttcttttagtatggaatctattcttcctaagatggagccaaacccagtcacccttattaagaactagctcttttcttcctctattgcctttagttgaatacaccttttgttggttctctatttggttcttaaccctctcatgcaacttctttacaaactctgacctagattccccttctttatgtataaaagaagtgtccagtgggaggggaatgaggtctaacggtgttaggggattgaacccatagacaacctcaaaaggggactacttggtggttctatgaacccccctgttgtaggcaaattctacatgaggaagatactcattccaagacttatggttgcctttcagaagaatccttaaaagggtggataaagacctattcactacctctgtttgcccatcagtttatggatgac

SEQ ID NO: 14687 - DNA, 325 bp, Glycine max
acatccgagtaaaaagttattggcgtatgaattggcttaaagcttaaacattcaaatgtgagcgtctcgttatattacaggactcaatcagacatccgagtaaaaagttattgttctttgaattggctcagaaggtcaacattcaattttgagcgtctcgatatattacgggactcaatcagacatccgagtaaaaagttattgtcgtttgaattggctcaaagcttcaacattcatattcgagcgtctcaatatattacgggactcaatcagaacatcgagtaaaaagttattgtcgttgaattggctcaaaagttcaacattc

SEQ ID NO: 14688 - DNA, 450 bp, Glycine max
  unsure (1)..(450): unsure at all n locations
tgaagctttgatgtattaatataacggggnattgtgttaattatttatatatgcataccaatatttacaatacatctgttttcttataaatttaattaatgtttttttatgcactgatatgcacataatatttatctagggatatatatatatatatatataaagnattacatgtgattgtacactgatatgttagatctatttgtttataagttttgaagttagatgtgttatgttattattattatattttttctctaattgttaagtatactttgtaattagttaaattgtgaaatgttaaattgtagacatgagatatggctgtgaatgagtgtgtgattaatacttgtagtgatattacttatcttgtgaggtatgagttatacaataacccgaccagctgttacctcgagaaatattttatgcacagttgtaaaggaaaaatgt

SEQ ID NO: 14689 - DNA, 416 bp, Glycine max
  unsure (1)..(416): unsure at all n locations
agcttgttccattataaatctgggtgggatattatcatctggctggtgcgagtttttcanaaatcgatgttctagtaaaactgcagctgttggccgctctgctggatttcttttaaagcagcacctcaagaaatctttaccctcaaatgaaagtgtttcaggtataggaggggtctccttcataaccttaaacagagctgcagcctgcataattagaaaagaagtttatttagcaagataaaaaaaaaggacccgtatacagatagcatctctgcctaatccacaagttgcaaacagaaaaaagttggctaaaagatgccttagctggttgttaaattgaggtttgccaaaataagtaaaaagttgacacattatcctacattaccaaacttcagaatctcatattctcatagaag

SEQ ID NO: 14690 - DNA, 368 bp, Glycine max
  unsure (1)..(368): unsure at all n locations
agcttgccttgccccttgatatatttgagggactcatgtgtcactatgaatgacaaattccttgggataaaggtagtgttgccatgttttcaaagcccgtactaaggcatacaactccttatcataagttgaatagttaagggtaggaccacttaacttttcactaaaataagcaattggatggccttcttgcatcaacacagccccaatcccaacatttgaagcatcacactcaatttcaaaagatttttgaaagtttggcaacgcaagtatggggacattagttagcttttgcttaagaacattgaaagcttcttcttgtttctctccccatttgaaaccaacattnttcttgagcacttcattga

SEQ ID NO: 14691 - DNA, 466 bp, Glycine max
tagagtgcacctgcatgcatgcaagctgacaccaagtaatttctttcttgttttatgtccaaagtatatttacgttggcataagaatatcccacttggattccttgcaacttctacaccaagaaaatacttcagggtccccaaatctttcatgtgaaagcacttgctgagatatactttaaatttttggattgtagtggagtcattcccacacacgatcaaatcatccacatacaccaaaactaccagttgcactccatgattaagaagagtaaagagcgagtggtcagaggatgattgttgaaacccaaaattcgtgaaggcaaatgatagtttggcaaaccaacatcgaggggcttgcttcaagccatacaatgatttgcgcaacttgcaaactaatcctggttgagatgtgcgaaagcctgggggcaacttcatgtaaacatcttcatgaagatcaccatgga

SEQ ID NO: 14692 - DNA, 446 bp, Glycine max
  unsure (1)..(446): unsure at all n locations
agctnggtcttaattatataaagatagatgtttgtccaaaacattgcatgttgtatttgggagatgatgaaaaaagtttggatgcttgtaagcattgtggtacatctagatggaaacccaacaagaagaagaaaatagctgcaaaggttttacgttactttccatcgaaaccaagattgcaaagattgttcacatgtcgtaagactgcaaaagatatgagatggcatgttttggaagacaataaagatgggttgttaaggcatccaagagatggagaggcatggaagacatttgatttaatccatcctgagttttcttcagatcctcgaaatgttcgcttaggccttgctactgatggttttaatcctgctaggaccttgagttctacctatagcatctggccagttttcttaattccatataatcttccaccttggatatgtatg

SEQ ID NO: 14693 - DNA, 442 bp, Glycine max
  unsure (1)..(442): unsure at all n locations
agcttattatgctagtttattcacaactcattatattctatatttatgtaattatagcagaaactaagacttgagtgcgacaaaaaaaggacaaaaaaggataaaggtttactggttttttttttaaaaatactattataattataattctgagtggtgttttattattttatatataaaaaagncgaattgtcattggttatactactatttagtaaggttttacaagaaaaggaagggggagggggaattttcattttaataaacatttgatatatgattatataaaaaaatacaaatgttattttaatacaaatttaatgctctatattttgttttatatatatcatataatcctatgactctataaacaaatatataaaatatgcttcattcctttcccttataagaacataacttctaaatatatcttttttattta

SEQ ID NO: 14694 - DNA, 439 bp, Glycine max
  unsure (1)..(439): unsure at all n locations
agctngcaatgacgcatctacttcttcattttattatatacaaagatgagtgtctcttaatcttaaatattctgaatttgtttattagttagaaatacttcaatttgaacaaaatgaacattgtctcttgaattatatgaagggtctcgctcggaatctttctgagttcttgattttatgcggcataaataaaaactaatatgatgtgctttacgggcaagggaaaaaaaggaaaagtttttaaatataaattactttattttctaaaatttaaatatagtgattatataatctttttatattgttatctaatcatagatttattaaaatatgtccaatttctcttctctatattattattttgtgatactttcattctaatatattcttttcgtgtctcaattttcatctccctcttctattctttctttctttatct

SEQ ID NO: 14695 - DNA, 263 bp, Glycine max
  unsure (1)..(263): unsure at all n locations
atctccaccggacaagcgctgatagagcgtaacaaacagcaccaagtaatgcaccatccccagcgaanacaagcatactgcactctctttccaacccatgttcgccgcagcttgtgccccgaccaagttccctatcaccgacatctggctggtcggattcgccacccgtcgacaaaacctcttncccttcgtgaaccactgcccgtagatcttcacgtccagcaccaccaccggcaccgcgaacacccaccacagaaccaagt

SEQ ID NO: 14696 - DNA, 271 bp, Glycine max
  unsure (1)..(271): unsure at all n locations
taacttctctagtgttgaaagaaacctctgtctcacactatcacaacaaaataatttacatttaagcacaagaagagaatttggaatggcacatagtatctntggccagactcgtagtaccttgggtgtaatctatagaaataaaacaacataagtcaggggatacacaacttaacctttacaatgttattgataatcacaataaaattacatgatatatttaagagtattactaccttagcaaaagtgtttaaactaccaatgtaaagcc

SEQ ID NO: 14697 - DNA, 256 bp, Glycine max
  unsure (1)..(256): unsure at all n locations
gtcatatatactgactcctcaagaatcccatttagaaaggcattgttcatatccagctgatacaactcccaccaatgtgagagaagcagggtgagattagtgcaaattgtcacaagcttgaccacggnggataatgtctcatgaaaatcgaaaccatggacttgatggaaacccttagctaacaaccttgctttgaactttgtgataaagccatcaacattttcctagactctgaaaacacacttacatctaatag

SEQ ID NO: 14698 - DNA, 342 bp, Glycine max
  unsure (1)..(342): unsure at all n locations
taccctaatgtctaaattntatgggattaagatggtcattgaccaatccctattntatgatttaacacaattgcctagtgaatgtgtgccttttgagggtgcactgatngatgattgaaaattcaatatttctgtgcatgatgcccgccggttggtttgcaccaaccaagcggatatgaccggaaggattcttgccatatcattggctttngaaagccgcatcctacattaccttattgttcacatattgcttcctagatcttcagatcttgctcaggtttctgaagaagatctcattgtcatgtgggcctctcataaacgttacaaattgattgggcacac

SEQ ID NO: 14699 - DNA, 349 bp, Glycine max
  unsure (1)..(349): unsure at all n locations
gcatgcaagcttttgcaagctgagatcatttattctatctcctatatccaatgggtgagtcgcgtgcaggtagtcccgaanaagactggcctcacagtgatcagaaatgagaaggaggagctgattcctactcgggtgcagaacagttggagagtctgcattgactataggaggctgaaccaggttaccaaaaaggaccattttcccctgccattcattgaccagatgcttgaacgcctggcaggtaaatcccactactgtttccttgatggtttttctggatatatgcaaattactattgctcctgaggatcaggaaaagaccacattcacctgccccttcgacactt

SEQ ID NO: 14700 - DNA, 305 bp, Glycine max
cctctaatgtgtcatctctcaatagattatccgatgattcgctgcggatatgagcattccaagatgttatatggcgttgatatgcaccattactgtggttcttctcttgacgcggtaagaaccgggcaatttcacctgctaaactcttcatagaatccacaacatcctggatgggtaattcaccgagcctttccaaccagatttcacaggtggcatatattggaggaccatacattcttaggagtggacgttggggtctcttattttgcctggcttttgttaagagaacacatttggcagccatc

SEQ ID NO: 14701 - DNA, 386 bp, Glycine max
  unsure (1)..(386): unsure at all n locations
caaacttgatgcattggttaacttggtaacccagctggtcttgaatcanaaatctgtacctgtcgcaagggtttgtggtttgtgctcctctgctgaccaccatacagacctttgcccttccatgcagcaacctggagcaattgaacagcctgaagcttatgctgtaaatatttacaatagacctcctcaacctcagcagcaaaattaaccacagcagaacaattatgaccttctcagcaacagatacaaccctggatggaggaatcaccctaatcttagatggtccagcccttagcaacaacaacagcagcctgctccttccttacaaaatgctgctggcccaagcagaccatacattcctccaccaatccaacaacaacaacaac

SEQ ID NO: 14702 - DNA, 272 bp, Glycine max
  unsure (1)..(272): unsure at all n locations
ctcgggaaatctcttcagctccacctatgtngcttataagcaccaattcgaaatagtctcttccattgatggtaaatctgatgcctccacttcttatgcacccaactctgcataatataaatgttactagttagcccaattttttttaaaccacatgtattctttactagaaacaaaataaaaggttaagacatatggcaattgacataacataaagatacttacttcctgtacaaaattggtacaatgccagctttgtacttggctattgt

SEQ ID NO: 14703 - DNA, 275 bp, Glycine max
  unsure (1)..(275): unsure at all n locations
gtacaagtccttataaaaattggtgacaagactntcaacggctcgagtatcgaagatccaattaccattctcatctttcaacatatcatgtttattccgcttccgtctgatcgctgtgataccatganaatacttggtattgtggtcccccatatacaaccatttacctgtggacttttgagaccaatgaagttcttcttcagccaagacttgttcatattctatccaagtcttcttatattctgaagctgcctacaaatcagacatgccactac

SEQ ID NO: 14704 - DNA, 335 bp, Glycine max
  unsure (1)..(335): unsure at all n locations
ccattgctgttctgaatgatctaagtccatggtattcttggaacaaagcgntctctctgaaaccaggagctccttttccccatgttcccgcctctgagtgttccttcaagtactttttcagcatatcagatgaaacctgaagaatacaattaatataagaagattaataagatgtacactataaacaattcttctactcttctactatatataagttagtatgttaattacttacttgattttctgccaatcccatttgtataactncggaggagtttgttaattcatcataagggttctcgtcatangctctccacccagcaaaatagggggag

SEQ ID NO: 14705 - DNA, 342 bp, Glycine max
  unsure (1)..(342): unsure at all n locations
gtccnctaatctctctctcatgtcggcgtccatcanaatggtgctcgaattgatgtccctgtgaataacaacctggtcccaaccgtggtgaaggtagttaagcccctctgccacgtcgacaaggatacgacggcgtngctcccaccccagaagcttctccgacttatcgaanacccacttgttgagactcccgttgggcatgtaatcataaaccaacataagctcgtcccctttctgcaccaccctctcatttgaaccaagttcttgtgctgaagcctccccatgcttgaaatctccgccatgaattcccgcaacccttgcttcgaatcgtggttcacgcac

SEQ ID NO: 14706 - DNA, 418 bp, Glycine max
tttgagcgcgtcgtaatattacgggactcaatcttacatccgagtaaaacgttattgttgtttgaatggttcagagcttcaacattcaatttcgagcgtctcgatatatgacaggactcaatcagacatccgagtaaaaagttattgtcgtttgaattggctcagagcttcaacattcaatttcgagcgtctcgatatatgacaggactcaatcacacatccgagaaaacaatattggcgtttgaatttgctcagaggttcaacattcaattttgagcgtctcgttatattaacggactcaatgagacatccgagtaaaaagatattgtcgcctgaattggctcagagcttcaacattcatattcgagcgtctcgatatatgacgggactcaatcagacatccgagtaaaaagttatt

SEQ ID NO: 14707 - DNA, 376 bp, Glycine max
  unsure (1)..(376): unsure at all n locations
atatatcgagacgctcngaaatgaatgttgaagctctgaaccaactcacacgacaataactttttactcggatgtctgattgaggcccgtaatatatcgagacgnctcgaaatgaatgttgaagctctgagccaattcaaacgacaataactttntactcggatgtctgattgaggcccgtaatatatcgagacgctcgaaattgaatgtggaagctctgagccaattcaaacgacaataactttttactcggatgtctgaatgacgcccgtaatatatcgagacgctcgaaatngaatgtngaagctctgagccaattcaaacgacaataactctctactcggatgtctgattgaggcccgtaatatatcgagac

SEQ ID NO: 14708 - DNA, 476 bp, Glycine max
  unsure (1)..(476): unsure at all n locations
agctnnggcaaatntcgaagggggtaatttgtgaaatttatagagccaacaagaaaaagcatcagctgcgaggacatgatctaaactctcccctaattggtggctntaacataaatgaaaatgagacgtgttcattaaacaattttgttgattagaaaattctaacttgtaactgacattcatggttgagtgagaccaacctatctcaaatattaatatattatttaaactagttttgtatcgtgtaacgtacagtttttttaaaatattatataagaattatttatgatatnagattgatagataaaaaataatataatgttatattggtaaaatatgaccaacatatntaaaaaaaacatagcaagtttaatttttcanaanagtatctaatagatgaacaatcactaaaaaattgaagaccattgtctcacttcgatataaaataattatataagaattaatatatttatatt

SEQ ID NO: 14709 - DNA, 300 bp, Glycine max
  unsure (1)..(300): unsure at all n locations
gggccatgcaagttgaaagccttggaggaaagaggtatgcctatgttgttgcggatgatntctccagaattacctgcgtaaactttatcagagagaaatcagacacctttgaagtattcaaagagttgagtctaagacttcaaagagagaaagactgtgtcatcaagagaatcatgagtgacccatggcagagaatttgaaaacagcaggttcactgaattctgcacatctgaaggcatcactcatgagttctctgcagccattacaccacaacagaatgggatagttgagaggaaaaac

SEQ ID NO: 14710 - DNA, 407 bp, Glycine max
  unsure (1)..(407): unsure at all n locations
gaccttaagaggggtgcaagtggcaggttcttgaacactgctgcttatggccactttggaagagatgacccagacttcacatgggaggtggtcaagcctctaaagtgggaataatgccatgaataaagctgattgccaagaaactatgtgtgatcttatatgctntcatacctaagatccgngatatgatttgccttagcttttgtatctttataaataaataaaacatatatatgtcgagttgagtatatgaacatacaaaggaagctgcatagcagcatcaatgtactattggaagttaatgtttgagatatatccgctaccatcgctatccattatccattatgtgtcctctcaatngctgagagacttagagaatcttgagtctcctcattaactaattggac

SEQ ID NO: 14711 - DNA, 364 bp, Glycine max
  unsure (1)..(364): unsure at all n locations
agctgtggttctctgagtatataggatggaccacttccaacaaaacaattgatgcaatcctacctcccaagatcatcggatagaagactccaagaagattgtgccaaagatgcaagagaaggccctagggttctcatgagccttagggtagaattctaagcacatgggccaaggttgggtccaatttatcttgtacatattagactaggatgtcattatatttggtccttgtatatagggctccatattgtaggtagggtatcctagaaatataggatatctcagcccctgtattttacggcacctagactaggtttcgtattatgggtagtnttgtaattcacatgcactaagcggatatttg

SEQ ID NO: 14712 - DNA, 416 bp, Glycine max
  unsure (1)..(416): unsure at all n locations
atcatctgcaggcatgctgccgcatgcaagctntgatgcaacatatggagaggttaatgaaacttctagatgatgcgctccatgagaggttggatcaaatggagaatagagatcataatgaagaagaaaggaggagaagagggaatgatggtgttcctagacaaaaccgaattgatggtattaaactcaacattcctccctttaaaagaaagaatgatccggaggcctacttgcagtgggagatgaaaatagagcatggtttctcatgcaacaactatgaggaggaccaaaaggtgaagctggctgccacggagttttccgactatgctcttgtgtggtggaacaagctacaaaaggagagagcaagaaatgaagagccaatggttgatacatggacggagatgaaaaagatcatg

SEQ ID NO: 14713 - DNA, 394 bp, Glycine max
  unsure (1)..(394): unsure at all n locations
agctntctattcanacctatatatccaattatgctctttaatttatgaagnttatgggattaagatggtcattgaccaatccctattctatgatttaacccaattgccaagtgaagatgtaccatttgaaggtacattgattgatgattggaagtttgatttttctgtgcatgatgcccgccggttggtttgcaccaaccaagcggatatgaccggaatgcttcttgcccgctcattggctttngaaagctgcatacttcattatgtaattgttcgcatcttgctttcaagatcttcaaaccttgcacaggtttctgaagaagatcttattgttatgtgggcttatcataaacgcctacaaattgagtggcacatcttgtagatatcgatgcat

SEQ ID NO: 14714 - DNA, 370 bp, Glycine max
  unsure (1)..(370): unsure at all n locations
tatctcttctaacataatctttctttctcgacccatactgaccagtcatctcacaaccaattatcacaaatgaagtccttcttctcataccagtgtttgtgtctgacctcataatcaccgccactgcaaaacatcatctcaggtagcaaacatcttgatgcaatcctccctaggaagggaccagtcactagagctatgagcacganggcttcaagaagatngtgctagagtagctgaagaaggccctanggttctcatgaacattanggtagatttctaagcccatgggccaagggtgggtccaattatctntgtacatattagactangatgtcattatatntggtccttgtatttagggctccataat

SEQ ID NO: 14715 - DNA, 455 bp, Glycine max
  unsure (1)..(455): unsure at all n locations
atcctatctccgacagccaatgggtgagtcccgtctcatgtagtcccgaaaagactggcctcacagtgatcagaaatgagaaggaggagctgattcctactcgggtgcagaacagttggagagtctgcattgactataggaggctgaaccaggttaccaaaaaggaccattttcccctgccattcattgaccagatgcttgaacgcctggcaggtaaatcccactactgtttcttgatggttctctggtatatgcaaatactatgctctgggacaggaaagaccacattcacctgcccttggactttgctatanaggatgctttcggctgtcaatgccctggaccttcaacgggctgatagattttagtgcttttagaaatgcataagtgtatggtgatcatgattggtctcttgaggtgttgaagttgaaagttgataatgctgaactactgtt

SEQ ID NO: 14716 - DNA, 448 bp, Glycine max
  unsure (1)..(448): unsure at all n locations
agcttatgctgcatatatttacaatagacctcctcatcctcatcagcaaaatcaaccacagcagaacaattatgacctttccagcaacagatacaaccctggatggaggaatcaccctaacctcagatggtccagccctcagcaacaacaatagcagcctgctccttccttccaaaatgctggtggcccaagcagaccatacattcctncaccaatccaacaacagcaacaaccccagaaacagccaacagttgaggcccctccacaaccttccctcgaagaactngtgaggcanatgactatgcagaacatgcagtttcagcaagagaccagagcctncattcagagcttaaccaatcagatgggacaattagctacccaatggaatcaacaacagtcccagaattctgacaagctgccttctcatgctggtcaaaatcccaaaaat

SEQ ID NO: 14717 - DNA, 320 bp, Glycine max
  unsure (1)..(320): unsure at all n locations
cccaaacccaatcacctggntcaagcacgactttctttctacttttgtttgcttgccttgcataactcgcatttttcttttcaatttgagccttcacttgctcatgcagcttcttcacatactcagctntagcctgtgcgtccttatgcttaaacatagtaatgttaggcataggcaacaaatcaagaggagtcanaggattaaatccatacactatctcaaatggtgaacaattagttgtgctatggacagtccgattataagcaaactcaacatgaggcaaacatgcttcccaagatttaagatttttctttaaaaca

SEQ ID NO: 14718 - DNA, 472 bp, Glycine max
  unsure (1)..(472): unsure at all n locations
agctntacagcaaatgccactctactccaaattcttgaaggatatgttaacaaggaaacataagtacattcaccaggaaaacattgttgtggaaggaaattgtagcactgtgattcaaaagatccttccagctaagcataaagaccctgngagtgcaactattccttgtttaattggagaagtcattgtgggaaaggctcttattgacttaggagccagtataaatttaatgccactctccatgtgtagaaggttaggagagttggagataatgcccactaaaatgactntacaactggctgactgctctattaccagaccatatggagtaattaaagatgtgctggtcagagtgaaacatnttatcttcccgggagacttaatggtaatggatatctgtgaagatactgacattcctataatattgggaaggccattcatgttaactgctagnttgcatagtgacatgggt

SEQ ID NO: 14719 - DNA, 400 bp, Glycine max
  unsure (1)..(400): unsure at all n locations
agctngaaggcanactggatgcattggttaacctgttaacccagctggccttgaatcagaaatctgtacttgtcacaagggtttgtggtttgtgctcctctgctgaccaccatacagacctttgcccttccatgcagcaacctggagcaattgagcagccgaaagcttatgctgcttatatttacaataaaaactcctcacctcagccagcaaatcaaccacagcagaacaattatgacctcttcagcaacagatataaccctgtatggaggaatcaccctaacctcagatggtccagccctcagcaacaacaacagcagcctgctccttccttcgaaaatgctggtggcccaagcagaccatacattcctncaccaatccaacaacagcaacaacccca

SEQ ID NO: 14720 - DNA, 290 bp, Glycine max
cattggattgacaaacatgaatgagagagttctcggagcgacgcatagaggaactgacatagagctcacgataggtgaagggagtttattataatttacgggctttgataccatagttagtgatgtagctccatgtggagcttgtaggccttgaatcttcttcatcaatagagtcctttgcttcttgaaggtcaatggcagcggaatggagacggaaaaagaccattggagatgccacttcaagaaaatatgagtaacaacaagctcccaccataagaagctatgataca

SEQ ID NO: 14721 - DNA, 463 bp, Glycine max
  unsure (1)..(463): unsure at all n locations
gcacattgttctcagttataccacatgcttatactatatgtatttctctatatatnntccaactggaccaatgagnttccattnttntctttatcttcatattaataatttgcaggtggagaagattgaggacagtattaaattcataaattctagacctaaacctcttgccctttatgttttcaccanaaaccaaacactgcagagaagaatgatatctganacatcatctggcagtgtgactatcaacgacgcaattctacaagtaataccaataccctatcaagcattaatattccactcttaatctaatctttttgcatattttatttattaattcctcagacttagtgcataatatttgtgttaaatntgtgcagtatgcagttgatactgttccatttggaggaagtggggaaagtgggtttggcatgtaccatgggaaattctcctttgacacatt

SEQ ID NO: 14722 - DNA, 460 bp, Glycine max
  unsure (1)..(460): unsure at all n locations
ttctctgatctatgacttcttatgggggngagcttgttcttgactcatcttctccttgaagtggcatctccaatcacctttcctcattctgcattctgttggcattgattttcaagaagcaaatgactttattgatgaacaagatctaaggcctacaagctctacgtggagctacatcatgtggtatcagagcattttcatctaggtgatgttctgttgcttcctttatcttttgtttagtcaattcaatttaattccatgttcttcattgtcttctccatgtatctcctccattgtcttgtggtttggtgctatttanagtagattcaaaaaaataaacctattaaatcttaaatctgcacttgntcttgcatttctatgggtcaaaatttatagatctactcttgaatcatgtttttgtggttgatttaggttctatcatctttcagtcataatcttc

SEQ ID NO: 14723 - DNA, 311 bp, Glycine max
  unsure (1)..(311): unsure at all n locations
ctaccttttgcctttntatgtttgataacataagggaattgctctagaaattccacccacttcacatgccttttgttaagcttgccttgccccttgatatatttgagggactcatggtcgctatgaatgacaaattccttgggataaaggtagtggtgccatgttttcaaagcccgtactaaggcatacaactccttatcataagttgaatagttaagggtaggaccacttaacttttcactaaaataagcaattggatggtcttcttgcaacaacacagccccaatcccgacatttgaagcatcacactt

SEQ ID NO: 14724 - DNA, 347 bp, Glycine max
aatctgcacctgttgcaatagtctgtggtctatgttcttttgcagatcaccatacagaatcttgttcatctgtgcagcaatctggagtccatgagcaacctgaagcttatgctgcaaacatttataatagaccccctcagcagcataaccaacaacagcagaataattatgatctttcaagcaacacatacaatccagcttggagaaatcatccaaatctgagatggacaagtcctccacaacaacaacagcatgttccttcttttcagaatgctattggtccaagcaagctgtatgttcctcctccaatacaacaacaacagtcacaacaaagacaacaagcaact

SEQ ID NO: 14725 - DNA, 391 bp, Glycine max
cttgtgagaactcacatcggatcaaacgactaatcatatcagtctgtttatgaggaacctgatgaagacgggttgttggtgtttccctctcgcgatcactcctaactgtagctgcttcagctttgaggaccaatataacagacttatgccctcttgtcttgccgtattcggagcagctgcgctatggatgatcagtgatttgcaggaatatcttggcaagggtgaacaaggaaatgtatgtgccgaatttcaggaaggcttttgagcatttctgcatagatgccggtggtaagtcagttgtcgacgccatagaggaaagtctcaggctgcagaagaaagacggcctccaggatggcactatacagatttggcaatacttcatcttcttctg

SEQ ID NO: 14726 - DNA, 396 bp, Glycine max
  unsure (1)..(396): unsure at all n locations
ntgagcaaattcaaacgacaataactnttgactcggatgtcccattgtgtcccgtaggatatcgagaggctcgtaattganaacggaagctcggataaaaatcaaacgacaataagtcttaactcagatgtcctattgatccctgtaatatatcgagacactcgaaattgaaaacggaaggtctaagaaaagtcaaacgacaataacttttaactcggatgtctgattgagtcccgtaatatatcgagacgctcgtaattgaaaactgaagctctgagcaaattcaaacgacaataacttttgaatcggatgttcgattgtgtctcatagaatatcgagacactcgtaattgaaaacggaagttctgagataaatcanacgacaataagttttaac

SEQ ID NO: 14727 - DNA, 375 bp, Glycine max
  unsure (1)..(375): unsure at all n locations
cattcctctcttcccttanacttcttttatttattgctatntatctttcgctctatagaagtttattttgaatagtcttttgagtaattcatgttaagggtgcattgctaatccgaaaagagagagtgaaagtttaattggggaatagtctttgcatcttaattcaaccccccccttcttaagataactgaggccatatgtccaacatcctattcttgacaactcgcttctcgaagaagacaaactttccggaatgataaaatgaggccacatgaacgtctatatttttacttgaaaacacagtcaatcaaatgccctttttctttttgaacccctttgttttattatggaacttaatttgtttgaactttaccc

SEQ ID NO: 14728 - DNA, 434 bp, Glycine max
  unsure (1)..(434): unsure at all n locations
cttatgacacagtctcatggtctnttctggactacatgctgcatagatngggcttttgtcataaatggagaaagtggatttcagcttgtcttcactcagcaacaatttcgatccttattaatggcagccctacaaagggagttaccccttctagaggcttgagacaaggggaccccctagctcccttactctntaacatagttggggaaggcatcacaggccttatgagggaagcagtccggaagaatctctatagcagctacaaggttggtatgaaaaatgagcccacaaacattctgcagtatgcagatgatactgttttngtgggtgaggcttcatgggacaatgtcttggtgttgaaggctatgctaagaggctatgagctggtctcgggcttgaagaataactatgctaagaagtcaattggtggtata

SEQ ID NO: 14729 - DNA, 439 bp, Glycine max
  unsure (1)..(439): unsure at all n locations
cttgactgcgtgcatgcacgcttcctttacattctaaggactcttcatttccaagatggcttggcatttatccagttggtgtgtatcccttgatgagtcagcatgaaccataaaacttttctctttctaccccgaagacacacttttcagggttcaacctcatgttatactttctgagctggcagaagaccttntgtaaatctgtgatgtgggttgctaaatcattagtctttgacctccatgtcatccacatagacttctaagtttcattcaagctaacactngaacactntgtccatcatatgctggtaagtagctccggcatttttaagttcgaatggcataaatntgtagtagtagtttgtggattcgataataaatgttgtcttcttctcattgatagcgtccatctttatctaattgtagctggaatatgcat

SEQ ID NO: 14730 - DNA, 441 bp, Glycine max
  unsure (1)..(441): unsure at all n locations
atgctttaaatgaacattcaggggaaacgtttggtcaaccgaaactggngaataaatcactcatggtgtataaaaactcacacaggtaagtggtttacccttaatctaaaccatagctgcaccatgactttattntgcacatgatttcctatcgaaccaaaagattacacgcgcgatcacggatcaataggattttctcaagggtgatgtttttggagaggaagctgggtgttttggtcttttcctctttgtttacgtggggcgggacattgccagtcgagagcgaccttgaatggcaatcccaaaggaagaaccacttcaaaatgggttttccctttgccggcggtcatttaccacgccgaanatttatctggtccgaagatcttctgttctctttcctgggttcctttattgatcgagaattattctgttttcctccga

SEQ ID NO: 14731 - DNA, 424 bp, Glycine max
  unsure (1)..(424): unsure at all n locations
tcctttagtagggaatctatccttcctaatatttatccaaacccagtcaatcttattaagaactagctcttttcttcctctattgcctttagttgaatacacctttgtttggttctctatttggttcttaaccctctcatgcaacttctttacaaattctgacctagattccacttctttatgtataaaagaagtgtccagtgggaggtgaatgaggtctaacagtgttaggggattgaacccatagacaacctcaaaaggggactgcttggtggttctatgaacccccctggtgtaggcaaattctacatgaggaagatactcatcccaagacttatggttgcctttcagaagagcccttanaagggtggataaagacctattcactacctctgttngcccatcnagttgtggatgacaagtg

SEQ ID NO: 14732 - DNA, 334 bp, Glycine max
  unsure (1)..(334): unsure at all n locations
tgaattagaaatctgcacctgtcgcaagactctgtggtttatgctcctctggcgaccactatacagacctttgcccttatgtgtagcaatctggagcaattgaacagtctgaagcatatgctgcgaacatctacaatagacctnctcaagctcagcagccaaatcagccacaacagaacaattatgacctcttcagcaacaggtacaatctcgggtggaggaatcatcccaaccttagatggtcgagtgctccacaacaacagtagctacaacaacaacagccttatttttagaatgctattggcccaagcagaccatacgttcctgcactaat

SEQ ID NO: 14733 - DNA, 422 bp, Glycine max
  unsure (1)..(422): unsure at all n locations
tccgttntcaattgcaacgtctcgatatattacaggtctcttctngtcatctgtgcataaagttattgtcaattcaattttctccgaacttcggatctaaatgttgagcgtctcgatatattacgggactcaatcagacatccgagtgaaatgttattgtcgtttgaatttgatacgagcttccgttctaatattggagcatctctcgataaattacgacattctgtcaggcatccgagtaaaaagttattgtcgtttgaatcttctaagagtttccgctttcaatttggagcgtctcgatatattacgggactcaaccggacatccgtgtataaagatattgtcatttcaatttgctcagagcttctagtctcaattgtgagcgtctcgatatatcacccgattcaatcggacatccgagt

SEQ ID NO: 14734 - DNA, 453 bp, Glycine max
  unsure (1)..(453): unsure at all n locations
atgatgatataattaaactntatcaataatatatatataacaatgataacaacatttgattattcaagttaattaattgtatctataacctcttctaaacaacctaaaaatttatttattttattaattaaagttaaaaatatcaatttaagttatttaattaaaggaccacagctaggcgtgattttaaaaagaaaaaaaatgtatagatgttttaggtcatgtatttatatattagcatttgtgtaatcatttttaagtacaaaaataatttttacaaaaataaatatttttgtagttaaattgtcaattcataattaaggacaatataattgaaaaattatatacctaaaatcaatttaaaaaatgtatgaattattccgacaagaaaatattcaaaatattttcacttctaaaggtgagtacatatacactatattctaaatatttcac

SEQ ID NO: 14735 - DNA, 479 bp, Glycine max
  unsure (1)..(479): unsure at all n locations
gagatcatccnctcgacaacattattggtgatatctttattgngtaacaactagacattctcttagagatttatgcaacaatatggctcctgtatctatgattgaacctaanaatataaaagaagccatagtagatgataactggatcattgccatgcaagaagaactaaaccaatttgaaagaaacaatgtgtnggaaatagtagaaaaacctgaaaattatcctgttatagggacaaaatgggtttttagaaataaattagatgaacatggtataattattagaaataaagccaggttagcagcaaaagggtataatcaagaagaaggaatagactatgaagaaacatatgctcctgttgcaagattagaagccattagaatggctttggcatatgcatccataatggattntaaactntatcaaatggatgttacgagtgcctttctaaatggcttaattcaagaagaggtatatg

SEQ ID NO: 14736 - DNA, 492 bp, Glycine max
  unsure (1)..(492): unsure at all n locations
atgagtgcatgtccaatggaaattgagttatatctttttctttctttncatttgctagatctttcgtgtggtagaaaatcaattgactagaatacaagaatcaaaataacagctagtgtagctagaggcttagagtatttgcatagtaaaatgaaacctcttatcatatatgaagacctgaaatgctccaatatcctgttaggtgaaggatatcattccaagttatctgattttggcttggcaaaagtaggatcaagtggtttgtgaaatagaaaggataacatactaacatgggagcaatttaggataacacatgttgttctaccaattctgcggagaaaataatggaatttttttttgctcatctaaagtaagttgtatatatataaatgagtaccagaggtactgtagatacataatgggagtggatagcagctggtctgaagccaagatcatataataaaaccaagtgacccgaagaacatatcatta

SEQ ID NO: 14737 - DNA, 453 bp, Glycine max
  unsure (1)..(453): unsure at all n locations
ctcagcttttaatagtccgcttgcttgccttcntattcttttaacataaacattangcataggcaaaagatcaagaggagttagtgggttaaaaccataaacaacttcaaaaggagaacaattagtggtgctatgaacaactctattgtaagcaaattcaacatggggtaaacaagcttcccaagtttttaagttcttcctcaaaactttcctaagcaaagttcccaaagtcctattaacaacttccgtttgcccatcggtttgtgggtgacaagtggttgaaaataacaatttagtgcctaacttgctcctcanagtcctccaaaaatggcttaggaacttagagtccctatcactaacaatgctccttggcnaccatggagtctcacaatctcttgaaaacaaatcgtcacatgggaacatcataactttttcatggataaatgaccattt

SEQ ID NO: 14738 - DNA, 440 bp, Glycine max
  unsure (1)..(440): unsure at all n locations
agcttcccttgataaggaagactcttatatatgcaattaatctagttgggtttatctatgcccattctagtaccttaagtttgttgagaaattttacaaacaagagggaattggtgagacatgctattactagatttgccacttcttatctaaccttggaaaggcttcacaaagagaaagccaatattagaaagatgtttacttctgatgaatggaccttgaacaagctatctaaggagcctaagggaaaagaagctgcaaaggtagtgctcatngccttcttttggaatagtgtggtttacactcttaaagtcatggctccacttgtgaaagtgcttcgtcttgtggatggtgaaaggaaaccagccatgggctatatttatgaagcaatggacaaggcaaaagaaacaattatgaagtctttcaacaacaatgaaagc

SEQ ID NO: 14739 - DNA, 216 bp, Glycine max
cttacctaagcatctgttctagctgttcctgacacttctaagactcctgagccacgatgtcaagccgctggagcgggagctggagctgtattgttacaaggaggtcaccttattgcttattctagagagaaacttcttagtgccaccctcaactaccccacctatgatgaagagctttatgccttaataagagccctcctaacttgggaacattac

SEQ ID NO: 14740 - DNA, 346 bp, Glycine max
  unsure (1)..(346): unsure at all n locations
taagctcctagctatcctcatagtatgcctttatgagagtagtatatgaagttctagtaggtttacatccgtttgccaccatatcaaccagataatctatggcaagactggtttgctgagctttacatagtcccatcattattgagttataaatgaatgcattgggtttaataccaaaccctttaagaatggaaaatttgattgttatgaactttcttcacactangcccccactactgaagtgcaagttattagatcaggcttaagacccttataacacatctcttccaagagctctacagccagttcggcttttcccacctctaagagcccattaattattata

SEQ ID NO: 14741 - DNA, 420 bp, Glycine max
acttgatatggtctcaatgatagacacgaacatgtataaaattttatgtcttacatgtttttcttattattctaccttaaactggcctaggtttgaatttaatttctttttggaacatcatgtctattttgaaaatatatattcattcgttaaaagtgtcttctgtctgaaaaaattatgtcttatatagtttttcttcaaacaataactttgttttcttcataaaagtctcgagagatttctaaacatataattcaatccttcttgtgatattcgcctgtacaggtggtaagcaacacataacacagttatattaaacatattatgaatacaaatctataatatactatagtcatcacaatatgaaaatcatctaattatgaatacaaatgtatactatattatagtaatcacaataac

SEQ ID NO: 14742 - DNA, 316 bp, Glycine max
  unsure (1)..(316): unsure at all n locations
catgggcagaaatatgtcagcatttatagggtaaattgttcctcacattcctgagaaatgtaaggacccaggtactttctgtataccttgcattattgggaacagtaaatttgagaatgccatgctagatctaggagcatcagttagtgtcatgcctctggtcattttcaattcttaatctcttgacctttacaatctacagatgtggtgattcatttggcanatagaagtgttgcttaccccacaggtttcatagaggatgtgntggttcaggttggtgaacttattnttcctggttgattttatgttcttaata

SEQ ID NO: 14743 - DNA, 426 bp, Glycine max
cttgtgtgtaatcgattaccagacatgaaaattcaaatttcaaatctgaagagtcacaactcttcagaaactaactgtgtaatcgattacaacaattatgtaatcaattaccagtaaggaattttcgaaaataactcccaagagtcacaactgttcaagaagtttttgaatggctatcaaaggtctataaataggtgacttgggacatgaaattttgaaaaagagaattttcctgaacaaattgtcttatcctctcaataccaaattgtcttataactctcaaaaagaattccttggtcaaaacacttgcaaatttaataaggaatcttgagtgatcttcaattgtaatatttttctcttatagagagaattcttcttcttcttcttattcaaagagattgattaagggatcgagagtctctttgt

SEQ ID NO: 14744 - DNA, 401 bp, Glycine max
  unsure (1)..(401): unsure at all n locations
actaagcttccataataatgctaccactatttggggcttgctattccatgatacatgttcagaccctangaatngacatgtaccactagtactcttcctatctatttntgatccagcaaaatctgaatcagagtatcctactaggttgcataaagaattcttaggataccataatccttaactaaatgttcctaataaatatcttataattctttttactgccattaaatgtgaaaactttggatctgattgaaatcttgcacacatgcatacactaaacataatgtctggcctacttgcagataagtaaagtagagatccaatcatacctctgtattgctttggatcaacaggttgaccggattcatctttgtcaagataacaactcgtattcatagggg

SEQ ID NO: 14745 - DNA, 361 bp, Glycine max
ataaactgaattatactagcaaaggaatggtaagagatgttaaagttatatttatcaattatcaagactaagtacattatctcagatcacaccttcttgcttattcttatagggaaatgatcattttatggcaacataagtaattgaagccgtaaaggatacacctctactgccaattcagtctgggaaagacctgaactaaataactttccttgccaatgtaggtcaccgccatacctagtcaaggggaacaaagttaggcaactcattaaagcctagttaaagggttagtcatctaagttcgtgtaatatatcattaatataatatatcacttattacatcttagatgaactatatatg

SEQ ID NO: 14746 - DNA, 445 bp, Glycine max
  unsure (1)..(445): unsure at all n locations
ctatatatctaatttattttttttctgttaaaantcattgtcatataattttatattacaatttaattctatattattaaaaaaataaatattattcattttaaaatggttaatttttaaaaataataattatgatacactacctaattaagagaggaagnatcttacccataatagattaaaaatatatatttgagaatttatatagaaaaagtattaatggagcattaacaatgcataattggatagatgaagtggttatttttaatttgcggacttataattntacantaaattaagtattctacacgaaaatntactccaatggtaaagttgttaaaaatgagtgattaacataattntacatataccacaatcattgaaaaatgttatttttgttataaaaattgtaagcaatatggttatataaacaatattatatcac

SEQ ID NO: 14747 - DNA, 423 bp, Glycine max
  unsure (1)..(423): unsure at all n locations
tcttacctcaccaatagtnnttggggttggccattcatgaatggttntcttcttttcttgaccaacctgtactccctgtgagctaacaacaaaaccaaggaaaactacatggtccaaacagaatgcacatttatccatgttagcatacaagctcaaacgcctaagggccactaaaagtctcctcaaatgcacaagatgttcatcatggaattcgttgtaaatcaagatatcatcaaaataaaccacaacaaattttcctagaaattcctttaacacatggttcattaatctcatgaaagtgctaggagcattggtcaacccaaaaggcataaccagccattcatacagctcatatttagttntgaaagttgttttccattcatccccctctctaatcctaatttgatggtacccacttttata

SEQ ID NO: 14748 - DNA, 397 bp, Glycine max
  unsure (1)..(397): unsure at all n locations
gcgtctcgatatattacgggactctattagttattcgagtcaaaagntattggcatttgacatttcatagagcttccattttcaattccgagcgtctcgatatattaaagggctcaatcggacattcgagttaaaagttattgtcgtttgatttttctaagagcttccgttttcaattccgagcgtctcgatatcctatgggacacaatcggacatccgattcaaaagatattgtcgtttgaatttgctcagagattcagttttcaattacgagcgtctggatatattacggcactcaatcagacatccgaattaaatgttattgtcatttgactcttcatagagctctccgtttcaatttcgagcgtctcgatatatcacagggctcaatcggaca

SEQ ID NO: 14749 - DNA, 340 bp, Glycine max
  unsure (1)..(340): unsure at all n locations
aacttcatgagatgctagcaactggttgttcccagttgtgatgatgattttgctgtccggaccaaaccaatcaggtcttccagcaattgcttgtaattgcttgtgtatgtcaacatcatctagaatcaagagaaccttctttcccatgagcctagactgtatgattgaaattccttgttgcttacttgttaagttgatgttcatctctcctagtatttctgaaagaaggattgtttggaggtgttctaacccgtgtttgtttgacttttccctcacattngcaagaaaacacanacaatcaaacttctcagcaattatcaactatgaagcacggacacgt

SEQ ID NO: 14750 - DNA, 359 bp, Glycine max
actagcttgaggatgtgattgaagcaccggtatgtttttattggcaaaacccaccaaaaaaagctggcatatagtaaagaaagattctatcgctgcagtgaatgaatttttcgagaaaggatctttattataggattttaatactactctcgtgactctcattcctaaatctattactgctaagactgtcaaggattacaggcctattgcagtttgctctactttttataaagtgatctaaaattttttgactacgaggctagggatagtgatacaggatattgttcatactatccaagcaacttttgtacccggtcaagtcattcacaatcatattctccttgcaactgagctgatga

SEQ ID NO: 14751 - DNA, 399 bp, Glycine max
  unsure (1)..(399): unsure at all n locations
actcaagcttctagtccttgtggatcttcttccctctactgctagaactttttttgtatgtttagctngaacttcacctgtaacatcatcaggttctggttcacttaatatttctgcattgatatgcatcattggcttcttgcttggatcatgcttgtccttcatccatgtgttcagcttatcaaattggacatccttactaaaaactatttgattcgttcttggatttaagagtttgtatgaccctatgggattgtagccaacaaagatcatgtgttcactcttgtcatccaatttcgcccttgtttgatcaggaatatgtctgtaacatgttgaaccaaaaactctcatatgcttcacagatggtgttttccctgaccatacagcttctggtacttg

SEQ ID NO: 14752 - DNA, 390 bp, Glycine max
  unsure (1)..(390): unsure at all n locations
ctaagcttattaatggttccttactntgagagggaaatcttctacttaccacgcatcnngnnnatgcacaaacaggcagcatgggcgtgctggtacttgctggggatacaaagggcagccaagtgtctcaaagtgcagtgtgcgaaaacaagtggttgtggcatgaaaatcctgtcttgtcaaacgcctatatattacggaagcaacagtttgctagttagggataaggcatggttggcttgggcagagaacatggaagtgagacacacatgcctaaatggtcctgacagctacaactatggagcttatagatggactgttcaacttgtcacaaacgataatcgattggaaaagatacttttccctatcttcttgggcctaatgactctc

SEQ ID NO: 14753 - DNA, 439 bp, Glycine max
  unsure (1)..(439): unsure at all n locations
actcagcttctggagccattcaaaacaatcaatttgatgccatctagacgaagaaatacgacttcattatgaagatgccaactttgctctaggtcatgtcctttggcctgaaaaatgcacgcgttacataccanagattaatggaccaaattttcaaacagcagatcgaacaaaatgtcaagatctatgtcgaagacaagggtgtcaaatcctatagcatagtccaacatgtggcagacctagaagaggtattcggagaaatttacaaatacaacatgtgccttaactcgaanaaatgcactttcagggtcggcggaggcagattcctcttcatgatcacacatctgggaataaaagtcaaccctgacaaatgcataggcatactggcgatgcatagtcctaccaacatccaagaagctcaaatgctgaatggtagact

SEQ ID NO: 14754 - DNA, 406 bp, Glycine max
  unsure (1)..(406): unsure at all n locations
ctcactcaaggtaataagagtgtagangagnactttaaagagttggaggtgtccttgantaaaggcaatttagtgaagatcgagaggctactatggcatgtttcttatatgggttgaatagtgatataagggatgttatagagttgtagaattatgtggagttgaagaacttagtacatcaagttgctaaggtagaacaacaattcaagaggaaggacagagataagaataagtgaggtacttcttcaagcaattctattgctgcacctcaaagggctaaaattaagtccaatgagtcccctaaaaaagacaaggagtaatgaggtaaaatgcttcatgtgtttacggagaggtcacatagctatgtagtgtccaactaagaaaattatgttacttaaggatgatt

SEQ ID NO: 14755 - DNA, 285 bp, Glycine max
tccactcagtctcccttcttcctaaaggagcatccctcagttagccttgcccggccaccggttggttgacacaagacagtctggcagtttccgcatacaacaacagtctgagagtggctaaagacagtggttctgcagtcatattcataccactcaagtattaaaacaaatccacaatcaaattcataacactcgagctattttatgtacacaatcaaaatcaataatatgaagggaaaaaaagacgatccaacttacattgtgaagcaaccctggcacttaaca

SEQ ID NO: 14756 - DNA, 469 bp, Glycine max
  unsure (1)..(469): unsure at all n locations
ntctaacanaaaatttcatgcaggtggaccttcttctagtttatttgacttactgcaggctcatatccctcttccattctcacctagagcaattccaaacaaaaaaatggaagaagcgcaaaaggagatcttggagaccttcaggaaagtagaggtgaacatacctctgctagatgccatcaagcagattccaagatatgccaagtttctaaaggagttgtgcacccacaaaaggaagctcaaaggcaatgaaaggattagcatgggcagaaatgtgtcaacattgataggtaaatctgttcctcacattcctaagaaatgtaaggacccaggcactctttgtataccttgcattattgtgaataagaaatntgagaatgccatgctagatctaggagcatcagttaatgtcatgcctctgtccattttcaattctttatctcttggacccttgcaatctatagatgtg

SEQ ID NO: 14757 - DNA, 469 bp, Glycine max
  unsure (1)..(469): unsure at all n locations
atactgaactataacctataaagataccaagnncaacttttcttgtctagcttgtctctcttaatnngaggcacataagtaaaacacaaacatctaaatacttgaaattttttcaagaagggtttataaccataccaagcctaaaaaagagtctttccatctattgctttggtggaaagtctatttagcaaaaatattgcagtgtttatagctttcacccaatatgccttaggtaactctttctcatgaaacatacacttgaccattttcatgattgttcaattctttctttcactaaccctattttgttgatgggtgtaaggagctgttaattgctcaatgcctgcttcctcacaaagcatggggaattgtgttgaagtgtactccttaccattatcagaccttanatcttgaatcatgcagtcactntgcttttcaatctagtgcttaaatctccaaaatacacttg

SEQ ID NO: 14758 - DNA, 425 bp, Glycine max
  unsure (1)..(425): unsure at all n locations
ttcctcagggggagagataacattagcaatgtattaatagcattcaagatagaaaattttatgtactacatataatgaaatgacagacgttatttctgaattcagctagcactacaattcatccgtacgttaactaatatcttaattaatatcacacaggcaaggcacaataatcttttatatcttaattaatatttatttattctgaaagattcttttagttggatataaaaaaatgattnttttagtacaatgaaacaaacaagcacaaattgataaaaaaaaacctcccatatataattataataatattatattaaattagagcgttntaggagctactatttatattaacaataacactcgaaatatttttttagagacnattccgaagatttcttaactttctatatggatccatctat

SEQ ID NO: 14759 - DNA, 346 bp, Glycine max
gagacgctcgaactggaataccgaagctctgagcaaattcaaacgacaataactttttactctgatgtctgattcagccccgtaatatatcgaaacgctcgatattgaaagttgaagctgtgagcaacttcaactacaataactttttactcgggtgtctgattcagaccaataatatatcgaaacgctcaatattgaatggtgaagctttgagcaacttcaaacaacaataacttattactcggatgtctgattgagacccgtactatatccagacgctcgacattgaataccgaaactcttaaaaaaatcaaactacaataactttttactctgaagtcagatt

SEQ ID NO: 14760 - DNA, 276 bp, Glycine max
tgcagcttgtcacgaagtttctgcatttctccctataagaatgcaatttaataataagcgggaagccaagccaaatgtgggaaattaatataaaagaagaaatataagcaaaaagagtcatggaagtcaagaactcaaccactaaattcagatgaattggcagagtaaagcaaaaaaatattacctgcaagaatcgacgttcttcaagccactgtttgacaggcatcactttatcattagcatctttccattcatttgcaaccacaacagctactc

SEQ ID NO: 14761 - DNA, 226 bp, Glycine max
ttgtttggctgatttaaagcatttgaattacttggacttgagcgggaatagatttcttggagaaggtatgtcaattccttcttttcttgggacaatgacttccttgactcacctcaacctctctcatactggattccgtgggaagattcctcctcagattgggaatctctcaaatttggtgtatcttgacctgagttatgtttttgccaacggaacagtaccctct

SEQ ID NO: 14762 - DNA, 265 bp, Glycine max
taatatttgaagattatccttgtggaaccttcacccaacgaagacactgacaaaaacttatcttctcctttttggacaaagaatggcaggctgggggcaagtaaattttcttcccatcagaccttggatgcaactgtgatcgtatgcccatataagctagatcttgacgggtattcaagccatccttcgtcttgccttgaatgttaaggagcagcccaatcacactgtcacaaacatttttctccacatgcataacatcaataca

SEQ ID NO: 14763 - DNA, 289 bp, Glycine max
ttggatttccttttaatagggaatctatccttcctaaaatggagccaaacccaatcacccttattaaaaactagctcttttcttcctctattgcctttaagtgaatacacctttgtttgattctctatttggttcttaaccctctcatgcatcttctttacaaattctgacctagattccccttctttatgtataaaagaagtgtccagtgggaggggaatgaggtctaacggtgttaggggattgaacccatagacaacctcaaaaggggactgcttggtggttctat

SEQ ID NO: 14764 - DNA, 262 bp, Glycine max
tttgcatgcaagcttaacccctatttctttaacccaaaactctaaaaactaaaccctaaactctaaggcttagacaccaaaccctaaatttgaaaacccgaaacccttaacccaaccttttaaagcccttaaccctaaaatataaaaaataaaccctaaaccctaatggtttagacaccaaaccccaaacctcaaaaccctaaaccataaacccttaaccctaaattctaatccctaaaccctaaactcagaattctaatac

SEQ ID NO: 14765 - DNA, 244 bp, Glycine max
acaacattcctggcgacatctcaaaaggggtcaccactatacattatctcaaagatttatgcaaaacatggcttttgtatctatgaaggaacctaagaatttaaatgaagccctcatatatgaaaattggataatatctatgccggaagaactataccaatttgaaagaaataatgtgtgggagttagttgagaaacctgaacgctacccaatcattgggacaaaaagggtgtttagaaataaa

SEQ ID NO: 14766 - DNA, 292 bp, Glycine max
  unsure (1)..(292): unsure at all n locations
ataaatgagataagagatgagagaatgcggaccttgctctatactggttcggcngaggccgtgcttacttccaatactcaagcaacccgcttgagattatcctttctctttggtaattcctttacaacttctgaaccacacagggacaactcatcccttgtgttgatgaattcttacaacttaagagaccctcagtcccttaatcaatctctgtgaatgagaagaaagaaagaagaactctctcttgaagaaaaggatattacaattgagagccatggagaaactcttaatg

SEQ ID NO: 14767 - DNA, 440 bp, Glycine max
  unsure (1)..(440): unsure at all n locations
gagtcacctcgcggcatgcaagcttgtgttgcanaagttgatggtattcatactaagatgggtttgcgcttagatgtcattactaggtggaattcaacttttctgatgcttaagagtggccttgtatatcgatgtgctttttgtagtctttcatttgatgataggagctattcaagttgtcctactaatatagaatgggagagaggacaaaanatgtgtgattttttgcatcctttctttcaaatcacagagttgatatatgattcctcttacccaacatctaatttgtatttcatgcaagtgtggaaaattgaatgtttgttgcttcaaaatttgagtaatgaagatgagttgattagaaccataactattgatatgaaaacaaagtttgataaatattggagtgattatagcaatgtgctttcctttgggtgcattct

SEQ ID NO: 14768 - DNA, 462 bp, Glycine max
  unsure (1)..(462): unsure at all n locations
cagaactactcaacaagctagaatcttataatatattataatatattaatgtttgaaaaatcaatgtaaaaattctacaaaaaatagagattaaaaagaaacaatttagaagaattanaattattcttcacatacataatataagacttggtaaccggtatacgcactattttcctccagaactaattttcttaagtcaaacaccttaaacttgtaagttgaagttntttgtgtccatgtgtggaaaaggataaaatgtaaaattaagttatcagcttatattgccaacttaatatgtatcaataaaaaattaagttaactaacgttatatcttacaaaattctaattctcaaaataaaaagtgagtatatgtatgtatattaattagtngcataaatactactatgatttacanaataataatcaatctagtaagggacgtatatgtatgtatattaatta

SEQ ID NO: 14769 - DNA, 211 bp, Glycine max
  unsure (1)..(211): unsure at all n locations
atgacaatacttacaaagntgagctgcccggtgagtataatgttagttccaccttcaatgtctctgatttatctctttttgatgcagatggagaatccaatttgaggacaaatccttctcaagagggagagaatgatgaggacatgaccaagagcaagggcaaggatccacttgaaggaattggagggcctatgacaagggctagagcaag

SEQ ID NO: 14770 - DNA, 376 bp, Glycine max
  unsure (1)..(376): unsure at all n locations
agctnggagcagtggaacacggngtggatttttgcagtttacgcaaggctaagcgataagatacttttcccactaattcgatgatctgataggggccataaaaacgctttcctagttttgaaacttatcagcgatcgaagtttggcggtaaagtcttagcttcacatagacccagtccccaattttgaagttgacttcttgacggtgaggatcagtagagttcttcattcgtgcctgagatcgttcgagtttttgacgaagggcatcaaacatatcttggcgagtggtaaggaggaagtccacagcctcgactgatgatgaaccaggaaggtagtccgggatatcgggtnggtggttcccgtacattacctcgtat

SEQ ID NO: 14771 - DNA, 463 bp, Glycine max
tctctctttcacctagtttttcattttttcgcatacacccaaatttgtcccagtaaaactacgatcccaaactcgttaaccgttggatcatcgtcaaagttgaacattaggttggaaattatattcacacatctccaccattgggatttgaaaaataaggcctacggagggagaattgctcatcgcacacagacagtgcaacgaaggttataatcccttcttcttctctctaacacttgaaaactctagcaagaggaaacgtttggggaatcttaggaaaccactagagatttctctcactatcaaactacactcatgagcccacttagaggtaagagatgagtttatcgcaattagggttagaatgaacatttgtagggatccgtagaggatcaaatttaggtttaatttgggatgtttattggattgtaattcttctagaaaatggttgaggagttttact

SEQ ID NO: 14772 - DNA, 444 bp, Glycine max
  unsure (1)..(444): unsure at all n locations
tgatatactntagctcnttgcttattaagcttgtaatnnncataatctngaaaccttaattcctccaattgatgaagttgtagcttcctatgttcacctgctgcatttagatcaaaattcaaaatcttcaatgctcaataggctttgtgccccaactcaataggtaagtgacaagttttgccatagataaattggaagggagtcagtcctataggagtattgtatgcacacgtagctttatctaatntttgagactagtccttccttgactgagcaactattttctccagaatcttcttgacttccctattagaaactttagcttgcccaatggtctatggatggtaaggtgaggctaccttgtgtctaacactatagtgttggagaactttcttgagttggatgttatagatatgagatcctctatcacttataaagtaccct

SEQ ID NO: 14773 - DNA, 398 bp, Glycine max
agcttcaacctagaggagacgatctcttccatgtgttggagaagatcaacgacaatgcctacaagattgacttgcctagtgagtataatgtaagtgccactttcaatgtgtctgatctatctctttttgatgcagatggaggagccttggatttgaggacaaatccttttcaaggagggagtgatgaggacataaccaagggcaaggaccatgaagcacttgaaggtcccatgaccagaggcagacttaaacaagcccaacacatcatagagacaaggctggtcatttgtatagctgtcattgatgatgattgaaggcccaagtggagaaagatgaaggcccagaggcagaggcactaccaagactactaattgttgctgaaggcccaaactaacttg

SEQ ID NO: 14774 - DNA, 439 bp, Glycine max
  unsure (1)..(439): unsure at all n locations
tgcaagcttgcccaacaaataaggaaatnntcttaattctctgatacttaatttatcttgtttgccaacaataaaaactgtcaaagtacgaagatattgtagtctacagatttgtgttgccatctctggaaaattagtgtaactgatgtccaggtggcgtaaattaaccagatttcctatcggtcgtggcaactgaataagaaattcacaatttgataatatcaaagtttgcaaattgtaaagcataaatgtttcataggacaagctttcaatggaagtgtaagaaagatccagataccacaagtgcaacaaattgccaatggaatcaggtaactcaatgatatttntatatttagacaacgacagtatacgcaaacatctcagttttggaaaccaaccatgataagtgcataaattaaaatactggtttcaagggtac

SEQ ID NO: 14775 - DNA, 297 bp, Glycine max
  unsure (1)..(297): unsure at all n locations
agctacaaccgattatgttaccgcgaattatgtcgagangacccgtgctaccatcgactcgctagccatgggtaggagctcgctacaagacaatgataaacatgcatgtaaacaccataccgttaataggaatagaagattaacatatgaattgacgaggagtgcgggctgaacactcatgcggttgttgagccattcgccatagcaacaaataggcatctgagtgtggttcaccctaattacaaacttttgttttctcactatcgcgacaccatgaatattaattcactcgcccgc

SEQ ID NO: 14776 - DNA, 472 bp, Glycine max
  unsure (1)..(472): unsure at all n locations
ctggaactacttcacatggacttgatggggcctatgcatgttgaaagccttggaggaaagaggtatgcctatgttgttgtggatgatttctccagatttacctgggtcaactttatcagagagaaatcagacacctttgaagtattcaaagagttgagtctaagacttcaaagagaaaaagactgtgtcatcaagagaattaggagtgaccatggcagagagtttgaaaacagcaagtttactgaattctgcacatctgaaggcatcactcatgagttctctgcagccattacaccacaacaaaatggcatagttgaaaggaaaaacaggactntgcaagaagctgctagggtcatgcttcatgccaaagaacttccctataatctctgggctgaagccatgaacacagcatgctatatccacaacagagtcacacttagaagagggactccaaccacactgtatgaaatct

SEQ ID NO: 14777 - DNA, 449 bp, Glycine max
gcaagcttgtatgttagacctcgatcggtcatcttttctggccgacgccgactgtcatttttttcgatcaatatcggtgaataatatttttttgccgaggtgggctaatgttttcctggccgaataaatgggaacatgccagtttcggccgaaacgaaacatcggttgagctcgcacgaaaaaacctagccgacctacattgtaagttttttatgcaacaccgaaaaaaacaaaatttcccctgccgtaagaaaaaacattatcggccagcgagcgcgggacttgaaattcaagctccaaaaactaacccaaggcaacaagggggttgaggagtatttcaaggaaatggatgtgctcatgattcaagcaaatattgaagaagatgaggaggtaactatggctcgatttcttaatggtttgacttatgatatccatgatattgttgagct

SEQ ID NO: 14778 - DNA, 225 bp, Glycine max
  unsure (1)..(225): unsure at all n locations
agcctaccatcctcagtctgatggccntattgaatggaccatgtagtcgctggaggagcctttgagggcgtgtgtcttatagcaatagaggagttgggagagttttctatcgttgatagaggtcacttataacaatagttttcactctaccattggcatggctccctatgaagctttgtatggtagaaggtgtaggacacctctatgttggctaaagcccggaga

SEQ ID NO: 14779 - DNA, 261 bp, Glycine max
agcttttttttcttgaatcttcttcatcaatggagtcatttacttcttgaagatcaattgcagcggaatggaaatggaagaaagatgattggagacgccactttaaggagaagatgagtcaagaagaagctcaccaccataggaagccatgaataagagcttgaaggtaggagaagatgagtggagggagagggagagaaggagcacgaaattttgtgcctcaaatgaagtctgaactttgaagtgtaattctcaaatgat

SEQ ID NO: 14780 - DNA, 288 bp, Glycine max
accctctagaggcgaactgtttgcatgcacccgctgttttctaacgttttaaggcgcaccccatattccgtggtcatatgcccaacttgagcccatatttttgaagttgtttatggttttaacccactaactcctcttgatcttttgcctatgcctaatgtttctgtttttaagcataaagaaggtcaagcaaaggcggactatgtgaagaagcttcatgagagagtcaaagatcaaattgagaggaaaaattaaagctatgctttacaagccaacaaagggagaaag

SEQ ID NO: 14781 - DNA, 252 bp, Glycine max
ttctttcatgaatacttgttacccaatctcttccttcactattgaagaagcatgcaatgggtaaaaagaagtccttttgagaattatctaagccatcataccttaattttaatatggcatgaatttttggatttggaatatttcggagttttggcaattcacttttccatgcctctttacttcttacttcttgaacgaagatttgaacccagaacttttaaagccaaaggaataccttcggaataagaaatt

SEQ ID NO: 14782 - DNA, 252 bp, Glycine max
ttcttttagtctctcagaagaagacggtgggcagaaagaggatatttttgctctccaaactccatgctcccaacaaatgaatacaaatttgcgtttgggtcttcacattagatgacggctctataatcatggaatttgaagtcctcctgtaaggaagaagttacatccagcccttgttttatcttcaagtttgtctcaccatccaagttcatggtctcaacatagcaaactgcatcctcataactggaggaa

SEQ ID NO: 14783 - DNA, 438 bp, Glycine max
  unsure (1)..(438): unsure at all n locations
aggtctcanattcgagtcctaactcttaagtatataatgcattaaataattaaaagaaaaattntatcattcataataatcctactcaactaaaaaaaatactcataatcttaacaaaatgtaatgtagcaagtcataccattgaaattaaagtccaaacaatataccatgtctccttgaaattaaatagactgagccaattgcagtattgtacattntctattctatagattttntatctttgtttctcaatgataaacaatgataaaaatatagacttttcacctttatcgttatcacacgtatattgttgaagaactcaagggactgttgcgcttaaaattcaaaacacaaatacaattctaatatcacacaaattcatttttaatcaatttaacaaatccccaaggaaataatagtcaaacatagcgacaaatc

SEQ ID NO: 14784 - DNA, 301 bp, Glycine max
  unsure (1)..(301): unsure at all n locations
gcttcattctcgtggcgatagaatatntcaccatatgggtcanagtgacttcttataccaatgtcacgaggagtgtggtggtcagattcataaagaaggaactgatttgtcgatacggactccctatgaagatcattactgacaatggcaccaatctgaacaacaaaatgatgcaagaaatgtgcggggatatcaagatccagcatcataactccattcactatcgaccaaagatgaatggngctgtggaggatgcanataanaatattaataagattattcagaagatgacggtgtgata

SEQ ID NO: 14785 - DNA, 301 bp, Glycine max
  unsure (1)..(301): unsure at all n locations
aattcaaacagccataacttttgacacgagtgtatgtatgaagcccatgatatatcgagacgctaaaaaatgaacaacgaaagctcttgagaaattcaaatggtcataactcttcacttggatgtccaattcaggcgcacaatatatcgggactctcgaaatgaaaatggaagctcttggcacattcaaacggccataacttttaacttaggtgtatgtgtgaggcctangatatattgagacgctgaanaatgaacaatggaagctctcgagaaattcaaatggtcataacttttcacat

SEQ ID NO: 14786 - DNA, 472 bp, Glycine max
  unsure (1)..(472): unsure at all n locations
aagattcctaaagaagctagagcttagctacacatacctctctaatagctaagctcacacccnctataatagctaagctcacccccatgacaaaaaacatgaaaatacaaaaaaaagtgcttactacaaagactactcaaaatggcccgaaatacaaggctaaaaccttatactactagaatggccaaaatacaaggccaaaacgaagggaaaacctattctaatatttacaaagataagagggctcatacttagcccatgggctcgaaatctaccctaaggctcatgagaaccctagggccttcccttggatctctagcccaatctacttggagtcttctacctaatgcccttgcgggataggattgcatcattccctccagcttggagaggatttgacctcaaatgccgaggttcttcatactctgggctacttccctcaacacctgtaaaaagaacaaaaacatatgta

SEQ ID NO: 14787 - DNA, 409 bp, Glycine max
  unsure (1)..(409): unsure at all n locations
tataaaactcaactgaagcaactggtgcgttggtaacttggaacccagctgttcttgaatcagaaatctgtacctgtcgcaagggtttgtggttngtgctcctctgctgaccaccatacagacctttgcccttccatgcagcaacctggagcaattgagcagcctaaagcttatgcagcaaatatatacaatagacctcctcaacctcagcagcaaaatcaaccacagcagagcaattatgacctttccagcaacagatacaaccctggatggaggaatcaccctaacctcagatggtccagccctcagcaacaacaacagcagcctgctccttccttccaaaatgctgctggcccaagcagaccatacattcctncaccaatccaacaatagcaacaaccccagaaac

SEQ ID NO: 14788 - DNA, 430 bp, Glycine max
  unsure (1)..(430): unsure at all n locations
tgtgatcgattacacaccatactgtttcaattaccagaggagtatttcagactatattctcaattgtcacatcttntcagttggttcttgaatggctatcacaggcctatatttatgtgacttgagacacgaatgttctaagagttnttcagaacaaataggtcttatcctcttacaaaccacaatcattttatcctcttacaaattccttggccaaaacacttgtgattcaataacgaattatttgagtgctcacattgttcaatctatctctctagagagagatttcttcttctcttcttctttattctgaanagggattaagagaccgacggtctcttgttgtgaaagaattctaaacacaaaggaaggattgtccttgtgtgtttagaaattgtanaaggaatttacaagatagtggaactttcag

SEQ ID NO: 14789 - DNA, 325 bp, Glycine max
  unsure (1)..(325): unsure at all n locations
acagagatgccagtctaccattcaactnttagacttccttgatgttggtaagggtgtgcatctctagtatagttatgcanttgtcggggctgacttctattccctgatgcgtgatcacgaaacctatgaccttgccttcgtcaaccccaaaagtacattttttgggttgaggcacatgttatatttgtggatttcttcgaacacctcttctangtctgccacatgtanggctatgccataggacttggcaaccatgtcgtcaacatagacctcgacatttcgtctaatctattgtttgaagatctgatccatccgtctttggtat

SEQ ID NO: 14790 - DNA, 286 bp, Glycine max
  unsure (1)..(286): unsure at all n locations
catccgagtaaaaaagtgattgtcgtttgaatttgctcatagcttcaacattcaattntgagcgtcttgatatattacgatactcaatcggacatccgagtaaaaagttattgtcgcttgaatttgttcagagcttcggcattcaagtccgagcctctcgatatactacgggactcaatcagacctccgagtaaagggttattgtcgtttgaatttgctcagagcttcgacattcaagtccgagcgtctcgatatattacgggactcaatcagacatccgagttaa

SEQ ID NO: 14791 - DNA, 456 bp, Glycine max
  unsure (1)..(456): unsure at all n locations
tcagaccactatcagtgtgctggaactacttcacatttacttgatggcgcccatgcaagttgaaagccttggaggaaagaggtatgcctatgttgatgcggatgatttctccagatttacctgggtcaactttatcagagagaaatcagacacctttgaagtattcaaggagttgagtctaagacttcaaagagaanaagactgtgtcatccacagaatcacgagtgaccatggcagacagtttgaaaacagcacgcagaatggcatagttgaaaggaaaaacaggactttgcaagaagctgctagggtcatgcttcatgccaaagaacttccctataatctctgggctgaagccatgaacacagcatgctacatccacaacagagtcacacttataagagggactccaaccacactgtatgaaatctggagagggaggaagccaactgtcaagca

SEQ ID NO: 14792 - DNA, 413 bp, Glycine max
  unsure (1)..(413): unsure at all n locations
taatntacaaccagaatggtgaagctgttaataaagatgaaggtgatatgttttttctctatggatatggaggtacaggaaaaacatacatttggaaaacacttgcaagttcactgagagctgacaataaaattgtaataatgatagcctctagcggcatagcttctctgctattgcctggaggtagaactgcacattcaaaatttaaaattccagttccagtttttgaagactcaacttgcaatatccatcaaggaactcaattagctgaactattaaatcagacaagtctaatcatttgggatgaagcacccacgactcacaaattctggtttgaggcacttgatcacagtcttagagatatcatcaaacacaactcanaggacagtaaaatctttggaggtaaagtcatg

SEQ ID NO: 14793 - DNA, 323 bp, Glycine max
tctgacattcaccacatattctgtcttcttctatttttagaatgggaatgcctctaacagcacctttgtgaatgatattcttcatgcctcgtaagcgcagatggccaaatctatgatgccatattctgactccatcttatttggaggatagacatgtggaggagtaactagtttcttgaggtgtccatacgtaacaagtgttctttgatctgctgcccttcattagaacttcactcttattattagtcaccaagcattctgactgtgtgagagttacattgaatccttcatcacacagctaactgatgctgatcaagtttgca

SEQ ID NO: 14794 - DNA, 473 bp, Glycine max
  unsure (1)..(473): unsure at all n locations
acacctctctaatagctaagttcacctccttgagatgagaagctagagcttatctacacacccnctataatagctaagctcacccatatgacaaaaaacaagaaaatacaaaaaaagtccctactacaaagactactcaaaatgccccgaaatacaaggctaaaaccctatactactagaatggccaaaatacaaggcccaaacgaaggaaaaacctattctaatatttacaaagataagcgagctcatacttagcccatgggctcgaaatctaccctaaggctcatgagaaccctagggccttcccttggatctctagcccaatctacttggagtcttctatccaatgcccttgcggngtaggattgcatcaccctcatatatttttcccaaggccaccaagtgtgtagaatgatcacgttgcacatacaatcccataatcggtataacaatagcaacatcttcttcccctg

SEQ ID NO: 14795 - DNA, 424 bp, Glycine max
  unsure (1)..(424): unsure at all n locations
agcccatgtgcttgattcaatattgattcaagacttcaagatcaagcatcaagaatccaatccaagattcaagagaagaaatcaagaagcaacaagtcaagacttcatataggataaatattaaaagaatttttcaaaaaccaaatagcacagntttggtttacaaaagaattttctcaaattttctatggtaccagagtgattactctctggtaatcgattaccaattggcattaatcgattaccagtgaccagtttggttttcaaaatgttttcaaatgatttataattntccaaaatgattntcaaatagtgtaatcgattactatattagtaatcgattacaagtgaatctgaacgttggaattcaaatccaattgtgaagagtcacaacttttcatataatacattgtgtaatcgatta

SEQ ID NO: 14796 - DNA, 321 bp, Glycine max
  unsure (1)..(321): unsure at all n locations
cgaatggtcataactnttcactcggatgtccgattcgcgggcataactcatctagatgctcgaaattgaacatcggaagctctcgagaaattcgaatggtcataacttttcacacggatgtcccaatttaggacataatatatcgagacactcgaaattgcacaacggaagcactcgagaaattcgaatggtcataacttttcacacggatgntccgaattgggacataatatatcgagacgctcgaaattgcgctacggaagcactcgagaaattcgaatggtcataacttttcacacggatgtctgattcgcggacata

SEQ ID NO: 14797 - DNA, 417 bp, Glycine max
  unsure (1)..(417): unsure at all n locations
tctcgatatattatgaaccttaatcggacttccgtgtgataagttatgaccatttgaatntcttgagggctttcgttgtgcaatttcgagcgtctcggtatattatgcgcctgaatcggacttccgtgtgacaagatatgacccattgagtttctcgagagcttccgttgttcaatttcgagcgtcatgatatattatgcacactgaatggacttccgtgtgacaagttatgaccatttgaatttctcgagagcattcgttgttcaatttcgagcgtctcgatatattatgcgcctgaatcggacgtccgtgtgacaagttatgaccatttgaatttctcgagagcatccggtgttcaattcagagcatctcgatatatgatgcgccagaattggacttncgtgtgacaagttatta

SEQ ID NO: 14798 - DNA, 489 bp, Glycine max
  unsure (1)..(489): unsure at all n locations
tactcagctgaagaaatatttgatgatgccaaggaatntaagaattatttttatgatgccaaggaatttcaaagatcattccagatgaatttcaaggatgaagaaagcaagatgtcaagccaagcaaagatcttaagataagaattaagatagactcttagaanagtttttgaaaagcacaaatgattggccaagtgagtttctatcttaacaaaaacttttccaagcattntactctctggtaatcgattaccagaggttgtaatcgattaccagtggccacaaagctttctggaaatgttatcaaagttattttcaaagttttcaaagctataatcgattaccaaaactatgtaatcgattaccaatgctttaaaacgggtaaaaatgattntgtcatgtgtaatcgattactagagcttntgaacgttggacatttgaattntgaacaaaaataattgtgtaatcgattacgccaatgctgtaatc

SEQ ID NO: 14799 - DNA, 494 bp, Glycine max
  unsure (1)..(494): unsure at all n locations
gctgcatgtccaattccatttgatgaagccaatntgtggaaaggccaaagtggacctgatctaaaacagataattcaacaacaatttagaaacatcaggtattacttcaaactagtggaagtggactgagctctgtctagctaaatattatccattaataacttgcagggctttgttgtggcttaatctcttgtaagcatgcatcatactgctaaaaaatgacaattgattaccaatgattcgtagtaatgcttacaaaaccatttttgtggaaggaatcatagtatatataggttggattctatctaaaatcccatcattgatatttttagtcctacagtatggnttttcttttcattttgagatttccacatactgatggatgctaaatnnnggttggttatctggactctttgattgctgatctaatctgaacataagacaactaaatgaccactccttttacttgntctccatttattattctattactg

SEQ ID NO: 14800 - DNA, 449 bp, Glycine max
  unsure (1)..(449): unsure at all n locations
tctaatcctgagggttatggtgcttncttggngatttcaatatcattagaagccaggatgaaagaacaggctcatctcanaggagtgtgggcacatataatggttttggtttcaatgattggatatcagacatggaaattcaggaaattaaaagctttggtagcagatttacttggtgtaggccaaatggatatgtgaggagtangctcgatagatgcttggtttcagaacagtggctacttaaatggcctgattcttcacaacaagtactccacatggattattcttatcactgtccaattattttgaaaacagatctggtggattggggccctaagccatttagggtgatggactgttggcttaaaaataaagagtatcaaagactggttaaagaagtgtggtgtggtgaccaacaacttggatgggggagtattgtgcttaaaaac

SEQ ID NO: 14801 - DNA, 416 bp, Glycine max
  unsure (1)..(416): unsure at all n locations
tattcttntaatgaatttaaccaatataanattgtttaacatattgtgtatgttattaacacttctattaagattatatattttcttaattaatcatatgagaatctttaattagaaactactttgtgcgatgcacatattagagtgatacaaatgttagtttcagagcagtaaagataatacatatttttaaataagaatgtagaacaaaaactataaaaaattgttttaacaacaatacaatctaaaaataaagaaatattttcttgaataaacatccataaaatcttagaatttttagacatgttctcatttcaatgataaaaaaagaagacctgttctcattantttctaaccaaatttttagaccatactggaatgcattataaaaaaagtaatgtgaataaatacatgtc

SEQ ID NO: 14802 - DNA, 393 bp, Glycine max
  unsure (1)..(393): unsure at all n locations
tctacattcaatntcgagctgttcgatatattacgggactctatcggacattcgagtaaattgttatggagatagaatttgctcagggcttccgtattccatttcgagcgtctcgatatattacgggactcaatcggacatccgagtataaagttattggtgtttgaatttgctcagagcttcagtattccatttcgagcatctcgatatattacgggactcaatcaaacatccgagtaaaaagttattgtagtttcaatttgctcagggcttctgtattccatttcgagcgtctcgatgtattacgggactcaatcagacatcccgagtaaaagttattgtcgttagaaattgctcagagcttctacattccatttcgagcttttcgatata

SEQ ID NO: 14803 - DNA, 252 bp, Glycine max
  unsure (1)..(252): unsure at all n locations
agacatcatggaaagcatcaagatagttgcaattgttcacatagatngtgaaggcctcanagaacaccttcattgaaaggtaatatgtattacactatatttattgatgacttcaccagaatgtgttggatttttttcttcaagttcaaatcagaggtggctgaaattttttggaagttcaaagtcaaggtagagaatgaaaacggtctcaagattcaaattttgaggtctgacaatggcaccgagtacaca

SEQ ID NO: 14804 - DNA, 423 bp, Glycine max
  unsure (1)..(423): unsure at all n locations
attgaagaatatgcttcctgactataacacgtttcccaagaattattacgaggcaagaagatattatgtcttgtgggtatggaataccaaanaatacatgcatgccctaatgattgtattntgtatagaaatcagtttgtcgaaattcgcaactaccctacatgtgggctctcaagctacaaggtcaagtatgacgaatgcagtgatgatgctgccactaacaaccattgtccaaaaaaagtgtgttggtatcttccaataataccaaggtttaagtgattgtttgctaatgcagatgacacaaaaaaacctaacatggcatgcagatggtaagaaaaatgatggatntctccgtcatcctgctgattctcctcaatggaagacaattgatcagttgtatcttggatttgataggatcctata

SEQ ID NO: 14805 - DNA, 311 bp, Glycine max
  unsure (1)..(311): unsure at all n locations
taagctctgtatactgcacaaggctcttaatattagaagagtattcttgaggaaccttcacccacgaagacactgacaaaaacttatcttctccttttcggacaaagtatggcaagctggaggcaagtaaattttcttaccattagaccttggatgcaactgtgatcatatgcccatatcaactagatcttgacgggtattgaagccgtgcttcgactggccttaaatgttaaggagctgtccaatcacactgtcacaagacattttccccacatgcataacatcaatacaatgtgtaacgtcnagatcag

SEQ ID NO: 14806 - DNA, 304 bp, Glycine max
  unsure (1)..(304): unsure at all n locations
atctccttcttcactacatcaagaatctccgggttgttgtttctctgtggctgnttactggtttagctccatcctctaaatttattcgatgcatacatgtggatgggctagtaccaggaatgtccgccagggtccaacctatagccttcttatgcttcttgagaacagacaacaacttctcctcttgctcatcactaagggaggcagatataatcattggaaaacatttgctatcatccaaataagcgtattttaaatttgatggcagaggcttcaattctggtgtgtgtggctgggtagaggt

SEQ ID NO: 14807 - DNA, 416 bp, Glycine max
  unsure (1)..(416): unsure at all n locations
tgtagggtaaagtctcacgaatgtcacgtgctcatgcaacttttgttagtcgtggctatacgagacatctgccaaacaaagtcaggttaacgataactcacctatgctntttcttccattctatatgtagcaaagtcattgatccagtcatatntgatgagttggaaaatgaggccgcaattatactgtgccagttggagatgtatttcccccttgctttctttgacatcatgattcacttgattgttcatctggtcagagaagcagaagaagccattgaattttgttcagaatacttagagaaggctaaacctgttgggcttcctgagtctcggcatgatgacagagtgggtgggaaggggtcaagaggactgcangtgatcacttcaagtgtagaagatttgttacaagctcac

SEQ ID NO: 14808 - DNA, 485 bp, Glycine max
  unsure (1)..(485): unsure at all n locations
aatactcaagcctaaatggtggaatgaaaaanaagtntgtatccagacaagagttatcattttcatacctaattttgctggggaattgtaacctcatttgctttcttatcaaagggacttatgttaaattcttaatgaagtntggtcacagtaactcttgttttagcgtcatgccaacagttgaaatagacaggaaaagagtaatgaggaaacaactgacattggaagtattttaaaggaaagcaatgaagaagtcacactagttatcttacatcaggaatgaaactgttatgaaaacataagaaatacctcaaatataggagagaaactcacanaatactaacctctcttatctgtggttcanaacccatatcaagcattctatctgcctcatctagaacaacaaaagaaattctggagagggaagtgttgccttgttgtaaatgatcaatgaatcttccaggggtggcaactgctatttcaac

SEQ ID NO: 14809 - DNA, 355 bp, Glycine max
  unsure (1)..(355): unsure at all n locations
acttagcatcaaattttcctaagttatcttttcattattcaatacaaaacatttacaaccaaagatatgaagatgtgagatgtttggttttctgccattgaacaattcatatggagttttatttaaaatgggtcttattaaagccctatttaaaatgtagcatgcagtgttaacggcttcagcccaaaaatattttggaagaggagtatcatttaataaagttctagcaatctcttccaaagatctattnttcctttcaacaaccaccatttgntaaggggttcttggtgcagaaaagttatgctcaatcccatacttatcacaaaatagttcaaattctttattttcaaactca

SEQ ID NO: 14810 - DNA, 354 bp, Glycine max
  unsure (1)..(354): unsure at all n locations
tttctttacaattgcatcacctctcaatgagctggtgaagaagaatgtgcattttcctagggtaaaaaacaagagccaagccttgctttgctcaaagaaaagcttactaaggcacttgttctagctcttcctgacttttctaaaacttttgagctaaaatgtgatgcctctggagtgggagttggagctgtattgttacaaggtgggcaccctattgcttattttantgaaaaacttcatagtgccacatgggctatacacacccttacccatggatgtgtggcttgtttacaagccaagtctagggtgatgcctcatgggctatacacacccttacccatcccatcttcacct

SEQ ID NO: 14811 - DNA, 397 bp, Glycine max
  unsure (1)..(397): unsure at all n locations
tgctctattcaatggagttgacaagaatatcttcagactgatcaattcttgcacagngccaaagatgcatgggagatcctgaaaatcactcatgaaggaacctccaaagtgaagatgtccagattgcaactgttggccacaaaattcgaaaatctgaagatgaaggaggaagaatgcattcatgacttccacatgaacattcttgaaattgccaatgcttgcactgccttgggagagaagatgacagatgaaaagctggtgagaaagatcctcagatccttgcctaagagagttgacatgaaagtcactgctatagaggaggcccatgacacttgcaacatgagagtagatgaactcattgtgtcccttcacacctttgagctatgactctcggata

SEQ ID NO: 14812 - DNA, 400 bp, Glycine max
ggaggtaaactagatgccttggttaacttgttaacccaactggccgtgaattaaaaattgcacctatcgccagactctatggtctatgctcctctgccgaccaccatacagacctttgcccttctgtgcaacaatctgaagcaattgaacagcctgaagcttatgctgtaaacatctacaacagacctcctcaacctcagcagcaaaatcaaccacagcagaacaattatgacctctccaacaacaggtacaatcccggatggaggaatcatcccaaccttagatggtcgaatccttcacaacagcggcagcaacaacaacagcccatatttcaaaatgttgctggcccaagcagaccatacgttccttcaccaatcccgcagcaacaacaacaacaaca

SEQ ID NO: 14813 - DNA, 377 bp, Glycine max
  unsure (1)..(377): unsure at all n locations
actcagctgagcagatggatgtcaaacaacccttttgcatgggaagctggatgagaccatttatatgaagcaacctactagntttgtcaaaaagggtgatgaacataaggtatgtttgctcaatccatccttatatgatcttaaacaatctcctanaatgtggtataggcgttttgatgattatatgattaaaattggattttctaggagtgtttatgactattgtgtgtactagaaatgtcacaagaatgagaaactaatttacttgttggtgtatgttggtgatatatatgctactgaccagctaaagcatgactganattgctagagttaagaaattgttgaatctagagtttgagatgaaagatcttggacat

SEQ ID NO: 14814 - DNA, 359 bp, Glycine max
  unsure (1)..(359): unsure at all n locations
tgctntgcattgtgttaacaaacagggcaacctcattattttgtgccactctggntcagaaaaagtgtcttccttttcttgtgggtttgctccattgtctctgttctgggaaacagaaacaaaaagaaaataacaaataaatgagaccggcacagattgtgttggttctggtttggttgctctgcattcacactcccaagttgttctgcgccaatgtagagtatgatcacagagcattggtcatcgacggcaagcgcagggtcttgatctctggctccattcattaccctcgtagtactccagaggnctctctctctctttctctcttcgngtgttctgcgtttcttttctttgaactt

SEQ ID NO: 14815 - DNA, 315 bp, Glycine max
  unsure (1)..(315): unsure at all n locations
gactccaactgggcgacaatagtattaaattcattaatacgatgagccacagagataccttctcccatcttgaggttgaacaaccgacgcatcaaatatactctgggggctatcgatgacttctcgtacatatttgataacgccttcattaagcctgcactcttctcgtatacaatgttgaacgcgacattcttggctaatgtcaatctgatcacgccaagagtctatcgatctagcgagttccattcttcttgcttcatgtcgtctggcttaatgcctgatgagggtngatacaacttcttttgatatagataa

SEQ ID NO: 14816 - DNA, 364 bp, Glycine max
  unsure (1)..(364): unsure at all n locations
tggtcataacctntcacatggaggtttctattangcgcataatatatcgagacgctcgaaattgaacaatggaagctcttgagcaattcaaatggtcataaccttactctcggagggctgattcatgcacataatatatcgagacgctcgaaattgaacaatggaagctcttgagttattcaaatggtcataacttttcactcggaggtccgattcatgcgcataagatatgaagattctcaaaattgaacaacggaagctctcgagaaattcaaatggtcataacttttcacacggaggtgagattcacgcacataatatatcgagatgctcgaaatngaacaacggaagctcttgagcaatt

SEQ ID NO: 14817 - DNA, 275 bp, Glycine max
  unsure (1)..(275): unsure at all n locations
tcacctggttcaagcacgactttctttctgcttttgatggcttgccttgcatagctcgcatttttcttttcaatgtgaaccttcacttgctcatgcaacttcttcacatactcagctntagcctgtgcatccttatgcttaaacatagcaatgttaggcataggcaacaaatcaagaggagtcaaaggattaaatccatacactatctcacatggtgaacaattagttgtgctatggacagcccgattataagcaaactcaacatgaggcaaaca

SEQ ID NO: 14818 - DNA, 387 bp, Glycine max
  unsure (1)..(387): unsure at all n locations
agactaagtttagcctagcatcctcagactgatggccaatctgaacggaccattcattcattggaggacgctttgagggcgtgtgttttatagcaaaaaggaagttgggagagttgtcttccattgatagagttcacttataataaaagttttcattctacgattggcatggctccctatgaagctntgtatggtagaaggtgtaggacacccctatgttggttagagcctggaaaagacctcaccttatgaccggaagtggtacaacaaaccaccgagaaagtcaagttaatccacgaaaggatgaagactgctcagagtaggcaganacgttttcatgataagtgaaggaaagatctggaattcgatgttggtgatcatgtattc

SEQ ID NO: 14819 - DNA, 334 bp, Glycine max
  unsure (1)..(334): unsure at all n locations
tgcaactggaatgttaggaagatatcacagtaatccgagattggaacattcggaagttgcacagaaagttctgagatacttaataggaacgaaagatcacatgcttacatataggaggtctgatcaccttgaggtaatngggtattcagactcaaactctgttggatgtgtggatacgagagaatccactcttggctatgtatttctctaagccagaggagcagtatcttataagagtgcaaagcaattagttgtagctgcatctaccatggaagctgagtttgtaaatggtttgatgctacactctaaactaattggtgcagaacttaattca

SEQ ID NO: 14820 - DNA, 399 bp, Glycine max
  unsure (1)..(399): unsure at all n locations
agctgnaatgatacactatggncacgttactccttgtaattcatatacaagtctgaacagtcacaactcttcagaaactaactatgtaatcaattacaatagttatgtaatcgattaccagtcaggaattttcaaaaataactctcaagagtcaaaactgttcaagaaagttttgaatggccatcaaaagcttataaataggtgactcgggacacgaaattccttagagtttgtctgaacaacattatcttttcctctcaaaacanaattgtcttataactctcaaaatattccttggccaaaacaattgcaaattcaataaggaatctcgatcgatcttcaaatttaatattcttctcttaaagagcgaagtcttcttattattattcttattcaaag

SEQ ID NO: 14821 - DNA, 252 bp, Glycine max
  unsure (1)..(252): unsure at all n locations
ctatgatgagacctatgtccctgttgctaggttggaagctattagatntttcttgcttttgcttgtataatgaatttttggttatatcaaacggatgtgaaaagtggatacattgaagaagagatatatgtgggagaaacctccaggttttgtagactttaatcatcctaatcatgtacacaagttggaaaagacactatatcgattaaaacaagaacctagatcttggtacgaaagattgagcaatttttt

SEQ ID NO: 14822 - DNA, 382 bp, Glycine max
tcttagtttcagatgatgcagatgggtttgagctacctcatcactcctctaatgactatggcatcatttctggcgctaaactgctgggagttggaggccatcttctcaattaaatttctggcttcagcaagagtcatgtctccaagggctccaccactggcagcatctatcatacttctctccatattactgagtccttcataaaaatattggagaagaagctgttctgaaatctgatggtgggggcaactggcacatagtttcttaaatctctcccagtactcatacaggctctctccactgagttgtctaatacctgagatatccttcctgatggctgtggtcctggaagcacggaaaaaattttctaagaatactctct

SEQ ID NO: 14823 - DNA, 292 bp, Glycine max
  unsure (1)..(292): unsure at all n locations
ctatgatgagacctatgtccctgttgctatggtggaagctattagatttttcttgcttttgcttgtataatgaatttttggttatatcacacggatgtgaaaagtggatacattgaagaagagatatatgtgggagaaacctccangctttgtagactctaatcatcctaatcatgttcacaagttggaaaagacactatatcgattaaaacaagaacctagatcttggttcgaaagattgagcaattttttagttgggcaatcttttgtatgagatcaagttgacaaaaca

SEQ ID NO: 14824 - DNA, 401 bp, Glycine max
  unsure (1)..(401): unsure at all n locations
actggatgatctntattgcttccttcttcttttcctttataatcttcgccatgaatgagcatttgttctaaagattctataatatcatctaaaatatcctttcttggataaataacattagactcatcaaaggaaacatgaattgattcttcaattggcattgttctcttattataatttctataagctctactatgcaaagaataaccaaggaaaattccttcatctgacttagcatcaaattctcctaagttttcttttccattgtttaatacaaaacacttgcaaccaaagacatgaagatgtgagatgtttggtttcctaccattgaacaggtcatatggagttttctttaagatgggtcttattaaagccctattcatgatataacatgcagtatt

SEQ ID NO: 14825 - DNA, 390 bp, Glycine max
  unsure (1)..(390): unsure at all n locations
agcttccttaagaagattcctaaagaagctatagcttagctacttatacctctctaatagctaagctcacctccttgagatgagaagctagagcttagctacacaccccctataatagctaagctcacccccatgacaaaaaacatgaaaataataaaaaaaaagtccttattacaaagacaactcanaatgccccgaaatacaaggctaaaaccctatactactagaatggccaaaatacaaggcctagacgaaggaaaaacctattctaatatttacaaagataagcgggctcatacttagcccatgggctcgaaatctaccctaaggctcatgagaaccctagggcctttccttggatctctagcccaatctacttggagtcttcta

SEQ ID NO: 14826 - DNA, 397 bp, Glycine max
  unsure (1)..(397): unsure at all n locations
agcttccataacaaanaatatctcctagtatttactaaatttgatctgcttgaggagaagattgaacacattcctctagcacaatgtgaatggtttagcgacttccaaccatttatcagtcccaatcagaagagaggctgtagcaatggcaataataactcttcattagcacaatgtgcttttcaatacattgctgtcaagtttaagagattgttcctttccatcactggccgaattctctttgtttcactggttaatggattggaacctgatactattgatgaagctctcagatatggaagggaggttatggagtgggaaaaatgggatccctctattgtaactgatccaaagtccgagaatacttcaacaagcattgatgagcaaagttacttat

SEQ ID NO: 14827 - DNA, 366 bp, Glycine max
agtcttgcacgtatcagtcaagtgtatggactatatcgtagccaaagtgctcatcgataatggttccagtttaaacgtgatgcctaagagcactttggagaaattaccattcaatgcctcccacttaaagccgagttcaatggtggttcgtgccttcgacggtacccgccgagaggttaggggagagatcgatctcccagtacagataggccctcacacctgtctagttactttccaaataatggatattaaccctccctacagctgtctgttggggcgcccgtggatccactcagtaggagttgttccctcaacactccaccaaaagttgaaattcgtagtggaagggcatctggtcatcgtatc

SEQ ID NO: 14828 - DNA, 465 bp, Glycine max
tgcggcatgcaagcttcatggtatggcctgtatcctatagttatggagttcttaaggccaacgttgcatattctatatttgtaagtctttgcaggcttcatggtgaagagtggttcgtcttttccatcacctttagctgttttgccattgataaggacaccttcatgcctaccaagagagcgcccgctatccaataacttcctcagaatggtgtgactctttgtgtaccagtcaccaatgagaacggtgtattcatcctcaggatctgggtaaggcacacgaataatcatgcgactgtttacacgaaggccaccaaaaccaccagctgccctatgcatggctgtgctcgggtagaataaagaactgcctatttggtcctcacctgatacgaacgtgaagttgtcctggcgaatgggcagtatttctgcacccctcttgcatgaattcttttgtgtggatgccttc

SEQ ID NO: 14829 - DNA, 296 bp, Glycine max
  unsure (1)..(296): unsure at all n locations
tttgttaaaacataagcacttatacaatgaatgaaagctggagttgctgcacatgatgtccaacgttatgtcaaggaatcagattgggctgcacaatgcacaaggcaaagataaaatgtcaaatgaagatttgaagctgcaggatccacgatgtcggacacgatgtcctgacatccggcccgaaaatactggacacataaatctgttatatctttaacagattaatgtgcagttagcaacagaattggcgatctatctttaggaacgaattanaagataattaaagtttgaattac

SEQ ID NO: 14830 - DNA, 467 bp, Glycine max
  unsure (1)..(467): unsure at all n locations
ttggcaatgtactcaacgaagtacttgtgtgcctctaaaataaaaggattaaaaatatatcagttacataggcagttggatctgtaagagcttgataagctttggcaatgtactcaacgaagtacttgtgtgcctctaaaataaaaggaataaaaatatatcagttagcagttacatatgcgattgtaggaatccaacattcctgcaaacatcaaagttggcattgcaacaataaaaaaaaataaacaactgaaacaccttcaacctggatctgggtttttatctggatggtattgaatagaaagtcgcctatactttttctttatttcagactctgccgctccaggctctaatcctagaatattaaacggatcanaaatttcaatctgcatcaaaattaaaagaaaaatttcagaacgtgcaccagtggaagtctcagccaattagtaaaatgttaaacacaaata

SEQ ID NO: 14831 - DNA, 336 bp, Glycine max
  unsure (1)..(336): unsure at all n locations
cttcacaaatcgtctataaaaacttgcttagccatgaaaactcctcacctcggtcacagacttaggtgtaggccattcttgaatagccctaaccttcttctcatcaacttgcactccttttgaactcacaacaaaaccaagaaacacaacatggttagtacaaaagatgcatttttcaagaatggcatacaattgttcttttctaagcacagtcaagacagaatttaaatgatcaatatgcaaatcaagtgaagtgctatagataagaatatcatcaaagtacaccacaacanactttcctatgaactctctcaagatatgggtcattaatctcat

SEQ ID NO: 14832 - DNA, 444 bp, Glycine max
  unsure (1)..(444): unsure at all n locations
catgcaagcttctgttatgaatntcgagtgtctcgatatactacgggactttatcggacatccgagtaaaaagttattgacatttgaatttgctcatagcattcgttgtcaattacgagcgtctagatatattaaaggattcattcggacatccgagtaaaaagttattatctttttatttcgctcagagcttctgttttcaatttcgagcatctcgatatattacaggactcaatcggatatccgagtcaaaagttattgtcgtttggatttgctacgagcttccggtttcaattacgagcgtctcaatatgctacgggacacaatcggacatccgagtaaaaagttattgtcgtgtgaatttactcagagcttccgtcgtcaattacgagcgtctcgatatattacagggattacttggacatccgagtaaaaagtcattgt

SEQ ID NO: 14833 - DNA, 326 bp, Glycine max
  unsure (1)..(326): unsure at all n locations
nngcttatatgattggctaatattttgttaatacataagcactnagacaatgaaggaaagctggagttgctgcacatgatgtccaacgttatgtcaaggaatcagatcgggctgcacaatgcacaaggcaagataaaatgtcaaatgaagaattgaagctgcaggatccacgatgtcggatacaatgtccaggacatcctgcccgaaaatgcacaaggcatgataaaagaattgaagctgcaggatccacgatgtctgatactatgtccatgacatcttgcccgaaaatactggacacataaatctgttatatctttaacagaata

SEQ ID NO: 14834 - DNA, 434 bp, Glycine max
  unsure (1)..(434): unsure at all n locations
agcttaaatccttaactgcacaggctctattatttgaagagtatccttgtggaaccttcacccaacgaagacactgacaaaaacatatcttctccttcttggacaaagtatggcaggctgggggcaagtaaattttcttcccatcaaaccttggatgcaactgtgatcgtatacccatatcaactagatcttgacgggtattcaagccatccttcgtcttgccttgaatgttaaggagcgtcccaatcaaactgtcacaaacacttttctccacatgcataacatcaatacaatgtctaacttcaagatcacaccagtacggaagatcaaagagnatggacctcttcttccatatgcaactatgactattatccatcttttaggtcttcccacatacaatattcaggtgttgaacccgctgatatacctgctca

SEQ ID NO: 14835 - DNA, 329 bp, Glycine max
  unsure (1)..(329): unsure at all n locations
aagatgtgctgaattctctagagactgtcttcttagaaataaaaaggcaatcgatctctatatgtttggcacgctcatgaaaaattgngtagatgtaatatgaggagctgcgtgattaacacaaattagtctcagttccaacctcacacatttagctcttcagcgattagtctaattgntttatacattatttgacaagttgtgagagtcatagcttgaatttctgcttcagctttggaccttgcaaccacattntgattcattttttttcctttccatgaaatgagaatccctcaanatagaacacaatatccaaaggtggatctcct

SEQ ID NO: 14836 - DNA, 300 bp, Glycine max
  unsure (1)..(300): unsure at all n locations
ttcgagcgtctcgatatattacgggactctatcggactttcgagtggaaagttattgtcgttagaatttgttgcgagcctcggttttaaaatttgagcgtctcgatatattacgggactcaatcggacatccgagtaaaacgttattgtcgttcgaatttgcaacgagcctctgtttcaattntgagcatctcgatatgttattggactcaatcagacttccgaatgaaaagttgttgtcgttcgtatttgctacgagcttcggtttcaatttcgagcgtttgacgggactcaatcggac

SEQ ID NO: 14837 - DNA, 393 bp, Glycine max
  unsure (1)..(393): unsure at all n locations
caatagacctccaatctttaatggagagggttaccactactggaaaacccgaatgcaaatttttattgaggcaatagatctaaatatttgggaagccatagaaatagggccttatatacccaccacagtagaaagagtttcaatagatggtagttcatcaagtgaaagcatcactatagaaaaacctatagatagatggtctgaagaggatagaaaacgagtacaatacaacttataagccaaaaacataataacatctgccctgtgaatggatgaatatctcanggtttcacattgtaagagtgctaaggaaatatgggacactcttagattaacacatgaaggaactacggatgttataagatctatgatacatgcactaactcatgagta

SEQ ID NO: 14838 - DNA, 389 bp, Glycine max
  unsure (1)..(389): unsure at all n locations
agcttgaatngngtaccattatcggtgacaatggcataagcaagaccgtatctgcatatgaactntctcacagtggccttgcttcaatccacttggtgaaatagtcaatggagaccaaaaagaacgtaacttgtcttgtgcttttggtgacggccctagtatgtccatcccctacatggcanaaggccaaggggaactaaagttatggaagttgtcgggtggtgttcatggaacttctggcatcgtaaataccttcttgttaagttaagggcgcctaccttaagtgtcggccaatagtagccatcatgcactanctttttttccagggagcgccccctcgtgtggaggccaaagaatccttcatgtaactctcccatgacataatctac

SEQ ID NO: 14839 - DNA, 310 bp, Glycine max
atcctcttagtcacctgccgcatgcaagcttggcactcggatgctgcgatggatagtgggagtgatgctcttgcgaacattagatcgaaagtatatctgtctcccaagctttggtatttgagggttaatgtgataaaggcacaggaccatatgccaactgataagggtagataccctgaggtatttgtgaaggctattctggggaatcaggcctcgacgactagaatctctcaagtatgagtattaatccaatgtggaatgaggatttgatgtttgtggtggcagaacagtttaggagccgctgattttg

SEQ ID NO: 14840 - DNA, 319 bp, Glycine max
agagaaggagaatggattaaagcctccattccactatctacgcgcgatgagtatttctccctccaaagacattaatttgcaaatctcaacggtgaaaacatgtgaaagtggcattcaaatcctgtgtcccaatttcatgaagatccaacggttaacagaacctggattgtagttttactaagatagttttgggtttctgcgggaagagaaaaagttacaatgcgaagggtatttctctcagcttcgacattgtttcgcaattttcaacggtgagaattcttggaaataagtttcaaacctggggctgaaatatcatgac

SEQ ID NO: 14841 - DNA, 351 bp, Glycine max
  unsure (1)..(351): unsure at all n locations
aattttgtgcctcacatgaagtctgaactttgaagtgtaattctcaaatgatcaaagttgataaaatccacacacatagcctctatttatagcataagtgtcacacaaaattagagggaaatttgaatttctattcagatttcacttgaatttgtggagtcaaaatttcactaattatgattagtgaattntagcaatggttcagtccactaatccaagatcaagtgcaagatttctccactaagtgtgcttaggtgtcatgaggcacgtaaaacatgaaagacatgcacaaagtgtggctatatgatgtggcaatggagtgtagcaagaaaatgttcacattcccctcta

SEQ ID NO: 14842 - DNA, 444 bp, Glycine max
  unsure (1)..(444): unsure at all n locations
agctntactatacagagaatatccaaggaatttaccttcatctgacttagcatcaaattttcctaagttatcttttccattattcaatacaaaacatttacaaccaaagatatgaagatgtgagatgtttggttntctgccattgaacaatccatatggagttttcttcaaaatgggtcttattaaagccctatataaaatgtagcatgcaatgttaacggcttcagcccaaaagtattttggaagaggagtatcatttaataaagttctagcaatctcttccaaagatctatttttcctttcaacaacaccattttgttgaggggttcttggtgcagaaaaattatgctcaatcccatgcttatcacaaaataattcanattctttattntcaaactcacccncatgatcactcctaatagatataatcttgagattttctta

SEQ ID NO: 14843 - DNA, 454 bp, Glycine max
  unsure (1)..(454): unsure at all n locations
agcttatcatacatcaaacttggagaaagagttctttgggtcaagacatgagaagcaatcaagtataatgttacttccttcactaaagcggtgatccatctccacacatattttatcaatagcaacataaaaaatctttgcacggtaatgatgaagattagtgatagtcctcccttctgctcttgaacgatcccgaaccggtatttcgtcattcatatttggtaccggaatacttttagctacacaaaatccttggacatcggcaaaaaaattattccagccactctctctcattgtgcccaaccgagctttgacaacatcaactaattccatggcattcacaatattaagatcttttctttgcaatacaattgagagctcgtgtgtgatacccaaccacttttacattaacctcanaatataagcacatttagagctctccattntttctatc

SEQ ID NO: 14844 - DNA, 350 bp, Glycine max
  unsure (1)..(350): unsure at all n locations
tcacaaatctggacctgtcgcaagtgtttgtggtttgtgctcctctgctgaccaccatacagacctttgcccttccatgcagcaacctggagcaattgagcagcctgaagcttatgctgcaaatatttacaatagacctcctcaacctcagcagcanaatcaaccacagtagagcaattatgacctttccagcaacagatacaaccctggatggaggaatcaccctaacctcagatggtccagccctcagcaacaacaacagcagcctgctgcttccttccaaaatgctgctggcccaagcagaccatacattcctccaccaatccaacaacagcaacaaccccagaaac

SEQ ID NO: 14845 - DNA, 297 bp, Glycine max
atgcaacaattgttagccgtggctatacgagacatcttgccaaacaaagtcaggttcacgataactcgcctgtgctttttcttccatgctatatgtagcaaagagactgatccagtaatgttagatgagtgggaaaatgaggccacaattatactgtgccagttggagatgtattttccccctgctttctttgacatcatgattcatttgattgtgcatctggtcagaaaaatcaaatgttgaggtcctgtttatctaccgtggatgtacccggttgagcgatacatgaagatctta

SEQ ID NO: 14846 - DNA, 308 bp, Glycine max
taccaacatcagacaccatggattatattttgtgagaacgaaaaaaggggtggagggagactgacacatagagaccgatgctttgagccggaaatgaagtctgagcttggacctgtaattctcaaatgatccatgttgattgattactggcacatagcctttctttataacataagcgtcacacaaaaatacagggagaggagaatatctattcaaactgcacatgattctgtggtgtgaacatttcgctttttatgaataaagaattataaccatggttcaatccactaaaacaagaccaagtgcca

SEQ ID NO: 14847 - DNA, 322 bp, Glycine max
  unsure (1)..(322): unsure at all n locations
cttaaggttgagaaatgagtttttgttagggagaaaacaggacacaaaatttatgcctcaaatgaggtctgaactttgaagtgtaatttcaaaaatgattaaagttgaaaaaaatgcatacccaaggcctctatttatagcctaagtgtcacacaaaattgaagggaaatttgaaattttggctccacaaattcaaattcaaattcaaaatnncagtgaaatttgaataaaaattcaaatttcactaattatgattagtgaattttagctatggttcagcccactaatccaagatcaagtccaagattctccacttgtgctt

SEQ ID NO: 14848 - DNA, 261 bp, Glycine max
tgctacaggttctagggaacattacactgcgatgggctataaaatccgcatacattgtgagcagcattctgaaagatgcttctgtgcctgatgctgagaaagatgtttcaacatattccaccccaagtgataccgtgcctgatgctgagaaagatgttccaacatcctgcgctccgaatgctgaagccctcccttcacccagtgaagaggaatcttcagaagaagaggatcaagccttataggagactcctgctccacggg

SEQ ID NO: 14849 - DNA, 331 bp, Glycine max
  unsure (1)..(331): unsure at all n locations
tatgaccatatgaattggnccttatctttcattgttcaatttcgagcgtctcgatatattatgcgcctgaatcggacctccgagtgaaaagttatgaccatataaattgctcaagagggtctattgttcaatttcgagcgtctcgatatattatgcgccttaatcggacctccgagttaaaagttatgaccattggaattgctcaagaacttccattattaaatttcgagcgtctcgatatattatgcgcctaaatcggacctccgagttaaaagttatgaccatatgaattgctcaagagctttcattgttcaatttcgagcgtctcgat

SEQ ID NO: 14850 - DNA, 337 bp, Glycine max
tgcttctacactaagaagcactctttattgagtgaatcaccaaagagagaacaaccaccaaaattgaggaccgttttgtaattttgtaatttacaatttacttaccttcatttctttcaagttttgtaacaaaaaggcctttcattggaagtgtgttgggagcctccaataagttaccaaacttccatttgtgtgtaataattttaggcaatttttccttaggatagtgagtgttttgttgggaaccttgaatgtggtcatccaaacactcttaggatttgcctagtttacatttcttgcttactttcatagcttatttcctttaccttccctttta

SEQ ID NO: 14851 - DNA, 331 bp, Glycine max
tgaatatgattatatgatggatgattatgttgagaatgagaggtgaccaggaagatagctaagggaattgaagtggcacacatgcttaggccttgggaaagagatagttcattgtttcaccaatatctgttggtttttttcttcatacttgtctttacattttcttccatttttaccatagtaatagaagcagtgtgatgtagctccattggagcctgtaggccttggatcttcttcatcaatggagtcctttgcttcttgaagtttgatggcagcggaaaggagaaggagaaatatgattggagacgccactttcaggagaaaaacagtc

SEQ ID NO: 14852 - DNA, 325 bp, Glycine max
ttacttcaatattttccaaatcatttataatcttgttgaaatcagccaattgttcagtggcagttcttgactctgtcatcttgaagatgtacagttgttgcttcaagcatagccgatttgcaaggaactttgtcatatacaatgactccagtttcaaccacattgaggttgttgtcctttctcttgcaacttctcttaaagctttatctccaaggcatagaatgattgcacttctggctttagcaatcatctctaatttcttctttgagcttaaagattctgacatcctttcttccccttcaagagcttctacacagccatggtg

SEQ ID NO: 14853 - DNA, 338 bp, Glycine max
tccattgttcaatttcgagtgtctttttatattatgcgcctgaatcggacctccgaatgaaaagttatgaccatttgaatttctcgagagctacctttgttcaatttcgtgcgtctcgatatattatgcgcctgaatcggacctccgagtgaaaagttatgaccatttgaatttctcgagagcttccgatgttcaatttcgagcgtcttgatatattatgcgactgaatctgacctccgggtgaaaagttatgaccattttaatttctcaagagcttccgttgttcaattttgagcgtctctatctgtgatgcgcctaaatcagacatccgagttaaa

SEQ ID NO: 14854 - DNA, 336 bp, Glycine max
tagctacacatacctctctaatagctaagctcacctccttgagatgagaagctagagcttagctacacaccccctataatagctaagctcacccccatgaggaaaaacatgaaaataacaaaaaaagtccttattacaaagacaactcaaaatgccccaaaatacaaggctaaaaccctatactactataatggccaaaatacaaggcctagacgaaggaaaaacctattctaatatttacaaagataagcgggctcatacttagcccatgggctcgaaatctaccctaaggctcatgagaaccctagggcctttccttggatctctagcccaatc

SEQ ID NO: 14855 - DNA, 340 bp, Glycine max
ttgggagaatcaaatattattgggttgtattaatacatatggatcatctatgagaaaaattaggaccaaggacataaaagatataacttgttatgatgatgtatatatacgtgagatacatggttacttgggttgcttaatgtgcaatacatacaaaactttcacacatatttctaatttaaataaatccaataaattttccaaactaattatttgtagatccgttttagttattttaaattagtataaaaatatataatgttgcaacgagttgcaaacacaaatattaagactatagaccaaaatagaagctaacaaaatcaaatactaatttatttat

SEQ ID NO: 14856 - DNA, 324 bp, Glycine max
tcaacattcaatttcgagggtttctatatattacgggattcaatcagacatccgagtaaaaagttattggcgtttgaatttgctcagagcttcggcattcaagtcggagcctctcgatatactacgggactcaatcagaccaccgagtaaaaagttattgtcgtttgaatttgctcagagcttcggcattcaagtccaatcgtctcgatatattacgggactcaatcagacatccgagtaaaaagttattgtcgtttgaatttgctcagagcttccaaaatctatttcgagcgtttcgatatattacgggactgaatcagacat

SEQ ID NO: 14857 - DNA, 486 bp, Glycine max
  unsure (1)..(486): unsure at all n locations
gtgaaagaattagtatgggcagaaatgtctccgcattgattggtaaatttgttcctcaaattcctgaaaaatgtaaagatccaggtacattcagcataccttgtattatagggaacaataagttttacaatgccatgctagatttaggagcttctgttagtgttatgcctctgcctatttttaactctctatctctaggtcctttgcaatcaactgatgtggtaattcatttagctaatagaagtgttgcctatcctgctggtttcatagaggatgtcttagttagagttggtgagctcattttccctgttgattnttatattttaaatatggaggagggattttctaaaggatcagttcttatcattctaggcagaccttttatganaactgctagaactaagatagatgtatatgtacgcacactatctantggagttggtgatataactattcattntaatattcttgatgctataaacacca

SEQ ID NO: 14858 - DNA, 486 bp, Glycine max
  unsure (1)..(486): unsure at all n locations
ntgagaagcatgtgatccttnggcatcatcaaaacattcagcttgatcctttgtctacaaaatcgacgttaacatataaatgttaacatcaatttttgaaaaaactgatgttatccaagtgatattaacatcggttttcgaaaaaccaatgttaacattgtctcgttaacattggtttttcaaaatcagatgttaatatcttcatgtttattacaattatgccccacccttttctaacatctatttaatcaaaaaccaatgttaaatatctttttttctagaagtatgttttgatgaatagatatctgcctcaattaatataggatcccaataaataagaccatgataacactgagaaggtatcatacttttatttgaattaattatctacgaaggagatgaatcaagaagatattgttgatttcatgttgcgcatggatattcaagactaaaggccaattctagctctatcataatatatatctc

SEQ ID NO: 14859 - DNA, 483 bp, Glycine max
  unsure (1)..(483): unsure at all n locations
tactcagctatcgaatatatataagagaactatgactatcgaagaatctattcttgtttcttggatgagtctaatgctattgctgcaagagaggatattctatatgatatcgcagaatctttataacaaatgcatatttatggaaaagattataaagganaagggaaaggaagcaatgaagatcctccaaaagaagccaaatcaaataatgaacttccaacagaatggaaagcttcgagagatcatccncttgagaacattattggtgatatctcacaaggggtaacaactagacattctcttaaagatatatgcaataatatggcttttgtgtctatgattgaacctaanaatctaaatgaagccataatagatgatcattggatagttgctatgcaaaanaaactaaatcagtttgagagaaacaatgtgtgggaactagtagagaaacctgaagactaccccatcatatgaacacaatgg

SEQ ID NO: 14860 - DNA, 433 bp, Glycine max
atatagatgtcttcctctaaatccccatgcaagaatgcagttttaacatctaactactccaagtgaagattctctacagctactatgctcagaataactctgatggtagtcatctttacaactggagagaagatctctgtgaaatcaattcctttgttctgctgaaaccctttcaccacaagtctcgccttgtatcttcttctacctttagattcttcctttagcctatagacccacctattctgtaacgccttctttccttctggcaatttagttaaagaccacgtcttattcttctgaagggatgccatctcatctttcatcgctagctcccactcaatagtgtcattcccctgtgtagcctcattgaaacattctggctcaccagcatcagttaacaacaaataatgcaatgaaggggaatacctatctg

SEQ ID NO: 14861 - DNA, 298 bp, Glycine max
ctcgagagcttccgttgttcaatttttagcgtgtagatgagttatgtccccgaatcggacatctgtgtgaaaagttatgaccacttcaatgtctcgagagcttccgctgatcaatttcgagcgtctcgatgtattatgaccccgaatgggacatccgcgtgaaaacgtatgaccattcaaatttctcgagagccttcggtgatcaatttcgagacgcctgacgaattatgtgcccgcatcgaacgttcgagtgaggacttacgaccaagagaatttctcgagagcttccgctgttcga

SEQ ID NO: 14862 - DNA, 396 bp, Glycine max
  unsure (1)..(396): unsure at all n locations
tgtnatcgattacacacatactgtaatcgattaccagatgagtttttcaaanaacattctcaacagtcacatctttntatctgattcttaagtggccatcaaaggcttatatatatgtgactagagacacgaatttaacaagagtttttaagaacaaaaaggtcttatcctcttaaaaagcaaaatcattttaccctcttacaaattccttggccaaaactcttgtgattcaataaggaattatttgagtgctcaaattgttcaatctatctctttcaagagagagttcttcttttcttcttcttcattctgaaaagggattaagagaccgagggtctcttgttgtgaaagaattctaaacacaaaggaagggttgtccttgtgtgtttagaactt

SEQ ID NO: 14863 - DNA, 380 bp, Glycine max
  unsure (1)..(380): unsure at all n locations
agtgtccatattatctcttagtttatgtcatgaanatattataaaactacaaagcacatttaaataataacagcttccaaagttaccagatatcatcatatctatgatatgatgatccaataacaagcaaaactgaaaggtagtttcaattgggtataagttgcataaaaaaatttaaaaacactaagactactcaatacttgactggagcaaggatatcaagttgggaaccgagcttgtcttcagcaaccttctcggctttcacccttaatttgttgagctgcttctttctctcataaaccaattgtgtcttttcctttctcttcttttctagctcctatgagcaataaaacaattactcacatcagcaaacacatcta

SEQ ID NO: 14864 - DNA, 360 bp, Glycine max
  unsure (1)..(360): unsure at all n locations
tctaaactntatacaagaatgaagctctgataccacttgttagacaagtggcctcaaatatcttaagaagggggggttgaattaagatattccaaactacttccccaattaaaaatctatttcactttcttttcaagttataaattcccttaacaatgaacttcttaaatattaattcaaataaaaacaatttgaatatgaatataaagaaataataaacaaaggagtttaagggaagagaaagtgcaaactcagatttatactggttcggccacacccttgtgcctacgtccagtccctaagcaacccgcttgagagttccactatcttgtaaattccctttacaagttctaaacacat

SEQ ID NO: 14865 - DNA, 441 bp, Glycine max
  unsure (1)..(441): unsure at all n locations
aagcttataaaanaactataataagtcacaagttacttggatcatgaattgtttgtgttaaataaattcatatttaattaaatttatctagttattattaaatatattctatgtagcatttcttttacatgccataagtatcctttgagtatttaagagaaatgcatactcaagatgctactattaattaagataaaaaaaaatagaaagaataatttagaatttaagataaatatcacaagtgtcccatgagtattatcctatattcaagatactataattattaatgtttccattatcaataatattgacatcacatatatatatatatatatatatatatatgaggtgctgtattattatcactatcattaatatatatcactattattgctactatcaatagtactactatatcattgatcacgctcacatcacccc

SEQ ID NO: 14866 - DNA, 460 bp, Glycine max
  unsure (1)..(460): unsure at all n locations
tctgtcatcttcttctctggaccaatttgaagccatctctggatctgttcaacacacctaggcactacatgtatgtagaatatggactcttctgcttcattaaaagccttctcaattgcaacttcagaaaaatcaatggaaagacaattagggtcatttccaagaactatagaacatatgttatcgtaggagaagcgattgaagacatcttgaagatccacaactcttccctgttgctgtacatgatccaatattggaaggagaccattatgcaccttgacgtgaatggttttcactaaaaacacctcgaagcttttctgcttaaagagagaatggaagagaatccctgtgtacttccatgcttcataatcagcggagaaaataccgtctccgaacgcctganaaatgtgacgaaactcgggtcccttgacgtagttgaggaaattcttgctcagcatgt

SEQ ID NO: 14867 - DNA, 358 bp, Glycine max
  unsure (1)..(358): unsure at all n locations
tagtatccatcttgggcctttttcccacaactctttgtaatgggagagaaattttcatctaaagcatacaagtccctaatgttatcaaatcctaaaatttgagctccttgggagcaaaacaatgtgtgtctcctagagagagcatcaactaccacatttgtttttccctttttgtatttgataacatantggaaatgctctangtactctacccattttgcatgccttttgtttaactcgctttgccctctaatgaacttaagtgattgatgatcactatgaatgacaaattccttggaaacaaggtaatgttcccaagttcggagtgctcttattaatgcataaagctctttatcat

SEQ ID NO: 14868 - DNA, 456 bp, Glycine max
  unsure (1)..(456): unsure at all n locations
gtcatacctcacacaatatatgtatgtgtgtttatgtagcaagataccttatatatgcatgcatgtagcaaaaagatatctcacaaaatatatatatgtatgtttaggtagcaagataccttggatatgcatttatgtaacaaaaaaatacttcacaaaatatatatgtatgcttaggtagaaagataccttagatatgcatgtgtgtatcanaaaaatacttcacaaaacatatatatgtatgtttaggtacaaagataccttggatgtgcatgtatatagcgaagatatctcacaaaatatatatatgtatgtttaggtagcaagataccttggatatgcatgtatatagcaaaaatacctcacaaaacatatatatgtatgtttatgtagcaagaatacgtggatatgcatgtatatagcanatatacctcacaaaaatatacacatggtacg

SEQ ID NO: 14869 - DNA, 299 bp, Glycine max
  unsure (1)..(299): unsure at all n locations
actcgagactaaagagaggaattatcctacccatgatctggaggctgctgtagttnttgcccttaagatgtggaggcattacttgtttggctccaagtttgagttatttagtgaccataagatccttaagtacttgtttagtcagaaagagctgaacatgcgttaaaggagatggttagagtttcttanagattatgattntaagcttagctaccatcccggcaaagccaatgtagtggctgatgccttgagttggaaatccctacatatatctgccttgatggttagagagatggatc

SEQ ID NO: 14870 - DNA, 405 bp, Glycine max
agcttagctacacatacctttataatagcttagcacacctccttgagatgagaagctagaacttatctacacaccccctataatagctaagctcacccccatgacaaaaaacatgaaaataaccaataaaagtccttattacaaagacaactcaacatgccccgaaatacaagggctaaaccctatactactagaatggccaaaatacaaggcctagacgaaggaataacctattctaatatttacaaagataagcgggctcatacttagcccatgggctcgaaatctaccctaaggctcatgagaaccctatggcctttccttggatctctagcccaatctacttggagtcttgtagccaatgcccttgcggggtaggattgcatcattacttttcactcagat

SEQ ID NO: 14871 - DNA, 414 bp, Glycine max
  unsure (1)..(414): unsure at all n locations
ctcagcttgacattcaacttcgagcgtctcgttatattatacgactcaattatacatccgagtaaaaagttattgtcgttcgaatttgctcagagcttcaacattcaatttcgagcgtctcgatatatgacgggactcaatcagacatccgagtaaaacgatattatcgtcttaattggctcagagcttctacattcaattttgagcgtctcgatatgttacgggactcaatcacgcatccgagtaanaagatactgtcggttgaattggctgagagctncaacattcaatgtcgagcgtctcgatatgttaccggactcaatcagacatccgagtgaaaaggtattgtcgtgtgagttggctcatagcttcaacattcaatttcgagcgtctcgatatatgacgggactcaat

SEQ ID NO: 14872 - DNA, 445 bp, Glycine max
  unsure (1)..(445): unsure at all n locations
agcttataatatatcgatacgctcgatattatatgtcgaanactcttgacaaattcaaatggccataacgtttcacacggatgttcgattcgggcgcataatatgtcgagaggctcaaaattgaacaacggaagctcttgagaaattcaaatggtcataacttttcacacggatgttcgattaacgcgcatcacatatagagacactcgatattgaacaacggaagatcttacgaaattaaaatggtcataacttttcacactgatgtccgattcaggcttataatatatcgatacgctcgaaattaaacatcggaagctctcgagaaattcaaatggtcataacttttcacacggatgtccgattcgagcgcataatatgtcgagaggctcgaaattgaacaacggaagctctngagaaattcanatggtcataacttttcaca

SEQ ID NO: 14873 - DNA, 409 bp, Glycine max
  unsure (1)..(409): unsure at all n locations
cacattcacaatactcatttttggtgtgtgagtttctggagatgggcgacgtcaagaagattttgaaggatgatgaacaagcaattgcgtttgattggaataaaagggtggatgttgttaagggtgtaacaaatgctttatgctatatgcatcatgattgctcacctccaatcgttcatcgtgatatatcaagcaagaatgttcttttggattccgattatgtagctcatgtctcagacttcggaacagccaagtttcttaatccagattcatccaattggacctcctttgcaggaacctctggatatgctgctccaggntaatttcctttctctatactatttgagtaaatcatgatattntagtttgtcttcggtagccatttacanatatatatacatcacaatta

SEQ ID NO: 14874 - DNA, 375 bp, Glycine max
  unsure (1)..(375): unsure at all n locations
taaacacaatctctgtatgggctaaagcaatcccccaagccatggaacaagagatttgatgacattatggctcacataccggttcatagaagtcactatgaatacttgtgttacttcaaattttcttctaaatctgagtttgtgatattgctattatatgccgatgatataaattacatggaagggtatccatatgatatatgctganggccactgatgtatgctatggtatgtactcgccctgacatagctcatgcactgagcttagtaagtaggtctatgggaaaatcaggcaaatgacattggcaagcccctgaatggatactcagatatatcagaggatcacttggaagagctattgtctatgctttagct

SEQ ID NO: 14875 - DNA, 369 bp, Glycine max
  unsure (1)..(369): unsure at all n locations
gtttgtcatttcaatttctcactatttaaaatggatcattttcaaggtccaacgccttataatgatcacctcttaaggtaaaaaagaatcacttgataagcaagaactacgtaggtctgatttcctcatcgcaattgtggatacgtaggagcaaaagccctgcttttgtcgaccaccccaagagatcgttaatggtccaatgccttaatgtttctctcctctcanaaaaacaagagatcgttaatggtccaagctcatgcttttataaaaaggttcatcacgtcaagttgaaatatgaaagtnaccgtcttgcaaaattggcgcataagatgaatcgagtcacatcactgcttcgtctactggcaaaca

SEQ ID NO: 14876 - DNA, 463 bp, Glycine max
  unsure (1)..(463): unsure at all n locations
agaataaaacaatccanaatcaattgtacctttcaagtaacgaagaaattcttttgcggcttttagatgaggagaggtaggagcctccataaagcgacacacaactcccaccgcatatagaatatcgggccttgtattggttagataccttaaactccccacaagactcttgaagatcgtgaagtctaccttctctccttcatcaaactttgataacttcaagccaccttccataggtgtgttcacgggattgcaatcaagcatattaaattacttcaacacttcttttgtgtacctttcttgtgagacaaagataccattctccgtttgcttcacttccattcccaagtaatatgacatgagtcccatatctgtcatatcagattcacgagacatggactccttgaagtcttcanacaaatttgggttattggccggaaagataatgcatccacataaagac

SEQ ID NO: 14877 - DNA, 291 bp, Glycine max
atgcaatactagactcagaatatgcaacaaacactatacctaaatcagtgtcacagaaactggaagaaaatactttatacaagcacaaacttcaagccttattccatgtattgtggggaagctatgactggccatatgggttgaggtgttatagaggagcacgcatggcggaagggaccttggactgctgaataggacaggtggcttgtagagtatgtcaggttgcatggagaacgcagacggaactctgtcgctatgctcgcaatatataaacacgcacactttttcact

SEQ ID NO: 14878 - DNA, 372 bp, Glycine max
  unsure (1)..(372): unsure at all n locations
tccaagagttgaagaggcggttgacaacagctccattgttatatttttccgaccctaagagaccatntgaagtgtattgcgatgcgagcgggcaacgcttggggtgtgtgttaatgtangagggaagagtagtggcttatgcttcacgccaattgcatcctcatgaagttaactatccgacccatgacttggaactagcagcggtggtctttgctttaaagatttggagaggcactattaatttggtactcgttttgaagttttcagcgatcacaagagcctcaaatacttgttcgaccagaaggaactcaatatgaggcaacaaagatggatgaagttcctcaaggattatgattntggtctttcctacca

SEQ ID NO: 14879 - DNA, 426 bp, Glycine max
agctgggtgggagatatagcatcttgctgttgttagtttttcaaaaatcgatgttctagtaaaactgcagctgttggccgctctgctggatttgttttaaagcagcacctcaagaaatctttaccctcagatgaaagtgtttcatgtataggaggggtctccttcataaccttaaacagagctgcagcctgcataattagagaagatgtttatttagcaagataaaaaaaaaggacccgtatacagatagcatctctgcctaatccacaagttgcaaacagaaaaaagttggctaacagatgccttagctggttgtaaattgatggttgccaaaataagttaaaagctgacacattatcctacattaccaaacgttagaatctcatattctcatagaagcagatataaaccatgtctaataagaat

SEQ ID NO: 14880 - DNA, 380 bp, Glycine max
  unsure (1)..(380): unsure at all n locations
ctactataatngngaacatctctttctctgtcattggaggtgccacttgagcttgcagatcccttcaactctgggcatattccttgaaggaatcatgccctttttttgcaccgtgtctataagtgcattctatccgaagccatatccaaattgtactgatactgcttaatgaaggcaaccattangtccctccaagaatgaactcgggagggtccaagttagcgtaccaggtaacagctacccattaagactttcttggaagaaatgtattagtagttcctcatcttttgcgtatacccccatcttccgacaatacnatcttagaatggtcttggagcaagtagtccccttgtacttgtcanagtccgacacccttgaac

SEQ ID NO: 14881 - DNA, 425 bp, Glycine max
ctttggctattgagagccaaagaattatttctctctgacctttcgtcttgctgaagttcttgttcatgaactttgagagtaccaacaagttcttcaagggacataaaatcaagattctttagagcccttaatggtggtacccatggtctctattttttagacaaacttctcaagattttttccatatgatcatagttatcataagttctgcttagagatattaattcattaagaatggtttgaaagcatccaaacatactctgtatgtcttcgccttcttctatagagaagagttcatatttacgagtaaggagacctagtttggtcatctttacatgtgacgttcattcacgtgttatagctaaagtgtctcacatctggtttgcactcttgaagctaagtactttggtgtatctttctctcat

SEQ ID NO: 14882 - DNA, 470 bp, Glycine max
  unsure (1)..(470): unsure at all n locations
gatgcacgaatgcatacgaaatacatgtgttaatataatatgggttaaaagttaaattagaaagaaaaaaaccatgtttaacatagatcatggtgaattggcttatatatgttttcttacaaaaacgaattcgtactccaaaacatttttcttaaaacttgggttacaagggtcaactaatttttctcaccaaatagacatattatattanagtagtatcttctgttatgattccatatataataaatatggacatgagaatttaaacatttaaactcctcgccatcacatgctcaatgaacataattattgatcaattatatgttacaccgtattggtaaaaaaatgaaactgtttcacacgtgcataaataaatgaattcaaatcacacataatatgacgttgccaatgaggcacatcttgtgctnntttggtattattaaataaaattaatattagcttacaaaaaa

SEQ ID NO: 14883 - DNA, 401 bp, Glycine max
  unsure (1)..(401): unsure at all n locations
aatcaacacggaggtagtaccctctcatacacaggagctactcttttccttggcgagaaatcaacaaatacttggaattagaactggccctaccaacattacagatagcctaataacagccaggaaggcagtgaaggctatctcccttcatagacaccgaagcaacgtggttcgaactgtgtgctttgacctctcgtctgatttaggccacttcgattcaaagattaccgacatcctctcagctctatgctgaggtgaaaggtatggaatttcatcaatcttcaacggtgacttgtaccctatactcagcaacgggtttatccaaatccaaaaggccttggatattgcagaagctgnagcaaagccacgaacgttggatttgcatatagntttgttcctca

SEQ ID NO: 14884 - DNA, 430 bp, Glycine max
taatagctaagctcacctccttgagatgagaagctagagcttagctacacaccccctataatagctaagctcacccccatgacaaaaaacatgaaaataataaaaaaaaagtccttattacaaagacaactcaaaatgccccgaaatacaaggctaaaaccctatactactagaatggccaaaatacaaggcctagacgaaggaaaaacctattctaatatttacaaagataagcgggctcatacttagcccatgggctcgaaatctaccctaaggctcatgagaaccctagggcctttccttggatctctagcccaatctacttggagtcttctagccaatgccctcgcggggtaggatggcatcattccctccaccttggaaagggattgacctcaaatcccgaggttcttcatactctgggctcctt

SEQ ID NO: 14885 - DNA, 448 bp, Glycine max
gctagagcttacctagttctacttctctaatagcaaagctcacctccttgagatgagaagctagagcttagctacgcacccccgataatagctaagctcactcccatgacaaaaaacatgaaaataataaaaaaaaagtccttattacaaagacaactcaaaatgcctcgaaatacaagggtaatactctatactactataatggccaaaatacaaggcctagacgaaggaaaaacctattctaatatttacaaagataagcgggctcatacttagcccatgggctcgaaatctaccctaaggctcatgagaaccctagggcctttccttggatctctagcccaatctacttggagtcttctagccaatgcccttgcggggtacgattgcatcattccctccaccttggaaaggatttgacctcaaatcccgacgctcttcatactct

SEQ ID NO: 14886 - DNA, 467 bp, Glycine max
  unsure (1)..(467): unsure at all n locations
aagattcctaaagaagctagagcttagctacatatacctctctaatagctaagctcacctccttgagatgagaagctagagcttagctacacaccccctataatagctaagctcacccccatgacaaaaaacatgaaaataataaaaaaaaagtccttattacaaagacaactcanaatgccccgaaatacaaggctaaaaccctatactactagaatggccaaaatacaaggcctagacgaaggaaaaacctattctaatatttacaaagataagcgggctcatacttagcccatgggctcgaaatctaccctaaggctcatgagaaccctagggcctttccttggatctctagcccaatctacttggagtcttctagccaatgcccttgcggngtaggattgcatcattccctccaccttggaaaggatttgacctcaaatcccgagggtcttcatactctgggc

SEQ ID NO: 14887 - DNA, 462 bp, Glycine max
  unsure (1)..(462): unsure at all n locations
tactaagctnttctctgtacacctacattcctatacacgaaaactttttctgtatacacacgcattaaaaaactctntctctttatatcaacatggtctatataaaacctttattccttttcaaagatttcttcttcctttttcagcatacgctcgttgtttatacaaaaattttctttatatacactcattgctcacacacaagaatttcttttcacacattatttatacacaaaatcttttcatacactttttatatacaaaaactcttttcttttctttatatacatatatgacattttgttcacaacgcctctttctttttctattcttggggttatcatgatgtttggtcgttntattttaggatgacgttcctaaatgaaaactctacacgggtccagaatttcaacaaacattattgacaataacgaagtaacactaatgaacagtccaaacaaa

SEQ ID NO: 14888 - DNA, 457 bp, Glycine max
tgcgtcaaccatgaaccatgtcataccaggcttgtcaatttatatttgaataaaatatccttttaaatacccattacacaacaaacaggtggattcaaaaatcaaaggcattgaattgaatgacccacacaaagccacaagagaaaaagaaatgacattttggcacaacccaattgaaaatcttaccaaccccagaaagaccaatccggaaaagggatgtcaaagtgttcctttgtggtgcaataccgaaatagaggcaaaggcattgcttggtgttcagtcttattaacagaaggtttatccatgcaatcaaacatcatatccacatctggcaccatcccagggtacctcctcataagctgcaacaacccccacagtgtaaacattgccctactctgcacacaagcatagtaccaatccacaaacaccttcccttcaacaatcaccactctgaacg

SEQ ID NO: 14889 - DNA, 346 bp, Glycine max
  unsure (1)..(346): unsure at all n locations
agcttcanaattcaatntcgagcgtctcaatagaatacggtactcaatcagacattcgagcaaaacattatttgtcgttgaattagctcagagcttcagaattcaatttcgatcgtctcgatatattacgggtctcaatcagacatctgagtaaaaaagttattattcgtctgaattgctgagagcttcaacattcaatttcgagcgtctcgatgttttatgggacttaatcagacatccgagtaaaaagttattggccgttgaatttgctgagagcttcaacattcaatntcgagcatctcgatatattaccggactcaatcagacatccgagtaaaaagttatc

SEQ ID NO: 14890 - DNA, 474 bp, Glycine max
  unsure (1)..(474): unsure at all n locations
agctctgataaanaccgagcagttctaataagatttgtttatgaatacccttacgctctgcagatatataaggtgacattttaggaattccatttctagtaccgcggccaaaatgaactcctgcttccatcatctctttcaagattatgttccaatatctttttgtcatttatatttatccccacacttttctttcatttcaaaatcgaaattctataaattttttgaaatgaaagaaagagacccggtatactgaaatagaaataagtgttcaaaagaaccttctcttctaccgaagaatggcctttgataaatgatcgggccatcttttctatttaatatataatatgagtattctctttaattatcttctgttattatacaaaataaaatgaccgaagatgaatccgctcttaagaaatcattatttagggaatattaaatactagattgctgcgatgtatcgcataaatt

SEQ ID NO: 14891 - DNA, 252 bp, Glycine max
gatccttaagcactgagctgcactgcagctgcgacacaacaattatctgcttacatgttgacaagcattaccttgcttcttgagcaccaaagatggtgttgtcaaaatttgaaaacatacccagtagtgcttttcctatcatccttatcaccacaccaatctgaatcactataaccaataacttctccttctatattcttctgactgtaaggatataaaatgccaagatccaatgttcctttcacatacctt

SEQ ID NO: 14892 - DNA, 368 bp, Glycine max
  unsure (1)..(368): unsure at all n locations
agctnggaaggtagtcatacctcacaaagtatatatatgtatgattgggtagtgaatatacctaagatatgcatgtatgtaaacaaaaatacttcacaaaatatatatatatatgtatgtttagatatgcatgcatgtaggaaaaatacttcacaaaatatatatatgtatgtttaggtagcaagatacctcggatatgcatgtatatagcaaaaatatctcacanaacatatatatgtatgtttaggtagcaagatacattggacacgcatgtatatagcaaaataactcacaaaaatatacgtatgtttaggtagcaaattacctcatgaaaaaaaagagcaaaaagagagtgagcaagaaaggaa

SEQ ID NO: 14893 - DNA, 409 bp, Glycine max
  unsure (1)..(409): unsure at all n locations
agcttcaaaaaatggcctcatcaacttcttattccctgaatgaaattcaataaatacgcctcctatatttaatggagagggttaccactactggaaaacccgaatgcaaattttcactgaggcaatagacttaaacatttgggaagccatagaagttggaccttatatacccaccatggtggctggaaatacaataatagagaaacctatagaagagtggtctgaagatgatagaagattagtgcagtacaatttaaaggctaanaacatcattacttatgccctangaatggatgaatattttacggtttcaaattgtaagagtgctaaggatatgtgggactgatgtgtcattattttctcctattatcttaacccttttgtcaccaatttaattactgattaactc

SEQ ID NO: 14894 - DNA, 408 bp, Glycine max
  unsure (1)..(408): unsure at all n locations
agcttcttatccaaggctcatctcggtggtgaagctccttcttccatggcttattccatagtggatggcgcctcctctcacctcttctcctttgtcttccactgcatctccatggtggaaaatcaccattaaaggacctcattgaagctcanagatccagcctccatagaagccccacaagcaagcttccatcatattcctccacccgggattgtatctattgctggagaggtcataattgttctggtggtggaatttgctgctgagtttgaggaggtctattgtagatgtttgcagcataagcttcaggctgttcaattgttccatatagttgcacagaagggcaaaggtctgtatggtggtcggcagaggagcataaaccacagaatcttgcgatatgtacatatt

SEQ ID NO: 14895 - DNA, 371 bp, Glycine max
tgatgcagctgagtttgtatcttcctcatgcactcctctaatgaatataacatcatttctggcgctaaactgctgggagttggaagccatcttctcaattaaatgtctagcttcaataagagtcatgtcttccagggctccaccactggcagcatctatcatacttctctccatattactgagtccttcatcaaaatattggagaagaagctgctctgaaatctgatggtgagggcaactagcacatagttttttaaatctctcccagtattcatacaggctctctccactgagttttctaatacctaagctatccttcctgatggctgtggtcttggaagcaaggaaaatgctttctaagaatactctct

SEQ ID NO: 14896 - DNA, 431 bp, Glycine max
  unsure (1)..(431): unsure at all n locations
agccttcaagaattaagatcattattcattctagaatcatgagaagacttactctagatcagtattaacaagcttttttcaaaaactgagtagcacatgaatctttctcaaaacctcttaccaaagaagttttactctctggtaatcgattaccacattattgtaatcgactaccagtaccaaaataattttcacatatctttcaactgaatttacaatgttccaattgatttcaacatgttctaatctgatacaatgttttggtaatcgattaccagtgtgtttgaacgtcgaaattcaaattcaaatgtgaagagtcacatcctcttccaaaagagctgtgtgtaatcgattacactaatnttgtaatcgattaccagtgatagtttctgaacatattaagagatgtaactcttcaaatacgttttaac

SEQ ID NO: 14897 - DNA, 439 bp, Glycine max
  unsure (1)..(439): unsure at all n locations
aaagcccagtcaccttcctcagaaaccacatcttaatttcaagtccaatttagagaaaattgtagctcctccaatttcatccgacaactctacaatcaccagaattggaaaattgctaggaagggtaatattggttaaagtactatagtcaaaacagaatctccaccctcgtccctcttcaccaaaacaataggaatgacaaagggacttacacgtggtctaatgatgcctgtcatcaacatctcattgactacttttcaatctctgccttttggtaatggggatatttacatggccttatatttggaatttgagcatctgctttcagcactattgcatgatattgtctcctatgtgaaggcagactntgagggccctanaagatgtcttgatatttatctaaatcaccctatatgaatgtngcaacttcaatctctat

SEQ ID NO: 14898 - DNA, 491 bp, Glycine max
  unsure (1)..(491): unsure at all n locations
agcttgagcagaacttanaaactntgaataggaagctcattctgtggttcacacatatcatcctctnaaactaataccaacacaccaccactccacttccacttncacttcgtaccccattgcccagaggctcttcactatgtgaaggtatggngaagggatattgtacgcagccttactcttgcatatgcaaagaggctgtttccggattcgaacccatgaccaacaagtcaccaaggcacaactttaccgctgcaccagggctcgccctcaccaatacaccaccactgaacaaaaaanaatgcaacataatccaccactttactttcatcaattgtgagagaatgtgtcgccaatcttccaaaaccacttaaagtanagcatcagatgatcaactactatcatnttcatcaattataaaagaantttatcatacagagtgtgaagggcaaccaatatcacagagtgtgatggtgtcatatatgatatgt

SEQ ID NO: 14899 - DNA, 292 bp, Glycine max
tctgaattggtccagagcttccttgttaagtttcgagcgtctcgatatattatgtgtctgaatccgacatccgagtgaaaagttatgacaattttaatttctcgagaacttccattattcaatttcgagcgtctctatatatcatgggcctcaatcatacactcatgtcaaaagttatggccgtttgaattgaccagagctttcttgtttaattcgagcgtctcgaatattatgtgcctgaatctgacattcgaggaaaagttatgaccatttgaattctctagattccatt

SEQ ID NO: 14900 - DNA, 443 bp, Glycine max
  unsure (1)..(443): unsure at all n locations
tcacatagtccgcctttgcttgaccttctttattcttaaaaacagaaacattatgcatatgcaaaagatcaagaggagttagtatgttaaaaccctcttccatttctaaaggagagcaattactattgctatgaacaactctattggtagcaaactcaacatggtgtaaacaggcttcccaangttttaaagttcttctctaaactgtcataagcaaagttcccaatgtcctattaacaacttctcgtttgcccatcggtttgtgggtgacaagtggttgaaaataacaatttantgtccaacttgccccgcatagtcctccataaatggcttaggaacttaaagtccctatcactaacaatgctccttcgcanaccatggagtctcacaatctccttgaaaacanatcaccacatgggaagcatcatcaacttttttacatg

SEQ ID NO: 14901 - DNA, 311 bp, Glycine max
  unsure (1)..(311): unsure at all n locations
agacactcgaaattganaacgaaaactcgtagcaagtgcataccgcaatcactcttaaatcgtcgcgaaatagatggacatgctccaatntgaaaaagaaagttcatagcanattcaaacgacacataacttttacacggatgtccgattgagtcccgtaatatatcgngatgctccaacatgaaaacggaagctcctagcanattcaaacgacaataactttntactcagatgtccgacagaggttcgtaatatattgagacactgcatattgagaacagaagctccgatcanattcaaacgacaatatc

SEQ ID NO: 14902 - DNA, 416 bp, Glycine max
  unsure (1)..(416): unsure at all n locations
gcttccgtgattcggaagctcttgctttctcaccctgaagnggagtttctctggtggatggacagtgatgcaatgttcaccgacatggccttngaggtgccatgggagaggtataaagattcgaactttgttatgcacgggtggaatgagatggtgtatgatgagaagaattggattgggttgaacactggtagttntctgttgagaaactgtcaatggtctttggatattctngatgcttgggctccaatggggcccaaggggaagataagagatgaagctgggaaagtgctcactanggagcttaagaatanggcctgttttgaagctgacgatcaatctgctatggtttatttgttggcaactgggaaggagatatggggttgacagggttaccttgagaatcactactactt

SEQ ID NO: 14903 - DNA, 358 bp, Glycine max
  unsure (1)..(358): unsure at all n locations
cacatcttcttatgtgggtcttgaatggctatcaaaggcctatatatatgtgacttgagacacgaatntgctaagagttctttggatcaaaaaggtcttatcctcttaaaaagcacaatcgttttatcctcttacanattccttggccaaattacttgtgattcaataaggaattatttgagtgctcaaattgttcaatctatctttttcaagagagatatcttcttttcttcttcttcattctgaacagggattaagagaccgagggtctcttggtgtgaaagaattctaaacacaaaggaagggttgttcttgtgtgtctagaacttgtaanaggaatttacaagatagtggaact

SEQ ID NO: 14904 - DNA, 321 bp, Glycine max
  unsure (1)..(321): unsure at all n locations
ctctagtgntagntntgcctaacccgagggaaccctttgaggtgtattgttatgcatcaaagatgggtttaggaggagtgttgatgcaaaatggccaagtagtggcatatgcttctagaaaactcaagactcatgagaggaattatcccactcatgacctggaattagctgttgtggttnttgcccttaagatgtggaggcattacttgtttagctccaagtttgagggttttagtgatcataagagccttaagtacttgtttagtcagaaatagctgaacatgcgtcagaggagatggttaaagtttcttaaagattatg

SEQ ID NO: 14905 - DNA, 415 bp, Glycine max
cttgattaattatccacaatggcaagctgagaggctttgtccttcccaatatgtcctggaaacatggcaataccatgccctttgtcctgaaaagagtttgcagccctgccgggaacattcccatgcaactctgtggagggtacaacattaagattgctgggcttagccccgtatagtgatgcagaacctgctgctgctggccagaatgaattcatcctcgcaatttgctggtgacacaatatattgcgagcaatgtagcagtgggttgcacaccttttcggccgaggctggttaaaaagaagatggggaagctgtaatttaagggagaaagtgattaatcaggaattcaattccacattgtttcaaaatcataagtttaaaaagggggaaagtaccggtattgctgcagatgtca

SEQ ID NO: 14906 - DNA, 517 bp, Glycine max
agcttgtgcatccaataccttgatgaggatgtccatatgttcttaaaactggactgatccatttgcttccaaagtttcatggccttgcaggtgaagacccacacaagcatctgaaagaattccatattgtctgctccaccatgaaaccccccagatgtccaggaggatcacatatttctaaaggcctttcctcattctttagagggagtggcaaaggactggctttattaccttgctccacggtccatcacgagctgggacgacctcaagagagtattcttagaaaaaattttccctgcttccaagactacgaccatcagaaaggatatttcaggtattagacaactcagtggagagagcctatatgaatactgggatagatttaaaaaattatgagtagtttccagcaacaggtacaatcccgggtggaggaatcatcccaaccttagatggtcgaatccttcacaacaatagcagcagcaacaacctttattttcaaaatgctgctgccccaagc

SEQ ID NO: 14907 - DNA, 244 bp, Glycine max
agcttatatgtttttcacaaattgggcatgggcattgttctttaacattatatcacttcaaaaattaatatgctggaaattcgttgatggaataaaataccattgcatgcaacttgatggtctgttggtggtacccatccaaaacgccaaccttgtccttccccaactttcttaaatttttaaccaagggaattaaattatcatcaatgttatttcttggatgtcttggacctgaaattatcat

SEQ ID NO: 14908 - DNA, 562 bp, Glycine max
agcttctaaagtagtataatgaagttggcttttatgaggagttaatatctgacctccaatactaaatgccgattcagaagctacaggggagatcggaatagctaacacaccccttgcaattgcttgtagtgttggatactttaactcattcaatttccaccacattaaaatatcaaaatctgaacttcttggcaaaacttcttcctctaagtaatgatctaactctgttttcatagttaaggttcttgccattttctttctttcaatgtatctatcataatcacacaatttactctttccatcactaaccacatcttgtgattcaaaagaactagtagaatcttgatgctttttggcttgatattccgaaaccaaatcataacacaagtttcggatcctattaacttgagaaaaaaaatcaatgggataaattgattcaaagtaaaactcaagcaactccattttgtatcttggatctaaaacaatagcaacttccatgatcacatgaattacactcccataaaaatcaaatttttgtaacatcttttttggcctattttga

SEQ ID NO: 14909 - DNA, 530 bp, Glycine max
attacattaaaatactaaccatattattttaattatttttttaaatatattaaaggtaaccaaattaattattttcctattaacggaaatctatattatcataatatattaaaatattaacgtaaaggcgtttcctttttaactataactcgacttagtggacacaagtaataatcacccactataagtccgacaagataaatatttttttcgtgtccatgcagttgcctattaagtgtacattcataaaacttacaattactttttctataatataaccatattaaaatattaacgtacattaatatattaaatatattatcataatattcaaatttactaacataattacgttaaacatacgtataaattatattaacataaacataattaatatatatatatatatatataatagacatataaaatacataacataaatgtgttatatttattaatataaaataataacaatattatgaaacctatcattaaataaatataatatgtgtattaacgaataaaaattt

SEQ ID NO: 14910 - DNA, 634 bp, Glycine max
  unsure (1)..(634): unsure at all n locations
agcttattgaatatccacgaataacacactgtatatgtgaagagattgcacactttattcaatcatatgaaaatgaattttataagccttacagacttgactctcaaaacagaataacaataaaaacaaaaaccacaaaactgcatgacgcataaaataggattgtttattgacacattaaaataactaacattaatttgtattttaattctcttttaatcactatagtttgaaattgatctttttagttcctataatttgtattttaattaccttttagtccttactgcaataaatatataaaataattagctacaaattagttataaattatcaactatttttttattacaaattatcttgtgataaattagttatgaattacttgctaatatttttgtagntaattataattgataatattactcatattttgatgggaagaactaaaatgaaaatcaaatataaagtatagggactaaaaaggtcactttcaaactatagtgactaaaagaaaattaaaatgaaaatgataaggactaaaaaatcattttcaaactacagagactaaaagagaattgaaatgtgaacttttatacttaaaaaattacttttaaactataatgactaaaag

SEQ ID NO: 14911 - DNA, 488 bp, Glycine max
  unsure (1)..(488): unsure at all n locations
atcatcaatcacctagctgaccaatttttgaggaatttgtggcttcccataatggatacaaatacaagggatcacattcacaaacaccattcaaatatggaaacgttactgatattcctactgcagtggattggaggcaaaatggagctgttactgcagtcaaggaccaaggccaatgtggtaatcaagtaacagagaacttttatttatttttttatcagcaggaatcaaaaacaggtaccagggagtttacaataactcacgtaccttgctcaatcatctgagctagaccacctggattaacacaaagaaaatgaaccctnnattaaagtgatactattttcttttgtatatatcattgtcatgatggcattaattaaaattggttaatttgtaaatgaattaaacaggtaactgctgggcatttttaacagttgctgcaacaaaaagtatctaccacataaagacaggtatgctaatgtcccttt

SEQ ID NO: 14912 - DNA, 390 bp, Glycine max
agcttcggttatcaatttcgagtgtctcttttttattacgaggcttaatcagacatccgagtaaaaagttattgtcggttgaatttgcaacgaccatcaacattcaatttcgagcctctcgatatattacgcgactcaatcagacatcagagtaaaaagttattgttgtttgaattggctgagagcttcaacattcaatttcgagtgtttcgatatattctgggactcaatcagacatccgactaataagttattgtcgttgaatttgctcaaagctttaaaatgcaatttcgaggggctcgacatattaccggactggaacaaacatgcgagttaaaaagtattggcgtttcaatttgctcccaactttcacattcaattttcatcgtc

SEQ ID NO: 14913 - DNA, 378 bp, Glycine max
ataaattaatgacctatttagtttagtaaccctaaaccctaattagtcacgtaaccataaatactaattagccacataaccctaatccctaattagtcaagtaagacaaaatcataattagtcaagtaacactaaaccctcattagtcaagtaaccctagacccccattagtcaaataactctgtcatcaaaacactaaaacataaataattatataatgggtgatgtttgtttctaatttatttttcgacagtcaatacttaagtcaaaaaataaatatacaacgttcaataaacacacttattatcatatacatgacaccccataagggactaaggtcatcttccctaataacaagcctattcaacctcgtaattg

SEQ ID NO: 14914 - DNA, 356 bp, Glycine max
  unsure (1)..(356): unsure at all n locations
tacatctttctagttgcattntcaccttatcagaagagactctgaaaagttaagatacaactcataatgctgtcaattgaatatgtaacaatcaccacgatggcatgcctgatgcaaaggatgagatctttggtccagtccaatccatattaaaattcaagtaagacaacaactagtgttagttaattactctgcagagaatggtattatactaccatacatgtgttgggctttgtgcattaatttttgtgttgatgactccagggaccttggtgaggtagttcaaagagcgaacaacacacgttacgggcttgcggcaggagtgttcacaaagaacatggacactgcatacactt

SEQ ID NO: 14915 - DNA, 363 bp, Glycine max
  unsure (1)..(363): unsure at all n locations
tcaggttttcgccttcgataaagaaggcctcaatcgacgtcattggagatttccgtttggtcagaggaggtcaaagaaggggatgagaaaagcgagagttctctcggaacggtgtcgtttgatctgcaagaggtgcctaaaagagttcctccggatagtcctttggctccgcagtggtacactctcgaatccgaaacctcgccggcaaatgacgtcatgctcgccgtttggatcgggactcangccgacgaggcctttcangaggcttggcagtccgattcccgcggcttgataccggagacaagagctaaagtgtatctttctcccaagctctggtatcttagactaacggtcatccaaacc

SEQ ID NO: 14916 - DNA, 421 bp, Glycine max
  unsure (1)..(421): unsure at all n locations
catgcaagctcaatggccatggtgattgagaaggagtttacattatgggatttcanatcatgcttctattntgctttttagacatgactcttgcttcaataacatggtttgctagtcttgtaaccaccaacctagtaccattgcataacccttgtgattgatacatgttccttaaaagcattattggggtacccacctttagttttatcttatgattaggaagaccaaatgttctcaaactattgagaaattcacttgtgaccacttcaagtgcatttcattcaaccatttttgacttgtcaattgaataagaacttagatattccctttgatcacctgaaaacaattcattaataaaaacattgtagaatcaatattaattattaaatcaattgatttatttgtgagatacctggaataa

SEQ ID NO: 14917 - DNA, 440 bp, Glycine max
  unsure (1)..(440): unsure at all n locations
tgctntctattgatttacttgattgtgcttttattcaccaatttaatgcaagttaattaatatgaaaaatatttacgggtcattatttgattgtcaatatcgatgggagatataaaaaatcatttttttaattntatataaaaanatgtaaacaaatagtaataattagttatttaatataatttgtaaattaattttaatccactctaatggtttagactntatttttagtgaatcaacataaatattcctccgctgtgctgttccacgtgtgtctctagatactctntttcataatttcattgtttggtctaataaacagccaatgtacttgttgttataattgagagtagttcagggaaaacaaacaatccaaaggaattctatatatcatgaagctctctgtaaccttgatatgcttagctgtatgtccatctatg

SEQ ID NO: 14918 - DNA, 419 bp, Glycine max
  unsure (1)..(419): unsure at all n locations
atcggacatccgtgtgaaaatnatttatctttgaatttctcaagagcttccgttgttcaatttcgagcttctcgatatgtgatttgcctgaatcggacatccgtgtgaaaagttataccagttgaatttctcaagagcttccgttgttcagttntgagcgtctcgatatgtgatttgcctgaatcggacatccgtgtgaaaagttatgaccatttgaatttctcaagaccttccgttgttcaatttcgagcctctcgacatattatgcgaccgaatcggacatccgtgtgaaaangtatggncatttgaatttctcgagagtttccgatgtttaatttcgagcgtatcgatatattataagcatgaatcggacatccgtgtgaaaaggtatgaccatgttgatttctaaagaactttca

SEQ ID NO: 14919 - DNA, 429 bp, Glycine max
  unsure (1)..(429): unsure at all n locations
agcttgtacattcaatttcgagcgttccgattattacgggactcattctgacatccgagtaaaaagtaattggtggttgaatttgttcagagcttcaacattcaatttcgagcttttcgatatattacgggactcaatcagacatccgagtaaaaagttattctcgtttgaatttgctcagggcttctgtattcaatttcgagcgtctcgatatattacgggactcaatcagacatccgagtaaaaatttattgttgtttgaatttgctcagagcttcaacattcaatttcaagcgttccgatatattacgggactcaatcanacattcgagtaaaaagttattgtcgtttgaatttgctcagagcttctacattcaatttcgagcttttcgatatattacgggactcaatcagacatccgagtaaaaa

SEQ ID NO: 14920 - DNA, 291 bp, Glycine max
  unsure (1)..(291): unsure at all n locations
tttcttgaatcggaccttagtgtgaaaagttttgatcatttgaatttctcgaaagctttcggtggtcaatgacgagcatctcgacatattatgcgctcgaatcgaacatccgagtganaagatatgaccatatgagtttctcgagagcctccgtggttcaattccgagcatcttgacttattatgtgcccgaatctgaccttcgtgtgaaaaggtatgaccatttgaatntctcgagagctctcgattgttaatttctagcgtctcaatatattgtaagcctgaatcggag

SEQ ID NO: 14921 - DNA, 261 bp, Glycine max
  unsure (1)..(261): unsure at all n locations
gacatgatcatccgaatcgacgacacgtcgtatcgctccacatcaggactcttagcaatggccaaaacgattggcggcacaaacggcgcgacgctcacattgtgtttctgcaccaactccagcaacgcaactatatcaaacttcggaacgatcaaaacggcagcctcaactcgaagcgaacacagcanaacagagttgagcgaataaatgtggaatagtggcagaacacacactaccacatcgtcgctgcgaaagtacaaa

SEQ ID NO: 14922 - DNA, 235 bp, Glycine max
  unsure (1)..(235): unsure at all n locations
tcttaagttcttcttaagtacttaagtatggtcttaaccactttctaatgttcctcaccagggttntcttgatatcgacaagttacacctagtgcataagcgacatcaggacgtgtacaagtcatggtgtacatgatagctcccactacactagcatatggtactctactcatgtgttctctttcttcagaagttgttggacaattctccctactaagagcaattccaacaccta

SEQ ID NO: 14923 - DNA, 324 bp, Glycine max
  unsure (1)..(324): unsure at all n locations
atgctacattcatatnccagacgtgaagaggcacaagcttgaagataagactatacgaggtatcttccttgggtatagcaatatctctaagggctaccgtgtctacaacttgcaaactaagaaactcgtcatcagtcgagatgttgaagttaatgagtatgcttcttgcaattgggatgaagaaaaagtggagaagaatgttcttatacccgctcaactacctcaagaagaagctgatctagaagacccaggtgaaccaccttcaccttcaccacaacaacaagatcaagaactatcatcaccagagtctactccaagacgagt

SEQ ID NO: 14924 - DNA, 360 bp, Glycine max
  unsure (1)..(360): unsure at all n locations
acctagaatctgagaataacaacacacatcatcttcctgagcatcatgaactngtcaatcttcaaagccttggtcataatatctgctacctgcaagtctgtcttacagtgccttcaaatcaatttgtctttgttcacttgatctctcaggaagtggaacctagtttctatgtgtntacttctgccatgtgagactggatttttggccaaatctatagcagatntgttttccaccaacagctccacagtcccactcatcttcacattcaattcttccagcaagtgtgtaatccaattggcctgacaagcagcactacaagcagaaatatattcggcttcacatgtggaaagagcaatcacg

SEQ ID NO: 14925 - DNA, 368 bp, Glycine max
  unsure (1)..(368): unsure at all n locations
acaaagagagtggaaaatttcaagtgggttgcttgaggactggacgtanacacnggaagtggccgaaccactataaatcaagtgtgcattccttctttccttaaacttctattatttattgctatntatcttctgctgtagagacgtttattttgaattgtcttttgagtaattcatgttaatggtgcattgctaatccaaaaagagagagtgacagtttaattggcgaatagtcttttgtatttaattcaaccccccaccccttcttaagataactgaggccatttgtccaacatcctattcttgataactcacttctctctaaaaagacaaactttccggaatgataaaatgatgtcaaatgaact

SEQ ID NO: 14926 - DNA, 228 bp, Glycine max
atgagcaactcacgattcaacagatgtgacatggaccattgctgctacgttaagaaatatgctaatagctatgttatccttgtcgtgtatgttgatgacatgttgattgcaagatctagtatgacagaaattaacatgtttgaacagtagttggcagaaaactttgaaatgaaggatcttggtctagctaaacaaatccttggtatgagaattcttagaaacagatca

SEQ ID NO: 14927 - DNA, 335 bp, Glycine max
  unsure (1)..(335): unsure at all n locations
tagatatgcnaaaggcacacactgatttggaataagataccattatgctaaaaacttcagacttcatggntattctgatagttgatgggctggatgtgctgatgatatgagaagtaccttcaggtatctttntagctntggttctagaattntctcatggtattcaaagaaacaggaagtaatagctcaattcacagcagaagcagaatatgttgctgcaactgctgctgtaaatcaagctctttggatcagaaagcttatgacaganttgcatatggaacaacaggacagtacgcatatatttgtggataatcaagctgcaatctcaacttcaa

SEQ ID NO: 14928 - DNA, 205 bp, Glycine max
  unsure (1)..(205): unsure at all n locations
taacccgagagaaccctctgaggcgtattgcgatgcatcaaagatgggtttaggaggagtgttgatgcacaatggccaagtagtggcctatgcttctagacaacttaagactcatgagacggaatatcccacccatgatctggagntggctgctgtggttttgcccttaagatgtgaggcactacctgtttggctcacagttgag

SEQ ID NO: 14929 - DNA, 229 bp, Glycine max
  unsure (1)..(229): unsure at all n locations
tgcacaccatggatttggcggaagacacaatgtcagtatgttgcngctatttacacctcctcctcgaacaaggccattacgaaatgcatagttcacatctaactggtgaagagactaaccataggcgagagccacagagagaagaagtctcactgctatgggcttgatgacaggtgagaaagtctcagtgtaatctgttccatattgctgatgaaataccttagctacc

SEQ ID NO: 14930 - DNA, 384 bp, Glycine max
  unsure (1)..(384): unsure at all n locations
tgatggggacctggttgaaaattcagaggtggatgatgattgcatggtttctccagatctgtttaaaagtgttagtttgcctacatatccactggaaaattttgaaggtcgtgcgttctgctttttacctttaccaatcagtactggtcttcctgctcatgtaaatgcatactttgaattatcatcaaatcgcagggatatctggtttggttctgatatggctggaggtggaagaaagcgctcagactggaatatttacctcctcgaaaatgttgttgcccctgcatatggtcatttgcttgagaagatagcatcagagattggcccttgcaatntgttcttctcgttatggccaacatcattagggttagaaccttgggcatc

SEQ ID NO: 14931 - DNA, 399 bp, Glycine max
  unsure (1)..(399): unsure at all n locations
tgaagtcagctatgaccactactctgtgccttgccctgccggacttcagtatcccatttaccgtcgagactgacgcctctggctccggcatgggtgtagtcctcatgcagaggggacatcccctggctttcttcagcaagcaattttgcccaaaattgctccgctcatccacgtaaattcgagaattacatgccatcaccactgccgtcaagaagtggaggcaatacctcctgagtcacaccttcattattctgacggaccacaagagtctcanggaattgatgactcagccggtgcagaccccagagcaacacgtgtatctagccaagctcctcggctacgattacactatacaatacaaagccggtcacaataacgccgtggcagatgccctatctc

SEQ ID NO: 14932 - DNA, 393 bp, Glycine max
tattagaccgattgaattgtgagagtgagatttttctgagagaagtttttaaaatgtttatgagagaaataaaaaatatgaccatgaactcggaaagaactttattgttattatattttttattataaatataaataaaatacgcaattgaaaataatgttagatttcattgaatgggtaaacaaatctttaaaatgattatgtttgttccaatatttaaaaagatttgatttctataaagtatcaatacatttattacaataatacgagggttttcttttcacaagaattggaatgtatgatgagtaatttttccttttagttcacgggacttggtatattgcaactaaatctatcttactaactctattattgttttttgtttattactag

SEQ ID NO: 14933 - DNA, 370 bp, Glycine max
tgagccttccacaaattctggaatgtgacctgttataaaattgtttgacacgtctataacctccaaagagctgcttgtcctgtcatttatgattgttgatagtgaacccaccagcagattatcatgcaaatctatggaagacagttctgttggtaatttgatttcagaaatgtcaaacctcagctggttgtttgagagcttgaccttttgcaagctggacatgtttgtgaagaaatttgaaataccatccaccagatagttatctgataggtcaatagagctgagagagtcaggtcttgtgaagtgtggaagatctcccttcaatttgcacccagctagatggacatctttaagctgcttgcttctgatc

SEQ ID NO: 14934 - DNA, 389 bp, Glycine max
  unsure (1)..(389): unsure at all n locations
atcaattactactgaattccttaattcattgaacacatncggntngccaactcattctatcaaacttaaaattggaagtnctaataatgtgntaaggaacctcgaccaaaatcaaggtctatgtaatggtactagattagtggtaacaaagatggcaaaacatgtaattgcagctgaaattatctcaagtaaaaacattggtctcgcttgttatattccaagaatgtcaatgtccctttcacaatcaccctggcccgttaaactattaagaagataatttctgattatgctatcttatngcaatgacaataacaagtcacagggacaatcactatnncatggtggactnntattgccgaaacccatattcactcatggccaattatatg

SEQ ID NO: 14935 - DNA, 394 bp, Glycine max
  unsure (1)..(394): unsure at all n locations
gcttacaactggagaaaaagntcatgaaaatcattatcatgaacttgatggaatcccttagcaaccatttggccttgtctttgttgatagacccatcagcattttcttttacacgaaatacccatttacatcccactgcctgtctcatgaatgattattcctgagagcagcatactcctgctgcatggcagaaacccaattggaatctgccaaggcctggttgacattnttaggttcagtgtgggttaaaaaaagagaaggatgaaatccaaactttgaccctgtttgcatagggtgttgttagaaggtctaggaggagactcataatntgagtgtgtagacttagaggaagtggaagaggaactntgaagaagatgataccagaacctatcct

SEQ ID NO: 14936 - DNA, 384 bp, Glycine max
  unsure (1)..(384): unsure at all n locations
gtgagcaaattcaaacgttcattatactntngactttggatgtccgattgtgtcccgcagnatatcgagacgcgtcgaattgaaaagggaagctcttagaaaaatcaaacgacaataacttttaactcggatgtcggatagagcccggtaaaataccgagacgctcgaaattgaaaacagaagctttgagcatattcaaacgacaataacttttgactcggatgtccgattgtgtcccgtagtatatcgagacgctcgtaattgaaaacagaagctttgagccaattcaaacgacaataacttttatctcgggtgtccgattgtgtcccgtactatatcgagacgctcgaaattgataactgaagctctgaggaaaatcaaacg

SEQ ID NO: 14937 - DNA, 467 bp, Glycine max
  unsure (1)..(467): unsure at all n locations
agcttatattgatttctttgaaccctatctntactctttttcatacccccaacaagaaagaaccacaacttaggaaccaacatgattgatcattcatctagtgttaatagtaagggtactagtcatacggaccctctatctagaatattaagtgagttgagttccctcaagttatggaaagaacaactagaaagaaaattaaaaggaaaagaaagggtagaaataagtaaagatgagagggaacatataagggaagaagaaagaaggaaaatactaatagttaagaatagagcaacatgctctctatagtagtcatgactccttcaagagcctaagtgaagaacatagtgactattatggaggaaagcataggtcacatnctagacctcactcncataggagaaaaaaaggaaagaaaggatcaagaggctaacattaacctctcatacttccatgggaaggacaat

SEQ ID NO: 14938 - DNA, 361 bp, Glycine max
  unsure (1)..(361): unsure at all n locations
ngtctaattgaaataagctgtttagagcttattctaataagcttttccatcgagtttattgaaacaagttgttcaatagactgcaaaacctttttttttttgtctttattaggattgaataatgcaccaaagttattgttattgctgatgtgcatagatgttgacagggctgatttttggtcttttgggattacggcacttgaattggctcatggccatgcaccattttcaaaatatcctccaatgaaggtatttacatcccgtggttgttcagagacaatgtctagacacatgttaacattggaccgattgaagttcatgtgatataatttgtaataaaagaaaaagagagttcactttt

SEQ ID NO: 14939 - DNA, 358 bp, Glycine max
  unsure (1)..(358): unsure at all n locations
caagcttgaatngngtgtcattgttgtgacaatgcttattggaggccatacctgcatatgaggcgtttctagttgaacttctccacctcgctcattgtgatttctcgcaatggtcttgcctcgatccacttggtgaagtagttgatagcgactagtaaatatttgactgctcacgattcaacaattgtcctagtatgttcattccccatatggcgaagggctaaggggaactcgggttgtggagattgtcaggagaggtgcgcggaatgtcagcgaattcctggcatcgtctacacttctttgtgaagtggatggcgttagccatgagtgttggctaatagtagcttgcgttcaccac

SEQ ID NO: 14940 - DNA, 373 bp, Glycine max
  unsure (1)..(373): unsure at all n locations
attctactatcttaacattncacttggaagtccgattgagtcccgaaatatatcgagacgctcgaaatttaaaaccgaagctactagcaaattcgaacaacaataacatttcactcggaagtctgattgagtcccgtaatatatacgggacgctagaaatttaaaaccgaagatcgtagcaaatttgaacgacaataacttttcagtcagaagtctgattgagtcgagtaatatatcgagacgctcgaaatttaaaaccgaaacttgaagcatattcgaacaacaataacatttcactcggaagtccgattgagtcccgtaatatattcgagacgctagaatttaaaaccgaagctcgtacaaattcgaacga

SEQ ID NO: 14941 - DNA, 397 bp, Glycine max
gcttaacaccttgcaagttctccatattttcaatgtattaatagttgctgaaccttgtctttatcctcttctaactacaggcaaaattttcctgaaatccctacccaaaatcacaacctttccaccgaatggtttatggatgctatcttcaaattgaaatcccattaggtctaaggtgcgatcaaacacttcaaagcaaaacttgttcatcatgggcgcttcatcccaaatgattagtttagcttctataagtagttttgctcaattgttgccttgtttgatattgcaagttaaatccttattgataaccaatggaagacaaaaggtggaatgagatgttttatctccaggtaatagcaaagaagcaattccacttgaagcaacattaaggacaatg

SEQ ID NO: 14942 - DNA, 379 bp, Glycine max
  unsure (1)..(379): unsure at all n locations
cgcaaaagncactcaaaaccgnntcaattttcaacgccttaaacggtcctctttgcttttatcgggtaacatggaccgctcaaaagcataaaatcaacacataaatttaccgcttttgcaagaactacgtaggtctgagttcctcatcgcaattgaggatacgtaggagcaaaagccccgcctttgtcgaccaccccaagaggtcgttaatggtccaatgccttaacgtttctctcttttcaaaaacaaaagatcgctaatggtccaacgccttaacgtttttctcctttcaaaaaaacaagatatccttaatggtctaatgccttaacgtttctctcctttcaaaatcaaaacatcgtttaaagggccaacaccttaa

SEQ ID NO: 14943 - DNA, 369 bp, Glycine max
  unsure (1)..(369): unsure at all n locations
agcttgaatgctctattcaatggagttgacaagaatatcttagactgatttacacatgnacagnggccaaggatgcatgggagatcctgaaaaccactcatgaaggaacctncgaagtgaagatgtccagattgcaactattggccacaaaattcgaaaatctgaagatgaaggaggaagagtgtattcatgacttccacatgaacattcttgaaattgccaatgctcgcactgccttgggagaaaggatgacagatgacacactggtgagaaagatcctcagatcctttgctaagagattngacatgaaagtcacttgaatagaggaggcccaagacatttgcaacatgagagtggatgaactcattg

SEQ ID NO: 14944 - DNA, 390 bp, Glycine max
agaggagtgttgatcacaaacccatcataccacttaggtgcaacaattcaacgcacggttctggaggagcttcttgactctgtgactcgcaagaacatacaacttgtctcagatgaaatctactcaggctcggtgttttcctcctccgaattcgtgagtgtagcagaaatcctcgaagctcgccaatacaagaacgcagagagggttcacattgtttatagcctctccaaagaccttggtcttcctggtttcagagttggaactacttattcatacaatgataaggttgtgaccacagcgagaaggatgtctgagttcaccttaatatcctcacagacacagcaccttttggcttctatgttgtctgataagaaagtcactgataactac

SEQ ID NO: 14945 - DNA, 365 bp, Glycine max
  unsure (1)..(365): unsure at all n locations
ctgaacagaccattcagtcgttggaggaccttttaagagcatgtgtcttacagcacaagggaagctgggagagttntcttccattgatagagttcacttataacaacagttttcattctaccattggcatggctccctatgaagctttgtatggcagaaggtgtagaacatccctatgttggttagagcccggagaaggcctcaccttangaccagaagtggtacaacanaccactgagaaaattaagttaattcacgataggatgagaactgctcagagtaggcagaaaaagtatcatgataagaggaggaaagatctggaattcgagggtggtgatcatgtattcttgagagtcactccatgg

SEQ ID NO: 14946 - DNA, 368 bp, Glycine max
tatgctgcaaatatttacaatatacctcctcattctcagcagcaaaatcaaccacagcagaacaattatgacctctccagcaatagatacaaccctggatggaggaatcaccctaacctcagatggtgcagccctcagcaacaacaacaggagcctgctccttccttccaaaatgctgctggcccaagcaaaccatgcattcctccaccaatccaacaacagcgacaaccgcagaaacaaccaacagttgaggcccctccacaaccttccctcgaagaacttgtgaggcaaatgactatgcagaacatgcagtttcagcaagagaccagagcctccattcagagcttaaccaatcagatgggacaatt

SEQ ID NO: 14947 - DNA, 330 bp, Glycine max
aagccttaaacggctctctttgcttttatcgggtaacatggacccgtcaaaagcataaagatcacacataaatttaccgcttatgcaagaactacgcaggtctgaattcctcatcgcaattgaggatacgtaggagcaaaagccccgcctttgtcgaccaccccaagaggacggtaatggtccaatgccttaacggttctctcttttcaaaaaccaaagatcgttgatggtccaacgccttaacggttttctccttttaaagaaacaagatatccttaatggtctaatgccgtaacgtctctctcctttcaaaatcacaacatcggttaa

SEQ ID NO: 14948 - DNA, 440 bp, Glycine max
  unsure (1)..(440): unsure at all n locations
agcttgaatgctctattcaatggagttgacaagtatttcttcagactgatcaacacatgtacagtggccaaggatgcatgggagatcctgaaaaccactcatgaaggaacctccaaagtgaagatgtccagattgcaactattggccacaaaattcgaaaatctgaagatgaaggaggaagagtgtattcatgacttncacatgaacattcttgaaattgccaatgcttgcactgccttgngagaaaggatgacagatganaaactggtgagaaagatcctcagatcctcgcctaagagattngacatgaaagtcactgcaatagaggaggcccaagacattngcaacatgagagtnggatgaactcattggttccttcaaacctttgagctangactctcggatagggctgaaaagaagagcaagaatctggcgttcgt

SEQ ID NO: 14949 - DNA, 422 bp, Glycine max
  unsure (1)..(422): unsure at all n locations
gtcacacacaaatgataaaactataacctaagttaacaaaaaanaattacaactgtcaactggtaatcaaggtttaaaaaaaaaagtctgcaacatcaaggtttccaggtggcagggagaggcggagagctaataacaaaatcaccaaatcaaccaacacaaatctcaatatctatcaactaactgatcgaatttcttcaagcaaaaagctaacatttaacaagaatttaccaaaaaccaaggcatcacaaatccgatcgaatataatacaatctcaattcaagccaactgttcaaagattntaccaatctcgacgccaagaccctacatcccgcagatgagaaaagtggaaccgaagagcctntgcatgatctctcgcccatacacggcgagttgtcggctgtggagatcctcatcgatgt

SEQ ID NO: 14950 - DNA, 396 bp, Glycine max
ctctgcagagaacaatgcagaaaccaaaaaatacccctggttttcatactttcgttgtccatcgaggtactgaacaaaaccatcaatgagatatggaccaacataagaagccaaagtgtttaacaatacaagaaaagctgtgataagaatctccttccatgctgaaattattaacgatttcaccaacttcagtgtggtgacactattaattccaccacaatcagcctcaactttctctctgaaagttggaaaagcaccaattacactatctctgctgtctagttgaggaacatcctcaaggtccagggtcttcttattaccaacggctataagaggacccacccaagagaaggtaagaatgctcaaaattccagcatatgagaaaggggtaactga

SEQ ID NO: 14951 - DNA, 250 bp, Glycine max
  unsure (1)..(250): unsure at all n locations
agcttctcgatatattatgcgcctgaatctgatcttcgtgtganaagttatgttcttttgaatgtctcgagagcttccgttgctcaattgcgagcgtgtagatatttcatgcgcctgaatcgggcatccgagtgaaaaggtatgaccatttgtatttgtcgagagcttccgatgttcaattacgagggtcgcgatatgttatgtgcacgactcgaacatccgagtgaaatgttctgacgttggaatgtct

SEQ ID NO: 14952 - DNA, 386 bp, Glycine max
gcttagccctagaggggatggaccttttcaggtttttgagaggatcaatatctttgcctataggttggacctcccagaagagtatggagtcagcaccacttttaacatttctgatttaattccttttgcaaatggagctgatattgaggacgaagaactaacagatttgaggtcaaatcctcttcaaggggaaggggatgatgcaatcctccctaggaagggaccagtcactagagccatgagcaagaggctccaagaggattgggctaaagctgctgaagaaggccctagggttctcatgaacctcagggtagatttctgagtccatgggccaacgttgggtccaattatctttgtacatattagactaggatgtcattatattt

SEQ ID NO: 14953 - DNA, 327 bp, Glycine max
  unsure (1)..(327): unsure at all n locations
ctgcagctatgggatgaatggcaattatcagcagatttctctctgcacttatggaggatgcaagtgtgacgttgggatcaaaatggagaaacaacgagaagaagagaaagttcatcaattcttgatgggtctagatgatgttttgtacggtacggtccgctctaaccttcttgcaactgatcccttgcctacattaaatagagtgtatgccactttggtgcaagaagaaagagtgagaaccatatctcggngaaaggaggaacgaggagaggctgttgggttctctgcacaggcccgtggaagaaccataggactcgctgaatcaaa

SEQ ID NO: 14954 - DNA, 352 bp, Glycine max
cctgattagcagccattggagttttttgcacttctaacttatcaactattgtggtgaattaatgtttcttatggattcctaaggtattctcctcttattgagccgggaatcaggactagtattcagcggatacgtcatcagtttgataagatgtgttatatatttatagaatgcggaaaaataaatgatgtaagagattacgtcaaccgtatagaattttttttatatatattctcctaatgaatagtcaaatatttactttttactccatagataaaacttagatagtaacacacaccgtggttttattcgatcccataaaatacacacccttgaaaaggagtgattatgg

SEQ ID NO: 14955 - DNA, 383 bp, Glycine max
  unsure (1)..(383): unsure at all n locations
tatgaagaaagatgatgttatgattntaaccctttcacattatttttagaagtttaattattttgatgtgaaacatgtttctactccttatgactcattcattaagttaaagaaaaatttgagtaaatgaattttttcacataaatattctcaaattattggttctttgtcacatttgacaaacttctctaggcctgacattgcatatgcaattgatagattagaaagtaattgagggatttagtgatgcaaattggatttctgattctgatgaaataaaatcgacaagtggttatgtctctactttagctggcggtgtagtatcatggaaatctgttaaacaaactattatttcacgttctaccatagaagcaanaactatt

SEQ ID NO: 14956 - DNA, 394 bp, Glycine max
  unsure (1)..(394): unsure at all n locations
gcttgtgcaaagatagagatgatacacaaagagattttatttttcattntatatgttnggtgaatggaaaggtttgttctctaatcattgatggtggaagttgtaccaatgttgcaagcactaaattagtggagaagcttggttaaaaaccacccctcaccctaagccttataagttgcaatggttgagtgacaatggtgagttggttgtggataagcaagtgttacttacattctccattggaaagtatgttgatgaagtgctttgtgatatggttcccatagaagtcggacatgtgttacttgggagaccttggcaatatgatagagatgttgtccataatggggtcaccaatcgatattctttcttgaataaaggtaaaaagttagttctc

SEQ ID NO: 14957 - DNA, 356 bp, Glycine max
  unsure (1)..(356): unsure at all n locations
aacaacggctcacaaatggtggagagctgcgatatgaatctggcaatataattcaagcgtcccaggaaacctcggacttgcctgtctgtacggagttctggcatctcaaggatagccttcaccttttcggagtctacctctatccctttctggcttacaatgaaaccaagcaatttccctgattcgaccccaaaggtacacttagcggggttcaaccttaattgatatttattaagcctttcgaacaacttccgcacgatgacaaggtgttcttactcagatttagatttagcaattacgtcgtccacgtagacctcgatctcttgatgcatcatatcatggaacanagctaccat

SEQ ID NO: 14958 - DNA, 356 bp, Glycine max
  unsure (1)..(356): unsure at all n locations
tcaacatcagaccacttttagggtgctggaactatttcacatggtcttgatggggcctatgcaagttgaaagccttggaggaaagaggtatgcctatgttgttgtggatgatttctccagatttacctgngtcaactttatcagagagaaatcagacacctttgaagtattcaaggagttgagtctaagacttcaaagagaaaaagactgtgtcatcaagagaatcaggagtgaccatggcagagagtttgaaaacagcaagtttactgaattctgcacatctgaaggcatcactcatgagttctctgcagccattacaccacaacaaaatggcatagttgaaaggaaaaacagga

SEQ ID NO: 14959 - DNA, 417 bp, Glycine max
  unsure (1)..(417): unsure at all n locations
angctgcagctatgctganacattacaatagatttcctcattctattatcaaaatcaaccacagcagaaaaattatgacctctccagcaatagatacaaccctggatgaaggaatcaccctaatctcagatggtttagccctcaacagcaacaacagcagcctgctccttccttccaaaatgttgttggcccaagcagaccatacattcctccaccaatccaacaacaatagccccagaaatagccaacagttgagaccgctccacaaccttccctagaagaacttgtgaggcatatgatgatgcagaacatgcagtttcaacaagagaccagagcctccattcagagcttagccaattagatgggacaattagctacacaatngaatcaacaacagtcctagaattccgacaagct

SEQ ID NO: 14960 - DNA, 417 bp, Glycine max
  unsure (1)..(417): unsure at all n locations
atccttagagtcacctgangctgcagctatgctganatattacaatatttctcctctttctcagcagcaaaatcaaccacagcagaacaattatgacctctccagcaacagatacaaccctggatggaggaatcaccctaacctcagatggtccagccctcagcaacaacaacagcagcctgctccttccttccaaaatgctgctggcccaagcagaccatacattcctccaccaatccaacaacagcaacaacctcaaaaacagccaacagttaaggcccctccacaaccttccctcgaagaacttgtgaggcanatgactatgcagaacatgcatggaataaatgatgtgagttatggaatggaatttttatttgatggagaatctattattnggaattgtggaaaaatgttatg

SEQ ID NO: 14961 - DNA, 371 bp, Glycine max
tcaatataaagatggcctcagcaaactccttattttcagaagggaattctatcaatagacctccaatctttaatggagagggttaccactactggaaaacccgaatgcaaaattttattgaggcaatagacctaaatatttaggaagccatagaaatagggccttatatacccaccacagtagaaagagttacaatagatggcagttcatcaagtgaaagtataacaatagaaaaacctagagatagatggtctgaagaggatagaaaacgagtacaatacaatttaaaagccaaaaacataataacatctgccctgggaatggatgaatatttcagggtttcaaattgtaagagtgctaaggaaatgtgg

SEQ ID NO: 14962 - DNA, 323 bp, Glycine max
  unsure (1)..(323): unsure at all n locations
tgacatctgatgtgtggacatcttgtacttcttatgttatatttcattaactgcgcattatgttgatgcaaattggaagttgaatggtaaaatggntaatttttctcattttcctcctccacactcggggcgtgagatggctaaagttatatatggntttttttggaagaatggtggattgagcacaaaatattttcattaattctagatgatgcttcttccaatgataaaatgcaagactatttgaaggaaagacttttgcatactaatggtttagtaagtggtggtgaattttttcatatctgatgttgtgctcacatttt

SEQ ID NO: 14963 - DNA, 370 bp, Glycine max
  unsure (1)..(370): unsure at all n locations
ntgagtaaattcaaacgacattagctnnntacttgtatgnctaanagagngcccgaantatattcaggacgcttaaaaatggatggtgaaacttttaacccattcaaaccaacataactttttacctggaagaatggatgaagtccggaatataacgagacgcctcgaaatgaatgttgaagctctgagcccattcaaacgacaataactttttactcggatgtctgattgagttccgtcatatatcgagacgctcgaaattgaatgttgaagcacttagccaattcaaacgacaataactttttactcagatgtctgattgagtgccgtaatatatcgagacgctcgaaattgaatgttgaacctatga

SEQ ID NO: 14964 - DNA, 379 bp, Glycine max
tcagtgacaccgacatttctgcagtgccaccttgttggaaaggccaatgtcaatcaggggagggattcaattcctcatcatgcaacaggtttaaggctgaaaccttatcctcatctagtttcatattcacttcacagaccaaacatgacgtcttcaacatggttttgtcatcttcaatggctaacaattttgtggataataatataggaaagtgataggagcaagatactacaggagtggatatgaagctgctgagggagattcagatgcaaaaaagtccttcagatctgcaagggacagcactggccatgggagccacacagcctccatagcagcagggaggtttgtggcaaacatgaactacaaggggctggcaagt

SEQ ID NO: 14965 - DNA, 372 bp, Glycine max
tgcttttacaaaagcatgcaaaatgggtagagttcatagagcaatttccatatgttatcaaatacaaaaagggaaaaacaaatgtggtagctgatgccctctctaggtgacaaacattgttttgctccctaggagctcaaattttaggatttgataacattaaggacttgtatgctttagatgaatatttctctcccatttacgagagttgtgggaaaaaggcctaagatggattctatttggctgaggggtatttgtttaaagagggaaagctttgcataccccaaggatccattatgaaattacttgtgaaatagagccatgaggttgggctcatgggccactttgggataaacaagacccttgtcttac

SEQ ID NO: 14966 - DNA, 200 bp, Glycine max
  unsure (1)..(200): unsure at all n locations
gcttctcatatgttatgcgtctgaatcggacatgctattgtaaaattatgaccatctttattttccgagagcttccgtcggcaatntctagcatctcgatacgctatgtgcctgaatcggacatgcgagtgaaaacctatgaccatttgaatttctcgagagcttcccgtggtcaatttctagcgtctcgatacgctatg

SEQ ID NO: 14967 - DNA, 387 bp, Glycine max
  unsure (1)..(387): unsure at all n locations
acaatatttactaatagaattaatgagtttaatgttaatatgatattnttattttagatagaaataaagtattgttgtagcatgataaaatataaataaaatcaagatagagataaaaacaactttaaaaagaaaaaaaatcatgagtgatttaatttaataaattatgtgagctaacaattaatgtggttcgtatctactaattaatttatatataataataaattaaattataagatatgagttgagttgagttgggccgagttgaataaaataaaacctgttacccaactcttatntgatcgggtcttaattggtgtgggtcatgnttgacctgaagaacactctaaaaacttaatccaatataattagatcgnagtgagtcat

SEQ ID NO: 14968 - DNA, 267 bp, Glycine max
tcagatatcttaagaaaggagggtgaattaagatattgcaaactatctccccaattaaaattctatttcactttctattcaagttacaaattcccttaacaatgaactcttaaataatgattcaaatagaacaatctgaatataaatattaaataataataaataaaagaggtcaagggaagagaaagtgcaaactcggatatatactggttcggccacacccttgtgcctacgtccattcctcaagccgcttgagagttcactatc

SEQ ID NO: 14969 - DNA, 452 bp, Glycine max
  unsure (1)..(452): unsure at all n locations
gcttatctacccacacncctctattaactatattattcttcttgaaaataattacngataaaaataacacaacaaatataatcaaacatcaaacataattactaataatatatagatatatatcaaggtgttacaactctcccactcttttagaaatttcatcctcgaaatttacgttactcaaacaaggatggataagcttctcgcatttgactntctaattcccacatgacatcatctcctgatgcacctccccagatcaccttgaccaacagaatctctttccctcttaggtgttttgttggtcgtcataccctaatttcgtctagggaaccattcttgatggcatacaacctttgcttgaccgcttagaggtacttggcacccattngtgcacaatancgtgaagtttgaacatgccagaaatcaaaaggaagcattgtacacaatcc

SEQ ID NO: 14970 - DNA, 315 bp, Glycine max
  unsure (1)..(315): unsure at all n locations
cctcggatccctgtcagatacaatactagaaggaattccatgcaaccttactacttccttgatgtacaactccactagcttctccattctatacttcatattcactgggataaaatgagcagatttggtaagtcgatctactatgacccacacagcatcatgttcacgactagtcttgggtaaactagatacaaaatccatagagatgctctgccatttccacttcagaantttcaatggcttcaattctcccgatggtcggtgtgctcaacctagccttntacatgtaaacatcttgctacatatcagctacat

SEQ ID NO: 14971 - DNA, 398 bp, Glycine max
  unsure (1)..(398): unsure at all n locations
acaaactccttaaaacttggtaaataaattaaacgtgaaaataaaaaataaaaaatcaaagctactgatgcacacgttcaaacactcctccttgcatcaatagggccaaattctaagtctttctcttaaatcttcaaatctgctttttgcaagagactntgtgaatatgnttgctagttgatcttcagttctgcaatactctagtctatctacaccatctntctgaacatctctgatggagagtagtttgatgctaacatgnttggtcttgccatgaaaaactagattggttgagatagctatagccacttgattatcaaccatgactttggtactcattntntgctctaagtgcagatcatttaanannattctcaaccatacagcattattaacat

SEQ ID NO: 14972 - DNA, 400 bp, Glycine max
  unsure (1)..(400): unsure at all n locations
gcttagtgacatccgtgacttgatcttgagttaagatgttcgcaagttagatnctttagaatcttccagtcgtgtttcctattcagcattgaatactgaaggcaggggaaggactacccagaagggtcagaatggtcgaggcctatcatagtcaagagggaaaggtcacagaaaatttcaaagtgacgatacttgttggaattgtgacaagagaggtcactttagcaatcagtgcaaggcaccaaagaagaacaagtcgcacaaaaataaaaagcgcgatgatgatgaatccgctaatgcagcaactgatgaactagatgatgcattaatttgcacgttggatagtcctgttgagtcatggatcatggactcangtgcgtcgttccacactactccctct

SEQ ID NO: 14973 - DNA, 351 bp, Glycine max
  unsure (1)..(351): unsure at all n locations
agcttctatctttcttatctaaaagtattatttctacctctagagngttngaacttttacatttaaatatntttggtccttctagaaccatatgcattagagggaatcactatgctttgattattgtagatgattgctctagatatatctagactttattctatcttctttgagtaatgcttttaaagtctttcaaaaacttgccaagcttattcaaaatgaaaaggaattcaaaattaaaagtttgagaagtgaccacggaagagaatttcaaaatgactctgaattgttttgtgaacaaaatggcattaatcgtaacttttccgctccaagaacaccacaacataatgg

SEQ ID NO: 14974 - DNA, 402 bp, Glycine max
  unsure (1)..(402): unsure at all n locations
agcttgttccctccttgttctaagggctnggttactgtgaaaacagtcttattctgtggcacaagaaccagcttgatcttccaccacagaataactccaaagctgcctccaccacctcctcttatagcccaaaatagatcctctctcatggcttttctatcaagaaccctccctttagcatcaacaattctagcatctataacattgtcagcaccaaggccatactttctcatcatggaaccatatgcacctcctgtgatgtgccctccaatccccaaggttgtgcaaaggcctgcaaggaagccatgaactgcactcttctctgaaatcctgtagtaaactccaccaatagtggcaccggcttggatccaagccgtgtttcgcgcaatatcaacattcact

SEQ ID NO: 14975 - DNA, 456 bp, Glycine max
  unsure (1)..(456): unsure at all n locations
gagcgttggangttttctgtgccaatacgcttcttctttttccagncttcttctggcttcaattcatcagtgggctttccttctgtgtccagcatcttgggatgctcccagcctttgatgacagctttccaggttctgctatccagtgatttgaggaaggccaccattcttgctttccagtattcataggtgcttacatcaagaataggtggtctgctcactggtcctccttctttctccatgttcatcacaatttatctgcccagatctcactctgtgattacgagtgtttgctctgataccaattgaaattctgataccagaggacagatagccgacccgacgtcacgacatcacgcttcagaacatgcagttgatgtgcgtccgtatgaacagattanacaagtaatatcacaagagaattgttacccaggtcggagcaccttacctacatgt

SEQ ID NO: 14976 - DNA, 414 bp, Glycine max
  unsure (1)..(414): unsure at all n locations
agcttatgcagcanatatatactatagaccttctcaacctcagcagcaaaatcaaccacagcagagcaattatgacctttccagcaacagatacaaccctggatggaggaatcaccctaacctcagatggtccagccctcagcaacaacaacagcagcctgctccttccttccaaaatgctgctggcccaagcaaaccatacattcctccaccaatccaacaacagcaacaaccccagaaacagccaatagttgaggcccctccacaaccttccctcgaagaacttgtgaggcaaatgactatgcagaacatgcagtttcagcaagagaccagagcctncattcagagcttaaccaatcagatgggacaattggctacccaattgaatcaacaacagtcccagaattctgacaa

SEQ ID NO: 14977 - DNA, 392 bp, Glycine max
agcttatgagatgctggaagagtctaagaattttctgagataaaatcttctaccttagcttccaacaagctacgtaattgatatggaatattacaaagattcacaacaaaatcactattagaaaataatgttttaacatcagttattaaggactctcaacatcagttattgacattgaaagtaatactgttaacatcggttttccaaaaccgatgttatcataaaatgacaacatcggttttttaaataaccaatgttagatattaagaattatataaaaaaaagtcatatatcttcatatcaacatcggtgtttaccagaaccgatgttaacttattcatacaacaatcggttttaaatcaaaccgatgtaatatatacatacaacattga

SEQ ID NO: 14978 - DNA, 353 bp, Glycine max
  unsure (1)..(353): unsure at all n locations
ctacctcatgctctcctctaatgactatggcatcatttctggcactaaactgctgngagttggaggccatcttctcaattaaatttctggcttcagcaggagtcatgtctccaagggctccaccactggcagcatctatcatacttctctccatattactgagtccttcataaaagtattggagaagaagctgttctgaaatctgatggtgggggcaactggcacatagtttcttaaatctctcccagtactcatacaagctctctccactgagttgtctaatacctgagatatccttcctaatggctgtggtcctggaagcagggaaaaatttttctaagaatactctctta

SEQ ID NO: 14979 - DNA, 147 bp, Glycine max
agggaagctctcgagttactcaaatgatcatatcttattttcagagggtcgattcacgcgcttaatatttcgagacgctcgaaaatgaacaacgaatgctctcgaggaattcaaatgttcatatcttgtcacactgatgtcccattc

SEQ ID NO: 14980 - DNA, 394 bp, Glycine max
  unsure (1)..(394): unsure at all n locations
agcttgtagcanatgcaaacggcaataacgttttactcggatgttcgattgagtcacgtaatacatcgaaacgctcgaaattgaaaacagaagctctgtgcaaattcaaacgacaatacattttaactcggatgtccgattgagtcccgtaatatatcaagacactcgaaattgagaataaaagctctgaacaaattcaaacgacaataactttttactcggatgtccgattgagtccagtaatatatctagacactcgaaattgagaatagaagagctgagcaaattcaaacgacaataactttntactcggatgtccgatggagtcccgagcgtctcgatatattatgcgcctaaactggacatccgagataatagttatgactattttaat

SEQ ID NO: 14981 - DNA, 297 bp, Glycine max
agctattctctcttatgtccgatttcggagtatattagatcgagacactcgacattgagcaacgttagctcttgagaaattgaaatggtcataactctccacacggatgtctgactcagacgcattatataatctagatgctcgaaattgaaccactgaagctctctagacactcaaatatccataacttttcactcgtggggccgaatcttgcgcatataatatcagacggtcgaatttgacctccaatctgcttgagaaatactaacgggcctaactctcctacccggattatcg

SEQ ID NO: 14982 - DNA, 414 bp, Glycine max
  unsure (1)..(414): unsure at all n locations
gcttcagctntgtccacaaggcttcatgttttctcgtccaaaatcgctaattgaacctcggatccctgtctgatacaatactagaaggaattccatgcaaccttactacttccttgatgtacaactccacgagtttctccattctatacttcatattcaccggaataaaatgagcagatttggtgagtcgatctactatgacccacacagcatcatgcccactgctagtcttgggtagactagatacaaaatccatagatatgctctcccatttccattccggaatttccaatggcttcaattctcctgatggtcgctggtgctcaaccttagccctttgacatgtcaaacatcttgctacatattcagctacatctttcttcatgccatgccaccaaaaacttctcttcaaat

SEQ ID NO: 14983 - DNA, 364 bp, Glycine max
  unsure (1)..(364): unsure at all n locations
agcttgtaaggtagtcatacctcacaaaatatatgtatgtgtgtttaggtagcaagataccttggatatgcatgtatataacanacatacctcacanaatatatatatgtatgtttaggtagcaagataccttggatatgcatgtatatagcanaaatatctcacaaaacatatatatgtatgtttaggtagcaagataccttggatatgcatgtatatagcanaaatatctcacaacatatatatatgtatgtttaggtagcaagataccttgcacacacatgtatatagcaaaacacctcacaaaaatatacatatgtttaggtagcaaatacccttgtggaaagagaaagagatataaaag

SEQ ID NO: 14984 - DNA, 314 bp, Glycine max
  unsure (1)..(314): unsure at all n locations
aacaacagcagctgctccttcctccaaatgctgctggcccaagcaaaccatacattcctncaccaatccaacaacagcaacaaccccagaaacagccaatagttgaggcccctccacaaccttccctcgaagaactngtgaggcaaatgactatgcagaacatgcagtttcagcaagagaccagagcctncattcagagcttaaccaatcagatgggacaattggctacccaatngaatcaacaacagtcccagaattctgacaagctgccttctcaagctgtccaaaatcccaaaaatgtagtgccatttcat

SEQ ID NO: 14985 - DNA, 467 bp, Glycine max
  unsure (1)..(467): unsure at all n locations
gcttctggtgggacatcttgacttgctntcttatctgacattcaccacaaattctgccttcttctattttcagattgggaatgcctctaacagcacctttgtcaatgattntcttcatgcctcttaagtgcagatgtccaaatctttgatgccatattctgacttcatcttctttggaggatagacatgtggaggagtaactggtttcttgaggtgtccataggtagcagntgtcctttgatctgctgcccttcattagaacttcactcttctcatttgtcaccaaacattctgactntgtgaagtttacattgaatccttcatcacacagctgactgatgctgatcaagtntgcagtcagtcccttcaccagcagtactttgtccagactaggaagtccatcatggactagctttcccattccaatgatctttcctttagagccatctccaaatgtcacatagcta

SEQ ID NO: 14986 - DNA, 329 bp, Glycine max
tgggtatttgacgaattacggtttatgtgtactcaacttttttgttttagtgttacttgaccaattagggtttagggttatttgacatattacggtcacttgactaattacggtttaaggttatttgacaaattagggttacttgactaattatgatttatgcgtgtataactaattagggttatgaatacttgacttattagggtttagttttacttgaccaattatggtttacggttattttacaacatttggtttatggctacatgactaaatagggtttagcgatatttgatagataagggtttaggtttacttgactagttggg

SEQ ID NO: 14987 - DNA, 367 bp, Glycine max
  unsure (1)..(367): unsure at all n locations
caagcttgatttcctttgttccgganaccttttttttcttatgtgcacccaaacccaatctccgggttcgaagacaaccttctttctccctttgttggcttgtttagcatagcttttatttttcctcttaatttgatctttgactctctcatgaagcttcttcacatagtccgcctttgcttgaccttctttatgcttaanaacagatacattaggcataggcaaaagatcaagaggagttagtgggttaaaaccatcaacagcttcaaaaggagaacaattagtggtgctatgaacagctctattgtaagcatattcaacatggggtaaacaagcttcccaagtttttaagttcttcctcaaaact

SEQ ID NO: 14988 - DNA, 373 bp, Glycine max
  unsure (1)..(373): unsure at all n locations
ggatanntaatgggagcattttttttttttttaaggaaagatggacgaccactttagtgctggttttgcctaacccgagagaaccatttgaggtgtattgtgatgcatcaaagatgggtttaggtggagtgttgatgcagaatggccaagtggtggcctatgcttctagacaacttaagactcatgagaggaattatcccacccatgatctagagttggctggctgtagttttgcccttaagatttggaggcattatctgtttggctctaagttcgaggtgtttagtgatcataagagccttaaatatttgtttagtcagaaggagctgaacatgagacanaggagatgtgttagagttcttaaggattatga

SEQ ID NO: 14989 - DNA, 336 bp, Glycine max
gtaaacattcaactttgagcgtctcgatatattacgggactctattatacatccgagtaaaaagttattggcgtttgaattggctcacacgttcaaaattcaatttctagcgctctcgatatattctaggactcaatcagacatccgagtaaaaagttattgtcgctagaattggctgagaggttcaacactcaatttcgagcgtcccgatatattacggcactgaattggacatccgagtgaaaagttattgtcgtttgaatttgctccgagcttcaacattcaatttcgagcgtctcgatatattacgggactcaatcagacatccgagtaaaa

SEQ ID NO: 14990 - DNA, 436 bp, Glycine max
  unsure (1)..(436): unsure at all n locations
agctntaagccaattcatacgacaataactttttacttttatgtctgantgagtcccgtaatatatcgagacgctcaaagttgaatgtttaatctttaagccaattcatacgacaataactttttactcggatgtctgattgagtcccgtaatataacgaaacgctcgaaattgaatgtttaagctttgagccaattctaacgataataactttttactcggatgtccgattgagtctcgtaatatatcgacacgctcgaaattgaatggtgaagctctgagcctattcaaacaacaataactttttactcggatgtccgattgagtgacgtaatatatcgggaccgctcgaaatgaatgttgaacctctgagccaactcaaacgacaataactttntactcggatgtctgattgagtcccgtaatatatcgagac

SEQ ID NO: 14991 - DNA, 428 bp, Glycine max
  unsure (1)..(428): unsure at all n locations
agcttttaatgaacggaatatctaagnctaatcttatattgcttgtaccgcacgcaaatatttcatgttatcatatatggtaatatttgatccatatatattgatttttaactacttaatttgcagtctgtacaccttactttagcttatgcatcaacgttttcccgtgaatgtataagaatcacaacaaatgagacaagggccactttaaagtccaaatagtccaagtaagagcttttggctaacaaaaagattttaaatttttttatagtactaatnnaccnaaanaagatgattgcaaaattatatctacaaataaattttaattaaaatatataaataacatcttatcttttatgtatatcgtaaataacaatgtaattataataagacaataataactttaatcaagttatttataactaaat

SEQ ID NO: 14992 - DNA, 215 bp, Glycine max
  unsure (1)..(215): unsure at all n locations
catccttgctttccagtattcatagttggttccatcaagaattggtggtctgttcactggtcctccttctttctccatgttcatcagaatttatctccctaggtctcactcagtgatttcgagtgcctgctctgataccaattgaaattctgatatggnggacagatgtcgtaccggatgtcacgacatcacgcttcagaacatgccagatatat

SEQ ID NO: 14993 - DNA, 424 bp, Glycine max
gtacaaatagaatcatcttgatatgactgttttggaagttctcttactaggctatgcttttgaagctttgagattaacctccagctagcatggtcaaacttcttattccatacccagtaatgctctttgactaaaagtaagcatgacaccttttgattggatagatcaccaagtttaatcttatagtgatttccttgtctcttagtagacaagagtaaagagttgtccttgttttggatgatacacatatccttgttaaagttaaaggtgacattgtatccactatcatacaattgacttatgctcaacaaattatgcttcaatcctttaacaagtaaaacattattgatagaaggataataaggaatacaaaccttacctacacctattattagacctttctgattccctctgaaagtgacca

SEQ ID NO: 14994 - DNA, 438 bp, Glycine max
  unsure (1)..(438): unsure at all n locations
agcttcttagtctcagatgatgcagctgagtttgtatctatctcatgcactcctctaatgactatagcatcatttctggcgctaaactgctgggagttggaagccatcttctcaattaaatttctggctttagcaggagtcatgtctccaagggctccaccactggcagcatctatcatacttctctccatattactgagtccttcataaaaatattggagaagaagctgctccgaaatctgatggtgagggcaactggcacatagttnttaaatcgctcccagtactcatacaggctctctccactgagttgtctaatacctgagatatctttcctgatggctgtggtcctggaagcagggaaattnttttctaagaatactctcttaaggtcatcccagctcgtgatggaccttggagcaaggtaatacagctagt

SEQ ID NO: 14995 - DNA, 431 bp, Glycine max
  unsure (1)..(431): unsure at all n locations
agcttcctcaattnttatggattgatgctcttatgactatcttcgnatatattaaaccgagttccaaccaaggctgtctcaaagacacattttgagttattcaagggttggataccaagtttgcgacatatacgcgtttggggatgcccgtctgaagtaagaatttataatccacaagagaagaaactagaccctaagactattactggntatttcattggatatgctgaaatgtctaaagggtataggttctattgtccatcccacaacactaggattgtgaaatcaaggaatgcaaagtttcttgaanatgacttgatcagtgggagtgatcaatttcaaaacatttcttctgaaagggatcactatgaagctgaaccttctgggacangtaataggtngtagtcattctcacccctcaagtaaaatgg

SEQ ID NO: 14996 - DNA, 300 bp, Glycine max
cagttgtacgtgtatttgaaggagtagagagggatgcagtgctatgagaggaaagcaaagtaggcattccaagggtcattgacgagcgtgatgggaaggaggcagtgaatggcaaagataagggttggggacgcacgaaaggtgtgtttagaggagatgaatttgttttttaaaaaggtggaaagagggcatctgatgttgttgaaggggtctgtgtggatgtaaatgttgaggaggttgggaggggtggaagagaagaatttgtcccataagggggagaattatatatcagtgtgggtg

SEQ ID NO: 14997 - DNA, 391 bp, Glycine max
  unsure (1)..(391): unsure at all n locations
tctatagaaggttcggtcctaatttctctacaattgcgtttcctctcaatgagctggngaagaagaatgtggcatttacctggggtgaaaaacaagagcaagcctttgctttgctcatagaaaagcttactaaggcacttgttctagctcttcctgacttttctaaaacttttgagctagaatgagatgcctctggagagggagttggagctgtattgttacaaagtgggcaccctattgcttattttagtgaaaaacttcatagtgccaccctcaactaccccacctatgataaagagctttatgccttaataagagccctccaaacttgggaacattacctctgttacaaggaatttgtcattcatagtgatcatcaatcacttaagta

SEQ ID NO: 14998 - DNA, 313 bp, Glycine max
tgggggcaaagaaattttcttcccatcaaaccctggatgcaactatgatcgtatacccatatcagctacatcttgacgggtattcaagccatcctttgtcttgccttgaatgttaaggaacgtcccaatgacactatcacagacatttttctccacatgcataacatcaatacaatgtctaacgtcaagatcacaccagtacggaagatcaaagaaaatggacctcttcttccatatgcaactttgacttttatccttcttttgggtcttcccaaatacagtattcatgtgttcaacccgctgatatacctac

SEQ ID NO: 14999 - DNA, 398 bp, Glycine max
  unsure (1)..(398): unsure at all n locations
tagtgcagggtttaanaaatccctttatgctctgctctgggatggcgcaaatcatatagtctcaaatcccaaacttccacaagataacatgcctttcaaccgttgctgctattacctctttttgttatgcattaattggaagcgggctttctctggcaagagttgtatcacgtatgagcttcacctatatctttccaaaagctgtccatcattcattccagaaaatatatgctacatttttttatcagcaaatgttagtttgttagaatgttaattttgttagcagagggattgaacatgtaacctttcttctttttccttctcctttaaccatccagcccactatatatctgttacaattttatactagatatttcctaagtcacttcattagctta

SEQ ID NO: 15000 - DNA, 328 bp, Glycine max
  unsure (1)..(328): unsure at all n locations
agctnntatctttagatctttaagtgcagattttcatgantatgatagatctcatccagcgcaagttgttgcagcccagatacgcacactgctatataaacatgaaggctgcacgagttttctaccaagtccgggattgaagagttattttgtgagttttgggacttgagtgttttgtgagccaccttgatgttaccctaacatcaagtgttggacctgagtgtgtagagttgatctctaatgttcagagagcaatctctggtgtgtctttgatttaattgtaaacaccggagagtgattgagagggagtgagaggggttctcatatc

SEQ ID NO: 15001 - DNA, 446 bp, Glycine max
ctcagctttaggccttggatcttcttcatcaatggagacctttgcttcctgaatatctatggaagcagaatggagaaggaagaaagatgattggagacgccacttcaaggagaagatgagtcaaaaagaagctcaccaccataggaagccatggataagagcttgaaggtaggagaagatgagtggagggagagggagataaattttatgcctcaaaagaggtttgaaatttgaagtttaattctcaaatgatcaaagttgaaaaaatgcacacacgtgtcctctatttatagcctaagtgtcacacaaaattggaggaaaatttgaatttttattcaaatttcacttgaatttgaaattgaatttgtggagccaaaatttcactaattatgattagggaattttagctatgggtcaccccactaatccaggatcaagtctaagat

SEQ ID NO: 15002 - DNA, 424 bp, Glycine max
  unsure (1)..(424): unsure at all n locations
gggaacaagaatctaaaccttgttcttagtgaactgactcaattcttcctccattgttgngacccaagaatcttcactcaatgcttcattaatgtttttaggctcaatggatgagagaagatccatcattcctctttttttattcaaggatgctcttgttttgactccagaagatgtttctccaatgattagatttggaggatgtgaatagacaaacctcatatctctaggcatgttagcttctattttttgtccaaagctttgtctttctgaactctccctttttgagctatcttgtaaagatcttcttaattnttctttgggccatctangctacgtgtagtgttctgagtatgcctgatgatccttattcttttctagttcttctaaatctgcaatccttctcttctcaagtgtactatca

SEQ ID NO: 15003 - DNA, 421 bp, Glycine max
ctcagcttccagaataagatcagattcagactcagattattattcagagaagattaattaagataagtataaaaaagttttttcaaaaactgagtagcacatggatttttctcaaaaccattttaccaaagagtttttactctctagtaatcgattactagattattgtaatcgattaccagtagtaaaatggatttgaaaaagtttacaacgttccaattgatttcaaaatgttgtaatcgattacaatgttttggtaatcgattaccagtgtgcttgaatgttgaaattcaaattcaaatgtgaagagtcacatcctttcacaaaaaagctttatgtaatcgattacactgatttggtaatcgattaccagtgatagtttctgaacaaatcaaaagatgtaactcttcaaatagttttt

SEQ ID NO: 15004 - DNA, 471 bp, Glycine max
  unsure (1)..(471): unsure at all n locations
agcttatattatataataacaaanaatgaaatttatatcattatttaccttcatcatctgaaaccatntcattcattacattagcacattcagcaacaactttatagcttgtagaacctataaaaatacattactagtattagttcttgaataaacacaaatatcaatttaacaacatatatgaataaaactttacccgtattttcagcactccacaacaaacttctagcgcacattaaagcctctaaagtagtccattgaagtctactacgatgtgggcttaatacttgaccaccagtgctaaatgcagattctgaagctacggtagatactggaatagctaatatatccttagcaattgcttgaagtggtggatacttgacaccattaaacttccaccacatcanaatatcaaagtcaacagctcttggaaaacatcttcttctaatagtagctaactctgattaacat

SEQ ID NO: 15005 - DNA, 373 bp, Glycine max
  unsure (1)..(373): unsure at all n locations
gacctatgaaactcagctataattatcgatacgctcaaaataacatcgaanactctcgttatatcaaatagncataactattcacacggatgtccgattcgggcgcataatatgtcgagaggatcgaaattgaacaacggaagctcttgagaaattcaactggtctaacctttcacacggatggtcgaatcaggcgcaatacatatcgagaccctctaaaattaacaaccgaagctcttgagaaattcaaatggtcataacatttcactcgaatgtcccatttcggcgcatcacatatagagacactcgaaaatgaacaacggaaactctcgtgaaattcaaatggtcataacttttcacactgaagtcccat

SEQ ID NO: 15006 - DNA, 430 bp, Glycine max
ggtgcattcaataccctgatgaggatgtcccatatgttcttataactagactgatacacttgttgtccaagtttcatggttttgcaggtgaagaccctcataagcatctaaaagaattccatattgtctgctccaccatgaaacctccagacgtccaagaaggtcacatctttctgaaagcctttcctcattctttatagggagtggcaaaggactggctatattaccttgctctaaggtccatcacgagctgggatgacctcaaaagagtattcttagaataaattttccctgcctccaggaccacgaccatcagaaaggatatttcaggcattacgcaacttagtggagagagcttatatgaatactgggagagatttaaaaaactatgcgccagttgccctcaccaccagatttctgagcagcttct

SEQ ID NO: 15007 - DNA, 326 bp, Glycine max
cttccatggcttattccctaatggatgacacttcctctcacctcttgtcctttgtctttcgctgcatctccatggtgggaaatcaccattgaaggacctcattgaagctcaaagatccatccttcataaaagctccacaagcaagcttacatcatatggtatagcaaaacaaagaaattgaactcttaaggatatggtgagaagaatgattagtcattcttctttgccagagtcactttggggagaagccttaaagaccgcattttacatccttaatagtgtgctaggtaaagcagctaacaaacacccttatgaactttggactg

SEQ ID NO: 15008 - DNA, 428 bp, Glycine max
  unsure (1)..(428): unsure at all n locations
tctctttgatgaaatgtctatcaatctccacatgctttgttcaatcatgttggacaggattgtgaacaattgctatggccgacatattgtcacagtacaaactcatagtttcatttggtttaaaacccaaatctgatagtacatttttaacccacaaaagttcacatacatcgagtgtcatgcctatgaattctgcttcagcactagatcttgttactacggtctgttttttattcctccaagttacaagatttcctcctacaaaagtaaagtatccagaggtagatcttctatcatcttttgaacctgcctaatctgcatccgtgtacccttctaccttcaagtttccatgatttgagaacaaaattcctttntcaggagtggacttcaaatatctcanaattctctcgactgcatccatatgaagc

SEQ ID NO: 15009 - DNA, 408 bp, Glycine max
ttatagcaattcagatggtcataacgtctcactcggatttcggattcaagcgcataatatatcgagacgctcgaaattgaataatggaagctattgagcaattccaatggtcataacttttaactcggaagtccgattgaggcacataatatattgagacgctcgaaattgaacaacggaagctctcgagaaattcaaatggtcataacttttaactcggaggtcggattgagacgcataatatatctagacgctcgaaattgaacaatggaagctcttgagcaattccaaaggccataacttttaactcggaggtacgattcaggcgcataatatctctatacgttcgaaattgaacaacggaagctctcgagcaactctaatgtgcataacttttcactcggaggt

SEQ ID NO: 15010 - DNA, 407 bp, Glycine max
agcttctgttttcaattacgagcgtctccatatattattggcctcaatccgacatcggagtaaaaagttattgtcgttagaatttgctcagagcttctgttctgaattttgagagtctcgatatactacggaacacaatcggacatctcagtaaaaagttattgtcgcttgaatttgctcagagcttctgttcttaattacgagagtctcgatatattacgggattcattcggacatccaagtaaaaagttattgccgtttgaatttgctcaaagcattcgttgtcaattacgagcgtctagatatattacgggattcattcggacatccgagtaaaaagttatcgtctttttattttgctcagagcttctgtttcaatctcgagcatcttgatatattacaggact

SEQ ID NO: 15011 - DNA, 446 bp, Glycine max
  unsure (1)..(446): unsure at all n locations
agctnttacgatggcgctactcttcttcttttattgtgagagaagcccacactatgctacaaacactatcaaagaagatcaaatagagatacatgatataaatggaagaagtgaaatagatagattaaatggagaattctatagacaatatgtactggacggttacattttgtttgtttattgttcatagtgtagtttccttcacctttctggcctttacattgttgtctagtttagtttgtctgtgatagcctgattgtaaataatattgtttttaacttcttggctgtcaggatttccaatccttggagttgagtggcagaagatggaaaatcctgatttacgaatgtcaatgggcatgggaccagatcaaaaaggtgtgcgtatcagaagaattgaacccactgctccagaatctcatgttctgaagccatctgatgtaattc

SEQ ID NO: 15012 - DNA, 391 bp, Glycine max
  unsure (1)..(391): unsure at all n locations
tggcattgatagagtacaaatattatgaaaccgacggattggcagatgcttcaactaaaactaaaactttggagtatctgattagagctgatgctagtaaagtgaacaactttaggattctggaggaggagggcatgcatatgtcgaccaacacgaggatgaaagcttcaaatttgcttatgcaactgatctcatgtggctcaatattagtgaaaaaccatagttttggccttattccttcctataagcccatgttttatagttcaaaatgtcctttcttttgtgttgggggagtttgattgcttattgattgagcatttgtagtttaatatttttctattctttctatctcaattgacatctctttgactgttattttntcaccttaact

SEQ ID NO: 15013 - DNA, 442 bp, Glycine max
  unsure (1)..(442): unsure at all n locations
agcttcaagaaacattttcactgttgttgtttatcttaacttcactagttagctctgctacacataatggctngtctagtgcaattactgctgctagtaaaagtcctaatgtagtttctaattctgtaatttcatcccctagcaatgttagcttgtggcatgctaggctgggtcaccctaatagcccatgtcatgaagctagtcaatcattgtaacatttcctcatctaataaaaatttccagacttttgctcctcatgctatatgggaaattctcacagatttccttctcactcttttatttttgtatactctcctttggagcttttttttatagacttgtgggggccttctcatttaatttcctatgctggtttcaaatactatgtcatttattgatgttttttccagatacacttgtgtatttcctaataaaaactaaa

SEQ ID NO: 15014 - DNA, 437 bp, Glycine max
aactagctcttgagaaacttcttggaagcagagcttatttctctattccctctcataactaagctcacctccttgagaagcttccataagaagattcctaaagaagctagagcttagctacacacacctctctaatagctaagttcacctccttgagatgagaagctagagcttagctacataccctctataatagctaaactcacccatatggccaaaaacatgaaaatacaaaaaaaggtcctactacaaagactactcaaaatgctctgaaatacaaggctaaaaccctatactactagaatggccaaaatacaaggcccaaacgaaggaaaaacctattctaatatttacaaagataagcgggctcatacatagcccatgggctcgaaatctaccctaaggctcatgagaaccctagggccttcccttggatc

SEQ ID NO: 15015 - DNA, 311 bp, Glycine max
acacggatgttcgattatggcgaatcacatatcgagacgctaaaaatggaacagcggaagctctcgagaaattcaaaggtcataacctctaacactgagttccgattcacgatcataatatataccgacgctcgaaattacacattggagggtctcgagaaaataaattggtaaatactttcacaccgatgtccgattcgggcgtataatatgtcgacacgctccaaattgaacaacagaagctctcgagatattccaatgcgcataacttctcacacggatctccaattcaggtgcatcgcatatcgaga

SEQ ID NO: 15016 - DNA, 197 bp, Glycine max
  unsure (1)..(197): unsure at all n locations
ctatatatatgtgacttgagacacgaatttgctaaaaagttttcagaacaaaaagggcttatcctcttaaaaagcaaaatcgttttatcctcttaccaattccttggccaaacacttgtgattcaataaggaattatttgagtgctcanattgttcaatctatctctttcaagagagatttcttcttctcttcttct

SEQ ID NO: 15017 - DNA, 217 bp, Glycine max
tcatgaaactcagctccaaactcgaacgcggaggacacatgaacagccctcagcaagaacattcatgtggctccagaataggatgagaatggaggattggcttgagggtcctctcttaggcaatcatgaaacacagcttcacactcaaaagtggaggacacatgaacagccctaagcataacattcatgtggctccggaaaggatgagaatggagga

SEQ ID NO: 15018 - DNA, 384 bp, Glycine max
  unsure (1)..(384): unsure at all n locations
catatatcgagacgctcgaaattgaatgttgaagctctgagccattcaacgacataacttttactcggatgtctggatgagtcccgtaatatatcgagaccctccaaattgaatgtgaagctctgagccaattcaaacgacaataacggtttactcggatgtctgattgagttccgcaatatatcgagaaccctcgaaatgaatgttgaagctccgagccaattcaaacgaacaataactnttactcggatgtctgattgagtcccgtaatatatcgagacgctcgaaattgaatggtgaacctctgagcctaatcaaacgacaataactatttactcggatgtctgattgagtcccgtcatatatcgagaacctcgaaattga

SEQ ID NO: 15019 - DNA, 398 bp, Glycine max
  unsure (1)..(398): unsure at all n locations
tcattaataaacacatcaaacttcacaggtgtgtttctctcaaactcaatcccttcaatcaccaaaacctcttcctcctcttccttctccttcctgctcctcgacttggttggccttttaaccattgtgctcacaactgaatccaacactagtgggaacttcacattccttgaagtctcagcagcacgtgctgcaccaaccaccaaaatttgtgctagtgcaaccttatgaaccctagaccttcgcggtgtgggcctagagtttaaccatggaatgtctacatcttggtaaacatacactagttntctctcgtcaagacaaatcttacccttactcgcacaaagttcttattctcatcgtagaagagaaacccagatttaaccaatccgagtcagtaa

SEQ ID NO: 15020 - DNA, 418 bp, Glycine max
  unsure (1)..(418): unsure at all n locations
tacccgctaacctagtggatggagggttgggctacatgcatgaaaaattangttaaatcttcattgttctcattgtaataaaaaaagaaaataaaaatgtgtttttttgtcaaaactgaggtggaataaagatgaatttttttcatgtttattcttgtcatcctgttagaagagtaaatagtatatgaaacaatagttattaactaattataactattaagtttgttaactttaataataattatattataagaaagtgtaaaaataatttctaattggctgatagtataacatttttttacactaacattatatacctattaaactctttntaaaaattacaaatgattntttaaaaaaaagtataattttataattaantatgatattctaatttgatatgttatttaaagatata

SEQ ID NO: 15021 - DNA, 468 bp, Glycine max
  unsure (1)..(468): unsure at all n locations
accctgatgaggatgtcccatatgttcttaatttttttctgattcattgcttccaaagnttcatggccttgcangtgaagacccacacaaacatttgaaagaaattcacattgtctgctccaccatgaaacccccagatgtccaagaggatcacatatttctgaaggcttttcctcattcattagagggagtggcaaaggactggctgtattaccttgctccaaggtccatcacgagctgggatgaccttaagagagtattcttagaaaatnttttccctgcttccaggaccacaaccatcangaaggatatctcaggtattagacaactcagtggagagagcctgaatgagtactgngagagaattaagaaactatgtgccagttgcccccaccatcagatttcagaacagcttattctccaatatntttatgaaggaactcagtatatggagagaagtatgataga

SEQ ID NO: 15022 - DNA, 251 bp, Glycine max
  unsure (1)..(251): unsure at all n locations
tttctctttntgataatatgattggacatgcttgtgagttcttcgttttccttctctctctttgataatttgattgatgtgtgagcaatgatggttaggaggggagaagaagtgtctgaattctgagctatggcatgcatgcacgggccccatggtgtccctaccaactgcagggactcatgtnggttacttccctcaaggtcataatgagcanngtttttgttanttgggtttactacctactctactct

SEQ ID NO: 15023 - DNA, 390 bp, Glycine max
  unsure (1)..(390): unsure at all n locations
gctcgtctcctgaacgcttgagaggttgatgtccaatggttaccctcnntatgtcctcaactngntngttaaatgctctggacgggtcggaccctgcctgacanattcacatacccggnntgtatcaaggcttgtggtgactngtctttgattgatgtgggcgttggaattcatgggcagacctttnaagttggctatgattccgacacattngttcaaaacactntgttggcaatgtatatgaatgccggngagaaggaagcagcacaactggttnttgacttgatgctggaacggactgtgatttcttggaataccatgattaacgggtacttttggaataactgtgtagaagatgcagtaaaggtttatggtagaatgatggatgtg

SEQ ID NO: 15024 - DNA, 444 bp, Glycine max
  unsure (1)..(444): unsure at all n locations
gactaattgtcttcacatttgattattgcttattatnaaananggngncatcagcgnagtggaatatgttgactggctctttgttttttcccacgaggaaactgctaaataagctcttatcaatgcttctctcattanaccgcgtaggccttctgaaacaatatngaatagtaaaggcgttaggtggtcgccttgtctaaggcctctttgtggaatgaatntatttgtggggctgccatttaccaatacagaaaccgaggctgagctaagacaaccctcaatccaacaaatccacttggggcagaagcctaatctcctcagcatatatgataggaaaccccacgagacggagttgtatgctctttcatagtctactntgaacaccaagcatggcttatgacgcctctntgcttcctccaccgcttcgatggctatcaatacact

SEQ ID NO: 15025 - DNA, 435 bp, Glycine max
  unsure (1)..(435): unsure at all n locations
tcctatctatatatcttttttatcttntcaggatctgataacttcttatcagacgttagttcatcattgaatttaacatggatggattcttctacaactaaagttcttgtactaaaaacttatatgctttagatgtattagataaaccaagaanaatcccttttgtcactttggaatcaaacttagcangttgatctttagtgttcatgataaagcactcacatccaaatggatgagaagtatgaaatatgggtcttcttcctctctatggttcatagggagactntnntatcaatggtctgatcaatattctattctaaacatagcangttgtatttactacttctgctcaaaagtacttatgaagtgaattntcatatagcatggttctagccatctcttgcagagntctattttccttttaactaccccatt

SEQ ID NO: 15026 - DNA, 467 bp, Glycine max
  unsure (1)..(467): unsure at all n locations
ttaaaagaacaacatatacattntttgttgttttaagggaataaaaattgtaattaaactagagaattttttattaaatgtgtcactatgacaatgataaatcgattcaacttaatgtggactaaaaaacataatcaaataaatcaaaaattgagaaatcataaatttttattagattatatcngaatttagatttgaatttaaaaattgattcaatcccgtcaaaattgaatatanttttattcataaatntataatggccctcatatgtttatttttattntctatatactttgaaaattatcatataaattatacctatgaaaaatacatttgattaaagaacttttttaactacctatttgaattaagatggataaatatattattagttatacagtgatatataaatgaaatatttgataacataaatgagtcttattatatatatatatatatatatatat

SEQ ID NO: 15027 - DNA, 463 bp, Glycine max
  unsure (1)..(463): unsure at all n locations
tgttaacccatggaagctcctaatatctcccacactctgtggtgtgggccattcttggatggccttgattntctcagggtccacttggaccccatttctaacaactacaaaccataagaaaactatattatctacacaaaaagtacacttctctatatttgcataaagggtgtttttcctaaggactgaaatatcatcaaaataagcaactacaaatctacctatgaaatcccttaagacatgatgcataagcctcataaaggtgcttggtgcattagtgagcccaaaagacatcactagccattcatacaaaccaaacttggtcttgaaagtggttttccactcatcaccctttntcttcctgatttggtgatacccacttttaagatcaattnttgaaaagatattggcaccatgcaactcatcaagcaaatcatcaagtctaggaatgagatgcctatac

SEQ ID NO: 15028 - DNA, 476 bp, Glycine max
  unsure (1)..(476): unsure at all n locations
taactggtttgttaaatgacatatctaaatctaaatcattttgtgataacaagatttgtcttanaccagttcaatcatatgcatcaaagtataaaaactttcataaaacaaaaaaatggttttgtggatgaaaagctggaaataacattctgagtacaacattatgacaaaaaacattcttagtattgcatttgcataacataaactgagattttcataataacaatattctgataaatttttttatttaaataatgaacatcaaaacataagaaaatgtgcattgacattaggttctcataatcatatcaaacatttcataatgagttttgtgactaaccaagtagagagtttagttatctaagtgtttgaacctctatgttaagactctttgcataccanaataatcttgagtaaaagttcaaaaaaggtaaagtttcaagaaagggtaacanagtcacaataacccctcattc

SEQ ID NO: 15029 - DNA, 453 bp, Glycine max
  unsure (1)..(453): unsure at all n locations
atgtctaagtgaaagaataatgattggcgaactctctcttaccaccaaacacctcattaatgtctattatttttctctgtctctctcttgtcattatagatcatatcacttatcatacttacacgtttctttatttctctcactagttgtcaattgtcaaataggttattagtgtccaccaaaattttttgctgagtgaaattacttgaatggctaacctccatttcagcatcatcaagatatccaacagtcaactntgtaatgtcaaccaggaatggatcatccagagagctatgttttgatgagggatcatcaagatcttttccccgaacaatatcaagaataatagcacaatcagttgcagatctacagaaaggaccaagcttatcctagtagaaagaatacatgtaagtntaacattcacagcatcctacanataacaagggatgatat

SEQ ID NO: 15030 - DNA, 366 bp, Glycine max
  unsure (1)..(366): unsure at all n locations
cttggagtttccaagtgccaattcgtcttcttctttagtccagtcttcttctggcttcaattcatcagtgggctttccttctgtgtccagcatcttgngatgttcccagcctttgatgacagctttccaggttctgctatccagtgatttgagaaaggccaccattcttgctttccagtattcatagttggttccatcaagaattggtggtctgttcactggtcctccttctttctccatgttcatcagaatttatctccctagatctcactctgtgatttcgagtgttggctctgataccaattgaaattctgatactgnngacagatgtcgtaccggatgtcacgacatcacgcttcagaacat

SEQ ID NO: 15031 - DNA, 434 bp, Glycine max
  unsure (1)..(434): unsure at all n locations
tgttcttaagcanaagctaactaatgcccccatacttcttgatatattgttcgcctgaatcggactttcgtttgaaaagttatgaccatttgaatntctccagagctttcgttgttcaatttcgagcatctcaatatattatgcacctgaatcggacctccgtgtgacaagttatgaccatttgaatttctcaagagcattcgttgttcaatttcgagcgtctcgatatattatgcggctgaatcggacatccgtgtgacaagttatgaccatttgaatttctcaagagcattcgttgttcaatttcgagcgtctcgatatattatgcgcctaaatcggagctccgtgttacaagttatgaccatttgaatatctcgagagcanttcgttgtcaattacaagcgtatcgatatattatgcggctgaatcggaca

SEQ ID NO: 15032 - DNA, 342 bp, Glycine max
  unsure (1)..(342): unsure at all n locations
ttcacacgacaataactcttgactcggatgtctgnattgttgtcctcgtaatatatcgagacagctcgtatattggaaaccagaagcctctgagcacaantcaaaacgacacataactttttacatcggatgtcccgattgaatcccgtaatatatcgagacgctattaattgaaaatagaagctctgagcaaattcaaacggcaataacttttaactcgggtgtccgattgtgtctcgtaatatatcgagacgctcgaaattgaaaactgaagctctgagaaaaatcgaacgacaataactttttactcggatgtccgattgagtcccgtaatatatcgag

SEQ ID NO: 15033 - DNA, 452 bp, Glycine max
  unsure (1)..(452): unsure at all n locations
tcaagaaaaagatggcctcagcanactccttatttccagaagggaattctatcaatagacctccaatctttaatggagagggttaccactactggaaaactcgaatgcaaatttttattgaggcaatagacctaaatatttgggaagccatagaaatagggccttatatacccaccacagtagaaagagttacaatagatggcagttcatcaagtgaaagtataacaatagaaaaacctatagatagatggtctgaagaggatagaaaacgagtacaatacaatttaaaagccaaaaacataataacatctgccctgagaatggatgaatatttcanggtttcaaaatgtaagagtgctaaggaaatgtgggacactcttcgattaacaaatgaaggaactacagatgtgtaaagatctangataaatgcactaactcatgagtatgaacta

SEQ ID NO: 15034 - DNA, 498 bp, Glycine max
  unsure (1)..(498): unsure at all n locations
agcttactatatttaagacgctcgaaattgaataacggaagctctcngtgaaatcttatagtcatatcatttcagacggatgtctgattcaggcgcagaatatatcgatacgctcgaaattgaacaacggaagctctcgagaaattcaaatggttataacttctcacacggatgtacaattcaaggacataatatatctagacgctcgtaattgaacaatagaagctctcgagaaagtcacatggttataacttttcacccggatgaccgattcggggacataatatatcgagacacttgaaattgaacagcggaagctctcgacaaattcaaatggtcatcactttccacaagaatgtccgattcacgggcataatatatcgagacgctcganatngaacaacggaagctctcgagaaattcanatggtcataacttatcatacggatgtccgattcgggccataatatatcgagatgctcgaaattgaacaacgga

SEQ ID NO: 15035 - DNA, 371 bp, Glycine max
  unsure (1)..(371): unsure at all n locations
taatttctctcaattgcatcttctctcaatgagctagtgaagaagaatgtggcatttacctanggtgaaaaacaaaaacaagcctttgctttgctcaaagaaaagcttactaaggcacttgttctagctcttcttgacttttctaaaacttttgagctanaatgtgatgcctttggagtgggagttggagctgtattgttacaaggtgggcaccttattgcttatnttagtgaaaaacttcatagtgccaccctcaactacctcacctatgataaagagctttatgccttaataagagccctccaaacttaggaacattaccttgtttccaagggaattgtcattcatagtgatcatcaatcacttaagta

SEQ ID NO: 15036 - DNA, 225 bp, Glycine max
cttttcacccggatgtccgattcgggcgcataatatgtctagagtctctaaattgaacaacggaagctcttgagaaattcaaatggttataacttttcacacggatgtccgaatcaggctaatcacatatcgagacgctcagaattgaacaacggaagctcttgagaaattcaaatggtcataactcttcacacggatgtccaatttaggcgcaccacatatagt

SEQ ID NO: 15037 - DNA, 298 bp, Glycine max
  unsure (1)..(298): unsure at all n locations
tatgcatcatgtgcactatatgatttgtgtgttggaagataaatntaatcgaagtacgagaagctcaatccaattaaattttagaccagcctaagggggaggtgagcatttgcttaccaccccccattgtcatatcatatagacacaccttgaacatgtncttctatgtttacatgccttatgacacctaagcacacttaagggagaatcttggatttgatcttggaagggggctgaaccatatctaatatttactaatcataattagtgaaattctgactccaaatttggcttcaca

SEQ ID NO: 15038 - DNA, 324 bp, Glycine max
  unsure (1)..(324): unsure at all n locations
atatccacatattcattctgataacctcccatagataaaaacttactaataagatagatttattggaataagaataaaaaaatagtattggaagggaaaaagttactgactcatgaatgtatatgattaaaattcttatacaaccagatacatcgaaataagtttcatagaagcccttctaaaaattctctaagacctaattaggtatttaaatataaaatgtaaattataatggttctatggattattaattagtataaatatactattcggggttaatntaaatactattaaaagtatattcatttaacaatacaacatatt

SEQ ID NO: 15039 - DNA, 350 bp, Glycine max
  unsure (1)..(350): unsure at all n locations
atcctctgagtcacctgcggctgcagctgctctactatatagattagaagtgtgggtgatatgtatatctattgaagatgtacattgctacttaaagaaagtcctctaagaccacaccacatgccctgactctcatttggtgtcatgacttctatctcaaacctctccaccaataattctagtaaccaattaatggtttcttacctatccttctatctatttattttcaaaaatctcaagagttctcttataccactcgcttcttatatcaataccacaacgggtatttgtntacttggtattatagaggcattattgcagcaaatcaagcattttcaaaagctaatgat

SEQ ID NO: 15040 - DNA, 425 bp, Glycine max
  unsure (1)..(425): unsure at all n locations
ctataccaatcttatntagagaacatagcacaacctagattggactaacaaatcttatcctcaaagataaatacaattatgctttagtcagcggtattttggaagatcacaaacttcattttaacaaacttgaaagggctttaattattctaaagcagcagatgcacggggtggaggatcaacaagaaatatatcaagaagctggtcaatggatgttgtaatataatcangatatagctgtgaagctcaaggtcatcttcctctatctcgaacctcacgaggtccnctttaacaaatatactatgaaggatggaaactggaatattgtgtggagagggtaacgctgcagcatcatgaataaataattaccattaggaaagaccaaatatacccatcatctgtatactacatccattattatatat

SEQ ID NO: 15041 - DNA, 374 bp, Glycine max
  unsure (1)..(374): unsure at all n locations
agctngaaanngaatctgaagttctattaaatgtcanacgacaatgacgtttgactcggatgttcgatatagtatcgtaatatatcgagacgctcgtaattgaaaacagaagctctgagcaaatttaaacgacaataacatttgactcggatgtccgattgtgtcccataggatatcgagacgctcgtaattgaaaacggaagctctgagaaaaatcaaacgacaataactnttaactcggatgtccgattgagccttgtaatatatcgagacgcttgtaattgtaaacggaagttctaagaaaagtcacacgacaataacttttgactcggatgtccgatngagtcctgtaatatattgagacgctcgtaatt

SEQ ID NO: 15042 - DNA, 451 bp, Glycine max
  unsure (1)..(451): unsure at all n locations
agctngcagtgaagcagccaagacatggatgactttgagtttttttgtttttaaaaaaagaacatntttttaatactttatttgggggggttatttcttgtgttttagttacatggtagagttggtagatagtactgcatctatgtgttattggaagctaattgaaactaattgaggatgtgattgtaatgttattgcagaatccggcaccgaagagaggtgagattgtgagacagattggtgaagcattgagggccaagttggatcctttgggtagactggtgtctcttgagatgggaaaaattctcccagaaggaattggggaagttcaggtatcacaattataactgttctgcaactctttttgacatattatcaggtttgacagcatagaaatcagagtttaattgtgtataatactataacacttctttgatggaaactaaatcaa

SEQ ID NO: 15043 - DNA, 282 bp, Glycine max
  unsure (1)..(282): unsure at all n locations
tgctttgctcaaagaaaagcttactaaggcacctgttctagctcttcctgacttttctaaaacttttgagctagaatgtgatacctctggagtgggaagtggagctgtattgtacaaagtgggcaccctacngcttattntagtgaaaaacttcatagtgccaccctcaactaccccacctatgataaagagctntatgccttaataagagccctncaaacttgngaacattnaccttgttccaaggaagttgtcattcatagtgatcatcaatcacttaag

SEQ ID NO: 15044 - DNA, 282 bp, Glycine max
  unsure (1)..(282): unsure at all n locations
cctctacttttctgaatgtttccaagatctctttctctgcctcttccattntttttggtggaaactgctcttggagggaatggaagaggaaggatgtgctgcttctgcaaatcagaattaccagtggaagattcacctgcacagaaatggttanggtaaattttgtcattacctttntctgggttagagtgaagttggacaggttcatttgcagatgaggaaggtgctacgggttgaggtccttgacactgctttcccgacctcaatgaaatggcactgaca

SEQ ID NO: 15045 - DNA, 424 bp, Glycine max
  unsure (1)..(424): unsure at all n locations
agtcacctgcggcatgcaagcttctagaggttgngcttatctaccccatttccnacagtgcttatgtaagcctagtccaggtggtaccaaataaagggggtatggcaatcattcggaatgacaagaatgacctaatcccaacgaagactatcactngtgttggagaaaaatatgcgtcaattacncgcaaagctcacattgaagccacaagggaaaagatcatttttccttttgcctttcatggaccanatgttggagaggcttgcgggacaagcttattactacttcttggatggatattctggatacattcagattgctgtggaccccaaggatcaagagaagacaaccttcacatgcccttttagtgtcttttcctacagatggatgccatttcggttatgtaatgcacctaccacatttc

SEQ ID NO: 15046 - DNA, 254 bp, Glycine max
  unsure (1)..(254): unsure at all n locations
gcttcntgtttcaatttcgagcgtctcgatatattacgggtctcaatcggatattggagntaaaagttcttgtggtttgcaattgctacgagcttctgttttcaatttcgagcatctcgatatattacgggactcaatcggacattcgagtaaaaatttattgtcctttgaatttgctaaaagcctctgttctgaattttgagcgtctcgaaatacttcaagacttaattggacatccgagaaaaagtttttat

SEQ ID NO: 15047 - DNA, 383 bp, Glycine max
gattgcggctcgtaatatatcgagacgctctacattgtaaacggatgctcgtagcaaatgcaaaccgcaataactcttaactcggatgtatgattgagtaccataatagatcgagacgctcgaaattgaaaaaagaagttctgagcaaattcaaacgactataactttttactcggatgtctgattgagttccgtaatatattgaggagcacgatattgagaacagaagctctgaccataatcaaaccaaaataactttatactcggatttgcgattgagtcccgtaatatatgaagacgctctcaattgaaaacagaagctcttgaacaattataacgacagttacctttacccgatgtccgattgagtcccgaatatatca

SEQ ID NO: 15048 - DNA, 203 bp, Glycine max
  unsure (1)..(203): unsure at all n locations
tcccctaatttcatttggccagagatcatagatttgtgcttggatcgcatccgaaaactcgcagacaactgcactagtctccagactcacttncttaagggttgatggcactatcaatgtagatattactgagttccacaccaaccttgtgccataccccagggtccacttcatcatttctttgtatacttcagttatctcta

SEQ ID NO: 15049 - DNA, 436 bp, Glycine max
  unsure (1)..(436): unsure at all n locations
agcttatcatggtagatgttgatcatgctaagtttttagacaaaatcatgaaatttgggtggtgccaatgctttggtgagaaaatctgccacttgatcacttgttgaaactggtagtagctntagagtgcccttcaaaagcttctctcgcacaagatggcaatcaatttccaagtgttttgtgcgttcgtgaaaaaccggatttgaggcaatgtggactgcgctttggttgtcacagtaaagagttggagttctggtaagctgaactctcanatctgcaaaaagatacaacagccattgcaactcacaagcagctgaagacagagccctgtactctgcttctgaagatgatctggacacagttgcttgctttttagcacgccatgacactaaaatttgcctatgaagaaaaatatccagatatggatttttagaat

SEQ ID NO: 15050 - DNA, 416 bp, Glycine max
  unsure (1)..(416): unsure at all n locations
agcttataatatatttattacgctcgaaattaaactatcagaagctcttctatattattcaaatggggcataacttttcancctcgaatgtctcgattatggcgacatcaccatatcgtagacgcttcannaaattgaaccagtcggaagccctttgagagaattctaatgggtcatatacttttaacatcggatgtctcgattcagggcgcatcacatnatcgagacgctcgaaaaggaacaacggaagctctcgagaaattcaaatggtcataacttatcacactgaggtccgattaaggattataatatatcaagacgctcgaaattaaacatcgaaagctctcaagaaattcaaatggtcatcacttttcacacggatgtacgattcgggcgcataatatattgatacgctc

SEQ ID NO: 15051 - DNA, 461 bp, Glycine max
  unsure (1)..(461): unsure at all n locations
agctataaccaaggggagatggaccatttctagtgcttgaaagatataatgacaatgcttacaaagttgagctgctcggtgagtataatgttagttccatctttaatgtctctgatttatctctttttgatgcagatggagaatccgatttgaggacaaatccttctcaagagggagagaatgatgaagacatgaccaagagcaaaggcaaggatccacttgaaggacttggagggcctatgacaagggctagagcaaggaaagccaaggaagctcttcaacaagtgttgtccatactatttgaatacaagcccaagtttcaaggagaaaagtccaaggttgtgagttgtatcatggcccaaatggaggaggactaaatggcaccactttgtctcaattntagagtgttagtttgtctaaataatagcccaatccttgtaaagttggctgaccaaaaatat

SEQ ID NO: 15052 - DNA, 432 bp, Glycine max
agctatagttcactgcttcaagtagtgcacgatatgtcttcagaggaaaacacgttgcctaaaagttattatcaggccaagaagatactgtgtctgatgggtttggagtatcagaagattcatgcatgccctaatgattgcatactatacaaacatgagtttcaagacatgcacaaatgccctaggtatggggtatcatgatacaaagtgaaggatgatgacgagtgtagtagtgatgaaaactcgaagaagggcccccagcgaaggtgttgttgtatcttcccatcattccaaggtttaggcgtctatttgctgatggagacgaagcaaaagaccctacacgacatgtaaatgggagaaactatgatgaaatgctccatcatccggctgatttgtgcagtggaagaagattgatcattatatccgcatttc

SEQ ID NO: 15053 - DNA, 353 bp, Glycine max
actaagcttgtcgcttcttctgaataactggctaacatacattctataatgctgaagtactattagaaaggggtagccctgatacagctctcatggttttgaggtgggctgggcgggatggtggacctcacgtgacttcactcaaagatgctgtcactgcaatgcgggtgagggttgagtgtgggcttcttactgaagcatttatgcatcagagaatgctctgcaccacagtgaaggaaaagaatttcaataaaacagcatctgggaatacttctgagaagcaaaaaggtcaatgtaataagtgggtggagtggatggaggtcctggtgactgagatatgttgcctctgtatt

SEQ ID NO: 15054 - DNA, 437 bp, Glycine max
  unsure (1)..(437): unsure at all n locations
aagcttgttactnnttttggtttataacgtatatagattaatattccttcgcttgcatacactnttcagcacattccatggaagaagcagaagtcctatgtgatcgattatgaatatttgtagacggnggcttgcagtgcatatgcaatccaaaggaggtaacattgcttaattaatatatatgctttatcaacttcatttgcaattaatgggcttgaccctatagataccgggctcaacctataactttggggttattctttctacacccaacaaatttcttctatacccaacatattctaaaaaattataactgtatccttttttacttcttcttcttcttcggtcctatctttttttcttgtcttcgcatagcttatagaaattntagtgttatatatagtgacattaattatnntttaacatgattggtctat

SEQ ID NO: 15055 - DNA, 462 bp, Glycine max
acataaaagaagaatcttgtacgtgtattgttgaggctttaatggaaatatctaaaatacaaggagccccagagataaaccaaataacatggtatctgtaagtaaggaatgagctaggataaatattaacaaggacagttctatactgattgaaacttaagaaactatatgatggcagaaatgcaagtgttatggggggaatcaatgatttctataagagctaacacttactgaggttaaactgtacactgcaggaatctgaataatattcttgcggaagactctcaaacaggaaagcagcggcatataccgtatatagattctaggttgacacttttgttgcaggagtctctcggaggaaatgcataattagcaatgatttgtgctatttcaccatcacacaagtagtatgtaatgcactgctcattcgatatgttttatcttctgatctttctgtattac

SEQ ID NO: 15056 - DNA, 462 bp, Glycine max
  unsure (1)..(462): unsure at all n locations
ntgaccccacttgttggacaagtgacctcagtatcttaagaatgtgggttgaattaagatacaaaactttccctaattaaaattntaactttctttcggattaacaatgcacccttaatatgaattactcaaagaacaattcaaaataaacttctttaaagcaaaagataaactgcaataaataaaagaaagttaagagaagagagaatgcaaactcagtttttatactgggttggccacgccctgtgcctacgtccagtccccaagcaacccgtttgagatttccactatcttgtaaaaatccttttacaaagtctgaaccacacaaggacatctttcccttatatttagaaatctttacaacttaagagaccctcggtctcttaaacagatctcttngaataataagaagaagaatattctctctttaagagaatgacattacaattgaagatcgatcaa

SEQ ID NO: 15057 - DNA, 401 bp, Glycine max
  unsure (1)..(401): unsure at all n locations
tagtatagctaggcactaacaatctcccnctttggcatattttgtctanaacatacttagacacttcctgagcacgtacgagcagttatgcaagtgggatcaacaactttcattatcagagtaatcaagcacagcggaaattctgcaagttgcaagtcgtttccaggatgtcaagacatcttacatgacatcagctttctgcttctgctccccctgtctccatgctcttactccagcatcttctatcagctactaatcttttccaggatgtcaagacatctcatgtgacatcagcttttccttgtctccatgctcttactgcagcatcttctatcagctactagtagcttacaatagtcatcatcagcagcaggaggctcccccttcaaacatgtacatac

SEQ ID NO: 15058 - DNA, 436 bp, Glycine max
  unsure (1)..(436): unsure at all n locations
nttcatacttatcttgattaagccttctctcgattcttgaatcttgagtcttgaatcttgatcatgattcttgggatcttgaaccttgaatcttgattctttactctntaactttcctcttgagacttgaattgttcttgattctatcttgatcacttgagttgntctttgattctatcttgatcacttgagttgttctttgattgatctttgagctttttgtcatcacctttgtcatcatcctttgttatcatcattgttatcatcaaaacatctttgaatgaatcttgattcaccatgaagctttgcttctacatctagccaaatgagcctaccttgaattaattcctttgatagcccctttgaacctatgttcccctttctttgntntgaagctcattacaagccttaagtgaaaaaccatgatctcacccta

SEQ ID NO: 15059 - DNA, 298 bp, Glycine max
cgacaataagttttaactcggatgtcctattaagccctgtaatatatcgagacgctcgaagttgaaaacggaagctctaagaaaagtccaacaacaataacttttaactcgaatgtccgattgagtcccgtaatatatcgaaacgctcgtaatttaaaacagaagctctgagcaaattcaaacgacaaaaacttttaacttcgatgtccgattgagccctataatacattgagacgctcgatattgaaaacggaagctctaaaaaaagtcaaacgacaataactcttgactcggatgt

SEQ ID NO: 15060 - DNA, 325 bp, Glycine max
  unsure (1)..(325): unsure at all n locations
atctatccttcctaagatggtgtcagacccagtcaccctcattaagaactagctcttttcttcctctattgcctttagttgaatacacctttgtttggttntctatttggttcttaaccctctcatgcaacttctttacaaactctgacctagattaccattctttatgtataaaagaagtgtccagtgggagaggaatgangtctaacggtgttaggggattgaacccatagacaaccttcaaaagggactgcttgatggttctatgaacccccctgttgtaggtaaattcttcatgaggaagatactcatcccaagacttatg

SEQ ID NO: 15061 - DNA, 371 bp, Glycine max
  unsure (1)..(371): unsure at all n locations
gtaaaagtattatcgtttgattttgctcagaaccattttttccaattcgagtgtcacgatatactacgagacacaatcagacatcccgagaaaaagnttttgtcgtttgaagttgctcagaacatctgttttcaatttcgagcgtctcgatatattacagcgttcaatcggacatccgagttaaatgttattgtcattngaatntgctacgagcttccattttcgatttcgagcgtctcgatatactacggcacacaattggacatctgagttaaaagtattggcactttgaatttctcagaacatctggtttcaatttcgagcgtctcaatatctcacgggactcaattcgacatccgagtaaaaagtat

SEQ ID NO: 15062 - DNA, 343 bp, Glycine max
  unsure (1)..(343): unsure at all n locations
atgaagctctgataccacttgntatacaagtggccttagatatcttaagaagggngggggggtgaattaagaaattccaaactacttccccaattaaaaatctatttcactttttattcaagttatgaattcccttaatgacaatcttcttaaatattgattcaaataaaacaatttgaatatgaatataaagcaataataaataaaggagattaacggaagagaaagtgcaaacttagaattatactggttcggccacacccttgtgcctacgtccagtccccaagcaacccgcttgagagttccactatcttgtaaattccttttacaagttctaaacaca

SEQ ID NO: 15063 - DNA, 400 bp, Glycine max
aaagcttatagatatgggagggagaataaaacaatcttatataattttacctggcaagcaacgaagagttctttttgcggcttttagatgacgacaggtacgagcctccatacagcgacacacaactcccaccgcatatagaatatcgggccttgtattggttatataccttagactccccacaagactcttgaagatcgtggagtctaccttctctcctttatgaaactgtgataacttcaagccaccttccataggtgtgttcacgggattgcaatcaagcatattaaatatcttaacacttcttttgtgtacctatcttgtgagacaaagataccattctccgtttgcttcacttgcattcccagaaatatgacatgagtcccatagtctgcatatc

SEQ ID NO: 15064 - DNA, 416 bp, Glycine max
tctggcatggaatgacttggcaattgccttctttatgcagcaccattacaacactgatatggctcctgatcagaaccaacttcagagcatgaccaagcgggaatatgagtccattaaagaatatgctcaaaggtggagagacctagcagcccaagtcgtcccacctatgactgagagggaaatgatcacgattatggtagatatgttgcctacgttctactacgagaagctgataggatatatgccggctaactttgcagacctcatcttcgctggagaaagaatcgagtccggactgaggaaaggcaagtttgaatatgcctccaacgctgcccccaacaataacagaagagccccagtggtgggcacacgataaaaggaaggagatacccacgtggtcaccaccgccccaacat

SEQ ID NO: 15065 - DNA, 329 bp, Glycine max
atggatcatctaaataggttaatttcaaaagatctagtttttggatggcctaaattaaatctaaaaatattgtttccaccactaaaccattgcaataattacacatggatttgtttggaccatctagggtcatgagctttggtggaagttactatgcattagtaattgttgatgattattctagatatacttggactttatttcttactcataagaatgatgcatttcatgcatttagaagacttgccaaagtcattcaaaacaaaaagaatctcaaattatctccatcagaagtgatcatggaggtgaatttgaaaacattgattttg

SEQ ID NO: 15066 - DNA, 249 bp, Glycine max
  unsure (1)..(249): unsure at all n locations
gggagaactaccataagggatagagcctttgtgctaagtgcatgtnnagaaacaagccagacaaggcaagtaaggttgtgagaaacaagacaagattggttgccaaaggttactcacaatangaaggtatagactatacataaacctttgctcatgttactcgtctaaagcaatacacattatactctcatttacagctcatacaaaaatgagactatatcaaatagacgtaaaaaggcattcctcaat

SEQ ID NO: 15067 - DNA, 354 bp, Glycine max
  unsure (1)..(354): unsure at all n locations
gcttatctcatgtgggtacatctcaataaattcattcttggagagcttcatggttttggttatcacgggaaggatcattgcagatgcgggaagcatgaccacggatctcgctagaggtgctgatgtagttggtgatatttttgggatcattgatcgtcgtacgaagattgagccggatgatccanatgggtacatgctagagaggttaattggtcaaatagagcttcatgacgtgcattttgcgtaccctgctaggcctaatgttgctatctttgaaaatttctcgatgaanattgaggcacggaaatcaacagcattggtggggcaaagtgtgtccgggaaatcgaccatcat

SEQ ID NO: 15068 - DNA, 313 bp, Glycine max
agcttgtatctcacagttgcctctctccttcacggtcaggtgacaataataaatttacaaacagatgcgtactactacattattattattattataattactgatattcaatgattaattatatgcaattgtcattaacttagtagtaatgctatgcttttgtaggtgttattatgcttagatggaaggagttaagcattcgggtccgaccaaattggttctatattctacggaggccacaaacattctctacacattccgtggacatgctgttactgtataagacaacctcagatatatattcgtgtctttt

SEQ ID NO: 15069 - DNA, 442 bp, Glycine max
  unsure (1)..(442): unsure at all n locations
acacgcagctgttgcaaacattcagaagatttaagtatatatntaatatagaactngtataaaagaaaaatagacaccaccagataattaagtggttcaactntggcatatgtgcaaatgcaaactagctaccaattaagattctcgacaatcctcanagcaacatcacataaacacttcaaaccatcctctctgggagcaagctcagtaggataaaccaaacccgggtagagtttgaacaagttgtgacaaaacattgggtaatcagaagctgcagtgatgtgcatggaagcatagtcacatgcctcattagccaaatcatgtgcagaagcttggagggcatcactggcatacttgtacttttctacacactccttcagcacccttttaaggtggaatccttgttgcagtgcaagcaactgagaagaaaatagagagaagt

SEQ ID NO: 15070 - DNA, 303 bp, Glycine max
agggactgaatcacacattcgagtaaaaagttcttatcgttagaatacgcacagaacttcggtgttccattctgagcaactcgatatattacgggactcaatcagacattccagtaacaagttattgtcgtttgaatgtggtcagagcttcgataatcaatttcgagcgtctcaatatattacgggacttagtcagacatccgagtaaaacgccattgtcgtttgaatagactcagaacttaggtcttcactttcgagcgtctcaacataattctggactcaatcagacatccgagtaaaaag

SEQ ID NO: 15071 - DNA, 349 bp, Glycine max
  unsure (1)..(349): unsure at all n locations
gttaaaagtgattttctaaatggcttaattcaagaagaagtatatgttgaacaaccaccaggttttgaaatattggataacccaaatcattgttataaattgaaaaaggtnttatatgggcttgaaacaagcccctagggcttggtacgagcgtctaagtaagttcctttagaaaaggactttctaganganagtggatctattcttttataaagagaaaacacatgatatttactagtcaaaatatgttatgacattattttggaccactaacaattgtgtgcaggaattctccatgacatgcaagtgagttgaatgtcatgatggaaattatttcttcttggataca

SEQ ID NO: 15072 - DNA, 383 bp, Glycine max
  unsure (1)..(383): unsure at all n locations
gcagcatctatgttagtganggctgtgattcacctcanggttcnttcgagntttgatcccacaatcaagggggacccacaaaatgtttttctcaagcactgcgagcatcttattgatcctatcagcaatatcatcacttggtggtattctcggagagtgaatgttataaactccggggccaattcctgctccatacttaactccttcacagaacactgacaggagctcttcttctgagcgagaattttcgatggtgatcacatacacatccatatcaatgatcgagtggatgatgtcattgaaattagagtaacacatgtgcgtgtggatctgtcgattgtatagaatacaaaacatattatattttgatggaatgcgttcta

SEQ ID NO: 15073 - DNA, 324 bp, Glycine max
agtttaatcattcaatttcgaccgtctcgatatattacgggactcaatcagacatccgagtaaaaagttattgtcgtttgaattggctcagaggttcaaaattcaatttcgaacgtctcgatatatttcgggactcaatcagacatccgagtaaaaagttattgtcttttgagttggctcagaggttcaacattcaatttcgagcgtcccgatatattacgtcactgaatcggacatccgagtaaaaagatattgtcggttgaatttgctcagagcttcaacattcaatttcgagcgtctcgatatattacgggactcaatcag

SEQ ID NO: 15074 - DNA, 316 bp, Glycine max
agcttcttatgattgtttgttcctaatttctctacaattgcatcacctctcaatgagctggtgaagaagaatgtggcatttacctgcggtgaaaaacaagagcaagcctttgctttgctcaaagaaaagctgactaaggcacctgttctagctcttcctgacttttctaaaacttttgagctagaatgtgatgcctctggagtgggagttggagctgtattgttacaaggtgggcaccatattgcttattttagtgaaaaacttcatagtgccaccctcaactaccccacctatgataaagagctttatgccttaa

SEQ ID NO: 15075 - DNA, 387 bp, Glycine max
ctgcattttaataatatataataagagaactatgactatggaagaatctattcatgtttcctttgatgagtctaatgttattcctccaagaaaggatattttagatgatattgcagaatctttagaacaaatgcatatttatggacaagattctaaaggaaaagggaaagaaagcaatgaagatcctccagaagaagccaaatcaaatgatgaacttccaagagaatggaaagcttcaagagatcatccacttgacaacattattggtgatatctcacaaggggtaacaactagacattctcttaaagatgtatgcaataatatggctcttgtgtctatgattgaacctacaaatttaaatgaagccataatagatgatcattggat

SEQ ID NO: 15076 - DNA, 403 bp, Glycine max
  unsure (1)..(403): unsure at all n locations
agcttcatcattattttcgagcgtctcgatacgttacgggactgaatcagacatccgagtaaaaagtattatcgtttgagttgctcagagcttaacattcaatttcagcgtctcgatatatgacgggactcaatcagacatccgagtaaaaagttattgtcgtttgaattggctcagagcttcaacattcaatttcgagcgtctcgatatgttacgggactcaatcagacatccgagtaaaaagttattgtcgtttgaatntgctcagagcttcaacattcaacttcgagcgtctcgatatattacgggactatatcagacattcgagtaaaaatatattgtcgtttgaatttgctcagagcttcaacattctatttcgagcgtgtcgatatattactggact

SEQ ID NO: 15077 - DNA, 368 bp, Glycine max
  unsure (1)..(368): unsure at all n locations
cgacaataacattttactcggatgtctgattgagtcccgtatatatcgacacgctcgaattgaatgtngaagctctgagccaattcaaacgacaataaatttttactaggatgtctgatataatcccataatataacgagaccctcgaaattgaatggtgaaactcttgaccaattcaaacgaaaataacttttactcggatgtctgattgagtcacgtaatatatcgacatgctcgaaattgaatgtgaactctgaccaattcaacgacaatacttttactcgatgctgatgagtccgtacatatcgagacgctgaattgatgtgagctctaccaatcaacgacataactttctcgatgctgatgat

SEQ ID NO: 15078 - DNA, 345 bp, Glycine max
agcttgcttttacggagttttccgactatcctctcgtgtggtggatcaagctacaaaaggagagagcatgaaatgaccagccaatggttgatacatggacggagatgaaaaagatcatgacgaagcggtatgttccggctagttactcaagggacttgaaattcaagctccaaaaactaacccaaggcaacaagggggttggggagtatttcaaggaaatggatgtgctcatgattcaagcaaatattgaagaagatgaggaggtaactatggctcgatttcttaatggttcgactaatgatatccgtgatattgttgagctgcaggagtttgttgaaatggatg

SEQ ID NO: 15079 - DNA, 458 bp, Glycine max
  unsure (1)..(458): unsure at all n locations
tgagacaacttccttgagaagctagatcttagctacacacttccctctcataactatgctcacctccttgagaagcttccttaagaagattcctaaagaagctagagcttagctacacacacatctctaatagctaagctcacctccttgagatgagaagctagagcttagctacacaccccctataatagctaagctcacccccataacaaaatacatgaaaatacaaaaaaattccctactacaaagactactcaaaatacctcanaatacaaggcaaaaaccctataatactagaatgaccaaaatacaaggcccaaacgaaggagaaacctattctaatatttacaaaaataagcgggctcatacttagcccatgggctcaaaatctaacctaagtatcatgagaaccctagggccttcccttggatctctggcccaatctgcttggagtcttc

SEQ ID NO: 15080 - DNA, 431 bp, Glycine max
  unsure (1)..(431): unsure at all n locations
attgtaaaaatagaaagcttttttgaaacacgtaattaatatattttttgtattaccaatttatgtatattcgatctcttggtaatttcctgtggttttaatcttcctttgggtattgtttgtaagtctctaacgtgctgtttaacttgaatgcatagatctaaacatccctgacgtactttgagaaaacaaatagaatnntagttaaaaattacatanttcgttttagttaaaattattttttatgtatgcgttgaaatgacttgttatanctcattttgttntaaaaaaatatttattttgaacaaaataactaanaatatttaatataanattaaatttaaataatnnttgtcacatgaaaagagatgttttgataaattatttatgccattaatantttagaatatataaatattataattttatat

SEQ ID NO: 15081 - DNA, 269 bp, Glycine max
  unsure (1)..(269): unsure at all n locations
gtctccgttggccttctccagtatcttcttctgcacactgtacccgaatntgccgtcgctgtgctccctccagagggagtcgatggccctgagggcgctctcggagatgaacttcacctccgagaagaagacgtagccgcgcttctgtgcggcttcgccagcaagcacgatgaggagacgacgcgtctcctcatcggccagctgaaagttattggtggagagatggtggcggaggaggtccaaggacagtgtggtttgggaggtggtgg

SEQ ID NO: 15082 - DNA, 274 bp, Glycine max
atggatccaaacccagtccctctcattaagaactagctcctttcttcctctattgcctttagttgaatacacctttgtttggttctctatttggatcttaaccctctcatgcaacttctttacaaactctgacctacattccccttctttatgtataaaagaagtgtcaagtgggaagggaatgacgtctaatggtgttacgggattgaacccatacacaacctcaaaatgagatggcttggtggttctatgaacccttctattgtaagcaaat

SEQ ID NO: 15083 - DNA, 349 bp, Glycine max
  unsure (1)..(349): unsure at all n locations
agcttattgtctagaatgggcatagatgaacccaactagattaattgcccttctaattgtcttccttatcaagggaagcttaccaatgtcttcaagcctcaaatcaatacaatgggatgcacaaggagtctaataaatatgtttccttttgtcttctaacaacttacccgctaaaacatagttgctcccattatcagttacaacttaaacaacgttctcttctccaacttcctccacaatagcatcaagcaactcagaaagcttttcacctgtcttcacaaaatcagagccatcaatagacttcanaaacattgtaccagcttgagagttaagcaaaaaattaatgatg

SEQ ID NO: 15084 - DNA, 309 bp, Glycine max
agcttctctatatattatgcacctgaatcagacttccgtatgaaaagttatgaccatttgaatttctcgagagcttccgtggttcaattccaagcttctcgatatattatgcgcctgaattggacttccgtgtgacaagttatgacaattttaatttctcgagagcattcgttgttcaatttcgagcgtctcgatatattatgcgcctgaataggacttccgtgtgatcagttatgaccatttgaatttctcgacagctttcgttgttcaatttcgagcgtctcggtatattatgcgccagaatcggac

SEQ ID NO: 15085 - DNA, 206 bp, Glycine max
  unsure (1)..(206): unsure at all n locations
atcaatggtcttattctaaagctaactaattccgccacacnncttgatatatagngcgcctgaagcggactttcggcnganaagacatgaccatttgaatttctccagagctttcgttggtcaatttcgagcatctctttatattatgcacctgaatcggacctgcgtgtgacaagtcatgaccatttgaatttctcaagagcatt

SEQ ID NO: 15086 - DNA, 386 bp, Glycine max
  unsure (1)..(386): unsure at all n locations
agcgtccttaagttgattcctaaagaagctagaagctagctacacatacctctctaatagctaagctcacctccttgagatgagaagctagagcttagctacacancccctataatagctaagctcacccncatgacanaaaacatgaaaataaaaaagaagtccttattacaaagacagactcaaatgccccgagatacaaggctaacaccctatactactagaatggccaaaatacaaggcctagacgaagganaaacctattctaatatttacaaagataagcgggctcatacttagcccatgggctcgaaatctaccctaaagctcatgagaaccctanggcctntccttggatctctagcccaatctacttggagtcttct

SEQ ID NO: 15087 - DNA, 461 bp, Glycine max
  unsure (1)..(461): unsure at all n locations
ntactatgcagagaatatccaaggaatataccttcatctgacttatcatcaaatattcctaagttatcttttccattattcaatacaaaacatttacaaccaaagatatgaaggtgtgagatgtttggttttctgccattgaacaattcatatggagttttctttaaaatgggtcttattaaagccctatttaaaatgtagcatgcagtgttaacgacttcagcccaaaagtattttggaagaggagtatcatttaataaagttctagcaatctcttccaaagatctatttctcctttcaacaacaccattttgttgaggggttcttggtgcaaaaaagttatgctcaatcccatgcttatcacaaaatatttcaaattctttattttcaaactcacccccatgatcactcctaatagatataatctttagatttttcttatattgaatgatttttgcaag

SEQ ID NO: 15088 - DNA, 419 bp, Glycine max
  unsure (1)..(419): unsure at all n locations
gcttgtaggcctaggatcttcttcatcaatgtattcctttgcttcttggaagatgaatgtctgctgaatggagaaaggaagagagagaggagacgccacttcaaggagaagatgagtctacaagaagctcaccaccatacgaggccatggataatagcttggaggaagaaagagatgaatgaggggagagggagagaagagcacgaaattttgtgctccaaatgagctctgaaatctgaagtttaatattcaaatgatcaaagttganaaaaatgcacacacatgacctctatttatagcctaagtgtcacacaaaattggagggaaattcaaatttcacttgtatttgaaattgaatttgtggagccaaactctggagccaaaatttcactaattatgatcagtgaatgttagttatg

SEQ ID NO: 15089 - DNA, 295 bp, Glycine max
  unsure (1)..(295): unsure at all n locations
ttcttgtatataagcatgattgggagcttactatatttaacagctagcagacctgacatcacctatgcagtaggtgtttgtgcaagatatcaagccaatcctaagataagtcacttgaatcaagtaaagagaattctgaaatatgtaaatggcaccagtgactatgggattatgtactgtcattgttcagattcattngctggtgggtattgtgatgctgattgngctggaagtgcaaatgacagaaaaagcacttctggtggatgtttctatttgggaaccaatcttatttcat

SEQ ID NO: 15090 - DNA, 442 bp, Glycine max
  unsure (1)..(442): unsure at all n locations
tagtagggaatctatccttcctaagatggagtttaacccattcaccctcattaagaactatctcttttcttccttaattgcctttagttgaatacacctttgtttgtttctttatttggttcttaaccctctcatgcaacttctttacaaactctgacctagattccccttctttatgtataaaagaagtttctagtgggaggggaatgaggtctaacggtgttaggggattgaacccatagacaaccttaaaaggggactgcttggtggttctatgaaccccctgttataggcaaattctacatgaggaagctactcatcgcaagacttatggttgcctttcagaanagcccttanaagggtggataaagacctattcactacctctgtttgcccatcagtttgtggatgacaagtggtagagaaaacaagtttagttcct

SEQ ID NO: 15091 - DNA, 353 bp, Glycine max
  unsure (1)..(353): unsure at all n locations
agtttgatttttatgagtnagctngggaaaaggacaagctaacttggagaaaccttctatgaatctctagtaatatcccgctaaacccagaaaaattctgatctcaaacacaaacttaggactctaccacttaagaacaacttttatcatacagggatctacaactatacctccttaggatatcacatgtcctaagaaactaactttctctaaccaatactcgcacttggacaacttactgtaaagatgctggtccctaagggtttgcaagacaatcctctagtgctcttcatgctcctctctagtgctggagtataccaaaatatcatctatgaatactaccacgagctatc

SEQ ID NO: 15092 - DNA, 433 bp, Glycine max
  unsure (1)..(433): unsure at all n locations
gattcctaaagaagctagagcttagctacacacactctctctaatagctattctcgcctccttgatgtgagaagctagaacttagcttcacacacctttctaatagctaagcacacctcctagagatgagaagctagagcttagctacacaccccctataatagctaagctcacccncatgacaaaatacatganaatacaaaaaaagttcctactacaaagactactcaaaatgcctcgaaatacaaggctaaaaccctatactactagaatggccaaaatacaaggcccaaatgaagggaaaacatattctaatatttacaaagataagtgggctcatacttagcccatggactcaaaatctaccctaaggctcatgagaaccctagggccttcccttggatctctggctcaatctacttggagtctttta

SEQ ID NO: 15093 - DNA, 437 bp, Glycine max
  unsure (1)..(437): unsure at all n locations
accaacgaccataactatttactcggatgtctgatagacgctcgnaatatttctagacgctcgaaatcgaatgttgaagctctgagccaatacaaacgatactgactttatactcggatgtctgattgagtcccgtaacatatcgagacgctcgacattgaatgttgaacttctgagctaattcaaacgacaataacgattttctcggatgtctgactgagtcccgtaacatattgagacgctcgaaatagaatgttgaacctctgagctaattcaaacgacattaactctttactcagatgtctgattgagtcccgtaacttatcgagacgctcgacattgaacgttgaagctccgagcgcattcaaacgaccataactttatactcggatgtctgattgaggctcgtgatatatcgagacgctcgatattgaatg

SEQ ID NO: 15094 - DNA, 173 bp, Glycine max
  unsure (1)..(173): unsure at all n locations
gcactcattgcanatgcgtcatcctcagctgacatgacgataagccactatggattgcttcttagaactccacgatattggtgttgcaccatacgtgaatatgcaacctatagtactcgctatgtaattttggactcatccccaatccgcatcagtatatcccactaattctt

SEQ ID NO: 15095 - DNA, 338 bp, Glycine max
  unsure (1)..(338): unsure at all n locations
agctntgttttcctttgttccgganacctttcttttctcatgtgcacccaaacccaatctccgggttcgaagacaaccttctttctccctttgttggcttgtttagcatagcttttatttttcctctcaatttgatctttgactctcttatgaagcttcttcacatagtccgcctttgcttgaccttctttatgcttaaaaacagaaacattatgcaaaagatcaagaggagttagtggattaaaaccataaacaacttcaaaaggagaacaattagtggtgccatgaacagctctattgtaagcaaattcaacatgggggtaaacaagcttccaagt

SEQ ID NO: 15096 - DNA, 423 bp, Glycine max
  unsure (1)..(423): unsure at all n locations
gtgagaagnagtctattgctnttctctcatatccattcatggtttgtgatattataatgagagcccaacatgataatcctgttgttgtgggtgatgcccgaaacacttgaataccctntacgatagctccacacttgcagtacatgtcaataattatggtgagaacaacgacattcaactcaaaattcccctttttacataatcatgaacccactccccatgtagaagtgcacctaagtgagcataaacacttaacaaactcatcactgtaaattcactaggctgaacccttcgtctctgcatcttgcggaaaagctccaatgcctccataagccttttattcctaacatatccactaatcatagaatnctaagtaactctaattcttgtaggcatgttatcacacaaccctctagatttatc

SEQ ID NO: 15097 - DNA, 335 bp, Glycine max
  unsure (1)..(335): unsure at all n locations
cgaacaacaataacttttcactcggaagnctgattgagtcctgtaatatttcgtgacgctctagtgntaaaaccgaagctcgtagcatattcgaacgacaataacatttcactcggaagtcctattgagtcccgtaatatatcgagacgctcgaattatagaaccgaagctcgtagcaaattcgaacgacaataacatttcactcggaagtcctattgagtcccgtaatatatcgtgacgctcgaattttataaccgaagctcgtagcaaattcgacgacaataacatttcactcggaagtcctattgagtcccgtaatatatcgagacgctcga

SEQ ID NO: 15098 - DNA, 326 bp, Glycine max
  unsure (1)..(326): unsure at all n locations
tttcttgttgganaactngatgccttggtcaacctagtgacccagcttgccatgaatcananatctacacctgttgcaagagtctgtggtctatgttcttctacagatcaccatacagatctctgtccttctttgcagcaatttggagtcaatgagcaacctgaagcttatgctgcaaacatttataatagacctcctcagcagcaaaaccaacaacactagaataactatgatcttttcagcaacagatacaatccaggttggagaaatcatccanatctgagatggacaagtcctcgacaacaacaacagtctgtcccttcttt

SEQ ID NO: 15099 - DNA, 425 bp, Glycine max
  unsure (1)..(425): unsure at all n locations
agctntttaatatttaaattcaaatttctaaaagctgtgacaaatagtttaaacttctggtaatcgattacgtaccttgtgtaatcgattacaggcttttaaattcaaattcaaaatttgcaaatttgtttagaaatcaatttaaccactggtaatcgattaccagagacgaaatatcatatttttgaaaatatgattgttcttaaaaaacttttgtaaaatatttcctttagtcctgtgcagcatcaattaagggaatttttctaagatcctaactaagtacatcattcttcttgcatttctaaattcttgacttgaatcgntgtcatctttggcatcatcacaacttcatatcatatatatttctacacataatttcattaaaaaaataagtgtatatttttaaaataaataacataaactga

SEQ ID NO: 15100 - DNA, 448 bp, Glycine max
  unsure (1)..(448): unsure at all n locations
ttcttctaatgtccatgatntatcttgttctatacattttttagttttaacacacaaactcgtgatttattcaaacaaaaaggatgaaattgggagcacgcacgcaagaaacttacttgttggtggcatagttgacaaggttggaaaagagaatgccaagggtgatattcaactggaaaagtatattcaatgctgcacgtattcttgaaagtgcgatctttgaaagaaaaactggcacaacctgttgtcataaaaaaaaattaaaccaacaaagataagtgagttcgaagaagcacttgctattacacaacattgaacactggtttcataaataaaataaacacacacatgcatatggcagaatgtctatataacgaaaatagaatgacanaccctcattacaataaattaatatcttcaattgaacaacattttgacctatttattt

SEQ ID NO: 15101 - DNA, 450 bp, Glycine max
  unsure (1)..(450): unsure at all n locations
agctncatnattatgcttcctccagaagcttcctcgtggctgctntgagaagctttctcaagaagcttctttgagaagctagatccttatctatccacacccctctattaactaaattaacttccttaaaaataattacggatgaaaataacgcaacaaatattcaaacatcaaacataattactaatagtatatagatatatatatatcagggtgttacaactctcccacccttttagaaatttcgtcctcgaaatttaccttactcaaacaaggatgggtgagcttctcacatctgactttctaattcccatgtggcatcttctcctgatgcacctccccagatcaccttgaccaacagaatctctntccctcttaagtgtgttgtgtgcctatcctcgatcctcaaatgcactgtttcatatgtcacaatctccttcacttgtacat

SEQ ID NO: 15102 - DNA, 233 bp, Glycine max
tgaaacctgttgaaatgagaactttggagaaatttttaaaattgtgaccaaatttcagaacatggtttctttagacatgaaggctttcttttcaaagaaaacaaattgtgtgtgcctaaatggtctactagaaatttgcttggttgtgaagcacatgaaggaggtttaatggggccatttggggtccaaaagactctagaaacattacaagaaccattttattggcctcatat

SEQ ID NO: 15103 - DNA, 359 bp, Glycine max
gtttgatccactgacattattacaacaacaatagtcctacatactacatgcccttagagtttagaagatttgtcaactggatccaaaaccatagcagaaaagaatgtaaataacatgtgaataaaaacctgaccaaccaaattgcaaatatgaatttgctggggaagaaaggggtagtcagtataagtgtaaaaccaagaaccggatcagaaatgtagaatgtctccctgtgatacttgttgagaggagcattgagagcaaatctctttggcaaatctggattagccaagaacaaacgaccgtaagcaacagatcagccctgtcttcagctactgcattgatcccatcttgcgatcata

SEQ ID NO: 15104 - DNA, 376 bp, Glycine max
  unsure (1)..(376): unsure at all n locations
agctagtgttttcttaccctgatgaggatgtcccatatgtgcttataactggactgattcatttgcttccaaagtttcatggccttgcaagtgaagacccgcacaaacatttgaaagaatttcacattgtctgctccaccatgaaacccccagatgtccaagaggatcacatatttctgaaggctnttcctcactcattacagggagtggcaaaggactggctgtattaccttgctccaaggtccatcacgagctgggatgaccttaagagagtattcttagaaaaaattttccctgcttccaggaccacagccatcaggaaggatatctcangtattagacaactcagtggagagagcctgtatgagtactggga

SEQ ID NO: 15105 - DNA, 380 bp, Glycine max
  unsure (1)..(380): unsure at all n locations
ttctgccttcttctatcctcagattgggaatgcctctaacagcacctttgtcaatgattttcttcatgcctcttaagtgcagatgtccaaatctntgatgccatattctgacttcatcttctctggagaatagacatgtggaggagtaactggtttcttgatgtgtccataggtaacagttgtcctttgatctactgcccttcatcagaacttcactcttctcatttgtcaccaagcattctgactttgtgaagtttacattgaatccttcatcacacagctgactgatgctgatcaagtgtgcagtcagtcccttcaccagcagtactttgtccagactaagaagtccatcatggactaactctcccattcagagatct

SEQ ID NO: 15106 - DNA, 400 bp, Glycine max
  unsure (1)..(400): unsure at all n locations
agccttcacatttcaatttgagcgtctcgtaatattacgggactcaatcagacatccgagtaaaaatttattgtcgtttggattggctcagagattcaacattcaatttcgagcgtctcaatatattacgggactcattcagacatccgagtaaaaagttattgtcgtttgaattagcttagagcttcaacaatcaatttcgagcgtctcgttatatcacgggactcaatcagacatccgagtaaaaagttattgtcgtttgaattggctcagagcttcaacattcaatttcgagcgtctcgatatatgacaggactcaatcanacatccgagaaaaaagttaatgtcgtttgaatttgctcaaaggttcaacattcaatttcgagcgtctcgttatatt

SEQ ID NO: 15107 - DNA, 390 bp, Glycine max
catggaaggacttggcaactgccttcattcggcagtaccagtacaatacagacatggctcccgatcggaaccagcttcagggtatgactaaacgagagcatgagtccattaaggaatatgcccagagatggagagtgaaattctgataccaggggacagatgtcgtacaggatgtcacgacatcacgcttcagaacatgcagattgtatgtgtccgtatgaacagattaaacaagtaaataacacaagagaattgtaacccagttcggtgcacctcacctacatctgggggctaccaagccagggaggaaatccactctcaatagtgttagttcaaggtctaacaacccctgtttacaaccttctcacctaaccactacccgtgcgatct

SEQ ID NO: 15108 - DNA, 391 bp, Glycine max
  unsure (1)..(391): unsure at all n locations
ttacgagcgtctcgaaatcctacggaacacttattggacatccgagtganaagttattgtcgttgtaatttgctcagaacttctgttttanaatacgagcgtttcgatatattacgggactcaatcggacatctgagttaaaagttattgtcgttggacttttcttagagcttccgttntcaacttcgagcgtctcgatatcctacgggactcaatcggacatccgagtaaaaagttattgtcgtttgaatntgctcagagcttctgtnttcaattacgagcgttttgatatcctacgggacacaatcggacattcgagtcaaaagttattgtcgtttgacttttcttagagcttncgtttacaatttcgagcttctcgatatattacagg

SEQ ID NO: 15109 - DNA, 387 bp, Glycine max
  unsure (1)..(387): unsure at all n locations
actcttgctcgagaatggagaattgcactaagcaatcactacgcatagctctcttactcgaaggtggaggacacatgaacgagaacacaattcatggnngctccgaaaaggggttgagaatggagaattacactaagcaatcactacgcatagctccaaacttgaaggtggaggacacatgaacgataacgcaattcatggtgctccgacaagattgagaatggagaattgcactacgcaatcactacgcatatctccaaacgcgaaggtggaggacacatgaatgaaaacgcaattcatggggctccgaaaagattgagaatggagaattgcactaancaatcactacgcatagctccaaactcgaaggtggaggacacatgaatg

SEQ ID NO: 15110 - DNA, 218 bp, Glycine max
  unsure (1)..(218): unsure at all n locations
tactcaagggacttgaaattcaagctccaaaaactaacccaaggcaacaagggggttgaggagtatttcaaggaaatggatgtgctcatgattcaagcaaatattgaagaagatgaggaggtaactatggctcgatttcttaatggtttgactaatgatatccgtgatattgttgagctgcaggagtttgttgaaatggatgatntgcttcacaaagc

SEQ ID NO: 15111 - DNA, 353 bp, Glycine max
  unsure (1)..(353): unsure at all n locations
cattcaatttcgagggtctcgatatatgacgggactcttctgacatccgagtaanaagttattggcgtttgaatttgctcagagcttccgtattcaatttcaagcgtctcgatatattacaggactcaatcagacatccgagtaaaaagttattgtcgtttgaatttgctcagagcatcaagattctatttcgagcttgtcgatatattatgggattcaatcggacatccgagaaaaaagttattgtcatttgtatttgctcagagcttcaacattcaatttcgagggtctcgacatattacgtgactcaatcagacatccgagtaaaatggtattgtcgttttaatttgctc

SEQ ID NO: 15112 - DNA, 233 bp, Glycine max
atacgatattgctgacacaataatctcttctatatagttactgagaatcattgtgtctgcaacacaaatggaatccaggtcatcacaatcaagatcagtggctgcaagcacttccatgatatggctcttgttatcctgaactgtgatcatcttcatatcctcttccaattgagacttccagctgacaagatgtgattcatcttctgggggcctgatgtctatgttgtatggga

SEQ ID NO: 15113 - DNA, 313 bp, Glycine max
  unsure (1)..(313): unsure at all n locations
aaaatggtgacaaactccacatactacacatgtaaaacattaacaagccatcctgattcctaaacacatgatatgcatcttcattttcaaagccacggactgaggtccatcatctacaccaagcttctcaaggtcctcaaaaaaagcatcgggattnttcttccacaactcttccaccttatttatttgctgttcacttatntggcgagcccttaactgcttcttaaggtataagacttgtatattctctatgtgataaccctaaaggcactttcttgaagcatcatatgatatgcccaaatcatcacattct

SEQ ID NO: 15114 - DNA, 345 bp, Glycine max
  unsure (1)..(345): unsure at all n locations
gccatttgaatttttcaagaccttccgctgctcaatttcgagcgtctcgatatattatactcctgaatcggacctccgagtgaaaagttaagaccatttgaatntctcgagagcttccgttgttcaattttgagcgtctcgatatattatgcgcctgagtcggacctccgagtggcaagttatgaacatttgaatttctcgagagcttccgttgctcaatttcgaccgtctcgatatattatactcctgaatcggacctccgagtgaaaaagtatgaccatttgaatttctcgagagcttccgttgttcaatttcgagcgtctctatatgtgatgcgcctgaatc

SEQ ID NO: 15115 - DNA, 353 bp, Glycine max
  unsure (1)..(353): unsure at all n locations
acgacaataactgtttacatggatgtctgtttgagtcctgtcatatatcgagacgctcgaaattgaatgttgaatctctgagccaatccaaacgaacaataacttttactcngatgtctgattgagtcccgtaatatatcgagacgctcganattgaatgttgaagctctgagccaattcanacgacaataactntntactcggatgtctgattgaggcccgtaatatatcgagacgctcgaaattgaatgttgaagctctgagccaattcaaacgacaataactntntactcggatgtctgattgagtcccgtcatatatcgagacgctcgaaattgaatgttgaatctctg

SEQ ID NO: 15116 - DNA, 267 bp, Glycine max
tctaccccattttcgatagtacttgtgtaagcccaatccaggtggtaccaaagaaagggggcatgacaatcattcagaatgaaaagaatgacctaatcccaacaaggactttcactgactggagaatatgcatcgattaccacaagctcaacgaagccacgaggaaagaccactttctttttcctttcatggaccaaatgttggataggcttgcgggacgggcttattactacttcttgtatggatactttggatataatcaaatta

SEQ ID NO: 15117 - DNA, 329 bp, Glycine max
  unsure (1)..(329): unsure at all n locations
gatctttcactttcaggtgatatatttaatgatgtggtgggcagcccatactatgtagccccggatgttctgcganagcgttatggtcctgaggcagatgtttggagtgctggtgttatcctttacattcttttgagtggagtacctccattntgagctggtgagatcttttgtatttatttggacagtgtaattatgacctctattcatataaatgtatgcctttcttttttctgattattaattctcccttcgtctttgtgtggttcatatggttgtgtagaanacgaacaacggatatttgaacaagttctgcgtggtgatcttga

SEQ ID NO: 15118 - DNA, 314 bp, Glycine max
aagctacaaaaggagagagcatgaaatgaagagccaatggttgatacatggacggagatgaaaaagatcatgaggaagcggtatgttccggctagttactcaagggacttgaaattcaagctccaaaaactaacccaaggcaacaagggggttggggagtatttcaaggaaatggatgtgctcatgattcaagcaaatattgaagaagatgaggaggtaactatggctcgatttcttaatggtttgactaatgatatccgtgatattgttgagctgcaggagtttgttgaaatggatgatttgcttcacaaagc

SEQ ID NO: 15119 - DNA, 318 bp, Glycine max
  unsure (1)..(318): unsure at all n locations
catcagaccacttccgggtgctggagctacttcattttttcttgatggggcctatgcaagttgaaagccttgtaggatagacgtatgcctatgttgttgtggatgatttctccagatntacctgngtcaactntatcagagagaaatcagacacctttgaagtattcaaggagttgagtctaagactccaaagagaaaaagactgtgtcatcaagagaatcacgagtgaccatggcagagagtgtgaagacagcaagtttactgaatactgcacatctgaaggcatcactcatgagttctctgcagccattacaccac

SEQ ID NO: 15120 - DNA, 325 bp, Glycine max
  unsure (1)..(325): unsure at all n locations
atcctatctccgacagccaatgggtgagtcctgtcccggtagtcccgaagaagaccggccctacagtgataaaaaatgagaaggaggagctaattcctactcgggtgcagaacagttggagagtctgcattgactatatgaggctgaaccaggttaccaaaaaggaccattntcccctgccattcattgactagatgctngaacgactggcangtaaatcccactactgtttccttgatggttnttctggttatatgcaaattactattgctcctaaggatcanganaggaccacattcacctgccccttcngcacttttgccta

SEQ ID NO: 15121 - DNA, 341 bp, Glycine max
  unsure (1)..(341): unsure at all n locations
agcttatctttttgaagtctgtaagatggtatgtcttattgactntgttagccttaagaacttgttcatttcttgttgttaccaaaattctgctacctgatccaaaatggtcaagagctattttgttctaagtgatgtaaatcattcacgtcatcaagaacaataagaaccttcatatggccaattctcctaacaatatctttgggtaactgcatccacgtcatatcctagtagtgtagaaaatatttttttcttcaaagaaattattccatgtttctttgattcttctctttcatgggctaaaaaataacaaccatcatattcagaccgtaacttttcta

SEQ ID NO: 15122 - DNA, 392 bp, Glycine max
  unsure (1)..(392): unsure at all n locations
agcttgtattactaccataaggaaagaaagtaatgggtgtctacaaacaatatggatgaggcaggtaacgttgtcagaaacaagacaagattggttgccaagggttactcacaacaaaaaggtgtagactatacaaaaacctttgctcttgttgcttgtctagaggcaatatacattntactctcatttgcatgtcatacaaaaatgagactatatcaaatggacgtaaaaaatgcattcctcaatggagtaatataagaagaagtctatgtagaacaacccactgngtttgaaagtaacactgttccacacatgtgttcaaactctataaaacattgtgtggacttaagaangctccttgagcttggttgaacatcttagttcatttcatg

SEQ ID NO: 15123 - DNA, 399 bp, Glycine max
  unsure (1)..(399): unsure at all n locations
agcttgcataatggattcagcgatgtctttctatggggggcaggataaccctcatcaattctgtcccaacagccctccctatctaccttctctcttttttcagaattcctaaaaaagtgatacataaggtagtttctattcagaggaactttntgtgggggggtggttctgaaacagctaaaataccatgggtgatctgggatattgtttgtcttcccaagactaaaggagggttggggatcaaagaattgtctaagtttaatgaggccttgattggtaaatggggatgtgatctggctaataaccagaatcagctttgggctagagttttgatgtccaagtatggtgggtggaatgctttatgttttggaagaaacagtgcagaatgctccccttggt

SEQ ID NO: 15124 - DNA, 354 bp, Glycine max
agcttgcatattggaatcagcgatgtctttctatggggggcaggataaccctcatcaattctgtcccaacagccctccctatctaccttctctcttttttcagaattcctaaaaaagtgatacataaggtagtttctattcagaggaactttttgtgggggggtggttctgaaacagctaagataccatgggtgatctgggatattgtttgtcttcccaagactaaaggagggttggggatcaaagatttgtctaaatttaatgacgccttgattggtaaatggggaatgggatctgctaataaccagaatcagccttgggctagagttttgatgtccaagtatggtgggtgga

SEQ ID NO: 15125 - DNA, 273 bp, Glycine max
  unsure (1)..(273): unsure at all n locations
aaattaactcgaaagagaggttttcttagatacaggggaaaaagtctctctataatcgattccttctctttgagtgaatcctttagcaacaagtcttgtcttatgtctctcaatgttgccttctaagtctttctttgttntgaagacccatctacatctgatggcttttacaccaacaaccaactcaacgagatcccaaacttggttagatgccatagaatccatctcatccctcatagcattataccacannattgattccttagaactcat

SEQ ID NO: 15126 - DNA, 362 bp, Glycine max
agcttctatattcaatttcgagcttttcgatatattacgggactcaatcggacatccgagtaaaaagttattgtagtttgaatatgctcagggcttcggtattccatttcgagcgtctcgatatattacgggactcaatcggacatcagagtaaaaagttattgttggttgaattttctcagagcttcagtattccatttcgagcatctcgatatattacgggactcaatcagacatccgagtaaaaagttattgtagtttcaattggctcagggcttcagtattccatttcgagcgtatcgatgtattacgggactcaatcagacatgcgagttaaaagttatcgtcgtctgaatttgctc

SEQ ID NO: 15127 - DNA, 350 bp, Glycine max
  unsure (1)..(350): unsure at all n locations
ttctnttcttagtcgtctgtaaggatgattgngtgttagaaagcggcgatgcctactgtagactgtttttctcccatgtttcagttgtatgtaacttgtattttcttcacagatggggcatgcatgatgacccttaacactgtaaccgctgagatttccatatgctggaaagtcattaatggtacaaaaaagcattgcacgcatttcaaacgtctctttgcgaaacgcatcatacactacaaccccctcgtcccacaactttctcagatcttcgaccaacggacttagataaacgtcaatgtcatttcctggctgtcttgggcccgatatcatcatacacaacattctgt

SEQ ID NO: 15128 - DNA, 409 bp, Glycine max
agcttttatctatcctttttagctactaattaacttttcagtttgcaattagattttcaactaattttatcgaatataacctatatctcattttaaaaaatataaaacaataaaagagcatttgtttcataaaatctttttacatttattaccaaaaatataacaagggaatatcatttccttgtatttaaaaaatcgtttggttacatttttatattattgagaataatttttgaaatttaaaataatttagataaaaaataaataaaaagaagtttcagacgtattagacaataaattctcacattctcatgaaaatatcactttctcaccctcctcatgggaatataaatattagagaatataataaaaaaattataacattaattctcaagaatcaataatacca

SEQ ID NO: 15129 - DNA, 394 bp, Glycine max
  unsure (1)..(394): unsure at all n locations
tttctntattatgctccatgantctactntacaaaacagataaacatacatgcgaatgttaaactgatgacagtgacactgaataaatttagaatgttaaactgctacttcacttcatgatgataatgtttatctttcttgtatttttaaacaatttatctactatgtaaatatattatcaatgtgtaatctattttaattggcacattagttttcattttattcctactttataaatcagataaacatacatgcaaaattttttacaaacaacccgtgtgtacgcacgggttgccaactagtgtacatatataaaatgagaagtgtggggttagttctgaaatataaacagaaatggatggggtattttgggaaaaattattttagaataatg

SEQ ID NO: 15130 - DNA, 267 bp, Glycine max
  unsure (1)..(267): unsure at all n locations
tctcaacaagagaccagagcctccattcagagcttnctttatctatgggacaatnggctacacagttaaatcaacaactgtcccagaattntgacagattaccttctcaatctgtccagaatcccaaaaatgtgagtgccattacattgaggtcgagaaagtagtgtcaaggacctcaaccagcaacatcttcctcatccgcaaatgaacctgcccaacttcactctactccagaanaagatgatgacaaaaatttaaagagtaagt

SEQ ID NO: 15131 - DNA, 388 bp, Glycine max
agctgacttatctcccatggctaccaacgatctgattcggatcattctcttttcttgcgcataaccggctccacaattaccatcctcttagtatatgtagacgacataattcttacagggaacagcttgacggagatacaggctataaccactctgttggaccaagagtttcgaattaaagaccttgggaacttgaagttctttctggggctggagattgctcgaacctctaaaggaattcatctatgccagcgtaagtatgtattagatatcttatctgaatcaggcatgttaggttgcaagccgcattcaacaccaatggattattcaataaaactacaaaagagctcgggtaaccctcttccgaacgagtcttcttcctcttatc

SEQ ID NO: 15132 - DNA, 329 bp, Glycine max
tggatgcaaaagtttattatgactatggttatgatgactacaaatgatacacaagtctcaagagaatcctgcggtccatatgccctgttgagggaagggacaataaatctgcacccttggattttcaaaccccaaaaagatttggcaatcactacttcataaacattcttgaagggaaagacttgttaggttctgacaatgttcttattagccatgacttacttggaaagattacagagcaggtgtgggattatgcctctaatgaaaaaatcttgtctgcttcatttgctaaatctatgattaggatgggaaacatcaatgttcttact

SEQ ID NO: 15133 - DNA, 351 bp, Glycine max
  unsure (1)..(351): unsure at all n locations
agcttctatataaggttcgttcctaatatctctacaatttcatcacctctcaatgagctagtgaagaagaatgtgacatttacctgcggtgaaaaacaagagcaagcctttgctctgctcanagaaaagcttactaaggcacctgttctaactcttcctgacttttctaaaacttttgagctaaaatgtgatgcttctggagtgtgagttggagctgttttgttgcaaggtgggcaccctattgcttattctagtgataaacttcatggtgcgacccttaactaccccacctatgataaagaagcttatgccttaataagagcactccgaacttgggaacattaccttgtt

SEQ ID NO: 15134 - DNA, 338 bp, Glycine max
  unsure (1)..(338): unsure at all n locations
agcttggatagaagggtgaccatgagagcgtttggagctgaattaatcctcactgatccagccaaaggaatgggaggaacagtatagaaggcttatgaactnttggaaaacacaccaaatgctcacatgctgcaacaattttcaaaccctgccaatactcaagttacctgaacctaaattactattgctgtttgaaatctcctaccaagacagaaaaatcagtagaactaggctngtattatgcttgtgtgatgcttcattgtacttaaagttaatactagaatatatgtctaacatagatgcttggctgtacaatggtgcatttatttattaaatga

SEQ ID NO: 15135 - DNA, 405 bp, Glycine max
  unsure (1)..(405): unsure at all n locations
agcttaattgcactattcaatggagttgacaagaacattttcagactgatcaacacttgcacagtggccaaagatgcatgggagatcctganaatcactcatgaaggacctccaagtgaagatntccagattggcaactcttggctacaaaattcgaaaatctgaagatgaaggaggaagagagtattcatgacttccacatgaacattcttgaaattgccaatgcttgcactgccttgngagagaggataacagatganaagctggtgagaaagatcctcagatccttgcctaagagatttgacatgaaagtcactgcaatagaggaggcccacgacatttgcaacatgagagtggatgaactcattggttcccttcanacctttgagctaggactctcggatg

SEQ ID NO: 15136 - DNA, 370 bp, Glycine max
  unsure (1)..(370): unsure at all n locations
agcttgagtcttttgttaatggcgacatttatagcatgaatagtggtgtgtgtaaccaacaagtcatcaactacttctgcctgagaggtaccctagaggtactggggtattgacgatgggagcttcccatatagtggcttcggatatttgaaataccagtgctcagatgaaccaatgtattgtatgaccactccgtataggaagatacttgaaccactatgatggtcgatcatggacaaacgaatggaagtattgctctaaaacatggttgacgacctccatctgtctatcgatctgnggatgataagcagtgctcatccatagcttcgtcccacataagcgaaagagttcccgccaataggcacttatg

SEQ ID NO: 15137 - DNA, 209 bp, Glycine max
tgcttgctttctctggaagctcctaatagctcccacactatttggggtgggccattctcggatggccttgattaactcacggaccacttggaccccatttctaccaactacacaacctgagaagactatattatctacacaaaaagtacactactgtatattagcatacagggagtttttcctatcgactgacataacttgtctgacat

SEQ ID NO: 15138 - DNA, 253 bp, Glycine max
  unsure (1)..(253): unsure at all n locations
tactcaagcctgttacctccttcttcactacatcaagagggaccttgttgtttcttctctgnggctgnctaatgggtttagccccatcctctaaaagtatccgatgcatacatgtgaatgggctaataccaggaatgtccgccagggtccagcctatagccttcttatgcttcttgagaactgatgacaacttctcctcttgctcatcaacaagggaggcagatataattactggaaaacttttgctctcatc

SEQ ID NO: 15139 - DNA, 376 bp, Glycine max
  unsure (1)..(376): unsure at all n locations
agcttatgtctganatatttacaatagacctcctcagcctcagcagcaaaatcaaccacaacagatcaaatatgacctctccagcaccagatacaaccctggatggaggaatcaccctaatctcagatggtccagccctcagcaacaacaacagcagcctgctccttccttccaaaatgctgctggcccaagcagaccatacattcctccaccaatccaacaacagcaacagccccagaaatagccaacagttgaggcccctccacaaccttccctcgaagaacttgtgaggcaaatgactatgcagaacatgtagtttcagcaagagaccagagcctccattgaatcaacaacagtcccagaattctgacaagct

SEQ ID NO: 15140 - DNA, 360 bp, Glycine max
  unsure (1)..(360): unsure at all n locations
agccttgttaagtgatcatgggggtgaattcaaaatgaggaattcgaaactttntgtgaagaaaatggtattaatcacaatttttctgcttcaagaactccttaacaaaatggagttgttttgagaggaaagatagatttctttaggaattaacaagaactatgctaaatgaaaaccacctacctaaatacttatgggtggatttcatttgtacaacttgttatgttctcaatacaatgattataagaccgattntganaatgacaccttatgaggtctacaaaggtagaagcctaaatacatcacatcaaanagtctttgggtgtaaatgctttgtgttaaacaatggtaaataatcac

SEQ ID NO: 15141 - DNA, 227 bp, Glycine max
tgctgattggttcaacattccaggtgtctttgacctcttcactttctaagatgttccttcccctcaaggcacccctgccaaactaggcacatctgtcataggattcaccctccatgactttgcagatataatcttccacaacaatgagaattacacgcagtcatggcacatggatggatctagcttctatgttgttgggtaggacatctatttttattatttattta

SEQ ID NO: 15142 - DNA, 410 bp, Glycine max
  unsure (1)..(410): unsure at all n locations
agctgttgttcaagatctctatttatctccgaaacccagctgagcaagcatatagtctaagaacgcccaacttatcgagttgtatgcttttctgaagtctactttaaattaaaaacaattccagtgaaatctttgggcccaatccaccacctcattcatgatcatcacgccatcaaacatttgcctactaggaatgtangaaaattgaacttctgatataacagatcccaagaccttcttcattcgtgtggacaacaacttagatatgattctgtgaagactccctantagtgataagggtaaaaaaatttgacatagactatggattcttcttctttggaattaaagcaatacatgaataaaccacagatttgggaagagaagcatntaggtaaaattcttgcacacat

SEQ ID NO: 15143 - DNA, 371 bp, Glycine max
  unsure (1)..(371): unsure at all n locations
accttgctatcccatggaagctcctaatatctcccacactttttggggtgggccattcttggatggccttgattttctcaaggtccacttggaccccatttctaccaactacaaaacctaagaagactatattatctacacaaaaggtacacttctctatatttgcatagagggtgtttttcctaaggactgaaagaacttgcctgagatgtcctaagtgatcatctangctcctactgtacactaaaatatcatcaaaataaacaactacaaatctacctatgaaatccattaagacatgatgcataagcctcataaaggtgcttggtgtgttagtgagcccaaaaggcatcactagccattcatacaaa

SEQ ID NO: 15144 - DNA, 365 bp, Glycine max
  unsure (1)..(365): unsure at all n locations
ntttctctgtacacctacattcctatacacaaaatattttttctctatatccacacgcattgaacaactctttctctttataccaacatggtctatataaaacctctattccttttcaaagatttctttttcctttttcaatatacactcgttatttatacaaaaaatttctttatatacactcattgctcatatacaagaatttcttttcacacattgtttatatacaaaaaatctttgcacacatgtgttatatacaaaaactcttatcacacatttttttatatacaacaacccttttcacacattgtntatatacaaaaaatttcttttcttttctttatatacagatatgacattttgtt

SEQ ID NO: 15145 - DNA, 431 bp, Glycine max
  unsure (1)..(431): unsure at all n locations
taacacactctccactgttggtccttattttattgagaattataaaatcagaataatgactcatcatatgagtagttggacctgtaaaatttgtgatttttaagaaatttgagccaacaaaaaagagtgttcaagagaatgtgttagagacagtgttgctaccatttctctgtttaggaatggtgtttgtagttattagtgaaaatagaaatagaaaatattttccttatgtcaaacaggcttctgcattactatttttagtttttacaacattatgatagatcattatatattttttctttctctaaaacaaatgatttgtttattgtcttgnggtggtgtatataaaaactgatcaacacantttacttttctttttttgcctgttcattccaatgtacaaatgattggcttatgatgcaacaaaatct

SEQ ID NO: 15146 - DNA, 361 bp, Glycine max
  unsure (1)..(361): unsure at all n locations
aagcagnactccttgggcctgagatgctacaacaaattaccgaacaagtganattgattcgagagaaaatagaagcatcccaggataggcagaagagctattatgaccgaaggacaaagccattagattttctagaaggagaacatgtngtttttaaggtttctcctgtaactggagtcggaagagctctcaaatctaggaagctgacgcccaagtatctgggtccgtatcaaattntgaagaagggtgggcctgtagcttatcaaatcgctttacctccgagcttatcgaatttgcaccctatgtntcatgtctctcaactgaacgatacaacccggatccatcacatgtactcgcactg

SEQ ID NO: 15147 - DNA, 428 bp, Glycine max
  unsure (1)..(428): unsure at all n locations
atgcctaatcatttccaatgttatttttatctctactgagttttaaaagattggctaagattttgttaaaacataagcacttagacaatgaaggaaagctggagttgctgcacatgatgtccaacgttatgtcaaggaataagatcgggctacacaatgcacaaggcaagataaaatgtcaaatgaagaattgaagttgcaggatccacgatgtcggatacaatgtcctgacatcctgcccgaanatactggagttgttgcacaatgcataagtcaagataaaatgtcaaatgaagcattgaagctgcaggatccacgatgtcggatacgatgtcctgacatcttgcccganaatactggacacataaatctgttatatctttaacagattattgtgcagttagcaaaagattagatgatctatcttt

SEQ ID NO: 15148 - DNA, 295 bp, Glycine max
  unsure (1)..(295): unsure at all n locations
catggaagctcctaatatctcccacactttttagggtgagccattcttggatggccttgattntctcaaggtccacttggacctcatttctaccaactacaaaacctatgaaaactatattatctacacaaaaggtacacttctctatattttcatagagggtgtttttcctaatgactgaaagaactagcctgagatgtcctaagtgatcatctangctcctactgtacactaaaatatcatcaaaataaacaactacaaatctacctatgaaatcccttaagacatgatgcat

SEQ ID NO: 15149 - DNA, 362 bp, Glycine max
  unsure (1)..(362): unsure at all n locations
aactcaagcttatgggaaggcccatttgcctgagagagctgtgtacttgtttcacagaatgnggggtgagtngcagtgcaaacaaaccgtgaaatcattcaattctgttctcaatgtgattggtcaagagggtctcttcaatcgtgcattggagttttacaatcatgttgttgcatccaagagtttgaacattcaccctaatgcactcacttttaatttggtcattaaggccatgtgtaggcttggttcggttgataaagcaattgatgcttttagagagattccactcaggaattgtgctccggataattatacctattcgacattgatgcatgggttgtgcaatgaagagagaattgatg

SEQ ID NO: 15150 - DNA, 456 bp, Glycine max
  unsure (1)..(456): unsure at all n locations
tactcaagctggtcccaacgctntgttcaggctctcccaaaatctagatgtaaacctagtatctctatcagacactatgctagatggcacaccatgtaatatgacaatctcactaatatacagagaggtcaacttttccaaggaaaatatgatattaatgggaataaagtgagcagacttggtcagcctgtcaacaataacccagatagaatcaaaacctttgggggttctaggtagtcctacgacaaaatccatagaaatattgttccatttccactgggtatctccaagggttgtaacttccctgaaggtctctgatatcttagccttctgacagactaaacatgcatacacaaactcactaacctctctcttcatgttgggctaccaaaacatcatcttcagatcttgatacatcttggtagcaccaggatggatgctcaaactactcctatg

SEQ ID NO: 15151 - DNA, 377 bp, Glycine max
  unsure (1)..(377): unsure at all n locations
agcttaacattcaatttcgggactcaatcagacatcgtttgaattgctattagcttttcattcaatnntgagcatctcactatattacgggactcaatcagacatccgagtaaaaagttattgtcgtttgaattggctcataggttcaacattcaatttcgagcgtctcgatataatacgggactcaatcagacatccgagtaaaaagttattgtcgattgaatcggatcagagggtcaacattcaattttgagcgtctcgatatacgaaggaactcaatcacacatgcgagntaaaagctattggcgttcgaatatgctcagagcttcaatcttcaattacgagcgtccctttatattacgggactcaatcaatca

SEQ ID NO: 15152 - DNA, 363 bp, Glycine max
tgtctgtttcagaataaacataaaacatcctgtcactatcttttccagaacgagcaaccccaaaatcgaaaggtaatcttgggatttcagtccatttatttgacacagaatcatatatttctccagagtccagaggctcatcccaagatcccagacctccaacagctatcaacaaaaatcttttactgccctttgagcttgaatgctcacttttttgcctaaagaatttgtatgtctttcgactgggcagagacaaagcttcagtctcattaaaagcaggtctgcaatggcgtctcattgaaagcttgtggggatcctcatatacgtctgaaaccccaccaatccttgatcttggaaaacgtc

SEQ ID NO: 15153 - DNA, 457 bp, Glycine max
  unsure (1)..(457): unsure at all n locations
tactaagcttataatatttgctttgtgcacggcagacaccttctttctgtanttttgtaagcatactcgaatgcatatgtagcaattcgctctgaacaaaactttgttattacctagtaaaatatgagtatcaacagcaaacataaacccatactgcatcaagacagtatcaaggtgataccttcatgacatatatacatcaaagatcacatggaaaagaagaaaaaaaactggatagaaattccaagcgaaaagaactttacataaaatgaattagccctcttgaaatcataaaatacaggaataccaaatatgttcactttcttttgctagcacgatagggaacgttntgctaacatatcaccagaaaacaatcattatttgcaaaagctctctaataaaaaataaaaacaagttatttatctatagcaagctgaatcattcaactggtaataca

SEQ ID NO: 15154 - DNA, 227 bp, Glycine max
ggcttgcttgctttggttccaattgctggaacacagagctgccactctcctcaagaaaaggatgtagaatctgaaattctgataccaatgacagatgtcgtaccggatgtcacgacatcacgcttcagaacatgcagatgatatttgacagtttgaacagattaaacaagttaataacacaagagaattgttaacccagttcggtgcaacgtcacctacatctgggg

SEQ ID NO: 15155 - DNA, 419 bp, Glycine max
  unsure (1)..(419): unsure at all n locations
tcgaagccctctgtttaaggctgaggctccacacctttctttggatactatctgctgagtctgcttccttcaatcgactgtctgtggagcgcgcatacaagtatcgccctgttaaggtggtggaatctgaacttccgcggcagcagtgtgtggtttacttggatctgaagcgggaggagtgcaccaatntgttcccatctggccgagtatattcacaggcattccatttangtggacaaggggtgctcttatcagcacattgcaacatggaccaacagagctctttccattgctttggcctgtttctatgaatgcangataagggctcagttagctttgcccgtgactatgagtttgctgctatgtcaaggccaacagaggaatttgttagcaagtacaaaggcaattatgtattcact

SEQ ID NO: 15156 - DNA, 368 bp, Glycine max
  unsure (1)..(368): unsure at all n locations
ctggcgggacatcttgacttgctttgcaaactgactttatacactttattctgccttcntctattggcagattgggaatgcctctaacagcacctttgtcaatgattttcttcatgcctcttaagtgcagatgtccaaatctttgatgccatattctgacttcatcttctttggaggatagacatgtggaggagtagctggtttcttgaggtgtccataggtaacagttgtcctttgatctgctgcccttcattagaacttcactcttctcatttgtcaccaagcattctgactntgtgaagtttacattgaatccttcatcacacaactgactgatgctgatcacgtttgcagtcagtcccttcacc

SEQ ID NO: 15157 - DNA, 259 bp, Glycine max
atccttggcccccttagagattttgtaaagatgtctgctagttgatcattagaactaacgaattcagtaataacttccttagaaaggactttctctcggacaaaatgacaatcaattcaatatgtttaagtctctcatggaatatgggataaaagctatatataggactgtctgattatcacaacatagtttcatttgttgagtatttccaaacttcaactcttgaagtgtttaatcccatgagacacatgtgactaca

SEQ ID NO: 15158 - DNA, 360 bp, Glycine max
ttttgaagataacatcatggatcaatgtatataccagaaggtcagtgggagtaagatttgttttcttgtgttatacgtggatgacattttgcttatgactaatgataagggtttgctatatgaggtgaaacaattcttctcgaagaactttgatatgaaggatatgggagaaacatcttatgtcattggcattaagatccatagggaaagatctcgaggcattttgggtttgtcttaagagacttatatcaacaaagttctagagaggtttaacatgaaatattgttcaccaagtgtagctcctattatgaagggtgacaaacttgatttgagccaatgccttaaaaaatgattatgagt

SEQ ID NO: 15159 - DNA, 440 bp, Glycine max
  unsure (1)..(440): unsure at all n locations
ntganaatataatatcttgatttctaaaatacttattttctctccccctttgtaaacatcaaaaaggccaaagtgcgcaaaacatgaataatttaatcatacacaaagcataatttgtaaaacaaacataaaagattctgaaacatacataaagaaaaacatgaataaaaccaaattgaaatgcaaaccacttagtcatataacacaaaccataaatatcatgttcagtcatactaagcaaatattaaaagaaatactaagttttcaaatgtcataataatatagccaaatacacggctagaaaacaaaatactaataataatagtaatgtctaaactgatagtggtggtggaggtaaattaagggagtcacgaatgatggtgaaatcttcttcaacctttgtgatccttgagtncatttcgtcgaatcgcgtgtccact

SEQ ID NO: 15160 - DNA, 265 bp, Glycine max
  unsure (1)..(265): unsure at all n locations
tcttgctattgcaagtaccagaatggtggttcctcagtatattgtttgggagcatggcgctatccttgctaatgggctttgtgtggaaaacggatgtgcaactgccatggtggggtatgctctttgcttttggttaggcttttattgtaacccttcctattggtgtcattcaagcaactaccaaccaggtaccatctccactattattntgatgcagagtgggaagcaatagaggtttaacattttaacactttttttttttttg

SEQ ID NO: 15161 - DNA, 441 bp, Glycine max
  unsure (1)..(441): unsure at all n locations
tactcaagcttagccctagaggggatgaaccttttcagtgttggagaggatcaataacatttcctatangttggacctcccagaagagtatggagtcagcatcacttttaacatttctgatntaattccttttgcaggtggagctgatattgaggaggtggaactaacagatntgaggtcaaatcctcttcaggggaaggggatgatgcaatccttcctangaagggaccagtcactagagccaagagcaagaggctccaagaggattgcgctagagctgttgaagaaggccctanggttctcatgaacctcanggtagatttcggagcccatgggccaaggttgagtccaattatctntgtgcatattagactaggatgtcattatattcgatccttgtgtttaggactccataatgtangtagggtatcctagaaatat

SEQ ID NO: 15162 - DNA, 374 bp, Glycine max
tgctcaatcagccccaactcttctctatgcttttgttttattctcactgcaacactataggattctttcaacctctcaagtgcaaggataagcagcttggtatcatgcttatatgataaaggtggaaagggaataggggagaacttcctatattccaaccaatgtacagttgttgtatagatagcaacagcttcttcaggagtaacatatggaccatctatcaaataattgagtggacgttcctgaaacacgcatcaatgatgacgaagtgacttcaattattaaaatgtctatagaactaattcaaacaacatttcgttcaaaatagtgagcctgcaaaggaatcatatcaatcatagagaacactgaacaca

SEQ ID NO: 15163 - DNA, 357 bp, Glycine max
  unsure (1)..(357): unsure at all n locations
ncgctattgcatttcgagcgtctggacatataacgttattttatcatacatccgagttaaaagtgattgtcgattgaatttgctcagagtttccacattcaatttcgagcatctcgatatattacgggactgaatcagacatccgagtaanaagttattgtcgtttgaatatgctcagagcttcaacattcaatttcgagcgtctagatatattacgggactaaatcagacatccgagtaaaaagttattgtcgtttgaatttgctcagagcttcggtattctatttcgagcgtctcgatatattacgggactcaatctgacatccgagtaaaaatttattgtcgtttgaatttgct

SEQ ID NO: 15164 - DNA, 253 bp, Glycine max
caatacctttttacaggaatgtctgattgagtcctgtcatatatcgagacgctcgaaatggaatgttgaatctttgagccaatccaaaacgacaataactttttaactcggatgtctgattgtgtcccgtaatataacgagactctcaaaattgaatggtgaagctctgaactaattcaaacgaacaataacttttaactcggatgtctgattgagtcctgtcatacatcgagacgctcgaaattgaatgttg

SEQ ID NO: 15165 - DNA, 439 bp, Glycine max
actcaagcttaacattcaagtttgagcgtctcgtaatattactgtactttatcatacatccgagtaaaaatttattgtcgtttggattggctcagagattcaacattcaatttcgagcgtctccatatattacgggactcattcagacatccgagtaaaaagttattgtcgtttgaattagcttagagcttcaacaatcaatttcgagtgtctcgatatatcacgagactcaatcagacatccgagtaaaaagttattggtcgttgaattggctcagagcttccacattcaattttgagcgtctcaatatattacgggcctcaatcagacatccgagtaaaaagttattgtcgcttgaattggctcagagcttcaacattcaatttcgagcgtctcgatatgtgacgagagtcaatcagacatccgagtaaaaagtatt

SEQ ID NO: 15166 - DNA, 239 bp, Glycine max
tgttttgatccagtgacattattacaacaacaatagtcctacatactacatgcccttatagtttacaagatgtgtcaactggatccaaaaccatagcagagaagaatgtaaataacatgtgaataaaaacctgaccaaccaaattgcaaatatgaatttgctggtgaagataggggtagtcactataagtgtaaaaccaagaaccggatcagaaatgtagaatgatctcctgtgatact

SEQ ID NO: 15167 - DNA, 407 bp, Glycine max
ggtttgctgcgattttgattcttcgagaataagaagggaacattataaataattatatcctccgatttaaaattaatctttgagttatctgcttacataatttataataacaatggttcaaattgtataattgttaattggaataattataattaatgattctatctaattgactaaatcattgctccatgtttaaatcttaaatgatggtatttatatatttatcttagtttaaattaatcttacgttccattatacaaatatatatacaattcttttttgaccaaattccagagctaagtcttgtttgtcactaactcactataattgaagataacatgatgaatgaaataaaaacatactatattcttaatacattggtgctttcaatcactcataacttttga

SEQ ID NO: 15168 - DNA, 449 bp, Glycine max
  unsure (1)..(449): unsure at all n locations
tttggcatggatatagctcctatgttatggtaacacactanaattttgtgaatatttgcatgtcagtattttcatccttgtatgttctaaatgagatatataatctaagaatatgagtttagaatgtgcagaagcaaaaatatatggcttgaagaggttgacaaattattaattatgttcatatataacactatatctatcatgtttaaataggttcttgaactatatttattgtttaattaagtccctattggatctttgttggaccacaagttaaagaatcctatactagaattaatacactaataactaataatctggaaaaagttcaaaaacctgctgaataattaaactttgttaatcatatcgcattgtgtattatatttagactttactctcatttctcttctctataaatatctaataacagaggtgtacaagaacttggg

SEQ ID NO: 15169 - DNA, 377 bp, Glycine max
  unsure (1)..(377): unsure at all n locations
gctgccactctcctcaagaaaaggatgtagaatctgaaattctgataccaatgacagatgtcgtaccggatgtcacgacatcacgcttcagaacatgcagatgatatttgacagtatgaacagattaaacaagtaaataacacaggagaattgttaacccagttcggtgcaacgtcacctacatctggnggctaccaagccagggaggaaatccactanaatagtgttagttcgaagatctaacaaccactgtttacaaccttctcacctaaccactacccatgcaacctctacctaagagccactcttagatatgagaacacctctcactccctctcaatcactctcccgtggttaccaataaatcanagacacac

SEQ ID NO: 15170 - DNA, 160 bp, Glycine max
  unsure (1)..(160): unsure at all n locations
gaccatgggagncctcaagagcttccgttgttcaatttcgagcttctcgatatgtgatttgcctgaatcggacatccgtgtgaaaagttataccaattgaatttctcaagagcttccgttgttcagttttgaacgtctcgatatgtgatttgcctgaatc

SEQ ID NO: 15171 - DNA, 371 bp, Glycine max
  unsure (1)..(371): unsure at all n locations
ttcatgcaagctttgccttantttctaagagctcgacaatggcgggtgtcggaaaccgatcacgcaccgtgattgcatttaaagctctgtagtccatgcaaaagtgccatgaaccatcctgcttgcgaactaggagcacagacaagaaaggtcctttctagagcattgattcaacctgcgattcaatctcatgtttctggtaatgtggataacgataaggccgtacgttgactggcgcagctcgcggcaggaggtggatgtggtggtctgtatccaggccggtggcactgaataaaggggctgatataatgcaagaaaatgatcaatctaagatcggatccgtgggtggggagacatacccatctggggtg

SEQ ID NO: 15172 - DNA, 323 bp, Glycine max
tctttcttgaagactaactggatgcgtcggtcaacttggtaacccagctggccttgaatcacaaatctgtacctgtcgcaagggtttgtggtttgtgctcctctgctgaccaccatacagacctttgcccttccatgcagcaacctggagcaattgagcagactgaagcttatgctgcaaatatttacaatagacctcctcaacctcagcagcaaaatcaaccacagtagagcaattatgacctttccagcaacagatacaaccctggatggaggaatcaccctaacctcagatggtccagccctcagcaacaacaacagcag

SEQ ID NO: 15173 - DNA, 420 bp, Glycine max
  unsure (1)..(420): unsure at all n locations
agctttgtattgtagaaagtgtaagacacccttatgttggttagagctcggagaagacctcaccttacgacctgaagcggtacaacaaaccaccgagaaggtaaagttgatccaagaaaggatgaggactgcttagagtaggtagaaaagttatcaagataagaggaggaaacacctggaattcgaggttggtgatcatgtattcttgagagtcactccgtggactcgggttggtcgagcattgaaatctcgaaaactcacacctcattntataggtcttttcctggaattcaaaatgacatctccttttagtagaatctgaaacacccctcagccctttatgttttgacaaggggtattgactccgaatgttgtcattaaccttatttctganaatctatactaaatatcctttaattt

SEQ ID NO: 15174 - DNA, 398 bp, Glycine max
  unsure (1)..(398): unsure at all n locations
agcttggctctgtgccatcanaaccttctcattcttaagttcctcaacctttaaacagacatttcggtcaagtaagtgtttttctgaatcaaacagatcaaacttgatcttctgatcatctatgcccgtttccagtttaccctttctcatatccaccacacaatcggcggttaacatgaagggatggcccanaatcaagggaattttancgtcctcttcaatatccattacaacaaaatctacagggaaagtaaaatgttgcaccttaaccacaacatcttcaattatgccataaggccttgtaatagaccgatctacaagttgtagtgtcattctagttggcataatctccaactcttcaattctcctgcacatggagagaagcatcaaatgtatat

SEQ ID NO: 15175 - DNA, 413 bp, Glycine max
tcttcttcagcatcttttcttggctagaaacatgctctctggcaagtttcccttggagttactcaactgctcctcaatccaacagttggacctttctgataacagctttgaaggagaacttccttccagcttggacaaactgcagaacctcacagatcttgtgctcaacaacaacagttttgttggatctttaccttctgaaattggcaacattagtagcttggaaagtcttttcctatttggtaacttcttcaaaggtaatattccgttggagattggaaggctgcacagattgagctccctttacctctatgacgaccagaattctggacccataccaatggagttaccaactgccaagcttagaagaagtgacttctttgaaatcactcacatggctcattccaaaacta

SEQ ID NO: 15176 - DNA, 297 bp, Glycine max
  unsure (1)..(297): unsure at all n locations
tttcttgtatgtgtttacatttcaagtgcatatatagctntagcccaacacttgttttgatccagtgacattattacaacaacaatagtcctacatactacatgcccttagagtttagaagatttgtcaactggatccaaaaccatagcagaaaagaatgtaaataacatgtgaataaaaacctgaccaaccaaattgcanatatgaatttgctggggaagaaaagggtagtcagtataagtgtataaccaacaaccggatcagaaatgtagaatgtctccctgtgatactgttgag

SEQ ID NO: 15177 - DNA, 435 bp, Glycine max
  unsure (1)..(435): unsure at all n locations
cggacttcctgtgttctgagaacctctcctttctcaagtgtactttaacccaatcacctggttcaagcacgactgtctttctgcttttgttggcttgccttgcatagctcgcatttttcttttcaagttgagccttcacttgctcttgcaacttcttcacatactcagctttagcctgtgcatccttatgcttaaacatagcaatgttaggcatagccaacaaatcaagaggagtcaaaggattaaatccatacattatcttaaatggtgaacaattagttgtgctatggacagcccgattataagcaaactcaacatgaggcaaacaggcttcccaagatttaagattnttctttaaaacaatcctaagcagtgtgcctaaagtcctattgactacctcagtttgaccattagtntgtgggtgacaagtagtag

SEQ ID NO: 15178 - DNA, 281 bp, Glycine max
gtttgatcagcgaactcataatggtgtacctgtcgagtaagactccttcttatctgcacaaccaaattattcaagcacagtcgataatatagaagatggaactatcacaattagtattccttcaaagaatgggaaagggcgtccatcctttaacttcaacaaagtctttggaccatctgcatcccacagttggtttggttctcagtttcagctatctccaacatcactataatttagtaaatattgaacaaatttcttctcttgtgttcaacggacgtctt

SEQ ID NO: 15179 - DNA, 399 bp, Glycine max
tgcttctcgtttattatgcgcccgaatcggacatccatttgaatagtttagaccatttgaatttctcgagagcttccgttgttcaatttcgagcgtctcaacatattatgcgcccgaatcggacatccgtctaaaaagttatgccatttgaatttctcgagagcttccgttattatatttttagcatctcgatatgtgatgcactctaaaaagttatgccatttgaatttctcgaaagcttccgttgttcaatttttagcgcctagatatgtgatgcactctaaaaagttatgccatttgaatttgtcgagagcttccgtggttcaatttttagcatctggatatgtgatgcgtgtgaatcggacattcgactgagaagttatgaccatttgaatttct

SEQ ID NO: 15180 - DNA, 333 bp, Glycine max
  unsure (1)..(333): unsure at all n locations
agcttctagatgatttatgtctgcgaatccgacatgctgtgagaagttatgaccatttgaatatatcgagcgctgccgaagttcaatcacaagcagcatagatatgcgcatgtactcagattagacattagagcgaaatgccatgaccatntctaatagagctgagagctatccgatttttaatcatctagcgtctgagatgagttatgacacacgaatcgacacatctagagtgaacaagagctgaccattgcgaatttgtcgagagctacatatgtgaatctctcaacgtagagatgacttatgaatccgaatagaacatccgtgtgaaaa

SEQ ID NO: 15181 - DNA, 448 bp, Glycine max
  unsure (1)..(448): unsure at all n locations
atctctaagtcacctgcagcatgcaagctgtcctttttgacanatactccttaccaaatagaatccatcttggccctttttccacaactctcgtanatgggagagaaaatgtcatctaaagcataccaagtcctaatattatcaaatnctaaaaattgagctccttaggagaaaaacaatgtgtgtctcctagagacggcatcagctaccacatttgtttttccatttttgtatttgataacatatggaaatntctctangtactctacccattntgcatgccttttgtttaactntctttgccctctaatgtacttaagtgattgatgatcactatgaatgacaaattcctcggaaacaaggtaatgttcccaagtntggagggctcttattaaagcatanagctctttatcatagatgggtagttgagagtgttcccaagtaatgt

SEQ ID NO: 15182 - DNA, 391 bp, Glycine max
  unsure (1)..(391): unsure at all n locations
agcttcacacttgatatttggagacacatgnaacagcgcctgggcaatgacactcatggtgctccgaacaaaggtggagtatggaggatttccttgagggtccgcgcttaagcaatcatgaaacccagctccaaactcgaaagtggaggacacatgaacaaccctaagcaataacattcatgtggctccggaacaggatgagaatggaggattgccttgagggtcctctcttatgcaatcatggaacacagctcccagctcaaaaatggaggacacatgaacagccctaagcaataacattcatgtggcttcagaaaaagacgacaatggacgattgccttgacggtcctctcttaagcaatcatggaacacagcctcaaggctcaaaatg

SEQ ID NO: 15183 - DNA, 328 bp, Glycine max
  unsure (1)..(328): unsure at all n locations
agcttttgcattctggaatcattnatcctatcttcgatagcgaatgggtgagtcccgtccaggtagttccaaagaaaaccggtctcaccgtgataaagaatgagaaggatgagctgattcctactcgggtgtagaacagctggagagtatgcatcgactaaaggaggttgaactaggttacgcaaaatgacccatatccactgccattcattgaccacatgcttgaacgcctagcaggtaaatcttactactgcttccttgatggtctttcatgtcacatgcaaatcactattgctcctaaggaacacgagaagatcacattcacctg

SEQ ID NO: 15184 - DNA, 387 bp, Glycine max
  unsure (1)..(387): unsure at all n locations
agcttccttatgaagattcctaaagaagctagagcttagctacacatacctctctaatagctaagctcacctccttgagatgagaagctagagcttagctacacaccccatatagtagctaagctcacccctatgacaaaatacatgagaatacaaaaaaaatccctactacaaagactactcaaaatgcctcgaaatacaaggctaaaaccctatactactagaatggccaaaatacaaggcccaaatgaaggaaaaacctattctaatatttacaaagataagcgggctcatacttagcccatgggctcgaaatctaccctaaagctcatgagaaccctangggccttccttggatctctgacccaatctacttggagtcttcta

SEQ ID NO: 15185 - DNA, 321 bp, Glycine max
gcacgttctctccttcagaggactacacgttctcaccttcagattactacacgtgctcgccttcagaggactacacgtcctccccttcataggactaaaagtcctccctttcagaggactacacgtccacgccttcagagttctacacatcttcgcgttcagagggctgcacgccctcatcttcagaggactacacgtcctggccttcagtgggctacacgtcctctccttcagaggactgcacgccctcacctttagaggactacacgtcctagcgttcagagggttaaacgccctcacctttaaaggactaaacgtcct

SEQ ID NO: 15186 - DNA, 429 bp, Glycine max
  unsure (1)..(429): unsure at all n locations
agcttgttgtttttaagattacatctatacaaaggaatttttgatggggcagcctccaagactccattaagattccttgggtgaggtgggacatagtctgcctacctaagagtaaaggtgggttagggatcaaagatttgattaaattcaacgaggctttgcttgctaaatgggggtgggagttggcaaataatcagaatcagttgtgggccacaattctattgtgtagatatggtggttggagggatttgatttctcatangaactgcagtttagactctccttggtggaaagacctcaaggttatcttcaagcagcagcaaagcaacacaatttgtaaaaatagctctattttgcccatangtaaggacggtccatggaatacaaaccaagtacttattggcttgcaacaaaaaaacactcattgga

SEQ ID NO: 15187 - DNA, 408 bp, Glycine max
  unsure (1)..(408): unsure at all n locations
agcatgacttacgcctattaatctttgttcggttttgaatgcaagagggcatgaatattatgacatgtttgagaggttttttattacaatttaaattggctgcctcatgaggaataccttgcacctatgtagcatggaaaatacctttcaatggtatgtatatatgtgaatatatatagcatggaaatgccttgcaaagtgtgtgaatatatggcatatatataccttgcaaagtgtgaatgtatagcaaataatgaatttcaaaaatctgtatatgtaagataggtagcgtaaaaaatgcctttcaaaatatgtatatttgtgggtaggtagcataaggagcctttcaaacaaaatgtacccatggcaaanatggcacgagaatgcttcccaaatgaatatatgatg

SEQ ID NO: 15188 - DNA, 401 bp, Glycine max
  unsure (1)..(401): unsure at all n locations
agagatgantgaagggagaggaagagaagagtttgaaattttgtgctctaaaaaagctctgaaatctgaggtttattattcaaaggatcaaagtggaaaaaaggccacaccatgaccttttttatagcctaagtgtcacccaaaattggagggaaattgaaatttcaattcaaatttcactttgaatttgaaattgattttgtggaaccaaacttggagccaaaattcactaatatgattagtgaattttagtatgattcagcccactaatccaagattctccactaagtgtgcttaggtgtcatgagacatgtaaagcatgaaggacatgcacaaagtgtgactatatgatgtggcaatggngtgtagtaagcaaatggctcacctcccctctaaaattt

SEQ ID NO: 15189 - DNA, 413 bp, Glycine max
  unsure (1)..(413): unsure at all n locations
agctttaattttcaattacgagcgtctcgatatataacgggactcaatcagacatccgagtaaaaagtaattgtcgtttgaatttgctaagagctgcggtattcaatttcgagtgtctcgatatattacgggactctatcagacatccgagtaaaaatttattgtcgtttgaatttgctctgagcttcaacattcaatttcgagcatcccgatatattacgggactctatcacacatccgagtaaaaagttagtgtcatttgaatatgctctgagcgtcaacattcaatatcgagcgtcttgatatattacgggactcaatcagacatccgagtaanaagttatggtcgcttgaatttgtccagagatacaacattcaatttcgagcgtctcgatatattacgggactcaatc

SEQ ID NO: 15190 - DNA, 334 bp, Glycine max
  unsure (1)..(334): unsure at all n locations
aataacnntttttactttcggatggtcgngaaattgagtcacagtaataatgtcaaagacgcctcgaaatatgnnnataccgaagctctgagcnaaattcataacgaacaatacctatttgactcggatgtcggattgagtcacgtaatatctcgagacgctcgaaattgaataccgaagctctgagcgaattcatacgacaataactttttactcggatgtgcgattgagtcccgtaatatgacgagacactcggaattgaataccgaagctatgagcaaattcaatcgacaataacattttactcggatgtcggattgagtcacgtaatatg

SEQ ID NO: 15191 - DNA, 326 bp, Glycine max
  unsure (1)..(326): unsure at all n locations
agctatcatacgcatgtccgatacangcgcatagcgtgtggagactctaganatctaacaaacgaagctctcgagagattcacatggtcataacttttcactcgcatgtccgatacaggcgcataacatatcgagacgcttgatattgaacaactgattttctcgagaaattcaaatggtcataacttttaactcgcatgtccgattcaagcgcataacatatcgagacgctcgacattgaacaacggatgttctcgagaaattcaaatggtcataactcttcactctcatgtgcgagtcaagcgaataacttatctagacactcg

SEQ ID NO: 15192 - DNA, 404 bp, Glycine max
  unsure (1)..(404): unsure at all n locations
agcttgtaattttattntccttgctagagatcaatcaagagccctcctacataaagggaaggctctcccaaaataattggaatntcctaatcctcctttatgtccatgatcacaaaatcagcttgaaaaatgaatttaccaactatgataagcaaattctccactattcctttcagataagtaatagttntatctacaagcacaagagaaatgttaatgggttgnggttcttgtaactcgaacttcttataaacaaaataaagcatcaaatcaatgcttgcaccaagatcacataaggctctatcgantttcagctcccatagtacanggaatgaaattccatgattgtgacttagaggcatttctttaaactatataagcattctcattgagccactgggaaa

SEQ ID NO: 15193 - DNA, 414 bp, Glycine max
  unsure (1)..(414): unsure at all n locations
tggacttcctgtgttctgggaacctctcctttctcangtgtatccaaacccaancacctagttcaagcacgactttctttctgcttttgttggcttgccttgcatagctcacatttttcttttcaatttgagccttcacttgctcatgtagtttcttcacatactcagctttagcctgtgtgtccttatgcttaaacatagcaatgttaggcataggaaacaaatcaagaggagtcaaaggattaaatccatacactatctcanatggtgaacaattagttgtgctatggacaacccaattataggcaaactcagcatgaggcanacatgcttcccaagaattaagacttttctttaaaacagtcctaagcagtgtgcctaaagtcctattgactacctcagtttgaccattag

SEQ ID NO: 15194 - DNA, 339 bp, Glycine max
ctgcaaacatttatcgtagaccccctcagcagcgaaactttcaattgtcttaaaattatgacctcacaagacacagatataatccaggttggatgaatcatccaaatctgagatgggcaagtcctccacaacaacaacagtttagccctcctttccagaatgctgctggtccaagcaagccatatgttcctcctgcaatacagcatcagcaacaacagagacaacaagcaactgagacccctcctcaaccttccttagaagagatagtgaggcagatgaccatccacaatatgcaatctcagcaagagacaatagcctccattcatagtctgacaaatc

SEQ ID NO: 15195 - DNA, 395 bp, Glycine max
  unsure (1)..(395): unsure at all n locations
ctaaagttccgcttcttcactcagctgttgtgtgttaattattaacttgttctttcctcttttttatctactccggtacagatgtattcgtggagctaaattaaatcctgaagatttagattgcatggtcttaagttctatctattctgaggtgatgatgatgaacaaacaagtttactgctataacatccagtcaggcagtgagcatgaggtactacaagagatattaagcactgttggatggccataaaagcaaaggcttttatctttttttttcttttcttggtntataattattctgcaacacaatatgtacatatatgtgttgtagatgctctggaaatgaccttctttgctctgaaaggtcctcttaaactatcgatttacactgatag

SEQ ID NO: 15196 - DNA, 358 bp, Glycine max
  unsure (1)..(358): unsure at all n locations
taagcttcattggagccggtgctgtgtatggaagataaggtgttgttgtgaaagggattgttttagttcatgggaaaactgcaattggaaggattgatgatgattctgtttgtgcaactctggattggtggcctcctcagaaatgtgactatggaaaatgcagttggggtcatgcttctctgctcaacctggtatttttcctttctttttgtcttctggttcctgaatccgtcaaaaagtttttttttcttttcagaataattagatgggttttgcttcttccttttattntttaatttataaatagcattctctgcatgatgacgcttttttttgcctctttagaatgatgctcgga

SEQ ID NO: 15197 - DNA, 402 bp, Glycine max
  unsure (1)..(402): unsure at all n locations
agcttccttattnatgattcctaaagaagctagagcttagctacacatacctctctaatagctaagctcacctccttatgatgagaagctagagcttagctacacaccccctataataactaagctcacccccatggcaaaatacctganaatacaaaanaaaatccctactacaaagactactcanaatacctcgaaatacaaggctaaaaccctatactactagaatggccaaaatacaaggcccaaacaaaggaatacctattctaatatttacaaagataagcgggctcatacttagcccatgggctcaaaatctaccctaaggctcatgagaaccctanggccttcccttggatctctgacccaatctacttggagtcttctatccaatgcccttgc

SEQ ID NO: 15198 - DNA, 365 bp, Glycine max
  unsure (1)..(365): unsure at all n locations
ntgaagcactcacatagngttgaattcttggatgaagagttgttgtctattgagagaaacaagacatggagtctcacaaagctaccaatagtaaagaaagccatagcagtaaaatgggtctacaaaactaagttgaatcctagaggataagtaacagagttcaaagccagactgagtgcaaagggatttctgcagaagcaaggtctggattatgatgaagtatttgctcctattgctaggttggaaacagttagacttgtaatagcaatggctagctataattgctgggaagtacaccaaatggatgtaaaatctgcatctcttaatggctcactataagaagaaagttttgtcactcaaccact

SEQ ID NO: 15199 - DNA, 241 bp, Glycine max
  unsure (1)..(241): unsure at all n locations
aattttcttcccatcagaccttggatgcaactgtgattgtatacccatattagctagatcttgacgggtattcaagccatccttcgtcttgccttgaatgttaaggagtgtcccaatcacactgtcacaaacatttttctccacatgcataacatcaatacaatgtctaacgtcaagatctcaccagtacggaagatcaaagaanatggacctcttcttccatatgcaactctgactttta

SEQ ID NO: 15200 - DNA, 320 bp, Glycine max
  unsure (1)..(320): unsure at all n locations
naagctcattttttgttttctcaaaaccacaagtgccccggctaatcccgccaccaaaaacaccatttgttcccagagatatgggtctttagggatgacaacaggttgaggggtctctgatcatgcacaagttacaagagacaagcccaaaccagtgagggtatcgaagatggaaccagcatagcaacaagacattgctacttgagcaccctctggtccaccatttaaagccatcgttaagtttgtcatcaaatccccaagtgagttcccccaagccaggaactgttagctcaagattgaaggacttattccacatatgt

SEQ ID NO: 15201 - DNA, 184 bp, Glycine max
  unsure (1)..(184): unsure at all n locations
ctgaggcacaagagaatcgacagaatatccatgtcttatcngtccatatcagctccacccgnatgtgtataagccaccagaagatgaaacagaaattgtatgccgccaaccacaagcaaccatgaccatcttgtcacactgcaacattaaacaagcaagaattaggcaaggggaggagggagag

SEQ ID NO: 15202 - DNA, 358 bp, Glycine max
  unsure (1)..(358): unsure at all n locations
agcnngaaattgtaatcaaangagangcgctncataaggggagtttctctggataaacaagctcttagcagttcccatttccccactccatatctnttggttgtcaaagcagccggatggctcttagatttgtcaaattcagtagcaagttcttcaccaaggcttcttccaacatgaaatgatctatgtgcctctgagaactctctggatgtgacaaatctataaggctgatctttgtctgcccagaactgctcctgatccttccatgatgttacctataacataattaatggtccaaatacaatatataactctcttttaccagtgcagacagataaaattattgagatcaatcact

SEQ ID NO: 15203 - DNA, 361 bp, Glycine max
  unsure (1)..(361): unsure at all n locations
agcttgaattgatcaacggaagctctcgagaaaatcgagtggtcataaattntcacacagatgtccgattcggggaaataatatatcgagacgcacgaaattgaacaacggaagctctcgagaaatttgaatggtcataacatttcactcggatgttcgatccggggacataatttatcgagacgctcgaaattgaacaaccgaagctctcgacaaattagaatggtcgtaacttttcacgcgaatggtcgattcggggacataactcatctagacgctcganattgaacaacggaagctctcgagaaattngaaatggtcatacgtttcacaccgatgtccgattcgggaacataatata

SEQ ID NO: 15204 - DNA, 439 bp, Glycine max
  unsure (1)..(439): unsure at all n locations
agcgatgcannagcttctactttttcaattnntgagcccgtctcgatatgatgacgaagacnntcaatcagacanntccgagtaaaaagttatttgtcgtgtttaatttggctcagaaggttcaaccattcaatgttcgagccgtcgtcgctataaattacgggacgtcatatctaacatccgagtaaaaagttattggcgtttgaattggctcatggcttcaacattcaatttcgagcgtctcgatatatgacgagactcaatcagacatccgcgtaaaaagttattgtcgtttgaattgtctcagaggttcaacattcaatttcgagcgtctcgttatgttacgggactcaatcacacgtccgagtaaaaagctattgtcgtttgaatttgctcagagattcacattcaatatcgagcgtctcgatatattatggga

SEQ ID NO: 15205 - DNA, 320 bp, Glycine max
  unsure (1)..(320): unsure at all n locations
tcaacatcagaccacttccagggtgttggatctacttcacatgtatatgatggggcctatgcaagttgaaagccttggatgaaagacgtatgcctatgttgttgtggatgatttctccagatatacctgggttaactttatcatagagaaatcagaaacctttgaagtattcaaagagttgagtctaagacttcacagagagaaagactgtgtgatcaagagaatcaagagtgaccatggcagagaatntgaanacagcaggttcactgaattctgcacatctgaaggcatcactcatgagttctctgcaggcattacac

SEQ ID NO: 15206 - DNA, 347 bp, Glycine max
  unsure (1)..(347): unsure at all n locations
cgactcatcttctccttcaagaggcgcctctggacatctttcttctatcnccattctgctnccatggatcttcaagaagcaaaggactcctttgatgaagaagatccaaggcctacgagctccacataggagctacatcagattcatgtgaattgttaatatagattcaaatgtcctccaattgtgtgtgacacttaagctataaatagaagccatgtgtgtgcatcttttcaaatgtgatcatttgagaattacaattcaaagttcagacctcatttgatgcatacaattgcatgcgtctttactacctcttcctcaacttatcttcctctaccttcaagctttta

SEQ ID NO: 15207 - DNA, 387 bp, Glycine max
  unsure (1)..(387): unsure at all n locations
agctttcataatatgattgctanagaagctagagctgagctacacatacctctctaatagctaagctcacctccttatgatgagaagctagagcttagctacacaccccctataataactaagctcacccccatggcaaaatacctgaaaatacaaaaaaaaatccctactacaaagactactcaaaatacctcgaaatacaaggctaaaaccctatactactagaatggccaaaatacaaggcccaaacaaaggaatacctattctaatatttacaaagataagcgggctcatacttagcccatgggctcaaaatctaccctaaggctcatgagaaccctatggccttcccttggatctctgacccaatctacttggagtcttcta

SEQ ID NO: 15208 - DNA, 235 bp, Glycine max
  unsure (1)..(235): unsure at all n locations
ggaaaactgcaattggaaggattgatgatgattctgttngtgcaactctggattgagggcctcctcagaaatgcgactatggaaaatgcacttggggtcatgcttctctgctcaacctgagatttgtcctttgttttcgtcttctggttcctgaatccgtcgaacaggctttttttcttttcacaataattacacgggtatcgcttcctcctttcatttcttaatttataaatac

SEQ ID NO: 15209 - DNA, 211 bp, Glycine max
agcttgcattagttgttttttttcggagagacagccactatactttgtgaacaggattgagaacagaacgactaacaaggtgtttagcattcgacagtctggattcggtgaagatgtgtggattcatttgcaaccactgtcgaccgccaacttttcttgggaagatccatatgggaataagtttttacatgcttaacttaccgatgatgat

SEQ ID NO: 15210 - DNA, 334 bp, Glycine max
agcttatatctcaccttcagctgtccctccgatctcagcgtcatcataaactcatgaagcgatacttctgcccatttgccattctggaacgcattggcagcgttgcttaccgtttgcaactacctgaagggtctcgtatccaccccgtcttccattgttccttactacgccctcatcacagacctcttgacctcccaacctcttcccttccggcggatacttcctccccacaccctatacttgagccactagccatccttgactctcgaatggacttctctgtggaccccccaactcgtttcgttcttgcacaatgggttggtcttactacgga

SEQ ID NO: 15211 - DNA, 395 bp, Glycine max
  unsure (1)..(395): unsure at all n locations
tcaagcttgtgtatgaaacagatgtgattaatctaaaattacatctctactgagaagaactttcctttcagatggtgaccagatcctatagcctttcaccccatcactataacccatgaacagaccctttcttgatctaggtaccaactttccttcattgacatgataataagcattgcagccaaatactcttaggtttgagtagttctctgttntgccattccagatttcaataggggttttaagtcctatagcagtagagggtgttctattgatcagaaaacaggctgtattgatagctcttccccanaaacttctgttgagaccagcattagacaataggcatcttgttctttccaggagtgttctgttcattctttcaggaactccatctt

SEQ ID NO: 15212 - DNA, 392 bp, Glycine max
  unsure (1)..(392): unsure at all n locations
agcttttatatattgaaaaanaaagctccaagagcttggtattaaaggctaagctcattcttagttcataatggattcaccagaggaataatggacaccacactatttagaaaggctaagataggaaatctgttgattgctcaaatctatgtagatgacataatctttggtgcaaccacagaaaggatgtgcaaggagtttcctgagctaatgaaaggtgaatttgagatgagtatgatgggtgagctaaaattcttcctangtcttcaaaacattcaaaaagatgatgggatattcatccatcaagagaacacanaaaacctatttaaaaggtttagaatggatgaagctagacctatggctacccctatgcacccttccacaatcattga

SEQ ID NO: 15213 - DNA, 381 bp, Glycine max
  unsure (1)..(381): unsure at all n locations
gtccatctatggattgaaacaagcctcccgccagtggtatttataaattcatgaggtcatttcttcattcagctttgaagagaatgtcatggatcactgtatataccagaaggtcagtgngagtaagacttgtttccttgtattatacgtagatgatattctacttgcgactaatgataaggttatgctatatgaggtgaaaaaatttctctcacagaactttcatataaaggatatgggagaggcatcttatgtcatacgcataaagatccatagagaaagatctctatacattttaggcttgtctcaagaaatctatatcaacaaagttntagagagatttaatatganagattgtcaccaagtgtagcttcctttgtg

SEQ ID NO: 15214 - DNA, 412 bp, Glycine max
  unsure (1)..(412): unsure at all n locations
agcttcagtcgtactcctatcngcangangtgtnngggatgatgtatcctcacttcactactataatcataacattgcggattgtttttaatagaagctacgaacaacagtttccatatcgcactattatatctgatatgatatgtctattcacgaaaattgattgagagctcaaaaactagtaacatcgaataataataggtcacttaatattctttattacaacatgtgatatgtttattctaaaatataaaaaaaacactaatacttttaaattattatattatttaaatttgaacatttctttaaaataatgctagcatatcggatgagtataaaatataaattatcaactagcatgtcggaagagtataaaatataaataataatgatagtatgtatcatgagtagt

SEQ ID NO: 15215 - DNA, 403 bp, Glycine max
  unsure (1)..(403): unsure at all n locations
agcttgnttttaatccaacctctcatggtagaagcagacacatagaaacaaggtttcactatcttagggatcaagtgaacaaagagaaactaaaagtggagtactgctgcacatttgatcaacttgctaatattttaaccaaacccctcataggggagaagtttaaaatgttaagggatagaattggcttgatgaacttaggagatcagaattaagggagggtgtganagcttaattctgtttttgagtggtgtagatttaattgtacattggatataagagagtaacagaattttaaaattctgttataagtgcctagcctaagtgtgaagggttgtactctgtttgcttgataaaaggacatacatgcatctaataatgaggatatcattcatcatttctc

SEQ ID NO: 15216 - DNA, 400 bp, Glycine max
  unsure (1)..(400): unsure at all n locations
atcttcgttatatattacgggactcaatcggacatccgaagtaaaagttattgccgttggacttttcttagagcttccgttntcaattttgaccgtctcgatatcctacgggacacaattggacatccgagtgaaatgttattgtcattagaatatgctgagagcttcaattttcaattacgagcatcttcatatattacgggactcaatcggacatccgagttaaaagttattgtcgttagacttttcttacagcttccgctttcaattttcgagcgtctcgatatattacagggctcaataagacatccgagttaaaagttatagtcgatagacttttcttagagcttccgttttcaattacgagcgtctcgatatattacagggctcgatcagacat

SEQ ID NO: 15217 - DNA, 417 bp, Glycine max
  unsure (1)..(417): unsure at all n locations
agctnctatcattatatctcgganagcaatcaagatgtgaggcatgtcagtgttggaaaccccaatagaacggaagaactcgagtttatgcaaaagggtatactctgcatcctcaagaagcaccaaaggtcgtttcttcgcaagttttgcaacctgcattatgtcaaacccatagctgctgagcatatcaataacagcgtctgggccatctgggtttgtaaaaatgaccctgtcggagacgaccttggcttttcatggcggcaccccacatgagttgatgaggtatgacacagtataggtgtcacctttgtggcggcttccatctgattcagaatcagaagagctggctgaagtgaatgaatagaagaaaacacttgaagcagtgtgtttgagttgcgacagagaacccaatgtgat

SEQ ID NO: 15218 - DNA, 379 bp, Glycine max
  unsure (1)..(379): unsure at all n locations
gaagatggactcaagttggtcaaactgaagggtgttgttatgcaggtaancaatatctggtacctggtctagtttcttgtctcacttcaacttatcttgcgaaataacttctgttctttatccaggatgccgccaatgctgctataagtgctatggttagtgtgataagactggactcagagaaagtccaacaatagtgtgatgcagccaatcacgaagttcctgaagctgagaaggttcaaattgccaattacctgtgcccagtaaggttcttgtgaatctaccatttataagcttaagcaaaatctgtttctagattatatataaccagtagcttgtttggaatgcttgtcttttgatagggaaactatgctgtctc

SEQ ID NO: 15219 - DNA, 413 bp, Glycine max
  unsure (1)..(413): unsure at all n locations
agcttgtatgatttgcaagatcatcgtccttgacaactccttgaaaattattgccatcaatccaaagagatgacaatttagagagtgatccaagactttcanatggatttccactgaatttattaatagagagatagagatattntaaatctatctcccttgagttgcggagatttcccagaaaagtcggaattattccgtcaagttgattatatgacaaatcaagttcaacgagagaagtcaaatttcccagggcatcagaaatagtcccatgcaagttgttgtcccctatgttgaggagcttgagacgatgaagaccgtataagcaatcaggtatagaagatgagaatgaatttccagacaagtcaagatcttgaagaagtgtgatgtttcgaataccaccaggaatggga

SEQ ID NO: 15220 - DNA, 448 bp, Glycine max
  unsure (1)..(448): unsure at all n locations
tcctaggctcattggagagtctgagatacttggaccttatcttaagtgggttcatgggattaatccctcatcaactaagaaacctctcanacctgcagcaccttaatcttggatacaattatgctcttcagatagataaccttaattggatatcaaggctatcttccttggagtaccttgatttgagtggttcagaccttcataaacaaggtaactggcttcaagtactgagtgaacttccatctctttcagaactacactnggagagctgtcaaattgataacttaggaccaccaaaaggaaaaatcaacttcacacatctccaagtccttgatctttcaattaacaatctcaatcagcaaatcccttcatggctatttaatctcagcacagctcttgtccaacttgatttacacagtaaccttttacagggagaaaatccacaaat

SEQ ID NO: 15221 - DNA, 404 bp, Glycine max
agcttgtattattattttgagcaactacaaatgatcttgatgagatttcggtgtcgcaaattccgcattacttcacattctacactaaagctccttgatcccaattcaaggtccaaattaaataatttgactgcaacaaccatcctatttggaagtatacctttgaacacagagccaaaactacccttaccaagcaaattactctcatcacatccattggttgcccgtgaaagttcattgcatgaaattgtactagatgctaatacagtagatgaactgacttcagcaggatcaccaccaccatgcctttttcttcgactacttttcagaaggaacacacataaaacaaccaatatggttgacaacattacaggcaatatgcattcgatgaaaacatatgtgca

SEQ ID NO: 15222 - DNA, 199 bp, Glycine max
  unsure (1)..(199): unsure at all n locations
agatgtccaaatcttgatgccatattctgacttcatcttctntggaagatagacatgtggaggagtaactgggtcttgaggtgccatagcagcaggtgtctttgactgctgccttattaaacttactctttcatttgtaccaacatgctgacttggaagtgacattgaaccttctcacaacactgactgagctgatcag

SEQ ID NO: 15223 - DNA, 440 bp, Glycine max
  unsure (1)..(440): unsure at all n locations
atatatattgtgctttgattaccgtgccaacatgtttgtttggtttaaactaatgtgccagcattatgtttgataggtaccctaaacccaattcattngatgtttctttnttatatgtatgttctctgacgacaaggtgacaatgtgcctttatanttttgttaaaaaatttattggtccagggtgttcttctgtgggatatggagcaacacaagaccttgacccatttttagcggacactgatggcaggggccttanattcaataacttttcctggaacaaaggtatgaaacgtgagatctangaccacaaacatatgtacatactaaaatntgttggcacagtcacctaattactactttctagtttctactttccatgttaacaatattataaaattatgttcaaccacacacactagttcttcgttatttgtccta

SEQ ID NO: 15224 - DNA, 403 bp, Glycine max
  unsure (1)..(403): unsure at all n locations
agctagattccgtgtgtcttctccactattctaatgacaatgaaagatggccaaattgagcataaggatgcacaagctaaagttgagtatgtgaaaagattgcatgagcaagtgaaggctcacattgcagagaacaatgatagctatgccaagcaagccaacaagaacaagaagaaagtggtacttgaaccaagtgattgggtttgggtacacatgaagaaggagacgttctctaaacaaaggaagtccaaacttcaacctacaagagatggacttttccaagtactagtgaggatcaatgacaatgcttacaagaacgatattcaaggtgagtatggaggtgatttcttcaattaatgttgctgacttgagtccattctntgcaggtggtgattctgaagat

SEQ ID NO: 15225 - DNA, 333 bp, Glycine max
  unsure (1)..(333): unsure at all n locations
agctntgtttcatttatggagaggttaatgaaacaacgagatgatgcgctccatgagaggttggatcaaatggagaatagagatcataatgaagacaaaaggaggacaagagggaatgatggtgttcctagacaaaaccgaattgatggtattaaactcaacattcctccatttaaaggaaagaatgatccggaggcctacttggagtgggagatgaaaatagagcatgttttctcatgccacatctatgatgaggaccacaaggtgaagcttgccgccacggagttttccgactatgctcttgtgtggtggaacaagctacaaaatgagaga

SEQ ID NO: 15226 - DNA, 389 bp, Glycine max
  unsure (1)..(389): unsure at all n locations
cgctatgctgcanacatttacaatagacctcctcaacctcagttgcaatatcaatcacagcagaacaatnatgacctctccagcaacagataccaatcccgatggaggaatcaccctaatctcagatggtctagcnctcaacaacaacaacaacagcctgctccttccttccaaaatgctgctggcccaagcagaccatacattcgttcaccaatccaacaacagcaacagccccagaaacaacannacagtaaagctcctccgtaaccttccctcgaagaacttttgangcaaatgactatgcanaacatgcagtntcaaaaagagaccagagcctccattcagagcttnaactaatagatgggggacattgctacacagttaaatca

SEQ ID NO: 15227 - DNA, 440 bp, Glycine max
  unsure (1)..(440): unsure at all n locations
ttagcactcttcttttgttagtcaaactttattgtttnaatctctcctcatctaaatcaaccaactcatctgacatcattttccaataatggtcgattggaatgtccatttgtttttgtaccctggctgattgcaaatgtatttcgaccggaagtacagcatcatgcccataagtcagtcgaaatggggtagtattagttgattccttangagaatttctacatgcccatagaacttgatctaacgtnttattccaatttcttggcttttgggcaatgtgttctttaatcaagttaattacaatcttattggctgcttcaacttgaccatttgcttgcgcgtaatatggtgttgaggttaataatcgaaagccaatattttgggcaaattcttgcatttttcgtccaataaaaactgaaccttgatcagtggtaattgtt

SEQ ID NO: 15228 - DNA, 406 bp, Glycine max
agctttcttgaaattcaaatggtctaaacttttaacacggaggtccgattcgggcgcataatttatcgagacactcgaaattgaacaatgcaagctctcgagaaattcaaatggtcataacttttcaatcggaagtccgattcaggcgcataatatatcgagacactcgaaattgaacaacggaagctctcgagaatttcaaatggtcataacttttcactcggaggtccgattcaggcgcataatatatcgagacgctcgaaattgaacaactcaagctctcgagaaattcaaatggtcataacttttcacacggaggtcagattcaagcgcataatatatcgagacactcgaaattgaacaatgcgagctctcgagagattcacatggtcataacgtttcaatc

SEQ ID NO: 15229 - DNA, 393 bp, Glycine max
  unsure (1)..(393): unsure at all n locations
agcagcgttanatttatattaaaagctccaagagcttggtattaaaggctaagctcattcttacttcataatggatgcaccacaggaataatggacaccacactatttataaaggcttacataggaaatctgttgattgctcaagatctatgtagatgacataatgtctggtgcgaccacagaactgatgtgcaccgagatntctgcactaatcaaaggtgaatctgagatgagtatgatgggtgagctaaaattcttgctaggtcttccaaacattcaaaaagatgatgggatattcctccatcaatagaacacataaaacctatataanaggcttagaatggatgaagctagacctatggctacccctatgcaccacttcacaatcattga

SEQ ID NO: 15230 - DNA, 401 bp, Glycine max
tcatgtctttattttcaattacgagcgtctcgatatattacgggactcaatcggacaaccgagtaaaaagttattgtcgtttgaatttgcttactgctgctgaattcaattacgagcgtctcgatatactacgggacacaatcggacacccgagtaagaagctattgccgtttgaatatgctcagagctgctattttaaattacgagcgtctcgatatattacgggactcaatcggacatccgagtaataagctattgtcgtttgaatctgctcagtgcttctgtgctcaatttcgagcgtctagacatactactggacacaatcggacacccgagtcaaaagttattgtcgtttgaatacgctcagagcttctattttcaattacgagcgtctcgatata

SEQ ID NO: 15231 - DNA, 430 bp, Glycine max
  unsure (1)..(430): unsure at all n locations
gtgagaaanatcaaacgacaataaatatttactcggatgttcgattgagtcccgtaatatatggagacgctcgtaattgaaaacaaaagctctgagcaaattcaaacgacaataacttttgactcgggtgtccgattgtgtctcgtagtatatcgacacgctcgtaattgaaaagggaagctctaagaaaaatcaaacgacaataacttttaactcgggtgtccgattgtgtctcgtagtatatcgagacgctcgaaattgaaaattgaagctctgagaaaaatcaaacgacaataactttttactcgaatgtccgattgagtcccataatatatcgagacgctcgtaattgaaacagaagctctgagcaaattcaaacgacaataactntntactcgggtgtccgattgagtctcttagtatatcgaga

SEQ ID NO: 15232 - DNA, 418 bp, Glycine max
  unsure (1)..(418): unsure at all n locations
agctntgtttagtttgaatataaaagctccaagagcttggtattaaaggctaagctcattcttagttcataatggattcaccagaggaataatggacaccacactatttagaaaggctaagataggaaatctgttgattgctcaaatctatgtagatgacataatctttggtgcaaccacagaaaggatgtgcaaggagtttcctgagctaatgaaaggtgaatttgagatgagtatgatgggtgagctaaaattcttcctaggtcttcaaaacattcaaaaagatgatgggatattcatccatcaagagaacacaaaanacctatttaaaaggtttagaatggatgaagctagacctatggctacccctatgcacccttccacaatcattgataaggattagaaaggtaataaactc

SEQ ID NO: 15233 - DNA, 400 bp, Glycine max
  unsure (1)..(400): unsure at all n locations
taaatcccggataagggggtccaaccaaacacctggccaacccctcattgcacctgcaccatactcaccttcacatgttgataaacccactatggattgcttcttagaactccacgatattggtgttgcaccatacatgaatatgtaacctatagtactctntatgtcanttttgtctcatccccaatccgcatcagtatatcccactaattcttctaagttactgttgtctatatttggaaatagatatccagtattgatggtcctttttatgaaccttagaatcctcttagcagctaggagatgaggaattctgggtcttttcgtatatctacttaccagtccaatagcaanatccaaatcaggtcttgaatgacacaagtacctgagagaaccaaca

SEQ ID NO: 15234 - DNA, 415 bp, Glycine max
  unsure (1)..(415): unsure at all n locations
taaccttctttataaacgggacattggtgcacaatacacaatgtccggtacaccacaaccaaatggtgtatcacaaaggcacaatagaactttaatggatatgattaggagtatgttaatcaattagactgtatccgtatctttgtggatgtatgccttgaaaactgtcatgtatttgttgaatagggttcctagtaaggcagttccaaagacatcttttgaactgtggacaaataggacacctagtataaggcacttgcatgtttggggttgtcaggcacaaataaagatttataatccgcaagaaagaaaattggatgcaagaacaatcagtggatatttcattggttatcaagaaaagtcaaaggagtatatngtttattgtcctaaccatagtatgagaatcgtcaaaact

SEQ ID NO: 15235 - DNA, 381 bp, Glycine max
  unsure (1)..(381): unsure at all n locations
ctcagctctaacttatacagaataagctctgataccacttgtttataagtggcctcagatatcttaagaaggcggggttgaattaagatattgcaacttcatttcccaattaaaatttctatttaactttctattcaagttataaattcccttaataatgaatttcttaaatgttgattcaaatagaacaatttgaatatgaatatngaccactaatatataaaggagtttaagggaagagacaatgcatactcagaattatactggttcggccacacccttgtgcctacgtacagtccgcaagcaactatcttgtaaattccttttacaagttctaaacacacaaagacaaccctctctttgtgttagaatttttcacag

SEQ ID NO: 15236 - DNA, 404 bp, Glycine max
agcttgctttctcatggaagctcctaatatctcccacactttttggggtgggccattcttggatggccttgattttctcagggaccacttggaccccatttctaccaactactaaacctaagaaaactatattatctacacaaaaggtacacttctctatatttgcatagagggtgtttttcctaatgactgaaagaacttgtctgagatgtcctaagtgatcatctagcctcctactatacactaaaatatcatcaaaataaacaactacaaatctacctacgaaatcccttaagacatgatgcataagcctcataaaggtgcttgatgcattagtgagcccaataggcatctctagccattcatacaaaccagacttggtcttgaaagcacttatacactca

SEQ ID NO: 15237 - DNA, 380 bp, Glycine max
  unsure (1)..(380): unsure at all n locations
agcttatgattctcattcctgngaattcttggattggatgcttaagtccattggcttcccagcccagttctatacttggatcatggaatgtgtttcttccacttcatttagtgtggcagtcaatggatctatttatggtcacttcaaagggcagcggggtcttagacaaggggatcctctatccccttatctgtttgtgctttgtttggagtacttttccagagatatgagcagtctcaaggatgatgccaattctaaatttcatcccaactgtgcaggtattcagctatctcatttggtttttgcagatgatattatgcttctatctagaggagatatcctttctgtgtcaactatgtctgccaagcttcagcacttct

SEQ ID NO: 15238 - DNA, 403 bp, Glycine max
  unsure (1)..(403): unsure at all n locations
agcttgagtacntttgtanggctccaaggctttccatcagctctgataaatctgccatatactcagccggtattaggcctcatgagctttctcatattcaacagcttactggatttagcttgggtgacttgccttgtatatacttgggtgttccccttttatcatgtagattaaatgcatgtcattatgctcccttgctttccaagattacttgcctgattcagggatggagcaccaagtctttatcttatgcaggtaagttagagttgatcagagcagttattcaaggaattgtgaatttctggatggagatttttcctttgccgcaatctgttctggaccaaatcaacgttttgtgccgtaatcttctgtggagcaaagcggatattggaaaaaacaagcc

SEQ ID NO: 15239 - DNA, 391 bp, Glycine max
  unsure (1)..(391): unsure at all n locations
agctnngtanaaccaaccaatcagaatgctagacgaaatatagatgggaatagaggtaacaatggcggtaatgacggaccgaggcagaaccgggttgagggagtaaagctcaatgttcctcccttcaaaggtagaagtgatccagatgcctacctggactgggaaatgaagactgagcacgtatttgcctgcaatgactacactgatgcgcagaaagtcaagctagcagcagctgaattctccgactatgcccttgtttggtggcataaataccaaagagaaatgttgagagaggaacggcgagaggtagatacatggactgagatgaaaagggtgatgagaaaaaggtatgtgcccactagctataacagaaccatgcgacagaaactcc

SEQ ID NO: 15240 - DNA, 374 bp, Glycine max
  unsure (1)..(374): unsure at all n locations
tcggacattcgtgtgaaagttatgatcattcgaatnnttcaagagcttccgttgntcaatttctagcgtgtcgacatattatgcgccagaatagaacatccgtgtganaagttaagaccatttgaatttctcaagaacttccgttgttcaatttcgagcttcttgacatattatgtgcccgaatcggatatccgtgtgaaaagttatgaccatttgaatttcgcgagagtttccgatgtttaatttcgagcgtatcgatatattataagcctaaatcggacatccgtgtgaaaagttatgaccatttgaatttctcgagaactttccgtgttcaatatcaagcttctcgacatattatgtgcctgaatcggaca

SEQ ID NO: 15241 - DNA, 402 bp, Glycine max
agcttgatcagctctataggaacggctttccaggttccggtggtggtgccggtgggtttaggattcgaattcccactgggttgagcgcgccgcagcagcagcatcctggatctgcttccaaggtgtttgggaaggttgggaatcagagattcagccccaatttgaatcaaaaccctaaccctaatcttgggaagaagagggagagagaccccgtgggtgaagtggtggctgcgattaaggtattgggagatgggtttgtgagaatggaacagatgaagatggagatggccagggagatcgagaccatgcggatggagatggaaatgaagcgcactgagatgattctagaatcgcaacagcggattgtcgaggcatttgccaaggccgtttcggataagaaca

SEQ ID NO: 15242 - DNA, 325 bp, Glycine max
agcaccttcttcaacagatctatgtccctctccacaacaccattctgttgaggtgttcttggcgttgaaaatttatggtgaattccatgttcttcacaaaagtgttcataggactcattctgaaactcacctccatgatcactgctaattgaataaatgtagagaccttttccattttgaattaccttggtaagtgtgcgaaaaacatccaaagcttcatctttggttgtcagaaacaatgtccaaggtaaccttgagtaatctccactattaccaagctatagtaatttctcctaacctatagctcttaaaggacctataatca

SEQ ID NO: 15243 - DNA, 404 bp, Glycine max
agcttgcttattcatggaagctcctaatatctcccatactttttggggtgggccattcttggatggccttgattttctcagggtccacttaaaacccatttctaccaactacaaaccctaagaaaaatatattatctacacaaaaggtacacttctctatatttgcatagagggtgtttttcctaaggactgaagaacttgcctgagatgccctaagtgatcatctaggctcctactgtacactaaaatatcataaaaataaacaactacaaatctacctatgaaatcccttaagacatgatgcataagcctcataaaggtgcttggtgcattagtgagcccaaaaggcatcactagccattcatacaaaccaaacttggtcttgaaagcggttttccactcat

SEQ ID NO: 15244 - DNA, 428 bp, Glycine max
  unsure (1)..(428): unsure at all n locations
caagcctncgatttattgcaggtagcaccagacatctctataaagactccttatgaaatgcacatcacctatttttctattctcagcattgacttaggaatatagtcataacctgtacaagaacaggtatgagtgggagtagaatctgaaccgccatcagaacatacatattttcctcagggcccgtgtaactcgatcatagagttcggtatcactctaatcactcggtagatgatagtgatgcacaggtgaaaatctctgatgtcttcattgatgctcttctattgcaagaagaaatggatgcaatggcaacttttagttcgtctcagtaaaaccagtggattcaattcagcttttcctgattattaataatgtcttattggcgtaatctacttctgataagataacagtttcatattttgcttctg

SEQ ID NO: 15245 - DNA, 407 bp, Glycine max
  unsure (1)..(407): unsure at all n locations
agcttattaattgaaagttgttctattggaagatcagataaacaaacatgcaagtatcattcctagaacctacattctattccattgtgactttacatctaatctgactttagttgtgtccaatgtgatcaacctagagcatatttgtatttttactcttgcatgcttagctttaaaaactagtgccaattttgaatatttttgagcaaaaacattagttcttagtttatgcgtattttatgtatacaattccttctgtgtgtggcagttgagagggtggaacgagaaggatgatgttgtagctaaatggaagaaagtgcanaatgatatgtgcctacatgctcattgctttgttagtgatcccaattccttcctggatttggctagtgaattgagatatcacatat

SEQ ID NO: 15246 - DNA, 449 bp, Glycine max
  unsure (1)..(449): unsure at all n locations
aggactcaagggagttagtgtggagattactctnggatggngatgatgctattctgngacttgcatgagaaggacctgtttgagaagtatttcacacggcttctggcaaagcaacttttgtcccgaataacagtctctgataatgcagaaagaagtctcatagttaagctcaagacccaatgcagttatcaattcacctctaaattagagggcatgtttacagacatgaaaacctctctagaaacattgctgaacttttatatgccaaccaccccgagttaagcaacggtcctacgcttgccgtgcaggttttgacaacagggttttggcctactcaatctactgttacatgtaacctgccagaagatatctcttcactttgtgagaaagttcagtcatatattaccttggcacacatactggcaggagatngtcctgcanactaatat

SEQ ID NO: 15247 - DNA, 343 bp, Glycine max
atctatatatggtgtattacaagcctcccgtcagtggtaccttatgtttcatgggataatatcttcaggtggttttgatgataatcccatgcataaatgcatataccacatagttagagggagtaaaatatatattcttgttttacatgtatatgatattctactagcagctaatgatcggggttgtctacatgaggtgaaacaatttctctctaagaattttgacatgaaggatatgggtgatggatcttatgtcatcgacattaacattcatacagatagatctctaggtattttgggtctgtcacaggaaacctatattaacaaaattttagacagattt

SEQ ID NO: 15248 - DNA, 400 bp, Glycine max
  unsure (1)..(400): unsure at all n locations
agcttgcatagttagaaatatcttggttgattccgatggtgtgaagtcaaggaaagatttttctattgccatgatgaggtcatctatagttttaggagcctctttgtgttgtaatgactgaatggcattaaagaagccaagatctaagacattaaaatcaagcaagtttgggggttgagaaaccaatcgaatgtcaaaaccgccttcactagcagcttaatggaagtcgttgtcatcttcatcaatgtgacatggagcattgtcttgttgtatgaaaatagtttctcctctatcccctattggccattttgctttgattgcagacaacacatgatgaataagaaaatgtttgcttacttgcttatttattgaagaatattggtntcgttccatagtccct

SEQ ID NO: 15249 - DNA, 313 bp, Glycine max
ctggggtcaattacgagtgtcgcgatatcctacggcacacaataggacatccgaatcaaaagttattacgtgggactgttcctagagctcccgatttcaatctctagcgtctcgatatattaaggggctcaatcggacatccgagttaaaagttattgttgctcgacttttcttagagcttccgctgtcaatattgagcgtctcgatatattacagggctcgatgcgacatccgactcaaaagttattgtcgttagatctttctcagagcttccgttttcaattacgagcgtctcgatatcctacaggacaca

SEQ ID NO: 15250 - DNA, 495 bp, Glycine max
  unsure (1)..(495): unsure at all n locations
cacatagatactaagctgctgcncatggagctcctntatctcccacactnnttggttggaccattcttggatggccttgattntctcaaggtccacttggaccccatttctaccaactacaaaacctaagataactatattatctacacaaaaggtacacttctctatatttgcatagagggtgtttttcctaaggactgaaagaacttgtttgagatgtcctaagtgatcatctaggctcctactatacactaaaatatcatcaaaataaacaactacaaatctacctatgaaatcccttaagacatgatgcataagcctcataaaggtgcttggtgcattagtgagcccaaaaggcatcactagccattcatacaaaccanacttggtcttgaaagcagttntccactcaatcacccttttcatnctgatttggtgataccactttaagaacaattttgaaagaattgcaccatcaactcataagcaatcatc

SEQ ID NO: 15251 - DNA, 471 bp, Glycine max
  unsure (1)..(471): unsure at all n locations
catgcgaagtgngtggaattcctagagcaattcctttatgttatcaaacatanaaagggaaaaggtaatattgtagccgatgctctttctcggcgtcatgcattactttctatgcttgaaacaaaattgattggtcttgaatgtttgaaaagcatgtatgaaaatgatgaaacttttggagaaatttttaaaaattgtgaaaaattttcagaaaatggtttctttagacatgaaggctttcttttcaaagaaaacaaattgtgtgtgcctaaatgttctactagaaatttgcttgtttgtgaagcacatgaaggaggtttaatggngcattttgnggtccaaaagactctanaaacattacaagaacatttttattggcctcatatnannaangatgtgcagaaattntgtgaacattgcattgtatgtaaaaaggcaaagtctaaggtaaagcctcatggattgatactc

SEQ ID NO: 15252 - DNA, 406 bp, Glycine max
  unsure (1)..(406): unsure at all n locations
agcttgttattcnntatgatagaccagtgagcctcacgttcaaagggaagctagtatttgaggtgaacaggtatggcttcactgatggtggagcttgggttgatgggaacctaaactaatgcaatcctaccccgcaagggcattggatagaaaactccaagtagattaagccagagatgcaagagaaggccctaggattcttatgagccttacggtagatttcgggcccatgggctaagtatgagcccacttatctttgtaaatattagattaaggtttcattatttttgggccttgtatatagagctccataatgtaggtagggtaccctagaaatatatgaattttcagcccttgtattttagggcacctagactagtttttgtattacgggtagttttgtaat

SEQ ID NO: 15253 - DNA, 402 bp, Glycine max
  unsure (1)..(402): unsure at all n locations
agctntgtgtatattaaacgacaataactttttactcggatgtctgattgagtcccgaaatatatcgagacgctcgaaattgaataccgaagcgctaagcaaattcaaacgacaaaaactttttactcggatgtctgattgagtcccgtaatatatcgaaaagctcgaatgtgaatgtagaagctctgagcaaattcaaacaacaataactttttactcggatgtctgattgagtcccgtaatatatcgagatgctcgaaatggaataccgaagctcggagcaaattcaaacaataataactntntactcggatgtccgattgagtcccgtaatatatcggaacgcttgaaattgaatgtagaagctctgagcanattcaaacgacaantaacttttactcg

SEQ ID NO: 15254 - DNA, 357 bp, Glycine max
tctacattcaatttcgagcttttcatatattacgggactcattagacatccgagtaaaaagttattgtcgttggaatttgctcagagcttctacattcaatttcaagcgttccgatatattacgggactcaatcggacatccgagtaaaaagttattattgtttgaatttgctccgagcttcggtattccatttcgagcatctcgatatattacgggactcaatcagacatccgagtaaaaagttattgttgtttgaatttgctcagagcttctacattcacattcgagcttttcgatatattacgggactcaatcagacatccgagtaaaaagttattgtcgtttgaatttgctta

SEQ ID NO: 15255 - DNA, 406 bp, Glycine max
agctttcttgttagattcctaaagaagctagaacttagctacacacacctctctaatagctaagctcacctccttgagatgagaagcttgaacttagctacacaccccctataatagctaagctcacccccatgaaaaaatacatgaaaatacaaaaagaaagtccctactacaaagactactcaaaatgcctcgaaatacaaggctaaaaccctatactactggaatgaccaaaatacaaggcctaaacgaaggaaaaaacctattctaatatttacaaagataaacaggctcatacttaacccatgagctcaaaatctaccctaaggctcatgagaaccctatggccttcccttggatctctggcccaatctacttggagtcttctatccaatgcccttgcggg

SEQ ID NO: 15256 - DNA, 400 bp, Glycine max
agctttttctaatacataatatcgtaactacaaaagtcaaaatatataagtctctacatattacagttgtcttatacacattttcatactttaaaaatattctataattttttgttgtcaatattataaaaaattaaaagcataaaatagtaaaattaatttcaatttattcttttttatttcttataattctttcattcatttataaaaaaatatatgaaaataatacctattttttgaaggaggcaatttatttttattacacatatacaaataatatataaaaaaatcataggaacaattgctcccaggttactattgtctatccgccacgtgatgtaacattaattaaatttgttatatcatatcatttataaatgtgcattaatactttacgaag

SEQ ID NO: 15257 - DNA, 377 bp, Glycine max
  unsure (1)..(377): unsure at all n locations
agctnnatgcatgaccaccaatggtctatatatatgtgacttaaacacgaaattactcagagattttcagaacaacaaagtgtttatcctctcaaagagcaaattcattttatcctcttaagaattccttggccaattcaattgcaattcattaaggaattatttgagtgctcaatctgtaaaatccatctctttctagagagatttgttcttcttcttcttctcattttctaagggattaagagactgtgagtctcttgttgtaaaggatctctaaacacaaaggaaggattgtccttgtgtgtttagaacttgtaaaaggaatttacaagatagtggaactctcaagcgggttgcttggtgactgaacgtaagca

SEQ ID NO: 15258 - DNA, 402 bp, Glycine max
  unsure (1)..(402): unsure at all n locations
agctngcnattcatggnaactcctaatatctcccacactctttggagtgggccattcttggatggccttgattgtctgagggtccacttggaccccatttctaccaactacaaaacctaagaaaactatattatctacacaaaaggtacacttctctatatttgcatagagggcgtttttcctaaggactgaaagaacttgtctgagatgtcctaagtgatcatctacgctcctactatacactaaaatatcatctaaataaacaactacaaatctacctatgaaatcccttaagacatgatgcataagcctcataaaggtgcttggcgcattagtgagcccaanaggcatcactagccattcatacataccacacttggtcttgaaagcacttttgcactc

SEQ ID NO: 15259 - DNA, 401 bp, Glycine max
agcttttgattttccaagtgccaattcgtcttcttctttagtccagtcttcttctggcttcaattcatcagtgggctttccttctgtgtccagcatcttgggatgttcccagcctttgatgacagctttccaggttctgctatccagtgatttgagaaaggccaccatccttgctttccagtattcatagttgatgacagcacctttgtcaatgattttcttcatgcctcttaagtgcagatgtccaaatctttgatgccatattctgacttcatcttctttggaggatagacatgtggaggagtaactggtttcttgaggtgtccataggtaacagttgtcctttgatctgctgcccttcattagaacttcactcttctcatttgtcaccaagcattctg

SEQ ID NO: 15260 - DNA, 490 bp, Glycine max
  unsure (1)..(490): unsure at all n locations
gatagattgaacgaatctagtaactaatgccagctttaatcgtatgtatggatagactaaagcagagagtgatcaatataaagaggctcacaggtcgtggtcatgttgtcaagtatcaaatgatgtgaaagaaatgctattcaatggacaacaatatatataggagatatgataaacatatgaaagggaaaaggaaaaggaaaagtaagaaagcaatagacatgttaagttatgtaatgaggtaagtaggaaaaggaataatgaaatggaattaacacaaacattatagaaaaatgactatattattttataagttaacaattatttaaaaaatagaatataagtgatactctattctgaatatatacaaaagaattacacagtcagataacagaaatgagtatataataatgttctcttcgttcttctacactatatctatgtcttncaatggattattcacaattgcacatatataatactcatctta

SEQ ID NO: 15261 - DNA, 339 bp, Glycine max
  unsure (1)..(339): unsure at all n locations
tctcgacatatgatgcgcccgaatcggacatnccgtgtgaaattatgaccatttaaatttcgcgagagtttggcgatgtttaatttcgagcgtatcgatatattataagcctgagtcgtacatccgtgtgaaatgttatgaccatttgaatttctcaagagcttctgttgttcaatttcgagcctctcgacatattatgcgcccgaatcggacatccgtgtgaaaagttatggccatttgaatctctcgagagtttccgatgtttaatttcgagcgtatcgatatattataagcctgaatcggacatccgtgtgaaaagctatgaccatttgaatttct

SEQ ID NO: 15262 - DNA, 396 bp, Glycine max
  unsure (1)..(396): unsure at all n locations
tggtattgaggtttaagaaccattattcactttcgatctaacgaanacactgtttatcggtgtatgtatctgaaggtcagtgcgagtaagattattttctaattctgtatattgatgatatcttgcttgcagctaatgatcttggtcttcttcatgagactaagacattgctctctataaactgtgaagcgaatgatatgggtgaggtaacctatgtgatacggatagaaatattccatagtagatcacatggattcgtacgcttatctcagaaagtatatatatcgatcaagtgctagagagatttaagatgaataggtgtttaacatcgcctattctaatttagaaatgagacagagttagtcttgcacaattgcctagaaatgatatggaatg

SEQ ID NO: 15263 - DNA, 381 bp, Glycine max
  unsure (1)..(381): unsure at all n locations
agctgngtgntntgcaattctaagacactagagagcgggcaagtatatgacatgtcccacttgtactttttctatctaatttgcatcctgcaaaatcagaatatgaaaaacctgttatgtttaaggaggtacctttaagataccacataagcaaacacttagcatgatatccaatctacttgcagataggtagagaagcgattcaatcatacctctgtatcttgattcatccactaatttacctttctcatcaaacgtaaggtaggttgatgtagacatacgagtaaatgcttctttgcattttttcataccaaatttctctatcgagtttatgcaatatttgagttgactgaagaaggctccatgtatcaattgcttgac

SEQ ID NO: 15264 - DNA, 376 bp, Glycine max
  unsure (1)..(376): unsure at all n locations
ctgcttagattgtggtctcagcctatctatgacaatgntaagctaagatggctcacagagtccatgggtggtgctctttcttaaccaacctctaaacctctccaatgcttcacttaaggattcatcanggaactgatgaaatgatgaaattgcagctttcccttctgtagtctttgactcggggaagtattacttcagaaatatatcaacaacttcttcccacgtctttagactgctacccttaaatgaatggagccacctcttggcttctcctgccaaggaaaacgaaaataggctgagtttgatggcttcatctggtatgcctgcaatctttacagtgttacaaatttcaatgaatgttgccaaatgtgcatag

SEQ ID NO: 15265 - DNA, 404 bp, Glycine max
agcttgccatgattagaggcgtcggggtcacgagctatgcggatacctaatgctcccatttgcttgggacgcgtgactggtcctagttcgcaagattccaacccttcgtataccagaagaagaccaaacgaagttgtgagtttttctatcaatggcggcatagattgactaatgcagccagaatagctgcataatgtacattggaagggaggataggacatatttagctaaacaaagtcatccagccctattcaaaagtttccctttccatgaagctagccttctatgaattttatccaagataaaatccaaagattgatggtgttgtctcccttgcaccaaggaaaaccctagatagcggccaaggttggaaacactcgcgatgccacaaacatccttgaata

SEQ ID NO: 15266 - DNA, 342 bp, Glycine max
tgatactatgtatcttctgcatgaatcaccataccagatactctgtccttctgttgcagcacatctaggagtcacatgagcatacttgaagctcatgctgcaaacatttataatagaccccctcagcaacacaaccaacaacacgagaataactatgatctttcaagcaatagattcacttcacgctggagagatcatccaaatctgagatgggcaagtgctgcacaacaacaacaacctggacgtattttgcaaaatgctgcgtggccaagcaagccatatgttcctcctccaatacattagcagcaatagcagcagttacaacaaagactacaagcacct

SEQ ID NO: 15267 - DNA, 401 bp, Glycine max
  unsure (1)..(401): unsure at all n locations
agcttgttattcaatatcctgatgatggtgttccatatgttctcaagactggactaatacatttgttgcccaagtttcatggtctcgcaggtgaagatcctcataagcatcttaaggatttccatatttttttccaccatgaagccccatgatgtccaagaagatcatatctttctaaaggcttttcctcattctctggagggagtggcaaaagattggctatactaccttgctcccaggtccattttcagctaggatgaccttaagagggtgttcttggagaaattcttccctgcatctaggaccactgccatcaganaagacatttcaggcatcaggaaacttagtggagagagcttgtatgagtactgggaaagattcaagaaattgtgtgcaagctg

SEQ ID NO: 15268 - DNA, 238 bp, Glycine max
  unsure (1)..(238): unsure at all n locations
agcttgaatcgtacatccgtgcgaaaagntatgaccatgcgaatttctcaagagcttccgctgctcaatttcgagcctctcgacatattatgcacccgaatcggacatccgtgtgaaaagtcatgatcatttgaatttctcgagagtttccgatgtttaatttcgagcgtatcaatattttataaccgtgaatcggacctcagtgcgaaaagttatgaccatttgaatttgacgagag

SEQ ID NO: 15269 - DNA, 337 bp, Glycine max
cactatagacacacaagcctcggtattcaatctcgagcgtctcgatatattacgggactcaatcatacatccgagtaacaagctattgtcgtgtgaattatctctgatgttcacaattccatttcaagcgtctcaatagattacgggactcaatcagacgtccgagcaaaaagttattgtcgcttgaattagcttagagcttcaaaattcaatttcgatcgtctcgatatattacgggactcaatcagacatccgagtaaaaagttattggcgtttgaatttgctcacagcttcaacattcaatttcgagcgtgtcgatgtattacgggactcaatc

SEQ ID NO: 15270 - DNA, 350 bp, Glycine max
agctttgttctaattcaaatgacaataaccttttgctcggatgtctgattgagtcccgtaatatattgagacgctcgaaattgaattctgaaccttagagctaattcaaacgacaataactttttactcggatgtctgattgagtcccgtaatctattgagacgctcgaaattgaactctgaaccttagagctaattcaaacgacaataacttattactcggatgtctgattgagtcccgtaatacatcgagacgctctaaattgaatgttgaaacctctagctaattccaacgacaatgactttttactcggatggccgattgagttccggaatacatcgagacgctcg

SEQ ID NO: 15271 - DNA, 390 bp, Glycine max
agcttgttacccatggaagctcttaatatctcccacactttttggggtgggccattcttggatggccttgattttctcagggtccacttggaccccatttctaccaactacaaaacctaagaaaactatattatctacacaaaaggtacacttctctatatttgcatagagggtgtttttcctaaggactgaaagaacttgtctgagatgtcctaagtgatcatctaggctcctactatacactaaaatatcatcaaaataaacaactacaaatctacctatgaaatcccttaagacatgatgcataagcctcataaaggtgcttggtgcattagtgagcccaaaaggcatcactagccattcatacaaaccaaacttggtcttgaaagc

SEQ ID NO: 15272 - DNA, 278 bp, Glycine max
agctttttacattcacgtgccttatggagctcagagcctgaacctccgcgtcaaactcctttgacttcccaccaccaccgtgcttgttcccaagcatgggggtgctactccacgagttctttctccttgcagggacatcggtgttccaaatatgcttcaccgcgagttctttcccattggaaagagtgaccctgtacacgttccccgagcctcctatccctatgagattctcctgcttgatggaatctacaatctctccctccgagaaactcatcacg

SEQ ID NO: 15273 - DNA, 408 bp, Glycine max
  unsure (1)..(408): unsure at all n locations
cccctcagtcgcagaaccaacaactttagaataattatgacctttcaagcaacagatacaatccgggtgggaggaatcatccaaatctaagatgggcaagtcctccacaacaacaacagcctgtccctccctaccagaatgctgctggtccaagcaagccatatgttcctcctctaatgcaggaacaacaacaacaacaacaaagacaacaagcaactgaggccccttctctaccttccttagaggagttagtaaggcaaatgacaatccanaatatgcaatttcagcaagagacaagagcctccattcagagtctgacaaatcagatggtgcggatggctactcgagtgaaccaagctcaatcccaaaattctgacaaatagccttcataaactgtgcacaatctga

SEQ ID NO: 15274 - DNA, 470 bp, Glycine max
gcgtctcgtatattacgggactcaatcagacttccgagtaaatatttattgtcgtttggattggctcagagaggcaacattcaatttcgagcgtctccatatattacgggactcattcagacatccgagtaaaaagttattgtagtttgaattagcttagagcttcaacaatcaatttcgagtgtctcgttatatcacgagactcaatcagacatccgagtaaaaagttattgtcgtttgaattggctcagagcttccacattcaattttgagcgtctcaatatattacgggcctcaatcagacatccgagtaaaaagttattgtcgtttgaattggctcagagcttcaacattcaatttcgagcgtctcgatatgtgacgagactcaatcagacatccgagtaaaaagttattgtcgcttgaattggctcagagcttcaacattcaatttcgagcgtctcgatatatta

SEQ ID NO: 15275 - DNA, 181 bp, Glycine max
gagaaccagcgcatgagagataacttccttcagcttgttgaaagccttctgagccttcggcgaccaacgaaatctgtctttggccaagagttgagttcaaggtgccactatggaaacgtatcccttaataaacctccgatagaagcctgacaagccgagaaagcctcttaaagctctggta

SEQ ID NO: 15276 - DNA, 400 bp, Glycine max
agctttttgaaaattcttatggtcataacttttcacacagatgctagattaaggcgcatcgcatatagagagactcgaaaatgaacaacggaagctctcgagaaattgaaatggtcataacttttcacactgaggtccgattcaagcttataatatattgatatgctcgaaattaaacatcggaagctctcgagatattcaaatggtcataacttttcacatgaatgtccgattcgggcgcataatatgtcgagaagctcgaaattgaacaacggaagctcttgagaaattcaaatggtcataacttttcacacggatgtccgattcaggcttataatatatcgatacgctcgaaattgaacatcagaaactctcgcgaaatttaaatggtcataacttt

SEQ ID NO: 15277 - DNA, 396 bp, Glycine max
  unsure (1)..(396): unsure at all n locations
caatttcgagcctctcgacatattatgcacccgaatcggacatccgtgtgaaaagtcatgatcatntgaatttctcgagaggttccgatgtttaatttcgagcgtatcaatattttataaccgtgaatcggacctcagtgtgaaaagttatgaccatttgaatttgacgagagcttccgttgttcaatatcgaatatcactatatgtgatgcgcctaaattggacattcgagttgaatgttatgaccatttggatttctcaagagattctgttgttcaaattcgagcgtctcgagatcttatgtgatcgaatcggacattcgtgtgaaaagctatgaccatttgaatttctcaagagcttgctgtggtcaatttcgagcctctcgacatattatgc

SEQ ID NO: 15278 - DNA, 412 bp, Glycine max
  unsure (1)..(412): unsure at all n locations
agcttatctattaatttcgaccgtcttgatatgttaagggactcaatcagacatccgataaaaaagctattgtcgtttgagttggctcagagcttcaacattcaatttcgaccgtctcgatatgttacgggactcaatcagacatccgagtaaaaagttatggtcctttgtattggctcagagcttcaacattcaatttcgagcgtctcgatatgtgacgggactcaatcagacatccgagaaaaaagctattgtcgtttgagttggctcagagcttcaacattcaatttcgagcgtctcgatatgttacgggactcaatcagacatccgagtaaanagttatggtcctttgtataggctcagagcttcaacattcaatatcgagcgtctcgatatgttacgggactcaatc

SEQ ID NO: 15279 - DNA, 427 bp, Glycine max
  unsure (1)..(427): unsure at all n locations
tctgttntcaatntcgagcgtcttgatatattacgggattcaatcgatcatccatgttacaagttattgcgaattgcattntctaccaccttttgttttccattaccagcatctcgatatattacgggactcaatcggacatccgagttgacaggtattattggtttgcatttttacaagcttccattttcaatttcgagcacctcgatatattacgggactcaatcgaagatccgagtcaaaacttattgtcgttngaatttgctcacagcttctgtattcaatttcaagcgtctcgaaatagtaagagaactcatcggatatccgagttaaaagttattgtcatttgaatntgctcagagcatcttgtcataccctaatttcgtccggggatctttgcttgatgacatgcgacctttctttggcc

SEQ ID NO: 15280 - DNA, 443 bp, Glycine max
  unsure (1)..(443): unsure at all n locations
agcttgtatacatgatttngaattttatgatcctaatagctccgtgtttgggaaacataaaattcctcttcaatgtatccatttacgaaaacactnttgacatccatttggtatagtttgaaatccataacacaagcataagcaaatagaaatcttacaacctctaatctagctaccggtgcataggtttaaccaaagtctatatgctcttgttgagtatagcccttggctactagccttgctttattcctaatgatcaaaccatgttcatccgatttatttttaaacacccatntagtgctaatggtgtgcatatctttagaataagatacccaattccatacatcattccttttaaattggttcaactcctcatacatggacattatccaaaactcatctttaagtgccttctctatagacatgggttctacttgagacac

SEQ ID NO: 15281 - DNA, 416 bp, Glycine max
  unsure (1)..(416): unsure at all n locations
agcttgttgcaattcttctagacttggagttataacatgcagtcctcttgaacccttacctcccactctttcgtcatgccgggactcanganacccaacaggttttgccttttcaatgtactctgaacaaaactcaatagcttctttggcaatatacctttcaataatagatgcttcaagacagtctagattctttgcatacccttttatgatcttcatgtatcactcaaccaggtatatccaccacaaataaatgggaccacaacatttaatttccctcaccagatgaacaattaagtggtgaaccatgatgtcaaanaacanaggaggataatacatctccaactgacaaaataaaatagcagcctcgttttcaactcatctaacttgagaggatcaatgactntactacatat

SEQ ID NO: 15282 - DNA, 464 bp, Glycine max
  unsure (1)..(464): unsure at all n locations
agagaatatcatctctctngaaaagcaaatcacctgatctgcattctttattgcactcaaatattcaccactnggtgaaacatcagccacagaattcaacaaattctctctgggtatcctcacattatcaaacctgaagacacatgtgaataatttctgcgtttactcttttatataaaatntcattttcaggtgcaacttgtttgaaaaatgtatatattaccagatacggccattatcaactccatttaaaccaattntgtgaccacaatcagctattcggatgtttggacatatgtttccatctgaatccctgatttgngcaataaatgcatgcaccccttgattgctccatttatatagagctgtgaaaagactatagtgtgggttgcatgctgaataaaagaacaagttaatataagggtaatatatacaaagttggagccagtgaaaaatgtatcatg

SEQ ID NO: 15283 - DNA, 455 bp, Glycine max
  unsure (1)..(455): unsure at all n locations
agcttgccaagaagagaggtgttggtgttacgagctatgcggatacctaaagctcccatttgcttgggacgcgtgactggtcctagttcgcaagattccaacccttcgtataccagaagaagaccaaacgaagttgtgagtttttctatcaatggcggcatagattgactaatgcagccagaatagctgcataatgtacattggaagggaggataggacatatttagctaaacaaagtcatccagccctattcaaaagtttccctttccatgaagctagccttctatgaattntatccaagataaaatccaaagattgatggtgttgtctcccttgcaccaaggaaaaccctagatagcggccaatgttggaaacactcgcgatgccacaaacattcttgaatatattcttcatgcgggtngggattcccttggagctcatcatcgtagatttat

SEQ ID NO: 15284 - DNA, 385 bp, Glycine max
  unsure (1)..(385): unsure at all n locations
cctagtaactcagcttgccatgaatcaganatctgcacctgttgcaagagtctatgatctatgttcttctgcagatcaccatacagatctctgtccttctttgcagcaatctggagtcaatgagcaacttgaagctcatgctgcaaacatttataatagaccccctcagcaacaaaaccaacaacaagagaataattatgatctttcaagcaatagatacaattcaggttggagaaatcatccaaatctgagatgggcaagtcctccacaacaacaacaacctgtccctattttccaaaatgctgctggtccaagcaagccatatgttcctnctccaatacattagcagcaatagcagcagtcacaacaaagacaacaagcaact

SEQ ID NO: 15285 - DNA, 423 bp, Glycine max
  unsure (1)..(423): unsure at all n locations
tgtgaatgtatgtatacatgattntgatgatgtcaaaagaagaatcaaacaaggctcattntgcttcaagattaatacaagattgtttcaacaaacaaagccttgattcaagatttcttcaagatcaagccttgcctcacaatgaaaggtttcaagtcattcaaggcacatgtaatcgattaccaatggtttgaaagtgtgtaatcgattacacatcatatgtaatcgnataccagagactctgaacgttgggaattcaaattntaaatgaagggtcacaactgttcaagaaaaacaactgtgtaatcgattacactaattctgtaatcgattaccanagaggattntcaaggaatatcgccaacagtcacatcttatcatttgaattttgaatggccatcaaaagcctatatatatgtgtga

SEQ ID NO: 15286 - DNA, 439 bp, Glycine max
agcttatgtgaacgttctgtataatgtataaagccacaaaagaaggcaactacctgtctcaagagatccattgtactgttaaacgttaaaacaaatatctgggagcttatttgaccccactttgaaaaacgatattgaaatacaatgaacaactaagtactgcatacaagaagtacgcacgtaaactacataattcaataatggttacactcgtaactattgtgtcacattagtttaaaacaagtacaactttagcacaacttactacgttgactagggacattagattccacaaagcatacagtcgagcaagcccagctgatctcctaggtccttgactaaacaaagcgctgattccagatggaaatggaaataggacaccatgagggaggacaaatagaactaataagaagctcaacagagacagcgagtacatctg

SEQ ID NO: 15287 - DNA, 386 bp, Glycine max
  unsure (1)..(386): unsure at all n locations
tatcctgatgagggtgttccatatgttctcaagactgtattaatacatntgctgcccaagtntcatgggcttgtaagtgaagatcctcataagcatcttaaggagtttcatattgtttgttccaccatgaaacaccatgatgtctgttccaccatgaaacaccatgatgtccaggaagatcactatcttttacaagctnttcctcattctctggagggagtggtgaaagatgggttgtactaccttgctcccatgtcctttaccagctgggatgaccttcagaaggtgttcttggagaaattcttccctgcatctatgaccattgccatcagaaaagacatttcaagcatcaagcaacttagtggagaaagcttgatgaatacttg

SEQ ID NO: 15288 - DNA, 421 bp, Glycine max
  unsure (1)..(421): unsure at all n locations
agcttatatcacataattgacaaactcttaataaactatgcttaagaccatcaacaagtaaaacattttctatggaggtagagggattcaaacctatttttccaactccaagaattntacctttgctgttgtctccataggtcacatgtttactatttttggaagaaatatgaataaactntgatgcatctcccatcatgtgttcagagcaaccgctatcaatgtaccaattatgcttcaaggagtctttcattcatataatcatatnttgattttggtacccanatnttcttgngttcttaaatgttagttatgactaacgatccttttggaacccataccatttttctaatgctactaccattctttctaatataacatattgatgcactataacctttcttaccacaatanaagcatg

SEQ ID NO: 15289 - DNA, 287 bp, Glycine max
  unsure (1)..(287): unsure at all n locations
agcttgaagganaactatatgcattgtttaacttgtttacccagctagccttgaatcataaatctgtacctgtcgcaagagtctgtggtttgtgctcctctgctgaccaccatacataccttngccctgtcatgcagcatcctggagcaattgagcagccctaatctcatgctgcatacatttactatagacctcctcaacctcagcaggcaaatcaaccacagcagaacatttatgacctcccatgcacatatacaaccctggatggatgaatcacccttatctca

SEQ ID NO: 15290 - DNA, 428 bp, Glycine max
agcttgaaggtacgttatgatgagtgtaggagagggggaagggggaacaaaattttgatagagagaagatgaagaatgaagtatgaactttgaagactaatttctcatcaaagtttcaaaatgcacacacaattgttctttccctttttgtatttgataacatatggaaattgctctaataactctacccattttgcatgcctgttatctaacttgcattgccctctaatgtacttaagtgattcatgatcactatgaataacacactccttggaaacaaggtaatgttcctaagtttggaaggctctaactaaggcatacaactccttatcatatgtggagtggttgagagtggcatcatgaagtctctcactaaagtatgcaagagggtgcccaccttgcaacaacataggctcccacacctacac

SEQ ID NO: 15291 - DNA, 431 bp, Glycine max
  unsure (1)..(431): unsure at all n locations
tccaccccnatatctcaagttttaggtaagaattcaagaccctttggaaggtacactgaattaattctctcagagtctccattgtgagatntgaaagtgagtaatctcaggtttggcatctttctgaatactttggagcttaaatttatatgtgtaatttgagtcatatctaaccatattccttcaactgcagcagttccctgacaaataataattagaattaatgtttacatcttttgtaataatttggcatttttataccaagagtttaggaatgcaagtcaaagtatcattaacatactctattatttgtcaatacatcatagatntccacaggatcccacaatctactgcgttgccctgganatntaacagattcttcacgaacaacttctctacccatttcttgtatcagatcgtgcatatctatg

SEQ ID NO: 15292 - DNA, 407 bp, Glycine max
  unsure (1)..(407): unsure at all n locations
agctntgagccaattttattgataatatacgtttactcggatgtccaattgagtcccgtaatatatcgacacgctcgaaattgaatgttgaagctctgagccaattcatacaacaataactntttactcggatgtccgattgagtgacttaatatatcgggacgctcgaaattgaatgttgaacctctgagcaaattcacacgacaataactttntagtcggatgtctgattgagttccgtcatatatcgagacgctcgaaattgaattttgaacctctgagccaattcaaacgacaataactntttactcggatgtctgattgagtcccgtaatatattgagacgctcganatngaatgttgaagctctgagccaattcaaacgacaataactntttactcggatg

SEQ ID NO: 15293 - DNA, 371 bp, Glycine max
  unsure (1)..(371): unsure at all n locations
gctaacattcaactntgtgcgtctcgatatattacgggactcaatcagacttccgagtaaaaagttattgtcgtatgaattggcttaaagcttaaacattcaactgtgagcgtctcgatatattacgggactcaatcatacatccgagtgacaagttattgccgtttgaattggctcagaggttcaaaattcaatttcgagcgtctcgatatattacgggactcaatcagacatccgagtaaaaaagtattgtcgcttgaattggctcagagggtcaacattcaattttgagcgtctcaatatattatgggactcaatctgacatccgagtaagaagttattgtccgctaaattggctcatacgttcaaca

SEQ ID NO: 15294 - DNA, 462 bp, Glycine max
  unsure (1)..(462): unsure at all n locations
agcttgcanatctttttattgaactgttattcaaaaccaagaggtgtgtccatgtagacttcctcctctaagtccccatttaaaaaggcattctttacgtcaagttgttgtaatcgtcaatctaaatttgcagccaatgataagaggactctaatggtgttaagttttgcaacaggagcaaaagtttctgagtaatcaataccataggtttgggtgaagcctttggcaactagcctggccttgtacctctcaacaaacccatttgcgttatacttgatagtaaacacccatttgcatcccacggttgttnttcctcttggtaggtccaccactttccaagtctgattnttttctagagctctcatctcctccatgacagcttccttccacttaagaacccttagagcttcctgtatatctcttggtatttctatanttgtcagttcacaagtaaaagctcta

SEQ ID NO: 15295 - DNA, 384 bp, Glycine max
  unsure (1)..(384): unsure at all n locations
agcttactaatctggtttaaatcctttcccataaataaattaaattcaaatctagataagataagataagatctagattaaataatatctagatgagaaattcaaatctagataagataagatcagatctagattaaataatatctagatgagaaattcaaatctagataagataagataagatctagattaagtaatatctagatgagaaattcacatctagataagataagatctagattaaataatgtctagatgagatcaaatctaaataatatctagatgagataaagatcagataagatctaattntgtagaataaaatagtctgccctcttcaagtccaagcccaattctggattcatacccatgcccgattctgga

SEQ ID NO: 15296 - DNA, 407 bp, Glycine max
  unsure (1)..(407): unsure at all n locations
agctttttattatcagtagatgaagatgaatctgtggccacctcatggactcctctaagaacaatatcatcatttcttgcactgaatttgtgggagccatcttctcaatcaaatttctagcctcaacacggtcatatcaccaaaagcttcaccattggcagcgtcagtcatactcctctccatgttgctaagtccctcatagaaatattgaagaaggagttgctcagaaatctggtggtgaggacaacttgcacacaatttcttgaatctttcccagtacttatacaagctntctccactaagttgcctgatgacctaaatgtcttttctgatggtagtggtcctagatgcagggaagaatntctccaagaacaccctcttaaggttatccagctgantatggacct

SEQ ID NO: 15297 - DNA, 378 bp, Glycine max
  unsure (1)..(378): unsure at all n locations
agcttccgtaaaatttatatggctataactgttgactcggatgtccgattacaaccataatgatgcaatcctacccccaaagcttattggatagaagactccaagaggattgggctagagcggctaaaaaaggccctatggttctcatgaatcttaaggtagatttctgagcccatgggccaaggctgggtccactcttctttgtaaatattagaataggttttccttcttttgngccttgtattttgatgcaatcctaccccccaatcttattggatagaagactccaagaggattgggctagagcgactaaagaaggccctanggttctcatgaacctcatggtagaatttttagcccatggtgatgcaatcctac

SEQ ID NO: 15298 - DNA, 336 bp, Glycine max
ctcagggtccacttatatcccatttctaccaactacaaagcctaagaacactatattatctacacagaacgtgcacttctctatatttacatagagggtagttttcctaaggactgaaagaactttcctgagatgtcctacgtgatcatctatgctcctactgtactccaacatatcgtctctataaacaactacaaatctacctatgaaatcccttaagacatgatgcataagcctcatacaggtgcttggtgcattagtgagcccaataggcatcactagccattcatacgaatcacacttggtcttgaaagcgagattgcactcatcactctt

SEQ ID NO: 15299 - DNA, 344 bp, Glycine max
tctagcaagaagcttctgacagtttatgactatgataatgaggcagtggaagcaatgattagttgctcagagaagagaggagccaaggcacatagcagcacctgcaaaaccaaaagaaggttctggaagtgtggaagcaaaaggaccagttgagagacttcaaagtaagaaagcacaagatagtggtgagaatggtgggtttaacattgagtgcaggtgtttggatcaagtggactctttgggattgataatgatcaccaatagaacgaggtaccttataaattggctggtgaactccatgatgaagctgaagcaccctaacgcagaggggttcccctagtcaa

SEQ ID NO: 15300 - DNA, 397 bp, Glycine max
  unsure (1)..(397): unsure at all n locations
gaagagggcattctattgattangaaacaagcagtaagcaccgcgtctccccaatgatgtgtacgaacattcgaatttagcattatggaacgagcagtttcaagaagatgtcgattcttcctttctgctataccatttttgtgtggagtgtgtggacatgtggactgatgtataatacctttggaagacaaaaaagaagaaagatcatgcgagaagtactctttagcattatcacttctgaaaattntaattggtcatccaaaatgattctcaatctcattgagaatgacacgaatataggcaaaagttcagatctgtctttcattagataaacccaagtacatctggagaattcatcaataaaggttacgaaatatcgaataccaatagatgtgac

SEQ ID NO: 15301 - DNA, 367 bp, Glycine max
  unsure (1)..(367): unsure at all n locations
agcttgtatgtgcgtaccccaccattgttcatagtataacattggtaatgtgtctactattattgtgatcatctctttctccggcattggaggtgccacttgagctgccaggtctctccacctttgggcgtattctttgaaagatctgtgccccttattgcacatgttctatagttgcatcctatccggagccatatcagaattgtactgatactgcccaacgaatgcaaccattaggtctttccaagaatggactcgagaaggttccaaggtatgtgtaccangtaacagctacccagtaagactttcttggaagacatgtatcagcagtttctcatcttttccgtatgcccccatcttccgacaa

SEQ ID NO: 15302 - DNA, 457 bp, Glycine max
  unsure (1)..(457): unsure at all n locations
agctntcttgaganatcttccttgataagcttctttgagaaanattccttgagaagctagagcttagctacatacacccctctcataactaaactcacctccttgagaagcttccttaagaagattccctactacaaagactactcaaaatgcctcgaaatacaaggctaaaatcctatactactagaatggccaaatacaaggcccaaacgaaggaaaaacatattctaatatttataaagataagtaggcacatacttagcccatgggctcgaaatctatcctaaggctcatgagaaccctaggggcttcccttggatctctggcaccatctacttggagtcttctatccaatgctcttgcggngtangattgcatcattccctccaccttggaaaggatttgacctcaaatcttgagattcttcatactctgggctcccttcctcaacacctat

SEQ ID NO: 15303 - DNA, 405 bp, Glycine max
caattcagagtcttcataaatgacgaattggtctttagttcttcttaagtacttaagtatggtcttaaccacttttcaattgttctcaccaacgtttgcttgatatcaactatgtacacctaatgcataagcgacatcatgacgtgtataagtcatggtgtacatgatagcctccagtgcactagcatatggtactctactcgtgtgttctctttcttcacgagttggtggacagttctccctactaagagtaaattccacacctacaggcaaatagccttgtttggaatatccatgtatatctcttaagatagatcaatgacatagattggagagtcaagcacctattgatcttctctataattttataccaaatatagtgttctccacatctcatggaaatgt

SEQ ID NO: 15304 - DNA, 393 bp, Glycine max
  unsure (1)..(393): unsure at all n locations
tctatagaaggttcattcctaatttctctacaatagcatcacctctcaatgagtagatgaagaagaacgtggcatttacctggggtgaanaacaagagcaagcctctgctttgctctaagaacagcttactaatgcacctattctagctcttcctgactattataacactcttgagctagaatgagatgcctctggagtgggagttggagttgtattgatacaatgtgggcaccctattgcttattntagtgaanaacttcatagagcctccctcaactaccccacctatgatacacagttctatgccgtaataagagtcctccaaacttgggaacattaccttatctccaacgaatttcgcattcatagcgatcatcaatcacttaagtaca

SEQ ID NO: 15305 - DNA, 435 bp, Glycine max
  unsure (1)..(435): unsure at all n locations
tgctagcttttagatccggtcatggaaagacttggcaactgccttcattaggcagtaccaatacaacacggatatggctcctgatcggaaccaacttcagagcatgaccaagcgggagcatgagctcattaaagaatatgctcanaggtggagagacctatcagcccaagtcgtcccccctatgactgacagggaaatgatcacgattatggtagatacgttgcccacattctactacgagaagctgatatgatatatgccggctaactntgcagacctcgtcttcgctggagaaagaatcgagctcggactgatgaaaggcaagtttgaatatgcctccagcgttgcccccaacaacaatagaagagccncagtggtgggcacacgggagaaggaaggagatacccacgcgatcaccaccgccctaacatggat

SEQ ID NO: 15306 - DNA, 400 bp, Glycine max
  unsure (1)..(400): unsure at all n locations
agcttcttttntaaatggcatttactacaccgtcaaacanatatgaaaataatcagctgccggtgtttgtttggtagctaaaacaaggcagaaattgtaaatttaatgaaaagatcaatggttaaggaatgataatgtaaactaattnttattctcaattaatactcaattaattttaaatggcattntctaattgatataattnttaagataattctattaacaaattaacanatgtgtattttggttaattgtattcttcaaaagtgttttttttattaatatgcttgtctaaactatgtttctctttntataataagtaatatctacttattacaaagtatttcttaaaaacatctttttttaaacattatgtttaaagttatcttctcttaatatg

SEQ ID NO: 15307 - DNA, 385 bp, Glycine max
agctttggttctaatagctccaatcacgtctattccccatatagagaacgaccaaggcgctgccaagacattcaaaggtacaggtgaagcattgacattattgacgaaggcctgacacttgtggcactttctcacatggatgcaacaatcgttttccatagtgagccagtaataccctgctatcaaaatcttctgggccatggcatttccattggcatgtgttacaaaggatccctcacgtacttccactagcatctgcttagcctccctggcatccacacatcgaagcaaaaccatatcatgggtcctctatgatgggaaaaccaagtgcttggttcaagttggatcttctaggatggaatttgtgcaccaggagcaacaaccc

SEQ ID NO: 15308 - DNA, 462 bp, Glycine max
  unsure (1)..(462): unsure at all n locations
cgtacnnccaccattttcatagtagaacattggtaatgtgtttactatcattgtaataatctctctctatgttattgagggtgctacttgagctgccaaatccttccacctctgggcatattccttgaaggattcatgctcttttttgcacatgttctatagttgcatcttatctgaagccatatcagaattgtactgatactgcttaacgaacacaaccattaggtccttccaagaatggactcaggaaggttcctaagttagtataccaggtgatagttgtcttagtaagactttcttangagaaatgtattagcagtttctcatcttttgtgtatgcccncatcttccgacaatacatctttagatggttcttggagcaagtagtccccttgtacttgtcaaagtccgacaccttgaacttgngaatgaccatgttcgggtactaagaacaactcttct

SEQ ID NO: 15309 - DNA, 381 bp, Glycine max
tcaagtttgacaggtttgaaatatatctctgatgtcttatatgtgcctgacattgatcaaaatctacttagtattgctcagcttgtagagaaaggcttcaaagttatatttgaagaaaattggtgcttgatcaaagatgcaataggaaaagacgtatttagggtaaaaatgagggctaaaagctatgctttaaatctaatggaggagaagcaaatagctttttcaagcatgaccaccaatgttgaactatggcacaaaaggctcggacacttccatcttgctagacttttatgcatgcaaaaacatgccttggtgaaaggtgtgtcaatccttgaagacaagttagccgattgcgtggcttgccaatatggtgagctagtc

SEQ ID NO: 15310 - DNA, 356 bp, Glycine max
agctttaacattcaacttcgagcgtctcgatatattacaggactcaatcaaacatccgagaaaaaagttattgtcgtttgaatttgctcagaggttcaacattcaatttcgagcgtctcgttatattacaggactcaatcagccatccgagtaaaaagttattgtcgtttgaattggctgagagcttcaacattcaatttcgagcgtctcgatatgttacgggactcaaacagacatccgagtaaaaatttattgtcggttgaattggctcagagcatcaacattcaatttcgagcgtctcgatatatgacgggactcaatcagacattcgagtaaaaagttattgtcgtttgaat

SEQ ID NO: 15311 - DNA, 476 bp, Glycine max
  unsure (1)..(476): unsure at all n locations
gacactatgatactcagcttgagccattcanacaacaataacgttntactcggatgtctgattgtgttccgtaacatatcgagacgctcgaaattgaatgttgaagctctgagccaattcaaacgacaataacttttttctccgatgtctgattgagtcccgtaatatatcgagacgctcgaaattatatgttgaacttctgagctaattcaaacgacaataactcttttctcggatgtctgattgagtcccgtaacatatcgagacgctcgaaattgaatgttgaatctctgagcaaattcaaacgacaataactttttactcggatgtctgattgagccccataacatatcgagacgctcgaaattgaatgttgaacctctatgccaattcaaacgacaataacattntactcggatgtatgatngagtcccgtaacatatcgagacgctcganattgaatgttgaagctctga

SEQ ID NO: 15312 - DNA, 383 bp, Glycine max
agttttgatgtaacatttggagaggttaatgaaacaacgagatgatgcgctccatgagaggttggatcaaatggagaatagagaccatatgaattgctcaagagcttccattgttcaatttcgagcgtctagatatataatgcgcctcaatcggacctccgagttaaaagttatgaccatttgaaatgctcaagagcttccattgttcaatttcgagcgtcacgatatattatgcacctgaatcggacctgcgagtgacaacttatgaccatttgaattgctcaagagcttccattgttcaattttgagcgtcacgatatattatgcacctgaatcggacctgcgagtgacaacttatgaccattttgaattgctcaagagct

SEQ ID NO: 15313 - DNA, 344 bp, Glycine max
  unsure (1)..(344): unsure at all n locations
agcttgagttgtacaagccaaaagtgacagtgattaatacttgtaacttgttgaagttaatgaaacttggtggttagccaagaactggacatatggggggatgatgcaatcctacccccaagggcattggatagaagactccaagaagattgggtcagaactactgaagaaggccctatggttaggtttttggcccatggactaagtatgagctcacttatctttgtacatattagattagggtttcattattttttggccttgtatttagggctccatagtgtagggagggtaccctagtaaagtaggatctttcagcctatgtattntagggcacatagact

SEQ ID NO: 15314 - DNA, 411 bp, Glycine max
  unsure (1)..(411): unsure at all n locations
ctcactcggaggcccgattcangcgcataatatatcgagacgctcganattgaacaacggaagctatcgagaaattcanatggtcaatacttcgaactcggaggtcctattaaggtgcataatatatctagacgctcaaaattgtacaatggaagctctctggctatacaaatggtcataacttttcactcgaaggtccgattaaggcgcataatatatcgagacgctcaaaattgaacaatggaagctcttgagcaattcaaatggtcataacttgtcactcggaggtccgattcagctgcataatatatcgagacgctcgaaattgaacaatggaagctcttgagcaattcanatggtcataacttgtcactcgaaggtccgattcaggcgcataatatatcgagacac

SEQ ID NO: 15315 - DNA, 335 bp, Glycine max
  unsure (1)..(335): unsure at all n locations
agtcttgtagcaaattcaaacgacaataactttttactcgggtgtccgattgagttcagtaatatatcgagacacttgaaatagaaaacgaaaacttgtagcaagtgcataccacaatcaattntaactcgtcgcgaaatatgttgagatgctcgaaattgaaaaagaaatttcatagcaaattcaaacgacaataactttttacacggatgttcgattgagtcccgtaatatatcgagatgctccaaattgaaaacggatgctcaaatcatattcagacgacaataactttctacacggatgtctgattgagtcccgtaatatatcgagacgct

SEQ ID NO: 15316 - DNA, 496 bp, Glycine max
  unsure (1)..(496): unsure at all n locations
cactcagcttcgttaattcaccgctcgataataccggtctcatccggattttcgtgtataaagntattgtcatttcaatgtgctcagagcttctagtctncaatttgagcgtctcgatatattacccgattcaatcggacatccgagtaaaaagttattgtcgtttgaatntgatacgagcttccattttcaatttggatcatctctcgataaatcacgacactctgctgggcatccgagtaaaaagttattggcgtttgactcttctaagagtttccattntcaatntggagcgtctccatatattacgggactcaaccagacatccgtgtataatgttattggcattacaattctctcagagcttctagtctcaatttggagcgtctcgatatattacccgattcaatcggacatccgagtaanaagttattgtcgtttgaatctctatgagcttccgtntcaatttcgagcgtctcgatatattacaggactc

SEQ ID NO: 15317 - DNA, 396 bp, Glycine max
  unsure (1)..(396): unsure at all n locations
tcaagtttgtggatagcatccacagcattgttttcacccaaggaaatggtggtcctgacaccatcaagaagatcaccaccattgaaggtcagttaattaatgttacctttaattttttttatttgtaagaataaaagaataaaaaacatgtaccaaaatttacaccaactcatgtacttatatattgttcagctaattgagttagatgctttgattaatattatcattaattaattcaatacaagatattttcttgaacttatatataaacaaaaataactattttcacacagagttataattaaataaatgatattgtaataataatatcattaaataggaatgaagttacttanatgtacttatatttatatttgagtgttagatagagtaact

SEQ ID NO: 15318 - DNA, 311 bp, Glycine max
  unsure (1)..(311): unsure at all n locations
aaacaaatccatgtatggtttanagcaatccnccacgcaatggaataggagacttgatgaatttatggctcacataaagtttcatagaagtcactatgataattgtgtctacttcaaatttccttctaaagtcgagtttgtgatattgctattatatgttgatgatattttgatagcaagtaatagcaagagtaaggctgagaaattgaaatctgagctgagcacggaatttgaaatgaaggatttgggagcagctaagaggatattgngaatagaaatcaaacgggatagaacaaagaaattgtggatct

SEQ ID NO: 15319 - DNA, 353 bp, Glycine max
  unsure (1)..(353): unsure at all n locations
agcttaaaggatgtgaacaaattagcatgggcagaaatgtctccgcattgattggtaaatctgttccccaaattcctgaaaaatgtaaagatccaggtacattcagcataccttgtattatagggaatagtaagtttgacaatgccatgctagatttaggagcttctgttagagctatgcctctgtctatttttaattctctatctctaggtcccttgcagtcaactgatgtggtaattcatttagctaatagaagtgctgcctatcctgttggtttcatagaagatgtcttagttagagttggtgaactgattctccctgttgatttttatattntgaatatggaggatggg

SEQ ID NO: 15320 - DNA, 416 bp, Glycine max
  unsure (1)..(416): unsure at all n locations
cggtgacaaaggcatatgggaggccttacttgcatatgaggtgtttctatgtgaacttctccaccttattagttgtaatttctcacagtggtcttgcctcgatcccttgngtgaagtaatcgattgccattagtaggtatttaactgttcttggggcctttaacagtggtcccagtatgttcattcctcacatggcaaagggccatgaggagctcacactatggagattgtccggaggggtgcatggaatgcttgcaaactcatggcatcatctgcatctctttgtaaagtcaagggtgtttgccctgaatgttggccagtagtagccaacacgcaccacctttgttgaagggatcgtccccagtatggagatcgaatattccatcgtggagtcctctcatgacataatttgctag

SEQ ID NO: 15321 - DNA, 385 bp, Glycine max
  unsure (1)..(385): unsure at all n locations
agttttgtgcaactgaagcatgggaagaagacattctatgctaggcatcattgatttctcaaagaatatcacccaaatcgttggttgaaaaaaacttttaatggaagataggagtttggatttgccccgataccaataacagaaaaaaaaatttatgagcgagtggaggaaatatgtactatctttggaaagacccaaaagaaggatgcaaatgagaaaaacaaatggaaaaagaggtctatattctttgatcttccatattggtttgtcctanatgttagatattgtattgacatgatgcatgtggagaaaaatgtatgtgatagtttaatcagcacacttcttaacattaaaggcaagacaaatgatggtttgaatgctcgtc

SEQ ID NO: 15322 - DNA, 308 bp, Glycine max
  unsure (1)..(308): unsure at all n locations
tcttggatgcctaagtgtggaccctctagggcaatcctccatttccatttattttgagccccatgaatgtcatggcctagcgtagctcatgtgtactacaccttcgagtatggagccccgcgaatgtcatcgtctagctctattagccaattctccattccacacttttatttggagccccatgagtgtcattgcctagcgctgtacatgtgtcctccaccttcaagtctggagctatgcttcatgaatgcctaagngtgaaccctcttgtgcaatgctccattctccacttttattctgagcctcat

SEQ ID NO: 15323 - DNA, 412 bp, Glycine max
  unsure (1)..(412): unsure at all n locations
cactcaagctntctcttttgtgcaactatctcatcctctttttcaggtgtagaatgaagcttgtcttgttttggtgcaggtgctgctactggtggagacacttgaatttggattccagacctcaaggtgatggcactcacattnttcagattctgcacagtttgtcaaggatatttgtcagaattttgngactgagcttgtgtcaattgagtagccatctgccccatctgatttgtcaaactctgaataaaggctcttgtctcttactgacattgcatattctggatggtcatttgcctcactaactcttctaaggaaggttgaggaagagcctcagttgcttggtggatttgttgagactgccgctgtattggaggaggaacatatggcttgcttgtaccagcaacattct

SEQ ID NO: 15324 - DNA, 503 bp, Glycine max
  unsure (1)..(503): unsure at all n locations
cctctctattggggaatcacaactgatggatatgtagcatttgttatgatttagttggtaaggttcctctctaagagcaaaattataatctaagcaagttcggttaggctctcaagtggttgacaagtctcgtttaagtggtctttttggccttggttaacaacaaaatcgagtgttaggtgcaaaaattggaaagctccactacacataatagcagtattatttatttcaatatttgtttttgcattcatggttagtttgcttattntgtctgtgtggctctcttcatttatgaactntgagacttatatgttatgatatatttcatctatttgatgcgatgaactatcangtggaagggtcagcagtccttgcaggcacagagtagaagatccatcttcaaatagagtaccgtgtgatgcattaatggagtaatgtgtttatgtgcttgtgacagtaagtcttgcatgcanggccatgtaaatacctttaatgataactat

SEQ ID NO: 15325 - DNA, 326 bp, Glycine max
gacattcatatatcaagtatcataatattatcataaaacataagaacataaaatatcattattataattcaagtcatttaaacacatgcataataattaatctacacacacacacagttagacaaagtacataaattctctgtaaacatacagtatttgacaatttaaaatgtaatattagaataacattatccaaagtaagcaattcttaaaaaaattatcatgtctttataatctccactaactttaatagtaactttaatagatgaaatgtagctgtattagcagatggataatcatgcatattaatgacttgaatagggata

SEQ ID NO: 15326 - DNA, 398 bp, Glycine max
  unsure (1)..(398): unsure at all n locations
agctttgagaaaattcaaacgacaataactttttactcggatgtctgattgagtcccgaaatatatcgagacgctcgaaattgaataccgaagcgctaagcaaattcaaacgacaaaaactttttactcggatgtctgattgagtcccgtaatatatcgaaaagctcgaatgtgaatgtagaagctctgagcaaattcaaacaacaataactttttactcggatgtctgattgagtcccgtaatatatcgagatgctcgaaatggaataccgaagctctgagcaaattcaaacgataataactttntactcggatgtccgattgagtcccgtaatatatcggaacgctcgaaattgaatgtagaagctctgagcaaattcaacgacaataacttttac

SEQ ID NO: 15327 - DNA, 492 bp, Glycine max
  unsure (1)..(492): unsure at all n locations
gctttcatatattacgggactcaatcggacttcctattaanaagttattgtagtttgaatgtgctcagggcttcggtattccatttcgagcgtctcgatatattacgggactcaatcggacatccgagtaaaaagttattgttgtttgaatgtgctcagagcttcggtattccatttcgagcatctcgatatattacgggactcaatcagacatccgagtaaaaagttattgtagtttgaatttgctcacagcttcggcattccatttcgagcgtctcgatgtattacgggactcaatcagacatccgagtaanaagttattgtcgtttgaatttgctcagagcttctacattcaattgcgagctnttcgatatattacgggactcaatcagacatccgagtaanaaagtatgggtcgttgcaattgctcagagcttcagtattccatttagagcgtctcgatatattacaggactcantcagacatccgag

SEQ ID NO: 15328 - DNA, 519 bp, Glycine max
  unsure (1)..(519): unsure at all n locations
gctatctatgcttttacctcaaattttattttggtgaatttatctatcaaagcattcaccctcaacatttaagagacttgtgagttntaccttctatcaatttacacataacataatttcactttntaaccccaattntttttttggcaaattttaccctgatcttttgttcttactaatggataatgataggaataaagtaagcaagttttcttaaaagtcaagagtaaaatgtgtcaaattaattntttgaaaataaaattcgccacaaaaaattgcgggtaaaaagtgtaattaagccaaattaactactattttcatcttactttttctttgtctttctaaaacaatatatgacaactattattgtgaaacggagggagtaacattatccattcttactaganaannaatattcattcctttgtatattacaagaaatagctatgataaccgaagaaatatgagttntgcttaccatggtattgatatgaagtatctatcacacaagatcatgac

SEQ ID NO: 15329 - DNA, 484 bp, Glycine max
  unsure (1)..(484): unsure at all n locations
atggtatggtatagagaataaaattattatgttgtccctttgttnttcttcttcatcatttctcaattaattntcttccttaacgcatttgcatatgcaggttgagaaccatgaaattgacacacaactgatggngaaggtgaagcagttgatcaatgcatactatgaggaaaacctgaaggaaagcttctaccagtctgagatagccaagaggttggagaaacagcagaacacctctgatatagattgggaaagtaccttcttcatttggcatcgccccacctctaacatcaatgaaatttcaaacatctctcangagctntggtaagtcaatccatatatgttcctttntctttntttttacctacatgtattctcctttagagataattntgattgagacacagttaaacactanatgtgaatatttctccanacatanattcanactttgattaccatgtggtggaaactaacccttatg

SEQ ID NO: 15330 - DNA, 438 bp, Glycine max
  unsure (1)..(438): unsure at all n locations
accccttgaactacttcacattgatttatttggtccctcaagaactatgcgtttatgtggaaattactatggcttagtaatagtagatgattactcaaatttcttggactttgtttttgaaaaccaaaaatgaagcttttgatgattttcacaaacttgccaaggtgattcaaaatgaaaaaggtctcaacattgtttcaattagaagtgatcatggaggtgaatttcaaaatgacttttatgaanaatatgaaattcaccataatttttctgccccaagaacatctcangagactggtgttgtggagaggaaaaatagatccattgaataatgtgcaagagaccttctatatgaaacaagggtacctaagtactatatagaagaatgtatacatacgtatttgttcaccttgaacagagtacttattagacctatct

SEQ ID NO: 15331 - DNA, 417 bp, Glycine max
  unsure (1)..(417): unsure at all n locations
gcttctacattcaatntcgagctnttcgaatattacgggactcaatcggtcttctctattatttagttatcgtagtttgaatttgctcagggcttcggtattccatttcgagcgtctcgatatattacgggactcaatcggacatcagagtaaaaagttattgttgtttgaatttgctcagagcttctgtattccatttcgagcatctcgatatattacgggactcaatcagacatcggagtaaaaagttattgtagtttcaatatgctcagggcttcggtattccatttcgagcgtctcgatgtattacgggactcaatcacacatccgagtaaaaaggtattgtcgtttgaagttgctcagagcttctacattcaatttcgagctgttcgatatattacgggactcaatcagaca

SEQ ID NO: 15332 - DNA, 391 bp, Glycine max
  unsure (1)..(391): unsure at all n locations
agcttgaataagcgatctaagtatttaataatatttagaatatgttttgaattccatctattaattaatagtaataatgttgaagtttaaatctgtatacgttataagttaattaaaccccattatcattattgcaacgaaaaagcattaattaaatgcatttattaggcttaaacattaaatgttgtaattactaaaaaaactaagtatttgttaaatggttttcatattgtcaaagggatttaacttaggttaggttaagcgaacgaattattgtaaatttttttatctttaattcctaagaacaaaanaattaattttatattntaaaattntattattatcataacattgatgggaaactaatacattacttagacattntttatta

SEQ ID NO: 15333 - DNA, 385 bp, Glycine max
agtttaattggttcaggccggtttggacaagtctacgaaggaatgctacaagataatacaagagtagctgtgaaggtgatggatacaacgcatggtgagatttcaaggagctttagaagggaatatcaaattctgaaaaagattaggcacagaaatttaataaggatcatcacaatttgctgtaggccagaatttaatgcccttgtttttcccttgatgccaaatggtagccttgagaagtacctatatccaagccaaaggttggatgtggctcaattggtaagaatctgcagtgatgtagccgatggaatgtcctatctgcaccattactctccagtgaaagtagtgcattgagatcttaagccaagcaatatactccttgatg

SEQ ID NO: 15334 - DNA, 379 bp, Glycine max
  unsure (1)..(379): unsure at all n locations
agttttatatactttccatttttatataataggactatgaaagttttacctgaaatgttgaacatataacaaaaatattgggatatattttacacaaatcatgttggccaagcttcatgcgtatgttttgtactattaagtcaatggcaacatcattatctcctccactcgggatgataatatcagcatactttttagttggcaatacaaaatcttcaaaacttggctttacaaatctggaatactgaacaatcattntgtatttagtcaaggaggactttaaacatttttaaacaaaaacaactttgaataagttatatgctgaaaagaaaagctacaagaatcaataaaaaaatgttcaactaggggattgttagta

SEQ ID NO: 15335 - DNA, 374 bp, Glycine max
agcttctaatctttatacaagaatgaagctctgataccacttgttagacaagtggcctcagatatcttaagaaggggggttgaattaagatattccaaactactttcccaattaaaaaaaactatttcactttttattcaagttatgaattcccttaatgacaatcttcttaaatattgattcaaataaaacaatttgaatatgaatataaagaaataataaataaaggagattaagggaagagaaagtgcaaactcagatttatactggttcggccacacccttgtgcctacgtccagtccccaagcaacccgcttgagagttccactatcttggaaattccttttacaagttctaaacacacaaggacaatc

SEQ ID NO: 15336 - DNA, 414 bp, Glycine max
  unsure (1)..(414): unsure at all n locations
taaatactatgctatttcagagagattatggaagtcaaatcctagtcgtcaagatatatgtggatgataccatattcagtgctactaatgacttgttgtgcgaggattnttccaaacttatgcaggcagagctcgcgatgagtataatgcgagaattgaagatctttgttggacttcaaatcaggcatacaaactatggcatatacacacatcgaaccaagtgcatgagggaacttctgaagaagttgaagatggatgatgaaaaccaaatgataacacttatgcatccaaccactgtacttggactaggcanagaatcatagcgggtggatgaaaagacatacaaagaaatgataggatatcttttgtatgtcattgagtccagacctgacattatgttcagtgtatgcttct

SEQ ID NO: 15337 - DNA, 471 bp, Glycine max
  unsure (1)..(471): unsure at all n locations
actgaacatattctcggatgaaatgatgatcgatgtctatgttctcgtatcgttcatgatgagtanggttggaagcaagacatatagcagatttattatcacaaaatagcatcacagagggcacatcaacttcaaagtaaagaagtaactagcttaacctaacaatttcactagtaacagaagacaacgcatgatattaagcttcactggatgattctgaaacagtgagttgcttcttagaacgcctagagagaagggtgtctcccacataaacacaaaggccagaagtggatcttctggtatcaacacagcgtggccaatcagcatcagcaaatgcagtgaagttgacagagttgtgagcatggaagaacaaaccttgttcaggagcagatctgatatactacagacgaatatgaacaacatgtaggtgacgaactctaagtgctttcatatactgacttaatcgatcac

SEQ ID NO: 15338 - DNA, 491 bp, Glycine max
  unsure (1)..(491): unsure at all n locations
tacctcaatgcnattttcctctatatccatgaagatagctaacatacaccttnggaaagtggttggtgcatttcacaatccanaggatatccttatgtatgtaaaaacatcaaaaggacaagtgaaagtagttntctcttggtctttaagatctactacaanttggttatagccgaaataaccatctaagaagcaataataagcttgtacggccagccgctctaacatctaatccatgaaaggaaggggaaagtgatccatccttgttgccttgttaagaattttataatctatgtacattctccatccggtcattgttgttgtgcgaattaattcattnttctcattcttaacaattgtcatgccacccttcttcagatccacttgcactcaactaacccatgcactatccanaattgngtangtcattctagcttctagaagtttanaacctctttccttaccccttncttcatcacaagaatcaatct

SEQ ID NO: 15339 - DNA, 357 bp, Glycine max
agcttctaggccttgtggagcttcttgcctctactgcttgaactgcacttgcaagcttagcttgaacttcaccagtaacatcatcagggtctggatcacttaatatttctgcattgatatgcatcattggcttcttgcttggatcatgcttgtgcttcatccatgtgttcagcttatcgaattggacatccttactaaaaactattagattcgctcttggatctaagagtttgtatgaccctatgggattgtagccaacaaagatcatgtgttcactcttgtcatccaatttcgcccttgattgatcaggagtatgtcatgaacatgatgaaccacaaactctcatatgcctcacag

SEQ ID NO: 15340 - DNA, 502 bp, Glycine max
  unsure (1)..(502): unsure at all n locations
gctttctctgacacctacattcctatacgatgaaaactntgtttgtatacacacgtattattataaaccctgtctctttatatcaacacggtctatataaaacatctattccttttcaaagatttctttntcctttntcaacatacactcgttgttgtataaaacaattttctttatatacactcattgctcacacaccagaatttcttttcacacattatttatacacacaaaatcttttcatacactgtntatatacaaaaactctnttcttttctttatataagatatgacatttgttcacaacgcctctntctttntctattcttggtgttatcatgatgtttgttcgttntattntaggacgacgttcctaaatgaaaactctacacggttccggaatttaacanacattatcgacaataacgaagtaagcactanagcaacagttcaacataatgtatgcacaaaacanatgacaatcaaaacaacataaacaaac

SEQ ID NO: 15341 - DNA, 484 bp, Glycine max
  unsure (1)..(484): unsure at all n locations
acattgatcttagcactagtctcttccagactatccttgatggngatgggaacacgatccanaagctatgctagctccatcttctcatcttgccttactgttacatacttgaattcttcactcatagagaacaatcgacaaagctctatgtcccccattgtaggcttcaaatgctcgctatatgtggatatggatccgtgtgttatgtagtagtagctggcaatacgacccaagtcagtgacctgaaaatatccactcttcctatcatacttcaccaaattatttctatccaagatggttgcagccgtatgaatctgcaaaatttcagcaagatataaagatcanaatcagccaataaataatataagacaggatgaacaggcaagaaaaanattcaatattgaatatcatcngaaattcatttaagaaaaaatttgaaggagataaatcagactaccaaagaagaccaagaacctatctctaa

SEQ ID NO: 15342 - DNA, 486 bp, Glycine max
  unsure (1)..(486): unsure at all n locations
ggaggaggatgtctctgcacctttacgcanagggccttgttactattataagagaactntggaagggaaggagtatgttcaatattgcaggcgccttatatctgataaccaaaaggtgccatatgtgcatgacatcatgcccacaggacctgaagctcctccggagcatgttattttggatgtgaatgttaaggcacaacatcaccaatactgcaccaatactacagtattggtggctttaaggttagatcatatcattattaatggcattttttctcactttnttctggcttgtttcctgacttccaagttctgacctgctnttattntattccaaacttcacttcttttcaggtcagcccanataacaagttggtagcatacgccgaagacaccaaaggagatgaaatatatactgtatgtcattgatgctgagactcaagctactattggagagcctctttgtggtgaacatcatactttgat

SEQ ID NO: 15343 - DNA, 497 bp, Glycine max
  unsure (1)..(497): unsure at all n locations
cggacctatgatactcagcttggtatctccttcttcactacatcaagaatcaccgggttatgtcttctctgtggctgtcttactggtttagctccatcttctaaatttattcgatgcatacatgtggatgggctaataccaggaatgtccgccagggtccagcctatagccttcttatgcttcttgagaactgacaacaacttctcttcttgctcatcagcaagggaggcagatataatcactggaaaactcttgctatcatccaagtaagcgtattttanatttgatggcaaaggcttcaattctggtgtggtcggctggacagtggtagaaggagatggtttctcagcctttacctcataaagaaagtcagaggtatgtgtacttcctgaaacatggttagtcctatctgactctataaaatcaatctcaagaagtaaaacaccaccaccaggcattcatcaatatcactctcagattactctcacatcaaattc

SEQ ID NO: 15344 - DNA, 390 bp, Glycine max
  unsure (1)..(390): unsure at all n locations
agctngatacaaacccttgctacttttgctatactcgaagctatacgaatcatgcctttctttgctactcactctcatataaggatacttcagatggtcgctaaaagtgccgtcttanatggccttatcgaataggcgatatatgctcgacaacctcttgggtttgaagatcgtactcttacacaccatgctttcacacttaacaatgctttgtatggcctataacacgaaccacacgcttggagagacagactgtgttcattgctcttagaaacggtgttattaaagtcacaacggatacctctctctctaaatgacaagttggcaccgaattcattctagactcaatttatgttgatgatagtcttgttgaagctactaacgaatctc

SEQ ID NO: 15345 - DNA, 423 bp, Glycine max
  unsure (1)..(423): unsure at all n locations
agcttcaagattaagatggcctcagcaaattccttatttccagaagggaattctatcaatagacctccaatctttaatggagagggttaccactactggaaaacccgaatgcaaatttttatcgaggcaatagatctaaatatctgggaagccattgaaatagggccttatatacccaccacagtagaaagagtttcaatagatggtagttcatcaagtgaaagcataaccatagaaaaacctagagatagatggtcagaagaggatagaaaacgagtacaatacaacctanaagccaaaaacataataacatctgccctaggaatggatgaatatttcagagtttcaaattgcaagagtgctaatganatgtgggacactcttcgataacacatgaaggaactacagatgtttaaagatcta

SEQ ID NO: 15346 - DNA, 441 bp, Glycine max
  unsure (1)..(441): unsure at all n locations
tactcaagctnttatcattgcttagaataggatagtacgatttcatacattgtaatctctctgttgatgagtggcccattcaaaagtgccatatgtctatgggaaggatattgcacttacggtgaacaacggttgaacatatagtctttggggttagctggtctggtattagatgataaagaccatgtctcgcttcaattataccaatcttcatacgtttgttcgtatcctgcaacatgcatgaattggaagaaaatatcaatgcacagtcagtagatgacacgagttttgaaatggaaataatattgaaagcgaatgtgggtcttaataatacattaaacagcgttatattgggtgagaggtgtacgacttcggaatgagtaacgtggacatgatggccgttatgaagctttactgtgactgggttgatgcattcatatg

SEQ ID NO: 15347 - DNA, 431 bp, Glycine max
  unsure (1)..(431): unsure at all n locations
agctntgagcaaattcaaacgacaataacttttgagtcggatgttcgattgtgtcccgtaggatatcgagacgctcgtaattgaaaacggaagctctgagaaaaatcaaacgacaataacttttaactcggatgtccgattgaaccctgtaatatatcgagacgctcgaaattgaaaacggaagctctaagaaaagtcaaacgacaataacttttgactcggatgtccgatatagtctcgtaatatatcgagacgctcgtaattgaaaaccgaagctcttagcaaattcaaacgacaataacttttgacacggatgtccaattgagtctcgtaggatatcgagacgctcataattganaacgaaagctctatgaacagtcaaatgacaataactntcaattcggatgtctgattgactcccgtaatatatc

SEQ ID NO: 15348 - DNA, 334 bp, Glycine max
  unsure (1)..(334): unsure at all n locations
ctggaactacttcacatggacttgatggngcctatgcaagttgaaagccttggaggaaagaggtatgcctatgttgttgtggatgatttctccagatttacctgngtcaactntatcagagagaaatcagaaacctttgaagtattcaaagagttgagtctaagacttcaaagagaaaaggattgtgtcatcaagagaatcaggagtgaccatggcagagaatttgaaaacagcaggttcactgaattctgcacatctgaaggcatcactcatgagttctctgcagccattacaccacaacagaatggcatagttgaaaggaaaaacaggactc

SEQ ID NO: 15349 - DNA, 316 bp, Glycine max
ggatatccatctaaatccagagcatgcaccaaaatcatattcaaacgcatatccggcacatgttgcatgcccttcaatcttagtgtgccaccattattggtttgaatgcacacatcaccaatcccaacaatgtttgtaatgctactattgaccatgttcacttttccaaagtctcctgctttatacgtagtaaagaattccttgttggaagtggcatgataagatgatgttgagtcaatgacccattcaacacatgaatatgaaacacggcactattcatcttccacagagatcctgtgggtacaagtgtgaagtg

SEQ ID NO: 15350 - DNA, 344 bp, Glycine max
tgctctattcaatgggagtgacaagaatatcttcagactgatcaacacatgcacagtggccacagatgcctgggagatcctgaaaaccactcatgaaagaacctccaaagtgaagatgtccagatggcaactattgggcacaaacatcgaaaatcttaagatgaaggaggaagagtgtattcatgacttccacatgaacattcttgaaattgccaatgcttgcactggcttgggagaaagaatgacagatgaaaagctggtgagaaagatcctcagatctttgcctaagagatctgacatgaaagtcactgcaatagatgaggcccatgacatttgccacatga

SEQ ID NO: 15351 - DNA, 429 bp, Glycine max
  unsure (1)..(429): unsure at all n locations
agcttggcaaacatagctggcacagaaaggatatctcctctagatagaagcataatatcatctgcaaaagccatatgagatagttgaatacctgcacagttgggatgaaatttaaaattggcatcatccttgaggctgctcatatctctagaaaagtactccaaacaaagcacaaacagataaggggagagaggatccccttgtctaagaccccgctgccctttgaagtggccataaatggatccattgactgccacactaaaggaagtggaagaaacacattccatgatctaagtacagaactgggctgggaagccaatggacttaatcatccaatccaagaattcccaggaaatggaatcataagctntatgcaagtcaattttcagtaggcactcgacgtgtattttcaaacaataataatgtgtg

SEQ ID NO: 15352 - DNA, 396 bp, Glycine max
  unsure (1)..(396): unsure at all n locations
agctttctattctaacctcgaaattcaagagagcactttgattnttgaggtttatgggataaaaatggtcattgaccaatccctattctatgacttgacccaattatctagtgagggtgtaccatttgaaggtgcattgaatgatgattggaaatttgatttctctgtgcatgatgcccaccggttggtttgcaccaatcaagcggatataaccgaaaggcttattgccggatcattggctnttgaaagccgcatccttcactatctcattgtgcgtattttacctccaagatcttcaaaccttgcacaagtttctgaagaagatcttattgttatgtgagcttttcataccggccgaanaattgattggacacacttaatccgatatcgcatgca

SEQ ID NO: 15353 - DNA, 413 bp, Glycine max
  unsure (1)..(413): unsure at all n locations
agcttggcctatcccacatcacatgttaggtgcaatgcaattgcatacaaatgctgacttttccttttaaaaaaataataaaacaaagatatttgcgggtcccatgttgctcaaaacgtttcgttntcagttgtcacatcttctgtaggtacatgaacatgtcctgcaagggcgagagctggcccatttgatactgaacagtgccaaaaaggtaatcatccacggaaaggttattatcgtccaagtaattaaactgaagatcaaacgcgttntctagctntaggtccagatcatcgttccacttggtgtcgctctgcacctgcctctcgcacgtgacatcgggcgaaaccacgtgctccgaactgctcgaagtcgtgttcaaccttggcaccgaatccgaagtctacatgtac

SEQ ID NO: 15354 - DNA, 416 bp, Glycine max
  unsure (1)..(416): unsure at all n locations
agctttaactatttatggactggttgtagcattagcacttttatttgctaatccttttgtttaatcctaaaaaaatagaaatacatantcctttttccgtggacttgctttaccggtcttgctttttcgaattctatttatattaatatttcactcctataattctttatccgttcggacaagaacacaggggaaggactaattgaaaggtgaagaattcacatactgattcgccctctttcttctctttcttagtccaatgacccccccttctttttaagataattattctcaagtgttaaaacttgagagatcttgcaatggatataagaactggtatctaattcgaataagtatcattcttttgggaatccttcaattgattgaccatccaaatatatatggaatatatatat

SEQ ID NO: 15355 - DNA, 447 bp, Glycine max
tcttacaaagcatacggctttctggatgtagatgatgatatctatacagatggatcttatatatctatatatctatagatagatatatagatatagatatatagatatagatcatacaatgaagtaccgcacgagtgggtatataggaatccaaatctgccgaatcactcatgttatgatcttctacatcctaggtcttcccgttccttcatctggcttatgttcttcatgtagcattcagactgaatgactctatgaaattacgtcgctacttccacatggtacgggtaacgtaggagacatctctatttttccggggggaatccttatattaccacagcttaactttcattcgcctctgacatcacatgaaaggataacccgcctccctcttgaaatttaaacaaaggtgttcggtctgtcgtgttgaacaatttgctttcatat

SEQ ID NO: 15356 - DNA, 407 bp, Glycine max
  unsure (1)..(407): unsure at all n locations
agcttgagcttgacttgtttaactcatttataacttatgatttttgcttttacaatttgttaaattattttttaactttatcgattaagcatttgataattattttaataccagataattatttactacttaaaaaatgtgcttaacatgtgatatgtggaattaaatctttttagactattaaaatagttcatagcttattgacctttacaaaaaagaaacttcanaatcaatttaacattctcaacaaagttcaaattacatattttcataatcaatatataaataacaaagaccaataaaatcttcatcaattnttgtatcaactaaatcatttagacctcaatgaaacatanacaacaacacctttcatgttttctaatttcaactaaaaaatgataaatagt

SEQ ID NO: 15357 - DNA, 432 bp, Glycine max
  unsure (1)..(432): unsure at all n locations
agcttaaccaatgganaaagagtcatcttaccttcaacgtttgttgggagcccacgttatatgaatcaactttactttgatggtatggcaatatgcagtcatgttggttttccaaatctttntattactctaacctgtaatccaaattggcttgaaattcgtagattactttcagctttgaatctcanaccaacagacagaccagacattgtatcacgaattttcagattaaaatatgaacacatgctgtcaaacttaacaaagggtcaattactgggaaaagtggtgcatgtaagttgactattcattttatacttaaatacaaatataagttgcttatttggccattnttctttgttctataatgcagatattaatggctaanatattacaatntagccaacacttttatagatatgagatacagaatta

SEQ ID NO: 15358 - DNA, 307 bp, Glycine max
tctcgtagtacccctccacgtcattcccaaacaccgacgcgagccccatcccgtgataaccacgtgcttcttcgggtccttctgccactacggggcggacaccttcggcgccactgtggcggacacgaagaacacgcgcttcgcaaaggaggcgcatcgcttggcggcggcattgttggggccccgaagagggtccaagggagaaccgcggagggtgatgatcatggaaggccaggttgttcgttagagcctcgatggcgccgccgcctcgcatggtggttcccgcggtggtttgggggttggagat

SEQ ID NO: 15359 - DNA, 396 bp, Glycine max
tagcttaagcttcttcaactgcacaaggctcttaatatttgaagagtatccttatggaaccttcacctgacacagatactgacaaaaaattatcttctcctttttggacaaagtatgacaatccgggggcaagtaaatcttctttccatcagaccttgtatgcaactgtgatcgtatccccatgtcagctagatcttgacgagtattcaagccatccttcttcttgccttgaatgttaaggagcatcccaatcacactgtcacatacatttatctccacatgcataacatcaatacaatgtctaacgtccagatcaaaccagtacgggagatcaaagataatggacctcttcttcatatgcaagtcttactcttaatcttcttttgggactttcca

SEQ ID NO: 15360 - DNA, 417 bp, Glycine max
  unsure (1)..(417): unsure at all n locations
agcttgtaggcctaggatcttcatcaatggattccttttctttttggaagatgaatggcagcagaatggagaaggaagagagagaggagacgccacttcaaggagaagatgagtctagaagaagctcaccaccataggaggccatggataagagcttggaggaagaaggagatgaatgaagggagaggaagagaatagcacgaaattntatgctctaaaagagctctgaaatctgaagtttaattttcaaattatcaaagttgaaaaaatgcacacacatgacctctatttatagcctaagtgtcacacaaaattggagggaaatttgaatttctattcanatttcacttgaatttgaaattgaatntatggagccaaattttggagccaaaatttcactaattatgattagttaat

SEQ ID NO: 15361 - DNA, 384 bp, Glycine max
cactgtatagactgctggttttatgtattacagaccaagcgatgtgaagtgttaaccgcgcatattggtaagactgacaatctcttctcttctttttcttctcattcctctcagtcgaattcttcaactgaaaaataataggaaaaattccgtcaatacaaatttgcaaggtagaagagaatatataaaaaggttgttgcttaacgatcagactcaccataataacaagaatccggacaaaaactgcgaccaaatcggtaaacaaggtcaaggcatgctgtacatagtccagatcgcccaagtgtgccctctcaacctattcttgggtgtctactacaatgtaacctacaaacaccaatagcccaaagtacaactgcaacacca

SEQ ID NO: 15362 - DNA, 348 bp, Glycine max
  unsure (1)..(348): unsure at all n locations
agctnttgaacctactatgtgattttcagtcagttgagcacccgtcacattcatgcgaaaaaatctgggaaattgctaatgaagaacttggaaatatagacccatacagtctctttactcctccgtgccaacatgctaatgttagccagttaagtcggctggtgagaagaaagcatgtgagtggtaacattttaaattttttagtatactatacagggcctgtaacgggtttgtgatgcagatcattattaatgatgtgttatgcttatgtcatgctacaaagaattggtagactcagtgcagagtatgatccatgcactgaanagcactccattgtatacttcaatc

SEQ ID NO: 15363 - DNA, 439 bp, Glycine max
  unsure (1)..(439): unsure at all n locations
tagaatanatgtgaactgcgtacnctntggtaagaacctccataagttgactntgtgaaggtgcatatggagtacaaatcaagcagcaattgagcttttccttgataaaatgtttgtaaacttctacatgctttgttcgagcatgctaaacaggattatgagctatgctgatagttgatttattatcacagtatggtttcattggtccatcccattcaatcttcaagttctttatggacacaccaaattgactttttaatcgttgagaagatattntaaaagacattgctttcttcagatttttgtttaagaacaaaacccaagtgatctgggtacaatcatcaataaaagtcataaaccagcaagcccctgaatattttgaataggagatggccctcanacatcagtatgaacagaataaagaggaaatatacttttc

SEQ ID NO: 15364 - DNA, 383 bp, Glycine max
tgagggaaaacttgatgcattggtcaacctagttactcagctttccatgaatcagaaatttgcatctacgcctgttgcaagagtatgtggtctatgttcttctgcagatcaccatacagatctctgtccttctttgtagcaatctggagtcaatgagcaacctgaagcttatgctgcaaacatttataatagaccctctcagtagcaaaaccaacaacagtagaataattatgatctttcaagcaacagatacaatccaggttggaggaatcatccaaatctgagatggacaagtcctccataacaataacagcatgtcccttcctgtcagaatgctgctggtcctagcaagccatatgttcctcctccaatgcagcaacaac

SEQ ID NO: 15365 - DNA, 462 bp, Glycine max
  unsure (1)..(462): unsure at all n locations
tcaacatcagaccacttccagggtgctggaactacttcacatggatttgatggngcctatgcaagttgaaagccttggaggaaagaggtatgcctatgttgttgtggatgatttctccagatttacctgngtcaactntatcagagagaaatcagaaacctttgaagtattcaaggagttgagtctaagacttcaaagagaaaaagactgtgtaatcaagagaatcaggagtgaccatggcagagaatttgaaaacagcaggttcactgaattctgcacatctgaaggcatcactcatgagttctctgcagccattacaccacaacagaatggcatagttgagaggaataacaggaccttgcaagaagctgctanggtcatgctccatgccaaagaacttccctataatctctgggctgaagccatgaacacagcatgctacatccacaacagagtcacact

SEQ ID NO: 15366 - DNA, 442 bp, Glycine max
tgaaggacatgcacaaagtgtgactatatgatgtggcaatggtgtgtatcaagcaaatgctcacctcccccttaggctggaccaaactttaattgggttgggcttctcccaattcaattaaatttatctcccaacacacatcaaatagggcacttaatgcatgtgaaattacaaaactacccctaatccagaaactagtctaggtgccctataatacaagagctaaaaaatcctacattactagggtaccctccctacactatggagccctaaatacaagtcccaaaaataatgaaatcctaatctaatatgtacaaagataagtggtctcatacttagcccatggacccaatcttcttggagtcttctatccaataccctcgagggatagtgatgtagctccatgtggagcttgagaaccttgatcttcttcatcaatgga

SEQ ID NO: 15367 - DNA, 428 bp, Glycine max
  unsure (1)..(428): unsure at all n locations
tctggtgggacatcttgacttgctgtccaatctgacattcaccacagattctgccttcttctattttcagattgggaatgcctctaacagcacctttgtcaatgattttcttcatgcctcttaagtgcagatgtccaaatctttgatgccatattttgacttcatcttctttggagaatagacatgtggaggagtaactggtttcttgaggtgtccataggtaacagttgtcctttgatctgctgcccttcattaagacttcactcttctcatttgtcaccaagcattctgactttgtgaagtttacattgaatccttcatcacacatacgactgatgctgatcaagttcgcagtcagtcccttcaccagcagtactttgttcagactangaagtccatcatggactagctttcccattccagtgatc

SEQ ID NO: 15368 - DNA, 317 bp, Glycine max
cgccttataacggtcctctttgcttatattggttaaaatggaccattcaaagcataaaatcaacatataaatttatcgcttttgcaagaactacgtaggtatgattttctcatcacaattgaggatacgtaggagcaaaagccccacttttgtcgaccaccccaagagatcgttaattatccaacgccttaacgcttctctcatttcaaaaatcaagagatcattaatggtccaacgccttaatgtttctctcctttcaaaaccaagaaattgttaatggtccaaacgccttaacgtttctctccttttcaaaaatc

SEQ ID NO: 15369 - DNA, 436 bp, Glycine max
  unsure (1)..(436): unsure at all n locations
agcttgcacttggaaataaagatagtatctgaataatttaaactacacagcttcaaaagctcagcagactgttgtttcaatataggattgcaaccactctgaatcacgagcaggagtttcgcagcaagccctgcatcaaccgcaatcgacgagcactcatcaggtgaaagcttgcacacggaccatagaatcgacaaagcatactgagtgcagttttctgagatcctcatcaacagcttcaccatgatgggtatggtgttagagcaatccttcaaagccactctaccttcggngaccgacgccaacgcatccaaaacacanagggccaattccgtacaatcaggctccatgccagacaacaattcaaccaactgagaaacagccccaatgctcacaagcaaattcctaacttccttatgcanacanattgttctga

SEQ ID NO: 15370 - DNA, 429 bp, Glycine max
  unsure (1)..(429): unsure at all n locations
tcttttaccgtaagagatgtgttccanattatctagctatcacaatcatgttgaaagctaaccaattgattctgaacatgtacttcccaatcagtggtgacaagggtgacagcattaaagcatcatacctccatcatctggatctattgaagaagagtgccgcagttgcagagatcacgagaaagttctcaacaaatgagaacactnttacagtangagggtcttttgctgttgaccctctgacacaggtcanagcaaggctcaacaatcatggaaagctcggggccctcctgcagcacgagatcataccanagtcagtgtttactgtttctggtgagattgacaccaanggccctgataaaaatcccaggtttggattgcaattgccctcaaccttgaggttttattcatttttagaaagtgatcgag

SEQ ID NO: 15371 - DNA, 428 bp, Glycine max
gcacctcttaatgaaattgtttaagaaaaaatgtggggtttaaatgggggagaaacaagagcatgcatttactgcactcaaaggaaaattgactcatgtacctattcttgtattacctaattttaccaaatcttttgaaattgaatgtgatgcatccaatgtggggataagggctgttttaatgcaagaatgacatctcattgcttattttattgaaaaattgaatgagggtgtgcttaattattctacatatgacaaagagttttatgcattggtaagggcattacaaacttgacaacattaccttttgcctaaagtatttgtcattcatagtgattatgagtccttgaagccattaatacgacaagacaagctgagcaagagatatgtcaagtgggttgagtttcttgataatttcctacatgatc

SEQ ID NO: 15372 - DNA, 408 bp, Glycine max
  unsure (1)..(408): unsure at all n locations
agctnttatccatggcctcctatggtggtgagcttcttctagactcatcttctccttgaagtggcgtctcctctctctcttccttctccatttcgctgccattcatcatccaagaagtaaaggaatccattgacgaagaagatcctaggcctacaagctccaatggagcttacatcacaacagttcttcttaatgtangccaagttaatggctgtgcttaagctctcgtaggtcagactatcagtggtaactcctctagctctacttagagtagtggtcaaggctangaattcgagcctaaaggagttactttgggcaatggtagaaatctgacctgagaatanggctccaaagttcatgtccatgcccgtgactaatccgtacaccaacccggctctgtccatatta

SEQ ID NO: 15373 - DNA, 274 bp, Glycine max
tgaaggacatgcgcctactgtgaatatatcatgtggccctgtcgtgaatcagacatatgctcaccttccactcatgctgcagcacactttaatagcactgggctactgccaattcaattatagttatctactaacacacctcagatacggcacttactgcatgtgagtatcactaaactacccatagaccggagactactctatgagccctatagtaccacatctaatggaaaatacattactaggcgaccctccctactctatggagccctag

SEQ ID NO: 15374 - DNA, 346 bp, Glycine max
  unsure (1)..(346): unsure at all n locations
taatatatcgagactctcgaaattgaacaacggaagctatcgagaaattcaaatggtcaatacttcgaactcggaggtcctattaaggtgcataatatatctaaacgctcaaaattttacaatggaagctctttggctatacaaatggtcataacttttcactcgaaggtccgattaaggcgcataatatatcgagacgctcagaattgaacaatggaagctcttgagcaattcaaatggtcataacttgtcactcngaggtccgattcagctgcataatatatcgtgacgctcgaaatngaacaatggaagctcttgagcaattcaaatggtcataacttgtcac

SEQ ID NO: 15375 - DNA, 465 bp, Glycine max
tgtccaaagattggttcattaacttattcttggacaaaaactggttcttgagccacaatcattagaggtgataacctttatgttaacttcaaaacattaaaggtcttttagtgtccatcccatgttcgtgatttgttatttaattggaaacttgagcttcatcaagtttaatcatttttccatgactagctctacaagaagtttcctttttagaaatgttactcgtcttgccacaagcactgtatggtcagaaggttggtataaacaatatttcataatttctttgggatacccaatgagtctacatttctcataccttggctcaagtgtgtctatttgcaatctcttaatgtaagtgggacaatcccaagccttggtgcgtttgagattcattctagccctttccatatcacatatggagttgtacatatacttttctaagacatgatgtatcacatacacttt

SEQ ID NO: 15376 - DNA, 387 bp, Glycine max
  unsure (1)..(387): unsure at all n locations
agcttcttagtctcagatgatgcagctgagtttgtagctacctcatgcactcctctaatgactatggcatcatttctggcgctaaactgctgagagttggaagccatcttctcaattaaatttctggcttcagcaggagtcatgtctccaagggctccaccactggcagcatctatcatacttctctccatattactgagtccttcataaaaatattggagaagaagctgctccgaaatctgatggtgagggcaactggcacatagttttttaaatcgctcccagtactcatacaggctctctccactgagttgtctaatacctgagatatctttcttgatggctgtggtcctggaagcanggaaaatttttctaagatactctctt

SEQ ID NO: 15377 - DNA, 367 bp, Glycine max
  unsure (1)..(367): unsure at all n locations
gagcttgacaagctgccatagcagcaacaacatattctgcttcacatgttgacaaaacaactagactttgcttctttgagcaccaagagattggtgatgttccaaatttgaaaacatacccagcagtgcttttcctgtcatccttatcaccacaccaatctgaatcactataaccaaacaattttccttctatattcttctgactgtaaagatataaaatgccaagatccaatgttcctttcacatacctcagaatcctctttgctgcctggaagtgaggtgtcttggtttctccataaacctgcttatcaacccaacacaataggcaatgtcaggtctggtgttacatangtacctcaatgagtct

SEQ ID NO: 15378 - DNA, 434 bp, Glycine max
  unsure (1)..(434): unsure at all n locations
agcttgaaggtaaactagatgccttggttaacctggtaacccaactggccatgaatcaaaaatctgcacctgtcgccagactctgtggtttatgctcctctctcgaccaccacacagacctttgcccttctgtgcaacaatctgaaccaattgaacagcctgaagcttatgctgcaaacatctacaacagacctcttcaacctcaatagcaaaatcagccacaacagaataattatgacctctccagcaacaggtacaatcccggatggaggaatcatcctaaccttagatggttgaatccttcacaacagcagcagcaacaacaacatacttattttcaaaatgctgctggcccaagcagaccatacgttcttncaccaatccagcagcaacagccccagaaacagcaaacagttgaggcccctccgcatcct

SEQ ID NO: 15379 - DNA, 465 bp, Glycine max
  unsure (1)..(465): unsure at all n locations
tcttggggttgcaacagggactaggactatggaccaattccatatttggcaaaggcatcataattggaattctggacaccggcataacccctgaccacctttcgttcaatgatgaaggaatgccactcccaccggcaaaatggaatggccgctgtgaattcactggggagaagacttgcaacaacaagctcattggtgcaagaaattttgtcaaaaacccaaactcaacccttccactggatgatgtangtcatgggacccacacagccagcacagctgcaggaagacttgtgcagggtgctagtgtctttggcaatgctaagggttcagcagttggtatggcaccagatgcacactntgtaatttacaaggtttgtgacctctntgattgttccgaaagtgcaatactagctggaatgggcactgcaatacctcacttggaggaccatctgttcctttctttga

SEQ ID NO: 15380 - DNA, 433 bp, Glycine max
  unsure (1)..(433): unsure at all n locations
agctntgagccaattcaaacgacaataactttttactcggatgtctgattcagtcccgtaatatatcgagacgctcaaaattgaatgttgaacctctgagcaaatgcaaacgaaaataattttttcttggatgtctttttgagtcccgtaatatatcgacacgctcgaaattgaatgttgaagctctgagcaaattcaaacgataataactttttactcggatgtctgattgagtgctgtaatatatcgagacgctcaaaattgaatgttgaacctctgagcaaatgcaaacgacaataatttttttctcggatgtctttttgagtcccgtaatataacgagacgctcaaaattgaatgttgaacctctgagcaaattcaaacggcaataacttntttctcgaatgtttgattgagtcccgtaatatatcgac

SEQ ID NO: 15381 - DNA, 123 bp, Glycine max
gctgaagtttcttttggtgaaggaaccatggaaaagcagagcgtttggaatggtttaaccaatttctgagaactgttgggggatgctgaaaacgagattatcacgaatatataagtttgaatg

SEQ ID NO: 15382 - DNA, 390 bp, Glycine max
  unsure (1)..(390): unsure at all n locations
agcttgtgctcctgattgtccacaaactgtggcttcgtaatttgcagcagaattgcagaaaatgccctgaagtagcacttcagaaaatttaagtactcagcagtgtgagctatctcaagactatccctaacctccatcaccatctgcagtcttgccggaatcgctgttttcaaccagaaacacaaaaacaaaaacaaaaaaattaagcaaaaacaaaacactaaatgtcaaaacaacgaatactgaaagcacttaaatgccaatacatcacaggcatagttgaatccattntcctacgacaaaagaacatganaataagcactaaatgtanaaacaacaaaaactggaagtgcttaaatgtcaatacaacagaggcatangtgaatccat

SEQ ID NO: 15383 - DNA, 465 bp, Glycine max
  unsure (1)..(465): unsure at all n locations
tgccattcactngnacttttatattattctattctattaagtttttnttagaagattgttttattaaggttaatttagtggtaaatgaataattttatgaattacaagtttaaatttctgccataatatacaaaaaagtatatatattttattagagattntatgtcgaattgtaatatacataaaataaagtatataaattgaaaataacttttatatttagaggtaatttttaagattaagctagaatcaatccgaaattgttggattgtataacaatttatcatagtaattattgtttggctaataaggctcttccccttattggattattattagatcactctcgattgtgtaatcttataatttcacgctctaaatatnttttttccacgtgaaaatagtgtatgagagagctcacattaattagtaatgtgattagagtanaacatatatgtagaggat

SEQ ID NO: 15384 - DNA, 413 bp, Glycine max
  unsure (1)..(413): unsure at all n locations
agcttgataggttcaagtgcaggtgctgctactggtggaggcacttcaatttgcttgaaaagggttntgaatttgaattttgaacatgtaatcgattaccatatgtctgtaatcgattaccagcaacgaaactcctgatattcaaattcaaaagtcatgacccttcaaattataactgtgtaatcgattatacagacattgtaatcgattaccagtgaagagatttcagaaaatctgtcaacagtcacatattttcattggatttatgaatggccatcaaaggcctataaataggtgacttgngctcgaattntatgagagagttntgctggtccaaaatgtcttatcctctcanaagaaaatgagagagattccaagagaacttcattgccaaatgctctctcaagaagtct

SEQ ID NO: 15385 - DNA, 418 bp, Glycine max
  unsure (1)..(418): unsure at all n locations
agcttgtaacataacaggtaattganattttttttttaaaaaaagctaaagcattactcttctcgtagattgtgatcgaaggaaatctacacaaatctggcgtccacctaaccgcttcccgttcatgactttcatcgcccgagcagcagcatccagattgagaaactcaacacacgcagtgccgcggtctataaagaacttaaaatcctcaatcttaccgaatttgcgaaattccgcttccaaatcttcccttgcaacagtgggactaaaaccacccacccacaattgtttgcacggctttgcctgaaacacacaattcatttaattaattaattaattattctcaacagaaagccacattgtgaaatanattatatataaaaaagcgttntcagtttggacacacaaaccggtctgg

SEQ ID NO: 15386 - DNA, 440 bp, Glycine max
  unsure (1)..(440): unsure at all n locations
agcttctatataaggtttgttcctaatttctctacaattgcatcacctctcaatgagctggtgaagaagaatgtggcatttacctgtggtgaaaaacaagagcaagccttttctttgctcaaagaaaagcttactaaggcacctgttctagctcttcctgacttttctaaaacttttgagctagaatgtgatgcctctggagtgggagttggagctgtattgttacaaggtgggcaccctatttcttattntagtgaanaacttcatagtgccgccctcaactaccccacctatgataaagagctttatgccttaataagagccctccanacttgggaacattaccttgtttccaaggaatttgtcattcatagtgatcattaatcacttaagtacattagagggcaaaacaagttaaacaagaggcatgcataatgggt

SEQ ID NO: 15387 - DNA, 431 bp, Glycine max
  unsure (1)..(431): unsure at all n locations
agcttagagtttctggtagttcattaaatacttgtttcatttcctccaagctcatattttccaaaacggagggtctaggggcaaccctcacaatttcactaccttttggttcctgaactcgtgcgtcggctttaatgactagttcggaattagagtttgcaccacattttattataaatggtgaggacgagcctgtattaaattggagtacattccactgtgcaacgtcagtttcagatccagagcccagatctgttgatggcttgcgaccatgaganatatcttgaatggngtcatcttcttcaggaattgactgtatgataacaaaataaaggatttgggcatcaaagaaaatcaatccanattcattntcatcagtgcagttctttagcatatacctaagctatagtcacaaacagcaaagtaatcaa

SEQ ID NO: 15388 - DNA, 439 bp, Glycine max
  unsure (1)..(439): unsure at all n locations
agctntgagcttattcatacgacaataactntntactcggatgtctgattgtgtctcgtaatatatcgagttgctcgaaatggaattccgaagctctgagcanattcaaacgacaataactntttactcggatgtctgattgagtcccgtaatatatcgatttgctcgaaatggaattccgaagctctgagcaaattcaaacgacaataattttttactcggatgtctgatttagtcctgtaatatatcgagcttctcgaaatggaattccgaagctccgagcanattcanacgacaataattttttactcggatgtctgatttagtcctgtaatatatcgactgtctcgaaatggaattccgaagctctgagcaaattcaaacgacaataactttttactcggatgtctgatttagtcctgtaatatatcgagattct

SEQ ID NO: 15389 - DNA, 428 bp, Glycine max
  unsure (1)..(428): unsure at all n locations
agcttcttattactcttggtcactaggtcacaagatcaactaggctctaataattcttctaacctagggtggtgactcactctttagaccgataattcttttaatcatactcttaaaagagcaaacaaatttctaatttataaaatatatctttaattctaaacaacatcctanaagtaagacaatatctttttttaaatctacataatattctagagatttaaaattataaatttaaattatttcctaaccgttatgacaagattatagattggctatttagccatggattgattgccaagacaatattactattgaaggagaaattttttttacaaaaatactatgattccacatcttaatcataataatttaatttaaatattctttaattnttaattcttgtttctcttctacacgaataaatc

SEQ ID NO: 15390 - DNA, 441 bp, Glycine max
  unsure (1)..(441): unsure at all n locations
agcttgctaaaccatggaagttcctaatatctcccacattttttggggtgggccattcttggatggccttgattntcttagggtccacttggaccccatttttaccaactacaaacccaaagaaatacacaaaaggtacacttctctatatttgcatagagggtgtttttcctaaggactgaatgaacttgcctgagatgtcctaagtgatcatctangctcctgctgtacactaaaatatcatcaaaataaaaaactacaaatctacctatgaaatcccttaagacatgatgcataagcctcataaaggtgcttggtgcattagtgagcccaaaaggcatcactagccattcatacaaaccanacttggtcttgaaagcagttttccactcatcaccctttntcatcctgattnggtgataaccacttttaagatcaatt

SEQ ID NO: 15391 - DNA, 400 bp, Glycine max
  unsure (1)..(400): unsure at all n locations
agcttgttatgtccattcctaaggccacatacgttgttatatatttctttcatatataaatatattatatatatttaataatcatctaacaatcatttatatcactcatcataaatcatatttgatataattntaagaataattatcataaaaattaataaatctatcatacatgatataattaaataataatatataattattttacactatcaatacataatctattttatcatattatattatgcccccataatatctttatactcttttccagcgggcacacttaattctggttttcaatagacatgaggatcagtggacgtgcggaataagtgtcattcccttactctcaggaaacagccatatatatcgcgatgatccaaactatcatatctat

SEQ ID NO: 15392 - DNA, 271 bp, Glycine max
  unsure (1)..(271): unsure at all n locations
agcttcggtattccatttcgagcgtctcgatatattacgagactcaattggacatccgagtaaaaatttattgtcgtttgaatttgatcagagcttcaacattcaatttcgagcatctcgatatattacgggactcaatcagacatccgagtaacaagttattgtcgttngaatttgctcagagcttctacattcaatttcgagcgtttcgatatattacgggactcaatcggacatccgagtaaatagttattgtcagttgaatttgctc

SEQ ID NO: 15393 - DNA, 441 bp, Glycine max
  unsure (1)..(441): unsure at all n locations
agcttgcctttagttgtccaggaaggacaaggcagccgaaggaactagttccgctccggagtatgacagtcaccgctttaggagcgctgtacaccagcagcgcttcgaggccatcaagggatggtcgtttctccgggagcgacgcgtccagctcagggacgacgagtatactgatttccaggaggaaatagctctacggagttttaaaagattggctaagattttgttaaaacataagcacttagacaatgaaggaaagctggagttgctgcacatgatgtccaacgttatgtcaaggaataagatcgggctgcacaatgcacaaggcaagataaaatgtcaaatgaagaattgaagttgcaggatccacgatgtcggatacaatgtcctgacatcctgcccganaatactggagttgctgacaatgcataagtcaagata

SEQ ID NO: 15394 - DNA, 427 bp, Glycine max
  unsure (1)..(427): unsure at all n locations
agctntgcttctacacaaatgattaaatgcatganaaacaaactaagataacagaaattataattgggttgcctcccaggaagcacttctttaacgtcattagcttggcacttttacctcactgngtgatcttatgttttggttcgtactttcagaacctcttgacctcttaccattacctgtaagcaaacattgtgttttggagcaggcttatcttcaaaaaataaatcaaaatcaattttatgatcttcaaaacctagctccagcttcctcttccccatatcaactatgcagcttgcggtcaacatgaatggccttccaaatattacagggatgccagtatctntagagatatccattaccacaaagtctgccgggaagataaaatgttntactctgaccaacacatcttcaattactccatatg

SEQ ID NO: 15395 - DNA, 436 bp, Glycine max
  unsure (1)..(436): unsure at all n locations
agcttgtgcattattaatgtcaatgataaaaaacagaatatgaatcataccaatttcaaaaccttcatactcaataattgaatcatctggccttttattagccctgtcttcaaaatccattgtgtatgacataccagagcaccctccctgtttgacacctattcttaaacataaatcttgatttcgttcagacctcatcttattcaagtgcttcagcgcattatccgtaagtgaaactgcaggggccagagaaccagatgctggtgcagctganagatattgaggtgggggtgagtgaaagcaaagattaaaaaagtgctgagtgtggcagaaaaagtatttcacataacanacaagtatataacanaattcaaaatatactgtntagctgttgcaatctggttaatgatattaaaacagagtgaatgccaataac

SEQ ID NO: 15396 - DNA, 430 bp, Glycine max
agcttatttataagagcttatatataaacctacaacaaatagtttcatctaacacttctctcaaaagtgctctattttttcattctgaggcaatttttcacagaaagaagagcacatttaattgtgaggagtcgatgcttcagatggactacttgaggagtcacctgaggatggattcaatggtgaaccagctgttagagaaccatttccaccctcactctcagccaccactggtatcttgacagtggctgctctttccatctctttctcgagttcttcctctttacgcaatgcagtaaactgggtatccaaggatttcgccgcagctagccaggcagatacaatcagcagaagtattcctcccaagtatggggttgaattagctagtgacccaaaagtcaagatcataaattgctggataagggcacct

SEQ ID NO: 15397 - DNA, 423 bp, Glycine max
agcttctgttttcaatttcgagcgtctcgatattttacggggctctatccgacatccgagttaaaagttattgtcgtttgatttttctaagagcttcccttttcaattacgagcgtctcgatatattacgggacacaatcggacacccgagttaaaagttactgtcgtttgaattttctcagagcttctattttcaattacgagcgtctcgatatattacgggactcaatcggacatccgggtaaaaagttattgtcgtttgaattttctcagagcttatgttttcaattacgagcgtcctgatatattacgggactcaatcggacatccgagtcaaaagtttttgtcgattgaatttgctcagagcttctggtttcaattacgagcgctctcatgtattacctggacttcatcggacatccg

SEQ ID NO: 15398 - DNA, 421 bp, Glycine max
agcttgacattcatataaaaccttataactaagctgattactatattttagatcgaacttagcgaaaagaatcaaaaagcgaagcagtgtatgtattgaatcggatccgggttacacccatgtcttcgatgatgcacctatcgcgaaagcgaattatctgctaatattaataatttggagctaaaagtcgacagtttgtggaaaaacgcaatagcaacaaacgccgaagatgaatcaaacaagcccaaaaccaaattctgagaaaaattcattcagacccaagctaagaacccaattctcaaaatattaaaatagactagaacccaacttgtaaaaaggggtgttgcgagaatcgaactcgcgacctctcgcacccgaagcgagaatcataccactagaccagacaccctatacaaattct

SEQ ID NO: 15399 - DNA, 430 bp, Glycine max
  unsure (1)..(430): unsure at all n locations
agcttcaagattaattcaaatgacaataactttttccttatatgttcgattgagtctcgtaacatatcgagacactcgaaattgactacagaagctctgagcaaattcaaatgataataagtattgacttggattttcgattgaatcccgtaatatatcgagatggtcgaagttgaaaatggaagctcataaaaaatgaaaacaataataattgttaactctgatgtccgattgagtcccgtaatatatcgagacgctggtaatggaaaacagaagctcatagaaaatgcaaatcacaataacttttaactcggatgaccgattaagtcctgtgacatcctggaaatttctaacccggaattttgtaaatggtgcattntgaatggctatatatataagtattattcagtggatgtatataagtatatat

SEQ ID NO: 15400 - DNA, 419 bp, Glycine max
  unsure (1)..(419): unsure at all n locations
agctttctcatgttttaagttcttcctcanaactgtcctaagcaaagttcccaatgtcctattagcaacttccatttgcccatcggtttatgggtgacaagtggttgaaaataacaatttagtgcccaacttgccccacatagtcctccaaaaatgacttaggaacttaagtccctatcactaacaatgctccttggaaaaccatggagtctcacaatctccttgaaaaacaaatcagccacatgggaagcatcatcaactntnttacatggaataaaataagccattttagaaaacctatcatacgaccacaaaatggagtctctaccactgcttgtttttggcagccctataacaaaatccatggataaatcaatccanggatactccggaattggcaatggagtatacaatccatg

SEQ ID NO: 15401 - DNA, 384 bp, Glycine max
agcttctagatgagttatgtctgcgaatcggacatcctgtgaaaagttatgaccatttgaatttctcgagtgcttccgttgtttaatttcaagcgtctcgatattttatgtcctcaaatcagacatcggagcgaaatgttatgaccattcgaatttgccgagagcttccgttattcaatttcgagcgtctagatgagttatgtcaccgaatcagacatctgagtgaaatgttatgaccattcgaatgtgtcgagagcttccgttgttcaatttcgagcgtctagatgagttatgtcaccgaatcggacatccgtgtaaaaagttatgaccattcggctttgtcgagagcttccgatgttcaatttccagcgtctcgatatatta

SEQ ID NO: 15402 - DNA, 425 bp, Glycine max
  unsure (1)..(425): unsure at all n locations
agcttatcattatcaaacttggagaaagagttcttggggtcaagacatgagaagcaatcaagtataatgttacttccttcactaaagcggtgatccatctccacacatattttatcaatagcaacataaaaaatctctgcacggtaatgatgaagattagtgatagtcctcccttctgctcttgaacgaccccgaactggtatttcgtcatccatatttggtaccagaatacttttagcaacacaaaatccttggacatcggcaaaaaaattattccagccactctctctcattgtgcccaaccgagctntgacaacatcaactaattccatgacattcacaatattaagatcttttctttgcaatatatttgaaagctcgtttgtgataccaaacaactntaacattaacctcaaaataaaagc

SEQ ID NO: 15403 - DNA, 434 bp, Glycine max
  unsure (1)..(434): unsure at all n locations
agcttttaatctttatacattattcccgctctgataccacttgttggaccttgtggcctcaataatcttaagagggataggcttagaatacagaagaaacaacaacaatcaatttaacaatgttctttanacatgcaagacacaattgattgcaacaaaataaataagataagggaagagagaatgcaaacacagttntatattggttcggccacaacccgtgcctacgtccagtactcaagcaacccacttgagagttccactaacttgtaaattccttttacaagttctaaacacacaaggacaacccttcctttgtgtttagagattctntacaacaagagactcacagtctcttaaccaatctcattgaataagaagaatggaagaagaattctctcttcaagagaagaatattacaatgaagatcatgt

SEQ ID NO: 15404 - DNA, 384 bp, Glycine max
  unsure (1)..(384): unsure at all n locations
ttatcttatgtttctaacatctacaatagacctcctcaacctcagtagcaaaatcagccacaacagaataattatgacctttccagcaacaggtacaatcccgagtggaggaatcatcccaaccttaaatggttgaatccttaacaacagcaacaacaacaaccttattttaaaaatgatgttggcctaagcagaccatacgttcctccaccaatctagcagcaacaacaacaacagcttcagaaacaacaaacagttgaggctccttcgcaccttcccttgaagaacttgngacgcacatgactatgcaaaacatgcagtttcaacaagagaccagagcctacattcagagctttactaatcagatgggacaattggctacac

SEQ ID NO: 15405 - DNA, 432 bp, Glycine max
  unsure (1)..(432): unsure at all n locations
agctttgagtttattcaaacgacaataactttttactcggatgtctaatcgagtccagtaatatatcgagacgctcgaaattgaatgttgaaactctgagctgattcaaacgacaataactttntactcggatgtccgattcagtgacgtaatatatcgagacgctcgaaattgaatgttgaacctctgagccaattcaaacgacaataactttttactcggatgtctgattgagtcccgaaatatatcgagacggtcgaaattgaatgttgaacctctgaggcaattcaaacgacaataactntttactcggatgtctgaatgagtcccgtaatatatcgagacgctcgaaattgaatgttgaagctatgagccaattcaaacgacaataactntntactcggatgtctgagtgagtaccgtattatattg

SEQ ID NO: 15406 - DNA, 337 bp, Glycine max
  unsure (1)..(337): unsure at all n locations
agcttctcgatatattatgctcctgaatcagacttccgtttcanaagttatgaccatatgaatttctccactgtattccgtgtcacaagtgatgaccatttgaatttctcgatagcattcgttgttcaatttcgagcgtctcgatatattatgcgcctgaatcggacttccgtgtgacaagttatgaccatttgaatttgtcgagagcatccgttgttagaattcgagcgtctcnatatattatgcgcctgaatcagacatccgtgtgacaagttatggccatatgaatntctcgagagcatatcgttgtcaatttcaagcgtctctatatagtctg

SEQ ID NO: 15407 - DNA, 485 bp, Glycine max
  unsure (1)..(485): unsure at all n locations
gctaataaatctatatatggttaaacacagcccttgtcagtggttccttttttttcatgggnataattctttatgtggttgtaatgataaccccatggatcaatgcatataccacaaggtcagtaggagtaaaatatgttgtcttgttttatatgtagatgatattttacttgtagtcaatgatcggggtttgctacatgaggtgaaacaatttctctctaagaattttgacatgaaggatatangtgatgcatcttatgtcatcgacattaagattcatagagatagatctcgaggtattttgggtctatcacaagacacctatattaacaaaattctagagagatatcatatgaaagattgttcaccaagtgttgctatcattgtgaagggtgataggtttagtttgaactaatgatcaaagaatgactctgagagggacgagatgaaacatattcattatgcttcaattgtcgacagcctca

SEQ ID NO: 15408 - DNA, 484 bp, Glycine max
  unsure (1)..(484): unsure at all n locations
cgcttctacaatctnccctttntggatgatgacaaccctgatatcaagatacacatacacattttnttcctagtcgatcactcacttaattctccatattctccccctttgtttttgagtttaagcttcacttgaaattaagttatttaattatgtgagttcttgatttaattcctattntctttccccctttggcagcaacaaaaagccaaagttcgtaacaattataaaacatacataaatgactaatcatacacaagacatttattgaataatctaaaccaatcatgaagcaaaaacatgaataacccatattaatatataaaccacatagtcatataacataattcataaaaacttagtcatactaagcaaatagtataagaagtactagatgttcanatttcataataatataggccaatacatgactagaaatctacagtctaataatattacacataatagacatctatgatgatgg

SEQ ID NO: 15409 - DNA, 332 bp, Glycine max
agcttctagatgagttatgtctgctaatcggacatcctcgtgaaagttatgaccatttgaatctctcgagtgcttccgttgtttaatttcaagcgtctcgatattttatgtcctcaaatcagacatcggagcgaaatgttatgaccattcgaatttgtcgagagcttccgtttttcaatttcgagcgtctagatgagttatgtcaccgaatcagacatctgagtgaaatggtatgaccattcgaatttgtcgagagctatcgttgttcaatgtcgagcgtctagatgagttaggtcatcgaatcggacatccgtgtagaaaagttatgacca

SEQ ID NO: 15410 - DNA, 378 bp, Glycine max
  unsure (1)..(378): unsure at all n locations
caaagcttgcattggtaatttttttctcatccatcaagatttagtacttcgagttatccaccatatagccaagccaacgttgagactatgttatttgtcaagttccagataccagtgaggtttacattgacaagtccagcctcacaattctccaaaagggggagaagaccaacatcagttatgcatagagtccaatcagattaatatgctgaagttggagacacaatttgaacaatcatggctaggctagcactaccaaaaccagngcacttttgaatgactaaagattgaaagactcgcaagaaaagtataacacttcatatcatatctttgactccatgtacttacaagggaaaagatttcacttcatttgatgtt

SEQ ID NO: 15411 - DNA, 391 bp, Glycine max
  unsure (1)..(391): unsure at all n locations
agctttgtctgatgagtactggctaatggcaatgcatgaagagctaaaccagtttaagagaaatggagtgtgggacttagtttctaaaccacctctataagtcaattaaacaaagggtgtttgaaacaacttgataattcacccatgtacggatacgaaatattgttgaagatgattcaaccgagaataaggaatcaactatgatgaaacatgcgctccaagtgcaaggttagatgctataagaatgctacttgcatttgcatgtattatggatttcaaactttttcagatggatgtaaaaagtgccttcctcaatggacgcgttgaagaagatatgtatgtagatcaaccactanggtttttggactatgaacatcctaaccatgtctac

SEQ ID NO: 15412 - DNA, 449 bp, Glycine max
  unsure (1)..(449): unsure at all n locations
agcttgncatatcttgntttatcctactaatcattggttagaaaaaggtgcaacagttactaaggaggataagttacaaagtgaactgatcagtcgtgatgctcattgtggaaccattgatcctaagtatgatgtaaaggatggattaatatttagaanacagtaaattgatgattcctgaaaattcagctctgagaaacaagaatttacaagaatttcatgacactataatagggggccatgcttgaagaacaaaaaccatggctagaatttgtagtcaattttattggcctaaactgcaagaagatattaagtcctatatcaaatgttgcagtatctatcaacacgctaaggtggatcaagcagtacctgcatgattgctgcagcattacccattccacaacatatctgagaggacattgctatggacttcatcactantctaccat

SEQ ID NO: 15413 - DNA, 484 bp, Glycine max
  unsure (1)..(484): unsure at all n locations
tactcagcttanacttgcacanaggagttgagcaggtaacanagaatcgtcttcattctcttagaggtgactntgagcgttcgtttatggaggagtccgagtcaatttctgattattgttctcgagtattggccgtagtcaatcaacttaaaagaaatggtgaagatgttgatgaggtgaaagtcatggaaaaaatacttcgaactttaaatccaagttttgacttcattgttaccaacattgaagaaaacaaggatttaaagaccatgactattgagcaactaatgggttccttacaagcatacgaagaataacaaacgagacaaattaaacaataggaggctacggagcaactactacaactcaacgtataggaagcaaactatgcaaattacaagagccaaacaggacgatgtcgctgccaatatcgtggacgtggacgaggacatggatgagaatgaagatgtggttacaacaaccactc

SEQ ID NO: 15414 - DNA, 417 bp, Glycine max
agcttccattgctcattttctagcatctcgatatattatgcgccttaataggacctccaagtgaaaatttatgaccatttgaattgctcaagagcttccattgttcaatttcgagcgtctcgatatattatgcacctgaatcgtacctccgagttaaaggttaagaccatctgaatatcttaagagcttccattgttcaatttcgagcgtcttgatatataatacgcctcaatcagacctccgagttaaaagttatgaccatttgaatttctagagagcttctgtgtgtcaatttcgagcgtctcgatatattatgtgcctgaatcggacatccgagtgaatagttatgaccatttgaattgctcaagagcttccgttgttcaatttcagcgtctcgatatattatgcgcctcaatc

SEQ ID NO: 15415 - DNA, 467 bp, Glycine max
  unsure (1)..(467): unsure at all n locations
agcttcaacattatactcacttccagggtgctggaactacttcacatggacttgatggggcctatgcaagttgaaagccttggaggaaagaggtatgcctatggtgttgtggatgatttctccagatctacctgngtcaactttatcagagaaaaatcagacacctttgaagtattcaaggagttgagtctaagacttcaaagagaaaaagactgtgtcatcaagagaatcangagtgaccatggcagagagtttgaaaacagcaggtctactgaattctgcacatctgaaggcatcactcatgagttctctgcaaccattacaccacaacagaatggcatagttgagaggaaaaacaggactttgcaagaggctgctacggtcatgcttcatgccaaagaacttncctataatctntgcgctgaagccatgaacacagcatgctacaatcacaacagagtcacact

SEQ ID NO: 15416 - DNA, 414 bp, Glycine max
  unsure (1)..(414): unsure at all n locations
ntaacanagtatccagtntgagtggtttggtcataatatcaaccacttgttcttgtgtcccacaatgcatcatcttgatagctccagtctttgtaagatctcgaacgaaatgaaatcggacatcaatatgtttataacgaccatgctttactggattcttcgaaagcttaatagcagagctactatcacaacaaattacagtagcctggttctgcattttacacaattttcccaacacccttttcaaccatatggcttgacaagcacacgatgctgcacctatgaactctgcctctgtagttgatagactcacaattggttgtttctttgatgaccaagagacagcagctgaacacaataagagaacataacccgaagtactttgtctatcatccaaatctcttgcataatcac

SEQ ID NO: 15417 - DNA, 453 bp, Glycine max
  unsure (1)..(453): unsure at all n locations
tcatctatctntccacacacacacattccctcaattatttccttgtatgttgtgacatcaggaagacagccactgctaatcatatgccctataagtttaaaacactcctccattctatcatgttgggcaagagccacaattataattgcataagtcttggcagtgggagaagatatagatgaaccttttgttctcatgaactcaaaaagatctacagcctctggtaccatacctgctttgcagtatgtatcaatggcagtgttgtacgcataattgtcatgcctatgacccagttcaaccatttcttccagtaatgtcatccctctagtcnggtgtctaaccctacaccacccataaacgaatatattatacgtctccgcattaggcttgactggtttactcattatcttatacagaagttcagcatcctcaaccaagcaacacttgcacagt

SEQ ID NO: 15418 - DNA, 412 bp, Glycine max
  unsure (1)..(412): unsure at all n locations
agctntgaatgctctattctatggagttgacaagaatatctgtagactgatcaacatatgcacagtggccaaggatgcatgggagatcctgaaaaccactcatgaaggaacctccaaagtgaagatgtccagattgcaactattggccacaaaattcgaaaatctgaagatgaaggaggaagagtgtattcatgacttccacatgaacattcttgatattgccaatgcttgcactgccttgggagaaagaatgacagatganaagctggtgagaaagatcctcagatctttgcctaagagacttgacatgatagtcactacaatagatgaggcccaagacatttgcaacatgagagtagaatgaactcattggtcccttcaaacctttgagctangactctcggataggact

SEQ ID NO: 15419 - DNA, 481 bp, Glycine max
  unsure (1)..(481): unsure at all n locations
tttgcaagctggaatcatttatcatacctctgatagccaatgggtgagttccgaagaanactggcctcccgtgataaanaatgagaaggaggagttgattcctacttgngtgcagaacagttggagagtctgcatcgactataggaggctgaaccaggttaccaaaaaggaccattntccactgcattcattgatcagatgcttgaacgcctggtaggtaaatctcactactgtttccttgatggttnttctggttatatgcaaatcactattgctcctgaggatcaggagaagaccgcattcacctgccccttcggcacttttgcctataagaggatgcctttcggtctgtgcaatgcccctggtaccttccagcggtgcatgatgtagtagtttagtgatattttagaaaattgcatagaggtgtttatggatgatttcactgtatatgaatnctcttttcatatttgtttggatagtc

SEQ ID NO: 15420 - DNA, 462 bp, Glycine max
  unsure (1)..(462): unsure at all n locations
agcttctaaactttgtacaagaatgaagctctgataccacttgttagacangtggcctcagatatcttaagaaggggggggttgaattaagatattcgaaactttttcccctaattaaaaatctatcttactttntacttaagttatgaattcccttaatgacaatcttcttaaatattaattcaaatgaagcaacttgaatatgaatataaagcaataataaataaaggagattaagggaagagaaaatgcaaactcagttttatactggttcggccacacccttgtgcctacgtccagtccccaagcaacccgcttgagagttccactaacttgtnaattccttttacaagttctaaacacacaaggactaccctatctttgtgtttagagattctttacaacaagagactcacagtctcttaatcccttanagaatgagaagaagaagaggaacaaatc

SEQ ID NO: 15421 - DNA, 437 bp, Glycine max
  unsure (1)..(437): unsure at all n locations
gagatgaannaaattatactagatcaaatganattgattattttttataataaacatcaacacatatatctcaagaaagatatattatataacatcttatcagacacaatctctataacttggaagagaattccataaacccatagaaccatcacatatagacctctaanaaaaacaaaaatcaagactaaaaaatttcaagatagatgtanaactaatttttattntcatatgactatttgatacatgtaaattaaaatgtcattatatattaataatcaagacagtaatttaattacaataattagtacattntatggaaataaatattcaaaatgaanacaatatatntacaagtgttcaaatcgattggaatattntttcttttctaccgcctaatcntaattccgaatatttaattgatttgaatatttata

SEQ ID NO: 15422 - DNA, 398 bp, Glycine max
agcttataatatatttatacgctcgaaattaaacatcggaaactctcggaaaattcaaatagtcataactattcacacggatgtccgattcaggcttataatatatcgatacgctcgaaattaaacatcggaaactctcgcgaaattcaaatggtcataacttttcacacggatatccgattcgggcacataatatgtcgagaagctcgatattgaacaacgaaagttctttagaaattcaaatggtcttaacttttcacacggatgtccgattcaggagaatcacatatcgagacgctcaaattgagcaacagaagctcttgagaaattcaaatggtcataacttttcacacggatgttagattaaggagcatcacatattgatacgctcgaaaatg

SEQ ID NO: 15423 - DNA, 347 bp, Glycine max
ttcgtcttcttgtttagtccagtcttcttctggctttctttcatcagtgggctttccttctgtgtgcagcatcttgggatgtacccagcctttgatgacagctttccaggttctgctatccagggatttgaggaacggcaccattcttgctttccagtattcatagttggttccatccaaaattggaggtctgttcactggtcctccttctttctccatcgtcatcagaatgcatctccctagatctcactctgtgatttcgagtgttggctctgataccaattgaaattctgataccaggggacagatgtcgtaccggatgtcacgacatcacgcttcagaacatg

SEQ ID NO: 15424 - DNA, 401 bp, Glycine max
  unsure (1)..(401): unsure at all n locations
agctntgagcaaatcgaaatgacaataactttatacacggatgtccggttgagtcccgtaagatatcgagacgctcaaaatttagatccgaagctctgagaaaattgaattgacaataactttatacacggatgtccggttgagtcctgtaatatatcgagacgctgcaaaatgaaaacggaagctcgtaggaaattcaaacgacaataactttttacttggatgtccgactgaatcgggtaatatatcgagacgctcaaaattgagactagaagctctgagcaaattgaaatgacaataactntatacacggatgtccggatgagtcccgtaatatatcgagacgctcaaaatntagatccgacgctctgagagaattgaatcgcaataactntatacac

SEQ ID NO: 15425 - DNA, 482 bp, Glycine max
  unsure (1)..(482): unsure at all n locations
tttcgaccatctcgatatattaccagactcatccggacttccgtatataaacttattgtcaattaaattgtctcagagctttggatcaaaattntgagcgtctcgatatattacgggattcattcagacatccgagtaaaaaattattgtcgttagaatttgatacgagcttccgttttcaatttggagcatctctcgctaaattgcgataggctatcgggcatccgaganaaaagttattgtcgtttcatatttctaagagtttccgttttcaatttggagtgtctcaatatattacgggactcaaccggacatccgtgtataaagttattgtcatttcaatttgctcagagcttctagtctcaattntgagcgtctcaatatattatcccgattcaatcggacatgcgagtaanaagttattgtcgtttgaatttcctacgagcttccgttntcaatttggagcgtctcgatatattaca

SEQ ID NO: 15426 - DNA, 404 bp, Glycine max
  unsure (1)..(404): unsure at all n locations
agcttggaaggtattcataccacacaaaatatatatatgtatgtttaggtagaaagataccttagatatgcatgtatgtaaacaaaaacacacttcacaaaatatatatatatgtatgtttaggtagcaagataccttagatatgcatgtatgtagcaaaaagatacctcacaaaatatatatatatatgtatggtagcaagataccttggatatgcatgtatgtagcaaaaagatacctcacaaaatatatatatgtatgtttaggtagcaagataccttggatatgcatgtatatagcaaaaatacctcacaaaaatatacacatgtttaggtagcanaatacctcatgaaaaaaaaaaaaaaccaacaagattaagaaataaacaaatgataatgataaaa

SEQ ID NO: 15427 - DNA, 440 bp, Glycine max
  unsure (1)..(440): unsure at all n locations
agcttggaatatattatntgaattctagtcccccttatagactctgtgaagatgtttgctagttggtcattagaactatcaaattntgtaatgagttctttggaaaaaaccttttcctgaatgaaatgacaagtaaatttaatatgcatagttcatccatgaaacatcatattggtggctatatgaagagctttgcttgattgtcacaacataatttcacctattggatgtctctaaacttcaattcttgaaggagatatttaatccaaacgtgtgcacaagtagctgtacacatatccttatactctacttctgcacggtgcagtaacattttgctttttactcttncaagagacaatattccctccaataggtacacaataccccanaatacagcatttgtcaataggcgagcttgcccaacctatatcacaatatcc

SEQ ID NO: 15428 - DNA, 325 bp, Glycine max
taagacagccagtaaccaatagaaaagatcaagcctgtcctggttaatgtcgttgttgtgaagccagccagcagctgaagaagaagaagttgaagtgatcttattgaccaaagaaaccaaaagtgtgctcaagtaaaagccaaatgagtaagagcaatatgtgatggctgtaaagaatgcttgcatccctttcaaggactgtttataaaagaactcaaggaggccaatggctgtgaacatctctgacaagccaaatatcaagtattgtggggttatccaaaagatggacaaaactttgtgatggttcacagctgcgtcccttctc

SEQ ID NO: 15429 - DNA, 371 bp, Glycine max
  unsure (1)..(371): unsure at all n locations
tctatagaaggttcgttcctaatttctctacaatggcatcacctctcattgagctagtgaagaagaatgtggcatttacctgcggtgaaaaacaagagcaagcatctgctttgctcanagaaaagcttactaaggcacctgttctagctcttcctgacttttctaaaacttttgagctagaatgtgatgcctctggagtgggagttggagctgttttgttgcaaggtgggcaccctattgcttattttagtgaacaacttcatggtgccacccttaactaccccacctatgataaagagctctatgccttaataagagcactccgaactcgcgaacattaccttgtttccaaggaattagccattcatagt

SEQ ID NO: 15430 - DNA, 437 bp, Glycine max
agcttaagaattattttctatcaactacttgtttccgagggaaattctataaataaacctcccatctttaatggagtgggtaccactactggaaaacccgcatgcaaatctttatagaggcaatagatttaaatatttgggaagccatagaacaaggaccttatgttccctctataatggccggaagtgcaacaatatgaaaacctatagcagattggactgaggaagaaagaagattagtacaatataatttacaggccaataatattattacatctgccctatgaatagatgaatactttagggtttctaattgtaaaagtgctaaagatatgtgggatacactacaagtaacacatgaatgcacaacagatgttaacagatctatgataaacactctaactcgcgaatatgaactctttacgatgaaataaatg

SEQ ID NO: 15431 - DNA, 434 bp, Glycine max
  unsure (1)..(434): unsure at all n locations
ngctctataaattctttctcacttgatacactccatggatgaacagcagggacttttgccgaataaagagtggtggaatttgcaggaggattatgcttgtagatcattgtatcaagaacggggtcaaaattctgaggagaatctatggagacacagaacataggaattgcaaccttctgatggatttctacgtcgcccacaaggttaacaagctcaacaaaatcactgataaggcgctgaggaacatagaacacctcagaactgcatattatgagggttttatcggtgtcgcttgtttctttgtaactgactcgaaagtgcgctggcatcgtgctaacaaccttctgtaccattcttgcttgttgtgaaacccatctgagtcctcaccatttgtaatatagaagaccgagactcngatacctgaatcccagtaa

SEQ ID NO: 15432 - DNA, 423 bp, Glycine max
  unsure (1)..(423): unsure at all n locations
agctgtgtaatgaagtatacaggctatgtttatttagtggcattgtttataactcgtccaagagttcttcctctttaattacctgttatatattcttttgattctatattttcaagcatggaattaaattgtatatacaggatcaatttgacactatgcgtaaaactttaacacttgcatcacttaataatttacacgaaattaactaattccaccattgattaagtttaaacaattccatacaaaacaaaaactaattgatacttaatcaatatgctntattttgatagataatatattatgtcttttatgtgaaataagtaaaatatttagttagatgaaatttcaggaatatgtttaatttatgtgatatttgatatacatgatagagaaagtaaatattatattaattcgcttaatctt

SEQ ID NO: 15433 - DNA, 432 bp, Glycine max
  unsure (1)..(432): unsure at all n locations
gatattcaagatggatgatcaagatagtctgtatagtcttagaaagggtatattaaataggaagggaattccaattgaagtagcaaaaggtttggccaagaaaattaagttaaaaagtcttttacaagaaatttactctctggtaatcgattaccagaggatgtaatcgattaccagtggccaaaactgatttacaacagctattaaaatttgaattcaaaatttgccctgtgtaatcgattacacatatatggtaatcgattaccagcagtttctgaaccgtttaattcaaattntacagcttgtaatcgattacacatatactgtaatcgattaccagatcagattntcagaaaatattctcaatagtcacatctttgtatgtggttcttgaatggctatcanaggcctatatatatgtgacttgagaca

SEQ ID NO: 15434 - DNA, 454 bp, Glycine max
  unsure (1)..(454): unsure at all n locations
agcttgcttctacaatctccccattntgatgatgtcaacttctgaaatcaagaaacacacacacacacacacacacacacacactttttcctagtcgatcacacacttctacaatctccccattntgatgatgtcaagaaacgcattcatacaacattcatggaaaaatataaaccaaatcatgaagcaagaaccatgaatataaaaaccacatagtcaaataacataattaatatttgttcaaacatatcatgcaaataaagaaatagtaaattgttcaaatgtcataataatatagattatntggataagtcactaacatctatcagtcctaattctcttctaatggtgtaaaaggtatctttacttagtggttntttaaaatgtctgcaagttgaattttagtatctacaaattctaaaacaacatcaccttntagaacatgatgtctaat

SEQ ID NO: 15435 - DNA, 457 bp, Glycine max
  unsure (1)..(457): unsure at all n locations
agctnttaactgtatttgcagcgttccaattgttntttaaatggtgtaatcgattacaatatattggtaatcgattactagagtatctaaatgttgaaattcaaattcaattgtgaagagtcacatcttttcataaaatgctttgtgtaatcgattacatggttttggtaatcgattaccagtgacaagttttgaataaaaatcaaaagatgtaactcttccaatggttttctcaagattttctcaaggttataactcttccaatgttttcttgaccagacatgaagagtctataaaagcaagaccttgacttgcattntaagtacttgatataacttttcatatatacttttacaacctttgaatctctntgaaccatcatttgaacttcttcttcttcttcttcctttgtcanaagctntctgagttntctgatttccaaaccttgttatttcac

SEQ ID NO: 15436 - DNA, 440 bp, Glycine max
  unsure (1)..(440): unsure at all n locations
acgctttaagtggaagaatattctccgtattcctacgtgatattggcttcatcgtgagatgtttcaataaactcatagttttgtctgctactcttctcaatcaaatgaaatagttaagtttgttcgcttaaaaaaaactcatacttttgtcttattattaattttcgtattagaagttgatataaaagtatgttggaaaataaaataaaatatttaaatttgcaatgatagatagtttttaacgatcaaattataattatatttaattaattatttggtctttataattctataatttatacattctagtttctatagttcgaaattaatctttctaagttttataatttatatcttaattctctggttagttttatagtctaaaattgatttatctagttcttggaattcatattctaattctnttttagctcttatga

SEQ ID NO: 15437 - DNA, 463 bp, Glycine max
  unsure (1)..(463): unsure at all n locations
agcttgcttatgtctttacctattcctaagcatgtatggcaacacatcaccatggacttcattgaaggtcttcctttctcttttggtaaacaagtcatttatatagtagtagataggcttagtaaggcaactcatttcatggccttatcacatccttatactgttgcggatgtggcccaatgcttccttgataatgtctttaaattgcatgggtttcctgacaccattaccagtgatagggatcctgtttttgttagtcacttttggaaggaatntatgtcctttcaagggattcaggtatagctttctatagcttatcacccacaaactgatggtcaatcagaagtggtgaataggtgccttgaaacatatctcaggtgcatgtgtagtgactcttcaacacagtggtcccaaatggtgcctcttgcggaatggtggacaattccacttaccacacattatt

SEQ ID NO: 15438 - DNA, 390 bp, Glycine max
  unsure (1)..(390): unsure at all n locations
ntccctctntgaacanatacccctcagccaaatagcattcatcttgtgcctttntcccacaactctcgtaaatgggagaaaaatgttcatctaaagcatacaagtccctaatattatcaattcctaaaatttaagctcctagggagcaaaacaatgtgtgtctcctagagagggcatcagctaccacatttgtttttccctttntgtatttgataacatatggaaatttctctaggtactctacccattntgcatgcctcttgtttaacttgctttgccctctaatgtacttaagtgattgatgatcactatgaatgacaaattccttggaaacaaggtaatattcccaagtttggagggctcttattaaggcataaagctctttatcat

SEQ ID NO: 15439 - DNA, 463 bp, Glycine max
  unsure (1)..(463): unsure at all n locations
agctntgcagcccaatcctttctttaagtaggtacggtgttttctagtatcctcttgatctccctagtctaaactccaacttttccatttgtttacggatgataaggtgatgctactttgtgtcaaacatcatagtgttgaaagacctttgagaattgagcaatacaaaagtgtgtaccttcatcactaatcaagagtctaggcaatcaaaacctaacaaaaatgtttctctttaagatattaatcatcatctttacatcattggttggactagaaatttcttccacccactttaagacatagtccactactaccaagatatatctgttgccacgtgaggatggtaaggggaccaaaaaatcaattccctaacaatcaaacacttctacctcctgcatgttctgtaatggcatttcatgtcgtctagatatgttgccgattcgttgaccaatattgcatgatc

SEQ ID NO: 15440 - DNA, 491 bp, Glycine max
  unsure (1)..(491): unsure at all n locations
tcctctgaggcaactccggtataaactggataaaccctntcttcaacacacctaatggaaccgtgcacaatgccatatcaccctcaaacacctgactccctgcagtcacctgcactccatcgccactatacctaatcatatgcacagtcttctcatacaaaatcggcacattctctgacaaagcctgaaccagcttcccatttcccccaggcaaaaagcaatggtctccccccatatcatatggatcatcctggtcccaaaacgcaagcgaaagatttgacaacaaccccgcattcgcatactccaaatttgcgagatgccaattaaacaaattcatttcctcatcactcactgcgtccttataaacctgactgaatgtctncagcgcagccncgagcgacacantccaccgaaacctccncatcagctgcctcagcctactcgccttatcaagcaaccgattaaacgcagactccaccttcacatccata

SEQ ID NO: 15441 - DNA, 426 bp, Glycine max
agcttctacattcaatttcgagcttttcgatatattacgggactcaatcggacatccgagtaaaaagttattgtagtttgaatttgctcagggcttcggtattccatttcgagcgtctcgatatattacgggactcaatcggacatcagagtaaaaagttattgttgtttgaatttgctcagagcttcggtattccatttcgagcatctcgatatattacgggactcaatcagacatccgagtaaaaagttattgtagtttcaatttgctcagggcttcggtattccatttcgagcgtctcgatgtattacgggactcaatcagacatccgagtaaaaagttattgtcgtttgaatttgctcagagcttctacattcaatttcgagcttttcgatatattacgggactcaatcagacattcgagta

SEQ ID NO: 15442 - DNA, 480 bp, Glycine max
  unsure (1)..(480): unsure at all n locations
ntgagcanattcaaacgacaataactntntactcggatgtctgattgagtcccgtaatatatcgagacgctcgaaatggaataccgaagctctgagcaaattcaaacgacaataactntntactcggatgtctgattgagtcccgtaatatatcgagacgctcgaaattgaataccgaagctctgagcaaattcaaacgacaataaacttttactcggatgtctgattgagtcccgtaatatatcgagacgctcgaaattgaataccgaagcgctgagcaaattcaaacgacaataactttttactcggatgtctgattgagtcccgtaatatatcgaaacgctcgaaattgaatgttgaagctctgagcaaattcaaacgacaataactntntactcggatgtctgattgagtcccgtaatatatcgagatgctcgaaatggaataccgaagctctgagcaaattcaaacgacaataac

SEQ ID NO: 15443 - DNA, 320 bp, Glycine max
  unsure (1)..(320): unsure at all n locations
cggttatctccttcttcactacatcaagaatcaccgggttgtgtcttctctgtggctatcttactggtttagctccatcctctaaatttattcgatgcatacatttggatgggctaatgccaggaatgtccaccagggtccagcctatagccttcttatgattcttgagaatagacaacaacttctcctcttgctcatcagcaagggaggcaaatataatcactggaaaagttctgctatcatccacataagcgtattttaaatntgatggcagaggcttcaattctggtgtggcccgctggatagtggtagaaagagat

SEQ ID NO: 15444 - DNA, 477 bp, Glycine max
  unsure (1)..(477): unsure at all n locations
ntagattctanaatgaatcanatcattattgttctaacttttatttgtgaaatgttgtcaaaatgttaaacaactaagaagcaaattaaagcagacctcacattttcaaaaaaaagattcgaaagaattgaaagttttgaagaggcaatatgcggcactaccaaaacaagaaaaatgtagcatttaccagcagtaattcttattagctnttgtttatttgatttgggtaatatagatagctaccaagataagcagaattttattacaaaagatttatctattgaagttctatttatttttctttacataattatgcatcatctttcttgtttttcgtactttagaatttcataccgtatagcagtatttttatgagaaaacatattaacatctgaattgttaaacattaaaaacatgtacacatgtatgaactntntgcgtgaaagtattttgatatttgaattgctaagatatata

SEQ ID NO: 15445 - DNA, 424 bp, Glycine max
agctttagccttaggttgtttcatgttgctgctccccttatctttaacagtaacaagcacatttccattcacaggtttagcgacatcaacatcatcacttgagccctcactttcaatgtttccattatccagtaatatcatgcctcttttatttggacattgagaagcaatatgaccaactccttgatacctgaaacatttgatatcatgggatctagaagatgaattaatttccattttacctttaggtgcagcacatgaatttttggacttagcttcatcttttgactttgtcatagaatttctgttttgccaatttgacttccatgaataagtggaatcaaatttggaagtactcttagctatcaattgcctctccacttgaatagatttatgcagcaagtcctctatctccacataatga

SEQ ID NO: 15446 - DNA, 460 bp, Glycine max
  unsure (1)..(460): unsure at all n locations
tcacctgcaactccaacccgctttatatcctaacaacaggttatctttatgtttaactntaatgtttgtccgacccataaaatatgaattatgtacaacaaaaatgttaagaatcttttatagtgttcaccattgaaaatgctcttaaaagtgaacatatttagcatatataattatgttaccaaaatataaattttttacaaattaaaggtttactcataattctttaagacaattgtgggaagggttttgtcatgcttttctcccttgcaaatccaatacatataagatctctttcgatataaagtagaagtgtttttgagagtttttttaataaaataatttatatttataatagagaaactttcaaaagcatgtatgaattgtatccaaacaaattcctaatgggttctagagtgcacaaggttgtaatgtcaagcacggtacacaagttttctta

SEQ ID NO: 15447 - DNA, 461 bp, Glycine max
  unsure (1)..(461): unsure at all n locations
tcgattacacaagtcttgtaatcgattaccagaggagattntcagaaaataatttccaagagtcacatctattcaaatggtttatgaatggccatcaaaggtgacttggaaacacgaatttaaagagagttttcattgcccaaaaagttttatcctctcaaaagattaagagtttttctgaactgaaatgtcttatcctctcaaaaagattccttggtcaaccacttgcatattcaataaggaattttgattgatcttcattgtacaatctatcttttttaagagagatttcttcttctcttcttcttacttctgaaaagggattaagagactgagagtctcttattgtagaggattcttgaacacaagggaagggttgtccctgtcgtggtcagactttgtaaaagntgttttacaaagagagtggancatctcaagtgggtttcttgaggactggacgt

SEQ ID NO: 15448 - DNA, 401 bp, Glycine max
agctatgtgttcgatggttctataacatctatcccccacatggaaaaaggccaaggtgcagacataacattcagaggatgtggcggaacattgacattgtccgcgtatgcttgacatttatgacatttgcttacatgggcacaacaatcgctttccatagtgagccagtaataaccggctctaaggatcttcctggccatagcatgcccattggcatgtgtaccaaatgaacccccgtggattacctcaatcatgtagttcacctttttggcatctacgcattgtacgacggtcatgtcggggttccgtttgtaaacgatggtaccactcacatagaccgcctggttcttacgtaataacttgaaaatgggctcacatgtaggggtgagtagtgagataaa

SEQ ID NO: 15449 - DNA, 377 bp, Glycine max
  unsure (1)..(377): unsure at all n locations
agcttgtaataagctttaaatgccttcatgtcatctgtaacctttacaagttcaacagttggcttctccctcacaataggcaagaaagcaccctggacttgtgttgcatttgcaagctcctcgggagtagaatcaccagcctacaataaaacaacagtttcacatgacacacaaacatctttcatttcgaccttcatcagaaatgaaaatgcctaccacaatcaaaatagataatggaacatctgaattaccttaaccttgtgtgcccgtcttgggaacacaaccaatttggccttgtatgttttcagcctctgcacattagctggcagactntccaaagaacggttcttgcgacgatgatcaacagcaatacctat

SEQ ID NO: 15450 - DNA, 429 bp, Glycine max
  unsure (1)..(429): unsure at all n locations
tctaaactntatacaagaatgaagctctgataccacttgttatacaagtggtctcagatatcttaagaaggggggttgaattaagatattacaaactatttccccaattaaaattctatttcactttctattcaagttacaaattcccttaacaatgaacttcttaaatattgattcaaatagatcaatctgaatataaatataaaacaataataaataaaagagtttaagggaagagaaagtgcaaactcggatttatactggttcggccacacccttgtgcctacgtccagtccccaagcaacccgcttgagagttccactatcttgtaaaatccttttacaagttctgaacacacaagaacaatccttcctttgtgttcagaattcttttacaacaagagaccctcggtctcttaatcccttagag

SEQ ID NO: 15451 - DNA, 449 bp, Glycine max
  unsure (1)..(449): unsure at all n locations
tattaaactcaatannaaaggcaacgtataattcatgcggtaaatactttttttcttttgtaccaaaagcaaacaaaagtaataatttgatataatgaaatagtacattgcctaatgatgtctcgaccatctgagaggattgttccacagactgcaagaacctcaaaactcgcttccaatttcctccacatctatcatacagctccctctgagaattcaaacccatccttgcaaaggtaacatgggaggcacacaattgaaatgcagcaaagtcaaccaaggacttgaacttgaaagggtgcaaaccatgactaccaccaaaagttttggaagtcaattctaaacanacaaggtccattgcactgagcctgcccgagcacagaatttctaataccaaatgtgatggcaattcctcaatggaaaaatggtctgcaacggtctccatcctc

SEQ ID NO: 15452 - DNA, 452 bp, Glycine max
gtacatatattaaaggcattcgctggttaatcctgctatagtactctcgcaatgcgattcacagtttcaggaacatattcaagtacaagattcaagtaaacttcttctttgtcagtcgttgaaaagaaacaatgccttagggcaacaatatttggatgatccagcatttgcataatttgtaactctctattcttgtatcgcttgtcctggagaactttcttgatggccacaatttctcctgtttctctacattttgcctaataaaagcattgataaaacgaagaaggtatcatcagtatgtcatacatcaacagcatggtgtttagaagagatatgaaaagcaaactcacctgaaaaacaacaccaaaagagcctgtccccactacatgctctgcaatataactaacattctgtcaactcacaaataaaaattatgtcagaggaagtattag

SEQ ID NO: 15453 - DNA, 419 bp, Glycine max
  unsure (1)..(419): unsure at all n locations
agctntcttcatttgtcgatatggatgataatgtttgagaaatcttcggtgccttgtgtatactatcttctttccatgttttagttggaagaagctcatatttttctcacatataggacatgtatgatggcctttgacactataaccacttaaatttccatatgttggatagtcattaagggtgcaaaaaaccattgcacgcaacctaaaggtctgctgcagattcccatgccacacatctaccccatcttcccacaattntgtcaagtcttcgatcaacgaaatcaaatagacctcaatatcattccctggctgtcttggagccactatcatcatgcanagcattatgtacttttgcttcatgcacaatcaaggagggaagttgtaaatcattagcanaacagactatgaactgtgat

SEQ ID NO: 15454 - DNA, 474 bp, Glycine max
atctacatagagtagaagatagatcattgatccatcctccaccttgttgcgataacacaacaatcatagagacttctctagaatccttggctggtgataaagctatcaaacctcatgtaccattgccttggagattgtttcaaaccatacaaggacctttgcagctgacaaacatacctttcttttacttgaacttcaaacccttcaggctgtttcattagaatattttcttccaatcttccatggagaaaagcagtcttgacatcaagttgttcaagttccagatcttggtttgccactatagcaagcagaaccctgatggatgtatgcctaaccataagagataaaatttcgttgaaatctattccttctttctagctgaatcccttggcaactaacctagccttgtatcttatcccttccttttctaaaagaccacgtttcctcttgaatatccacttgcaacctaccaca

SEQ ID NO: 15455 - DNA, 417 bp, Glycine max
  unsure (1)..(417): unsure at all n locations
agcttgacatgctgccattttatcaacaatatattctgcttcacatgttgacaaagcaactacactctgattcattgagcaccaagagattagtgatgttccagaattgaaaacatacccagcagtgcttttcctatcatccttatcaccacaccaatctgaatcactataaccaaacacttctccttttatattcttctgactgtaaggatataaaatgccaagatccaatgttcctttcacatacctcagaatcctctntgctgccaagaagtgaggtgcctttggtttctccataaacctacttatcaacccaacacaatatgcaatatcaggtctagtgttacatacgtatctcaatgagcctacaatttgcttgtacaaggtaggatcaacttctttctcatccccatctat

SEQ ID NO: 15456 - DNA, 446 bp, Glycine max
  unsure (1)..(446): unsure at all n locations
ntgatgcaacatttggagaggttaatgaaacaacgagatgatgcgctccatgagatgttggatcttatggagaatagagatcataatgaagaagaaaggaggagaagagggaatgatggtgttcctagacaaaaccgaattgatggtattaaactcaacattcctccatttaaaggaaagaatgatccggaggcctacttggagtgggagatgaaaatagagcatgttttctcatgcaacaactatgaggaggaccaaaaggtgaagcttgccgccacggagttttccgactatgctcttgtgtggtggaacaagctacaaaaggagagagcaagaaatgaagagccaatggttgatacatggacggagatganaaagatcatgaggaagcggtatgtgccggctagttactcaagggacttganattcaagcttcanaaactaac

SEQ ID NO: 15457 - DNA, 414 bp, Glycine max
  unsure (1)..(414): unsure at all n locations
agcttataatatatcgatacgctcaaaattaaacatcgaanactctcgagaaattcaaatggccgtaacttttcacacggatgtccgattcgggcgcataatatgtcgagaggctcgaaattgaacaacggaagctcttgagacattcaaatggtcataactcttcacacggatgtccgattcaggcaaatcacaaatcgagacgctcaaaattgaacaacggaagctcttgagaaattcaaatggtcataacatttaactcggatgtccaattcaggcgcatcacatatagtgacactcgaaattgaacaacggaagctctcgagacattaaaatggtcataacttttcacactgatgtccgattaaggcttataatatatcgattcgctcgaaaataaacatcggaagctct

SEQ ID NO: 15458 - DNA, 437 bp, Glycine max
  unsure (1)..(437): unsure at all n locations
tgaatcggacatccgtgtganaagttatgaccatttgaatttcacgagagcttncggtgctcaatttcgagtgtcactatatgtgatgcgccacaattggacattcgagttaaatgttatgaccatttgaatttctcaagagcttccgttgcacaattctgagcgtctcgttatgtgattcgtctgaatcggacatccgtgtganaagttatgaccatatagatttctcaagagcttccgatgttcaatttcgagcctctcgacatattatgcgcctgaatcggacatccgtgtgaagagctatgaccatcttgatttctccagagcttccgatgctcaatttcaagcctatagacatattatgcgcctgaatcggacatccgtgtgaaaagtatgacctttgaatatctccacaacttccatagtaatttcaacgt

SEQ ID NO: 15459 - DNA, 457 bp, Glycine max
  unsure (1)..(457): unsure at all n locations
tcgtgtccaaggatgacaaggtgcagtacatgcaaagagatattacattccgctaaaacttaaatagtgtatgggcaggatatccagaaatcatgcatattgcattgtacataaagtcacaaacaagggtactcaagcatgttaatatctgcaatgtccatcacattntaaacagatcaaggaataaagtcaagagggttacagcatccacagaggcttcagctgcgcctttgaaatagccaatagatccctcaataagtcttctatatccttgctctggagcaattagatgtggctgataaccatccgcttccataacaactttttcgacattctttaacgaaagatggcgattaaatgggagctctcttaatgcagctggtaattggtggtcaaaaacaccatatattctatccccgccaggacgtctaatatacaagttggtacttagtcaaat

SEQ ID NO: 15460 - DNA, 391 bp, Glycine max
  unsure (1)..(391): unsure at all n locations
tcatgtagtgtcagtcgtgtcaattaggaaaacatgttatgtcctcttttccaaatagaactgaaacaagatgtaattatgttctttacactattcactcttatatttggggtccaagccgagtcacatcttttggtttcaagtattttgttacctttattgatgaatactctagatgtacctgngtttatttaatgaaagatcaatatgaacatttacctatattcatgtctttctttaatgaaatcaagacccagtttggaaaagtaattaagattcttgcgagtgataatgccaaagaatatttctcctctaatctctctttggtttaaccacacaaggcattttacatcaggccacatgtcctcatacaccacaacaaanatagtat

SEQ ID NO: 15461 - DNA, 408 bp, Glycine max
  unsure (1)..(408): unsure at all n locations
agctttcatcaaattcaaacgacaataactttnttcctcagatgtctgattgagacccgtaatatatcgagacgatcgaaattgaattctgaagctctgagctaattcaaacgacaataatgatttgctcggatgtctgattgagtcccgtaatacatcgagacgctcgaaattgaatgttgaagctctcagcaaattcaaacgacaataactntttactcggatgtctgattgagtcccgtaaaatatcgagacgctcagaattgaatgttgaagctctcagcaaattcaaacgacaataacttttttcctcagatgtctgattgagactcgtaatatatcgagacgatcgaaattgaattctgaagctctgagctaattcaaacgacaataatgatttgctcggat

SEQ ID NO: 15462 - DNA, 340 bp, Glycine max
tcagaattcaatttcgagcgtctcaatagattacgggactctatcagacatccgagcaaaacgttattgtcgtttggattagttcacagcttcagaattcaatttcgatcgtctcgatatattacgggtctcaatcagacatctgaggaaaaaagttattgtcgttggaatttgctgagagctcaacattcaattttgagcgtctcgatgtattaccggacttaatccgacattcgagttaaaaggtattggtggttgaatttgctgagagcttcaacattcaatttcgagccgctcgatattttaccggactcaatcagacctccgagtaaaaagttat

SEQ ID NO: 15463 - DNA, 447 bp, Glycine max
  unsure (1)..(447): unsure at all n locations
ntgatgcaacatttggagaggttaatgaaacaacgagatgatgcgctccatgagaggttggatcaaatggagaatagagatcataatgaagaagaaaggaggagaagagggaatgatggtgttcctagacaaaaccaaattgatggtattaaactcaacattcctccctttaaaggaaagaatgatccggaggcctacttggagtgggagatgaaaatagagcatgttttctcatgcaacaactatgaggaggaccaaaaggtgaagcttgtcgccatggagttttccgacgatgctcttgtgtggtggaacaaactacaaaaggagagagcaaganataaagagccaatggttgatacatgggtagatatganaaggatcatgaggaagcggtatgtgccggctagttactcaagggatttgaaattcaagctccaaaaactaacc

SEQ ID NO: 15464 - DNA, 294 bp, Glycine max
agcttccatctctattcactcagaggtcagattcgggcacataatatgtcgagatgctcggaattgaaccactgaagctctcaagtaattcaaatggtcataactttacacacagatgtccgatcttggcgcatactatgtcgagtagctcgaaattgaacatcagaagctgtcgagaaattcaaatggacatagtatttcacacggatgtcatattcgggcacataacatgctgagatgctcgtaattgtaccacgaaagctctccagtaacttcaaatggtcataacttttt

SEQ ID NO: 15465 - DNA, 419 bp, Glycine max
tgaatcggacctcagtgtgaaatgttatgaccattttaatttcacgagagcttccgttgttcattttcgaacgtctctatatgtgatgcgccttaatctaacatccgtgtgaaaagttatgaccatttgaatttctcaagagcttacgttgttcaattatgagcctctcgacatattatgcgcccgaatcggacatccgtttaaaaagttaagaccatttgtatttctcgaaagctatcttggttcaattccgagcatctcgacatattatttgcccgattctgaccttcgtgtgaaaagttatgaccatttgaatttctcgagagcttccaatgtttaatttcgagcgactcgatatattataagcatgaatcggaccttagtgtgaaaagttatgaccatttgaatttgtcaagagc

SEQ ID NO: 15466 - DNA, 426 bp, Glycine max
  unsure (1)..(426): unsure at all n locations
agcttctgtccctgagaatctggttcccagaagacaacagggagtgaagattgctgaaaaccctagccttgcaacaagttctagggaagtagacacggagatggacaagaaaatccgcggtattgtgagtagcattttgaaagaagcttctgtgcctgatgctgagaaagatgttccaacatcttccaccccgaatgtttctgtgcctgatgttgagaaagatgttccaacatcttccggcccaaatgctgaagccctcccttcacccagtgaagaggaatcaacagaagaagaggatcaagcctcanaggagactcctgcaccacgggcaccagaacctgctccaggtgacctcattgacctggaagaagtagaatctgatgaagaacccattgccaacaggttggcacctggcattgcggaaag

SEQ ID NO: 15467 - DNA, 420 bp, Glycine max
  unsure (1)..(420): unsure at all n locations
tgtatctgttgcacganaaagcaagcagaaaaatacgaacctgtgtcagttataccgaagtatgcaagaagcatatgatcaaatgcagactccattagcccgccaaataccacctgccttggtaagtataatcctatgattcccaattgacttgaatttgtgatctctctctcctttatcctatatcttgttcttcaagcaggggctaaaggagctgaaggaatccaccatccaactggcttcaagtcatggatacattgattcccctgttgatgagactgttttcgatgtggataacgatgttgatgaccttctgccagttgaagttaaagaacagcgcctcagcaatctgctgcaggcattgatggttgcggcttgtgttgctgctatgcctcttttgaagaagataccaacttcagt

SEQ ID NO: 15468 - DNA, 471 bp, Glycine max
  unsure (1)..(471): unsure at all n locations
ntcactcgaatgtccgattcatgcgcatcacaattcgagacttctcgaaattgaacaacggaagctcttgatatattcaaatggtcataacttttcacttgagtgttcgattcaggcacatcacatttccagacgctcgatattgaacaacgaaagctctcgtatattcatatggtcataacttttcactcggatgtgcgattcaggcgcatcgcatttcgagacgctcaaatttgaacaacagaagctctcgagaaattcaaatggtcataacttttcactcggatgtgcgatttaggcgcatcacatttcgtgatgcttgaaattgaacaacggaagctctcgagaaattcaaatggtcataacgtttaactcggatgtctgactcangcgcatcacatttcaagatgctcaaaattgaacaacggaagctctcgaaaaattcanatggtcataactnttcacttgagt

SEQ ID NO: 15469 - DNA, 374 bp, Glycine max
tagcttagtttcataggatcatagtgcatgctaactgtgtgtacttcgttaactccagtctccactcggactttcagaatagcagagtttcagtatgataaataactagaaagatccacaaatcaatattgaagggtcatagttattacaaccaaagtggggaaaattcagattcatcatagatagattagtaggctaattttgcatatctgacctgctgatgagactggaacatgataatggtgtagaactccagttgctggaagataccctttttgaacattatcagcatagattcgagcttcataagcatgacctgccatcacatacagagttataatatactgaaacttcaaggcctctaatagatggat

SEQ ID NO: 15470 - DNA, 405 bp, Glycine max
  unsure (1)..(405): unsure at all n locations
agcttggatttccttttagtagggaatctatccttcctaagatggagccaaacccagtcaccctcattaagaactagctcttttcttcctctattgcctttagttgaatacacctttgtttggttctctatttggttcttaaccctctcatgcatcttctttacaaattctgacctagattccccttctttatgtataaaagaagtgtccagtgggaggggaatgaggtctaacggtgttaggggattgaacccatagacaacctcaaaaggggactgcttggtggttctatgaacccccctgttgtaggcaaattctacatgaggaagatactcatcccaagacttatggttgcctttcagaagagcccttannagggtggataaagacctattcactacctct

SEQ ID NO: 15471 - DNA, 365 bp, Glycine max
  unsure (1)..(365): unsure at all n locations
agcttagttggcgggcaatataaggaatcccatttccagtccagaatatgaagagactcaatgatgggatggttcttagtgctagacggaggaaggactacaaattgagtgggtggcggtccgtgatggagtttcaatagtgaaatatgaaacgtgggatgaatcttagaagaagatggtaactggagtttgtacaggacagggcccacgcgttcgagtatttggaatggaccgtanaatcatttggccaacttggtgtaagctggcgcanatgatgtttggcgatatggtctaagacatacatacacccagttgcctactgtgaattcaagactacgacaatgagtggttgcacagttttatgt

SEQ ID NO: 15472 - DNA, 435 bp, Glycine max
  unsure (1)..(435): unsure at all n locations
ntggcagatcaaggatattggacttcattcattgatatattagcattgttggggctcgggaccatactctttccaaatgtagacggcctagtggatttagcaacgatcgacgcttttcttgcttatcaccacaataaggaaagcccggtcattactgatgcaatcctccctaggaagggacaagtcactagagccatgagcaaaaggctccaagaggattgggcaagagctgctgataaaggccctacggttcttatgaacctcagggtagatttctgagcccatgggccaaggttgggtccaattatctttgtacatattatactaggatgtcattatatgtgatccttgtatttaggagtccataatgtaagtagggtaccctagaaatatacgagtttntagcccttgtattttacggcacttagactactt

SEQ ID NO: 15473 - DNA, 417 bp, Glycine max
  unsure (1)..(417): unsure at all n locations
agctttgatttcctttgttccgganacctttcttttctcatgtgcacccaaacccaatctccgggttcgaagacaaccttctttctccctttgttggcttgtttagcatagcttttatttttcctctcaatttgatctttgactctctcatgaagcttcttcacatagtccgcctttgcttgaccttctttatgcttaaaaacagaaacattaggcataggcaaaagatcaagaggagttagtgggttaaaaccataaacaacttcaaaaggagaacaattagtggtgctatgaacagctctattgtaagcaaattcaacatggggtaaacaagcttcccaagtttttaagttcttcctcanaactgtcctaagcaaagttcccaaagtcctattaacaacttccgtttgcccatcg

SEQ ID NO: 15474 - DNA, 477 bp, Glycine max
  unsure (1)..(477): unsure at all n locations
ntgagcacattcaaatgacaataactnttgactcggttgtcttattgagtcccgttatatatccagacgctcgaaattcagaacataagctattagaaaaatcaaacgataatcacttttaactcgggtgtccgattgtgtcccgtagtatatcgagacgctcgaaattgaaaactgaatctctaagaaaaatcaaacgacaataactttttactcggatgtccaattgagtcccgtaatatatcaagacgctcgtatttgaaaatagaagctcttagcaaattcaaacgacaataactttttactcggatgtccgattgagtcccgtaatatatcgagacgctcgtaattganaagggaagctctaagaaaaatcaaacgacaatgacttttaactcggatgtcggatagagccccgcanaatatcgagatgctcgaaattganaacagaagctctgagcaaattcaaacgacaat

SEQ ID NO: 15475 - DNA, 469 bp, Glycine max
  unsure (1)..(469): unsure at all n locations
tcctcctcaagctgtccaaaatcccaaaaatgtcagtgccatttcattgaggtcggtaaagcagtgtcaaggacctcaacccgtagcaccttcctcatctgcaaatgaacctgcccaacttgtctctaacccagaaaaaggtaatgacaaaaatttacctaacaatttctatgcagatgaatcttccactggcaattctgatttgcagaagcagcacatccctcctcttccattccctccaagagcggtttccaacaaaaaaatggaagatgcagagaaagagatcttggaaacatttagaaaagtagaggtaaacatacctctgctggatgcaatanagcanattccaagatatggtaaattcttgaaggagctgtgcactaataaacggaagcttaaaggaagtgaacaaattagcatgggcagaaatgtctccgcattgattggtaaatctgttccccaaattcct

SEQ ID NO: 15476 - DNA, 394 bp, Glycine max
  unsure (1)..(394): unsure at all n locations
agcttcgatgaaaatattgagtaaaaaataaactaattagaacaagtaggagaaatatgaataaaaatcaaagaagtattatttttaaaaaattattgataaaaagcataaatagaaagttatttaatttaaatgtataaattaattcaaacgttcatttcctaatgggtgaataggtacttctgaaatatattgnggccggtaatatagtccactttcattacagtcaattgctagctgttaattaattataatttttcttttatctttttactttgatttattcaataatttttattggttaacaatttcaaatgaattctttaaaaaaaattgtcattaatattactcatcttgactcctgagttntgataattacattcctactcttgac

SEQ ID NO: 15477 - DNA, 333 bp, Glycine max
agcttgacaggctgccatagcagcaacaatatattctgcttcacatgtggacaaagcaactacactctgatacattgagcaccaagagattagtgatgctccaaaattgaaaacatacccagcagtgcttttcctatcatccttatcaccacaccaatctgaatcactataaccaaacacttctccttctatattcttctgactgtgaggatataaaatgccaagatccaatgttcctttcacatacctcagaatgctctgtgctgccaagaagtgaggagcctttggtttctccataaacctacttatcaacccaacacaataggcaatatc

SEQ ID NO: 15478 - DNA, 416 bp, Glycine max
  unsure (1)..(416): unsure at all n locations
agcttgctaatcacagggcatttgcaaatggcaatgtggagactcattttattgataactacaaagaagacctctttgttgatgctaacaattcagtgtctgtgaaagaagcatatgaagctgctagacttaatgcatccctggtggccgcatgcctcattgaaaaagagcatttcatattggctagaaatccacctggtaaattgtcccattcttgctgtgtaatgttgagttgtttttgtaattttccttggtatttacataagcatgttcagggggcagcagcttgctccctatatggtattcttctccacctttcagaatccatcatcangctaagcgtagaatggaacttgagtgggataatgaatatggtagtggtagctcanagatcatgaagcttaccatcacttatc

SEQ ID NO: 15479 - DNA, 390 bp, Glycine max
  unsure (1)..(390): unsure at all n locations
agcttccatcaccattactttccttaactntttaaatagtgatcaagggctttccatggaccctaagagaataaaggtcattcctgagtggcctactccatcaagtataagggaaatttggggtttcaatgatttaacaaacttttacaaaaggtttgtcccatatttttctatacttgtagcaccactcattgagttggtgaggaactatgttctctcatggaaagatggtcaagaaaggcgttttcagtccttaccctactctaacatacccaacatcactaattcaatgttntaattcttttaacaggtgttgagaaaagaatccctgagtttcaagaacctctggatttgaggtcaaatcctttnttacgcattaagatcaataga

SEQ ID NO: 15480 - DNA, 454 bp, Glycine max
  unsure (1)..(454): unsure at all n locations
tgaaggtaaactagatgccttggttaacctgttaacccatctggccatgaataaaanatctgcacctgtcgccagactctgtggtttatgctcctctgccgaccaccacatagaccttttcccttctgtgcaacaatctgaagtaattgaacagcctgaagcttatgctgcaaacatctacaatagacctcctcaacctcagcagcaaaatcagccacaacagaacaattatgacctctccagcaacaggtacaatcccgggtggaggaatcatcccaaccttagatggtcgaatccttcacaacagcaacaacaacaacaacaaccttattttcaaaatgttgctggcccaagcagaccatacgttcctccaccaatccaacaacaaactgtngaggctcctccacaaccttcccttanagaacttgtgaggcanatgactatgcanaacatg

SEQ ID NO: 15481 - DNA, 348 bp, Glycine max
  unsure (1)..(348): unsure at all n locations
ttcttcatgttagagtcaatgatcaaattgagaggaanaataatagctatgctaaacaagccaacaaagggagaaagaaggttgtcttcgaacccggagattgggtttgggtgcacatgataaaagaaaggtttccggaacaaaggaaatcatagcttcaaccaaggggagatggaccatttcaagtgcttgaaagaatcaatgacaatgcttacaaagttgagctgcccggtgagtataatgttagttccaccttcaatgtctctgatttatctctctttgatgcagatggagaatccagattgaggacanatccttctcaagagggagagaatgatgangacatga

SEQ ID NO: 15482 - DNA, 280 bp, Glycine max
  unsure (1)..(280): unsure at all n locations
tactcagcttgaaaaatcaatggtctaactntcacacggatctccaattcatacgcatcacatattgagacgcttgaaattgaacagcggaagctcttgagaaatagtaatggtcataacttctaactcggatgtccgattcangcgactcacatatagagacgcacgagaatttaatggtcataactgttcacactaaagtcctattcaggcttataatatatcgagatactcgaaattaaacatctgaagctcttacgaaattcaatcggcataattt

SEQ ID NO: 15483 - DNA, 319 bp, Glycine max
  unsure (1)..(319): unsure at all n locations
agctttctagattttcgaatggtcataagttntcacacggatgtccgattcaggaaaataatatatcgagaccctcgatattgaacaacggaagccttcgagaaattcgaatggttataagtttgcacacggatgttcgattcggggacataatatatcgagacgctcaaaattgaacaacggaagctctcgagaaattcgaatggtcataacatttcactcggatgttcgattcaggtacataacttatctagacgctcgaaattgaacaacggaagctctcgacaaattttaatggtcataaattttcacacggatg

SEQ ID NO: 15484 - DNA, 386 bp, Glycine max
  unsure (1)..(386): unsure at all n locations
agcgtctcgatatattatgtccccgaatcggacatttgtgtgattacttatgaccattcgaatntctcgagagggtttcgtgttcaatttcgagcatctagatgagttatgtccctgagtcgaaaatccgtgtgaaaagttatgaccattcgtaattctcgagagctttcgcagttcaatttcgagcgtctcgatatattatgtccccgaatcggacatctgtgtgaaaacttatgaccattcaatattctcgacagcttctgttgttcaatntcgagcgtctcgatatattgtgtctccgaatcggacatccgtgtgaaaacttatgaccactaaaatttgtcgagagcttgcgttgttcaatttcgagcatctccatatataat

SEQ ID NO: 15485 - DNA, 417 bp, Glycine max
agcttctattctgaatttttagcatctcgatatactgcgggacacaatcgaacatccgagcaaaaagttattgtcgtttgattttgctcggagcttctgttctgtatttcgagcgtctcgatatattacgggattcattcggacattcgagtaaaaagttattgtcatttgattctgctcagagcttctgttctgaatttcgagcgtctagatatactacgggacacaatcagaaatccaagtaaaaagttattgtcgttagattttgcttagagcttctattctgaatatcgaacttctcgatatacaacgggatacaatcggacagccgagtaaaagttattgtcaatttattttgctcaaagcttctgttctgaatatcgagcgtctcgatatactacgagacacaatcggaca

SEQ ID NO: 15486 - DNA, 372 bp, Glycine max
  unsure (1)..(372): unsure at all n locations
acccctcagccaaatagtatccatcttgggctcttttcccacaattcttgtaaatgggagagaaatgttcatctaaagcatacaagtccctaatgttatcaaatcctanaatttgagctcctanggagcaaaacaatgtgtgtctcctagagagggcatcagctaccacaattgtttttccctttntgtatttgataacatatggaaattgctctangtactctacccattntgcatgccttttgtttaacttgctttgccctctaatgaacttaagtgattgatgatcactatgaatgacaaattccttggaaacaaggtaatgttcccaagttcggagtgctcttattaaggcataaagctctttatcat

SEQ ID NO: 15487 - DNA, 413 bp, Glycine max
atcttcaatttctcctagacactcatcataccgagggtttgtctcacatactttccaaattcttcccacttcatccacctttcctaggtttgcatagaggggaagcacaattcggcatatccaccgattctgtttataagtttccccttccatctcctttaataaagtttcagccttatcttgaagcccataagagatgtaaagcctaatcaaaacaacctgcgtagtgatgtctggttcaatgcctcgagccttcatcctatcaacaatttgatccattccatcaataacttttggactggccttctgtgtctattaagatcgaataagtatgagaagaacggttgatattctcattttccatatcaataacacatcagctatttccttcctgtcattccttctatacagaa

SEQ ID NO: 15488 - DNA, 351 bp, Glycine max
tatcttaactctattcgcattcttatctctcttgctgctacatatcgttaacctttatttcaattggatgtgaagaatgctttcttgcttggtgacttacattaagcggtgtatatagagcaatcacctgtgtttgttgcttatggggagttaggcaacgtgtgccgcttaaagaaagtgttaatggcttgatgcaatcacctagatcttggtttggagattaaggggtgtggccttgcttttgactgaagctgagtcaaagagatcatactgtaatttataacaatactaaccttggcagcatcttacttgtggatatgttatgatattgtgaaacaagaagtgatataa

SEQ ID NO: 15489 - DNA, 364 bp, Glycine max
  unsure (1)..(364): unsure at all n locations
gaacaggaacattagttatctgttatttcatagcaataaaagccttctcttgttgatccctccattcaaaaacaacatttttcttaacaatttcatttagatgtgcagccaangtgctaaaatctctaacaaacctcctatagaaacttgctaagtcatgaaagctccttacctcacttatattttatggggttggccaatcatgaatggctntcaccttctctagatcaacctgcattccttgcgagctaacaataaatccaagagaaatgacatggttcatacaaaacacacatctatgcacgttaacatacaatttctcacacctaagtggcttcaagatacacctcaaatgcacaacatg

SEQ ID NO: 15490 - DNA, 285 bp, Glycine max
gctggccttgaatcagaaatctgaccaccatacagacctttgcccttccatgcagcaacctggagcaattgagcagcctgaagcttatgctgcaaatatttacaatagacctcctcaacctcagcagcaaaatcaaccacagcagagcaattatgacctctccagcaacagatacaaccctggatggaggaatcaccctaacctcagatggtccagccctcagcaacaacaacagcagtctgctccttcctttccaaatgctgctggcccaaacagaccatacat

SEQ ID NO: 15491 - DNA, 372 bp, Glycine max
  unsure (1)..(372): unsure at all n locations
tactatccgtttcagacattcttctgataaattcataagcaagatccagtcttccacactttgcatacatgtctgtgatggcagatcccacattaactatattctccaatggtttctttagaatatcacaatgcaactccttccctaatttcagagcagccaaagcagcacaagctggcaaaacactagccatggttagggaattaggcaccattccctcttgaattaaccacctaaaagtggttatagcatcgatattcagcccatgaagcacataacctgagatcatagctgtgcanactgcaacatcaaccaaagtattctgctgaaaatcttgcgtgccatctccacatctcctcccttgaagtatat

SEQ ID NO: 15492 - DNA, 396 bp, Glycine max
  unsure (1)..(396): unsure at all n locations
gccgagttgagaacaacttaatgtgttccattagcttctcaggacgatatcttgcatacagaactcccaactcagtanagatacccatatgtgcacgctccaatcctaacccactctccattagagatatgagttcattgaagcatcctctgttctgatagtactcgctaacctcctccanatcatccaccttcaatataaaacagatagtaagtattcagacaaggtcaaaaggttagacaaagcaatcaaaagttnttctggcacttggttttagtattttgctactagctacatcctttaacttgcatttaaaggatntccaacatgggaagaattgtgtagtaattttggagtgaggagggggcaatcattcctgcaagtacaaaatccaca

SEQ ID NO: 15493 - DNA, 400 bp, Glycine max
  unsure (1)..(400): unsure at all n locations
tctaagattggaactaccaggcaagcaggtaagccttntatttccttcatgtgttccttttcactttagtaatgtgttatttcaattctgtggccttccatcatgtgatatacaggacagagatatcatgcgggttcttgtggagtgttgcttgcaagagaaagcttttaacaagtattataccgtgttggcttccaagttatgcgagcatgacaaaaatcataagtttactctacaggtattgattttctctccctgttgtaggatttagatgagaactaaatngtggaattgtgtactatttgcctcatgagtcanaacagttacattttttaactactcacagagagggaaaatatgactagaggaacacttattatgaaatatatgagtgcatcat

SEQ ID NO: 15494 - DNA, 368 bp, Glycine max
cgaaattgatcaacagaagctctcgagaaattcatatggtcataatttgttacacggaagtccgattcatgcgcataatatgccgagacgctcataaatgagcaacggaagctctcgagaaattcaaatggtcataacatatcacacggaggtccgattccggcggatagtatatcgagaagctcggaattgcacgacgaaagctctcgagaaattcaaatggtcataacttttaaaacggaagtaagattcaggtgcataatatatccagaaagttgaaattgaaccacggaagctgtcgatatattcaaatggtcataacttatcacacggaagatcgattcatgcgcataatatatcgagacgct

SEQ ID NO: 15495 - DNA, 406 bp, Glycine max
  unsure (1)..(406): unsure at all n locations
agctntgagataattcaaacaacaataactgtttacacggatatctgattgagtcatgtaatatttcgagacgctcganattgaattcngaagctctgagcaaattcaaacgacaataactttntactcggatgtcttattgaatcccataatatatcgacaagctcgaaatagaatcttgatgctctgagcaaattcaaacgacaataactntgtactcggatgtctgattgagtcctgtaatatatccacacgctccaaattgaataccgaagctctgagcaaattcaaacgacaataacttttaactcggatgtctgaatgagtcctgtaatatattgagacgctcaaaattgaatcccagagctctgagcanattcaaacgacaataactttttactcggat

SEQ ID NO: 15496 - DNA, 244 bp, Glycine max
  unsure (1)..(244): unsure at all n locations
aatattgtagccgatgctctntctcggcgtcatgcattactttctatgcttgaaacaaaattgattggtcttgaatgtttgagaagcatgtatgataatgatgaaacttttggagaaattcttaagaattgtgaaaaattctcagataatggtttctttatacatgaaggctttcttttcaaagaaaacaaaatgtgtgtgcctaaatgttctactagaaatgttcttgtttgtgaagcacatg

SEQ ID NO: 15497 - DNA, 393 bp, Glycine max
  unsure (1)..(393): unsure at all n locations
agctttgaatgcactattcaatggagttgacaagaacatcttcagactgatcaacacttgcacagtggccaaagatgcatgggagatcctgaaaatcactcatgaaggaacctccaaagtaaagatgtccagattgcaactcctggctacaaaattcgaaaatctgaagatgaaggaggaagagtgtattcatgacttccacatgaacattcttgaaattgccaatgcttgcactgccttgggagagaggataacagatganaagctggtgagaaagatcctcagatccttgcctaagagatttgacatgaaagtcactgcaatagaggaggcccaagacatttgcaacatgagagttgatgaactcattggttctcttcaaacctttgagct

SEQ ID NO: 15498 - DNA, 403 bp, Glycine max
  unsure (1)..(403): unsure at all n locations
tgctaatccatggaaactcctaatatctcccacactntnntgggtgggccattctttgatggccttgattntctcaaggtccacttggaccccatttctaccaactacaaaccctaagaaaactatattatctacacaaaaggtacacttctctatatttgcatagagggtgtttttcctaaggactgaaagaacttgcctgagatgtcctaagtgatcatctangctcctactctacactaaaatatcatcaaaataaataactacaaatctacctatgaaatcccttaagacatgatgcataagcctcataaaggtgcttggtgcattagtgagcccaaaaggcatcactagccattcatacaaaccaatcttggtcttgaaagcggttntccactcatca

SEQ ID NO: 15499 - DNA, 358 bp, Glycine max
  unsure (1)..(358): unsure at all n locations
tcatcaactacttgtttccaagggaaattctataaacagacctcccatctttaatggagtgggttaccactactggagaacccgcatgcaaatctttatagaggcaatagatttaaatatttgggaagccatagaacaaggaccttatgttccctctataatagccggaagtgcaacaatagaaaaacctatagcagattggactgaggaagaaagaagattagtacaatataatttaaaggccaaaaatattattacatctgccttaggaatagatgaatactttannggttcaaattgtanaagtgctaacgatatgtgggatacactacaagtaacacatgaaggcacaacatat

SEQ ID NO: 15500 - DNA, 400 bp, Glycine max
  unsure (1)..(400): unsure at all n locations
agcttttgttcttcagccaccaatccattatcttgaaaggtttaggtccccaatcattggttctagacctcaataggatggggcaatgatcagagaaatctctatccaacacgaattgagtagtatctagccattgggacagccagtcatcagaaagaaggaacctatccaatttgctcatgacagtcccattgngtctacaccatgtgaaatatctcccaacagacctaacctcctcaacctccatatctganatccaagaattaaactcagagatgctagtaagttttatcatacttcatcttgtccttacagtngtttttatcagcataggacacacccaggtctctagcaatctccctatgaagatcctcctcattctcanaataactattattga

SEQ ID NO: 15501 - DNA, 349 bp, Glycine max
  unsure (1)..(349): unsure at all n locations
cggagatgcctgccctagagacctgngattggtatcatagttagttagtataatataatatctaattatctattcatatcttctgagttttcaaatgggaggagggagtcaactcagtcaagtttagaaattgtaggctcatcttaagaaagaaaaagaaacacaactcacatggagccagtcaatacagcaaatattacagtcaaaaccttgccttcagtatatcctttctctattatcattgttgcaccaaaccatacagccagaccataactgcagataaaaacaaagtagagcaaaccatatcccanaccagaggctagtgcctcttgcactccagtcttatatg

SEQ ID NO: 15502 - DNA, 337 bp, Glycine max
  unsure (1)..(337): unsure at all n locations
agatggaccattcaagtgcttganagaatcaatgactatgcttacaaagttgagctgcccggtgagtataatgttagttccaccttcaatgtctcagacttatctctttttgatgcagatggagaatccgatttgaggacaaatccttctcatgagggagagaatgatgatgacatgaccaagaacaagggctaggatccacttgaaggacttggaggacctatgacaagggctagaacaaggaaagccaaagaagctcttcaacaagtgttgtccatactatttgaatacacacccacgcttcaaggagaaaacgtcaaagttgtgagttgtatca

SEQ ID NO: 15503 - DNA, 357 bp, Glycine max
gccacattcttcttcacgaactcatagagaggtgatgcaattgtagagaaattatgaaggaaccttctatagaagcttgctaacccatggaagctcctaatatctcccacactttttggggtgggccattcttggatggccttgattttctcaaggtccacttggaccccatttctaccaactacaaaacctaagaaaactatattatctacacaacaggtacacttctctatatttgcatagagggtggttttcctaaggactgatagaacatgcctgagatgtcctaagtgatcatctatgttcctactgtacactaaaatatcatcaaaataaacaactacaaatctacctatg

SEQ ID NO: 15504 - DNA, 400 bp, Glycine max
  unsure (1)..(400): unsure at all n locations
atcttcaatcttctcacaaaggagaagacaaagtaaataaggtgtgtctccaaactcttaagaggtgagtttgaatccttacatatgaaagagtcggagtccatttctgattattnttcaagaattcccgtagtttcaaatcaactagaaagaaatggtgagaagttaaaagatgtaagaattatggagaagatactatgctcgttagatcccaaatttgtgcacattgttgtgacaatcaaggaaaccaaagatttagaaactatgatgatagaaaaacttcaaggatcactgcaagcttatgatgagaagcataagaagaagcanaagatcactgagaaaatcttcaagatgcaactaaaggagaaagaagaaagtcgaggaaatgagagaagtcaac

SEQ ID NO: 15505 - DNA, 385 bp, Glycine max
  unsure (1)..(385): unsure at all n locations
nnggacttctatgttctgggaacctctccttncttatgtgtacccaaactccatcacctggttcaagcatgactntctttctgctttatgtggcttgccttgcatagctcgcagttttcttttcaatttgagccttcacttgctcatgcagcttcttcacatactcagctttagcctgtgcgtccttatgcttaagcatagcaatgttaggcatatgcaacaaatcaagaggaagtcaaggattaaatccatacactatcttaaatggtgaacaattagttgtgctatggacagtccgattataagcaaactcaacatgaagcaaacatgtntcccaagattaagaattttcttaaaacagtcctaacagtgacctaaagcctat

SEQ ID NO: 15506 - DNA, 336 bp, Glycine max
tttctttgagtcttttcaaacgacaataacttttgactcggatgtccgattgagagccgtagtatatcgagacgctcgtaattgaaaacggaagctctaagcacattcaaacgacattaacttttgactcaagtgtccgatggagtcctgtactatatagagatgctcgaaattgaagtctgaagctctgagataaatcaaatgacaattactttctactctgatgtccgagggaataccgcactatatcgagacacttgtaattgaagatgaagctttgaggatattctgacgaaattactttttactcggatgtccattgagtcctgtgctata

SEQ ID NO: 15507 - DNA, 379 bp, Glycine max
  unsure (1)..(379): unsure at all n locations
cgtgtgacaattcactgtgacagtcaaagtgccattcacttagcanatcaccaaatgtaccatgagaggacaaagcacatatatgtgaaactacacttcattagatatgtgattgaatctgagaaggtgaaggtggagaaggtttcaacagaagaaaactcagctgatatgttcacaaagtccctctctagtgtcaagttcaagcactgtctggacttgataaattntgaagatgcctaaagtagattggtataagtgcagccctgaagcacaaggtagacacttgttgatttggagtcaaggtggagaattgtggtgtgtgactcanaatcacaaatggcacaagtgagaaggctctaagaggtgctgtcataacagt

SEQ ID NO: 15508 - DNA, 310 bp, Glycine max
  unsure (1)..(310): unsure at all n locations
agcttgtgagatctgaagacttcttcagacatgtagaactggggaagactgacaacccaataggttcaaacgtgacctcaagtgtttgttgatcaactatcacgactaaacacgttgggtttgaacgctccccacactcaccctcgaggcactgagatccttatagtccttgagggtactctctatgttggatntgtgacttccaatcaagatggaaatcacctcttcaacaaagtgctgaacaaaggtgatgtgtttgtgttcccaatcggtctcattgatttctgcatcaatgtgggatatggcaatg

SEQ ID NO: 15509 - DNA, 334 bp, Glycine max
  unsure (1)..(334): unsure at all n locations
agcttctgttgttcaatttcgagcttgtttacatattatgctccctaatcggacatccgtgtganaagtgataaccaaatgaatttctcgagagcttctgatgtttaatttcgagagtatcaatatattataaccctgaatcggacctaagtgtgaaaagctatgaccattgaatttctggagtgcttccgttgatcaatttcgcgcgtctctatatgtgagtgacctgaatcagacatccgagttaaaagctatgaccatttaaatttctcaagagcttgcgtagttcaatttctagcggctcgatatgcgatgtgtatgaattggagattcg

SEQ ID NO: 15510 - DNA, 336 bp, Glycine max
gtgcctgtatatcgatgcgcctgaagtcgacatccgagtgaagaggtatgaccatttgaatttctcgagagcttcctatgtttaattgtgagcgtctcgatatattatacgcctgaatcgaacctcagtgtgaaaagttatgaccatttgaatttctttagagcatccgctggtcattgatcagcgtctctatatgtgatgcaccttaatcggacctccgcgtgaaaagctatgaccatttgaatttctcgagagcttgcgttgttcaatttcgagcgtctcgacatattatgcgcccgaatcggacatccatgggagaagctatgaccatttgaa

SEQ ID NO: 15511 - DNA, 418 bp, Glycine max
  unsure (1)..(418): unsure at all n locations
agcttcaacattcaatttctagcgtctagatatattacaggactcaatcaaacatccgagtaaaatgttactgtcgtttaaatttgcttagctctccagctttaaatttcgagcgtctcgatatatgacgggactatatcagacatccgagtaaaaagttattgtcatttgaatttgcttagagattcaacattcatcttcgagtgtctcgttatattacgggactcaattatacattcgagtaaaaagttattgtcgtttgaattntctcagagcttcaacaatcaatttcgagcgtctcgatatattacgggactcaatcaggcatccgagtaaaaagttattgtcgtttgaattggctcagagcttcaacattcaatttcgagcgtctcgctatattacgggactatatcagaca

SEQ ID NO: 15512 - DNA, 405 bp, Glycine max
  unsure (1)..(405): unsure at all n locations
tattatgtgttgatgattataacacacacacacacatgtatatgaattgttaaaataatttatgaattaatagttcanataataaaattaaattgaaggaaattaatatatcaagattcaatgataaatacttccaatgcattnttagtttaattatttattaattntttgaattgaaaatagtatagttcaatttaatagatacatgttttgtgccatgtaaatattaatattgtgagatgttcatatgattcatgaggtgtgataacatgctgtgttgggattataacattatgattgagattgagtgtgtgtgataaattgagtatgtgttgaattgtaagatacatgtgtattaagattntatacacattgagttgtgagttatgaactgtacaatcacat

SEQ ID NO: 15513 - DNA, 333 bp, Glycine max
  unsure (1)..(333): unsure at all n locations
ttacaaacttaattaactgcatanaaatttactntaagatccttanataatacatatcatgagttcatgacggcaatgtttaaatgtatcaattctattaaatttgagctcgttcaattatttcatacgtattattaatataatttctaaaataattattataaaaattaacgataagtatgattacatgaaagtgtataattaatttatattattgatacctagtctattttgtcatatcttcacttttaaatntgaattgtacatctaacaatntaatacataatattgaatcaacagtcaaacaaataattcaaccaatttatcttctta

SEQ ID NO: 15514 - DNA, 408 bp, Glycine max
  unsure (1)..(408): unsure at all n locations
atcttattctactanggactttagacaacatgcatttcattnttttcttttcgaaatcatacaaattgttcacattcatggtagcaacatgcctaaagggaaccttcatatcaagatgcaaatattgtaataactctntaaacctcctatgttcaacaaaagagaatggaagatcatgctcaataatcatcatagatatcatctcatgtaccacactntgatcaatntttttatttcttaatctcccagcatgatcaagaataatatttccaacatcactattagaatgccttcaaatatacatcacatttccncatatgacgttgtaggttgaagtctcattcttattgtcaccgcccacataatctttcaaacatatttgcatttactcctcactttttcatcact

SEQ ID NO: 15515 - DNA, 372 bp, Glycine max
agcttcagcctcaatttaaaaccttgcaaataaaaatcttatcatttttttttggaaaaggctgagaatgcaccgagcaataacaaagactgcgttctttgaatgataaaagggaattaccttccatatctgctgaagacacgctccaagtcacgggaacgagtcatcgaagacaagtgtccaacgtcgaggcgggtattactatatttatcatcatggcgaggcatcgttgatttcttccagctctgcaaaacaagcaactgaatgttgaaattcaattcaagaaaaaggccacacagaaacccctttttcaatggcataacgatcatcgatgacattagcaataacgtgagggaatgatgattgatgata

SEQ ID NO: 15516 - DNA, 413 bp, Glycine max
  unsure (1)..(413): unsure at all n locations
agtgacactatgatactcagcttctattctatntaganattcatgaaggtgttataatgtctganatctatgggattaagatggtcattgaccaatccctattntatgatttaacaaaattgcctagtgaaggtgtaccttttgagggtgcactgattgatgaatggaaattcgatttctctgtgcatgatgcccgccggttggtttgcaccaaccaagcggatatgaccggaaggcttcttgccggttcattggcttttgaaatccgcatcctccattaccttatagttcacatattgcttcctagatcttcaaaccttgcccaggtttctgaagaagatctcattgtcatgtgggcctttcataaaggtttacanattgattgngcacatcttgttagatatcgcatgcat

SEQ ID NO: 15517 - DNA, 369 bp, Glycine max
  unsure (1)..(369): unsure at all n locations
agagacgtggcgtttaacgagaaaggcatgaaggattggtcttcanagtctcaataggagtcgatggtgatcgctgacaaccatgaagaanattatgaaaggctactagatccaacacctgatgagccataatcatccaggaggccatagaggaatcctcaactctcagctagattgcaagattatgtcatgtttaatgacaaagatacatctaatgaagagattatcaattttactttatttgcagactgtgatccagttatttttgaagaagcctcaagtgacgagaattggagaaaggcaatggatgatgagattcgtgctattgagaagaatgacacatgtgagttggtggacttgacaacaaac

SEQ ID NO: 15518 - DNA, 393 bp, Glycine max
  unsure (1)..(393): unsure at all n locations
agcttctatataaggttcgttcctaatttctctacaattgcatcacctctcaatgagctagtgaagaagaatgtggcatttaactggggtgaaaaacaagagcaagcctttgctttgcttatagaagagcttactaaggcacctgttctagctcttcctaacttttctaaaacttttgagctagaatgtgatgcctctggagtgggagttggagctgttttgttgcaaggtgggcaccctattgcttattttagtgaaaaacttcatggtgcgacccttaactaccccacctatgataaagagctttatgccttaataagagcactccgaacttgggaacattaccttgtntccaagggaattgtcattcatagtgatcaacaatcacttaag

SEQ ID NO: 15519 - DNA, 235 bp, Glycine max
  unsure (1)..(235): unsure at all n locations
tgaatcggacctcagtgtanaaagttatgaccatttgaatntctcgggagcttccgttgttcaatttcgagcgtctgtatatgtgatacgcctgaatcgaacatccgtgtganaagttatgaccatntgaatntctcgaaagcttccttggttcaattccgagcatctcgacatattgtgtgcccgaatctgaccttcgtgtgaaaagttatgaccatttgaatttctcgagagc

SEQ ID NO: 15520 - DNA, 332 bp, Glycine max
  unsure (1)..(332): unsure at all n locations
atgaacaggactgctactgtgtaagaagtgtgtcgggttgggagcatacccagatgaatcccttttgaanagcggtcgatgaccacaagaatggtggtatagccacgaaatgcgggtaatccagttatgaagtcgagagacaagtcctcccatggccgacagggaactggtaccgagcataatagacatgtggccttcttagtttcatatttcgtgtgttgacagtcgacacatgaagcatattcagtgtgctcatcgaggtggtcaataatagcttgtcagaactgagcatattctaaatcttgagccaactgggcctttaattcctccag

SEQ ID NO: 15521 - DNA, 381 bp, Glycine max
  unsure (1)..(381): unsure at all n locations
aactgaggggctagctgggcatttgtctgctagaggaattatagcagctactgctatctgaacgtgctcaaacgtctcacttaacattaatagcacgttcactactgagccaaaacaaattcgaccgttgcttcacacgtccctctacattcctcaatcaaacttatattntcgtggtaatctcaatttcagcataccccaacagctctcagagatttacgaaatcattccaaacgctctgcttctccatggctacctcaccaaaagaaacttcagctccttgttcaccctctgtaccatcatctccatcatccaccanagcaccatcaaaccaggaacgacctgaattcaatatccagcccatacagatgattcctggtc

SEQ ID NO: 15522 - DNA, 256 bp, Glycine max
  unsure (1)..(256): unsure at all n locations
atcatcgagatcttcatgatanacaatagaaactagtaatccttgacttgattcgatcctcgataatgcaatgcataacatgccatggctaaagacaggatttggcagataaagttacaccatacaaggtgagacgccttgatacttgttaatagacattgcatgagataacatgattggagatagtcttctcaaaagattaagaggccacggtgattgagaacgcaacattgacattcttgggatgtaaacatta

SEQ ID NO: 15523 - DNA, 398 bp, Glycine max
  unsure (1)..(398): unsure at all n locations
tctcaaagggcatggttatttctagtntcctaacaatatctaagaatctcaccaaatatctgttcttctccttcttggatggtaccacaagatatggtacttccgcaccttcattcacagctttttctctctttttctctctagcttgttcacttctactcctctcttcactcttattattatcatctttttcatttcttatcattacataatactttatcttggccatttaatatctttttcttgaccattattcgctcttcttttgcctaatttccttaacctttcacatcatctttcttatcatcaatacctctattttcagcatctatcttcttgggcacgacaacactgacctcatcctccgcctccacaaacctttaacttcttgtcttcac

SEQ ID NO: 15524 - DNA, 293 bp, Glycine max
  unsure (1)..(293): unsure at all n locations
ntgagccaattcanacgacaataactttntactcagatgttttatatattctcgtgatataacgagacgctcgaaattgaatgtagaagctctgagctaattcaaacgacaataacattttactcggatggctgattgactcctgtcatatatcgagacgctcgagattgaatgctgtagctctgatcgcattcagacgacgataactggttacacggatgtgtgattgagtcccgtgatatatcgaaacgctcgagattgaatgtgtgatctctgagccaatccgcacgact

SEQ ID NO: 15525 - DNA, 215 bp, Glycine max
ctcggatgtccgagtccggagcataatatatcgatttgcgtcgtttagatcatcggaagctctagagagattcagatggtcataactttccacatggatgtctgaataagacgcgcaatatatcatgatgttcgaacttgaacaacggaagctctccagcaatactgatagtcataactttatcctcggagggacgattcatgcgcagaatatat

SEQ ID NO: 15526 - DNA, 307 bp, Glycine max
tgaatcggacctcagtgtgaagagttatgaccatctgaatctctcgggatcttccgttgttcaatttcgagcgtctgtatatgtgatacgcctgaatcgaacatccgtgtgaaaagttatgaccatttgaatgtctcgaaagcttgcttggttcaattccgagcatctcgacatattgtgtgcccgaatctgaccatcgtgtgaaaagttatgaccatttgaatttctcgagagcttccaatgtgtagtttcgagcgactcgatatattatacgcatgaatcggaccttagtgtaaaaagttatgac

SEQ ID NO: 15527 - DNA, 378 bp, Glycine max
  unsure (1)..(378): unsure at all n locations
tctgtccctgaganactggttcccagaagacaacagggagtttagattgttgtaaccctagccttgcaacaagtcctagggaagtagacacggagatggacaagaaaatccgcagtattgtgagtagcattttaaaagacgcctctgttcctgaagctgatgaagatgttccaacatcttccaccccgaatgtttctgtgcctgatgttgagaaagatgttccaacatcttccggcccaaatgctgaagccctcccttcacccagtgaagaggaatcaacagaagaagaggatcaagcctcagaggagacccctgcaccaagggcaccagaatctgctccaggtaacctcattgacttggaagaagtcgaatctgatg

SEQ ID NO: 15528 - DNA, 453 bp, Glycine max
  unsure (1)..(453): unsure at all n locations
ctanagtcgcatatcttanaggaaacgaatcanaattgatgatgtacatatgagactaatttggtggttcataaaatatctagctgtcaaacataagttntactaactagaaatgaatgctgggtagagcattactatcaatatgatatcaacatgataaattacctggaatagtgggtggggaaccctgatctccatagccaagtttcgctggtattttcagcttccgcttctcaccaagacacattcccaataatccctggtcccaacctgcaaagagaggtagtgatcatggaatactctatcttgaaagatttcccatcaatcataaaccagtaatttgtaacaaaattacatcatacatactagtatgattatgtaaatacacgcatgcatgtatgtgagcataaattatagctcatatgtcttggtgggtatgtaaataaataatat

SEQ ID NO: 15529 - DNA, 469 bp, Glycine max
  unsure (1)..(469): unsure at all n locations
tgcagacnctcctatgacacatccaggactatcatctccaagttcattcttgtcctcagcatgtgccttctccattggagatcaaggtgacatgtggagtccaaagttcacagataattcatcttttgatgtgcgcttagacaatcctttccatgtggaaagacttaaagagtgtagtgggccatatagcaccatggttgaagtatcatggctttatagagaaagtcagaagtcggctgatactgagacactgctcctgaatctagtgtgaagctgttatatacttatacttgattgagataacacactagaatgaactctttggttctaagttgagttctaatgagcatgtgctattatgttcgtatggacacttatttgtcggctagaacaagtagacctcggcatgttgaagcaccaagagaagatagctatttggatcaacatacactatgctttagcgatgcat

SEQ ID NO: 15530 - DNA, 401 bp, Glycine max
  unsure (1)..(401): unsure at all n locations
tcgaggtcaaccagaagaacctanactccgcggtgcaatcagacagagggtaaccccgccaacaaaccatgtcaataacgtaataagtntgatccgcctgtgccaccccaaaaatcacatacaaagaanaagaaaacagaaaacaaaaacacgacattcattcgaataacctagaaaagtagcaaattcagacctcgtgaaagatgcagtccaatatagagtaggaggggtccttcttccttgccccgctcggcaagccggagggaaaccgatgcagaacggcaccgttccgcagacggcttatcgtcgctccgttgcacgaaacgacgaaacaccgtttcccggaagggcgagcgaagacgaacctganaacgatagaaaacggagtttgttaagttaat

SEQ ID NO: 15531 - DNA, 502 bp, Glycine max
  unsure (1)..(502): unsure at all n locations
aggtgtatcaccttctcccaccacctccttatccgtgagggagaggaacctaattntgtccaaagcctagaatgtgcacattattcgccattaacaaatcgttcaacaattaaaaaaaaatttaaatgcaaggattttccaaatgtaaacaaaaatactttnttttaaaaaaaaaaaaaaaagcgcttacatcagaagcattggaaatcaactctctgaggaagatatccttgttactgtagagagaattgatgatgatatccataagccgcgacacttccgcttggaactcaaatttctccacgttgctctgaagagatttcttcgagatcgactacacctccctttcaatcgcaacaacacgcacacgtttatacacacaataacaagagaacaagagataaagggaaataaaacaacgaacacctcttgatgacatttgaatcggtaaaaggccatgaggcacatcactgatcttgtcctttaccttcggtggatctac

SEQ ID NO: 15532 - DNA, 339 bp, Glycine max
actcagcttgacctggaccttgcattgacccttcacttatgaagtgctctattgccttatgctctttggatagccctctatcattcccttcttcttgaaaagaatccatcctcagttgtgcatccaaaacacctacatcacaagaagacaggtcagcgacattgaaagtagagctcaccccatactcacttggtaagtcaatcttgtaagcattgtcattaattctctcaaggaccttgacaggtccatcacccctatgttggaagtcagatttcctttgtgaaggaaatctatgcttccttagatgtacccaaatctaatcttctggttcaaatacca

SEQ ID NO: 15533 - DNA, 415 bp, Glycine max
  unsure (1)..(415): unsure at all n locations
cctctagcaaaaggttagaaagcgtgattctccaccaacagactctctgtaaccttcaacataaatatatatgactataatggtttatttcaatcagatacattntgctctaaggacttttccaccattatcaaatattatactcttaatttctaaatgtaagtntcttttatatatggttgatattttaaaactaattttcttaaaaacttaattatataacaaaattgtgtcataccattcattntatcatactaatactttgtcaaataaatctttcatatatatatatatatgtgtgcgtgtatatttgaaatttattcttcataatgctttataacataatctatttaaaatctaatcagacaacanattgctctataccatagaatttactatagtaatacctttcatc

SEQ ID NO: 15534 - DNA, 423 bp, Glycine max
  unsure (1)..(423): unsure at all n locations
tcgcacttgataatggagaacacatgttcagcgctatgcaatgacattcatggtgctctgaacaaaggtggagtatggaggattgccttgagggtccgcacttangcaatcatgaaactcagctccaaactcgaaagtggaggacacatgaacagccctaagcaagaacattcatgtggctccggaaaaggatgagaatggaggattgccttaagggtcctctcttatgcaatcatgaaacacagctccaaactcaaaagtggaggacacatgaacagccctaagcaataacattcatgtggctccggaaaaggacgagaatggaggattgccttgagggtcctctcttatgcaatcatggaacacaactccatactcaaaagtggaggatacatgaacaaccctaagcaataacattcatgt

SEQ ID NO: 15535 - DNA, 454 bp, Glycine max
  unsure (1)..(454): unsure at all n locations
tggtaaanataaagctcattctaacctatttcactaagctntactgtcaatcttatgaatcatttgataagtgctgaattgctgattgagtaagtgcttaattaagctacttacccaaacaaaccttgattattatataacgaatgtaataaataaatacaaatcatataattttcctgattactacctttgcatgacatactgaactttggcactaagactgaactcagacataatgatacacatttcgaatacaagtcataactgataatataatgatntacttggaacagtcatatcaaaaggctttacaagtggatccttcatacaaagcagctgctgagtgcctggccattgttttaacggatattggtaccaacataaagcttgcaggaaatactcangaaggaatcaaaaatactttgaagctctcaaaatagatccacactatgct

SEQ ID NO: 15536 - DNA, 319 bp, Glycine max
  unsure (1)..(319): unsure at all n locations
gggatntccttntagtagggaatctatccttcctaagaatgttccaaacccagtccccctcattaagaactagctcctttcttcctctattgcccttagttgaatacacctatgtttggttctctatttgggtcttaaccctctcatgcaacttctttacaaactctgacctagattccccttctttatgtataaaaaaaagtgtcaagtgggaggggaatgaggtctaagggtgttaagggattgaacccatagacaacctcataaggggattgctcgggggttctatgaacccccctattgtacgcaaattctacat

SEQ ID NO: 15537 - DNA, 301 bp, Glycine max
tcggtattcaatttcgatcgtctcgatgtattacgtgactttatcagacatctgagtaaaaacgttattgtcgtttgaatttgctgagagcttcaacattcaatttcgagcatctcgatatattacgggactcaatcagacatccgagtaaaaagttattgtcgcttgaattttctgagagcttcaacattcaatttcgagcgtctcgatgtattatgggactctatcagacatctgagtaaaaaagttattgtcgtttgaatttgcccagagctacaacattcaatttcgagcgtcttga

SEQ ID NO: 15538 - DNA, 423 bp, Glycine max
  unsure (1)..(423): unsure at all n locations
ntagttcactacttcaagtagtgcacgatntgcttccagatgaaaacacgttgccaaaaagttattatcacaccaagaagatattgtgtccaatgggtatggagtattagaagattcatgtttgccctaatgattgcatattgtacatacatgagtntcaagatatgcacaaatgccctaggtgaggggtatcatggtacaaagtgaaggatgatgacgagtgtagtagtgacgaaaactcaaagaagggacccccaacgaaggtattgtggcatcttcccatcattccaaggtttaagcatctatttgctaatggagattaacggaaaaaaccttacatggcatgcanatgggtgaaactacgatggaatacttcatcattcggctgattccacccagtggaagaagattgattgttatatc

SEQ ID NO: 15539 - DNA, 313 bp, Glycine max
  unsure (1)..(313): unsure at all n locations
tgtaatcgattacacacatactgtaatcgattaccagaagatttttttcaganaacattctcaacagtcacatctttttgtgtggttcttgaatgagtatcataggcctataaatatgtgacttgagacacgaatttgataagagtttttcagaacaaaaaggtcttatcctcttataaagagaaatcgttttatcctcttacaaattccttggccaaattacttgtgattcaataaggaattatttgaatgctcaaattgttcaatctatctttttcaagagagatttcttcttctcttcttcttcattctg

SEQ ID NO: 15540 - DNA, 394 bp, Glycine max
  unsure (1)..(394): unsure at all n locations
tatcctcaaagatatattttataagaattaaattcaatttctctcattcttgttttatgataaatttatgtatttttattttaaaattagaattctaaaaacatatccttttcagattgaagaatgaaattcaactaacctgcacgaagaataaatgattctcatttacaataaattaaaggtatactttttttaacaataatacatcttttaagttcatatttcttataattagaatcaaaataataactctcttttttttttaatgagagagtatgttataaacacagacatccaataacataacagagcagcactttaaagtggaagacacttgtccctaattttccgaaagatgccatgattcttacgtggaaaagaatatntcctttat

SEQ ID NO: 15541 - DNA, 396 bp, Glycine max
  unsure (1)..(396): unsure at all n locations
tggacttcctatattntgngaacctctccttcctcatgtgtacccaaacccaatcacctggttcaagcacgactttctttctgcttttgttggcttgccttgcatagctcgcatttttcttttcaatttgagccttcacttgctcatgcagcttcttcacatactcagctntagcgtgtgcgtccttatgcttaaacatagcaatgttaggcataggcaacaaatcaagaggagtcaaaggattaaatccatacactatctcaaatggtgaacaattagttgtgctatggacagcccgattataagcaaactcaacatgaggcaaacatgcttcccaagatntaaggtttttctttaaaacagtcctaagcagtgtacctaaagtcctattgacta

SEQ ID NO: 15542 - DNA, 406 bp, Glycine max
  unsure (1)..(406): unsure at all n locations
tatctattgtgtggctgggggataatttaactctacaagcaaaatatcctactttgtatttaataagcaatcagcagacctttctatttctattttttacacatttaaaactcaaacatataaaatatataacaaactaacaaagataaagacaaaaaaaaggaaatataaactcacctcacttgctgctgctgcccatcatttcactctcacaacaaataggaatcatgtaccttcatggacggatccacataaagctctaaggagatgattgctcccattaagatattttttgtacttaaatatatttaataaaaaaattactntccaaattgggccatatgtctaattcaatcacccgcacacctttcttcagtgcatntatgatggggacgtcactgcagtc

SEQ ID NO: 15543 - DNA, 352 bp, Glycine max
  unsure (1)..(352): unsure at all n locations
gcttaacaatcaatttcgagcgccttgatattntacgggactcaatcagacatccgagtaaaaagttattgtcgtttgaatttgctgagtgcttcaacattcaatttcgagcgtctcgatatattacgggactcaatcagacatccgagtaaaaagttatcatcgtttgaatttggtcagagcttcaacattcaatttagagcgtctcatatattacgggactcaatcagacatccgagtaaaaaggtattgtcgctcgaaaatcctcaaagcttcggtattcaatttcgagcgtctcgatatattatgggactcaattagacatccgagtaaaaagttattggcgtttgaa

SEQ ID NO: 15544 - DNA, 358 bp, Glycine max
tgcatgagaggcttccttggggaggaagtgttacacccctccaatagcaaagctcaccccatgggaacacacacccctccaatagctaagctcaccgccccccaaaatacaaaaaaaaagaccctactacaaagactactcaaaatgccctgaaatacaaggctaaaaccctatactactagggtacccttaacttgtagggtagggtgtccttaatttgtagggtaccctacaaacctaaaattgaccaaaatacaaggcccataagatggaaaacctattctaatatttacaaagataagtaggtgcatacttagcccatggacccaaattctaccctaaggctcatgagaatcct

SEQ ID NO: 15545 - DNA, 439 bp, Glycine max
  unsure (1)..(439): unsure at all n locations
tgtcacacaatctgtttcataatcatattagttgtactttgttctggacatcaatacaatatgcaaacgcacgtatctttctatgcnaataaattgtttactaatgtaaaaaggtttaattactctgccgtccctgaacttttactaaattctgtgatgatgtgcattntaatatantttttattcaggctangcttgattggacttaagaaccggttcaatgttgatctattattatgtaaaaccaattttaagattgccagtatttanactaacaagcataatttattaaaattattttaatcgatttgaaaattatcttttggagttacaaaattacttattaaattgctatagtttcattttataattcatttnttaagacttaaataatttgtaagtcttgaactgtttgatgaaatttaatatttctctggat

SEQ ID NO: 15546 - DNA, 400 bp, Glycine max
  unsure (1)..(400): unsure at all n locations
agccttgttattactcaagaaaaggaagagaagaattggcatgtcataaatgcgtgtataacaaatattgaacatcagttacaagaggaaccctcttccctggcccagcgtgacccctgtccccatccctatccctcaccactaatntttttttctgttacatacgtgattgggaacagatacatcgttatatgatagcaagctatgcatatcaaagcttgagtcacatttgaggggtatcccaatcaaacctgcgctgtgaatagacctcataatcaattggcctagtatcaacaacgtaatcaactgtgtgaatgccctncaaaagagttggttgaaaactatcattacttgaaggcagtaatttatacacgactaataattcaagagtgaatatagc

SEQ ID NO: 15547 - DNA, 428 bp, Glycine max
  unsure (1)..(428): unsure at all n locations
agcttaagctccttcaactgcacaaggctcttaatatttgaagagtatccttgtggaaccttcacctgacgaagacactgacaaaaacttatcttctccttcttggacaaagtatggcaggctgggggcaagtaaattttcttcccatcagaccttggatgcaactgtgctcttatacccatatcagctagatcttgacgggtattcaagccatccttcgtcttgccttgaatgttaaggagcgtcccaataacactgtcacaaacatttttctccacatgcataacatcaatacaatgtctaacgtcaagatcacaccagtacggaagatcaaagagaatggacctcttcttcatatgcaactctgacttttatccttcttttgngtcttcccaaatacagtgttcaggtgttgaacccgctgatat

SEQ ID NO: 15548 - DNA, 423 bp, Glycine max
  unsure (1)..(423): unsure at all n locations
gcttggtccccaacgctctgttcaagctttcccaaaatctagaggtgaatctangatctctatcagatactatactagatggctcaccctataatctaacaatctcacttatatacagggaagtcaacttctccaaggaaaatctgatattaataagaatgaagtcagcagacttggtcagtctatcaacaataacccaaatagaatctaaacctctaggggttctaggtagtcctaccacaaaatccatggaaatactgtctcacttccactanggtatctctaaagatagtaactttcctgaaagtctctgatgttctatcttagccttctgacagattaggcatgcatacacaaactcactaacctctctcttcatattgnngccaccaaacatcatctttaaatcctgatacatcttgt

SEQ ID NO: 15549 - DNA, 434 bp, Glycine max
  unsure (1)..(434): unsure at all n locations
agcttatgctgcanacatctacaacagaccttctcaacctcagcagcaaaatcaaccacaatagaacaattatgacctctccagcaacaggtacaatcatgggtggaggaatcatcctaaccttagatggtcgaatccttcacaacagccgcaacaacaaccttattttcaaaatgttgctggcccaagcagaccatacgttcgtccaccaatccagcagcaacaacagcaacagccgcagaaacagcaaacagttgaggctcctccgtaaccttcccttgaagaacttgtgaggcaaatgactatgcaaaacatgcagtttcaacaagagaccagagcttccattcagagcttaactaatcagatgggacaattggctacacagttaaatcaacaacagttccagaattttgacaaattgccttctcaatctg

SEQ ID NO: 15550 - DNA, 417 bp, Glycine max
  unsure (1)..(417): unsure at all n locations
agcttcaacatcagaccacttccagggtgctggaactacttcacatggacttgatggggcctatgcaagttgaaagccttggaggaaagaggtatgcctatgttgatgtggatgatttctccagatttacctgcgtcaactttatcagagagaaatcagacacctttgaagtattcaaggagttgagtctaacacttcaaagagaaaaggactgtgtcatcaagagaatcaggagtgaccatggcagagagtttgaaaacagcaggttcactgaattctgcacatctgaaggcatcactcatgagttctctgcagccattacaccacaacagaatggcatagttgaaacgaataatatgactttgcaagatgctgctatggtcatgctncatgccanagaacttccctataatctct

SEQ ID NO: 15551 - DNA, 397 bp, Glycine max
  unsure (1)..(397): unsure at all n locations
agctttacatactcgcctagatctctttctgaaacgcgtctcgaactcggacctccacccggccgagtcaaaggccgagttcgagtccaacgcgctgcaaggccctgttgtctcgggaacgagtcanggaagcggcgagtacttcctccgagtcggaatcggaaagccaccgagtcaagcctacgtggttctcgacaccggaagcgacgtgagctggatccaatgcgcgccgtgctccgaatgctaccaacaatcggatccaatcttcgacccgatttcgtcgaattcgtactctccgatccgctgcgacgagccgcagtgttagtcactgtacctctccgagtgccgcaacagcacgtgcctctacgaagtcttctacggtgacggattctacacc

SEQ ID NO: 15552 - DNA, 432 bp, Glycine max
  unsure (1)..(432): unsure at all n locations
agctntgatcaaaatctaacgacaataactttntactcgaatgtccgattgtctcccattgtatatcgagacgttaaatattcagaatagaagctctgagcaaaatctaacgacaataactttttactcggatgtccgattgtgtcctgtagtatatcaagactctcgaaattcagaactgaagctctaagcaaaatcaaatgacaaaaaaattttactcggatgttcgaatgaatcccgtaatatatggagacgctcgtatttgaaaacggaagctctgagcaatatcaaacgacaataactttntactcggatgtctgattgtgtcccatagtatatcgagactctcgaaattcataacagaagctctgagcaaaatcaaacgacaatanattttaactcggatgttcgaatgtgtcccgtagtatatct

SEQ ID NO: 15553 - DNA, 415 bp, Glycine max
  unsure (1)..(415): unsure at all n locations
agcttgtgtattcaatatcttgatgaggatgttccatatgttctcaagactggactaatacatttgctgcccaagtttcattgtcttgcaggtgaagatcctcataagcatcttaaggagttccatattgtctattccaccatgaaaccccctgatgtccaggaagataatatctttctaaaagcttttcctcattctctggaggaagtggtgaaagattggctgtactaccttgctcccaggtccattaccggctgggatgaccttaagagggtgttcttagagaaattcttccctgcatctaggaccactgccatcagaaaatacatttcaggcatcaggcaacttagtggagagagcttgtatgagtactgngaaagattcaagaaattgtgtgcaaactgttctcaccact

SEQ ID NO: 15554 - DNA, 383 bp, Glycine max
agcttctgtccctgagaaactggttcccagaagacaacagggagtgaagattgctgaaaaccctagacttgcaacaagttctatggaagtagacacggagatggacaagataatccgcagtattgtgagtagcattctgaaagatgcttctgtgcctgatgctgagaaagatgttccaacatcgtccaccccaagtgtttctgtgcctgatgctgagaaagatgttccaacatcctccgctccaaatgctgaagccttcccttcacccagtgaagaggaatcaacagatgaagaggatcaagccgcagaggagacccctgcaccacgggcaccagaatctgttccaggtgacctcatcgacctggaagaagtcgaatctgatg

SEQ ID NO: 15555 - DNA, 405 bp, Glycine max
  unsure (1)..(405): unsure at all n locations
agcttttattttgatgataagtttagatatcctgagaattctgctcatggtcaactcccaagaacagtggatgtaattgcagaagacgaccttgntgattcttgcaagcctggagatcgagtggcaattgtggggatatataaggctctagcaaggaagaggtagtgtgaatggagtatttaggtagctccagacaatatactgacataactcctttgcacttgcttgctttcttgaacagaaacttgattgactgattntcatgtangactgttctcatagccaacaatgtttctcttctcaacaaagaggataatgcaccaatctacagtgttgaagatgtcaaaaacattaaagagatagctactagagatgatgcatttgatctgctaagtgattcacttg

SEQ ID NO: 15556 - DNA, 414 bp, Glycine max
  unsure (1)..(414): unsure at all n locations
agctngcctggtacatcactcttaggtggtgcattcatcttaccaagcccctcattgagcagtgtgttaggtacttgttcccaggttcaacaacattaacaactccatactcaagtttccttatatattctcccatgcttttacctccaacgcatgcataagcttgtatattgatgaatgcccaatagccaatataaccttctcagtttgtgaggccaattcccttgttagtgacattgttaaagcatgaaaccctgtcaaaaattaaaaaacaaacaccccatgtaaatacctagacaaaaaaatctaanatataacgcactcagttagatgtgaagcacacacaaccctttaacaatacattcttagaatatgtttgaatggaggaatttagagagaaatagcacanatgat

SEQ ID NO: 15557 - DNA, 391 bp, Glycine max
  unsure (1)..(391): unsure at all n locations
agcttgaatgtcgcttttgttaatcaagtgttactttatgcatttgtagatattaggctgctgtcgattattttgcattgcgatgaatgagtcagattccgaagcattgcatccagaaaacgaattatagaataaacgctttcactgtacggtccttattcaagagtctttctaacaatgagtagtagtatattaaacataattcactataaacatattttgactctcattataattatcatgtaatgtaatagaaaaaaactattccaaaataattattattttaacatcttactataatattaattattctttcctttatataacttataatattaatgattgatagtaaaatctataaatanattaataatgacaaaattaatttcat

SEQ ID NO: 15558 - DNA, 410 bp, Glycine max
  unsure (1)..(410): unsure at all n locations
agcttcaacatcagaccacttccagggtgctggaactacttcacatggacttgatggggcctatgcaagttgaaagccttggaggaaagaggtatgcctatgttgttgtggatgatttctccagatttacctgngtctactttatcagagagaaatcagacacctttgaagtattcaaggagttgagtctaagacttcaaagagaaaaagactgtgtcatcaagagaatcacgagtgaccatggcagagaggttgaaaacaacaggtttactgaattctgcacatctgaaggcatcactcatgagttctctgcagccattgcaccacaacagaatggcatagttgagaggaaaaacaggactttgcaagaggctgctagggtcatgcttcatgccaaagaacttccctat

SEQ ID NO: 15559 - DNA, 411 bp, Glycine max
agcttcattgcctaataggtcagcttacaaaagcaatctccaagagactcagcataaggatgcacaggctaaagttgagtatgtgaaaagattgcatgaccaagtgaaggcacaaattgcaaagaagaatgaaagctatgccaagaaagctaacaagaacaggaaggaaatgatacttgaaccaggtgattgggtttgggtacacatgaggagggagaggttccctaaacaaaggaagtccaaacttcaacctagagaagacagacctttccaagtccaatcatgttttcttattaattagtgaattatttaacactaatagggcttacaaattaagctctgtgtagttctcatgtgtgttataagcttatagcctttaggaatctgagaacacaacttgaaatgatatat

SEQ ID NO: 15560 - DNA, 438 bp, Glycine max
  unsure (1)..(438): unsure at all n locations
nggataagattatacggagattatggagggactnnngactactttctacaatnatgcataaaaaaaggtgtctgtcattcatctcaaactactgtttatgtatttttatgcatgcaagcactcacgtgcacatatataagtngttgactagttattaattttaattaaaacataaccatatactataatttcaattatttattgtaaaactaaaataaaattatatatttaaaaatatttatttattataattataaatatataaaaactgtctatcaacttgtggaatgtataaactacaagttagtatattaataaagagaaaatatacatataatatataatctgagacatgatattttgtcaatgaaaactaataatataaaagtatgtgattttttattggaataaaatatatagtttttaataaaattatat

SEQ ID NO: 15561 - DNA, 428 bp, Glycine max
  unsure (1)..(428): unsure at all n locations
tctacattcaatttcgagcttttcgatatattacggtatttttatcggacatccgagtaaaaagtgattgtggtttgaatttgctcacggcttcggtattccatttcgagcgtctcgatatattacgggactcaatcggacatccgagtaaaaagttattgttgtttgaatttgctcagagcttcggcattccatttcgagcatctcgatatattacgggactcaatcagacatccgagtaaaaagctattgtagtttgaatttgctcagggctccagcattccatttcgagcgtctcgatgtattacgggactcaatcagacatccgagtaaaaagttatagtcgtttgaatttgctcagagcttcgacattcaatntcgagcgtttcgatatattacgggactcactcagacatccgactaaaaag

SEQ ID NO: 15562 - DNA, 435 bp, Glycine max
  unsure (1)..(435): unsure at all n locations
ccctcgttaatttgtatatttttattcaatgacaaattttatttatggtaaagccgnnaatcatgataataattactttctttaaaaaaaaactttgataataattatcttaaaaatcatataaataattatatgtaactaattgatagtgtaaaagctattaacctaacaatacatgcttattaactcttaaaaattggtaaaactcgctagaaaacccaatcataatggttgaaaaaagacgaagaactaatattgaataattggccggcttcaatggtttcttttcatttgtttttatcttttatgatatttaactcaataaaaaatactttgtaactagaaaaaggttaaatgtcaagttacaaaaggctgtgtctgagaattacgtataaaatattatcatttaccatattattattacgtagttatcat

SEQ ID NO: 15563 - DNA, 457 bp, Glycine max
gaacttagaaactcagcttgaatctctcctttgggtggacatgattctctatgttttcatgggcgacaagcatacaacaattacagtgagattatctgatgtatttaggcgcaatgcttccttgactagctctccggcacattgctgtgggtcatcatgccttcttaatcctcggcgaacaagactaactgcaacttggctagacattacatcccaaatcccatcacacccaatgatcaagaactcatcaccctcagtcaatgtaaccagccgaacatctggctcagcaataagaggggatgcagcaccaagtggaaatttcaagtcccaatccccaagggctcgagttactgaaagataaccattgagatatccatcatcaatgaacccacctaactcctccaccctcctcttctctggtagataacttggcctgtgatcattagacatctcaaca

SEQ ID NO: 15564 - DNA, 429 bp, Glycine max
  unsure (1)..(429): unsure at all n locations
tgtacattcaatttcgagcgttccgatatattacgggacttcttcggacatccgagtaaaaagtaattgttgtttgaatttgttcagagcttcaacattcaatttcgagcttttcgatatattacgggactcaatcagacatccgagtaaaaagttattctcgtttgaatttgctcagggcttctgtattcaatttcgagcgtctcgatatattacgggactcaatcagacatccgagtaaaaatttattggtgtttgaatttgctcagagcttcaacattcaatttcaagcgttccgatatattacgggactcaatcagacatccgagtaaaaagttattgtcgtttgaatntgctcagagcttctacattcaatttcgagcttttcgatatattacgggactcaatcagacatccgagtaaaaagta

SEQ ID NO: 15565 - DNA, 407 bp, Glycine max
  unsure (1)..(407): unsure at all n locations
acctaggctgatgaagacnnctantattcaaaatgctgctggtttgcagcttctccccaaaagcctttggcagtcctgcacttagaacatgcacctcactctttcaaaatggtcctattcattctttctgccaaaccattctgttgtggagtgtgagggactgttttgtgccttttgatgcctattttcctgcaaaactcattgaactgctctgaaacaaactccaggccattgttagttcttaaaacttttaattttgtaccaagtcgatttccaacaagagtatgtcattctctgaatttttgaaaagcttccgacttatttttcaaaacatacagccatactcttcttgagaaatcatctatgatggtgagaaagtatgagcttccaccatgagtattcactct

SEQ ID NO: 15566 - DNA, 441 bp, Glycine max
tcaacatcagaccacttccagggtgctggaatacttccatggacttgatggggcctatgcaagttgaaagccttagaggaaagaggtatgcctatgttgttgtggatgattactccagatttacctgtgtcaactttatcagagaaaaatcagacacctttgaagtattcaaggagttgagtctaagacttcaaagagaaaaagactgtgtcatcaagagaatcaggagtgaccatggcagagagtttgaaaacagcaggttcactgaattctgcacatctgaaggcatcactcatgagttctctgcagccattacaccacaacagaatggcatagttgagaggaaaaacaggactttgcaagatgctgctatggtcatgcttcatgccaaagaacttccctataatctctgggctgaagccatgaacacagcatgctaca

SEQ ID NO: 15567 - DNA, 399 bp, Glycine max
  unsure (1)..(399): unsure at all n locations
gtccataccaggcactaagtctagggagaactcaacctctctctcacgtggtaatccggacaccttaaacacctttggaaactccctcaccaaaggtatatcactcagaggggttttgcctcaacactcatactagctaagatcatgtatacttgtgcatcctccctcaaagatgcctcaacctggttagcagacaaaaacatatcactttcactcacaccaaaagacaacagatttctcaaaatagtttaataaggcgtggttggaagataaccagtccataccaagaataacatcaatctgactcanaggtaaaacaaccaaatcaaacaaaaactatctatcagaaattaagataggacattgcaagcacacatcagatgttaaaacagacccact

SEQ ID NO: 15568 - DNA, 446 bp, Glycine max
  unsure (1)..(446): unsure at all n locations
tgatgataaaagtgagaagtacgtgtgtgtgggttacgtctcaatatccagngggtacaagctctatagtccaaattgtagaaagatcgtcataagtcgcgacgtggagttcgacgaagaagattgttgggattggagtgttcaagaagataagtatgattttcttccttattttgaagaagatgatgaaattgaacaaccaatcatagaggaacatattacaccacctgcctcaccgacaccaaggctggatgaaacaagttcaagtgagaggacaccgcgactaatgagcattaaagagatttatgaggtaaccaaaaacctaaacgacattaacctcttttgtcttttggtgattgtgagcctctatgctatcaagaagcgacgggaaacataaagtggaagacgccatggacgaagacatcaagtcaatcacgaagaatgat

SEQ ID NO: 15569 - DNA, 387 bp, Glycine max
  unsure (1)..(387): unsure at all n locations
caccttctccttccccaacgcgggcgatcatcttagcgccgaggtcgtaaaccgtttccatctcggtcgtcttgagcgtcagcttcccggtcttcgcagcggcgccagacaccgcagggcggtcgatctggacctcgaccacttccccttcaatgacttcggcttcttccttgatgcggacgccgatggccttgcggaaggcctgngtgagggcttccggtttggacatttccaatgagaagatttcgctggcagcgatcatggcaaaaggggtttcgaggccganggacttggccatgcccatggcgatggcggtcttgccggtgccgggctggcctgctaggaagaccgcgcggacggcgatcttgccatctttaatcatctgga

SEQ ID NO: 15570 - DNA, 354 bp, Glycine max
gatcattttcccctgccattcattgatcaaatgcttgagcgcttggcaagtatgtctcattacaatttttttatggtttttctggttatttacaaattcatattgctcctgaggatcaagaaaacaccacattcacctatccctttggcatttttgcctataggaggatgccctttggcctatgcaacgcctctggtaccttccaacggtgtatgcttagcattttcaatgattttttagagagttgcatagatgtgtttatggatgattttactgtttatggatcctcttttgatgcatgtttggatagtctaaatagagttcttaatagatgcattgaaactaaccctgtgc

SEQ ID NO: 15571 - DNA, 364 bp, Glycine max
atattgaaatgatgaatagtttgtgatgtttgtaactggtgtctagatatggactagtacactgcagcgaacaattttgacagcaggtccaattgttgggtttccaaaggttagtgccatccttaagtcaggaaatatggattgacaaaagtatacattattagtgctcctgcacttactatctatatgttagatacaatggcgcgcacttgatgagataaatgccggtgtgtgtgatgggaagacatatgaagaaatcaagaagaacatgccagaggagtacgagtatgtcacaaacttgtaatttgtcttatttccagttgaatgctactggtacatcagataaaaaaaaccagtgcgtggt

SEQ ID NO: 15572 - DNA, 440 bp, Glycine max
ctaagctcttctatttttttggctggaaagccaaaggggtttattctttcagggaacagcttgaagacttgggaagaggttgtagagaaatttctgaagaagtactttctagagtccaagacaactgaaggcaaggcaactatctcctcattccattaattcccaaatgaatccctgagtgaagcgcttgagagattccgtagcttgttgtgaaaaacaccaactcatggattctccgagccgattcaattgaacattttcatagatggtttgagatcgcagttcaagcagttattggatgcttctgttggaggaaaaattatattgaagacccatgaagaagcaatgaaacttattgaaatatggcagctagtgatcatgcgaatttgcgtgataggactcatgtacccacaaagagaagcctactggagctttcttca

SEQ ID NO: 15573 - DNA, 445 bp, Glycine max
  unsure (1)..(445): unsure at all n locations
ntgacttgagtcatcaagagattataaatatgtgaccatgtgtctgtgtntaaataatcatcatcaatcatctttgaatcatctatctttcaatctttttcaacatcatctctcaaacatctttcaatcaatctttcaatatctttctacataattttctgattcatttctcttcatatttctaaaagttttttatcaacactttctcttccaagaaaagttctttgttcaaaaacttatgctattcatctttttcgttctcttctccctttgccaaaagaacgaaggactaattgccttaattcttttgtgtctctcttctcccttacaaaagattcaaaggactaaccgcctgagaattctttcgattcttctcttccccttaagcaaaatatttcaaaggactaaccgcctgagaattctttngattcttctcttcccctta

SEQ ID NO: 15574 - DNA, 391 bp, Glycine max
  unsure (1)..(391): unsure at all n locations
agatcaacttgatgttctatgcttcttgaaagtgtcagtccatgaggaatctccttgggaaagacatctttaaattcctgcaataagggttgaacactaggagaaacataaatagttaactgattagaattatcactctctctctcttgtgtatcactcttttcctcaggtgtatcactcttctttttcgtattccattgtggtgcctcactattttctttctcttgttcaatttcgagcgtctcgatatattatccgcctgaatctgacgtccgtgtgaaaagttatgaccatttgaatttctagagagctttcgttgttcaatttcgagcgtctcgatatattatgcgcttgaatcggacctncgagtgaaaatctatgaccatttgaa

SEQ ID NO: 15575 - DNA, 442 bp, Glycine max
  unsure (1)..(442): unsure at all n locations
cattgataatagaagctatgagcaaattcaaacgacatttactttttactccgatgtccgattgtgtgccgtagtatatcgagactcccgtaattgaaaacagaagctcgtagcaaattcaaacgacaataatattctactcagatgtccgattatgtcccgtagtatatccatacgctcgtaattgaaaacagaagctcgtagaaaattcaaacgacaacaactttcaactcagatgtccgattgagtgctctaatatatcgagacgcttgaaattgaaagcagaagctcttagcatattctaaggactataacttatatctcggatgtccgattgggtaccataatatatcgagatgctcgaaattgacaatggaagctcgtagcaaatactaacgaccataacattntactcggatgtccgattgtgacccgtaatata

SEQ ID NO: 15576 - DNA, 408 bp, Glycine max
  unsure (1)..(408): unsure at all n locations
atttagtagatgaagatgaatccatggtcttctcttggactcctctaagaacaataacatcattgcttacactgaattgttgggagttggaagccatcttctcaatcaaattcctagcttcagcaggggtcatatcaccaagagctccaccactggcagcatcaatcatactcctctccatgttgctaagaccctcatagaaatattgaagaaggagttgctcanaaatctggtggtgaggacagcatgcacacaatttcttgaatctttcccagtactcatacaggctttctccactaagttgattgatacctgaaatgtcttttctgatggcagtggtcctagatgcaaggaagaatttctccaagaacaccctcttaaggtcatcccagctgaaaatggacctgg

SEQ ID NO: 15577 - DNA, 424 bp, Glycine max
  unsure (1)..(424): unsure at all n locations
agcttnctttcatacccacttcatcaaatgtcatgttacaacccctcaccgnccattaaacactgttgctcaatctccaccgaaaggtggcatgccttaccaaaaaccaccctatagggagaaatccccaaaggtgtccggtaagcggtcctatgggcctatagagcatccttaagtagcttgctccaatcctttntgttgggctgcactagcttctgcaacacttgttttatctctctattaaaaacctccgcttgtccattagtttatggatgataagctgcaacaattgtatgaacaaccccatacttttggagcaaggatgccaatgacttgttatagaagtggctcccttggtcactgataatggctctaggctgactacaacctgcaaaaagttagatctcacataatccacaacaac

SEQ ID NO: 15578 - DNA, 268 bp, Glycine max
atattatgcgctcgaatcgaacatccgtgtgaaaagtgatgaccatttgagtttctcgagagcttccgtggttcaattccgagcgtctatacatattatgtgcccgaatctgaccttcgtgtgaaaagatatgaccatttgaatttctcgagagcttccgacgttagatttctagcgtcgcgatatattgaattcctgaatcggagctccgtgtgaaaagctttgaccatatgattttctcgaaagctatcgtggtcaatttcgagcg

SEQ ID NO: 15579 - DNA, 315 bp, Glycine max
tagcttagcttatataatttcaaagatggaagatactttaacataatttatgcaggtatccatcacaatccagaagaacattgatgcttctattaaagatctagaagttcaagttggacaactgtaaaaatagctatctgaacatggaagtggatctttctcagcaaccacacaggtcaaccaatatgaacattgtaatttaattacaacaaggtgggggactgtggttggtttgaaggataataatgagaaaaagaataaagaatgagttgaaatgaatacgagataaatgatgatgtggtgactactgaaaaa

SEQ ID NO: 15580 - DNA, 384 bp, Glycine max
  unsure (1)..(384): unsure at all n locations
tataccttgagaggttacacggagaggaagatagtgcgagcanaaaatgggtatgtcacacgcgaggttacacagagaagaatagcacgagcatactaggtcgcgtatgacataatttaaaatatatgtccaacatcgatttccaatactaaactgatgtttacaaaatgatggtaacgttaacatcggctttttccaatataccgatgttaactagtcataacttatcatcggatctcatataacctatgttagcgtacatcagttaacatcagttcttctaaagccgatgttatcaaattagagttaacaattggttgtaccagaaaccaatgttaacgtcaccttcgttaacatcggatttttagaaatacccatgttaac

SEQ ID NO: 15581 - DNA, 437 bp, Glycine max
  unsure (1)..(437): unsure at all n locations
tgcttgatggcacgtgatccatggaaaggataatttcttgttgatgttgtttctttattggtaaagatagagcctatgttacagagatactaaacggctgtggactacatgctgatattgggatacctgttcttatagagcgtagcctcgtaaaaattgaaaagaacaacaaacttggaatgcatcctttacttcaacaaatgggaagagagataattcgtggaagttcaataaaggaacttgggaagcgaagtcgattgtggtttcatgaggatgtacttgatgtattgattgtcggttttgtagaggaaattattaaaaacagaggagagaagagagacaatacgtatgtggaggaaatagaattattttattctaattcaaattggtctcagtagcgatacaataaatagcanaagataaactaattagataac

SEQ ID NO: 15582 - DNA, 366 bp, Glycine max
  unsure (1)..(366): unsure at all n locations
acctaggagttaatgactttgtattnagtgatcttgaagcggaataatattatattgttaaataatacaacactgtaaagtatatgaaatatcaaattattaaattggaggatattaatgaactaaatattataaaaataaattattgaaacgatggaattattgtttttttaaacatgtattatgaatntaaatgctaataaaaaaataatagggatatatttgaattttaattatcttaaaataataactagtttttatgtaactgataataaaaaatggtctttcttttagtgtatcctatacaaatctaaaataattggataataacactatttgctaacaaatatcatctattaataaaat

SEQ ID NO: 15583 - DNA, 448 bp, Glycine max
  unsure (1)..(448): unsure at all n locations
ctaagcttgatgcaacattggagaggtaatgaaacactagatgattattaacatgtnttctcatgcaacgactatgatgaggaccaaaatgtgaagcttgctgccacggagtatttcgactatgctcttgtgtggtggaacaagctacaaaaggagagagcaagatatgaagagccaatggttgatacgtggacagagatgaaaaagatcatgaggaagcggtatgtgccggctagttactcaagggacttgaaattcaagctccataaactaacaccaggcaacaagggggttgaggagtattcaaggaaatggatgtgctcatgattcaagcaaagattgtagaagatgacgagggaactatggctcgatttcttaatggtttgactaatgatattcgtgatattgtcgagctgcaagagtttgttgaatggatgatttgctcaca

SEQ ID NO: 15584 - DNA, 352 bp, Glycine max
ctaagcttgaatcggacacccgtgtgaaaagtgatgacaatttgaatcttactagaacttccgttgatcattttcgagtgtcactatgtgtgatgcgccaaaagaggacattcaagctatatattatgaccatttgaagctcaaaagagctatcgtagatcaattctgagcgcgtagtaatgggattatgcctgaatctgacgttgatatgaaatgctatgaccatgtgaagccgtaaccaccttggagagcacagtatagggcctaactagcatatatgcgcccaaatcggacattcgcctgtggaaaatgacgctaagaatgtattgaaagctttcaatgtgggatttct

SEQ ID NO: 15585 - DNA, 446 bp, Glycine max
  unsure (1)..(446): unsure at all n locations
tcaagaaaaagatggcctcagcaaattccttatttccaaaatgtaattctatcttagacctccaatctttaatggagagggttaccactactggaaaacccgaatgcaaatttttattgaggcaatagatctaaatatttgggaagccatagaaatagggccttatatacccaccacagtggaaagagtttcaatagatggtagttcatcaagtgaaagcataactatagaaaaacctaaagatagatggtctgaagaggatagaaaacgagtacaatacaacttataagccaaaaatataataacatctgccctgngaatggatgaatatttcanggtttcaaattgtaagagtgctaaggaaatgtgggacactcttcgattaacacatgaaggaactacggatgttaaaagatctangataaatgcactaactcatgagtatg

SEQ ID NO: 15586 - DNA, 398 bp, Glycine max
  unsure (1)..(398): unsure at all n locations
agcttgatctggttaacctcttttgtttgggcaactgaaaagaaatgtnattgataagaatattgacttaagctttttgcattctgtcaggtgcaagattggttgtatacagatggtgaagatgccaatgccacagagtttcaagagcgtctagatcagttaaaagctgttggagatcccaatttcttcaggtatgttatattcagtataactattaatttctttctgcatgcatatntgtggtanagtttgttctgaattggtaacatttgtttccgttaaaagacttacagctcggccagcagcagtggcatgctaataatacattgtgagttgaacaggtatcataacaatcatacatgtaagtgggcttagtgttttatttcttatgtcttttg

SEQ ID NO: 15587 - DNA, 288 bp, Glycine max
  unsure (1)..(288): unsure at all n locations
agcttgactcttaatnatttgtatnggnnggatgtngaattctggttgttcctggtgcggagatgatggtacaacgggtgaaccaggagcggcatttcttttggtgatgaagccatggagaaacagagcgtttggaatgatttcatacatctcagaaaactattgggaaatgctggaaaaaacacgaatgccaagcacatataaatttgaatgaagaatgtaaaggggcgtgtgaagcaacggtcgaatttgctttgtggtgaacgtgctattaatgttaagtgattc

SEQ ID NO: 15588 - DNA, 431 bp, Glycine max
  unsure (1)..(431): unsure at all n locations
gtcgaccaaaaggttcanaaggaagagagaagaggattgtgttggttggttatcaagttgtaggtgagatgcacgacctaagaagcatggcaggccgaacggttcaaaaattaaaatgaagaatgttgttgatgttggtaatgaagttgatggggctggtgagattacaggacctaatatacatgatcaaccaaaaggttccccaaagatgaagaagaatgctttgaaagttcataatgaagttgttggtgttggtgatatcacaggacttaagaaacgtggtcgaccaaaatgttcaataaagaaacagggtactgttgtgtacgctttcaataatgaagtgccatgtgagattgcatacaagatctggaaaatataaatgctgacaatctgtgtcaaaagtttagatgatttgcaagcctaatactaat

SEQ ID NO: 15589 - DNA, 339 bp, Glycine max
  unsure (1)..(339): unsure at all n locations
atattatctactcanaaagtacacttctctatatttgcatagagggtgttcttcctaaggactgatagaacttgcctgagatgtcctaagtgatcatctaggctcctactgtacactaaaatatcatcaaaataaacaactaagaatctacctatgaaatcccttaagacatgatgcataagcctcatanaggtgtttggtgcattagtgagcccaataggcatcactagccattcatacaaaccaaacttggtcttgaaagcggttatccactcatcaccctttttcattctgatttggtgatacccaactttaagatcaattcttgaaaacatattg

SEQ ID NO: 15590 - DNA, 391 bp, Glycine max
  unsure (1)..(391): unsure at all n locations
acaggttcaggtgcaggtgctgctactggtttatgcactttattttgctngccagacctcagggggatagcgctcacatttttcggattatgcacagtttgtgaaggcaatttgtcagaattttgggattgagctcggttcatctgagtagccatctgccccatctaatttgtcagactctgaatgaaggctcttgtctctagctgaaattgcatattctggatggtcatttgcctcactaactcctctaatgaaggttgagacggggccatagtttctcgtagtctttgttgttgttgctgcattggaggatgatcatatggcctgcttggaccaacagcattctggataagagggataagttgttgttgttgctgttgtggttgtggag

SEQ ID NO: 15591 - DNA, 292 bp, Glycine max
  unsure (1)..(292): unsure at all n locations
tctatctctatctttgacaagaatgagctctgataccacgtgttagacaagtggcctcagatatcttaagaaagggggggttgaattaaaatattcgaagctttttcccctaattaaaaatctatcttactntttacttaagttatgaaattccttaatgacaatcttcttaaatattaattcaaatgaagcaacttgaatatgaatataaagcaataataaataaaggagattaacggaagagaaaatgcaaactcatgtttatacttggtcggccacacccttgtgccta

SEQ ID NO: 15592 - DNA, 401 bp, Glycine max
  unsure (1)..(401): unsure at all n locations
tctgcaagggtcatgactactgtaggagacatgtttntcttttcttaatncttttaatattngccttctttcttcttcccttatttgttccctctcaccttgatttatcctacctctctttcccttttctttctttctagttntcctttccataacttgagggaactcaactcatctaagattctagagagagaaagtccttatgactagtaccctcaccattaacactagatgaaagatgactcctattggttcctaagttgtggttctttcttgctgggggtttgcaaaaggtaaaagctagggtttaaaagaactcaagataagcgtgataatcaagaagaaagtattatgtaataacaagataaactaggtgtgactattaaagaaaatatgctatg

SEQ ID NO: 15593 - DNA, 465 bp, Glycine max
  unsure (1)..(465): unsure at all n locations
acacttagcaactcaagcttgtgcattcaatatgctgataagggtgttccatatgttctctttactggactaataaatttgctgcccaagtttcatggtcttgcagatgaagatcctcataagcatcttaaggagttccatattgtctattcctccatgaaaccccctgatgttcaggaagatcatatctttctaaaggcttttcctcattctctggagggagtggcaaaagattggttntattaccttgctcccaggtccattaccagctgggatgaccttaagagggtgttcttggaaaaaagtttccctacatctangaccactaccatcacgaaagacattntcaggcatcagacaacttagtggagagagcttgtatgagtactgngaaagattcaagaaattgtgttcaaggtgtcctcaccaccagatttctgagcaactccttctacaatatttcta

SEQ ID NO: 15594 - DNA, 405 bp, Glycine max
  unsure (1)..(405): unsure at all n locations
agcttgcgtgttgtgttgcatcggggaacaatttcactgtaaaagtgggtcccaattggattcctaattttcaacttacctatttggaagtgacatcatggcagttaggtcccagctttccattgtggattcagtcacaaaaccaacttcattatgttggactatctaacacggngattntcgattctattcccacacagatgtgggaagcactntctcaggttttgtatttaaacctctctcgtaatcatatccatggtgagattgggactacattaaagaatccaatatctatcccaactattgatctaagctcanatcacttgtgtggtaaattaccctatctttcaagtggtgtgttcggttagatctttcaagcaattcattctttgaatccatgaatga

SEQ ID NO: 15595 - DNA, 319 bp, Glycine max
atgaaccctaccctaatataaacactaacctaaccctacgcttaacaccaaaccctagacccttaacccaaaattctaatccctaaaccttaacctctgaattctaatccctaaaccctaaactctgcattctaaaccctaaaccctaaactctaaaccacaagggttagacaataaaccctacatattaaaccataatcccttaaccctaaaatttaaaccattaacccttaaccctaccttttataccctttaaccctaaatataaaaaataaaccctaaaaaataaatcctaaattctaaaccctaaacccttaac

SEQ ID NO: 15596 - DNA, 420 bp, Glycine max
  unsure (1)..(420): unsure at all n locations
tatgcttgaattgcttatnggatgcccattggttaacttggtaagcccagctttggccttgaaccatgaaatnntgtacctgttgcaaagggtctgtggtttgtgctcctctgctgaccaccatacagacctttgcccttccatgcagcaacctggagcaattgagcagcccgaagcttatgctgctaatatttacaatagacctcctcaacctcagcagcaagatcaaccacagcaaaataattatgacctctccagcaacagatacaaccctggatggaggaatcaccctaatctcaaatggtctagccctcagcaacaacaacagcagcctgctccttccttccanaatgttgctggcccaagcagaccatacattcctccaccaatccaacaacagcaacagccccagaaacaacc

SEQ ID NO: 15597 - DNA, 334 bp, Glycine max
  unsure (1)..(334): unsure at all n locations
tcacanaagtttatatggcttgaaacatgcatcgatgtagtggtacaagaagtttaatgagtttatgagcaactcaggattcanaagatgtgacatggaccattgctactatgttgagaaatatactaatagttatgttatccttgtcgtgtatgttgatgacatgttgattacaggatctagtatgatagaaattaatagtttgaagcaatagttggcagaaaactttgaaatgaaggatcttggtccagctatacaaatccttggtatgagaattcttagaaacagatcagaaggaattttgaagttgtctcaggagaaatatatacacaag

SEQ ID NO: 15598 - DNA, 401 bp, Glycine max
  unsure (1)..(401): unsure at all n locations
tttgatccaattcaaacgacaataactttttactcggatgtctgattgactctcgtcacatatcgagacactcgaaattgaatgttgaagctctgagccaattcaaacgacaataactttttacttggatgtctgattgaggcccgtaatatatcgaaatgctcgaaattgaatgttgaagctcctagcaaattcaaacgacaatatctttttactcggatgtctgattgaggcccgtaatatatcgagacgctcgaaaatgaatgttgaacctctgagcgaatncaaacgacaataaacttttactcagatgtctgatagaggctcgtaatatatcgagacgctccaaattgaatgtngaagctctgagctaattcaaacgacaacaactttttactcgg

SEQ ID NO: 15599 - DNA, 384 bp, Glycine max
  unsure (1)..(384): unsure at all n locations
tcaacattcaatttgagcgtctcgtaatattgctgtactctttcagacatccgagtaaaaatttattgtcgtttggattggctcagagattcaacattcaatttcgagcgtctcaatatattacgggactcattcagacatccgagtaaaaagttattgtcgtttgaatttgctcagaggttcaacattcaatttcgagcgtctcgatatattacaggactcaatcagacatccgagtaaaaagatattgtcgcctgaattggctcagatcttcaacattcaatttcgagcgtctcgatatatgacgggactcaatcagacatccgagtaaaagttattgtcgtttgaattgctcanagctcaacattcaatttgagcgtctcg

SEQ ID NO: 15600 - DNA, 460 bp, Glycine max
  unsure (1)..(460): unsure at all n locations
gcgatgcattgtcttctattttnctcaattnntgaacngtnnctcgatgatatnnntagcgcgatntcatgatcgagaccatttccaatgctaaaaaggttatttggtgcgtttgggaatttcctactgagcccttcggtttgtcaattnntggagccatcnntcgatatattacanggaaactgaaccggacatttccgtgtataaagttattggtcatnnttaaattttcttagaagcttcggatctaaattttgagcgtctcgatatattacgggactcaatcagacatccgagtcaaaagttattttcgtttgaatttgatacgagcttccgtattcaatttggagcatctctcgataaattatgacactctgtcgggcatccgagtaaaaacttattggcgttagaattttctaagaagtttcattttcatattggagcgtctcgatataatacg

SEQ ID NO: 15601 - DNA, 411 bp, Glycine max
atatggagcatctcgatatattatgtgtactcttccggacattcgagacaaaagtgattgtcgttagaatttggtacgagctttcgttttcaaattggagcatctggatatattacaggactctgtcggacatctgagtaaaaagttattgtcctctgaatttgctacgagcatccattttcaatatggaacgtctcgatatattatgggactcaatcgaacatccgtgtataaagttattctcgattgataatgctcagagcttctgatctgaattttgagcgtgtacatatattacgagactcaatagaacatccgagtaaaaagttattgttgtttgaatttgctacgaacttacattatgaatgtgcggtgcctcgatatattacgggactcaatcggacatccaag

SEQ ID NO: 15602 - DNA, 316 bp, Glycine max
  unsure (1)..(316): unsure at all n locations
ttcttatgttctcaatttcaagcatcttgatatattacaggacacaatcggacatccgagtaaaaagttatagtcatttgaatttgctcagagcttctattttcaatttcgagcgtcacgatatattacaagactcaatcagacatccgagtaaaacgttattgctgtttgaattatctcanagcttatgttctcaatntcaagcgtcttgatatattacaggactcaaccggacattcgacttaaanagtaatgtcgttagaatctgctacgagcttccgttttcaattacgagcgtctagatatattacgggac

SEQ ID NO: 15603 - DNA, 398 bp, Glycine max
  unsure (1)..(398): unsure at all n locations
tttactcnatgtccgaagagtcccgtatatatcgagatttctcaaattgaaaatagtagctcctagcagattcataccataataactttntactcggatgtccgattgtgtcccgtagtatatcgtgacgctcgaaattgaaaacataaggtctgagcaaattcaaacgtcaataactttttactcagatgtccaattgagtcccgtaatatatcgagatgctccaaattgaaaatagtaggtccttccaaattcaaaccataataacgttntactcggatgtctgattgagtcccgtactatatcgagacgctcgaaattgaaaaaagatgctctgagcaaattcaaacgacaataacggtttactcagatgtccgatccagtgctgtaatatatcg

SEQ ID NO: 15604 - DNA, 354 bp, Glycine max
gacacataaatactcagcttttagtttagatgatgcagatgatttgtagatacctctatgctctcctctaatgactatagcatcatttctggtgctaaactgttgggagttggaagccatcttctcaattaaatttttggcttcagtaggagtcatgtctctaaaggctccaccactggcagcatctatcatacttctctccatattactgagtccttcataaaaatattggagaagaagctgctccgaaatctgatggtgagggcaactggcacataattttttaaatctctcccagtattcgtataggctctctccactgagttgtctaatacttgagatatccttcctgat

SEQ ID NO: 15605 - DNA, 305 bp, Glycine max
  unsure (1)..(305): unsure at all n locations
tttcttatgtttaangaagtaagatgggngctcgagatgcatntaaaccttatctcaaccggacagcttgatgaagttgggatgatataccagttcggtgctggtagatggaagctatatagaggaagcatggtcattgctcaaggtaagaaggaatgctcctggtacatcgtgcaaggaaagatatgcatatggaagatgaatgttgctcaagatacaaccaaagaattatgacacaagagatngngtcacatgagtgagaaacgtttggagtttctaacataggatcactttccaaacataaa

SEQ ID NO: 15606 - DNA, 342 bp, Glycine max
  unsure (1)..(342): unsure at all n locations
tttctntggttcaggnattcatgtnncatctaggccttttgagtatgtccattttgatttatggngaccatctagaggaaaaactcatggtggaagctcatactntctcaccatcatagatgatttctccagaagagtatgattgtatgttttgaaaaataagtcagaatcttttcaaaaattcagagaatggcatactcttattggaaatcaacttggtacaaaattaaaagttttaaggactgacaatggcttggagtttgtttcagagcagttcaatgagtnttgcaggaaaataggcatcanaaggcacaaaacagtccctcacacaccacaacagaa

SEQ ID NO: 15607 - DNA, 319 bp, Glycine max
  unsure (1)..(319): unsure at all n locations
agctacttcttctaagttaccatgnagaaaagccgnnngtacatccagttgatgtaattccaagttaaaataagcaactaatgccattatgatgcgaaaggaatctttcatggatacaggagataaggtttctttgtagtcaactctatcccttcgagcgaatcctttggcaccaatcatgtcttgtgtctctcaatgttacctaatgaatccttcttggtatcgaaaatacatttacatacaatacgctttatcccattaggacatagcactagatcccatactgtattatttcccatagattccatatcatctttca

SEQ ID NO: 15608 - DNA, 385 bp, Glycine max
  unsure (1)..(385): unsure at all n locations
agcttgctcttgaggatgtaaggatatttgcagctaatgaacaactttcttaactatttgtccttcggattttactgtttttttcttatatgtaaatataaataatataaggctatggcttatggacatggtcatttttacccctaacaatcttagaagtaagtatagaccatgtttttacgcgatacccttataccatttatatttacatattagcaaaaagaaatctggatacaaaccatcaatcttcttccactgggagcaatcagccggatgacgaaccattccatcagaaatccttccatttgcatgccatgttaggtgttttgcgtcgtcctcgttagcaaanagacgcttaaaccttggaatgattggaagataccac

SEQ ID NO: 15609 - DNA, 467 bp, Glycine max
  unsure (1)..(467): unsure at all n locations
ctcagcttgtatttgtntatttaatccctggaacatactccattgttataatctgcattggaaacatagataatagataaataagttcagacataaaatggaaaatatgtgcattactacatttggcataataagagccatgaaggttaaacctgtggtgtggtataatcccagtagattgtaggaactttcacataatccatgttcttaaagttacttgcaaacaattctgcattagcagcctccttggtgtaatcaatctcctgaaaattattaatccatgttgcagtaacaggatcggagaatgttatttgctgagaacacgtgcatacatcataccaaaacaacagattcacaactcaagcaggaactgaaacaggaatgaccactcttatgtgtgatgatcttaagcccatatttgtattgtgtagatggttttcttacatcaagttttcctatacataaac

SEQ ID NO: 15610 - DNA, 412 bp, Glycine max
  unsure (1)..(412): unsure at all n locations
agcttatattctccaatgtacagattataaagcaagttccacatgatatatgcatgaaaaacaaagataacagaaattaaaattgggtttcctcccaggaagcgcttctttaacgtcattagctngacacatttacctgaatgggtgatatcaaataaacagtgttatgtgccctttcanattcttcaccatggtacaattttaacctctagccatttactacccatgttctgtcaggattctgagattgtgggtcatatagctctattgcaccataagaatcaaatttcttgataacaaagggtccagaccatntggacttcaacttaccaagaaataatttcaatcttgaattaaaatgtagtacctgttgtcccggnttgaagtctttcttcaacaaatttttgtcatg

SEQ ID NO: 15611 - DNA, 410 bp, Glycine max
  unsure (1)..(410): unsure at all n locations
ttctngactttcaacccttcttaaagtccccattgctcatcaatttcttgccttgtgctagtgataacaagttcagcagcatctagggaaagctcttctgcttctattctcctcattatcttatatgttgaattgatatcctccttcgattgacgcccttgcttaagaagctgttctagcttgtttcttccaagtgaatgaccagtgagcaccattggcacattcaaggcacctgaaagaagagcagcactatctccagcatcagcataatgtccatgaataacgtgtggccacactggtttccccccgctaacttgttcacccaatacttatgacatatngagaatgtgagctaaagccccatctacaaattcttgaatatggggccaaagaagttctttctgtagata

SEQ ID NO: 15612 - DNA, 399 bp, Glycine max
  unsure (1)..(399): unsure at all n locations
ggcgtgctttcttctctttttccctctttccaancgcgctagcagcggtttagctcctggaatgtacatctctgtaagcttcttcagatacccaattgctccgtatgaaatcatcagttacttacatttcttacttggagaaagtgatccaaggcaagaaactgcatacttttttgcagtgttctgggggcttggatcaagcaactggaccatatttggcacacttttatcattcttcttaacctctctccgattctgggacagaaccattacgcttgaattcgcttgagcagcgacctctctagcattatttgctgtatccttaagcatctatataatataagggatgccaccggctacaccaactatctttttcatctccattgagctgcaaacact

SEQ ID NO: 15613 - DNA, 428 bp, Glycine max
caattcaaatggtcataacgtttcactctgatgtcttattctagcgcataatatatcgagacgctcgaaattgaacaatggaagctcttgagcaattccaatggtcataacttttaactcggaggtccgattcaggcgcataatatgtcgagacgttcgaaatagaacaatgctagctcttgagcaattcaaattgtcataactgttcactcggaggtcagattcacgcacataatatatcgagacgctcgaaattgaacaatggaagctcttgagcaattcggatggtcataactatttcactcggacgtgcgattaaggcgcataatatatcgcgacgctcgaaattgaacaatggatgctcttgaacaatacagatggtcctaacttttcactcggatgtaccgttcacgcacataatagatcga

SEQ ID NO: 15614 - DNA, 159 bp, Glycine max
ccatgtatccaaagcccgtactaaagcatacaactccttatcataagttgaatagttcagggtaagaccacttaacttttcactaaaataagcaattggatggccttcttgcatcaacacagccccaatcccaacatttgaagcatcacacttaatttc

SEQ ID NO: 15615 - DNA, 402 bp, Glycine max
  unsure (1)..(402): unsure at all n locations
atgcaagctcgtttatttgattaaatatttctcttttatggtaaacattataaaaattttcaatatacgtaatacgttaaatatatagcataaaccaaagagtcaccctaattccatgaacacatacaaatgcaagatagtggacctagatgatttatcaaaggggtatattagaagcatgtgtaagtaactatgtacaagaaattttcttaaaatgcaaaacatgtatcatagtaagatgatgtatcaaagcataatatgtatattagagcaaaaagattgacatgaatgaaaatgcatcanatgtataaaccaattataacaagaaccaattttttccatactattnttttgtcatcaaactaaaaggaacgagtntcatcattgttaaaataaacaaaa

SEQ ID NO: 15616 - DNA, 397 bp, Glycine max
  unsure (1)..(397): unsure at all n locations
atgctgtcgcagacttgccaggtgattattttgttttggtccacacattnttcaatgagaagtgatcatggaggtgaatttcaaaatgagtcttttganaacttttgtgaagaaaatggaattcaccataattttcaaccccaagaacacctcaatagaatggcattatggagaggaaaaatagatcccttgaagaaagtgcaagaacccttctaaacgaaaccaggttgcctaagtacttttgggcagatgttgtacatactgtttgttacaccttgaaaaaagtacttattagacctattctgaagaagactccttatgaattgtataaaggaagagaaccaaacactttacacctgagagtttttggttgtaagtgtttcgttttaacaatggt

SEQ ID NO: 15617 - DNA, 440 bp, Glycine max
  unsure (1)..(440): unsure at all n locations
tcaacgtggtaaggcttgttaatttatccacttttagttaatttttattagaatattaatcacacatctttattttaaaagaacttaaaaaagggttggagcaatttgttggcccaaaataacaatatacaagtataggtattaaactcttatgagaaaaaaaatttatgcactgattgatatttacagtataataagttttatacaatcattcaattacaatcaatcatgtataatagattntttgatttttaaaataattataaagtaattcaaacgataattntgtgtttaactaataatataaaattgttttacattatcaatgtataggtattaaagtctaaaagataaaataaagattgaatatgtgcatcttgagaaataatgagtttttaataattatggttattttgactgcataattatgaattactata

SEQ ID NO: 15618 - DNA, 409 bp, Glycine max
  unsure (1)..(409): unsure at all n locations
tgccttgccccttgatatatttgaaggactcatggtcactattaatgacaaattccttgggataaaggtagtgttgccatgttttcaaagcccgtactaaggcatacaactccttatcataagttgaatagttaagggtaggaccacttaacttttcactaaaataagcaattggatggccttcttgcatcaacacagccccaatcccaacatttgaagcatcacacttaatttcaaaagatttttganagtttggcaacgaaagtatgggggcattagttagcttttgcttaagaacattgaaagcttcttcttgtgtctctccccatttganaccaacattnttcttgagcacttcattgagaggtgctgccaatgtgctaaaatccttcacaaatcgtctataaaa

SEQ ID NO: 15619 - DNA, 318 bp, Glycine max
  unsure (1)..(318): unsure at all n locations
agcttcaattttgcaacttaggagttgagcaggtaaaaaagattcgtcttcaaactcttagaggtgactttgagcgtttgtntatggaggagtccgagtcattttctgattttttttctcgagtattgcccgtaatcaatcaacttaaaagaaatggtgaagatgtngatgaagtgaaggtcatggaaaaaatacttcgaactttatatccaagttttgccttcattgttaccaacattgaagaaaacaaggatttaaagaccatgactattgagcaactcatgggttccttacaagcatacgaagaaaaacaaaaga

SEQ ID NO: 15620 - DNA, 409 bp, Glycine max
  unsure (1)..(409): unsure at all n locations
ttctntgttataaactatgtgcggcaaaacttcattactattattcagtatatacaaatgagcttgttgcaattcttctagagttggagtgataacatgcaatccncttatacctttacctctcactctctcgtcaaggcgagactccagaatcccaacagggtttgccttttccatgtacttagaacaaaactcaatagcttcttctgcaatgtacctttcaataatagatgcttcagaacagtgtagattctntatatacctttntaagatcttcatgtatcactcaatcgggtacatccaccgcannataatggaaccgcaacatttaatttccctcactagatgaacaattaagtgaaccatgatgtcaaanaattaaggaaaatacatctccaaatgacacaag

SEQ ID NO: 15621 - DNA, 394 bp, Glycine max
  unsure (1)..(394): unsure at all n locations
atcatccatattcaatactatttaatcatcattttaaaaaagagtgcggccaattaattntaaaaataaccaaataccttatttaaaatatatgtataccttanacatgtgtaatttgttggatcattgattatgtgtttatatattcaatagatattaactctcctttaatgtatgttttttgtcaacatgtttttcttggcttcggcttaattntattattcttcanaaaagagtgtccgggactttntgacaaanaaatggatgttntttatataaaaaanaacaatattctcaaagagtgtagtttggaaacaatntacaagacatatnttttgtcacataatatgtangagaaaccaatctcggtgtcactttatatttgttttatgtc

SEQ ID NO: 15622 - DNA, 409 bp, Glycine max
  unsure (1)..(409): unsure at all n locations
tatcttgtgttttggtacccacatcatcttctttctgctgttgctactttgagttccatgatgtggatggccatgtagatgatagcaaaagggctntatgtgaccatacttgccacagtagtgacacctccacttctttcttttgctccttttctgctgcgttccatgatgtcgagaccgatgttgtgacatcgtggctccagtgctgtttttggcaggaacaaattctgtcatggttgttctgccagcagacttaggattaaatccaagtcctctctggtttccaacattctttccaagctgcagcacctcatcaagcgtatctgagcctttattcagcatctttattgattctgtcatgttttccagtttagagttcagaaaaccaacttctcctttaagctcagag

SEQ ID NO: 15623 - DNA, 393 bp, Glycine max
  unsure (1)..(393): unsure at all n locations
cactcaagcttgcccaggtcgagaaggagcttgtccgaacaatttagctttatcaaaganaacatgtgggccatcatcgaccaatacaaggaaaagttaagcctagcggtaactcacaaacaaaggctagaggacgagtacgtgaaggtataagtcctgcaagtggaaagggaagcaagggaaagggtgatcgattcattacacagagaagcaatgatgtggatggataggttctcctttactgaaattctgatactgtggacagatgtcgtacaggatgtcacgacatcgcgcttcagaacatgcagctagtatatgaccgtatgaacagaataaacaagtaaataacacaagagaattgtaacccagttcggtgaaacgtacctacatctg

SEQ ID NO: 15624 - DNA, 388 bp, Glycine max
agcttcatcattcaatttcgagcgtctcgatatatgacgggactcaatcagacatccgagtaaaaagttattgtcgtttgaattggctcagagcttcaacattcaatttcgagggtctcgatatattgcgggactcaatcagacatccgagtaaaaagttattgtcgtttgaattggctcagagcttcaacattcaatttcgagcgtctcgatatatgacgggactcaatcagacatcctagtaaaaagttattgtcgtttgaattggctcagaggttcaacattcaatttcgagcgtctcgatatactacgggacctcatcagacatccgagtaaaacgtattgtcgtttgaatggctcagacgtcaacattcaattcgagcgtctc

SEQ ID NO: 15625 - DNA, 312 bp, Glycine max
tgagccattcagacgacaataacgtttactccgatgtcttattgagtcccttcatatatcgagacgctcgaaattgaatgttgaagctctgagccaattcaaacgacaataactttttactcggatgtctgattgagtcccgtaatatatcgagaccctcgaaattgaatgttgaagctctgagccaattcaaacgacaataacgttgtactcggatgtctgattgagtcccgcaatatatcgagacactcgacattgaatgttgaatctctgagccaattcaaacgacaataactttttactcggatgtct

SEQ ID NO: 15626 - DNA, 312 bp, Glycine max
  unsure (1)..(312): unsure at all n locations
tttcaganaatattctcaacagtcacatctttttatgtggttcttgaatggctatcaaaggcctatatatatgtgacttgagacacgaatttgctaagagtntttcagaacaaaaaggtcttatcctcttataaagaaaaatcgttttatcctcttacaaattccttggccaaattacttgtgattcaataaggaattatttgagtgctcaaattgttcaatctatctctttcaagagagatttcttcttctcttcttcttcattctgannagggattaagagaccganggtctcttgttgtgaaataattc

SEQ ID NO: 15627 - DNA, 255 bp, Glycine max
accattaaaaaaagctgtccctccatccatctgttgcaactcaaggtcaaaatgagcaactaatgccaagattatacgaagagaatctttcttagatactggagagaaagtctctttataatctattccttcctttagagtagatcccttacaacaagacttgccttgtatctctcaatgttagctaatgaatcctttttggtcttatagacccatttacatccaatggccttcgccccattatgcgactctaca

SEQ ID NO: 15628 - DNA, 244 bp, Glycine max
  unsure (1)..(244): unsure at all n locations
ggagatgaaaaaaatcatgaggaagcggtatgtgccggctagttactcaagggacttgaaattcaagctccaaaaactaacccaaggcaacaagggggttgaggagtatttcaaggaaatggatgtgctcatgattcaagcacatattgaagaagatgaggaggtaactatggctcgatntcttaatggtttgactaatgatatccgtgatattgttgagctgcaagagtttgttgaaatggat

SEQ ID NO: 15629 - DNA, 398 bp, Glycine max
  unsure (1)..(398): unsure at all n locations
tgcattcaggaacctaacaaacaatacaagatgcttcacttccagtcctgctccaatgaataaatctttataagtaaaacatgtatgtttattctaactcaccccatcttggagcttgtcctctacagcagtggcaccaagaagaattaggttcttctcaatcttatctgatacttcctcaatcattatatcctgatcagcactgactacattcttggccctagagaatttactatcaaactccttgtattcttctgcatcaagttcacgataggccagtataaaggttctcaaacccgcatcagcatactcatgcacatngctcatggttttctcttcaaactccttcctattcttggcaagcctttcaaacatggtgctgcatgaaaacatcactc

SEQ ID NO: 15630 - DNA, 403 bp, Glycine max
  unsure (1)..(403): unsure at all n locations
agcttgttggtaaactatatgccttgtttaacccggtaacccaactggccatgaatcaaaaatctgcacctgtcgctagactctantggttatgctcctctgacgaccaccacacagacctttgcccttgtgtgcaacaatctgaagcaattgagcagccctaagcttatgctacaaacatctacagtaaacctcctcaacctcagtagcaaaatcagccacaacagaacaattatgacctctccagcaacaggtacaatctgcggtggaggaatcataccaatcttaaatggtcgagtacttcacaacagtagctacaacaccagccttatttgtcaaatgttgctggcccaagttgaccatacgttcactcaccgatccagcagtaacaacaacaacagca

SEQ ID NO: 15631 - DNA, 392 bp, Glycine max
gctttatgtaaactgatgccttggtaacccggaacccaactgccatgaataaaaattgccctgtcgctagctctatggttatgctcctctgccgacaccacacagacctttgccttgtgtgcaacaatctgaagcaattgagcagcctaaagcttatgctacaaacatctacagtagacctcctcaacctcagtagcaaaatcagccacaacagaacaattatgacctctccagcaacaggtacaatctcgggtggaggaatcataccaatcttagatggtcgagtccttcacaacagtagcaacaacaccagccctattttcaaaatgttgctggcccaagtagaccatacgttccttcaccaatccagcagtaacaacaacaacagcagc

SEQ ID NO: 15632 - DNA, 280 bp, Glycine max
  unsure (1)..(280): unsure at all n locations
tatcgagacgctcgaaattgaatgttgaagctctgagccaattcaaacaataataacgttttactcggatgtctgattgactcccgtaatataacgagacgctcgaaattgaatgttgaagctctgagccaattgaaacgacaataactntttactcggatgtctgattgagtcccatcatatatcgagacgctcgaaattgaatgttgaagctctgagccaattcaaacgacaataaactttttcacggatgtctgattgagtcccgtaacatatcgag

SEQ ID NO: 15633 - DNA, 335 bp, Glycine max
  unsure (1)..(335): unsure at all n locations
agctttatcatcagaccacttncagggtgctggaactacttcacatggacttgatggggcctatgcaagttgaaagccttggaggaaagaggtatgcctatgttgttgtggatgatttctccagatttacctgngtcaactttatcagagagaaatcagacacctttgaagtattcaaagagttgagtctaagacttcaaagagaanaagactgtgtcatcaagagaattangagtgaccatggcagagagtntgaaaacagcaagtttactgaattctgcacatctgaaggcatcactcatgagttctctgcagccatcacaccacaacaaaat

SEQ ID NO: 15634 - DNA, 325 bp, Glycine max
  unsure (1)..(325): unsure at all n locations
aaattgagtggggagaaaattttcactaattatgattagtgaattttagctatggttcagcccaccaatccaagatcaattccaagattctccactaagtgtgcttaggtgtcatgaggcatgtaaagcatgaaggacatgcacaaagtgtgactatatgatgtggcaatggggtgtagcaagcaaatgatcacctccccctctaatatttaattggattggtcttctcccaattcaattaaatntattgctcaacacacacatcaaatatggacttaattaacgtgaaattacaaaactacccctaatacacaaactatagtct

SEQ ID NO: 15635 - DNA, 232 bp, Glycine max
  unsure (1)..(232): unsure at all n locations
ataanatatcgagacgctcgaaattgaaaatcggaagctcttgagcaattcaaatggtcataacttctaactcgaaggtccgattgaggtgcataatatatcgagacgctcgaaattgaagaatggaagctcttgagcaattcaaatggttataacttttcactccgaggtccgatacacgtgcataatatatcgagacgctctaaattgaacaatggaagctcatgagcaa

SEQ ID NO: 15636 - DNA, 369 bp, Glycine max
  unsure (1)..(369): unsure at all n locations
agctttttcgtatgtgctccaaacanaagcgggcatggtggtttaataagaaacctaggggaaattactgttcatgctgaagagactgttgcttcaaagagtgcagttgagatggtcttgcgttgttctcacttggataacagggatgtcttttctaaaagtgtacgtattctatatcccatattaatgtcccctatttaattaaatacatttttttttgtttgtcattcgaaacatctctcatatattgttttctcgtangaccctcttctaagaatatcaagaatggttgagagtggacgttatattcctatatgcaagactgaagttatcgacgacaatttaaattccaaatggaatcatttgtct

SEQ ID NO: 15637 - DNA, 399 bp, Glycine max
  unsure (1)..(399): unsure at all n locations
agcttgtattagtatacttcaccttgctgcggtggcacttaacctggctctaatcctggctgcacttgacccaattggggtttttcagtcttaacctcttcctgaaccagggatttctgcttctccaatgattgaaacttctttggggtcttcttttccttccttgagacctcttgatagcttgtggctgattctgccgctcgtaacttaagcagcctcatctctttcctcagtgcagcattttccacctcaaatttccggacatcaacattggttcgttctacctgtgcacttgctttagacaggcattntccatctcagaaacttcttcatagtgttttcctctagagattgtttttctttnttaagacgttcaactcatctttctcttgtctcaat

SEQ ID NO: 15638 - DNA, 398 bp, Glycine max
  unsure (1)..(398): unsure at all n locations
agcttttactaagttcatcctaccatcctcagactgatggtcaaactgaacggaccattcattccctggaggaccttttgaggtcatgtgtcttaaagcanaaggggagagctttctttcattgatagagttcacttacaacaacagttntcactctaccattggcatggctccctatgaagctntgtatggtagaaggtgtangacacctctatgttggctaaagccctgagaagacctcaccttatgacttgaagtggtacaacaaaccaccgagaaggtcaagttgatccaagaaaggatgaagactgctcagagtangtagaaaagttatcaggataagaggangaaagacttggaattcgaggtggtgatcatgtattcttgagagtcactct

SEQ ID NO: 15639 - DNA, 403 bp, Glycine max
  unsure (1)..(403): unsure at all n locations
attgaacaagcggaagctctgcgtgtataatcnagtgtttttaaattntcacacagatgtccgatgcggggaaataatatatcgagacgcacgaaattgaacaacggaagctctcgagaaatttgaatggtcataacatttcactcggatgttcgatccggggacataatttatcgagacgctcgaaattgaacaaccgaagctctcgacacattagaatggtcgtaactnttcacgcgaatgttcgattctgggacataactcatctagacgctcgaaattgaacaacggaagctctcgagaaattcgaatggtcataagttttcacaccgatgttcgattcggggacataatatatcaagacgctcgaaatttgacaccggaagctttcgagaaaatcgat

SEQ ID NO: 15640 - DNA, 393 bp, Glycine max
  unsure (1)..(393): unsure at all n locations
taagcttatcaccatcggaagccatggataaaagcttgaaggtaggagaaaatgagtagagggagagggaaagaagggaatgaaatnttgagagagaaaagagggagaatgaggtctgaactttgaagtctaatttctcanaaataaaagttgcaaaatacacatacaaggtctctatttatagcataagtgtcatacaaaattagaaggaaatttgaatttctattcaaatttcacttgaatttgaatntgaatttatggagccaaatttggagccaaaatttcactaattatgattagagaatttcatctatggttcaacccactaatccaagatcaaatccaagattctccactaactgtgcttangtgtcatgaggcatgtaaagcatg

SEQ ID NO: 15641 - DNA, 325 bp, Glycine max
  unsure (1)..(325): unsure at all n locations
agcttattgacatccgtgactngatcttaagcgaagatgttcgcaagagagatntangagaatcttccaatcatgtntccanttcagcatttgatactgaaggcangggaagtactacccaaaatgatgcaatcctaccccgcaagggcattggctagaagactccaagtagattgggctagagatccaaggaaaggccctagggttctcatgagccttanggtagatntcgagcccatgggctaagtatgagcccgcttatctttgtaatattagatanggtattccttcgtctagccctgtattttggctattctagtagtat

SEQ ID NO: 15642 - DNA, 357 bp, Glycine max
  unsure (1)..(357): unsure at all n locations
caaatcccttgggataaaggtagtgttgccatgttttcaaagcccgtactaaagcatacaactccttatcataagttgaatagttaaaggtaggaccacttaacttttcactaaaataagcaattggatggccttcttgcatcaacacagccccaatcccaacatttgaagcatcacactcaatttcaaaagatttttgaaagtttggcaacgcaagtatgggggcattagttagctnttgcttaagaacattgaaagcttcttcttgtttctctccccatttgaaaccaacatttttcttgagcacttcattgagaggtgctgccaatgtgctaaaatccgtctataaaaacttgc

SEQ ID NO: 15643 - DNA, 186 bp, Glycine max
tatttatgacctctccagcaacaggtacaatcccggatggaggaatcatcctaaccttagatggttgaatccttcacaacagcagcagcaacaacaacatacttattttcaaaatgctgctggcccaagcataccatacgttctttcaccatccagcagcaacaggcccaaaaacagcaaacagtt

SEQ ID NO: 15644 - DNA, 349 bp, Glycine max
aggccctgatcaattctggcaattgcaccatttgtaagttttgcttcttttgatgcttgaacatcattccatttttccttgcaacattcatgaacagcatgcatcatctcgtgatgagaagtatacgctacgcagatcaaaagaactctctggttgttgcgagcagtaactctcattgccttttgcacagaacatgagaacattaaattcaaccttatggccataaccttcttacatgtatctcttctttgcatacctttgattcccatccatgatgaaagcaatatgacttggcataggaaccaccgataaaatgggcaacatgcatcttcttatataacaatataaa

SEQ ID NO: 15645 - DNA, 390 bp, Glycine max
agctttcattataataaactaagcaataaactacttcatattttccctgtgtgtgtggttgtcgtgcaatcccttctacaacttgccatgcaacattgccttgatcaaacccaagagcaagccctatggccaatctatcaataataacagaagcaacaaaaataattagattcatgataattttcttgtaacctaaatatgaaataaagaaataattaatgatataattgatcgggtaatcatgacttaattttttaattatcaagatttatcttattaaagtaattaataagagttccaaattgaaaataatagtagttattgaatactaccaatgaggattccaacatgcttgaacttatgaaattgtattattgagacacacactct

SEQ ID NO: 15646 - DNA, 478 bp, Glycine max
  unsure (1)..(478): unsure at all n locations
acataatactcagtagtccttgctacaagggaaaccttcgaaaaagaaaccanactgncttacatattcgataaaaaaacagaccaaatatttttttcaggggaaagaccacaaaccaggattggagttagctgcccctctaggtcaagaagacctttggcaaaagcagctgcagacatctgtttaatatgggtcatgaaaaaatggctcacatatgatgccaaaggacaaattaggcttataaacaatgcctagacatcaaacacttccaaaatgtataaaaatgtagcaaccaataatgaaaaccacttagccttcttatgattaaggtgagcacaactttaggccatacctgcacacgaccctcatcagagctgtaaatcttgagatcatgacggtatgtactatggaggcgaagaagccctgtaccttcttcttgcatttaaaccacacaaaaatttgcctttatacatactac

SEQ ID NO: 15647 - DNA, 329 bp, Glycine max
  unsure (1)..(329): unsure at all n locations
ngagacatatagattgaatcctagtgagctctaggacttagnttaatatctgtcaactggtcatgagaattgatgaacccagtgataatctccttggacaataatttctctcgaatgaaatgataatcaatctctatgtgtttagtcttttcatgaaagactggatatgaggcaatgtgaagagctgcctgattatcacagtataacttcatttgcaccacttcacaaaattccaactcttggagaaattgtttaatccacataagttcacatgtaaccatagccatagatcgatattcagcctctgcactagatcgagcaacaacagt

SEQ ID NO: 15648 - DNA, 455 bp, Glycine max
  unsure (1)..(455): unsure at all n locations
tctntgaganaacttccttgagaagctagagcttatctactcacacccctctcataactaagctcacctccttgagaagcttccttaagaagattcctaaagaagctagagcttagctacacatacctctctaatagctaagctcacctccttgagatgagaagctagagcttagctacacaccccctataatagctaagctcacccccatgacaaanaacatgaaaataataaaaaaaaagtccttattacaaagacaactcanaatgccccgaaatacaaggctaaaaccctatactactagaatggccaaaatacaaggcctagacgaagganaaacctattctaatatttacaaagataagcgggctcatacttagcccatgggctcgagatctaccctaaggctcatgagaaccctanggcctntccttggatctctagcccaatctact

SEQ ID NO: 15649 - DNA, 396 bp, Glycine max
gacacataatactcagcttatataacctttaccatgatagagataactggtggattgttgcatcaattgtagtggttctctgcctattatgggttggcatagaggatgtaagctttcatagcaaagggaccacactcaatcttgcaactcttcctgttgctgttggtctttatggttactgctactttggacatgctgtgttcccaaacatttatacatccatgacaaatccaaaccaatttccctggaatcctcttagcatggtaaatgacttttagctataatctaactcagcttccactagtccactcactaaatattaaatctcctcaagtcctgtacaaattgcaatttacaaatatagtcaaaagatataattatttggcttacgtcaac

SEQ ID NO: 15650 - DNA, 346 bp, Glycine max
  unsure (1)..(346): unsure at all n locations
ctagagcggttcccttatgttatcaaacataaaaagggataaggtaatattgtagccgatgctctttctcggcgtcatgcattactttctatgcttgaaacanaattgattgggcttgaatgtttgaaaagcatgtatgaaaatgatgaaacttttggagaaattttttaaaatagtgaaaaatattcagaaaatggtgtctttatacatgaaggctttcttttcaaagaaaacaaattgtgtgtgcgtaaagtctactacaaatttgttgtttgtgaacacatgaagaagttaaaggggcattttgggtccaaagactctaaaacattaaaaacattttatggct

SEQ ID NO: 15651 - DNA, 225 bp, Glycine max
  unsure (1)..(225): unsure at all n locations
atattatgcacccgaatcggatatccttgtgaagagttatgactatatgaatnttccgagagtttccgatgtttaatttcgagcgtatcgatatattataagctcgaatcggacatccgtgtgaaaatntatgaccatttgaatttctcaagagcttccgttgtcaatatccagcttctcgatatgtgatttgcctgaatcggacatccgtgtgaaatgtttacc

SEQ ID NO: 15652 - DNA, 387 bp, Glycine max
agcttgtaattattgaatcatcaaccatgctcgtcccagcagactacgcattctttgtagggcccatttcattctcgggcccatactgtaaacccagcatcgttttccaggtaacatatcaaacccaaagagagaaagtagcaggaataaacagagagagaaagagagaaaataacaggaaaaaaatgaaaagaaactaaataacatgatagcccacaagtgtgttcataagccaaatgtgatttggcatcaaaaaataacgtcaaccttttgtcattcaagtaagacagaacacatgtctgtcatttcccatgaatcatttacatttagttaaattttaaatatcaataaaatatttaagaaatattatagtttatttaataaata

SEQ ID NO: 15653 - DNA, 303 bp, Glycine max
gtcctgctccaatgaataaatctttataagtaaaacatgtatgtttattctaactcaccccatcttggagcttgtcctctacagcagtggcaccaagaagaattaggttcttctcaatcttatctgatacttcctcaatcattatatcctgatcagcactgactacattcttggccctagagaatatactatcaaactccttgtattcttctgcatcaaattcacgataagccagtataaagggtctcagacccgcatcaccatactcatgcacatgccccatgggtttctcttccaactccc

SEQ ID NO: 15654 - DNA, 170 bp, Glycine max
agcttttttttatattatgcacatgaatcggacctgcgagtgacaagatatggccatttgaatttttcgagagcttccgctgctcaataacgagcgtctcgatatactatactcctgaatcggacctccgagtgaaaagttaagaccatttgaatatctcgagagcttcc

SEQ ID NO: 15655 - DNA, 373 bp, Glycine max
  unsure (1)..(373): unsure at all n locations
gtatatgtaaatcaaccccctggatttgaaaactcagacaagactaatcatgattntagattaaaaaaggctntatatggctcanagcaatatagatactactcttttcataaagagaaaattacatgatattttattggttcaaatttatgttgatgatattatttttggatctactaatgaattattgtgcatggaattctctcatgacatgcaaagtgagtntgaaatgttaatgatgggagaacttaatttctttcttggattacaaattanacaaaccaagactggaattnntgtcaatcaatccaagtactgcanagagttaattcacatattcngaatggaaatgctancacatggctacccaatg

SEQ ID NO: 15656 - DNA, 301 bp, Glycine max
  unsure (1)..(301): unsure at all n locations
cctaggatcttcttcatcaatggattcctttgcttcttggaagataaatggcngcggaatggagataggaagagagagaggagacgccacttcaaagagaagatgagtctagaagaagctcaccaccataggaggccatggataagagcttggaggaagaacgagatgaatgaggggagagggagagaagagcacgcaaatttgtgctctaaatgagcctctgaatctgaagtttaatatctcaatgatcaaagttgaaaaaaatgcacatacatgacctctattatagcctaagtgtcca

SEQ ID NO: 15657 - DNA, 299 bp, Glycine max
  unsure (1)..(299): unsure at all n locations
tatcttgatgaggatgtgccatatgttcnttangactggactaatacattngctgcccaagtttcatggtcttgcaggtgaagatcctcataagcatcttaaggagttccatattgtctgttccaccatgaaaccccctgatgtccaggaagatcatatctttctaaaggcttttcctcattctctggagggagtggcgaaagattggttgtactaccttgctcccaagtccattactagctgggatgaccttaagagggtgttcttggagaaattcttccttgcatctangaccactt

SEQ ID NO: 15658 - DNA, 352 bp, Glycine max
  unsure (1)..(352): unsure at all n locations
cttcgtcaagtaagtgacagcttgatattgattttttaggccacattggtgcaagttgctgccactgtacctcttaactgttcaagtcaacaagatggcttaagggtgtggttggataaacaacttaattaagtgcttattagataagtacttatcatgtaagcccttatgtataagctatntctataataaaagtagaaataggattaaactctctcaatataagttgttagttattttcatgaggtatcatggagattggagatcttatngataagctgaaaacaacttatggacaaattataagctatgtccataagctctcccaaacacttacaagttcttatgtgac

SEQ ID NO: 15659 - DNA, 398 bp, Glycine max
  unsure (1)..(398): unsure at all n locations
tgcctatccaaggcattctctaggagccgaagctcctnattattggcttattccttagtggatggcgcctcctttctcctcttctcctttgtcttccgctgcatctccatggtggaaaatcaccattgaaggacctcattgaagctcaaagatccagcctccatagaagctccacaagcaagcttccatcacatcccttgtggatctttgcttgtaaaggattttacaaggttattggaaatctaaagaaccggtggttgcttggggactggatgtangcactggttgttgccgaaccagtataaacttgtgtttggcttcttcttccctacactctataattctcgctgtgtacttttaattccgctttacttaagtctaacgtattagttatgttc

SEQ ID NO: 15660 - DNA, 326 bp, Glycine max
agctttagtcctgacccggtctgcacttgtaatgtgcgatgctcttgcccagtttccaccattatcggacaaagaaagcttgaagaccgagctatgcaatttctgagaggtctgaatgaacagtatacatacattcggtctcatgtgttacttatggatcctataccacccatatcaaagatcttctcatacgtggcgcaacaagaacggcaactgttatgtaactgctctcctaatctcaattttgaatctaaggaaatctccattattgctgcaaggtccgtttgtgagtattatggacgaatcggtcaccacaaaaatgtgtg

SEQ ID NO: 15661 - DNA, 347 bp, Glycine max
ttaaaacaaagagtttttgcctctaaagaaatttttctagcttataaacttttcttcacacacactataatgatacacaatgcaaaacagatatcaaatgtactaagatgcaacaaccaagataacaaccaatacaaatgtcactcaagggagttgggcatgtataagccaaaacttcttcataaatgcctaaaactctttaactactctatttctcccaccacatcatggtcactgcactccccatgtacatacataacatacattatcacaatgacgttttcaatgtcaacaacatctcatcttaattgtcttacccacatcaacatcatgtcatctcaatatca

SEQ ID NO: 15662 - DNA, 406 bp, Glycine max
  unsure (1)..(406): unsure at all n locations
tgaaggtgtgtagtccaccatctggtgatagnagaatattggattgtgtctactatcattatcattgggtctccgtcattgaagtgccacttgagctgccaggtctctccacctttgggcgtattctttgaaagatctgtgcccctttttgcacatgttatgttgttgcatcctatccggaaccatatcaaaattgtactgatactgcctaatgaaggcaaccattatgtccttccaagagtggactcgagaaggttcgaggttagtgtaccaggtaacagctaccccagtaagattatcttggaaggaatgtatcagcaggtcctcatctgttacgcatgcccgcatcttccgataatacatccttagatggttctttgggcaagtagtccccttatacttgaca

SEQ ID NO: 15663 - DNA, 353 bp, Glycine max
  unsure (1)..(353): unsure at all n locations
agcttgatttcttagcataatcactngcatcgcacatggactcaaattcttgcccctatctggtgttgtaattcctggtgcaaacactaattgtgttttcaaatcattaaatgctctcatacattcttcattgaacacaaaagcaacatctttattcaacaaattgctcaacagtttggctactttggagaaatcttttatgaatcgcctagtgaaccctgcatgtgctaagaaacttcttattcccttgacattcangggaggaggtagtatgtcaattacattgtacacctctttccctcttactgacattttatgccccaacactattcgcttctgaaccatgaaatgac

SEQ ID NO: 15664 - DNA, 180 bp, Glycine max
taaacgccacatccttcttcaccagctcattgacaggtgatgcgattgtcgataaattatgaacgaaccttctatataagcttgctaacccatggaagctcctaatatcgtccacactctctggggtgggccattattggatggccttgattttctcatggtccacttggaccccatttc

SEQ ID NO: 15665 - DNA, 427 bp, Glycine max
  unsure (1)..(427): unsure at all n locations
ntggatctttgtaagcagtagaagaaaactatgatgctcctgatttatctttagatccaacggtggctcagatgaagaatcacagagaaaggaagaccaaaaagactaaggctaaaaattgccttttctctactgtgtcaaaaattatttttacaagaattatgaacttcaagtctgccaaacagatttgggattatctcagatcagaatatcaaggctgtgaaagaaccaaaggcatgcaagtactcaacttgngcagagaattcgagatgcagagcatgaaaaagactgaaacaattaaaggctacgctgaccggctgttaagcatagcaaatagagtgaggcttcttgggaaagactntcctgatgaaagaatagtgcanaanatcctggtcactatacccgagaagtatgaatcgaagatatc

SEQ ID NO: 15666 - DNA, 277 bp, Glycine max
caaaagccattcatgatttttctaaacctttgatcaacatgatgaaagcagctgggtgggaccttgatgctgctgccaactcaatcgaacctgatgttgtttatgcaaagagagctcataagaaatatgcatttgagtcttacatatgccaaagaatgttcagtggctctgagcaagaaaacttctctgtcaaatcagacaatattactgtaactaaagagagcttctttcaccaagttctcgcattaagagagatggatcccttggacatgctggg

SEQ ID NO: 15667 - DNA, 377 bp, Glycine max
  unsure (1)..(377): unsure at all n locations
cctcaccaaatcccttatttccagaagggaattctatcaatagacctccaatctttaatggagagggttaccactactggaaaacccgaatgcaaatttttatcgaggcaatagatctaaatatctgggaagccatagaaatagggccttatatacccaccacagtagaaagagtttcaatagatggtagttcatcaagtgaaagcataaccatagaanaacctagagatagatggtctgaagaggatagaaaacgagtacaatacaacctaaaagccaaaaacataataacatctgccctatgaatggatgaatatttcagagtttcaaattgcaagagtgctaatgaaatgtgggacactctttgattaacacat

SEQ ID NO: 15668 - DNA, 397 bp, Glycine max
  unsure (1)..(397): unsure at all n locations
gacacttagatactcagcttgagcaattcagcaaaatcactttttactcggatgttgattgagtcccgtaatatatcgagacgctcgaaatggaacaccgaatctctgagaaaattcaaacgacaataactttntactcggatgtcagattgagtccagaaatttgtcaagatgcttgaaattgaagaccaaagctctgagcgaattcaaacgacaataactttttactcggatgtgtgactgagtcccgtaatatatcgagacgctcggaattgattatcgaagctctgagcaaattcaaacgacaataagtttttactcggatgtctgattgagtcccgtaatatatcgagacgctagaaattgaataccgaagctctgagcaaattcaaacgat

SEQ ID NO: 15669 - DNA, 348 bp, Glycine max
  unsure (1)..(348): unsure at all n locations
tgctgtcttcgtatatggccacctgataatcctatcgaaaagctctccacctgcacataattccatcacaacatgaacagccacggcatccttatatgcacctttgatggatataacattacgatgccccgccaagtggtgcattatctgaatatctcttctcacatcctccacatcatcatcggtgacgagcttcctctttgcaatagatntgcaggcgcactccagccctgttgccttttccacgcacaagaacgttgtcccgaactgaccctgtccaagtttctcccagagtaaagaactcttgaaatatcggtctctctttgaacacagaataacacgaaccct

SEQ ID NO: 15670 - DNA, 397 bp, Glycine max
  unsure (1)..(397): unsure at all n locations
agctgaagtttcttcatttgcacaagacgctaataggngaagagtatccttgtggaaccttcacccgacgaagacactgacaaaaacttatcttctccttcttggacaaggtatggcaggctgggggcaagtaaattttcttcccatcacaccttggatgcaattgtgatcgtatacccatatcagctagatcttgatgggtattcaagccatccttcgtcttgccttgaatgttaatgagcgtaccaatcacattgtcacaaacatctttctccacatgcataacatcaatacaatgtctaacgtcaagatcacaccagtacagaagatcaaagaaaatagacctcttcttcatatgcaactctgactcttatccttcttttgggcttaccaatac

SEQ ID NO: 15671 - DNA, 321 bp, Glycine max
  unsure (1)..(321): unsure at all n locations
ctcaattaaatttctggcttcagcaagagtcatgtatcgaaaggctccaccactggcagcatctatcatacttctctccatattactgagtccttcataaaaatattggagaagaagttgttctgaaatctgatggtgggggcaactggcacatagttttttaaatcgctcccagtactcatacaggctctctccactgagttgtctaatacctgagatatctttcctgatggctgtggtcctggaagcaaagaaaantttttctaacaatactctcttaaagtcatcccacctcgtgatggaccttggacaaggtaatac

SEQ ID NO: 15672 - DNA, 402 bp, Glycine max
agctagccttttgcaagtgccatttggcccatgtaatgaactacatttccactatcagtgggtcctaaggagatggaggaaagtgtttctacaagagattgttgcaatgcttccaagccttgagataaagcatcctcagcctgctgggaagactgttgcagattataaattcccatcaactgctgatctgttaatggctcaaggtggttcttgatgatctgaactccaaaagacgagaaatgagtcaacaacaaactatatacacaagtgaagttactagaaaatggaagtacttaattggcaatcaccttgagaagttcggatgaacggaatccaccaagccacataaaacatctttccacaggtgtcttccacatcccattatgtatgtgtaatacatca

SEQ ID NO: 15673 - DNA, 413 bp, Glycine max
  unsure (1)..(413): unsure at all n locations
tgtaagaatttgtgatagtgattntgccgtagatgttgatgttttanaagtactaccggatttgtattttttatgggtgattgtgtttttacatggagttctaagaagcaagacattgtgacactttttacttgtgaagccgagtatgtagctgcaacttcttgcacatgtcatgccatttggcttagaagattgttggaggaacttcagttgttgcaaaaggaaagcacaaagatctatattgataatagatctgcacaagagcttgccaagaatccggtgttccatgaacgaagtaagtatatatatacaaggtagcatttcattagagagtgcattaccaaaaaagaagtagaattgactcatgtgataactcatgatcaagttgcggatattttcaccatgcctctcaa

SEQ ID NO: 15674 - DNA, 304 bp, Glycine max
caatcatacttccactgttgccacaggtttgggtaaatttctggtatgctgtgggaaccaattccaaatttaattttggaaactatatcttttgatcaaactgttaagcattcagaatcttttgctatcaaattacccattgccttccctactgtattgtgtggcattatgttcagtcagcatcccaatatgttaaactacactgactctgtgatgaagagagaatctcctctatccctgcattacaaactggttgaagggacacatgtcccagacattgtctcgacatctgtctcgacatcag

SEQ ID NO: 15675 - DNA, 397 bp, Glycine max
  unsure (1)..(397): unsure at all n locations
aatcaaaccacatgttgatttaagttatataaaatattnttaatttaactacatgtctttaaatttaaatcttaaatatataatcatattaaatatttagagaaagaaatttaccgtgtataataactctatcgtctatgattttaattcacaaaagatttcaatcctaagagcaacttaatagaaatacactacactacccaaatatacatggtggtatctagctcgacagatatttatcaaaataataataatacatgtcgtcttaatcttagattattattgattatgtaggctctagcttctcttaanttttttcctatcatgcatgtntcctttgttggtggtggtggtggtggtattattattattattattattattatcatagattatg

SEQ ID NO: 15676 - DNA, 436 bp, Glycine max
  unsure (1)..(436): unsure at all n locations
cttgctaaaccaaaatctgcaacaactgcttcaaagtcctcatttaacaatatatnagcagcttcgaaatcacgatgaataatctttgggtcgcaatgatcgtgcaaataagcaagccccttaacagtggtggttgtgattttagacgatctacaaaaatacaatcaatatacataaaaacatttttacttttaaaaaacatgtcgaaatttaactacaagaaattttaattgcttttatgctattttagcataggagtttatttgtattctgtttcgactgcattaaatgagatactgttgttggttttgtggaggaaattataaaaaagagaggagagaagagagacaataagtatgcagaggaaatagaattattctattctaaattcaattgttctcaacaacgatacantaaatatctaaagataactaat

SEQ ID NO: 15677 - DNA, 449 bp, Glycine max
  unsure (1)..(449): unsure at all n locations
taactcttgaagaagttgtttgatccagactaactcacaagtggttgtggccatagccctacattttgcttctgcactagaccgagcaacagtgttttgttttttgctcatccaagagataatattacctcaatggatacacaatatccagtagtggaccttctgtctatggagcatccagtctttaacttgtcctcatataacaatccttgtcctggagccttctcaatgttcctgagaatgcgaatcacaaccttctggtgatcaacatgaggagcttacatgaatngactaaccagtcttctatatctttctggatctgagtatggatcaccttggtctgccattaacttttgatttggatctataggaatattaacgggtcaacagttagtcatgtctggttcttcttaaatatcaagagcatactnntctttgaagactatatg

SEQ ID NO: 15678 - DNA, 390 bp, Glycine max
ttccaacctccttttcttgttagaatatcaatggttggacaagtggcctcaaatatcttaggaaggggggttgaattaaaatatcacaatctttccttattcaaaagttctattttgattttaacccaaaaacccaagatggctttcaaaatgacctcctaaataataatgcaaattaatcttactgattagaattattaagaattaaacattaaagaagtttaagggaagaaagattgcaaactcagatttatactggttcggcacaccctgtgtaaaatttgaatcaaatttctaaatagctgtataatcattttgccactacatcgattaccgagagtaatctcttgaaaaagttttgacaaaactcttaaaaatgagagaatgatg

SEQ ID NO: 15679 - DNA, 397 bp, Glycine max
  unsure (1)..(397): unsure at all n locations
tttgatgcatgcaagctagttttagatgttatggaatatatgctgaggcttcgcaacatgaacctgcgatactcatggtaacgaatttgttcttcactgagggcatttacaatggcagcaccctcagcattcttgggaggaaccctatgttgcagagtgttaaagaaatgccaattgttgggggtagtgggatcttcaaatatgcaaggggttcttctgtgcttaagacacatgtgcatgatgctaaagctggtgttgcaattgtcgaatacaacgtgtctgtcctgcatgtttgagtgaaataggttgaagttgctctttataatatangtttngtttggaaggtgagtttgaatctttctcttctaatctctctaattttaagtccattcgtctt

SEQ ID NO: 15680 - DNA, 390 bp, Glycine max
  unsure (1)..(390): unsure at all n locations
taagcttattccgatatgggctcaaaacggcagcaggtatcttcagtttctgagtaagtggtctccatggtttgttcatcaattcagttggctgaacaaaatcatcctctttttcatttccaaaaccaccttcctttggccatatagcattgccatagccataggttccctttgttcaaagagccacctattatgatcaaaatctccagtttggctcctcaccagtgctgacttcgttgacttcatcatggacaatctcctctccattntagacattccacttggtggaggaagtagaaggggatgcccattatctatagccacttcatctagttctgtgttctgatatggctccttgcatcctgngcatatcccacctnctgttttact

SEQ ID NO: 15681 - DNA, 339 bp, Glycine max
  unsure (1)..(339): unsure at all n locations
cattctcctaacaaagtcgaacatgccataactcaatcgtgctttttcttcaatgtcatatgtagcaaagaccttgatcctgccaagttagatgagctagaaaatgaggctaccaatacattgtgtcgcatggagatgtatttacctcctgagttcttcggcattgcggcacacttaattgttcatctggtgagggaaattaaatgttatggtcttgtatatttgtggaggatgtacccgattgaacaatactagaagatcttacaatggtgtacaaagaatctacaccgttntgaagcatctattgtgcgaaggtacattgtacaataaactattgag

SEQ ID NO: 15682 - DNA, 312 bp, Glycine max
  unsure (1)..(312): unsure at all n locations
ggaaaaatnggatatggcactgttagcgaagccttggcatacaagtgtccttttgtctttgtacgtagagactatntcaatggaaaaccttttttgagaaatatgcttgaggtattctattgactttctccatgttagttttttgtgtcttcaatatattttggttatgagtgcctttcaagtaattatcttatttttttagttttatcaaggtggtgttgaaatgattagaaaggatttactgacttggcactggagaccttatcttgaacgtgcgataagnttgaaccctgctatgaagcaagcattaat

SEQ ID NO: 15683 - DNA, 383 bp, Glycine max
  unsure (1)..(383): unsure at all n locations
catganggtgggctcatgggccactttgggatatacaagacgctcgtcttactcaaaggaaaagtttattggccccatatgaagaaaaatgtccttaagcattgcactaggtgtgtagcttgtttacaagccaagtctagggtgacgcctcatgggctatacacacccttacccatcccctctgcaccttgggtagacattagtatggactttgtccttgggcttcctagaacccaaagaggtgtagactctatctttgtggtggtggataggtttatcaagatggcacactttataccatgccacaaggtggatgatgcttaccacatctcaaaacgctttgttatggaagttgtgagactcgatggttcgcctggaccatt

SEQ ID NO: 15684 - DNA, 444 bp, Glycine max
  unsure (1)..(444): unsure at all n locations
ctctctggtaatcgattaccagtttattgttttcgattccagnggcaagnttggttttcaaaaagctttcaactgaatttacaacgttccaatcaatttcaaaatggtgtaatcgattacaatatattggtaatcgattactagtgtgtttgaacgttgaaattcaaattcaaatgtgaagagtcacatcctttcacacaaatgctttgtgtaatcgattacaatgatttggtaatcgattaccagtgataagctttgaataaaaatcacaagatgtaactcttccaatggttntcatgttattctaaaagttataactcttaatggttttcttgaccagacatgaagagtctatanaagcaagaccttaacttgcattntatagacattgaatacattgatttcaatcctttacaacccttgagtctctttgaacatcttctt

SEQ ID NO: 15685 - DNA, 312 bp, Glycine max
  unsure (1)..(312): unsure at all n locations
gctagagagatncccgatctgagagggtactgctccgtcggcatctttctttangtcaagatacaccaaatttgagagattcccaatctgaggaggaatcttccccatgattccagtatgagaagaggttgaggtgagtcaaggaagtcattgtcccaaggaaagaaggaattgacataccttctccaaggtattcattggcgctcaagtccaagtaattcaaatgctttatatcagccaaacaaggacttatctctccaccagagctccatctcctataagcttcccaatcatcattgaaaatagaatctg

SEQ ID NO: 15686 - DNA, 423 bp, Glycine max
  unsure (1)..(423): unsure at all n locations
ntatacgaaatgccactctactgcaagggtgaaatgtttgttaactaggaaacacaagtatatgcaccaggaaaacattgttgttgaaagaaattgtagtgttgtgattcacaagatccttccacctaagcataaagaccctgngagtgtaactattccttgttcaattggagaagtcactgtgggaaaggctcttattgatctgggagccaatattaacttaatgccactctccatgtgtagaaagttgggaaagtcagagatcatgcccactaggatgactttacaacttgctgactgctccattaccagaccatatagagtaattgaagatgtgttggtttgagtaaaacattttatcttccccgcagactttgtggtaatggatatctgtgaagataatggcattcctgtaatattggg

SEQ ID NO: 15687 - DNA, 242 bp, Glycine max
  unsure (1)..(242): unsure at all n locations
ttctttngatattnggcaaagttaaaaataatgttttaaaaattatactaatcattaaactaataaaatacaaagttatgatttaataattacatagtaagtaataaagtaataataattaaaaattcataattaaatactatntttttattcatacagcttatatttaaagaactttatctatcttaaagtcattttaaacagaaatttaaaaagaaaaggggggaaataaagacagtgga

SEQ ID NO: 15688 - DNA, 328 bp, Glycine max
  unsure (1)..(328): unsure at all n locations
agcttttttataaagcctatcaggnatgcgccaagggcgactgttccatggctctatggaccctgcttcaaacccgaaatagtgccttctttaatagaaacacctttgtttcatctccttttgcaacaaagccttcaaggtgctcaacataaatctcttcctttaggaagccatttaaaaaggctgacttgacatcaaactgataaatcttacattggtttgggttgaatagctagaacattctgattgatctagccttcaactggagcaaagtatcaaataatctactcccaaacttgacataccctttaccactacattgcttata

SEQ ID NO: 15689 - DNA, 320 bp, Glycine max
  unsure (1)..(320): unsure at all n locations
aaactatattatctacaccaaagggacacttctctatatttgcataaagggtgtttttcctaaagactgaaagaacttgcctgagatgtcctaagtgatcatctangctcctactgtacactaaaatatcatcaaaataaacaactacaaatctacctatgaaatcccttaagacatgatgcataagcctcataaaggtgcttggtgcattagtgagcccaaaaggcatcactagccattcatacaaaccaaacttggtcttgaaagcgattntccactcatcaccctntttagtcctgatntggtgataaccactttta

SEQ ID NO: 15690 - DNA, 450 bp, Glycine max
  unsure (1)..(450): unsure at all n locations
tacaaatctgttttaagtccaagcccataaataatttaaattctagataagataagacaaaatctagatgaattaatatctagatgaaataaaatctagataaaataatatctagatgagataaaatctagatatgataagataaaatctagatgaaataatatctagataagataagatntggtagcataaaattgtctgctctcttcaagtccaagcccaattccggattcaaacccaattgcttantaatttcctganattaaattaaaaacacaaaattaatccagtaggcccaaatgataaaactgcataattaatttgacaattaaggctaatcagtaattaaaatggtgacaaaaaggggtaagaaatatgagaaaatgatgacacatcaggacgacagcttttaattaaatccacaataccatgacttcagaatggtttatt

SEQ ID NO: 15691 - DNA, 371 bp, Glycine max
  unsure (1)..(371): unsure at all n locations
agctttatttttgcttaatatatcactttttagttgactatttttcttattagcttcctactattagtgcaaaaccattttgctatngtntcatgttttttttgctcgtgttgtgggtttgaatttgaaaattgaacgtttgtgcttaactttttgaactatacggtatgttgttgtttggatggcactatatcacatgaatgcattntggtttgcaacctggtgtgtttgcaaggggttgtgaagcgaatttaataataaataanatcaaatgctttctctctggttctttgtatatttaattgaaaagtatancatatctatagagtatcttcaattatacttaaaaaattaagtattatattaaaaaa

SEQ ID NO: 15692 - DNA, 409 bp, Glycine max
  unsure (1)..(409): unsure at all n locations
actggatgcattggttaactgggtttctcattggccttgaatcaaaaatttgtaactgtcgcaagggtnttgtgggttgtgctcctctgctgaccaccatacagacctttgccctttcattgcagaacctggagcaatngagcagcctgaagcttattgctgcaatatttacaatagaacctcccaaccacagcagcaaaatcaaccataacaaagcaattatgacctctccagcaatagatacaaccctggatggaggaatcaccctaacctcagatggtccagccctcagcaacaacaacagcagcctgctccttccttcaaaatgttgtggcccaacagacatacattcctcaccaatccacaacagcacaaccccagaacaaccaacagttgaggccctccacaa

SEQ ID NO: 15693 - DNA, 365 bp, Glycine max
  unsure (1)..(365): unsure at all n locations
ttcgtggagcttacagaccatgtcttttgaaatantctatcaaccttgtatgcccgtatggtgggtanggattagcnnaccaaatgagcacccctgtggaaatcggtctacaaacactaatatcatcgtgaaacccgtgggattattgcagcccctattattgaaatcgaggacaaatctttccatatgtgggaaggtattggaaagaggtgcagcaaaccggcagcccttctttgttcgtattttgtctgttcgcacgaaggacattgcacgatgtactggcggacatcttcttgtatatgtggccagtcaaaattctgtcgtanatgatggagagtctttgatacccctgtgtgattgtcgag

SEQ ID NO: 15694 - DNA, 446 bp, Glycine max
ggaatcggacctcagtgtcaaaagttatgaccatctgatatttctcgagagcttccgtggttcagtggcgagcatctcgacatattatgtgcccgaatctgactttcgtgtgaaaagttatgaccatttgaatttctcgagagcttccgatgtttaatttcgagcatctcaatatattgtaagcctgaatcggagctcagtgtgaaaagttatgaccatttgtatttgtcgaatgcttccttggttcaattccgagcatctcgacatattatgtccccgaatctgaccttcgtgtgaaaagttatgaccattcgaatttctcgagagcttccgttgttcagtttcgagcctctcgaaatattatgcgcccgaatcggacatccgtgtgaaaagttatgaccatctgaatttctcgagagcttacgatggttaatttctagcgactc

SEQ ID NO: 15695 - DNA, 426 bp, Glycine max
tggattaaacaacggaagctctcgagaaattcattttgttttaacttttaactcggaggtccgattcaggcgcgtaatatatcgagacgctcgaaattgaacaatggaagctattgagcaattcaaatggtcataacttttcacttggaggtctgtttcatgcacataatatatcgagactctcgaaattgaacaacggaagctctcgagaaattcaaatggtcataacttttcactcggaggtcagattcaggcgcataatatatcgagatgctcgaaattgaacaacggaagctctcaagagaatcaaatggtcataacttttcacacggaggtcagatttatgcgcataatatatcgagacgctcgatattcaacattggaagatctcgtgaaattcaaatggtcataccttttaacacggag

SEQ ID NO: 15696 - DNA, 331 bp, Glycine max
ggaaaaacctatgtgcctcattgaagttagcacccatcttttataaaactgatgggagaatatccaatcaacataacccacttgacccttttgcaccccatttttagggcttgttttgccaccacagagagcaacattctcccaagccccttcgtcttataacactccctcaagaacaagttctccatgtaaaaccctcgcttctctagaacgagagagaagttcggagaaaacaagacaaacccaacaatggaaacacctctgaaggtgtttaaattgtagtttctcgagataactattacttaatgggaaataatgatgaataattaat

SEQ ID NO: 15697 - DNA, 215 bp, Glycine max
  unsure (1)..(215): unsure at all n locations
ccttgaatnaaaaatctgtgcctatcgcaagggtttgtggttagtgctcctctgctgaccaccatacagacctttgcccttccatgcagcaacctgtagcaattgagcagcctgaagcttatgctgcaaatatttacaatagacctcctcaacctcagcagcaaaatcagccacagcagagcagttatgacctttccagcaacatatacaaccct

SEQ ID NO: 15698 - DNA, 324 bp, Glycine max
  unsure (1)..(324): unsure at all n locations
acttgttgtgatgttagctttgttcgtcaatgctttgaccttccaccaccatctgcatagatttagattattattattatatttaaattttaagccttgtatttggctatggtttatgacatttgaatacttagtatttctttcatatttacttagtatgactgaacatgatgatttatattacttgcttttggtgtttatggttatgtgtggtaaaccttattattttatgatatatatgtctagtgatatgtacttacatttggtattgtgtngatgtatgtcttataattattcatgtatggtttattntacgcactatga

SEQ ID NO: 15699 - DNA, 285 bp, Glycine max
  unsure (1)..(285): unsure at all n locations
agcttggttctgtgtttcagaggaaanngacgcnggcaacgtatcaagagcaatgctggcacgactactgattcaactgatcatggtagagagctagaaatagttcatatgacactaaacgaaaagttggctgatacaaaatttctcctcgtttaggatgacgtgtgggaacgaaaggcggccttaatggagaactgtgctgaatgctccttgttatggagctcagggaagtacgatccttgccacgacacgcagtgaagaagtggcttctatcatgcgggcaga

SEQ ID NO: 15700 - DNA, 405 bp, Glycine max
  unsure (1)..(405): unsure at all n locations
agcttnagtcntttttatctgcacaaggctcttaaaggttgaagactatccttgtggaaccttcacccgacgaagacactgacaaaaacttatcttctccttcttggacaaagtatggcaggctgggggcaagtaaattttcttcccatcagaccttggatgcaactgtgatcgtatacccatatcagctagatcttgaagggtattcaagccatccttcgtcttgccttgaatgttaaggagcgttccaatgacactatcacagacatntttttccacatgcataacatcaatacaatgtctaacgtcaagatcacaccagtactgaagatcaaagaanatggacctcttcttccatatgcaactttgacttttatccttcttttgagtcttccaatacagtat

SEQ ID NO: 15701 - DNA, 444 bp, Glycine max
  unsure (1)..(444): unsure at all n locations
actcaagcctaatgttntattgatgatcatcaacatattcaaagttttgtatacattggcaagaagtggggctccattgttcactatgaagttgataattggctctatatatggctctacatcgctattaaaaacggatgtactgtgtgggtaggcgggtgcagcaatgaaagcagagtatattgctgttgacaccttgagtcggccatgcaaattggctaatgaaattgctntttgaatgttggtcatagcaggtagaatgtattggaccgacctcattggtattggggccaatttcgtttccaacaacgatgtacttaaaattgacgtctcgtgagtagggtgtcacgtacttattgacccagtctctggctgcattagcgttngtcagagattgaagggtatccttagcaacgtccatgatcaactcaatgcctgaacctc

SEQ ID NO: 15702 - DNA, 361 bp, Glycine max
  unsure (1)..(361): unsure at all n locations
acgcatgctngacagagaagtattaggggcagagacattgtccttgtagttgtaacggattggcataccagttaaatgctccaagatattgtcctcttctgaaccatctctaggagactcgggcaacctttgctttcttctgtggtatctaactcccccaaagaccagaccacaaatgacaagcaaggttattatgacaatgaccacaacaactatggtgtgcttattgccacctccactgcccccataacccgtgccagcacctccaaccgtcgagaccttgatgtagagacataaccagaatcacaatcaggtttctgaaagcatcctacactgttcaaaaggaaacagtcccctgaac

SEQ ID NO: 15703 - DNA, 344 bp, Glycine max
  unsure (1)..(344): unsure at all n locations
tctgcttgatggtaaactagatgcttagttaacctggtaacccagctagcgttgaatcagaaatctatacctgtcgcaaaagtctatggtttatgctcctctgncgaccaccacacagatcttttcccttccatgcagcaacctgaagcaattgagcagcttgaagcttatgctgcaaacatttacaacagacctcctcaacctcagcagcaaaatcaaccacagcagaacaattatgacctctccagcaacagatacaatcccggatggaggaatcaccctaatctcagatggtctagccctcaacaacaacaacagcagcctgctcctttctttcaaaatga

SEQ ID NO: 15704 - DNA, 292 bp, Glycine max
  unsure (1)..(292): unsure at all n locations
tttttgtctttcttattcattcaatatcgagcgttgcgatatattatggactgaatcanacaaccgagtaaaaagttattgtagtttgaagttgctcagagcttcaactttcaatatcgagcgtttcgatatgttacgggactgaatcagacatcanaataaaaagttattgtcgtttgaattatctcagagcttcagtattcccattcgagcgtctcgatatattacgggactcaatcagacatccgagtaaaaagttattgtcgtttgaatttgctccaagcttcaacat

SEQ ID NO: 15705 - DNA, 414 bp, Glycine max
  unsure (1)..(414): unsure at all n locations
ttgagtccttaaacaacaataactgtttactcgtttgtttgattgacacctgtaatatatccagacgctcgaaattgaataccgaagctctgagcaaattcaaacgacaataagtttctactcgtatgttcgattgactctcgtaatatatcgaaacgctcgaaattgaagaccgaagttctgagcaaattcaaacgactataactttttactcggatgtctgattgagtcccgtagtatatcgagacgctccgacttgaatgccgaagctctgcgcaaattcanacgacaataacttttttcctcggatgtctgattgagtcccgtaatatatcgagacgctcggacttgaatccttagctctgagcacatcaaatgacataactnttactcgatgtcaagtgagcccgaata

SEQ ID NO: 15706 - DNA, 106 bp, Glycine max
  unsure (1)..(106): unsure at all n locations
agctttgtttgcacttttcaatggagnngacaggaagatcttcgaactgatcaacacttgcacagtggccaaagaagattggaagatcctgaaaatcactcatgaa

SEQ ID NO: 15707 - DNA, 410 bp, Glycine max
  unsure (1)..(410): unsure at all n locations
gcttaacattcaattntgagcgtctcgatatatgactagactttatcttacatccgagtaaaaagttattttcgttgtaattggctcagaggttcaacattcaatttcgagcgtctcgctatattacgggactcaatctaacatccgagtaaaaagttattgtcgtttgaattggctcagggcttcaacattcaatttgagcgtctcgatatatgacgagactcaatcagacatccgcgtaanaagttattgtcgtttgaattgtctcaaaggttaaacattcaatttcgagcgtctcgatatgttacgggactcaatcagacatccgagtaaaaagctattgtcgtttgaatttgctcagagattcaacattcaatttcgaacgtctcgatatattatgggactcaatc

SEQ ID NO: 15708 - DNA, 394 bp, Glycine max
  unsure (1)..(394): unsure at all n locations
gtggccagtgcagatgacataccaaactgcaattttgcacatgaatcatagataagattaaaaaatcaaaaataaatgtcacatggcaaaatagccatgataacaataataattgttcgttcttctatagactaaaacaccagattccccacatatgagaaaatctatgaaacaccaatacttcaatttgctttgcctatccgtattcgatttgtttacgatactaatactcttaattggatactntacgtatatatagatattgttgaagtattactactaaaaatatgatatttagtaatatttttttatcaacactaaataaaaatgttactaaaagcctttgacgacatttaatttttttacaaaatgatgaataaatgttattaatata

SEQ ID NO: 15709 - DNA, 355 bp, Glycine max
  unsure (1)..(355): unsure at all n locations
agctttctcatacatacgaagattttgtgagtntacaaaccatgttgtcattcttgacaagataaccaagaggcatgtccatgtatactccctcaatcaaatcactattgagaaacacattatttaaatcaagctgaaacatgttccaatttctgtgaggtgcaatggaaagaaacactctcattgccgtatgcttggcaacaagtgagaaagtgtccaaaaaatcgatctctgcttgttgtttgatgtgtgtacccttttgcaacaagacgagccttgtatctatcaagggagccatctgctctatacttgaccttataaatccatctgcaactgatgggtcttttatcgggtg

SEQ ID NO: 15710 - DNA, 413 bp, Glycine max
  unsure (1)..(413): unsure at all n locations
ttcttgtatgaagaaggagatgaatgaacggagagggagagaagagcacgaaattntgtgctcaaaaagagctctgagatctgaagttaatattcaaatgatcaaagttgagaaaaatgcacacacatgacctctatttatagcctaagtgtcacacaaaattggagggaaattcaaatttcacttgaatttgtggagccaaactttggagccaaaatttaactaattatgattcgtgaatgttagttatggttcagcccactaatccaagatcaattccaagattctccactaagtgtgcttaggtgtcatgaggcatganaagcatgaaggacatgcacagagtgtgactatatgatgtggcaatggngtatagtaagcaaatgctcacctctccctctaaaattaattgg

SEQ ID NO: 15711 - DNA, 398 bp, Glycine max
  unsure (1)..(398): unsure at all n locations
tgacaaattccttgngataaaggtagtgttgccatgttttcaaagcccgtactaaggcatacaactccttatcataagttgaatagttaaaggtaagaccacttaacttttcactaaaataagcaattggatgaccttcttgcatcaacacagccccaatcccaacatttgaagcatcacactcaatttaaaaagatttttgaaagtttggcaatgcaagtatgggggcattagttagcttttgcttaagaacattgaaatcttcttcttgtttctctccccattagaaaccaacatttttttagcacttcattgagaggtgctgccaatgtgctaaaatccttcacaaatcgtctataaaatcttgctaaaccatgaaaactcctcacctcggtcac

SEQ ID NO: 15712 - DNA, 434 bp, Glycine max
  unsure (1)..(434): unsure at all n locations
agncttgtttttgactcatcttctctttgaagtggcgtctccaatcattcttcttccttatccaatacactgccattgatcttcaagaagaaaatgactccattgatgaagaagatccaaggcctacaagctccacatggagctacgtcatgtggtattaagagcatcttcgtctaggtgatgttcttttgcttcctctatcttttttcccggtcaattcactctaattccttattcttcatcttattctccatgtatatcctccattttcttgtggtttggtactatttagagtagattcacaaaanataaactgattaaatcttagatctacacttgttcttgcatttctattggttcaaatttatagacctattcttgaatcatgnttttgtgttgattntaggttctatcattntcagtcataatctttt

SEQ ID NO: 15713 - DNA, 423 bp, Glycine max
cgatactataaaacccagcttaatagatggtggtctattatgccggaggcatcctattgtttcttaaagttttgggtcgtcttctttgtgggaaagataaggaagtatgggaaagtcagctacacaaacttgaaaacatgccaaatacagatatttaccatgcaatgagattgagttttgatgatctagatcgcaaagaacagaagattcttttagatcttgcatgtttcttcataagattgaatttgaaactggacagcataaaagttttattgaaagacaatgaaagagatgattcagtggttgctgggttagaaaggttgaaagataaagctcttgtaaccatttctgaagataatgctatatctatgcacgatatcatacaagaaatggcttgggagattgtgcgccaagaatcaattg

SEQ ID NO: 15714 - DNA, 388 bp, Glycine max
agctttgatgcattttatggagaggttaatgaaacaacgagatgatgcgctccatgagaggttggatcaaatggagaatagagatcataatgaagaagaaaggaggagaagagggaatgatggtgttcctagacaaaaccgaattgatggtattaaactcaacattcctccatttaaaggaaagaatgatccggaggcctacttggagtgggagatgaaaatagagcatgttttctcatgccacaactatgaggaggaccagaaggtgaagcttgccgccacggagttttccgactatgctcttatgtggtggaacaagctacaaaaggagagagcaagaaatgaagagccaatggttgatacatggacggagatgaaaaagatcatg

SEQ ID NO: 15715 - DNA, 427 bp, Glycine max
  unsure (1)..(427): unsure at all n locations
acatgagtttgtggctacttcattcactcctctaatgactatagcatcatttctggcgctaaactgttgggagttggaagtcatcttctcaattaaatntctggcttcagcaggggtcatgtctccaacggctccaccactggcaacatctatcatacttctctccatgttactgagtccttcataaaaatattggagaagaagctgctcataaatctggtggtgagagcaactggcacatagttatttaaatctctcccagtattcatatacactctctccactgagtttcctaattcctgagatatcctttctgatggcagtggtcctggaagctggaaaatttttttctaagaatactctcttgaggtcatcccanctcgtgatggaccttggagcgaggtaatatagccagtcctttgtcact

SEQ ID NO: 15716 - DNA, 353 bp, Glycine max
  unsure (1)..(353): unsure at all n locations
tcaccttcagaggactacacgtnctcgccttcagaggactacacgtgctcgccttcaaagggtcatgtaccttcacctttataaggctacacgccgtcaccttcaaaagactacacgtcctcacctttagaggactacacgtcctcgccatcagaagactacatgtcccccattttcaaaagaggacatgccctcacctttagaggattgcatgtcctcgtcatcatangactacactccctcgccttcaaaaggcgacacgtcctgaacttcaaaaggctacacgccctcgcctttagagggctacgcgtnctcactttcagtgggctccatatccacaccttaagataatt

SEQ ID NO: 15717 - DNA, 438 bp, Glycine max
tcttatccaaggctcatcttggtggtgaagcttcttcttctatggcttattccctagtggatggcgcctcctctcacctcttctcctttgtcttccgctgcatttccatggtggaaaatcatcattaaaggacctcattgaagctcaaagatccagcctccatagaagccccacaagcaagcttccatcactgctgttgttggtgctgacggctggaccatctgaggttagggcgattcttgtatccagggttgtatctgttgctggagaggtcataattgttctgctgtggttgattctgcttctgaggttgaggaggactattgcaaatatttgcagcataagcttcaagctgctcaatcactccaagttgctgcatggagggcaaatgtctgtatggtggtcagcacaggagcacaaaccacatacccttgtaca

SEQ ID NO: 15718 - DNA, 363 bp, Glycine max
  unsure (1)..(363): unsure at all n locations
tctatgagtccccttgagaattgngtttctcttcttcttcttcttcttatatgggatccctctagcctttgcctgacactccttgacctcacgcaggtacacccaaatggctcctcctacaaaaggattagtctctggcgatccgtcatgctcctcataagcagcgcgaagccggcctatgagggcatcgaggctaccccatgcttgcctgagagggcaggcacacggtgcacgaggggtgggctggccaaagaagatgcaaccgtgcaagtggagcttggtttcccatattgatcgaggaccgaacgaaatccaacacatggttgaagttgcactgagagagtggaactggcggactctgat

SEQ ID NO: 15719 - DNA, 434 bp, Glycine max
  unsure (1)..(434): unsure at all n locations
tgcatgccagcctatatcttctaagcaacactctcactctggggagactccaaaacgatgccgttttgggccccactcaagtcaagcctctccaccaagctcctcaacataaccgtctcctctctctgcaaagcgaagcanatccccaatgccgaaacggcaatcgtcgacggcatacgactcggcgtgctccccgacgtggtcacctacaacaccctaatcgatgcgtactgtcgtttcgccacccttgatgtcgcttactccgttctcgcgcgaatgcacgacgccggcattccccctgacgttgtttcattcaataccctaatctccggcgctgtgagaaagtctctgttctcgaagtccctcgacctgttcgacgaaatgctcaaacgaggcatcaaccccgacgcatggagccacaacattctaatgaa

SEQ ID NO: 15720 - DNA, 393 bp, Glycine max
agcttttgtattattcaagaagtgccttatgaatactcccgtgcttatgccaccagtacctggaaggcctctcattttgtacatgacaatcttggacgagtcaatggggtgtatgttggggcaacatgacgaatccggaaagaaagagcgcgctgtttactacctgagtaagaagttcacgacctgtgaaatgaattactcgttgctcgaaagaacgtgttgagctttagtatgggcatcccatcgcctaaggcagtacatgctgagccatactacctggttgatatccaagatggacccggctaagtacatctttgagaatccatctctcacgggacgaatcgcccggcggcaagtcctgctatccgaatttgatatagtcgacgtcacaca

SEQ ID NO: 15721 - DNA, 422 bp, Glycine max
  unsure (1)..(422): unsure at all n locations
agcttgtttcttttggtgcatagaatgcaggcaaaaaaaaaaatagtaagtgtcatgaatctatgacataagcttcaaccaattaacattgtttgtatgacaactgttgtagttggacagcaatcacacagtttgtccaccatggaatgctntatgttcctattggttatagttttggtatgctttatgttcctattggttatagctttggtgctggaatgttcaatttggagtccacataaggaggaactctatatggtgctggagtttttgctggagatggtacaagacaagcaagtgaaatggagctggagctcgcagagtatcatggcaagtatatatgaaattagcccatanaagctaggctggattctgtgattaatnatccattaagccctcctagctaggttagcattctagtc

SEQ ID NO: 15722 - DNA, 410 bp, Glycine max
  unsure (1)..(410): unsure at all n locations
ttcttattttgtagcagttccagggaccatcgacgaacgggcgatcaatacanaaagaatactcattccatgggaaaggaatgaaaatcacacactttgcctcaactctgctaaagcaattggatgtacagtggtcaacattggcactcatgacttcattgaaagaagggtatgtatgtaagccttctagtttccacccataaaagcagaattattgtgggcatgtacactgcagaaccacaaaatttaagatttaatttaatttataaatgaaatctggtcagatttgattatttctcgatcaaagtaattctcaatcaagttacccctgtttntaaatgattccgaatgctggtaaagtatctctatagcatgctacatatttatacagtcaaagcctttctctattc

SEQ ID NO: 15723 - DNA, 433 bp, Glycine max
  unsure (1)..(433): unsure at all n locations
gcatatgtactntaagtgagagagaagatataaattatttgtaataataattaatattacgagtaaataacatatacaaagatgattaatttttacataatcaatcacatattatcatataatgtaaattgattgatagtaataataaaaatataaaattcatattaattatgatttaagttctaaacattatagatgatatgataaaaaaaatgtgtataaaaatgagaaattaagcaataatgagagaaaataaaattgaataatgaaagagagaaagagtgtgaccgtcacagcttccaatagattggtgttgtcgtgcaagtacttgaggacccatgttagaacacttgctgtggtgtcatgtgcagcaaagatgacaccaatgagattatcaacaacttgagaatctgtgtgctgctgatagtacatc

SEQ ID NO: 15724 - DNA, 394 bp, Glycine max
  unsure (1)..(394): unsure at all n locations
attcaaatttcaagtctgaagagtcacaactcttcataaactaactgtgtaatcgattaccacatttatgtaatcgattaccactaaggaattttcgaaaataactcccaagaatcacaaccgttcaagaagttcttgaatgaccatcaaaggcctataaataggtgacttgtgatacgaaattcattagagttntttttaataacattgtcttatcctctcaaaaccaaattgtcttatcactctcaaaatattccttggccaagatactttcaaattcaataaggaatcttgatcgatcttcaattgtaatatgcttctcttaaagagagaaaattcttcttcttcttattcacagagatctgtttaagagaccaatggtctcttaagttgt

SEQ ID NO: 15725 - DNA, 396 bp, Glycine max
agctttatttgttttggaatcaaataaagaaccaaaaatagtctcatattggaaaaattgttcatatcgtgtctcaatagaattaattaattgatctaatatgtataaaaaatactcgatacgaacagattcttcacgtgaatgtgtgatctcattactaatattttcatcaaaatgagattttctatgaattttacgtttttcacaaaattttggctctatatccatttcgatagccattttttctgtggattctaaagtcgatgcaaacccgtcttccctataatgttttatataagcgataagaccttttaaatgatctatagcaacatctatatgcatatctttggattgtacaatcctgctaacagaaattgcaacaaacaacatatcata

SEQ ID NO: 15726 - DNA, 337 bp, Glycine max
  unsure (1)..(337): unsure at all n locations
cttttcacatgaatgtccgattcgggcgcataatatgtcgagaagctcgaaattgaacaacggaagctcttgagaaattcaaatggtcataacttttcacacggatgtccgattcaggcttataatatatcgatacgctcgaaattaaacatcagaaactctcgcgaaatttaaatggtcataacttttcacacggatgtccaattcgggcgcataatatgtcgagaggctcgaaattgaacaacggaagctctcgtgagattcanatggtcataactcttcacatggatgtgcgattcaggcgcataatatgtcgagaggctcgaaattgaacaac

SEQ ID NO: 15727 - DNA, 395 bp, Glycine max
  unsure (1)..(395): unsure at all n locations
tcggacatccggtgnaagttatgaccattagaatttctcaagagcttccgntggtcaatttcgagcgtctcgacatattatgcgcccgaatcggacatccgtgtgaaaagtcatgatcatttgaatntctcgagagtttccgatgtttaatttcgagcgtatcgatatattataagcttgaatcggacatccgtgtgaaaagttatgaccatttgaatgtctcaagagcttccgttgttcaatttcgagcctctcgacatattatgcgcccgaatcggacatccgtgtgaaaagttatgatcatttgaatttctcgagagtttccgatgtttaatttcgagcgtatcgatatattataaccctgaatcgtacctccgtgtgacaagttatgacca

SEQ ID NO: 15728 - DNA, 376 bp, Glycine max
ttatattcatgacgatcgagagatttgtttttttgatgagttatgaattattggatatatcataaaaaaggtgtgagaccatgagagctctaaaataatatctgaatatacttacacgtacattatatatattagttcttttttcattgtcatacattttatattatattatacacggggtttaaactttatgctaaatcaacttctattattaattttacaaatccataaaattggcagaaaagctacgtcatctagttaacgaagttttttatgcttcaaggaatttgaaattcactatatagacaggcctgatcaattgtcattagttatttaatgtcacgtaaacaaattaattaattaaacaaaacgaatg

SEQ ID NO: 15729 - DNA, 411 bp, Glycine max
  unsure (1)..(411): unsure at all n locations
agcctatcttttatatgaaacacccccaaaaattctcaaatgtgaaagttttaccttctttcctgaccatacttctttgggaagctgataattcanaggaactgatggtcctctattgatgagatatgttgttgtgtttattgcttctgcccagaatgttttatgcaagccagattggatccacaaacaccccgctctcttgttcaaggttctattcatcctttctacaacaccattttgctcaggtgttcctagtattggcttaataattctgattccatgttctgaacaaaagtccttanaatcctgactatcatactctctgtcattgtcagattttagactnttaacctttagacctgtntgattttcaacttctgttgtccacttttaaacacagaaaacacatca

SEQ ID NO: 15730 - DNA, 325 bp, Glycine max
ctcgatatactataggcctgaattggacatccgtgtgacaagttatgaccatttgaattgatgcagagcttgcgtcgttcaattttgagcatctcgacatatgatcagcctgactcggaccttagtgcgaaaggtatgaccatctgaatcactcaacaacttgcgatgttgattctcgagcgtctctatatgagaatcgcctgaatcagaggtgcgagctaaaagtcatgaccatttaaattgctcaagagcttccggtgtcaatctcaagcggatcggtgtgcgacgcgcatgaatcggagatccgtgtgaatagatatgacca

SEQ ID NO: 15731 - DNA, 280 bp, Glycine max
gaatcggacatccgagtgaaaagtgattatccttttgaatttctcgagagcttctatgtttaattatgagcgtctcgatatattatacgcctgaatcgaacctcagtgtaaaaagtatgaccatttgaattctttagacatacgatgtcattttgagcgttctatatgtgatgaccttatcagacctcctgtgaaaggatgacattgaattctcgagagcttcgttgtcaatttcagcgctcacatttatgccccgatcgacatctgggaaagtatgaca

SEQ ID NO: 15732 - DNA, 382 bp, Glycine max
  unsure (1)..(382): unsure at all n locations
ctcggatgttttatttatgcgcataatatatcgagacgctcgaggttgaataatggaagctattgagcaattccaatggtcataactgttaaactcggaagtccgattgaggcacataatatattgacacgctcgacattgaacaacggaagctctcgagatattcaaatggtcataacttttaactcggaagtcngattgagacgcataatatatcgagacgctcgaaattgaacaatggaagctcttgagcaattccaatggtcataacttataactcggatggccgattcaagcgcataatatctcgagacgttcgacattgaacaatggaagctcttgagcaattcaaatgggcataactcttcactcggatgtacga

SEQ ID NO: 15733 - DNA, 324 bp, Glycine max
  unsure (1)..(324): unsure at all n locations
acctatacttaacagaaaatacttataacacaaaatgaaaatactaagtatttttgggcctttagggctccataatataggtaaggtaccctagaaatgtaacatttttcagtccttgtattttagggcacctagactagttttttgtattaggggtagttttataatttcacatgcattaagtgaatatttgatgtgtgtggttgtaaataaatntaattgaattgggagaagcccaatccaattataatttagagggggaggtgagcatttgcttgtacaccccattgcacatcatatagcacactttgtgtgtgccttcat

SEQ ID NO: 15734 - DNA, 292 bp, Glycine max
  unsure (1)..(292): unsure at all n locations
ctaaaagcttttcacccttatcgacgattgaaaaaagcttttaatggaagtcaggggaatgaangccccccagaaccattaactggaaaccaagttcatgatcgcgtaaaggacattgtaaccgtgtttgggaagtcccagaagaagacatcatctcccaacaacatgtggaagaaacgctcaatattctttgatcttccatactggtctgatctatatgtgcgtcactgtctagatgttatgcatgtggagaaaaatgtgtgtgatagtttaattngtactcttcttaaca

SEQ ID NO: 15735 - DNA, 303 bp, Glycine max
ggctggctattatagaaagatcattgtatgattttctaaattggcattgcccctaactaagttgactcgtaagaatgagaagtctttctggaatgagaagcgtgatcaaagtttccaagagttgaagaggcggttgacgacagctccagtgttaattttgcccgacccttatagaacattcgaagtgtattgctatgcaagcgggcaaagcttgcggtgtgtgttgatgcaagatggaagagtactggcttatgcttctcgtcaattacgtcctcatgaatttaactatccgactcatgactt

SEQ ID NO: 15736 - DNA, 329 bp, Glycine max
agctttgttgtctatgatcaggtcatcacgcgcgcgctcaaggatctcggcggcggctcgggcaaccacgccaggatcgacagcattcccgtgcagatgggcacggccacggccggcagcacgcccttcgagggccggctgcagctgatcgacaaccaggtcgatgcccgaagcggcacggtgcgcgtgcgcgccgtcttcgacaacaaggatggcgccctcatgcccggccagttcgcccgcatccgcatgggccaggcgcgcgacagcagcatgctgctggtcagcgagcgcgccatctgcacggaccaaagcaagaagtacgtgat

SEQ ID NO: 15737 - DNA, 394 bp, Glycine max
  unsure (1)..(394): unsure at all n locations
agaagctcatccagagagatgtagccactngctttgttttattaaaagaaaaagcagcaactgaatgatcttctatttcaactttgtttaaatgtaatgttgcagctatgaattctctgtagtcaattgtgccactgttgtcaacatctgcctgcgatcagaattatcttttttttaaaatggaacaaatggattataatttataaggatgtgctactaaaactggttaacactacctttaccattctggattctatttacaatgttacttttccctacttgcataacaatgtgtgactaaatgatactcagaagtctttcccttgtaagactatatctttagaatggaattataaacactacccataatataggtcaagttacaacttgaaca

SEQ ID NO: 15738 - DNA, 363 bp, Glycine max
agcttatatttattatacttacgtcataggattaacagaatagcttatatcacattataaaaaaaaggatgacacactgatgataatttaaaaagttttacaccagcatctaatcccaacccatcttgtatgttaagatagttgattcttatgctaattactttataagttatatcaacaatgatgatataatttaataacggtataaaactattttatatatgaggatcaactcattacattaacaataaaattaccaagagaatcatgtcttattctaatacgaatattttataattgattattagaataaacaaagatttctcttttctcttgcttactaattgaatgtatccttttatt

SEQ ID NO: 15739 - DNA, 427 bp, Glycine max
  unsure (1)..(427): unsure at all n locations
ataactttgtactcggatgtcttatttagttccgtagtatatcgagacgctcgaaattgaaacagaagctctgagcatattcaaacgacattaactnntttctcggatgtacgattgtgtcccttagtatatctagacgctcgcaattgaaaacggaagctcgtagcaaattcaaacgacaatacactttaactcagatgtctgactgagtcctgtagtatatcgagacgctcgatattgaaacataaggtctgagcaaattcaaacgactataactttttactcggatgtccgattgagtcccgtaatatatcgagacgctccaaattgaaatagtagcttctagcatattcaaacaacaataactttttactccgatgtccgattgagtcccataatatatcgagacgctccacattgaaaacat

SEQ ID NO: 15740 - DNA, 461 bp, Glycine max
  unsure (1)..(461): unsure at all n locations
tacaaacccaagcttgacactatgaaatngaaaacttgaaaccctcaagtttcattctaagttgcaactgacacagtaaccaagattgcatttttttacccccttcttccttctccagcatcatcaaacatcacaacacaaacctcaaatgcctactaccaccaccactttttcttgcttcctcttcaccttcctcatcaccacttccaccatggcttctatggttggagctgtgggggtgaactggggcaccatggcttctcacccacttccaccccacaaggtggtgaagctcttgaagtccaacagcatcaacaaagtcaagctctttgatgccaactctgatgttcttcaggccctttctggctccaacattgctagtactgtgggtgttcccaacactttgctcagaagcttgaactcttctaagaaagctgctgatagctgggtccatgataatg

SEQ ID NO: 15741 - DNA, 382 bp, Glycine max
  unsure (1)..(382): unsure at all n locations
agcttctttctatatacaagactgaagctctgataccacttgttagagaagtggcctcagatatcttaagaaggcggggcgcgaatgaagatatgaccaactatttaccctaatcaaaaatctatattactgctcaaccaacgtatgaattcccttaatgacaatcttcttaaatattaattcanatgagacactttgaatatgaatataatgcactcatagataacggagaataacggaagagaatatgcgcactcagttctatactgtttcggccacacccgtgtgcctacgtacagtccccactaaacccgctagagagttccactatcttagaaatgctttgtacaagttctaaacacacaaagacaatccttccttt

SEQ ID NO: 15742 - DNA, 387 bp, Glycine max
aagcacattttatttctttggagaaaccttggtctaaaatgtggcaacataatgttatcaatctaacaaaaaatcctatcatgcattctaggactaaacacatagaaataatgcatcattttcttagagatcatgtgttaaaaggtgactgctacattgagttcatagatagtgagcattaacttgcagacattttcactaaaccacttgctagagataggttctgtttcattagaaatgaaataagcatattagatgcttccaacataaaataacttcctatttgcataatgtgtgatgcacattgctatttgagacgatgactaatttattctggagtctctactctaatcaattaccaagtagtttaatcgattacttctctct

SEQ ID NO: 15743 - DNA, 164 bp, Glycine max
gtatcctatgtcgtgtggatgattctccagattacctgggtaactttatagagagaaatcgaaacctctgaatatcaaagagttgagtctaaacttcaagagagaaaactgtgtatcaagagaataggagtgccatggcagaaatttgaaacagcaggtcactg

SEQ ID NO: 15744 - DNA, 333 bp, Glycine max
  unsure (1)..(333): unsure at all n locations
tttctcatgtgttcactttacccaatctccgggttcgaagacaaccttctttcttcctttgttggcttgtttagcatagcttttatttttcctctcaatttgatctttgactcttacatgaagcttcttcacatagtccgcctttgcttgaccttctttatgcttaaaaacagaaacattangcataggcaaaagatcaagaggagttagtgggttagaaccataaacaacttcaaaatcatcaaaagtggtagtggtcaaaatctgatttttgcaaaacaagatatatagtgactgtttagcatgaaacaacctcttgacctcactttttgt

SEQ ID NO: 15745 - DNA, 189 bp, Glycine max
  unsure (1)..(189): unsure at all n locations
gtcacacgaagtccgattcaggtgcataatataccgagacgctcgaaattgaacaacggaagctctcgagaaattcaaatggtcataacttatcacacggaagtccgattcaggagcataatatatcgagaagcttgaaattgaacaacagaagctctcgagaaattcanatggtcataacttgtcaca

SEQ ID NO: 15746 - DNA, 275 bp, Glycine max
  unsure (1)..(275): unsure at all n locations
taagaaccccatcgtcttcttcgatgtcaccatcggtaacattcccgccggtcgaatcaagatggaactctntgccgatattgccccaaaaaccgccgagaatttcaggtatctatgcttctagtgttaaagcgtttcttcttttagtgctagttagagtgccccttggctttaagcattgctatcaacttgtgattgaacttctacgaaaaatcactanttnttgttttagtctacagaagtttactcattttaattgcaaaagtgcagattta

SEQ ID NO: 15747 - DNA, 350 bp, Glycine max
agatgtatcacacaatcaaataaaggggctactcccagattgttggagaccctaaaacacttacttgttcttgatttaagcagcaataaattgtcaaggaagattcctatgtccatgggcgcccttgttaatatggaagccttggtttttaaaaacaatggtttaatgggtgagttgccttcttctttgaagaattgcagcacgttatttatgctggacctgagtgaaaatattgtagcccggccaataccatcattgataggacaacgtctgcagcaattgataatctttgacatgcgaggaaatcacctttcatgatatatacccattcatctttgtatttgaaccga

SEQ ID NO: 15748 - DNA, 251 bp, Glycine max
tctgtacctgtcgcaagggtctgtggtttgagctcctctgtggaccaccatacagacctttgcgcttccatgcagcaagctagagcaattgatcggcctgaagcttatgctgcagatatatacgatagacctcctcacctgggagcaaataaaccacagcatgacaattatgacctctgcagcggcagatataaccctggatggaagagatagcctaaccttacatggttcatccctcaacaacaacaaca

SEQ ID NO: 15749 - DNA, 374 bp, Glycine max
  unsure (1)..(374): unsure at all n locations
ccaaagcacagcttcaaatttgggcactttagatgtatcacacaatcaaataaaggggcaactcccagattgttggaaatcagtaaagcaattactgtttcttgatttaagcagcaataaattgtcagggaagattcctatgtccatgggcgcccttgttaatatggaagccttggttttaagaaacaatggtttaatgggtgagttgccttcttctttgaagaatgcagcagtttatttatgctggacctgagtgaaaatatgttgtcnggtccaataccatcatggattggacanagtatgcagcaattgataatcttgaacatgcgaggaaatcacctctcangatatctacccattcatctcntgtattt

SEQ ID NO: 15750 - DNA, 361 bp, Glycine max
  unsure (1)..(361): unsure at all n locations
ctcctctaatgactatggcatcatttctggcgctaaactgttgggagttggaagccatcttctcaattaaatntctggcttcagcaggagtcatgtctccaaaggctccaccactggcaacatctatcatacttctctccatattactgagtccttcataaaaatattggagaagaggctattctgaaatctgatggtgggggcaactggcacataatttcttaaatctctcccagtactcatacaggctctctccactgagttgtctaatacctgagatatccttcccgatggttgtggtccctgaagcaagaaattttttttctaagaatactctcttaaggtcattccaactcgtgat

SEQ ID NO: 15751 - DNA, 267 bp, Glycine max
ctccatgagaggcgggatcacatggagaatatatatcataatgaagaagaaaggaggagaagagggaatgatcgtgttcctatacaaaaccgaattgatggtattaaactcaacattcctccatttataggaaagaatgatccggaggcctacttggagtgtgagatgaaaatagagcatgtcttctcatgcaacaactatgatgaggaccacaatgtgaagcttgccgccacggagatttcccactatactcttgtgtggggaaca

SEQ ID NO: 15752 - DNA, 411 bp, Glycine max
  unsure (1)..(411): unsure at all n locations
atcttcttcatcaatggagtccgttgctttttgtatatcaatgacagtggaatgcagaaggaggaaaggtgattggagatgccacttcaaggagaagagagtcaagaacaagttcaccaccataggaagccatggataagagcttgaaggttggagaagatgagtggagggagagggagagaatgggcacgaaatttatgcctcgaatgaggtctaaaatttgaagtgtaatttctcanatgatcaaagtagaaataatgcacacaacaggcctctatttatagcctaagtgtcacatgaaattggagggaaatttgaattttattcaaatttcacttgaatttaaatttgtggagctaaatttggagcctaaagttcactaattatgaatagtgaaatttanctatggtt

SEQ ID NO: 15753 - DNA, 288 bp, Glycine max
agatggaccatttcaagtgcttgaaagaattatgacaattcttacaaagtaagctacccggtgagtataatgttagttccacctttcatgtctctaacttatctctttttgatgcagatggagaatccgatttgggaccaatccttctcaagagggagagaatgatgacgaaatgaccaagagcaagggcaaggatccacttgaaagacttggacgacctatgacaagggttagagcaaggaaagccaaggaagctcttcaacaagtgttggccatactatttgaata

SEQ ID NO: 15754 - DNA, 392 bp, Glycine max
  unsure (1)..(392): unsure at all n locations
agcttagtcttgttcaacctaccatccttagactgatggccaaactgaatggaccattcagttgttggaggatcttttgagagcgtgtgtcttagagcaaaagggaagttgggagagttttctgccattgatagagttcacttataacaatagttttcactctacgattggcatggctccctatgaagctctgtatggtagaaggtgtaggacacctgtcataccctaatttcgttcggggaccagctgtttgttgggatgcgaccctcgtttgaccacttcgaggtacttggcacccatcgttaggcaattcgtgaagttctgtgacatgccggaagtcaaaagatagcatntgtgcacaattcgtgaagttccgtgatgtgccggaagtc

SEQ ID NO: 15755 - DNA, 397 bp, Glycine max
  unsure (1)..(397): unsure at all n locations
agctngtgtgttatttgtgtttgcaagtaaatgatgaatgagcgagcgcatagcacaatgaatntaagatgaaacgacgtagttggcagtgaggcaggaggagtttatggttttagcattgttgttcttgagttgtgttgaatctggagagagagatgaataattgtatagcaaagagacgtgagaatgcgaggagcagtagagaggaagatcaactgatagtgactccattaggcgctggaaatgaagttgagtcttgttcgattgtggaatacacccggcttactctggcatggctgctttgccctatttcgacgagattgacccttccatagtcaatgttcttctcatcactcactttcacttggatcatgctgcttccttgccctattttctc

SEQ ID NO: 15756 - DNA, 354 bp, Glycine max
  unsure (1)..(354): unsure at all n locations
agctnagattcttctattacttccatacatnggctntgaacaccatgaggaaattcgcacaanacactgaattggtgagacacaaagttacaagatttgctaccactttcttaactntgcaaagattgcataagcaaaaggccaatcttagaaggatgtttacttcggatgaatggttgaagtctaaggaagctaaagagtctaaggggaagcaagcaacaaatgttgttcttatgccatcattttggaatgatgttgtctacattttaaaggctatanggcctcttgtaagtgtgttgaggttggtggaataatgaaaaaacctgcaatgggtttcatttatgaagcaatgga

SEQ ID NO: 15757 - DNA, 388 bp, Glycine max
  unsure (1)..(388): unsure at all n locations
agcttcgttgattgttcgggactgcgngagcaagcacctctactcctccgccatcttcttcgccgacaaagtggcagccttcaccgccgaccccgcagacatctacatgcaggcccaggccctcttcctcggccgccactaccgtcgcgccttccacctgctcaacgcatccaaaatcgtcctcaccgacctccgattccgctacctcgccgccaagtgcctcgtattcttctggttccttctctcttttttcatttgattattgattaaaaccattcattgaaaatacacatcaattctaataatgggatgtctttttctatttttatttanacgagttgaaacgtgattcttgaatgaattcagatagtatgagttacaacttata

SEQ ID NO: 15758 - DNA, 362 bp, Glycine max
  unsure (1)..(362): unsure at all n locations
agcttctctaatattatgcgcctgaatcagacttccgtttcaaaagttatgaccatatgaatttctccactgtattccgtgtgacaagttatgaccatttgaatttctcgatagcattcgttgttcaatttcgagcgtctcgatatattatgcgcctgaatcggacttccgtgtgacaagttatgaccatttngaattgtcgagagcatccgttgttaaatttcgagtatctcgatatattatgcgcctgaatcggacatccgtgtgacaagttatggccatatgaatttctcgagagcattcgttgttcaatttcgagcgtctcgatatattctgcgccttaatcggacttccgggcgaca

SEQ ID NO: 15759 - DNA, 421 bp, Glycine max
  unsure (1)..(421): unsure at all n locations
agcttcatgtgttatggcctcagcaaacttcttatttccagaaggaaattcaatcaatagacctccaatctttaatggagagggttaccagtactggaaaacccgaatgcaaattttcattgaggcaatagacttaaacatttgggaagccatagaaataggaccttatatacccaccacagtagaaagaaccataatagattgaagcacaacaagtggaagcacaacaatagaataaactagagatagatggtctaaagaagatagaagacgagtacaatataatttaaaagccaaaaacataattacatctgccctgngaatggatgaatattntanggtttcaaattgtaagagtgctaaggaaatgtgggacactctacaagtaacacatgaaggcacaacatatgttaaaagatct

SEQ ID NO: 15760 - DNA, 297 bp, Glycine max
agctatttatcatttcaaatggtcataacgtttcactcggatgtcggattcaagcgcataatatatcgagacgctcgaaattgaataatggaagctattgagcaattccaatggtcataacttttaactcggaagtccgattgaggcacataatatattgagacgctcgaaatcgaacaacggaagctctccagaaattcaaatggtcataactatgaactcggaggtcggactgagactcatattatattgtgacgctcgaaattgaacaatggatgctcttgagcacattccaat

SEQ ID NO: 15761 - DNA, 302 bp, Glycine max
agtctttttcttagggagacggaccatctcaagtgctcgaaagaatcaatgacaatgcttacaaagatgagctgcccggtgagtataatgtgagtttcaccttcaatgtctctgatatatctctttttgatgcatatggagaagacgattagaggacaaatccttctcaatagggacagaatgatgatgacatgatcaagagccatggcacagatccacttgaatgacttggagagcctatgacaacggctagagcaaggatagccaatgaagctgttcacgaatgttgacatactatttga

SEQ ID NO: 15762 - DNA, 312 bp, Glycine max
agcttcttatgttttagttgataaagatgaattcttggctacttcatgcactcctctaatgacaatagcatcgtttctggcactaaattgctgggagtttgaagccatcttctcaattaaatttctggcttcagcaggggtcatgtctccaagtgctccaccactagcagcatctatcatacttctctccatgttactgagtccttcataaaaatattggagaagaagctactcagaaatctgggggtgagggcaactggcacatagttttttaaatctctcccagtattcatataggttctctccactgag

SEQ ID NO: 15763 - DNA, 341 bp, Glycine max
  unsure (1)..(341): unsure at all n locations
ctgcatactcatcccttatcacaagattgccaaaatccaataactctgccactggattatgtgcttcttttggacaatttgtggaccacacaaccgtgttgttgtgtgtaaggaccaaattgccagaactgtttagtctcaagatggcagaggaatcatttattgggttgccaccgtttgcaacccaaacaacattttgtgacggattattcttgaaccaaatccccaggtagcttttgtttggaagtccaagattgaagaaaccaagctcanagattcccctttgggaaaccatggtctttccaaaactganggattgggactgtgaaatggatgatgtg

SEQ ID NO: 15764 - DNA, 421 bp, Glycine max
  unsure (1)..(421): unsure at all n locations
agcgantatttcttgcnttctatggcggngagccngngcttgactcatcttctacttgaagtggcatctccaatcacctttcctccttctncattttgtttccattgatcttcaagaaacaaaggactccattgatgaagaagatccaaggcctaccagctcaacatggagctacatcatgtggtatcagagcatcttcatctaggtgatgatcttttgcttcctctatctntntgcttggtcaattcactataattccttggtcttcatcttcttctccatgtatctcctccattgcttgtggcttggctctgtntagagtagattcaaaaaaaaataaaccgattcaatcttagatctacacttgctcttgcatttctatggttcacatntaatagatctactcttgaatcatgtttta

SEQ ID NO: 15765 - DNA, 417 bp, Glycine max
agctttacttcatatgttttccaaatcatcaagaatcttgttgaaaacagccaattgttaagtggctgttcttgactctgtcatcttgaaggtgtacagtttttgcttcaagcatagccgatttgcaagggactttgtcatatacaatgactccagtttcaaccacattgaggctgctgtcttttctcttgcaacttctcttaaagctttatctccaaggtatataatgattgcacttctggctttagcaatcatctctgatttctcctttgagcttagagattcagacatcttttcttctcctttaagagcttctgcacaaccatgatgaatcaagattgcttccatcttgattctcataacccacagtcattttccctgaaaacttctctatatcgtactttgttgttccatctt

SEQ ID NO: 15766 - DNA, 400 bp, Glycine max
  unsure (1)..(400): unsure at all n locations
agcttattttaaggcatgtgaagtgggtggaattcctagagcaattcccttatgttatcaaacataaaaagggaaaaggtaatattgtagccgatgctctttctcggcgtcatgcattactttctatgcttgaaacaaaattgattggtcttgaatgtttgaaaagcatgtatgaaaatgatgaaacttttggagaaatttttaaaaattgtgaaaaattttcagaaaatggtttctttagacatgaaggctttcttttcaaagaaaacaaattgtgtgtgcctaaatgttctactagaaatttgcttgtttgtgaagcacatgaaggaggtttaatggggcattntggggtccaaaagactctagaaacattacaagaacatttttatnggcctcatat

SEQ ID NO: 15767 - DNA, 413 bp, Glycine max
  unsure (1)..(413): unsure at all n locations
agcttagttctatatgggatgaaccttttcaggttttggagaggatcaataacaatgcctataggttggacctcccagaagagtatggagtcaggaccacttttaacatttctgatttaactccttttgcaggtggagctgatattgaggaagaggaactaacagatttgaggtcaaatcctcttcaaggggaaggggatgatggaatcctccctaggaagggaccaatcactagaacaatgagcaagaggctccaagaagattgggctagagctgttgaagaaggccctanggttctcatgaaccttangatagaattctgagcccatgggccaaggttgggtccaattatctttgtacatattagactangatgtcattatanttggtccttgtatatagggctccatatt

SEQ ID NO: 15768 - DNA, 428 bp, Glycine max
  unsure (1)..(428): unsure at all n locations
agctntaattgctttcatgtcatctgtaacctttacaagttcaacagttggcttctccctcacaataggcaagagagcaccctggacttgtgttgcatttgcaagctcctcgggagtagaatcaccagcctacaataaaacaacagtttcacatgacacacaaacatctttcatttcgaccttcatcagaaatgaaaatgcctaccacaatcaaaatagataatggaacatctgaattaccttaaccttgtgtgcccgtcttgggaacacaaccaatttggccttgtatgttttcagcctctgcacattagcttgcagactttccaaagaacggttcttgcgacgatgatcaacagcaatacctatggttggtgcaagctttttgggaatccctgctgcctatggcataatatanaaaatacataata

SEQ ID NO: 15769 - DNA, 365 bp, Glycine max
  unsure (1)..(365): unsure at all n locations
ggcttgctatcttggttataaaagaaaccgtctgtgagtcatatgagaatttttggttgtacaacatatgcattagttgatttaaggactaagctggatgataaatttgtcaaatgtgtatttattggctatgctacttagtcaaaggcatacagactgtataacccactaactggcaagataattgtcaatagaaatgttgtatttgatgaagatgcacgctgggtttgggaggaatgtgaaatcagtaaaagtgtttatcagaaatcagtcagttntgatggttcataggaggtctcaaatgtgccagaaaatgatcacactccaagccctcattcaacgccatcaagccagggatcattaac

SEQ ID NO: 15770 - DNA, 391 bp, Glycine max
  unsure (1)..(391): unsure at all n locations
agcttgagttatgatttgaatagagatcatcactaccaacaatgccttgaagtaagacttcattggttgcctgtgatttaactgtgcaaaagtgaggaaagaattcagagtaaactccattatctttggcaaatttacttacacttgatggatttttagtgattgagggagcatgtaacaagtaatgaagataaagaggaaaactaggattagtaggggacttataagaaggagaaccagaaccaagaatttttaaaccttcaccattaccaatataaatctgatctcatccatcanagtgaccaagctgatgaatattntgtggttctccagtcacatggaatgaagctcccgagtcanggatccaggttgaattagcattgtccatgag

SEQ ID NO: 15771 - DNA, 416 bp, Glycine max
ttcttggttatctccttctttactacatcaagaatcaccgggttgagtcttctctgtggttgtcttactggtttagctccatcctctaaatttattcgatgcatacatgtggatgggctaataccaggaatgtccgccagggtccagcctatagccttcttatgcttcttgagaattgacaacaacttctcctcttgttcatcagcaagggaggcagatataatcactggaaaactcttgctatcatccaagtaagcgtattttaaatttgatggcagaggcttcaattctggtgtggtccgctggacagtggtagaaggagatggtttctcagcctttacctcataaagaaagtcagaggtatgtgtacttcctgaaacatggttagtcctatctgactctataaaaacaatctc

SEQ ID NO: 15772 - DNA, 324 bp, Glycine max
  unsure (1)..(324): unsure at all n locations
agcttttctactattgccactctactcaggaattcgtgagggatatgttgacgaggaacaccactgcttcctccaggagaatgttgttgtggaaagcaactacagtgctgtaatacagacaattcttccgccaacacgtaatgaccctggaagtgttactattccttgttcaatcagagaagtcactgtgggaaaggatcacattgatttgggagcagtatcaacctaataccactctctatgtgtataatgttgtgagagcttggaatcatgcccacgagaatgactntacaacttgctgaccgatccatctcaagaccttac

SEQ ID NO: 15773 - DNA, 375 bp, Glycine max
agcttgaatgttctataagatgagtggagaacaaaaactacccctaatacaaaaactagtctacgtgccctaaaatacaagggctgaagatcttacattacaagggtatcctaaacttgtggggtaccctccctacattatggagcactaaatacaaggcccaaaaaaataatgaaaccctaatctaatatatacaaagataagtgggatcatacttagcccataagcccaaaatctatcctaacgctcatgagaaccctatggtcttctcctgcatctctagcccaatcttcttggagtcttctattcaatgcccttggagggtaggatagcatcattaggggtgcctaaaagcaagatattcactatggtact

SEQ ID NO: 15774 - DNA, 434 bp, Glycine max
  unsure (1)..(434): unsure at all n locations
agctttattattatagaatatccaaggagaatacctggatctgacttatcatcaaattttcctaagttatcttttccattattcaatacaaaacatttacaaccaaagatataaagatgtgagatgtttggttttctgccattgaacaattcatatggagttntctttaaaatgggtcttattaaagccctatttaaaatgtagcatgcagtgttaacggcttcagcccaaaagtattttggaagaggagtatcatttaataaagttctagcaatctcttccaaagatctatttttcctttctacaacacccatttgttgagggtttcttagtgcagaaaagttatgctcaatcccatgcttatcacaaaataattcaaattctttattttcaaactcacccccatgatcgctcctaatagatataatctttag

SEQ ID NO: 15775 - DNA, 389 bp, Glycine max
  unsure (1)..(389): unsure at all n locations
agctnttatattatgtngacctcgagtgtatatgggttgtcttccatgtttcaatcgtacgtagcttgtgtcttcttcacagatagggcatgcacgatggcccttaacactgcatccactcaaattcttgtatgctgganagtcattaatggtagaaaataacattgcacacaatgtgaatgtctcatttcgatacccatcaaacacaacaacttccttgtcctacaactctgtcaagggttcaatcaaaggactgagataaacatcatagacaacatcaattatttttacttcatgcactaccaaggaggtaagttgtaaattactagcanaacaagtcacaaactatgctgagttcttanatngtcatagggattcattccatcact

SEQ ID NO: 15776 - DNA, 392 bp, Glycine max
  unsure (1)..(392): unsure at all n locations
agcttgttattgtttcacgaaagctctcgagaaattcagatggtcataactnttcatacggaagtctgattcaggtgcataatatatcgagaagctcgaaattgaagcacggaagctctcgagaaattgaaatgatcataacttatgacacggaagtccaattcaggcgcataatatatcaagacgctcgaaattgcacaacggaagctctccagaaattcaaattgtcataactcttcaaacggaagtcagattaaggtgcataatatatcgagaagcttgaaattgaacaacgtaagctctcaagatattcaaatggtcataactgttcacaacggagtccgattctgacgcataatataccgagacgctcgaaattgaacaacggaagc

SEQ ID NO: 15777 - DNA, 331 bp, Glycine max
  unsure (1)..(331): unsure at all n locations
caaacgtctcgatatattatgcgcccgaatcggacatccgtgtgaaaaattatgaccaatagaatttctagagagcttccgttgttcattctgtagagcctctatattgtatgcgcttgtatcggacatctgagttaaaagttatgaccatttgaatttctcaacagcttccgttgccaaattntgagcatctcgatatgtgattcgcatgaatcagacatccatgtgaaaaggtatgaccatctgaatttctcaagagcttccgttgttcaattatgagcgtcacgatatgtgattcgcccgaatcggacagtcgtggtgaaagttatga

SEQ ID NO: 15778 - DNA, 416 bp, Glycine max
  unsure (1)..(416): unsure at all n locations
cgatatattatgcaccttaatcggactaccgtgtgttatgtttgaccattntaatttctcaagagctggcgttgttcaattccgagcttctcgatatattatgcacctgaatcagacttccgtttgaaaagttttgaccatttgaatctctcgagagcttccgttgttctatttcgagggtctcgatatattatgcgcctgaatcggacttccgtgtgataagttatgaccatttgaatctctcgagagcttccgttatgcaatttcaagcttctggatctattatgcacccgaatcagacttccatttgaaaagttatgaccatgtgaatctctcgagagctttcgtcgttcaattttgagcgtctcggtatattatgcgcctgaatcggacttccgtgtgacaagtactgacca

SEQ ID NO: 15779 - DNA, 435 bp, Glycine max
  unsure (1)..(435): unsure at all n locations
gttggaggaatcaaatcctggaggctgctgcatgtagacttcttcttgtagaatgccatggagaaagacattgttcacatccagctgctgtatgggccagtgataggtgacagccaaagtgagaagaagtctaacagtaataggcttaataactggtgaataagtttcttgaaatctgtgtcatattgcttgagggcaaggttgattgaggctgtgatttanatgaagaggaagagggaaagaggtcatanggaaatctggactcattgaacaccacatccttagatatgtagattctgccttcagaagaaagacattagtagcctttgtgcgtaggagaatatcccagaaaatgcattcttgagactgaattggagtttattcttcttgtangagaggaanacaactaggaagtctattaattaaatagacact

SEQ ID NO: 15780 - DNA, 450 bp, Glycine max
  unsure (1)..(450): unsure at all n locations
caattgcttcagattgttgcacagaagggcaattgtttgtgctgtggtcgacagaggagcataaaccatagagtctggcgacaggtgcaaatttttgattcatggccagttgggttaccaggttaaccaaggcatctattttaccttcaagcttcttagtctcggctgatgaagatgaattcgtggctacttcatgcaatcctctaatgacaatagcatcacttctggccgtggtcctggaagcaaggaaatttttttctaagaatactctcttgaggtcatcccanctcgtgatagaccgtggagcaaggtaataaagccagtcctttgccactccctctaaagaatgaggaaaagcctttagaaatatgtgatcctcctgcacatctaggggtttcatggtggagcagacaatatggaattctttcagatgtttgtatgggtcttcac

SEQ ID NO: 15781 - DNA, 451 bp, Glycine max
  unsure (1)..(451): unsure at all n locations
tcttagtctcggctgatgaagatgaatngttgtgcttcttcattcactcctctaatgacaatagcatcacttctggcactaaattgctgggagtttgaagccatcttctcaattaaatctctggcttcagcaggggtcatgtctccaagggctccaccactagcagcatctatcatacttctctccatgttactgagtccttcatagaaatattggaggacaagctgctcataaatctggtggtgacgacaactggcacataatatcttgaatctttcccagtactcatactagctttctccaccaagttgtctgatgcctgaaatgtcttttctgatggcagtggtcctagatgcaaggaagaatttctccaagaacacccttctaaggtcatcccagttgaaaatagacctgtgagcaaggtagtatagccaatctcttgccactccct

SEQ ID NO: 15782 - DNA, 453 bp, Glycine max
  unsure (1)..(453): unsure at all n locations
agcttattctttcttgtacgtgaatttcaaccatggaccatatgtatatatatagatgagagatcccgagttcaactcttccattaataaagaattaacaattaacaattaataactagcatttgttgataaatatatgtctcaatctaccattccaccacctatatggaagcacattgtgtcattgtgtgtatgttttaaggtgaagctatataaagttatatgatattacatcatttatattataattgaaaaaatttatactattttttaaatgagaaataaattctcttaaaaaatgaaaactaaatataaattatcgtatgagatttttcttctataaatagtggattggtattacttatattttgaaacanatattcagaataacaaacaacttctacaaatcaatgtttttcataccttaagcangcatanataattgaacacact

SEQ ID NO: 15783 - DNA, 447 bp, Glycine max
aactataaaactcaagctgggcccttaattgaataagtcacgccagaatccagattgtctgtttaataggggtcccagtcagaaaccatactccaagggaaactgtggagtttgcataccatatccagaaaagggacaacaatcttgtgggcagtgtatttagggggtaacacaccaaagtgggctctttataatagcgatctacaaccaccagaatagccgtgaaatcgttggaagggggtaagccgatgatgaagtccacgctgaggtcttcccatattgacgacaaaatgggaagaggttgcaaaagacccgtgggcttcttggactcgtatttagtttgttggagagtggaacactgagcaagatattggcgaacgaccgaatgaatttgtggccataagaaattggcctatagatgatgaagtgtcatggcgacacccatgt

SEQ ID NO: 15784 - DNA, 463 bp, Glycine max
ctcagcttcccttcaactcttcaaagctctctgagcctcttctcttctcttgaacccatccttcttggtaagttcagtcaatgggttagctatcttgccataatgtttgatgaattttctgtagtagccagttaaccctaagaaccccctcactcccttcacattcattggggttggccattgaatcacactttcaatcttgctaggatccactgctacaccagcttgggatatgacatggcccaagtattcaatggtgtgttgagcaaaatgacacttctttttgttggctactaacccatgtactgctaacagttgcaaaacagtttgcaaatgctccaaatgggcttcccaatcaacactataaactagtatatcatcaaagaaaactaatacgcatttcctaagcaaggggttaaagacatcattcatgaggctctgaaatgtcgagggtgcattcatt

SEQ ID NO: 15785 - DNA, 408 bp, Glycine max
agctttattatgtttagagagagagagacattaccatgcttgtgtcacattgtagttatgcttaatgttatattactatgtttatgtcatattgtacacttaatattatataatttttcaaataaacatgtgcttaatgtgtgtgtgacatatatgggcgtaatatcaactgatgcaatcctagcccccaagggcattggatagaagactccaagaagattgggccagagatgcaggagaaggcccaagggttttcaagggccttatgatagatatggggcccttgggctcagtagatcttgggcccatttcatgctccttctctccttctacctccactcatgttcttctaccttcaagctcttatccatggcttactatggtggtgagcttgttcttgaatcatct

SEQ ID NO: 15786 - DNA, 446 bp, Glycine max
  unsure (1)..(446): unsure at all n locations
atcaaccagcttcacaagcctgccttaaaatgtttcctgcctntttttttacttgtatccctagctataactctaaggctagtgaaatttatttcaaagaggcatgtagtgcattaaatgcactgtagactttggatggacacaacaattttccccttccagccagaggggaatatcctcaatttctcataggcaatccatatcgattagctcgacacaaagttgaagcttttctcgtgctacaactttactcatcatattcgtaggatttttatcaatgtgaatcttttccaacttgaagtgttgttcttccacttctcgttgcaacaaatggtatcttacatcaatgtgatttgtgagagagtggtacatcacattcttacttaaatccaaagcactttgactntcataatgaatcatgtaactntcctgcttcattcccaact

SEQ ID NO: 15787 - DNA, 428 bp, Glycine max
tctttccttcctaagatggttctctttcccagtccccctcattaagaactagctcctttcttcctctattgcccttagttgaatacacctttgtttggttctctatttgggtcttaaccctctcatgcaacttctttacaaactctgacctagattccccttctttatgtataaaagaagtgtcaagcgggaggggaatgaggtctaagggtgttaagggattgaacccatagacaacctcaaaaggggatcgcttggtggttctatgaacccccctattgtatgcaaattctacatgagcaagatactcatcccaagacttatggttgccttttagaagagcccttagaagagtggataaagacctattcactacctctgtttgcccatcagtttggggatgacaagtggtggagaaaagaagctta

SEQ ID NO: 15788 - DNA, 418 bp, Glycine max
  unsure (1)..(418): unsure at all n locations
gatgattctctacattaatgtataatgttttatattatcgagactcatcatgcaaaagtgtaaatcgtcaaatttttaatttcaattatgacatcattaaggttaatatataatactttaactgatattattaaaacattcattcaataattaacatgtaatcaattaatatttatccaatatatccaatgtcggtgctaatagtaatacttaacatattatttcgagcgaattttgtataattatcatcatcgttattgaatcagatcatctaacatacaatgattcaacatcttaaaaataaagagattcattgcattcattactacattcgattcattatatgagcacattcactatccttgatcgncactatgagtacaaaattatcagcgtatacattttcattattttgaat

SEQ ID NO: 15789 - DNA, 422 bp, Glycine max
  unsure (1)..(422): unsure at all n locations
tgatgagggtgttccatatgttctcaagactggactaatagattttctgcccaagttcatggtcttgcangtgaagatcctcataagcatctttaaggagtccatattatnntgtccaccatgaagccttctgatgtccaagaagatcatatctntctaaaggcttttcctcattctttggagggagtggcaaaagattggctatactaccttgctcccaggtccattntcagttgggatgaccttaagagggtgttcttggagaaattaatccctacatctangtccactgccatcagaaaagacatttcaggcatcangaaacttagtggagagagctngtatgagtactgngaaagattcaagaaaatgtgtgcaagttgtccccaccaccagatttctgagcaactccttcttcaata

SEQ ID NO: 15790 - DNA, 367 bp, Glycine max
tctgcatctgtacctgttactgttgcaagagtctgtggtctatgttcttctgctaatcaccatatagatctttgtccttctttgcagcaatctggagtcaatgagcaacctgaagcctatgctacaaacatttataatagatcccctcagcagcaaaatcaacaacagtagaataattatgatctttcaagcaacagatacaatccaggttggaggaatcatccaaatctaagatgggaaaatcctccacaacaacaacagcctgtccctcctttccagaatgttgttggtccaagcaagccatatgttccttctccaatggcagcagcacaacaaagacaacaagcaactgaggcccattctcaac

SEQ ID NO: 15791 - DNA, 432 bp, Glycine max
  unsure (1)..(432): unsure at all n locations
tagactcacccccggcttctttttggtgtgatgattccaacttgaagagcttggtcacctcctttttcaccacatctagaatgatggggtcaagtcgtcgttgtggctgcctcactgactgagctccatcctctaaaagtatcctatgcatgcaggtagatgggctaatactatgaatgtttgctaaagtccatccaatagctttattgtgcttctggagcactaacaacaactactcctcttgctcggcagtaagggaggcagagatgaacactggatatttttccttgccctccaagtaagcatacttgaggtttgctgagtagggcttcaactctgatgcgggtggtggatgaatagcgggaggaaccagtgtgagagaacaagatganggttcctcagcctgtacctcataaagcatgtcataagtat

SEQ ID NO: 15792 - DNA, 409 bp, Glycine max
  unsure (1)..(409): unsure at all n locations
caagctatgttgtatattntacaatagacctcctcaacctaagcagcataatcaaccacagcagagctattatgacctttccagcaacagatacaaccctggatggaggaatcaccctaacctcagatggtccagccctcagcaacaacaacaacagcctgctccttacttccgaaatgctgctggcccaagcagaccatacattcctccaccaatccaacaacagcaacaaccccagaaacaaacaacagttgaggcccctccacaaccttctctcgaagaacttgtgaggcaaatgactatgcagaacatgcagtttcagcaagagaccagagcctncattcatagcgtaaccaatcagatgggacaattagctacccaattgaatcaacaacagtcccagaattct

SEQ ID NO: 15793 - DNA, 356 bp, Glycine max
gttatgattatttgaatttctcgagagcttcctatgtttaattttgagcgtctcgatatattatacgcctgaatcgaacctcagtgtaaaaagttatgaccatttgaatttctttagagcatccgttgttcattttcgagcgtctctatatgtgatgaaccttaatcggacctccgtgtgaaaagttatgaccatttgaatttctcgagagcttccgttgttcaatttcgagcgtctcgacatattatgcgcccgaatcggacatccgtgggaaaagctatgaccatttgaatttctcgagagcttccgttgttcaatttcgagcgtctggacatattatgcgcccgaatcggaca

SEQ ID NO: 15794 - DNA, 459 bp, Glycine max
  unsure (1)..(459): unsure at all n locations
tcattcaattgaataaagagagctgttntgctacatctattagtatcaatttagagttgttgcgcttgtttaattgggtgtgcctctctctttcatttagttattgttttttaatcacctcattcatcattgaccggtacagaaagtccttgtgcagattgttttttcccatgaaagcatttttttagttcatattattataacatgttgttgactttgaattgaagtaagtaattggaaaagtgattactcccaacggttgtaatatcttttacgttaaactatctacttggtatgtaatgttctctattttaagtttttttgctatatcattgtcatcaaatatctatcaatgttatttattattaatttttgttagaaaacttaatcagtcacctttaatggaattatttcttttcattcacatttttgtttattcacaaaattcatacttattta

SEQ ID NO: 15795 - DNA, 405 bp, Glycine max
  unsure (1)..(405): unsure at all n locations
ctcttctaaggacaatagcatcatttctgcactgaattgttggagtnggaagccatcttctcaatcanattcctagcctcagcaggggtcatatcaccaagagctccaccattggcagcatcaatcatactcctctccatgttgctaagtccctcatagaaatattgaagaaggagttgctcaaaaatctggtggtgagggcagctngcacacaatttcttgaatctttcccaatactcatataagctctctccactaagttgcctgatgcctgaaatgtattntctgatggaaatggtcctagatgcanggaagaatttctcaagaacaccctcttaaggtcatccctgctgaanatggacctgngagcaaggtagtacagccaatcttttgccactccctcta

SEQ ID NO: 15796 - DNA, 432 bp, Glycine max
actcagctcagcacttctgtaggttcaggcttccatctctctgatatatctgccatatactcagccggtattaggcctcatgagctttctcatatccagcttactggatttagtttgggtgacttcccttttagatacttaggtgttccccttttatcatcgagattaaatgtatgtcattatgctcccttgctttccaagattactggcctgatttagggatggagcaagaagtctttatcttatgcaggtaagttagagttgattagagcagttattcaaggaattgtgaatttctggatggagatttttcctttgccgcaatctgttctggaccgaatcaacgcttcgtgccgtaattttctgtggggcaaagcgaatattgcaaaaacaagcccttggttgcttggtcagtagtttgttctccgaaaa

SEQ ID NO: 15797 - DNA, 322 bp, Glycine max
tgggagagaaatgttcatctaaagcatacaagtccctaatattatcaaatcctaaaatttgagctcctagggagcaaaacaatgtgtgtctcctagagagggcatcagctaccacatttgtatatccctttttgtatttgataacatatggaaattgctctacgtactctacccattttgcatgcctcttgtttaacttgctttgccctctaatgtacttaagtgattgatgatcactatgaatgacaaattccttggtaacaaagtaatgttcacaagtgtggagggctcttattaacgcataaagctctttatcatatgt

SEQ ID NO: 15798 - DNA, 412 bp, Glycine max
  unsure (1)..(412): unsure at all n locations
ctctgcgtgctatcagggctttcatcttacagacagcaaaagaaagtntatacggataaccactcgggtatttccacccgtcaacgtgactcanatgtcagtatgacagatcttgtgaaggtggccgacaaaagcgaggctcttgctcctacgtatcctccaatgaggaactcagacctacgtagttcttgataacttgtgagacttgacaaagtctccaccggaagatgctgacatctccggaaagggcgcagatgaccacattggcctctgctcgtcaatcacacttgnggtcactgaatgacgaggtgcggataaccgtaaggtgtctccgcgaactaccagctcttgngtcatggtaacaaanagcggtgcggtcgacaaaagcgaacctcttgctcctacttatccc

SEQ ID NO: 15799 - DNA, 422 bp, Glycine max
  unsure (1)..(422): unsure at all n locations
ntgagtatagactcatctctctaattgagtgcatgtacaaggtgttatctaatttgtcggctaatacactcggcaaggtgatacaccaagtgattgatgacacctaatctgtgttcatccaagacaggcatatactggatgacgttcttattggaatgagcttgttgaggaagcaagagtaagtggcatggaaatgattatgttcaaggttgatttccagaaggcatatgactcgatggatcgtgattgtcttatgatgaagacggaagatatgggttttcttaagacatggcatgtatgaattcaagaatgcctgtaaactgcaacaatttttggtatactaaatgggagtccatctaaagaatatgtgtatggtcaaggtcttgggtaacaagatcctttatcacctttcctgtgtctga

SEQ ID NO: 15800 - DNA, 356 bp, Glycine max
  unsure (1)..(356): unsure at all n locations
tctcttctggattatctggctctttaaataatgcattatttcatacaaaagttaactacactagctagtatgataaaatcattctccttgactaanatatcctcattaaaatagttaaaatctaattgtaaattagtctaaatagtaatatttttgccatagcacagtatacaatataaattgttatttttatataactaaattcataataataaaaacattaatatgtaaatcatattacaattaaagttcataatanataaatatctagaacatataaattatatgttagatntacaataaataatctatattgtagtacaagagtactgttaactatntgataattcttttaa

SEQ ID NO: 15801 - DNA, 447 bp, Glycine max
  unsure (1)..(447): unsure at all n locations
ntgaatgctctattcaatggagttgacaagaatatcttcagtctgatcaacacatgcacagtggccaaggatgcatgggagatcctgaaaaccactcatgaaggaacctccaaagtgaagatgtccagattgcaactattggctacaaaattcgaaaatctgaagatgaaggaggaagagtgtattcatgacttccacatgaacattcttgaaattgccaatgcttgcactgccttgggagaaagaatgacagatgaaaagctggtgagaaagatcctcagatctttgcctaagagatttgacatgaaagtcactgcaatagaggaggcccaagacatttgcaacatgagagtagatgaactcattggttcccttcaaacctttgagctaggactctcggatagggctgaaaagaagagcaagaacttggcgttcgtgtccaatgat

SEQ ID NO: 15802 - DNA, 388 bp, Glycine max
  unsure (1)..(388): unsure at all n locations
ctctaatatctcccacactgtgtggggtggccattcttggatggccttgatattctcagggtccacttggaccccatttctaccaactacaaaacctaagataactatattatctacacaaaaggtacacttctctatatttgcatagagggtgtttttcctaaggactgaaagaacttgtctgagatgtcctaagtgatcatctangctcctactatacacttaaatatcatcacaataaacaactacaaatctacctatgaaatcccttaagacatgatgcataagcctcataaaggtgcttggtgcattagatgagcccaaaagcatcactatccattcatacaaaccagacttggtcttgagagcagtgtctcactcatcaccc

SEQ ID NO: 15803 - DNA, 395 bp, Glycine max
  unsure (1)..(395): unsure at all n locations
agcttcctttatattatttctatagaagctagagcttagctacacgtacctctctaatagctaagctcacctccttgagatgagaagctagagcttagctacacacccnctataatagctaagctcacccccatgaaaaaatacatgaaataaaaaaaaatccctactacaaaggctactcaaaatgcctcgaaatacaaggctaaaaccctatactactagaatggccaaaatacaaggcccaaacgaaggataaacctattctaatatttacaaagataagtgggctcatacttagcccatgggctngaaatctaccctaaggctcatgagaaccctagggccttcccttggatctctggcacaatctacccggagtcttctatccaatgcct

SEQ ID NO: 15804 - DNA, 293 bp, Glycine max
atagaaggtatgttcctaatttctctacaattgcatcactctctttatgatctggtgaagaagaatgtggcatttacctgtggtgaaaaacaagagcaagcctttgctttgctcatagaaaagctgactaatgcacctgttctagctcttcctgacttgtctaaaacttttgagctataatgtgatgcctctggagtgggagttggagctgtattgttacaacgtgggcaccatattgcttattgtaatgaaagacttcatagtgccaccctcaactaccccacctatgataa

SEQ ID NO: 15805 - DNA, 415 bp, Glycine max
  unsure (1)..(415): unsure at all n locations
taatgaaacggcgagatgatgcactccatgagaagttggatcanatggagaatagagatcataatgaataagaaaggaggagacgatggaatgatggtgttcctagacaaaaccgaattgatggtattaaactcaacattcctccatttaaaggaaagaatgatccggaggcctacttggagtgngagacgaanatagagcatgttttttcatgcaacaactatgaggaggaccataaggtgaagctcgccgccacggagttttccgactatgctcttgtgtggtggaacaagctacaaaatgagagagcaagatatgaatagccaatggttgatacatggacagagatgacaaagatcatgangaagcggtatgtgccggctagttactcaatggacttgaaattcaagcttca

SEQ ID NO: 15806 - DNA, 359 bp, Glycine max
  unsure (1)..(359): unsure at all n locations
agcttatgtctggtctagtacagatntgagcatatataatactcctaacaattgatgcatactaaattgcttccatttgttntcgttccatatcatttctaggacattgtgcgagactaaatttgtctcctttctgaattggaacgggtgatgctgagcacttttccatcctaaacctctctagtantttattgatatatgctttctaagacaagcctaacaatccttgtgatctatttcagaataattctatccctatcacatagcttgcctcacccatattcttcattttatagttactagaaagaaacttcttagtgtctgaaaaaactatatcattagttgcagcattatcatca

SEQ ID NO: 15807 - DNA, 366 bp, Glycine max
  unsure (1)..(366): unsure at all n locations
tggaacaggaagaagccatcagcaaagcacctaagggctttgttatctatatgctacattcatattctagacatgaagaggcacaagcttgaagacaagactatacgaggtatcttccttgggtatagcaatatctctaagggctaccgtgtctacaacttgcaaactaagaaactcgtcatcagtcgagatgttgaagttgatgaatatgcttcttggaattgngatgaagaanaagtggagaagaacgttcttatacctgctcaactacctcaagaagaagatgaggaagaagacccaggtgaaccaccttcactctccaccacacaacaagatcaagaactatcatcacccgagtctactcca

SEQ ID NO: 15808 - DNA, 397 bp, Glycine max
  unsure (1)..(397): unsure at all n locations
agctttaagtgataatggttcaaagccncactttgagggtgtgtctctgtttcttcttctgtccatgaaacttctctgtgtcacttgatgaatgagccccacttaaaaagtttgaatattgaggtgaattatctttctgggtgtttttcaagagagcaagttcttgaagtacttggggtttatgtggaatcctctgtctgggttatggacgctgctgctataatggcaattgcacttgccaatggangggtgagttgagcaaattcaatcttgggagtttttaatcactatggttgatgctccatagattatcttttaatttttttttatgcaggtgagccccctgattggcaagattttgttggatcatcaccttgcttctcatcaattcactatc

SEQ ID NO: 15809 - DNA, 319 bp, Glycine max
  unsure (1)..(319): unsure at all n locations
tactaagctntgaatgctctattcaatggagttgacaagaatatcttcagtctgatctacacatgcacagtggccaaggatgcatgggagatcctgaaaaccactcatgaaggaacctccaaagtgaagatgtccagattgcaactattggctacaaaattcgaaaatctgaagatgaaggaggaagagtgtattcatgacttccacatgaacattcttgaaattgccaatgcttgcactgccttgggagaaagaatgacagatgaaaagctggtgagaaagatcctcagatctttgcctaagagatttgacatgaaag

SEQ ID NO: 15810 - DNA, 452 bp, Glycine max
  unsure (1)..(452): unsure at all n locations
tgtagaatggctagacatgatacatgtcagggcttggtttgtttcatttgtaaaaagggatgccccacattatttccatgacacaaatgcaaaaatgatgatttggaaactttatgcaaaactggtcatgcatgcatctatgcggacactcaaatgtcaaattnttatggtcatgtgatgctagggcccaggattcatttcctctattttatatcaacccaatgtttccaaaatatgttcttttatccatttgtgcattcatccaagtccatttcgggcgtccgggaaaatttcacagcattcacccttcaggtttacacacattntttttcccanaaactagctatgaattagcgaattttcttcanagaaaagttggaagtcatctcttttcaaaagcatgtttggttttcagctagacaaactatttttcttttttttctccttttttt

SEQ ID NO: 15811 - DNA, 113 bp, Glycine max
ccttgaatcttcttcatcaatgatgttacttgcttcttgaagatcaatgacaacagaatggagaatgaggaatggtgatcgaagacgtcacttcacatataatatgagtcaag

SEQ ID NO: 15812 - DNA, 359 bp, Glycine max
  unsure (1)..(359): unsure at all n locations
gtaaaactaagctaaaaagtcttagatgggagtgggaccagnccatacattcgttacctgcaatgaacaacgaagcactcgagaaattcaaatttcataacttttcacacggaagtccgtttcatgcgcataatatatcttgaccctcgaaattggtcaccggaaagctctcgagaaattcaagtggtcataacttttcttacggaagtgcgattcaggcgccatatatatctangtgctagaaatngatcaccggaagctctcgagaaaatcanatggacataacttttcaatcgcatggtctgattcaggtgtagaatatatcgagacgcactanattgaacaatgaaagctctcaa

SEQ ID NO: 15813 - DNA, 389 bp, Glycine max
  unsure (1)..(389): unsure at all n locations
agcttttggattgatcaagaagtgccttatgaatcctcccgtgcttatgccaccagtacctggaaggcctctcattntgtacatgacaatcttggacgagtcaatggggtgtatgctggggcaacatgacgaatccggaaagaaagagcgcgctgtttactacctgagtaagaagttcacgacctatgaaatgaattactcgttgctcgaaagaacgtgttgtgctttagtatgggcatcccatcgcctaaggcagtacatgctgagccatactacctggttgatatccaagatggacccggttaagtacatctttgaaaagccagctctcacgggacgaatcgcccggtggcaagtcctgctatcncgaattgatatagtctacgtca

SEQ ID NO: 15814 - DNA, 297 bp, Glycine max
  unsure (1)..(297): unsure at all n locations
tctccctttgagtntcttcattaactcctctattgttatttgcttccctctctcttttaatctgagtcatctctatgtcatactgagtgtacacagagacaaactctccaattgccatgctacaagccccagcaactaatcctgcaaaaccagcaagaagcatggcactgatgtctntcttaacagctccaacacccatcatcagtgaagcaacagaaaccaacccatcattagctcctaacactgcagctcgaagccactgggccctttgagagtaatcaataatgctactactct

SEQ ID NO: 15815 - DNA, 294 bp, Glycine max
  unsure (1)..(294): unsure at all n locations
agcttgtnttcttttcccttcatctcttcggtgtggcaagcttgttttcttttgtgttaggaagtctcacatcgtctgcctcagtctttgtggtgccagttatatatctgttggaccaacttcacttaatgccaattgatttaagatgaaatctaacatgatatcagagcttatagtccgtcttagttttctctaccatgtnggttgaaaaagcagcagtacctgagattntcatccagttgtttgtctcttagaagagcacctacatactactaatctcattaacagttaatc

SEQ ID NO: 15816 - DNA, 334 bp, Glycine max
  unsure (1)..(334): unsure at all n locations
tactcaagctaatcatgtgagtgtcgtaggacatctcccaattcaatttaatttctctcccaacacacatcanatagtgcactgaatgcatgtgaaattataaaactacccctaatacaaaactaccccanaaataatgaaaccctaatctaatatgtacaaagataagtgggctcatacttagcccatgggccaaaattctaccctaatgccttcttcagcagctctagcccaatattcttggagtcttctatacaatacccttggagggaggattacatcatatgtggatattattcttgatagtttaatatgccaatgatggacaaagtct

SEQ ID NO: 15817 - DNA, 312 bp, Glycine max
  unsure (1)..(312): unsure at all n locations
tgtaatcgattacacacatactgtaatcgattaccagagcatattttcagaanatattctcaacagtcacatctttntatgtggttcttgaatggctatcaaaggcctatatatatgtgacttgagacatgaatttgacaagagtttttntgaacaaaaaggtcttatcctcttaaaaagaanaatcgttttatcctcttacaaattccttggccaaaacacttgtgattcaataaggaattatttgagtgctcaaattgttcaatctatctctttcaagagagatttcttcttttcttcttcttcattctg

SEQ ID NO: 15818 - DNA, 347 bp, Glycine max
  unsure (1)..(347): unsure at all n locations
ctctcccctaacaaatgaaccaacttctttaagatantttatctacatccacagcaagatgctcgaaaacctcatacatgtcaagtaaccgaaaacatttttctggtgtgtgtgttcccattgccacggcctcaccataattcaagagatgcagcatgaaactctgagaaatttcagataagcagcattgataaaaggatccaaaatcaccaaggatttgctcacacaatcgtttctcactgacgaggtacacccgaacaatgatcttcatggctcgaatccatttctttatctcgttgttcaagcaatgccactccagttttatcacatccttcattcttaacttt

SEQ ID NO: 15819 - DNA, 318 bp, Glycine max
  unsure (1)..(318): unsure at all n locations
nttgcaagctggaatcatttatcctatctccgacagccaatgggtgagtcccgtccaggtagtgccgaagaaaaccggcctcaccgtgataaaaaatgagaaggaggagttgattcctactcgggtgcagaacagttggagagtctgcatcgactatatgaggctgaaccaggttaccaaaaaggaccattttcccctgccattcattgaccagatgcttgaacgcctggcaggtaaatctcactactgtttccttaatggtttntctggttatattaaatcactattgctcttgaggatcangaanaaaccatattc

SEQ ID NO: 15820 - DNA, 233 bp, Glycine max
tatgctgcagacatttacaacatacctcctcaacctctgcagtttaatcaaccacagcagaacaattatgacctctccagcaacagatacaatcccggatggaggaatcaccctaatctcatatggtctacccctcaacaacaacaacagcagcctgctccttcctttcaaaatgatgctggcctaagcaagccatacattcctgcaccaatccaacaacagcaacagaccca

SEQ ID NO: 15821 - DNA, 392 bp, Glycine max
  unsure (1)..(392): unsure at all n locations
tctgcatagctgtatatgacataacaatctctaatggcttatctcatctttccttcgatatctggaaagtgtgcgagtgttgtgcaaagaacaaagganagggattcaagagatggcaaatagattgttggcacaaaactatggagttgtgtgcaatttgaagcactaagagaaacaaggttagcgagatgtccaactgatttatgaatgctaaccaggttctcgcatccatcaagtatcaattntcttaaattcatggctctagacacatcaggaaattcagaaaccttatcacaaccggagatattcatgtaagtcaaatggtcaaactgcaaaacatacataanatcagataatcaattaacaacagtacatcaaaatcatgtcaatta

SEQ ID NO: 15822 - DNA, 284 bp, Glycine max
  unsure (1)..(284): unsure at all n locations
ggatgcaactgtgatcttatacccatatcagctagatcttgacgggtatcaagccatccttcgtcttgccttgaatgttaaagagcgtcccaatcacactgtcancaaacattttctccacatgcataacatcaatacaatgtctaacgtcaagatcacaccagtacggaagatantagaaatggacctcttcttcatatgcaactctgactttatccttcttttgggcttcccaatacactgttcaggtgtgaacccactgatatacctgctcaccagtcaac

SEQ ID NO: 15823 - DNA, 403 bp, Glycine max
tcttccacgccaataggttccatctcagcaagtaaggccatattgactttatcaccatcagctgtaatcgaggaatctgggaatatctcatagtcatccagccttgcaggggcttgtctatttctctgaggtctcgttgatactgcatcatcatgaacaacattgtcttctgttcctacatccgtgtttagaccttcaattctggttctcaattcagatgtgccctacttatcactccaattccaggattgaccctcatcaaacttcaaatctctactcaacactagtttctgagtttgaggattaaaaaccctgtatgcaccagtagaatggtaaccgagaaatatgaagttctcactcttgtcatcccaatttctctttattgcgtctggaatatgcttat

SEQ ID NO: 15824 - DNA, 395 bp, Glycine max
  unsure (1)..(395): unsure at all n locations
tgttgctttgtgtgagggaaccatantcttttgttttctctctgnctttnacaataagtatgtggtcaagatacaccacttgagtcatgaaacccgttccagtggagacaataattgaggttccaagggtgttagacatcatggttgcatggtangcaaacatctcactcatgtggttcttcaacacttgaccaatgttaggtggcattttaccacttggtatagtggcttttgtttgcaatgctactatgtgccttacttgcacaacttttagtgggaacttttcattaagctgttctctagacaacattattccgttagaaccttcttgaacaacaattacctaaattgatacctctattctggttagagtcgggtgaacaatcatgttgtct

SEQ ID NO: 15825 - DNA, 410 bp, Glycine max
  unsure (1)..(410): unsure at all n locations
ctaagcttgtaccgaattcttcatcgctctaattatcagattgatgagattcgattaatataaatggctctggatgtggtatgaaataattacactcattcctttccaaccatcatttacgtcaataaactttcacattttgaaattctccaatttacaggctaggggcatgaattgcttacacaccagcacacctacaattgttcatcgagatctaaagtctccaaatcttttggttgataagaactggaatgttaaggtatatgattgaaaacttatgcaggttataatatttgcttattctttattatcgcataacataactaaagagtgccataaaaagtagtgcaataaaataataacaagacgatgatgatgatgtctngttggatgatagtttatgatggaaa

SEQ ID NO: 15826 - DNA, 379 bp, Glycine max
  unsure (1)..(379): unsure at all n locations
agctntntggttattataaaacaatgggcaatggttaaagaaagattgtgaaaaagaattggttggaagaatatcatatatgtatattgaatgtgtgcaaaattcatgcttttatagactcttcatgtctggtcaaagaaaccattggaagagtnatgacttttgagaaaaccatgttaagagttataactcttaaacttttcttcnaaactgttcactggtaatcgattaccacaaaggtgtaatcgattacacaatgcattttatgaanagttgtgactcttcacaattggatttgaattccaaccgtcagaatcatttgtaatcgattactaatatanggtaatcaattagactatttgaanatcattttggaatg

SEQ ID NO: 15827 - DNA, 289 bp, Glycine max
aggaacccccagctataatgcgttcttttgaacctctatgtcgtctggaggatgaaggcaacgagttctatatccagagtaagaacaatatgtgttgggtgtggtgaaggaaaccactacttacggtatcaataatcccatcgtgttacaaaacacatttcccttgacatctgaaaagccatcgttctcatgacattgtcctactttgtgtggatttccttgaagttgcacatgctgctgcagaaaagtatatgagaaaagtagctgttgaatttgggattcctctcta

SEQ ID NO: 15828 - DNA, 380 bp, Glycine max
  unsure (1)..(380): unsure at all n locations
agctttttctcatttctcattccagacaaacttctcattcttatgagtcagtttagttaggggtagtgccaatttagaaaatccctcaatgaatttcctataatagccagccaaccccaagaaactntgaacttctgttggagttgtcggttgttgccactccataaccgactccactttaattggatccacagcaaccccatctttagaaatcacgtgccctaagaactgcactttctctaaccaaaattcacatttcgacaatttggcgaacaatttcctatccctcaggatatgcaacacaattctcaagtgcttttcatgctcctccttattccttgaatacactaggatatcatcaatgaacacaaccatgaact

SEQ ID NO: 15829 - DNA, 325 bp, Glycine max
tgtgcctcttcatgtctagaatatgaatgtagcatatagatttttagacccttacgtgcttttctgatggcttcttcccgttctaagcttcaattggagtcttgtcttttacagacttagttggacatctgttgagtatgtaaatagtagtgtagattgcttcagcccagaatgtgttaggtagtcccttctccttgagcatcgatctagccatttccataactgtgtgattctttctctcggacactctattttgttgacgagactatgcgactggtagttgtcgctcaatgccttcatcctcacaaaatctttcatactcacg

SEQ ID NO: 15830 - DNA, 419 bp, Glycine max
  unsure (1)..(419): unsure at all n locations
ttgcttcttatgtgtgacataaaatagtcacgataagatttgattggttggcaatacacatttaattatattatttgtatttctctcattatttcacttctcatatatgatccacacaaacatataataaagatctaagacaagcttgaaagatgatctgttttaagaaatctggaaggtgattattaagaaggaaaaatattttattcagattaattttattgtcactgagaaagaaaaaagggttatgtgtgtaaaaagtcctacacgattaagatatcattattataatcataagtgagggtggtaagttttaaaaaataattatnttatgatgaattanatgatgatctatcattgacagagaacgtaaatttattttacacatatgtatgaacatcaaactcatanattacata

SEQ ID NO: 15831 - DNA, 328 bp, Glycine max
  unsure (1)..(328): unsure at all n locations
ctcaagcctgcattctatgcccagaaagtactcaagagtgctattttgcttaatataanaggnancatncaacttgttcacgatgaggttaatagcagtgttggaggaacccgtgatgattatatcatctacataaatgagattaagcaggcagcaaccatgttttgtgaatacgagaagagagggatcacacttggattgttgaaaaccaaaggagatgagagtatttgtcaaactctcataccaagcccttggggcttgttgtaaaccatatattgccttgtgaagtttgcatacaagagtggattcacccttgattaaagccttg

SEQ ID NO: 15832 - DNA, 342 bp, Glycine max
  unsure (1)..(342): unsure at all n locations
ccttgaatcttcttcatcaatgatgttctttgcttcttgaagatcaatgacaacagaatggagaaggaggaanggtgattgaagacgtcacttcaaagagaatatgagtcaagaagaaactcaccacaataggaagtcatggataagagctngaaggtangagaagatgagtgaagggagagggaaagaagagcacganatttatgcctcanatgaggtctaaactttgaagtataattctcaaatgatcaaagttgaaaaaaatgcacacacaagacctctatttatagcctaagtgttacacaaaattagaggaaaaattgaatttctattcaaatttca

SEQ ID NO: 15833 - DNA, 356 bp, Glycine max
  unsure (1)..(356): unsure at all n locations
cctcgaataaacatcgaaactcttagactttcatatggccataactntncacacggatgtctgattcgggcgcataatatgtcgagaggctcgaaattgaacaatggaagctcttgagaaattccaatagtcataagttttcacacggatgtccgaatcaggcttataatatatcgatacgagcgaaaataaacatcgaaaactctcgagatatcatatggccataacttttcacaccgatgtccgattcgggcgcataatatgtcgagaggctcataattgaacaacagaagctcttgagaaattcaaatggtcataaactttcacacgggtgttagattaatgcgcatcacata

SEQ ID NO: 15834 - DNA, 381 bp, Glycine max
agcttttcgtctcggatttttccgactatgctcttgtgtggtggaacaagctacaaaaggagagagcaagaaatgaagagccaatggttgatacatggacggagatgaaaaagatcatgaggaagcggtatgttccggctagttactcaagggacttgaaattcaagctccaaaaactaacccaaggcaacaagggggttgaggagtatttcaaggaaatggatgtgctcatgattcaagcaaatattgaagaagatgaggaggtaactatggctcgatttcttaatggtttgactaatgatatccgtgatattgttgagctgcaggagtttgttgaaatggatgatttgcttcacaaagcaatccaagtggagcaacaat

SEQ ID NO: 15835 - DNA, 338 bp, Glycine max
  unsure (1)..(338): unsure at all n locations
tgaaattgaacaacggaagctctcgagaaaatcgagttgtcttttatattttcacacagatgtccgattcggggaaataatatatcgagacgcacgatattgaacaacggaagctctcgagaaaattgaatggtcataacatttcactcggatgttcgatccggggacataatttatcgagacgctcgaaattgaacaaccgaagctctcgacaaattagaatggtcgtaacttttcacgcgaatgttcgattcggggacataactcatctagacgctcgaaattgaacaacggaagctctcgagaaattcgaatggtcataagttntcacacggatg

SEQ ID NO: 15836 - DNA, 387 bp, Glycine max
  unsure (1)..(387): unsure at all n locations
agcttcttgttatattatgtggcagaatcggacttctgtttgaaaagttatgaccatttgaatttctcgagagctntggttgttcaatttcgagtgtctcgatatattatgcacctgaatcggacttccgtgtgacaagttatgaccatttgaatttcacgagagcattcgttgttcaatttcgagcatctcgatatattatgcgcctgaatcggacttccgtgtgacaagttatgaccatttgagtttctcaagtgcttccgttgttcaatttcaagcttctcgatatattatgcgcctgaatcggacttccgtgtgacaagttatgaccatttgaatttctcgacagcatacgttgttcaatttcgagcgtctcgatatattatg

SEQ ID NO: 15837 - DNA, 258 bp, Glycine max
tctcgatatattatgcgcctgaatcagacttccgttacaaatgttatgaccatatgaatttctcgagagccttcgttgttcaattacgagcgtcttgatatagtatgcgccttaatcggacttccgtgtgataagttatgaccatttgaatttgtcgagagcttccgattttcaatttatagcttctcgatatattatgaacctgaatcggactttcgtgtgacaagttatgacctattggatacctacatagcattc

SEQ ID NO: 15838 - DNA, 364 bp, Glycine max
agcttatgctgcatacatctacaacagacctcctcaacctcagcagcaaaatcaaccacagcagaacaattatgacctctccagctacagatacaatcccggatggaggaatcaccctaatctcagatggtctagccctcaacaacaacaacagcagcctgctcctttctttcaaaatgatgctggcctaagcaagccatacattcctccaccaatccaacatcagcaacatccccagaaacaacagacagttgatgctcctgcgcaaccttgcctcgaagaactcgtgaggcaaatgactatgcacaacatgtatgttcgaacaagagaacagatgctccattcatagcttatctcgccagat

SEQ ID NO: 15839 - DNA, 396 bp, Glycine max
  unsure (1)..(396): unsure at all n locations
tatgataggatgagatagaattntatttctaatgttcttcattaagtgttccttcctcaacagctaatttcaatcattatgcatngtattaattcagtccaatctaatctattgtggaatggtcatagggttgcccctttcttacctcaatgtggcttgagacaaggagatcccatgtctccgtatattgttgcgacgtgtatggataagtcatctcatctaatcctttaagctcttcatgcaggtcaatggaagcctatgagagctggtcgaaatggaccattcatctcacacttaatgtttgtggatgatcctttactctctggaaaagcatcaataagtcaaattaaatgtattcaacatggcttgacgactctctgtgatatgtcatgacaa

SEQ ID NO: 15840 - DNA, 423 bp, Glycine max
  unsure (1)..(423): unsure at all n locations
tattaaattaagtntattntaatttattataataaatgttatgatcaaatttatgatataagttctaataagatatgataacttattaaataagcaattgattagttaatctaacaacatctatgtattctcatgaattattatctatctaaaaacattntatttattattcaaaacattactttcacaaaaatcaatgtttgaacagaagtttataaacacagaanattataaattaaattgaaatgcattgaaaatataatgattttttataccattatttaatcatgtatatgataaatttgtttatttttataataaatattttaagtcatttataagatgaattttatttgattcatatagcgtanaaattaaattntcattanatatttaaaaactcacttcttaatagatatctag

SEQ ID NO: 15841 - DNA, 288 bp, Glycine max
agcttgttagaaaatctaatggtcattacttgtaactcggaggtccgattgaagcgcatcacatatagagacgctcgatattgaacaaccgaagctcttgagatattcaaatggtcatcacttttacctcggaggtactattcatgcgcatcacatatagagacgctcaaaatcatacagcggaagctctcgagatattcaaatggacataaattgtaactcggaggtacgattcatgcgcatcacatatagagacgctctgtattgaacagcggatgctctcgagat

SEQ ID NO: 15842 - DNA, 261 bp, Glycine max
gtgatcaccttggcaatctgatgctcacaatcatccatatctatcactccatcaagtggtctacccagatattagccgatcacatcatgggagaatatatcacacttgcctctgacaagacactctcgatcatcatcactctttctgtctgatatgtcagagggaatgctgacaatgaataccctgactaggccttcgtaacagtcttccagcttggtgactgtcttcagtagaccagcagacttgttgatgtccatgatc

SEQ ID NO: 15843 - DNA, 382 bp, Glycine max
agcttcaacgttcattttcgagcgtctcgataagttacgggactcaatcagacatccgagataaaagttattgtcgtttgaattagctcagaagttcaacattcaatttcgagcgtctcgatatgttacgggactcaatcagacatccgagtaaaaagtcattgtcgtttgtattggctcagagcttcaacattcaatctcgagcgtctcgatatattacgagcctcaatcagacatccgagtaaaaatttatggtcgtttgtattggctccgagcttcaacgttcattttcgagcgtctcgatatgttacgggactcaatcagacatccgagaaaaatgttattggtcgttgcattggctcagatgttctacactcaattt

SEQ ID NO: 15844 - DNA, 440 bp, Glycine max
  unsure (1)..(440): unsure at all n locations
agcttacttgtatgtcttgaacaacaataatgaagttntgccatacatagttaagcatgaagctttagtcaaacagaataatccgaaaatgtcaaagaattgggtgttgaaaaagcataacaagactttctgtgattggtttaaagatacaatctttgcagatgagaatgcttcagaaacattaagaaagctagcagatgggcctaaaagaaatgttataacctggcaaggatatgacaaaagtacaatgtataacagtggggtcaccctaagggctgaatcttaacactttgcaaggtactaggggcattgcacaggccgaaaggcatcctcctatangcaaaagtgccgaaggggcaggtgaatgtggtcttttcctgatcctcangagcaatagtaatatgcatataaccagaaaaaccatcaaggaaacagtagtg

SEQ ID NO: 15845 - DNA, 210 bp, Glycine max
  unsure (1)..(210): unsure at all n locations
atctcgacatattgtgtgcccgaatctgaccatcgtgtgagaagttatgaccattngaatttctcgagagcttctaatgtttagtttcgagcgactcgatatattataagcatgaatcggaccttagtgtaaaaagttatgaccattagaattctcaagagcttccgttgntnnaatttgagcgcctcgatatattataagcctgaatcg

SEQ ID NO: 15846 - DNA, 423 bp, Glycine max
  unsure (1)..(423): unsure at all n locations
ttctctacaattgcatcacctctcaattatctagtgaagaagaatgtggcatttaactggggtgaaaaacaagagcaagcctttgctttgcttaaagaagagcttactaaggcacctgttctagctcttcctaacttttctaaaacttttgagctaaaatgtgatgcctctggagtgggagttggagctgttttgttgcaaggtgggcaccctattgcttattttagtgaanaacttcatggtgcgacccttaactaccccacctatgataaagagctttatgccttaataagagcactccgaacttgggaacattaccttgtttccaaggaatttgtcattcatagtgatcaacaatcacttaagttcattagagggcaaagcatgttanacaaaaggcatgcaaaatgggtagagtaccta

SEQ ID NO: 15847 - DNA, 432 bp, Glycine max
agcttattgtatcattcaccctttgatatatgatctctaagataaagatatcttatctctacatgtttggttctagtatgcatgacaagatttatagacagattaatagcaattgtgttgtcacatttcaagggaatgcgatcaatgattactctagagtctccaagttattgtgtcatctagagactttgagcgcaatgactttcagctgcaaaatattctgcttccgcggtgaatagtgctacacaagcttgtttcttgtcattccaagatacaagagagctttctaatagatggcatgtcccacttgtgctttgtctatctagttatgatccttctaatagatgttaagcgaaattgcttaagattatcttgatacctagtcacatgaaacactaagcatttatatggttgattgcagtaagtaaaaat

SEQ ID NO: 15848 - DNA, 331 bp, Glycine max
  unsure (1)..(331): unsure at all n locations
agcttgatgaggttgatgttaatcttgtgacggataatatggcagtcaattttgatgttnttagttcgtttctggaacacaagattggaagctatttgtatggtggactaattatcacaataaagaatggctggttgaaggaatgaaactctaaaatcttggagaagataagtgagccactgaagctcgcatgttgtggatgctaaagcacgacattcagcttcggaaaaactgcgagagactgtggattgtttctttgatttccaggagatgtgggaggtactgagataaacagtaaacctagtgatggagtgtctggaatcccgacacc

SEQ ID NO: 15849 - DNA, 462 bp, Glycine max
  unsure (1)..(462): unsure at all n locations
tcaaagttggccaatagtacctgactcttagaactcttatggccattggtctctccctagaatgcataccacanacaccttcatgtagttctcgaagaacatagtaagcctggtcttggtcaagacattntgagtagaggtgaggagaaacctctcctatatagtttgtcagtcactaaggtataccagacatcttgcattcttagttgtctggcttttcccttgtctattgtgagtgtctcatgttttaagtactcgactatctcttttttccatctcgaagggccttcctccacctgtaagcattcttttcccgagatgttgggttcgggaaccaaatggagtgtgaatgttnttagttaccaaggtttaggtcaagttgcaagttaagccaactcgtcggctttgtcattaacttcttagcttatatgaatcacctaaacttcctcanactcttccttg

SEQ ID NO: 15850 - DNA, 485 bp, Glycine max
  unsure (1)..(485): unsure at all n locations
gagatccatagatctaatccaaggtagatgtttcataaatgggatntcgttgcttgtgttgtttgattccagtgccacctattcctttatatcctgtttgtaagtagaaaaacttaagctnttctgtgtcttctttaaataaagatctagtggtggagacccctactagtggttntgtgttaacttcttatgtgtgtttgaattgtcctgtggagatttctagtagaacattcttgattgatttgatttgtttgcctttgagccagattgatgttattcttggtatggaactggtatcttccaaccatgtcttgttaaactgttttgataaaagtgtggtgtttgatgattctgtagtgagtaaagatatgatgtttatctctgccaacaaagttatgacatctntaaaggaagatgctcaagtgtacatgattctgtctaacctggatatagagaacaaggtttctatgtgtgaacttcctatt

SEQ ID NO: 15851 - DNA, 415 bp, Glycine max
  unsure (1)..(415): unsure at all n locations
agcttccatcattntatatgaaggagtcgtacctatttgtctaactccaagaattatacctttgttgttgtctccataagtcacatgtccactattctttggagaaatatgagtaaagtttggcgcatctcccgtcatgtgtttggagtagccgctatcaatgtaccaacttttgttcaatgaatccttcatgcatataaccatatttttgatttaggtaccccaattttcttgggtccttgaatgatagttttgactagagatccttttggaacccataccatttttccaaagctactactgattttcctaaaataacatgttgatgcattatgtgcattcttaccacaataaaagcatgtcatgataggagaactagtcttttgagtagatgacaagaaaattttatacatct

SEQ ID NO: 15852 - DNA, 477 bp, Glycine max
  unsure (1)..(477): unsure at all n locations
agcttgcttaaagacgtctttgatcaattaattatgttaaaatctagtgaaatactaactaaaaaaaagaaacttataaaatttaatatgagtaatgtacaaatccaaaaataattgataaacaaaatcatattgaattcaagtagttaaaatacaaagaatataaaaaaaatgaacaaaagagagcataatattaaaaaatacatacaaagacaaggaatgactttaatcaggatgggtaagactatttggtgtagatacaaaacttagagaaagaaaatgaattaagaaagtcagaatgcanagggacgtgtgcagaggtgaaatacttataggttacaatacaacttaaaagtacttttattntctatgtattattttataagaatctgaagaattctanaagttttctatttaataatgatacttattattattattaataatacttanatagaccagtttgtcaagttaaca

SEQ ID NO: 15853 - DNA, 377 bp, Glycine max
  unsure (1)..(377): unsure at all n locations
agcttgganaacactgtgctcctcccaattcgtcaagcaactcatcaattgtcagtatgggaaagcagtccttgacggtgagggaattcaatgccctgtaatcgacgcagaagcgccaggttccatcatgcttcctgacgaggaggaccggagaagaaaagggactgttactaagttgtatcagtcctttctgaagcatggactcgacctgcaactcaatctcctgcttttggaagtgcggataccggtaaggtcggacatttactgngttagactgaggtagaagatgaatatggtggtctgtggtgcactctgaggtaatgtttgtggtggttggaataggacattatatttggtgagcaaggcctgaatgggtg

SEQ ID NO: 15854 - DNA, 459 bp, Glycine max
  unsure (1)..(459): unsure at all n locations
agcttcttggcaatcctcattccagcgatctgtttggttnttgcgtaagagcttgaacaacggctcacaaatggtggtgagctgcgatatgaatctggcaatataattcaagcgtcccaggaaacctcggacttgcctctctgtacggagttctggcatctcaaggatagccttcaccttttcggggtctacctctatccctttctggcttacaatgaaaccgattaatttccctgatttgaccccaaaggtacacttagcggngttcaaccttaattgatatttcttaagcctttcgaacaacttccgcaggttgacaaggtgttcttcctcggatttagatttagcaattatgtcgtccacgtagacctcgatctcttgatgcatcatatcatggaacaaagctaccatggcctgttgataagnntgccccgcattcttgagtccaaaggacatcac

SEQ ID NO: 15855 - DNA, 438 bp, Glycine max
  unsure (1)..(438): unsure at all n locations
ntaatgaacttcaactttggcttgagggtatatcctccccaaccactatggtgatatttgctccacttaagagccaccatantttggaatcccttgtcctgcatccaccaatccatgattntgaaaggcttangtccccagtcaatgattntggatctcaaaagaatagggcagtggtctgaanaattcctatccaacacaaactgggtggtatcaggccattgaaccagcccaatttcagataagaaaaacctgtccagcttactcatggcacttccattaggtctgaaccaagtgaacattctgccaatagatctaacctcctctaaggccataagtgaaatccaagagttgaattcagcaatgctagaggagttgaccacattctgagatgaactcactctctcattntgatgtcagtggagaaaggtgatgaca

SEQ ID NO: 15856 - DNA, 405 bp, Glycine max
  unsure (1)..(405): unsure at all n locations
agcttcgattntattatttcgagcttcacgatatattacgcgactcaatcggacttccgagtgaaaagttattttcgttagaatttgctacgatcttcgantttaaatatcgagcgtctcgatatattacgggactcaatcggacttccgagtgaaatgttattgtcgttcaaatttgctacgagcttcggttttaaatttctagcgtctggatatattacgggactcaatcggacttccgagtgaaatgttattgtcgttcgaattggctatgagcttcaattttatatgtctagcgtctagatatattacgggactcaatcggacttccgagtgatatgttattgtcgctcgatttgctacgagactcggtcttaatntctatcgtctgatatttacggactc

SEQ ID NO: 15857 - DNA, 423 bp, Glycine max
  unsure (1)..(423): unsure at all n locations
tgtagcanattcgaacgacaataacatttcactcggaagtccgattgtgttccgtaatatatcgacacgctcaaaatttagaaccgaaggtcgcagcanattctaacgacaataacatttcactcggatctccgattgagtcccgtaatatatcgagacgctcgaaatttaaaaccgaagctcgcagcaaatgctaacgacaataacatttcactcggaagtccgattgagtcccgtaatatatcgagacgctcaaaatttagaaccgaagctcgcagcaaatgctaacgacaataacatttcactcggaagtccgattgagtgccgtaatatatcgagacgctcgaaatttaaaaccgatgctcgcagcaaattcgaacgacaataacatttcactcggaagtctattgagtcgcgaatata

SEQ ID NO: 15858 - DNA, 237 bp, Glycine max
agcttaaacattcaatttcgagcgtctcgatatattacgggactcaatcagacatccgagttaaaagttattgtcagttgaatttgctcatagcttcaacatttaatttcgagcgtctcgatatattacgagactatatcagacatctgagtaaatagttattgacgtctgaattcgctcataggttcaacattcactttcgagcgtgtcgatatattacgggcctcaatcacacat

SEQ ID NO: 15859 - DNA, 438 bp, Glycine max
actcagctatgttgcaacattataatagatctcctcagcagcataaccaacaactatctgaattattatgatctttacagcaacagatacaatccaggttggaggaatcatccaaatttgagatgggcaagcctccacacaacacagcctgctctgctttccagaatgctgctggtccaagctagccatatgttcctactccaatacagtcggagtcacaacaaatactacaagcaactgacgctcttcctcaaccttccttaaaagagttagtgaggcatatgaccatccagaatatgcaattacagtaagagacaagagcctttattcagagtttgacaaatcagatggggcatatggctactcaattgatccaagctcagtcccaatatcttacaaatattcttgacaactgtgcagaatctgaaaatgtgagtg

SEQ ID NO: 15860 - DNA, 460 bp, Glycine max
agcttgtaacatatattattcaatacaaggtcctctcaaggatttagtcaaaacatatgcaagttgattgtttgaactaacaaactcggtagaaatctaattggacagtagctttccctcataaaatgacaatcaatttttatgagcttagttctatcatgaaacacttgattataagcaatatgaaagtttgtctggctatcacaatacaatttcattggctaaattgcatagaattgtagttcttgaaggagatgtttgatccacaccgactcacatgtggttgtggccatggtcctatattcagctcttgcactacattgagcaacattaaactgtttcttactcttcctagagataagatctccaccaatggagacactatcttgtgttaaagagtctatctatatgagaacctgtgcaatctatatcacaatacccaaagaattgtgcatctcat

SEQ ID NO: 15861 - DNA, 447 bp, Glycine max
  unsure (1)..(447): unsure at all n locations
tgatggtgttgagaagaaatcacatgtttgtcatcatcaaanagggggagaatgtgaatgtatgtatacatgattntgataatgtcaaaagaagaatcaaacaaggctcattntgcttcaagattaatacaagattgtttcaacaaacaaagccttaattcaagatttcttcaagatcaagccttgcctcacaatgaaaggtttcaagtcattcaaggcacatgtaattgattaccaatacatgtaatcgattaccaatggtttgaaagtgtgtaatcgattacacatcatatgtaatcgattaccagagactttgaatgttgggaaattcaaatttaaatgaagggtcacaactgttcaagaaaaacaactgtgtaattgattacactaattctgtaatcgataccagagaggaatttaaggaatatcgcaacagcacatcttata

SEQ ID NO: 15862 - DNA, 299 bp, Glycine max
  unsure (1)..(299): unsure at all n locations
atcctatctccgatagccaatgggtaagttccgtgcatttagttctaaagaaaaccggtctcaccgtgatcaaaaatgagaaggaggagttgattcctactcgggtgcagaacagttggagggtctgcatcgactataagacgctgaaccatgttaccaaataggaccattttgcactgccattcattgaccagatgcttgaacgcctggcaagattctacaggcgctctattagagaatttagcacggcacctgattggaccgccccatttgagctaatgtgcgatgcatncaattac

SEQ ID NO: 15863 - DNA, 406 bp, Glycine max
  unsure (1)..(406): unsure at all n locations
agctntcgagcaattcttatggtcataactcttcactcggaggttcgattaaagcgcataatatatcgaggtgctcgaaattgagaaccggaagctctcgagaaattcaaatggtcataacttttaactcggaggtccgattcaggtgcataatatatcgagacgctcgaaattcaacaatggaagctctggagcaaatcaaatggtcataacttttcactaggaggttcgactcatgcgcataatatatcgaggcgctcgaaattgacaaccggaagctctcgagagattcacatggtcataactattcactcagaggttcaggtcctgtgcataatatattgagacgctcgatattgaacaacagatgctctcgagatattaaatgagcataactcttcactta

SEQ ID NO: 15864 - DNA, 433 bp, Glycine max
  unsure (1)..(433): unsure at all n locations
tccattgttgaatctcgagcgtctcgatatatcatgcgctntaatcggtctctccgagttaanagttatgaccatntgaatttctcgaaagcttccgttgatgaatttcaagcgtctcgatatattatgcgcctgaatcggatctccgagtgagaagttatgaccatttaaatttctagagtccttccgttggtcaatttcgagcgtctcgatatattatgcgcctgaatcggacctccgagttaaaagttatgaccatctgaatttctagagaccttccgctgttcaatttagagcgtctcgatatattatgcgcctgaatcggacctccgagtgaagagttatgaccatctgaattgttccagagcttccattggtgaatctcgagcgtctcgatatattatgcgcctgaatcggacctccgagtgcaaag

SEQ ID NO: 15865 - DNA, 469 bp, Glycine max
  unsure (1)..(469): unsure at all n locations
agcttaatagtcttctagtaaagtattcactggtagcagtaaaattattaatcagctatatatcacgggtgatattaaataaactgcctaattatcaattatatcatgcattgggctgataagagctcgacgctattatctctatactcaatacatactatcaaggatactttatcagtggtcacaggaaatgtacgtggtaccatttcatcatactatntagcattaaaggtatgctctccctatatctatatctttatgcacactatacaagcttacaactagttggtttagaataatataataactgtgattatatatataatcaaactgtagcgtttacaataatatgatttaataagtagatattacataacgtagtaataattatagttgtttatctggactcgctgaatgttaagacaccaaatgtcaacttccacatgttcctattgtcagtacctacact

SEQ ID NO: 15866 - DNA, 420 bp, Glycine max
  unsure (1)..(420): unsure at all n locations
agcttcattcttagtatgaagtaagtagagatacatatatcgtgaataatcatctataaaggttatgaagtatttcggactatttgcatccatgtctggacaacatatgtctgtatgtatgatttctaataaattagaactcctctntgcaccctttttagacttgttagtttgcttacccttaatgcaatctacacaagtctcanaatcagcgaaatccaaagtactaagtactccttcatttactaatcgcttgattctttcaatagagatatgtcctaatctccggtgccacaacatagaggattcttcattcacaatacatcgttntaacccaacagaaacgtgcatagaagtagcgtcattttgcaattcaatcgaataaagaccatcaaccaattgaccacaaccaataatttc

SEQ ID NO: 15867 - DNA, 466 bp, Glycine max
  unsure (1)..(466): unsure at all n locations
tgggttggatgttgaattctggttgttcctggtgcggatatgattgtacagcgggtgaaccaggggctgaagtctcttttggtgaggtagccatggaaaagcagagcgtttggaatggtttagcaaatttctgagagctgttgggggatgctgaatacgagattatcacgaatatataagtttgaatgaagaatgtaaaaggccgtgtgaagcaacggtcgaatttgctttggttcagtagtgaacgtgctattaatgttaggtgattcgtttgggcacgtcagatatcagtagttgctacaattcctctagcagacaaatgcccagcttgcccctcagttattcaaactgttntgcatccaatgcctttgtaaaatatctgctatttgttcctcagtggtcacatgctccagtgtgataactctatcatcaacaagctctcttgatatagtgatgtctgatgtca

SEQ ID NO: 15868 - DNA, 419 bp, Glycine max
  unsure (1)..(419): unsure at all n locations
agcttggatttccttttagtagggaatctatccttcctaagatggagccaaacccagtcaccctcattaagaactagctcttttcttcctctattgcctttagttgaatacacctttgtttggttctctatttggttcttaaccctctcatgcaacttctttacaaattctgacctagattccccttctttatgtataaaagaagtgtccagtgggaggggaatgaggtctaatggtgttaggggattgaacccatagacaacctcaaaaaggggactgcttggtggttctatgaaccccccctgttgatgcaaatctatatgangaagatactatcctaagacttatggttgctttcagacgacccttanagggtggataaaacctattactacctttgttgcccatcagttatggat

SEQ ID NO: 15869 - DNA, 458 bp, Glycine max
  unsure (1)..(458): unsure at all n locations
ctgtanggctaaagtctcacgaatgtcacgtgttgatgcaataattgttattcgtggctatacaagacatcttgccagacaaagtcaggttagccataactcgcctgtgctttgtcttccatgccatatgtagcanagtcgttgatcctatcatgtttgatgagctggaaaatgaggctgcaattatactgtgccagttggagatgtattttccccctaccttctttgacatcatgattcacttgattatgcatctcgtcagagaaatcaaatgttatggtcctgtttatttgcagtggatgtccccagttgagcgatacatgaagattttaaaatgatatgaatatctatatatccagaacatctattgttgagaggacattgcagaagngccattgaattctgtcagaatacatcgagaagctaaacctgttggccttctaagtctcagcatgatg

SEQ ID NO: 15870 - DNA, 376 bp, Glycine max
  unsure (1)..(376): unsure at all n locations
tagcttgtaagatctgcaagatcatcttccttgacaactccttgaaaattattgccatcaatacgcagagatgacaatttagagagtgatccaatactttcaaatggatttccactgaatttattaatagacagatagagatatcttaatgatgaaagctttccaaatgatcttggaagagcaccaccaattaagttgttggaaaaatctagcatgtctatatttttaaaagccccaatttgatctgtcagattgcctganagttgtgaactctgatctgcaagtgttgtgagtccatgggatatacaatgagcaagaatttctgaaagtcattaacctggtggctgagtctgagatatgataaacctatctccct

SEQ ID NO: 15871 - DNA, 409 bp, Glycine max
  unsure (1)..(409): unsure at all n locations
agcttgagagatntatgtaattttataaaatttccaggataattagtgtaatttattttatactttntgaacagcaaccaatataagtacatttttttatttttaatcattatctaaacatggtatttttttttaaagatgaatgtgataatttgttaataatatatgtattatataagaaacattaaatatgcttgattaaacatttcaaattaattttaaattacacattaaatgtttctaagtttaataaatgtgcattaataatataaacattaaaaattgattaatttatataaagaattttacttatatgaaacttttacatgtttctttaaagaggcatgtattgtttattcaatgaattttattccttccaacatanatctatctttttgttttaattacc

SEQ ID NO: 15872 - DNA, 375 bp, Glycine max
  unsure (1)..(375): unsure at all n locations
agcttgtatggttatatgtctacgatngtcacgtgctcatgcaacaattgttagccatggctatacgagacatcttgcccaacaaagtcaggttagcgataactcgcctgtactttntcttccatgctatatgtagcaaagtcattgatccagtcaagtttgatgagttggaaaatgatgccgcaattatactgtgccagttggagatgtattttccccctgctttctttaacatcattattcacttgattgtgcatctggtcagagaaatcaaatggtgtggtcctgtntatctacggtggatgtactcggttgagcgatacatgaagatcttaanagggtatacatagaatctatatcgtccagaagcatcta

SEQ ID NO: 15873 - DNA, 440 bp, Glycine max
  unsure (1)..(440): unsure at all n locations
agcttctggtgggacatcttgacttgctttccaatctgacattcaccacagattctgccttcttctattgtcagattgagaatgcctctaacagcacctttgtcaatgattttcttcatgcctcttaagtgcagatgtccaaatctttgatgccatattttgacttcatcttctttggaggatagacatgtggaggagtaactggtttcttgaggtgtccataggtaacagttgtcctttgatctgctgcccttcattagaacttcactcttctcatttgtcaccaagcattctgactttgtgaagtttacattgaatccttcatcacacaactgactgatgctgatcaagtttgcagtcagtcccttcaccagcagtactgtgttcagactatgaagtccatcattgactagctntcccattccagtgatctttcctta

SEQ ID NO: 15874 - DNA, 498 bp, Glycine max
  unsure (1)..(498): unsure at all n locations
nttcactcggagatctgattcaggcgcataatatatcgagacgcttgataatgaacaacggaagctctcgagaaattccaatggtcattacctttaactcggaggtctgatttaggcgcataatatatcaagacngctcgaaatgaacaacggaagctctctagaaattcaaatggtcataacttttcactccgaggttcgattcaagtgcatgatatatccagacgctcgaaattgaacaatagaagctctcgagaaattcaaatggccataacctttaactcggaggtccgatttaggcgcataatatatcgagacgctcgatatttaacaatggaagctcttgngcaattccaatggtcataactnttaactcggacgtccgattcgagtgcanaatatatcgagacgatcgaaattgaataatggaagctattgagcaattcatatgatcataactnttcacttggaggtccgatngaggcgcataatatatcg

SEQ ID NO: 15875 - DNA, 350 bp, Glycine max
  unsure (1)..(350): unsure at all n locations
ctctcttgctctacggaacatgagtaatacacaaacaaccaaatatcttatgaaatntcagagatggtttgtaaccatactaaacctcaaacggtgtttgatccttcaatgctctggtgggaagtctattctgataaataacaacagtacttgctgcctctgcccataatttctatggcaattcttctcatcaacatgcatcttgcatctccaaatatatctattatcctctactaacccatgttgtgtggggataaaactgtaagttatgttcatgcctatcctacaaattgataattatcaatgtgtctcgggccttgcaacctaaattgatctgaaccgttcatctc

SEQ ID NO: 15876 - DNA, 394 bp, Glycine max
agcttcctcagagccttattctatgatgacaaacatttggaaagttagtctacacgataatgcttactttatcacaaaaatgatatgctaatctttacgatataaaacgaactcatgcacacattaatgtagtacatttatgaacatgcgcatgtgtaaaatatcctactatatatgtcaacatacgaggacattcatcacattctagttaccacacatatatacatctgtgaaaagaatacacatttccatgctcaatgcattgagcaaaaattacacctattcacatactatatatattgctatcacaaactacctacacatatgtgaagatgtatcataaaatttctgtatgtactccatatattatatcacactgaaagtaatacgtatg

SEQ ID NO: 15877 - DNA, 417 bp, Glycine max
  unsure (1)..(417): unsure at all n locations
agcttctacattcaatttcgagcttttcgatatattacgggactcaatcggacatccgagtaaaaagttattgtagtttgaatntgctcaaggcttcagtattccatttcgagcgtctcgatatattacgggactcaatcggacatccgagtaaaaagttattgttgtttgaatntgctcagagcttctgtattccatttcgagcatctcgatatattacgggactcaatcagacatccgagtacaaagttattgtagtttgaatttgctcaaggcttcggtattccatttcgagcgtctcgatgaattacgggactcaatcagacatccgagtcaaaagttattggtcgttgaatttgctcagagcttctacattcaatctcgagcttgtcgatatattacgggactcaatcagac

SEQ ID NO: 15878 - DNA, 305 bp, Glycine max
  unsure (1)..(305): unsure at all n locations
actcggatgtcatattgagttccgtaatatatcgaaaagctcgaaattgaatgttgaagctctaagcaaattcaaacgacaaaanacttttactcggatgtctgattgagtcccgtaatatatcgaaaagctcgaatgtgaatgtagaagctctgagcatattcaaacgacaataactntttactcggatgtctgattgagtcccgtaatatatcgagatgctcgaaatggaataccgaagctctgacaaatncaaacaataataactttttactcggatgtccgattgagtcccgtaatatatc

SEQ ID NO: 15879 - DNA, 301 bp, Glycine max
aatgatagatctcatccagcgcaagttgttgcaacccacatacgcacactgctatataaacatgaaagctgcacgagttttctaccaagttcgggattgaagaatattttgtgagtcttggaacttgagtgttttgtgagccaccttgatgtcaccctaacatcaagtgttggacctgagtgtgtagagctgatctctattgttcagagagcaatctctggtgtgtctttgatttatttgtatacaccggagagtgattgagagggagtgagatggcgtctcatatctaagagtggctctt

SEQ ID NO: 15880 - DNA, 306 bp, Glycine max
  unsure (1)..(306): unsure at all n locations
actcgcatgtctggttgagtcccgtattatatcgagacgctcgaaattgaatgttgaagctntgagcaaattcaaacgacaataaccttttactcggatgtctgattgagtcccgtaatatatcgagacgctcgatattgaatgttgaagctgagagcaaattcanacgacaataacttcttactcggatgtgtgattgagacccgtcatatatcgagacgctcgaaattgaatggtgaagctctgagcagattcatacgacgataactttctactctgatgtctgattgagtgccgcaatatatc

SEQ ID NO: 15881 - DNA, 363 bp, Glycine max
  unsure (1)..(363): unsure at all n locations
agcttccatcatanggtaccctagaaatatangatntttcagctattgtattttaaggcacctagactagtttttgtattaagggtagttttgtaatttcacatgcactaagtgaatatttgatgtgtgtgttgggaaataaatttaattgaattggtagaacccccaatccaattaaattttagagggggaggtgaacattntcttactacaccccattgccacatcatatagtcacactttgtgcatgtccttcatgctttacatgtctcatgacacctaagcacaattagtggagaatcttggaattgatcttggattagtgggctgaaccataactganattcactaatcataattagt

SEQ ID NO: 15882 - DNA, 382 bp, Glycine max
  unsure (1)..(382): unsure at all n locations
acaatgatcacaaaattcaagtntatctagtttatcaccacctaacagaatttgtttctcaagttcatgtaatcctctntcactaacatgacctaatctcanatgccaaagttttgttttatcaatcaatgtattactagctatcaatgcatgtccaacaatggtggaaccttcaagaataaacaagccattacttttattcttggtacccttagctatgattaaagatccatttgaaatcttaagaacaccatttaaaattctagttgaatatcatggatcatcaaacantgttatggaaataagatttcttttgagttctggaatggtaccttacattttcagtagatactctctattatcaaacatctttaatctcaca

SEQ ID NO: 15883 - DNA, 439 bp, Glycine max
  unsure (1)..(439): unsure at all n locations
ttattgtagttgctntagaacttgctcttttaggcttcaattntcttagattaataatatataaacattcttatatactattttgttggtccttattataaggtccaattaactaattatcaaaattaagaaaattggtgaatttagttgagggcattaaagacattnttgtgaaaaaaataatacaaaggacattntangttgaaccttataataaggatcaagtgacacttgtaatgtggatattataataagcattagatggagtaccatattaacacccataanttttctttcactctttttctatcatgtaatatcaattaaccatacttgatntctttctcttctctctttatgtgtcaattagtggtcaatgaatgtntntntcatttcttaactcanattgaaaatagaaatatttatttttaacaactaa

SEQ ID NO: 15884 - DNA, 334 bp, Glycine max
agcttcaacatcagactcacttcaggtgctggaattacttcacatggacttgatggggcctatgcaagttgaaagccttagaggaaagaggtatgcctatgtttgtgtggatgattactccagatttacctgggtcaactttatcagagaaaaatcagacacctttgaagtattcaaggagttgagtctaagacttcaaagagaaaaagactgtgtcatcaagagaatcaggagtgaccatggcagagagtttgaaaacagcaggttcactgaattctgcacatctgaaggcatcactcatgagttctctgcagccattacaccacaacagaat

SEQ ID NO: 15885 - DNA, 409 bp, Glycine max
  unsure (1)..(409): unsure at all n locations
agctgtaagacatattgctgcatcgttatggatatgtcgcatgatcatcccatctgttgacgtgggtaccttggtgatcagatagcttctcctatctctgacggaacgactggaatctgtgattggatatcatagcctattgtgagtaattagctccaactcatgagatgatccctcagatctgggacatagcagacattctgatatgacacatgtcttacatctttcgaatacacgaagatcttacattttccttgtacaagaatcttagaattatcaccanatgagacattgtcacttactgattcatcaagatccacgaacatgcttctgttctacacatatggttgcttgcaccaatgtcaaaggatcatgtgttttcttggctaccttcattacctccacatgc

SEQ ID NO: 15886 - DNA, 399 bp, Glycine max
  unsure (1)..(399): unsure at all n locations
ttcttggtggtgaagctccttcttccttggcttattccctagtggatggtgcctcccctatcctcttctcctttgccttccgctgcatctccatgatgaanaatcaccattgaaggacctcattgaagatcaaagatccagcctccatagaagctccacaagcaagcttccatcaagttatgaccatttgaatttctcgagatcttccgtggttcaatttcnggcgtctccatatgtcatgtgcctgaatcggacctccgtaagaaaatntatgaccatttgaacttctctagagcttccgttggttaatttcgagcttctcgatatctgatgtgcctgaatcggacatccgagtgaannagtggacaatttaatttctcagagcttcgttgtcaattt

SEQ ID NO: 15887 - DNA, 332 bp, Glycine max
aacagagatatctattctatagatacatataattataacaatttccatggctctttatactgtttcagcactgctgcttgctaccacgtactgtgttttagctatggtaaccaagttaccccatacaagtgagcaataacctattatagaccttctgtgagtgatagaccctacccagtcaacattagcgtatgccttgatggttcatactgcggtatctttgtgttacgagaagacatatgcatatgcccttccttctcaagatccgatatactacctttaggtagtcttgatagggagaatgtgtgagatgacttactaaacttacccca

SEQ ID NO: 15888 - DNA, 314 bp, Glycine max
  unsure (1)..(314): unsure at all n locations
ccccaatgccacaagatataaaaaagatagttatttccaaaatgtcaagatggngtgagatnatgattgtgatgcaatcccaccccccaagggcactggatagaagactccaagaagattgagccagagatgcaagagaaggccctatgattctcatgagccttanggtagatttcgagcccatgggctaagtacaagcccacttatctgtgtacatattagattaatggttcattatttctgggngttgtatttatggctccataatgtangtagggtaccctagaaatgtaggatnnttcacccttgtattt

SEQ ID NO: 15889 - DNA, 343 bp, Glycine max
agctttatcttatattgtcagatgcagcattgaggatcagagatattaactatggtccagatgtgctcatggaagaaattgaaaaatacaagacgtatgccgagaggttggagccctttattgctgatactgtgcttgtcatgaatgatgccatataacaaaagaagaagatttttgttgaaggacgacaagctaccatgttggacattgattttcgaacttatccctttgttacttcttctagcccatcaacaggcaggatatgcactggtctaggtattgctccaaaggtagttggtgattaatatgagtggtacgtggatatttatctatttctttttta

SEQ ID NO: 15890 - DNA, 249 bp, Glycine max
  unsure (1)..(249): unsure at all n locations
tcttcttctattgtccatgtcttcttctggcttaattcatcagtgngctatccttctgtgtgcagcatcattgtgatgttcccagcctttgatgacagctatccaggttctgctatccagtgatgtgaggaatgccaccatccttgctctccagtattcatagttggttccatctaagattggtggtctgttcactggtcctacttctttctccatgttcatcagaatatatctccctagatctactct

SEQ ID NO: 15891 - DNA, 300 bp, Glycine max
  unsure (1)..(300): unsure at all n locations
agcttcgcacttgataacggagaacacatgagcagcgctaggcaatgacattcatggtgctcccgaaaaaggtggagtatggaggattgccttgagggtccgcacttangcaatcatgaaactcagctccaaactcgaaagtggaggacacgtgaacagccctaagcaataacattcatgtgactctagaaaaggatgagaatggangattgccttgagggtcctctcttangcnatcatggaacatagcttcaaactcgaaaatggaggacacacgaatgacaatgcaattcattcatg

SEQ ID NO: 15892 - DNA, 436 bp, Glycine max
  unsure (1)..(436): unsure at all n locations
tcttcttaatgaaaccgttaanaaggcactctntaacatcctttgaataagcttaatgttnntgtgagcaacaaaggctaaaatgattcttataacttcaagtctagcaacatgaacaaaggtttcagagaaatctataactttntgttgattatatcctcaagctactaacctagctntgttgcatactacttttccttgttcatccaacttgtttctgaagattcatcttgttccaatggtgctcttgttntctggcattggaacaaatgtccagacattcattttgttaaactgattcagtttttcttccattgtgattatttagtcattntctatcanagctntgtctatagttntaggttngattcanacacatgngtcttaatgatatctagtttaactccttcntctaatctcagatatatgatcttat

SEQ ID NO: 15893 - DNA, 449 bp, Glycine max
  unsure (1)..(449): unsure at all n locations
agcgatgctctagagatcctctacaggcatgctgcctgcgtccagccgcttgatatatttgatggactcatggtcactatgaatgacaaattccttgggataaaggtagtgttgccatgttttcaaagcccgtactaaggcatacaactccttatcataagttgaatagttaagggtaggaccacttaacttttcactaaaataagcagttggatggccttcttgcatcaacacagccccaatcccaacatttgaagcatcacactcaatttcaaaagaattttgaaagtntggcaacgcaagtataggggcattagttagctnttgcttaagaacattgaaagcttcttcttgtttctcttcccatttgaaaccagcatttttcttgagcacttcattgagaggtgctgccaatgtgctaaaatccttcacaaatcgtctataaaaac

SEQ ID NO: 15894 - DNA, 270 bp, Glycine max
  unsure (1)..(270): unsure at all n locations
tgtgcttggatcgttcatgatgagcangtntgaaccaatacttatagcanatntattatcacagaataacatcatagagggcacatcaacttcaaagtgaagaagtaacttgcttaaccaaacaatttcactagtaacagaagacaagacacgatattcagcttcagtggatgatttaaaatagtgggttgtntcttagaatgccaagaaagaagttggttcccanaaaacacaaaagtcagaagtggatcttttggtatcaacacaact

SEQ ID NO: 15895 - DNA, 293 bp, Glycine max
  unsure (1)..(293): unsure at all n locations
ttgcgccgctacgctctccgacttgtctccaggccgccctcagccggagccaagatcaaagagccagcgcgcaccgtggaggtcgcatgctttcttcggtattgcctgttcaccaccacagaccagttgatccttatggtgcagcgccggatcgccgatctgtggcgtcaggctgccgccgatgtccccgctaccgtcaattgngccgcaatgtacaaaacgctgctcggcgaactttgtgccttgagcgcgcaaagtgcggtgccagatgctgagttgcgtgcccgtcttga

SEQ ID NO: 15896 - DNA, 393 bp, Glycine max
  unsure (1)..(393): unsure at all n locations
agcttcanacttgcatcanaggagttgagcaggtaaaaaagattcgtcttcaaactcttagaggtgactttgagcgtttgtttatggaggagtccgagtcaatttctgattatttttctcgagtattggccgtagtcaatcaacttaaaagaaatggtgaagatgttgatgaggtgaaagtcatggaaaaaatacttcgaactttaaatccaagctttgacttcattgttaccaacattgaagaaaacaaggatttatagaccatgactattgagcaactcatgggttccttacaagcatacgaagaanaacaaaagagaanaattaaacanaaggaggctacngagcaactactacaactcaacgtaaaggaagcatactatgcaaattaca

SEQ ID NO: 15897 - DNA, 239 bp, Glycine max
  unsure (1)..(239): unsure at all n locations
cctcatcagcanaaccaacaactgcagaataattatgatctttcaagcaacanatacaatccaggttgaagaaatcatccaaatctgagatgggcaattcctccacaacaacagcagcctgtccctcctttccaaaatgttgttggtccaagcaagccatatgttcctcctccaatacagcagcagcaactgcagcagtcacaataaagacaacaagcaactgaggctcctcctcaatc

SEQ ID NO: 15898 - DNA, 437 bp, Glycine max
  unsure (1)..(437): unsure at all n locations
tctatacaagtngaggtttctctttacctgaatagtatagtgtacaatttgatgtctntgtgtgtagcataagccanaaggaatttgatggctccaagttcttctattggtgttaaagtttcttcatatcaattccttcttattgattatatccttgagccaccagtcttacgttgattctaactatctctcctttttcttgttcttganaacccatttggttccaattactaactaattcttaagagatggtacaagattccatactntgttctttgtgagccgactctattattcttccatagtagcaacccaagaatcttcactcaatgcttcatcaatgttctttggctcaattattgagaagagtgtcatcatncctttctctttgttcaaagaagctcttgtnttgactccagatgttatttctctaatga

SEQ ID NO: 15899 - DNA, 385 bp, Glycine max
  unsure (1)..(385): unsure at all n locations
agcttgtaacagttagatntagtataatttacgtttaatactatataatcttcttacttgactgtttgtacaagattacttttcttcccgtgatcaacatggatttcttttaggagatatatataaagttgatttatttgttaaaaaaatcctaaattcgattatgatattgatttgaaatatttttcattaaaaatgataattaatcttttttaccaataaaatttattttataccttctggttaaactatttgattaagatagatacattattaccacttatataaatcgtttttatcttaaaaatcatatatttttgtgagtaaatgtatttttaaagagtaaataataatatatgccaaaaatatataatactattctcta

SEQ ID NO: 15900 - DNA, 392 bp, Glycine max
  unsure (1)..(392): unsure at all n locations
agcttctacttgcttggaattttccagtctatctttcttattttttcgcctacattcttcttcaagaatagcttaagcaacatcattaaaggttagacaagtgacattattattatttgttatgttgataatgagtttatcatataaatctggtagactctaaagtagaagctctacccgtttgttttcttctatgttaaaatttgatgagggaaattgngaaaataaagtattcaggttttcatgtggtatgtcacccaagtggactcactcgttcgaagagtgcagagtttcctcttcaagaatattctagtctgaagtgacttgatctcatacaatttgtggaaagtatcccanatatccttcacgttntccattgttaagtgcaaatt

SEQ ID NO: 15901 - DNA, 401 bp, Glycine max
cttgcaagcttgtgttccttgttaattattggtattagttgttgtttatgtgaatattagttgttaaatttcaattgaattatgttatatgatacacacatgttaaagtagttgcattactattagactctcttatacattaattggtttatatgaactgggagaatgattatataattagaaaaacaattatagataaaattgtctaagtgagatttaaatctaacatgaaagatgaaattagaaagcttgaccattgtgtcaattaatgtcattggtatattgaaatatgacttataataaatgaatatatgctaataatcgaaatatgacttatacactgtgtgtttaaagtgttgttgtttatttttgcacttctgagatattattatgatctttat

SEQ ID NO: 15902 - DNA, 335 bp, Glycine max
  unsure (1)..(335): unsure at all n locations
gtattaattattattgttaaccttccagtatatatatttcgatatcatcattcatgttggtgtctttcctctgcgggcatggcgattttgtcctaatttcttttagaatgcatttagattcataattttacttgacgaaagcaatttattagataatttacatctctttaatctaanatcgattgtttgaatgttcttttataaagaatctaaattgttataattctacacaattaacaatatagaattttaatttccttctaacaagtgagaaattgacattctcttcttgatcaaagagccttaaaaaatatgtgcgtaatttctttaatacc

SEQ ID NO: 15903 - DNA, 417 bp, Glycine max
  unsure (1)..(417): unsure at all n locations
agcttcacatggagctacatcagaatggtcttaaagtgtgggaattgtggcagtgctaaggtaagtcccacttgagaggagaaggtagaaagattgcttgagaagaaaagctctcttaatatctccttttcgttggactagctcatctaggtccctatatggaaggagttcaaccttgtcccccacttccatattaagcccactaaggaacctagctatgcttgttttttccacctccctaagtccagctcttaaaaggagtagttccatttgttgtctatattctttgacactcatacttctttgtctaagcctttggagcttgtccataagctccctttcatagtangagggaatgtgcctcttcctaagggcattcttaagatcatttccatactttactggangatccccatg

SEQ ID NO: 15904 - DNA, 481 bp, Glycine max
  unsure (1)..(481): unsure at all n locations
ctataatactcagctttatcaagagttttactctctggtaatcgattaccagtggcaagttntgttttcaaaaagctntcaactgaatttacaatgttccaatcaatttcaaaatggtgtaatcaattacaatatattggtaatcgattaccagtgtgtttgaacgttgaaattcaaattcaaatgtgaagagtcacatcctttcacanaaatgctntgtgtaatcgattacaatgatttggtaatcaattaccagtgataaattttgaataaaaatcaaaagatgtaactcttccaatggttctcaagtttttctaaaggttataactcttctaatggttttcttgaccagatatgaagagtctataanagcaagaccttgacttgcatttaagaatcattctaacaattatacaatcctttatacctttgaactctttgacatcttcttttctcttctttgaaaagtttctaaagttat

SEQ ID NO: 15905 - DNA, 407 bp, Glycine max
  unsure (1)..(407): unsure at all n locations
ntcacaagttatctcataactcanagccttgtggcacaacacaatagctcttgcttcatgtgtttaccttcttgctgtgtctattccattgtggacaagtgcatcaagtgaagtatgtggatgcctcccgagttattcgccttctggtagccaaaggctctaatgaagtatgtngataccactgtcgtccaggaagaccttgttagaattaatgtctcatgtgagaggcatgtgactttatgtaggactaataaataaatcattaataattaacgactaaattgttattgtgtaaataggagaaacttctaaacgtaactgttacttgatggaagtagtgggtgtanaaggggttaatacccactaacttgaaacaaagtcccttctgacacaagtgtctctctatc

SEQ ID NO: 15906 - DNA, 372 bp, Glycine max
agcttttctcttgtggagacggcgacaaatatcggttgggacatggaaacaaggaaacgtaccttcaaccaacttgtgtctctgcacttatcgagtataatttccaccagatagcatgtggacacaccatgactgttgctctcactacatctggtcacattgttactatgggaagcaatgaatatggtcaactatgaaaccatctggctgatggaaaagtacctatcctagtacaagacaagttggtgggtgaatttgttgaggtaatatcatgtggatctcatcatgttgcttgcttgtcatcaagaagtgaattgtatacttgggggacaggtgccaatggaagattgggacatggagacatagaggata

SEQ ID NO: 15907 - DNA, 359 bp, Glycine max
  unsure (1)..(359): unsure at all n locations
agcttcccaagttnttaagttcttcctcaaaactgtcctaagcaaagttcccaaagtcctattaacaacttccgtttgcccatcgatttatgggtgacaagtggttgaaaataacaatttagtgcccaacttgctccacaaagtcctccaaaaatggcttaagaacttagagtccctatcactaacaatgctccttggcaaaccatggagtctcacaatctccttgaaaaacaaatcagccacatgggaagcatcatcaacttttttacatggaataaaatgagccattntagaaaacctatcaacaaccacaaaaatggaatctctaccattgctttgttttggcagccccaaaacaa

SEQ ID NO: 15908 - DNA, 398 bp, Glycine max
  unsure (1)..(398): unsure at all n locations
tattgctaaatgctaatcaatcagcaattctcacagaaatcatctgttcctgacaatgttagaaaccatcagaccatggccatatataactgtgcaagcatgatagaaaacaaattataaaactattagaaatgaatgaggaagtttgacaaaataataagacaaataccttttcattgtatatacgaagcctttctttgactactgctntagtatcatctgaccgagtaatgagctttgacatacagtgtgcaggaggaagaagtggagccatgaccattccaggacgcccattctcactcttgatgctaatggaggcaatattaaaaattccttcacattgattacaaattcttctaccaagggcatttgcaagcagtgcttcttcttggagcttc

SEQ ID NO: 15909 - DNA, 413 bp, Glycine max
agcttagactcagttcagcctaccatcctcagactgatggccaaactgaacggaccattcagtcgttggaggacattttaagagcatgtgtcttatagcagaagggaagctgggagggttttcttccattgaaagagttcacttataacaacagttttcattctaccattggcatggctccctatgaagctttgtatggtagaaggtgtataacacccctatgttggtagagcccggagaatgcctcaccttacgaccagaagtggtacaacataccactgagaaagttaagttaattcaggacaggatgagaactgctcagagtacgcagaccagttatcatgataagaggatgaaagatctggaattcgacgttggtgatcatgtattcttgagagtcactccatggaatg

SEQ ID NO: 15910 - DNA, 449 bp, Glycine max
  unsure (1)..(449): unsure at all n locations
gctattacgtgacactatgatactcagcttatagggagtgatgcctatgctagtgtgataactattattataagctaaatttataagggataaaaacttatcccaacttacaccttcatcaagaacacatactctaagcatgtcttcaaggttctagatgatcctctntgattgactatccatttgaggatgataagcagtgctaaaacttagcttatacccaaaagctcgctagaatgctttccaaaatctaagatacctatctaacactatagaggtaggtatgccatgaagcttaagtatctccttattgtaaatgtctgctaatttgtccaatttgtaggtctccttaattggtaagaagtgagcagacttggttagcctgtccacaaccacccatatgacctctagacccaaacgaagttttggaaaactgttacaaaatccct

SEQ ID NO: 15911 - DNA, 323 bp, Glycine max
  unsure (1)..(323): unsure at all n locations
gattcatgggttcgagctatgcatgatgaaattattgctttagaaaggaatcatacatgggtgcttactganttacctcagaataaaaatgtgattgtgtgcaaatgggtgtacaagatcaaacataatgtgaatggctctattgaacggtataaagctcgcttggttactaanggctatacacanattgaaggctangactatttagatactgtttctctagtagccaaaattactaaagttcggcttttgttggcactcgctgctttgataagtggttatcagacagcttatgtaataatgcaaactcatttgatcttatg

SEQ ID NO: 15912 - DNA, 375 bp, Glycine max
  unsure (1)..(375): unsure at all n locations
agctttgatgcaacatttggagaggttaatgaaacaacgagatgatgcgctccatgagaggttggatcaaatggagaatagagatcataatgaagaagaaaggagtagaagagggaatgatggtgttcctagacaaaactgaattgatgatattaaactcaacattcctccatttaaaggaaagaatgatccagaggcctacttggagtgggagatgaatatagagcatgttntctcatgcaacaactatgatgaggaacataaggtgaaactngccgtcacggagttttccgactatgttcttgtgtggtggaacaagctacaaaatgagagagcaagatatgaagagccaatggttgatacatggatggagat

SEQ ID NO: 15913 - DNA, 303 bp, Glycine max
  unsure (1)..(303): unsure at all n locations
tataatatattgatacgctaganattaaacatcggaagctctcgaganattcacatggtcatgacttttcagacggatgtccgattatggcgaatcacatatcgagacgcttcataattgaacaacagatactctggagaaattcaaatggtcataactgctcacaccgatgtccgattcaggcgaatcacatatctagacgctcaaaattgaacagaggatgctcttcgaaaattcaaatggacataacttttaactcggatgtccgatcacgcgcatcacatatagaagctcttgaaaagg

SEQ ID NO: 15914 - DNA, 298 bp, Glycine max
gatgcaacatccggagaggttaatgaaacaacgagatgatgcgctccatgagatgttggatcaaatggagaatagagatcatactgaagaagagaggatgagaacagggaatgatggtgttcctagacaaaaccgaattgatggtattaaactcaacattcctccatttaaaggaaagaatgatccggaggcctacttggagtgggagatgagaatacagcatgttttctcatgcaacaactatgaggaggaccagaaggtgaagcttgccgccacggagttttccgactatgctctt

SEQ ID NO: 15915 - DNA, 379 bp, Glycine max
  unsure (1)..(379): unsure at all n locations
attgaataaacacttaattnttgtctgattgcatcttatgttaatcaaaactatgtctacaaccatgtttctgggtttaatttcacgacaatgtggacccttcaaatgcagaggctatagtaaaaaaattccagatggatggacgttatcttagagatgtctggtaaattctctgattattcatctgtctgggttttggcacccttgctatttggtgtgttaagttcaagattggttgaaggatatttgataccctgctatcatgcgagtttgggacaccaatgatggaaggctgaaatttctttgagaaaacaaatcgttnttgtggacatttgtgtggatntcttatatgtttctcttaatattctctcttatcatg

SEQ ID NO: 15916 - DNA, 360 bp, Glycine max
cttgaaagactaccagaataacatatgctatctggaatcttccttgagaggttgttggtggagaggtccaacacagtgaggttactatgcttccctagctcctcaggaatctcacctgttaatccgttagaccatagctgaagaacctgatgcctatgcaaagatgcaacaccctttggaatcttcccagtgaacttgtttgagaaaaggtggagaatcttcagcctctggagcttaaccacacgctcggaaatctcacccgaaagagagttatcacttagatcaagagacatcatctttttgagctcgaagatagatcctggatttgaccacttatttgttttggagagaagagatctg

SEQ ID NO: 15917 - DNA, 354 bp, Glycine max
  unsure (1)..(354): unsure at all n locations
agcttgtgactcttggcaatatctttaacattagtcacttaaaaagttgtgacttttgaaaaaatcttcagaaaaaagtcacttgaagaattgcgactnttggaaaattatttttcgaaatcagtcactggtaatcgattaccattaatgtgtaatcgattacacatcaatagatgtgactcttcattttaaattttgaaaattaaaacatttagaagccttggtaatcaattacaagtattgtgtaattgattataccatgttaaaatgatttgaaaatgtttaaacacaagctgtaactcttgaaatttgaatcttaatgtttaaaacactggtnatcgattactaccttct

SEQ ID NO: 15918 - DNA, 372 bp, Glycine max
agcttgactatgaaagcagaacctgaaatttttgtaggttatagctcaacttcaaaggcctacagaatctacctaccacagagcaacaaagtaatcgtcagcagggatgtcaaatttctggagtcagatagttgggactggaaaaatgattagaggtctgagtttcaggaagagaatgaagatgttgatgaagaacctatcagaggaaccagatcactttcagacatctaccaaaggtgtaatgttgctgtgatggagcctgagggatatgaagaagctacagctgatcaaaaatggagaaatcaatgaaagaggagcttataatgattgaaaaaaataaaacatgggagctggtggacagacctaaccaca

SEQ ID NO: 15919 - DNA, 415 bp, Glycine max
  unsure (1)..(415): unsure at all n locations
attacggacctaatagactcagcttgctctcnacaacttggttagctagactagtttcttggtattgaagtcaagtattgtcctgatagatctattatgatgacacatatgaaatacattatggacttgttgcacaaaacaaanataaccgaggctcagcctatctcctctcctatggttcctcctgcaaactctctaagaatggcagtgatctctttcatgatcctaccttatttcattcagttgatgggcactccagaatgccccttgacccacccagagattagctactctgtccacaaggtctgccagtttatggctcaacctttagacactcattggactgctaggaaacatattctgcactatctagagggtactgggtcttatggtcttcacttaacacctgctgctc

SEQ ID NO: 15920 - DNA, 291 bp, Glycine max
  unsure (1)..(291): unsure at all n locations
agcttctattctctatacaagaatgaagctctgataccacttgttagacaagtggcctcagatatcttaagaagggggggttgagttaagatatcacaaactatttccncaattaaaattttatgtcactttctattcaagtgataaattcccttaacaatgaatttcttatatattgattcggatagagcaatttgaatatgattgtttaacaatcatcaataaaggagtttaatggaagagagaatgcatactcagaattatactggttcagtcacacccttgtgccta

SEQ ID NO: 15921 - DNA, 342 bp, Glycine max
  unsure (1)..(342): unsure at all n locations
agcttggaacatacaatctgaattntaggtcctcttaaggacttagtcaaaatatctgctggctgatcattagaaccaatgaactcagtgacaatctccttggacagaaacttctctcgaatgaaatgacaatcaatctctatgtgcttagtcctttcatgaaaaactgggtttgaggcaatatgaagagcagcctgattatcacaatacaacttcattggcagctcttcacaaaacctcaattcctgcagaaactgtttaatccacatgagctcacaagtaaccatagtcatagatcgatattcagcttctgcactggaccgagcgacaactgtctgtttc

SEQ ID NO: 15922 - DNA, 386 bp, Glycine max
  unsure (1)..(386): unsure at all n locations
agcttagcttaaaattaatttanaattcttacaagtattgcaaaaattatctacgaattatggattgaaatcttgtaaattaatgaatccacttttaccaaaatttattgcttcttttcttactctaaatgtttgcataaacttttataatatttacataacctttangtgatatattcaattattcattataattnttttatctagaggatntataacaacaactcatgtacctttatttaactaattgaactanatttcttgacatccattatacatttttataatataaaactaatagcagtaaaaatatattatcaactattcagtaacaattataaactgccttttnngttccctaattntgttttttttaaaaaaatctt

SEQ ID NO: 15923 - DNA, 362 bp, Glycine max
  unsure (1)..(362): unsure at all n locations
agcttgtatattaattggcatacgaattcatcttctactgaggtcgcgagtatccaaattcatctcctattgattntgagtataatcccagtacttaaatcttaataatatagtttaaaacataatattcatatttcatctctttaaagttagaagtaatatttaaaattaatagatagagcagttatgtatgtgtgtgtttggttcatgagattagtgtgttatttatccaacattntaatctcttcgatgtttctaaatcantaataattgtctcaactgcatggatgtacttaaaaacatatttgttatattataatatcaacaatattaacatatataattgagaattaaacaattta

SEQ ID NO: 15924 - DNA, 397 bp, Glycine max
  unsure (1)..(397): unsure at all n locations
agcttgtgacttgcataaactccttttcagtggatgacaatagaagctaaaagttaccaagcatacatcaaactgtttcaaaaagtccaactatcattttattcttaataaatgggagttaccagtataaaataaactatggctgcaaaattgtacttcaaaaaaatataaaatataacctgatcaaagacatcaatatagactttgtgcagagaatgagaactgcagaactgattaatctcatgatgaatcttgtcatatatccatgtcttatcataatgtacaccatagttgagcaatgtctcaaagacaaattccttatggagttgattcacaacctanaagaagaatatgcatcactgctatgaaaatattgaagatgtgaaaagaaaacact

SEQ ID NO: 15925 - DNA, 416 bp, Glycine max
  unsure (1)..(416): unsure at all n locations
agctntgatgcttgtgttgaatgcattaaaggtaaacagaccaaaagcaataaattaagtgcatatagggctactgacatcttggaattgatacatacggacatttgtggaccatttcatacacctttgtggaatggtcaacaatattttatatcattcatagaagattactccagatatgcatacttgtttcttatacagganaattcacaatctttggatgtgttcaaaacatttaaagttgaagttgaaaatcaactcaacaaaagaataaagtgtgtcagatctgaccgtggtggtgaatactatggcagatatgatggttcaagtgaacaacgtccggngccttntgccaggtacctagaggaatgtggaatcatcctacagtacaccatgtcggngtcacctagcatgaa

SEQ ID NO: 15926 - DNA, 395 bp, Glycine max
  unsure (1)..(395): unsure at all n locations
agctnttgctacattagcttctttgcaataaacgtgcattaaagtagtgaaggtagcaacagttggaatgatttgcatctcaagcatcaaatcaagaacccaaatagcattttcaatcttctttgaatttgcaagccctctaacaatagcgctcatagcaacattgtgggagctgataccaagtgttttcatttcatcttgcagtttcattgctccttttatgtttccaactctacacatgccattgattaaagtgatatattgtttatttgtaggaacagaaccactttccaacaagacttgcaaaacacgatgggccttatgaaaatcactagttctaatgagtccattaaaaaggcattgtatgtatctacattangaataaccataaactg

SEQ ID NO: 15927 - DNA, 348 bp, Glycine max
  unsure (1)..(348): unsure at all n locations
agctttgatggtggaggatagacgaacagcgctaggcaatcaaatcatgggtctccgaataagattttatgtttgaggatagatgaatagtgctaggcaatcaattcatgggactccgaataagatttgagggtggacgataaacgaacaacgctaggcaaccaattcgtggtgctccatactcaatggtggaggacgcatgaacaaaactagggaataaattgatgggtctccgaataagatntgagggtggaggatagacgaacaactctaggcaatcaatccatggggttctagactcgatggtggagaacgcatgaacagcgctaggcaatcaagtcatgggtc

SEQ ID NO: 15928 - DNA, 371 bp, Glycine max
agcttgaacattatctccttttgggttcgcaggttcttccatgcacggaatccagtgatcatctcgattacaatgcacccaagagaccatatatctaacgctggttcaatctgaccaacgatcgattctggcgacatgtaaaaaggtgtccctctaaacttgaccttcccatactcagcatttgcatcttctctagtcttggacaacccaaaatcagcaatcttcagttgataccttgcatgatcatcagatgaaggaaagagaaggatgttgtccggtttgagatcacaatggacgactccttttcgatgaatgcaagaaagccctttgagaagcatacgagtgtagactcttacttcactatccgatat

SEQ ID NO: 15929 - DNA, 456 bp, Glycine max
  unsure (1)..(456): unsure at all n locations
ngcaattaacatgaatggccttcctaatattacaggaatgtcagtatcttcacaaatatccattaccacatagtctatcgggaagataaaatgtttcactctaaccagcacatcttcaattactccatatggtctggtaatggagcggtcagcaagttgtaaagtcatcttagtgggcatgatctccaactctcccaaccttntgcacatggagagtggcattaaattaatactggctcccaggtcaataagagcctttcacacagtgacttctccaattgaacaaggaatagttacactcccagggtcttgatgcttgngtggaaggatcttttgaatcacaacactacaatttccttccactatgatattttcctggtgaatatacttatgtttccttgttaacatatccttcaagaacttggagtagagtggcatctgctgtaaagcttctcc

SEQ ID NO: 15930 - DNA, 435 bp, Glycine max
  unsure (1)..(435): unsure at all n locations
ntagagagctgcgcttcttcattgccttcaaatttctgtctgtatctgattcatcaccaggttttccaggagagaagactttgagaagcccttgaaccaggcttggtgcaaagtccttgtacctttgatgaagcaaagaacagatctttccaaaaagaagcaaatgatttaaggtaacatcatataaaatatagaaacagcttcaaatgtgtagaaaccagggggactgcaaagcccatacctgaactgcagcttgtatatcagaacttctaagcttggcatcacatatagcagccacagcttcactgacaaatntgcttaagttgacacttcgcaactcgtccatcagagcttcacgctgctcttcattaatctgcttcagtttcttaataacagcagtggtgcgcttaatgctagaatccaatgtcccttaaa

SEQ ID NO: 15931 - DNA, 279 bp, Glycine max
  unsure (1)..(279): unsure at all n locations
agcttcggttgttcaatttcgagcgtctcgatatattatgtgcctgaatcggacatccaagtgaaaagttatgatcatttgaatatctcaagagcttccattgttgaatttcgaacgtctcgatatattatgcgcctgaatcggacatccgagtgaaaagttatgaccatttgaattgctgaagatctttcattgttcaatttcgaacgtctcgaaatattatgcgcctgaatcggacatccgaagttaaagtatgaccatntgaattgtcgacagctt

SEQ ID NO: 15932 - DNA, 400 bp, Glycine max
  unsure (1)..(400): unsure at all n locations
ntcgagaaattcanatggtcataacttttcacacggaggtctgattcaggcacataatatattgagacgctcgaaattgaacaacggaagctctcgagaaattcgaaaggtcataacttttaactcggatgtctgattcaagcgcataatatatcgacacgttcgaaattgaacaatggaagctcttgagaaattcaaatggtcataacttttcactcggaggtcccattcaggtgcatcatatatcgagatgctcgaaaatgaacaatggatgctgtcgagaaattcaaatgatcataanctttcacttcgaggtccgattcaggctcatcatatatcgagacgctcgaaattgaacaccgaagggtgtcgagaaattcaaaaggtcataacttttaac

SEQ ID NO: 15933 - DNA, 341 bp, Glycine max
agcttctagtctcaattttgagcgtctcgatatattacccgattcaatcggacatccgagtaaaaagttattgtcttttgaatttcctacaagcttccgttttcaatttgcaacgtctcgaatatattacaggactcaacttgacatccgtgtataaagttattgtcaattcaattttctcagaacttcggatctaaattttgagcgtttcgatatattacaggactcaatcggacatccgagtgaaaagttattgacacttgaatttgatacgagcttccagtttcaatttggagcatctctcgataaattacgacactctgtcaggcatccgagtaaaa

SEQ ID NO: 15934 - DNA, 322 bp, Glycine max
  unsure (1)..(322): unsure at all n locations
agctntgatttcctttgttccggaaacctttcttttctcatgtgcacccaaacccaatctccgggttcgaagacaaccttctttctccctttgttggcttgtttagcatagcttttatttttcctctcaattttatctttgactctctcatgaagcgtcttcacatagtccgcctttgcttgaccttctttatgcttaaaaatagaaacattaggcataggcaaaagatcaagaggagttagtgggttataaccataaacaacttcanaaggagaacaattagtggtgctatgaacagctctattgtaagccaattcaacat

SEQ ID NO: 15935 - DNA, 331 bp, Glycine max
  unsure (1)..(331): unsure at all n locations
acttggaccccatttctaccaactacaaaccctaagaaaactatattatctacacaaaaggtacacttctctatatttgcatagagggtgtttttcctaactactgaaagaactagcttgagatgtcctaaatgatcatctaagctcctactgtatactaaaatatcatcaaaataaacaactaccaatctacctatgaaatcccttaagacattatgcataagcctcataaaagtgcttggtgcattagtgagcccanaaagcatcactagccattcatacaaaccaaacttggtcttgaaagcggatntccactcatcaccctttttca

SEQ ID NO: 15936 - DNA, 126 bp, Glycine max
  unsure (1)..(126): unsure at all n locations
ccacagattctgccttcttctattttcagagtggggatgcctctaacagcacctctgtcaatgattntcttcatgcctcttaagtgcagatgtccaaatctttgatgccatattctgacttcatct

SEQ ID NO: 15937 - DNA, 374 bp, Glycine max
  unsure (1)..(374): unsure at all n locations
tgatcatgtcatcaattcgaagatggttattcagcttcttttcaaactgngaaaaaaataaaacttatagctcagacagctgtataagaaagaagctatatcttgaagtcaacaactgttgatatttaactaaatacatacctgaataatttttactttgctcattgcaggctcaatgactccggcctccaagttgtttctgattatcccttgcgaaaggtccaaacccatactggggaaaaaagagaaaaataataacaatatttagcgagatggaaaagaatgccaaagcttatcaagcatcatttcatatgtattctccattggtacttttctctaatattcattaacatattcacatgttggaatgatac

SEQ ID NO: 15938 - DNA, 420 bp, Glycine max
  unsure (1)..(420): unsure at all n locations
tattatcatacaaaaacttttaacagttacaacttttaatatttgattttaaaatcttcaaaatagtttggcacagatagaataatcataatcagttaggatgctccatcacaattaanaaagaagacttaatggatggagcaacgtgaataacaacaaattataaattcaaagatgtgtttttttgtttcattaaattagttacaatagtacacttaaaaaaaaagttacaatagtgactaaataccgccaaatttaaggatcaaaatgttagcttactcattttcttgataaaaatcgttgacttttaaattgaataaaatattaaattaatggaagaatntgttaaatntgtttgaatttggattatctttacaatagtgattaatataaaatcaagattttataacaatgttttac

SEQ ID NO: 15939 - DNA, 452 bp, Glycine max
  unsure (1)..(452): unsure at all n locations
tcttacatagtccgctnttgctggacctttatgcttaaaaatagaaacattatgcatagacaaaagatcaagatgagttagtaggttaaaaccataaacaacttcaaaaggagaacaattagtagtgctatgaacaactctattgtaagcaaactcaacatgtggtaaacaagcttcccaagtctttaagttcttcctcaaaactgtcctaagcaaagttcccaatgtcctattaacaacttctgtttgcctatcagtttgtgggtgacaagtggttgaaaataacaatttagtgcccaacttgccccacaaagtcctgcaaaaatggcttaagaacttagagtccctatcactaacaatgctccttggcaaaccatggagtctcacaatctccntgaaaaacaaatcagccacatgggaagcatcatcaactnttntacatggaataaaat

SEQ ID NO: 15940 - DNA, 259 bp, Glycine max
  unsure (1)..(259): unsure at all n locations
tgaatagttcgttcaatctgaccatctgtntgaggatgataagctgaactaagcttcagctttgttcccaaagcttcatgtagacttgtccaaaatcgcgaagtgaaccttggatccctgtcagatacaatactagaaggaatttcatgcaaccttactactttcttgatatacaactccacgtagctttccattctatacctcatattcactgcgataaaatgagcagatttggtgagtcgatctactatgacccaca

SEQ ID NO: 15941 - DNA, 411 bp, Glycine max
  unsure (1)..(411): unsure at all n locations
taacatcagaccacttccagggtgctagaactacttcacatggactngatggggcctatgcaagttgaaagccttggaggaaaaaggtatgcctatgttgttgtggatgatntctccagatttacctgcgtcaactttatcagagaaaaatcagacacctttgaagtattcaaggagttgagtctaagacttcaaagagaaaaagactgtgtcatcaagagaatcaggagtgaccatggcagagagtntgaaaacagcaggttcactgaattctgcacatctgaaggcatcactcatgagttctctgcagccattacaccacaacaaaatggtatagttgaaaggaaaaacaggactttgcaagaagctgctaaggtcatgctccatgccanagaacttccctataatctc

SEQ ID NO: 15942 - DNA, 349 bp, Glycine max
tcagcaccactcttaacatttctgatctaactccttttgcaagtggagctgatattgaggaggaggaactaacacatttgagggtcaatcctcttcaacgggaaggggatgatgcaatcctccctaggaagggaccaatcactagaaccatgagcaagaggctccaagaagattgggctacagctgctgaagaatgccatatggttctcatgaaccttaaggtagatttttgaacccatggaccaatgatgggtacaattatctttgtacatattagactacgaattcattatactcggtccttgtatatatggctccatattgcaagtatggtgccctaaaatatatg

SEQ ID NO: 15943 - DNA, 450 bp, Glycine max
  unsure (1)..(450): unsure at all n locations
tctttganagaaaatggaggagaaagtattttaatagcatgtggacgtggaagaggacgtggtcgtggccaatgaagaggaggaagaggagatcgtgataattttgacaataatgaatggaggagccatcaatccactanaagttgtggaagaggaagagaaagaggtagaaacaattatgataaagcatatgaaaggaggtatgataaatctaatgttgaatgttttaattgtcataaatatggccattactcttgggagtgtagaacaaatgttgaagagaaggtcaatcttgttgatgataaagaagataaagaagttgaagagccagcactactactatcnacttataatggtgagaaggaagacaaatgcttatggtatcttgacaatggagcaagcaatcacatgtgtggatgcaaagagaaatntgtggaacttgatgagaat

SEQ ID NO: 15944 - DNA, 316 bp, Glycine max
  unsure (1)..(316): unsure at all n locations
gacttttccatatacacctgaacaatatggtacacctgaaagaaagcatagacattggacaaaaactggtctcactcttgtggcttcagcttctctttcttgaaatttttggggagagtcattcaacactgcagctactataatcaattatcttccttcacctgcccttaacaatatgagtccttttgaaaaattgtttcataaanaaccagattataaagtcttgagagtgtttggatgtgtntgtatcctctattacgaccttattaataacacaaacttgactttcggcacacatgtgcctattcattggtat

SEQ ID NO: 15945 - DNA, 421 bp, Glycine max
  unsure (1)..(421): unsure at all n locations
tcttccctttcccatgaccggcattgtcaaagatcctacacatgttggtcaggtgtacaaagttatggataccatgacaattcaccatcatcttcacttctagttggaggccattgataaacttcacacatttagacctctccctagcttccccctgataatgaggaaaataccttaccaggttctcaaacctagctgcatactctgccaccgacatgctcccctctttcgactctaagaactccatctctttcctatntttcacgtcttctggaaaatacttctctagaaaagtgtgtctgaaagtccccgatgggacaatagcaccacctgctccctccaaacgtggacgagtgttctcccaccagtactctgcctcatctgccagcatgtgattagaaaacaacacctttttctagtc

SEQ ID NO: 15946 - DNA, 427 bp, Glycine max
  unsure (1)..(427): unsure at all n locations
tattcaaaatacagggcatcctagccttatataagcagatgtttaaacagaananaaaataacagaataaactttcatatggattntagtcacagcccaacaattcaccaccttgaactaacattcatataagacacaaactgcaccctccaagcatacacgaactcaaccctaacaatcaacattgagcaagcttaagcagtgatcaaacttgctctttggaactggctttgtgaacatatcagcaagattgtgcagagtgttgatcttatgaactttgattcttctttctgaccgaatgaagtgatatctaacatctatatgcttggttctatcatgataaacctgatccttggccaagcatatagcactaaggctatcacagtagatgttagcatattcttgattaattccgagatcatttatt

SEQ ID NO: 15947 - DNA, 397 bp, Glycine max
  unsure (1)..(397): unsure at all n locations
ntgatttcctttgttccggaaacctttcttttctcatgtgcttccaaacccaatctccgggttcgaagacaaccttctttctccctttgttggcttggttagcatagcttttatttttcctctcaatttgatctttgactctctcatgaagcttcttcacatagtccgcctttgcttgaccttctttatgcttaaaaacagaaacattaggcataggcaaaagatcaagaggagttagtgggttaaaaccataaacaacttcaaaaggagaacaattagtggtgctatgaacagctctattgtaagcaaattcaacatggggtaaacaagcttcccaagtttttaagttcttcctcaaaactgtcctaagcaaagttcccaaagtcctattaacaac

SEQ ID NO: 15948 - DNA, 415 bp, Glycine max
  unsure (1)..(415): unsure at all n locations
tgactgcgcttagaatatccaaagaaaattccttcatctgtttttcatcaaattttcctaagtcttcttttccattgtttattacaaaacatttgctaccaaaaacatgaagatgtgaaatgtttggttttcaaccattgaacaatttatatggggttttctttaaaatgggtcttattaaagccctattcatgatatagcatgcagtattaacggcttcagctcaaaaatattttggaagaggggtatcatttaataaggttctagcaatttcttccaaagacctatnttttctttcaataactccattttgttgaagggttctatgtgcagaanagttatgttcaatgccatgcttttcacaagataaatcatattctttattttcaaactcacccccatgatcactcctaat

SEQ ID NO: 15949 - DNA, 366 bp, Glycine max
ttctggttgttcctggtgccgagatgatggtacagcgggtgaaccaagggctgaagtttcttttggtgaggtagccatggaaaagcagagcgtttggaatggtttatccaatttctgagaactgttgggggatgctgaaaacgagattatcacgaatatataaatttgaatgaggaatgtaaagggccgtgtgaaacaacggtcgaatttgctttggttcagtagtgaacgtgctattaatgttatgtgattcgtttgggcacgttcagatatcagtagttgctacaatttctctagcagaacaatgcccaacttgccccttcagttttcaaactggtttgcatccaatgcctttgtgaaaatatc

SEQ ID NO: 15950 - DNA, 445 bp, Glycine max
  unsure (1)..(445): unsure at all n locations
tctttgacatataatggacgagaaagtagtcaaaaagcatgttgacgtggaagatgacgtggtcgtggccaaggaagattatgaagaggagatcgtgataattntgacaataatgaatggaggagccatcaatccactagaagttgtggaagaggaagagaaagaggtagaaacaattatgaaaaagcatatgaaaggaggtatgataaatctaatgttgaatgttttaattgtcataaatatggccattactcttgggagtgtagaacaaatgttgaagagaatgtcaatcttgttgatgataaagaagataaagaagttgaagagccagcactactactatcacttaataatggtgagaaagaagacaaatgcttatggtatcttgactatggagcaagcaatcacatgtgtggatgcaaagagaaatttgtggaacttgatg

SEQ ID NO: 15951 - DNA, 269 bp, Glycine max
  unsure (1)..(269): unsure at all n locations
agcttctcagctatcttgcttcctcactagcagntgctagtgctatcatctcacattccatagtggactgagctaagatagtctttttctttgacttccaagagacagccccaccagctatgctaaatatatagccgctgggtgctttggaatcatctgaaagagtgttctaatctgcatcgctgtatccttcaagtacagcgggaaaccctttataatgtaatccaaaggctatggttctattaaagtgcctcattaccctttcaata

SEQ ID NO: 15952 - DNA, 233 bp, Glycine max
  unsure (1)..(233): unsure at all n locations
catcaaaggtaattgaaaacttgggaagaatggttacctcatgttgaattatcttataatanggtagccaacactaccacttctttttcctactttgagcttgtttatggttntgatcctctatcttctcttgatttaactcctttacctaatgattcttctattttgagtaaagatgggatttctagagccactcttgttaaggatcttcatgaatgggtgagaaatcaaat

SEQ ID NO: 15953 - DNA, 261 bp, Glycine max
  unsure (1)..(261): unsure at all n locations
agcttctcatttgtacggngactcttcactggtgatccaccagctgatatgagaatgggaaactanagaccccaagctgataccctaccaagcctatatcaaggaatagtgctggttctttgatgagatctccttccatcatgttccccgagaggaaaatcatattgcaaatgcgcttgccactttggcatccatgtttcagctaacaccgcacagggacctaccatacattgagttctggtgtcgtggcagacccgcaca

SEQ ID NO: 15954 - DNA, 288 bp, Glycine max
agctacaacattttaccacttccagggtgctggaactacttctcatggacttgatggggcctatgcgagttgattgccttggacgaaagatgtatgcctatgttgctgtggatgatatcaacagatttacctgagtctactttatcatagaataatcatacacctttgaagtactcgatgagttgagtctgagacttcacagagaataacactgtgtcatctatagaatcaggattgaccatagctgatattctgaaaacagcatggtttctgaattctgcgcatctg

SEQ ID NO: 15955 - DNA, 273 bp, Glycine max
  unsure (1)..(273): unsure at all n locations
agctngaatgatgtatagatccttgattcttcaatggccaccacaatgtgatcaaactttgatatcaatgttctaagcaccttttcaatcaccaattgttccttaatttgttctccacaacacttcatctggttggtgagtgtgagaatcttggtgagatactcaactactgattcagtctcctccattgcaagaagctcatactatcttctcaatgtctgaagtntcaccttctttatcttttctgcaacttcatgactctttacaagaatg

SEQ ID NO: 15956 - DNA, 292 bp, Glycine max
  unsure (1)..(292): unsure at all n locations
ttttttcacttcatacatctttttcttctgaaaatatatttgaaaattntaacaacattaatttaagtattcatattaatatagtattggttaaaaaattaaataaacattgatttgaatgcaatttacaaattattagatatattatcaatccttaaaccaaataaaatataaattaaactacattatactatgatatatnncaataattctattaatattgatcactattgctaacaatngatttactgctatatatttgatattgataccatataatactaattaccta

SEQ ID NO: 15957 - DNA, 270 bp, Glycine max
  unsure (1)..(270): unsure at all n locations
agcttgaatgaccatttgatagccatgttggacatgccaaagggtgccataagtaggtagttttgcttttgaatttttagacagaaatggataaagtagagggacaaatagtccattttgaaaaaacttattgtcaacctctttcagatatgaatatacctgattcagaagggaagaacttgcatcaatatctcaatttcaattgaaacatgggtttgattcacactccatgttctgagaaatatntaccatccaaanaaaggagagata

SEQ ID NO: 15958 - DNA, 269 bp, Glycine max
  unsure (1)..(269): unsure at all n locations
agctntgaatgcactattcaatggagttgacaagaacatcttcagactgatcaacacttgcacagtggccaaagatgcatgggagatcctgaaaatcactcatgaaggaacctccaaagtgaagatgtccagattgcaactcttggctacaaaattcgaaaatctgaagatgaatgaggaagagtgtattcatgacttccacatgaacattcttgaaattgccaatgcttgcactgncttgggagagagggatacagatgataagctgg

SEQ ID NO: 15959 - DNA, 300 bp, Glycine max
  unsure (1)..(300): unsure at all n locations
agcttctaaactttatacaagaatgaagctctgataccacttgttagacaagtggcctcagatatcttaagaagggggggttgaattaagatattccaaattacttccccaattaaaaatctatttcactttctactcaagttataaatntccttaacaatgaacttcttaaatattaattcaaataaaaacaatttgaatataaatataaagcaataataaacaaaggagtttaagggaagagaaagtgcaaactcagaattatacctggttcggccaaacccttgtgcctacgtcaag

SEQ ID NO: 15960 - DNA, 351 bp, Glycine max
agctatggttttcggaaatctacactccctgttgtcttttggggaccagtttctcatgaacaggggcttgaccaggaatcatttgtatgggttggatatggaattcaggttgttcctggtttgatggtgctttggtggatgatggagatgatggtacagagggtgaaccaggagctgaagtttcttttggtgaagtagccatggagaagcacagcttttggagtggtttcgtgaatatctgagaagtgttgaggaatgctgatgataaccagattgccactaaaatatgagtttgaatgatgaatgtagatggacgtgtgaagcaacggtcgaatttgtgtttgcccagta

SEQ ID NO: 15961 - DNA, 409 bp, Glycine max
ctcagcttcacaagcaagcttccatcactttctctccctctccctccactcatcttctcctaccttcaagctcttacccatggcttcctatgttggtgagctttttcttgactcatcttttccttgaagtggcgtctccaatcatctttcttccatctccattctgctaccgttaaacttcaagaagcaagggactccattgatgaagatgatccaaggcctatatgctccacattgagttacattacgaaaaatacttgtttgaaaatgtaaacaattacaaaacatattatatatatttatatattttaaattacacacacacacacatattcaagttttacttaaactaaaaaatacttaaataatgtatgtggttactagaatatatttacaaactaactaattc

SEQ ID NO: 15962 - DNA, 364 bp, Glycine max
ttagatgttaggtgatgcaatcctactttgcaaggtcattggatagaaaactccaagttgattgggccttagattcaagatagagcccttaggtacttataaccttatggtaaatttctggcccatggtctaagtatgaacccacttatgtttgcaaatattatataaaagcttcattattcttgggccttgtatttacggctccctaatgtatgtacggtaccctaaatatataagattcttcagcccttgtgtttaagggcacctaaactagtttttgtattaggggtatgttagtaattccacatgcactaagtggatatttgatgtgtgtggaatgaaattaaattaattgagttggttc

SEQ ID NO: 15963 - DNA, 384 bp, Glycine max
tcaacattcaatttcgagggtctcgatatattactgtactcaatcggacatccgagaaaaaagttattgtcatttgtatttgctcagagcatcaacattcaatttcgagcgtgtcgatatattacgggactcaatcggacatccgagtaaaaagttattgtcgtttgaatttgctcagagcttccgtattcaatttcaagcgtctcgatatattacaggactcaatcagacatccgagtaaaaagttattgtcgtttgaatttgctcagagctttgggattcaatttcgagcgtgtcaatatattacaggactcaatcagacattcgagtaaaaagttattgtcgtttgaacttgctcagagcttccgcattcaatttcgagcg

SEQ ID NO: 15964 - DNA, 405 bp, Glycine max
gaccttagaatctcagctcacatcagacccttccgggtgctggaactacttcacatggacttgatggggcctatgcaagttgaaagccttggaggaaagaggtatgcctatgtgggtgtggatgatttctccagatttacctgggtcaactttatcagagagaaatcagacacctttgcaactgtcaagcacttccacatctttggaagtccatgttacattttggcagatagagagcaaaggagaaagatggatcccaagagtgatgcaggaatattcctgggatactctacaaacagcagagcatatagagtattcaattccagaaccagaacagtgatggaatccatcaatgtggttgttgatgatctgtctccagcaagaaagaaggatgtcgaagaagat

SEQ ID NO: 15965 - DNA, 361 bp, Glycine max
agcttgttgcttatgttgaaaagcacgaccacggaaactggcattcagtgcctgccaaagcgggtaataaaacttttttgtattcctttttactcaatctatgaattgaggttttaaattgcggttgcaaatacattttagatttgtgatgatccttgatattgtgggacattgtagacaaatgcagtcgatcgataaggttgcaattgtagttgcaatgtgaatgcagatattcctaattttgtttgttacatacatttatatctaggtcttcaaagatgtggaaagagttgcatgctgaggtggatcaattacctcaagccagatataaaaagaggaaactttatcatggatgaagacc

SEQ ID NO: 15966 - DNA, 349 bp, Glycine max
atcttgttgcttatgttgaaaagcactaccacggaaactggcattcagtgcctgacaaagcgggtaataaaacttttttgtattcctttttactcaatctatgaattgaggttttaaattgcggttgcaaatacattctagatttgtgatgatccttgatattgtgggacattgtacacaaatgcagtcgatcgataaagtagcaattgtagctgcaatgtgaatgcacatattcctaattgtgcttgccacatacatttatatctagggctgtaaagatgtggaaagagttgcatgctgaggtggatcaattacctcaagccagatatataaagacgaaacttcatca

SEQ ID NO: 15967 - DNA, 352 bp, Glycine max
cttcaacttctgaccacttccagggtgctggaactacttcacatggatttgatggggcctatgctagttgaaagccttggaggaaagaggtatgcctatgttgttgtggatgatttctccagatttacctgggtaaactttatcagagagaaatcagaaacctttgaagtattcaaagagttgagtctaagacttcaaagagagaaagactgtgtcatcaagagaatcaagagtgaccatggcatagaatttgaaaacagcaggttcactgaattctgcacatctgaaggcatcactcatgagttctctgcagccattacaccacaacagaatgggatagttgagaggaaaa

SEQ ID NO: 15968 - DNA, 398 bp, Glycine max
taaacattcaatttcgaggctctcgatatattactttacttaatcaagcatcccaaaaaaaagttattgtcgtttgaatttgctcacagattcaacattcaatttcgagcgtctcgatatattacgggactcaatcaaacatccgagtaaaaagttattgtcgtttgaattggctccgagcttcaacattcaatttcgagcgtctcgatatgttacgagactcaatcagacatccgagtaaaaagctattgtcgtttgaatttgctcagagattcaacattgaatttcgagggtctcgatatcttacgggactcaatcagacatccgagtgaatagttattgtcgtttgaattggctcagagcttcaacattcaatttcgagggtctcgatatattac

SEQ ID NO: 15969 - DNA, 352 bp, Glycine max
  unsure (1)..(352): unsure at all n locations
ctttatgcaagtcaattttcaggaggtatctcggagaggatcttttccgggcatatttgcgcaaaatctcttgaactaggaagatgttgtccatcatctttctgttcttaatgaaaccagtttgagtttctccaataatagtctcaagcactagggctatgcgattgaccaaaattttagacacaatcttgtataacaaattacagcaagatatgggtctaaaatggttaacctgngaggcctgatcatgcttatgaataagcgcaataatagcatggttgagctgctttagaatttttctagttgtatagaattcattaaccgctgcaaatatatcatcaccaatgatatt

SEQ ID NO: 15970 - DNA, 431 bp, Glycine max
agcttgcgagttcaattacgagtgcctgtatattgatgcgcctgaatcggacatacgagggaaaagttatgaccatttgaatttctcgagagcttcctatgtttaatttggagcgtctcgatatattatacgcctgaatcgaacctcagcgttgaaagttatgaccatttgaatttctttagagcatccgatgttcattttcgagcgtctctatatgtgatgaaccttaatcggacctccgtgtgaaaagttatgaccatttgaatttctagagagcttacgttgttcaatttcgagcgtctcgacatattatgcgcccgaatcggacatccctgggaaacgctatgactatttgaatttctcgagagcttccgttgtgcaatttcgagcgtttgaacatattgtgcgcccgattcggacatccaggggaa

SEQ ID NO: 15971 - DNA, 348 bp, Glycine max
  unsure (1)..(348): unsure at all n locations
atcttctcgagaaattcgaatggttataacttttcacacaaatgtccgattcggggacataactcatctagacgctcgaaattgaacaacgcaagctctcgagaaattccaatggtcataacatttcgcacaaatgtccaattctgggacataatatatcaagacgctcgaaaatgtattacggaagctcttgggaaattcaaatggccataatttttcacatggatgtccgatttgggaaaataatatatcgagatgctcntaattgaacaacgaaagctatcgagaaatccgaatggtccgaacttttcgcacggatgtccgattcggggacataactcatctaga

SEQ ID NO: 15972 - DNA, 312 bp, Glycine max
agctttgctatgtataacaatctcacctctatactgggaggaaccagtggtctcttccctttcaactctctagttaagaagtccagtttcttttcttcatcccattcactgtacgtgcccatatccaaataccttgtaattacatcaatggtttcagcatgtctgcttgattcctgtcacactgctagtttcaggccacaactgattatccaaacaataatgaacaaaaaactttgaaacatacctgacgcaagtcaagcttcattaacaccatgccaaaagtagcaactcttcgatcagatcagctagtcg

SEQ ID NO: 15973 - DNA, 389 bp, Glycine max
ttaaaagattggctaagattttgttaacacataatcacttagactatgaaggagagctggagttgctgcacatgatgtccaacgttatatcaaggaatgagatcgggctgcacaatgctcaacgctagatgaactgtcacatgaagtattgaagctgcacgatccacgatgtctaatacaatgtcctgacatgctgcccgataatactggacttgctgctcaatgcaagatataagtcaagtgctgaactgaagttgcatgatccacgacgtctgatacaatgtcctgacatactgcccgaaaatactggagtcgctgttcaatgcatgattacagtcgagtgcaaaattgatgctgcatgatccacgatgtcagacaccatgtcctga

SEQ ID NO: 15974 - DNA, 394 bp, Glycine max
tagcaaattagaatatttatacctttctggaaacttcctagtgggccagttgccatcatcattgtttgggctaactaagcttagtgatttagattgttccgacaataaattagttggcccaatgccagacaaaattagtggactttaatttctaatttaatttatctggatttgtctggtaactccctgcacgaaacaatccccatttatctggatttgtctgggaactccctgcacgaaacaattccccaatggtgcttttctttgtcatcgttgttacgcttatctctttacggaaatcagcttacaggaccaattggtgaattctcttctttttccttgtattattgtgatctctcttataacaagctacaaggtaatatcccaactcaat

SEQ ID NO: 15975 - DNA, 314 bp, Glycine max
atctttctgcctgcttgtacctgcaatttgatttagatgaatatccagacaatgatgcatctatataggccacatgtcaatatccattacctgcacataattccgctcacatatgttgttaatatgaacaggaatcgatgcatctgttcctattccattcttctccatcagggatatcagctcactttcagtaaggaaatctggaggactggtgctcccctgcagaatttgtggtgttagctatgtgtaatacacacagaactccaatgggaaatgaatttcaaccttatttcttctccccagaaatggttata

SEQ ID NO: 15976 - DNA, 397 bp, Glycine max
  unsure (1)..(397): unsure at all n locations
tgtgcaatgtctgaaattgcgagtatttangaatatgaaaataagcagaattaagaatcgatgtataacgtcacggggttgaatgaataaactgaattaatattataaaatttggttttgtacttttattgtctacataaaattacaacaccaaatttttagaggatgcgatgtaaagaagtttttgaattttgatggacgatgtaaagaagtttgttttattaagttgttgaaactcaaatgtttgcattgtaaaaattgtcaaaactcattgttattaaacttttacttaaattacttggtaaacgaaaatgtataaatggttaattgtttccttaataacgaaattctatttgttaaatttaatagtatatttattgaaggaaattgtattact

SEQ ID NO: 15977 - DNA, 347 bp, Glycine max
agcttctatagaaggttcgttcctaatttctctacaattgcatcacctctcaatgagctagtgaagaagaatgtggcatttacctagggtgaaaaacaagagcaagcctttgctttgctaaaaaagaaggctctctaaggcacctgttctagctcttcctaacttttctaaaacttttgagctagaatgtgatgcctctggagtgggagttggagctgttttgttacaaggtgggcaccctattgcttattttagtgaaaaacttcatggtgccacccttaactaccctacctatgataaagagctttatgccttaataagagcactccgaacttgggaacattacc

SEQ ID NO: 15978 - DNA, 389 bp, Glycine max
ttcatgacttgcaatctttctatagaatggtgacttatacgaaaatgccacaaatctatagggatgacattacattttggatgggtaatggcggagcatatggatcttgaatgtgatggtttcaaggtaagctgataaagcccatgactcacttcaactgtaccaatcttcgctttggtgttgatatcctgcaaaacacaagtattagaggagaagattaactcgtagctgtttgtggaaatgagtttggatatggatatgagattaaagctaaaagaaggtatgtatagaacatctttcaatgtaattgaagaggtgagatggacggttcccgagtgggtggcatgaacttcgtgtccatttggtaacttaactagaatgggtttaat

SEQ ID NO: 15979 - DNA, 400 bp, Glycine max
tctgtaatcgattaccagaagcaaaaatgactttgaaaagctttcaaaaagtttgaattttaattttaaaagatgtaatcgattaccactattgtgtaatcgattaccagtgacagaaggttttgaaattcaaactgaaaagacatgactcctcaaaaattaattgtgtaatagattaccacagatctgtaatcgattagcagtgagaaaatttcaaaaataactctgaaaagtcacatctcttcataagtttttgaaaagccaccaaaggcctataaatatgtgacttgtgttcgaaattctggagagttttttagaacctcattgtcttattctctcataagaaaaccttgggccacacactttcaaaacaattaaggattcatataagttcttcaag

SEQ ID NO: 15980 - DNA, 400 bp, Glycine max
tgtaatcgattacacacatacagtaatcgattactttagcacattttcaaaaaatattctcaacagtcacatctttttatgtggttcttgaatggctatcaaaggcctatatatatatgtgacttgagacacgaatttaagaagagtttttggagaacaaaaaggtcttatcctattaaaaagcaaatcgtgttatcctcttacaaattccttggccaaattacttgtgattcaataaggaattatttgagtgctcaaattgttcagtctatctctttcaagagagatttcttcttttcttcttcttcattctgaaaagggattaagagaccgagggtctcctgttgtgaaagaattctaaacacaaaggaagggttgtccttgtgtgtttagaacttgt

SEQ ID NO: 15981 - DNA, 363 bp, Glycine max
agcttgagagggttatggaccgaacgatagaatgtcttatccaaaataaactgtatgtagatagctgaagtcttctttttggctcagaacgatcaattgctgtgataagtcccttaactcctgcctgacaaagatcttgaaacctccggccacttgcaaaatcttgaaaatatttgctaatcacgaacaacacaagccggagattgtgctgcaaccgacatcacaatggtttcttaatctcagtataactaatactcattccaaagaatatcaacaaacactgcaacaattaaaccattcatatccaaagagacaaagagagagaagaaatatgaacggagatgtcatatatcactgatcttc

SEQ ID NO: 15982 - DNA, 398 bp, Glycine max
tatcagaaggggaatggtaaaataccacctcaagctgatattattaaggtggcaaagtgtttcttttgcaagaagaagggacacatgaaaaagaattgccccgggttccagaaatggcttgagaagaaaggtaaatcaatctcattagtatgttatgaatctaatatggttagtgttaatattaacacctggtggattgattctggatctactattcatattgcaaattctttacagggtatgcaaaacctaaggaaaccagtgggaagtgagcaaagcattttatcaggcaataagctaggctcacatgtggaggccattggaacttgcattttgactttaagtagtggctttatttcaaaattagaaaggactttttatgtaccaagtttttcccg

SEQ ID NO: 15983 - DNA, 368 bp, Glycine max
agctttgagaagtagtctattgcttttctctcatagccattcatggcaagtgatattataatgaagttccaacatgataatcctgttgttgtgggtgatgcccgaaacacttgaataccctttacgatagctccacacttgcagtacatgtcaataattattgtgagaacaacgacattcaactcaaaattcccctttttacataatcatgaacccactccccatgttgaagtgcacctaagtgagcataaacacttaacaaactcatcactgtaaattcactaagctgaacccttcgtctctgcatcttgcggaaaagctccaatgcctccataagccgtttattccttacatatccactaatcata

SEQ ID NO: 15984 - DNA, 403 bp, Glycine max
tatagaatatataataaaagaacaatgacaattgtttagtctattcatgtttcctttgatgagtctaatgccattcttccaaggaaggattttttagatgatatttcagattccttagaagatacacatattcatggaaatgactctaaagaaaaagatgaaggaagcaatgaagattctcaagataatggagttagaacaaataatgaacttccaagagaatggaaagcctcaagagatcatcccctcgacaacattattgctgatatatcaaaaggggtaacaactagacattctcttaaagatttatgcaataatatggcttttgtatctatgattgaacctaaaaatataaaagatgccataatagatgataactggatcattgccatgcaagaagaac

SEQ ID NO: 15985 - DNA, 317 bp, Glycine max
agcttatgtctggtcaaatacagatttgagcatacataatactcccaacaactgatgcatacgaaattacttccatttgtttccgttccagatcatttctaggacattgagcgagactaaatttttctcctttctgaattggaatgggaaatgatgagcacttttccatcctatataactctagtactttattgaaatatgcttcttgagacaagcctaacaatccttgtgatctattttggaatattctatttgtatcacatacgttgcctcacccatttccttcattcaaagttactaaaaagaaccttttagtc

SEQ ID NO: 15986 - DNA, 363 bp, Glycine max
agcttatgctgcaaacatttataatagacctcctcagcagcaaaaccaacaatagcagaagaattatgacctttcaagcaatagatacaatccaggttggaggaatcatccaaatctaagatggacaagtcctccacaacaacaacagcctgtccctccttttcagaatgctactggtccaagcaagccatatgttcctcctccaatacagcaacattcacaacaaaaataaataaccccccctaattcgttactattttattactatctgttatgaacgtttggttgaccattgctcgttaggagatgacctatgatcacttcctagatactgcatttttaatgtttatttgatttgggtgc

SEQ ID NO: 15987 - DNA, 385 bp, Glycine max
tgaggtatttgtgccatagtaggccagatatttcttatggtgtgggcttgataagcagatatatgaatgattcgaggacttctcatatggctacaacaaagagaattttgagatatgtgaagggcacacttgactatggattgctattctccaaatcatatcataatcaaagaataaggttaattgttttttctgatgcaggagtggtgatgtagaggacaacaaaagcaccactggatatgtcttcaaattacttggatcaacaatctgctggagttctaagaaacaagaagatgttggacattcaacttgtaagtcagagtacatggttgctgtcttatcagcttgacaattagcctggttggagtcactctttgcagaattg

SEQ ID NO: 15988 - DNA, 396 bp, Glycine max
tctggtgggacatcttgacttgctttccaatctgacattcacttctagattctgccttcttctattttcagattgggaatgcctctcacagcacctttgtcaatgattttcttcatgcctcttaagtgcagatgtccaaatctttgatgccatattttgacttcatcttctttggaggatagacatgtggaggagtaactggtttcttgaggtgtccataggtaacaattgtcctttgatctgctgcccttcattagaacttcactcttctcatttgtcaccaagcattctgactttgtgaagtttacattgaatccttcatcacacaactgactgatgctgatcaagtttgcagtcagtcccttcaccagcagtactttgtccagactaggaagt

SEQ ID NO: 15989 - DNA, 398 bp, Glycine max
tctcaacgccctaaaccccagaaaccccaactaataaaattattccaaaaaaaattaaaaaaaaataaacgcataaaaaccctaatgcaccagaaaatttcaggaaaaaaaaaaacctaccaacacaaccccatctttgcacttgatcccaataacagtcctgcaacaaagtttcaaatctaagatcactaccaatacaaaaattacaaaatcatttaaaaaaaaaaaacatactcataattattaaataaactctttttttcaattttaaaaccacgaatttaaaagtataataataataataataataataataataatgataagtaccaacccgctgttgtcgacggctttagcggcatactcgatctggaaaacgcggccatcaggggagaaag

SEQ ID NO: 15990 - DNA, 348 bp, Glycine max
agcttcttattcaaggcaattcttggtggtgaagctccttcttccttggcttattccctagtggatggtgcctcccctatcctcttctcctttgccttccgctgcatctccatgatgaaaaatcaccattgaaggacctcattgaagatcaaagatccagcctccatagaagctccacaagcaagcttccatcaagttatgaccatttgaatgtctcgagatcttccgtggttcaatttcaggcgtctccatatgtcatgtgcctgaatcggacctccgtaagaaaatttatgaccatttgaacttctctagagcttccgtagttaatttcgagcttctcgatatctg

SEQ ID NO: 15991 - DNA, 382 bp, Glycine max
tgtgcattcaatatcctgatgagggtgttccatatgttctcaagactggactaatacatttgctgcccaagtatcatggtcttgcaggtgaagatcctcataagcatcttaaggagttcgatattgtctgttccaccatgaagccccctgatgtccaagaagatcatatctttctaaaggcttttcctcattctctagagggactggcaaaatattggttgtactaccttgctcccaggtctattttcagttgggatgaccttaagagggtgttcttggagaaattcttccctgcatctaggaccactaccatcagataagacatttcaagcatcacgtaacttagtggagaaaacttgtatgagtactgggaaagattcaa

SEQ ID NO: 15992 - DNA, 363 bp, Glycine max
atcttcataaggccttgtatggtttgaaataggctcccagagcctggaacaagagaacagatacttttctcttacaagttggattcatgagatgcactactgaatatggtgtgtatgttaaaagagaaagtctttcagacatcctcatagtgtgtttatatgtggacgacttgttgataacaggaaaagatttcaatgctatctcgacatttaagcaagagatgaaatctgaatttgaaatgtcagatcttagagaattatcatattttctgggcatagagttcaagaggacaaaggctgggatttttatgcaccaaagcaaatacacaactgatgttctaaagaggtttcaaatgtttgact

SEQ ID NO: 15993 - DNA, 401 bp, Glycine max
tgccagcagcaacagatttcttgagatgaacgaggacaagcttcttgtaggttgcaggcaactccttgtgcttcccttcgatgtatttggttatcgcgtattggctcgaaccggttctctctttcagactcgcaatcgcctctgctatcatctacagaataatcaaattaaatacaattggaaaagaaataaactaagagaattgattttgaaggagagtattttgggaaagtaccacggcgaagggagggtgggagaggggcttcttggacgacgccgttttcttggccttgggttgcgatgcggtagacatgatgatggcttgattgaaactcaaaacgaaaaaggagtaaccgttgttgaaattgaaacaagagatagatagaaattctgagagagag

SEQ ID NO: 15994 - DNA, 345 bp, Glycine max
  unsure (1)..(345): unsure at all n locations
agcttcaacatcagaccacttccagggtgctggaactacttcacatggacttgatggggcctatgcaagttgaaagccttggaggaaagaggtatgcctatgttgttgtggatgatttctccagatttacctgngtcaactttatcagagagaaatcagacacctttgaagtattcaaagagttgagtctaagacttcaaagagaaaaaaactgtgtcatcaagagaattaggagtgaccatggcagagagtttgaaaacggcaagtttactgaattctgcacatctgaaggcatcactcatgagttctctgcagccatcacaccacaacanaatggcatagttg

SEQ ID NO: 15995 - DNA, 393 bp, Glycine max
tggttacctccttcttcaatacatcaagaatcatcgggttgagtcttctttgtggctgtcttactggtttagccccatcctctaaatttatctgatgcatacatgtggatgggctaataccaggaatgtccgccagggtccagcctatagccttcttatgcttcttgagaacagataacaacttctcctcttgctcatcagcaagggaggcatatataattactggaaaacttttgcttttatccaagtaagcatattttaaatttgatggcagaggcttcaattctggtgtgggcggctggataatggtagaaagagatggtttctcagcctgtacctcataaagaaagtcagaggtatgtgtacttcctgaaacatggttaattctatctg

SEQ ID NO: 15996 - DNA, 347 bp, Glycine max
atctttttgaacgtcatgggaagatcacaaaggtggttcttccaccaccaaagtctggacaggaaaagaacagaattggctttgtacattttgcagacaggtcaaatgctatgaaagcactgaaaaacactgaaagatatgaattacaacgtaacatattgtccagccttttgtggttattttatgtgaatgttggtcaataatatttaaggtttgttctacgtttcaggtcaacttttacaatgctctctggcaaagccacaggctgatcaatagtctggaggatcaaacacacagaagccaggaccaggattgcttccaagctatccaccccatgttggttatgg

SEQ ID NO: 15997 - DNA, 324 bp, Glycine max
agcttctgtcctttgctaactattggactgaatctcggtccgggcaattaaaaagatgggactgtacctgccgaggaagagggcttcttcgagggcgcagcggaggctggattcctggtggcccaagccctcgcaagatccacagtgttttccggggcagtcgatgcgggtgccccaatagaggtacttttcgaagggctgttgttgtcgtcgctgtaagaggttggctttcgagacggtggtggaaagaagagaggagaacaggaagagaagcgcaatcgctgtcactgctgccgcgaggagcagaattcgggatctcgcgga

SEQ ID NO: 15998 - DNA, 439 bp, Glycine max
tcaagaataatggcctcagcatggtggctggaaatactacaatagagaaacctagagaagagtggtctgaagatgaaagaagattagtgcagtacaatttaaaggcaaaaaatattattacttttgccctaggaatagatgaatattttagggtttcaaattgtaagagtgtcaaggatatgtgggacactttacaagttacacatgagggaacaactaatgtcaaaagatctaggataaatacttcaactcatgagtatgaattatttaggatgaagacaaatgaaagtatacaagatatgcagaaaagattcacacatatagtttatcatcttgcatcattaggaagaacttttcaaaacgaggatctcataaataaagtgttaagatgcttaagtagagaatggcaaccaaaggtaacaaccataacagaatctag

SEQ ID NO: 15999 - DNA, 442 bp, Glycine max
agcttgtatgagtactggaaaagattcaagaaattgtgtgcaagctgtcctcaccaccagatttctgagcaactccttcttcaatatttctatgagggacttagcaacatggagaggagtatgattgatgctgccagtggtggagctcttggtgatatgacccctgttgaggctaggaatttgattgagaagatggcttctaactcctaacaatttagtacaagaaatgatgctattgttcttagaggagtccatgaggtggccacgaattcatcttcatctactggaaataaaaagcttgatgccttggtcaacctagtaactcagcttgccatgaataaaaaatctacaccttttgcaagagtctgtggtctatgttcttctgcagatcaccatacagatctctgtccttctttatagcaatctagagtcaatgagcaac

SEQ ID NO: 16000 - DNA, 447 bp, Glycine max
accttaaaactcagcttcacaagcagcttccatcacttgataggttagatccttttatcttcttcgaagggacataagtatatcttggttgctgctgagtatttcaccaattgggtggaagaaattcctttgaatgttgatcaaggggatataataaacttcatagaacaaaatattatttttcgatttagtatcccataaacacttataacaggtcaaggcaccatttttattgatcgaaaagtggttcaatatgtcaattctcaaaatattaagttagtaacttataccccttattatgctcaagcaaatggtcaaggtgaagccatacacaagaatttggtaaggttaattaagaaacatggccaaaaacctagaagttagcatgaaagtttagaccaaattctctatgcttatcaaaattcaccaaaagggggccactattgt

SEQ ID NO: 16001 - DNA, 433 bp, Glycine max
tatcaaacattagtcataaagtgataaggaggtgatttcttcaaatagatcattagcagaaaagaataataattgttcacacttcacaggaaacaaaagctatgaaaaggactgaaaatttaaacagcagaatgagtttgtacctgtacaaacttggcaaagccagacccaagaggggatccaatgtacagagccattgaagctccatttagcaaggatgcgtatactagccatggccccatcatccgtccaagattagtgggccagcacactacatcacctttacgaacgtccatgtggcaccatgcatctgcagcagcttttagagagtaatattggtccatggaattgcctttggatcacctataccaccaaatgaggtacattatattagcttttggctagcttcatatggtgagtgaagtcttggtat

SEQ ID NO: 16002 - DNA, 431 bp, Glycine max
  unsure (1)..(431): unsure at all n locations
tgcttgtaatcgattacacacatactgtaatcgattaccagaggagattttcagaanatattcttaacagtcacatcttttcatttggttcttaaatggctatcaaaggcctatatatatgtgacttgagacatgaatttgctaagagttttcagaacaaaaagatcttatcttcttaaaaagaaaaatcgttttatcctcttacaaattccttggccaaaacacttgtgattcaataagaaattatttgagtgcttaaattgttcaatctatctctttcaagagagatttcttcttctcttcttctttattctgaaaaaggattaagagaccgagggtctcttgttgtaaagaaatctgaacacaaaggaagggttgtccttgtgtgtttcagatcttgtaataggaatttacaagatagtggaactctc

SEQ ID NO: 16003 - DNA, 436 bp, Glycine max
agctttaggctaatataaacgacaataactatctactcggatgtctgatcgagtcccgtaatatatcaagacgctcgacattgaatgttgaacctatgagcccattcacacgacattaactatttaatctgatgtgtgattgaatcccgttatatatcgagacgctcgaaattgaatgtggaagctttacgcaaattcaaactacaatgactttttactcagatgtttaatcgactccagtaatatatcgagacgctcgaaattgaatgttgaacctatgagccaattcatacgacaataactgtttactcggatgtctgattgagtcccataatatatcgagacgctcgatattgaatgttgaacctctgatccaattcatacgacaataactttctactcggatgtccgattcagtggtgtaatatatcgggac

SEQ ID NO: 16004 - DNA, 435 bp, Glycine max
  unsure (1)..(435): unsure at all n locations
agcttctgggaaaaatccacgagttntcagtatcaaaactcctagtgtttcattggaattaggagtaacctacagtaataacaaattatctcatgaatatatcattccaaggctcattatttctcacgaaacttattcaccattagaaacaaagaggatttacctttctccaactatgaccaagaaattcattcacagctatagcattctgtccatacatcagtggtgaggaccagtaaccccacacaaaccatttgtgcacattctctggctcanagaacagaattatcatgataaaggttcattacactaatcaactntgaagttacattaccattttcttacctcgcgaaatcacaaatcctcccanaaccagaactataagtaatgcanaacttccaacagtatntgcaactataacatcccttccgaatg

SEQ ID NO: 16005 - DNA, 400 bp, Glycine max
  unsure (1)..(400): unsure at all n locations
tgcttaacaaaaggcatgcaaagtgggtggaattcctagagcaattcccttatgttatcaaacataaaaagggaaaaggtaatattgtagtcaatgatctttctcggcgtcatgcattactttctatgcttgaaacaaaattgattggtcttgaatgtttgaaaagaatgtatgaaaatgatgaatcttttggagaaatttttaaaaattgtgaaaatttttcagaaaatggtttctttagacatgaaggctttcttttcaaagaaaacaaattgtgtgtgcctaaatgttctactagaaatttgcttgtntgtgaagcacatgaaggaggtttaatggggcattntggggtccaaaagactctagaaacattacaagaacattnntattggcctcatat

SEQ ID NO: 16006 - DNA, 431 bp, Glycine max
  unsure (1)..(431): unsure at all n locations
tgtgggattgtgtgatagtgattntgccggagatgtttatgatagaaaaagtactaccggatttgtattttttgtgggtgattgtgtttttacatggagttctaagaagaaaggcattgtgacactttctacttgtgaagccgagtatgtagctgcaacttcttgcacatgtcatgccatttggctaagaagattgttggaggaacttcagttgttgcaaaaggaaagcacaaagatctatgttgataatagatctgcacaagagcttgccaagaatccggtgttccatgaacgaagtaagcatatagatacaaggtatcatttcattagagagtgcattaccaagaaagaagtagaattgactcatgtgaaaactcaagatcaagttgcggatattttcaccaagcctctcaaatttgaagagtttcgaa

SEQ ID NO: 16007 - DNA, 432 bp, Glycine max
  unsure (1)..(432): unsure at all n locations
tgcttttatatttgagtacctgaaaaatgggagcctagaacagtggctgcatccaaggacattaactcctganaagccaggaacattgaaccttgaccaaagattaaatatcatgattgatgttgcttctgcaatacattatcttcatcatgaatgtaaggagtcgattattcattgtgatttaaagccgagtaatgtacttcttgatgatgatatgactgctcacgtgagtgattttggcttaacaagacttctttcaactattaatggtgccacttctaagcaaacaagtacaattggaataaaggggactgttggctacattcctccaggtatgttctaaactcccaaaaaattgtttctttgatttcttcccttttgatgaaaaactgatatnntactaactacaagtatggggcaatnnttctatat

SEQ ID NO: 16008 - DNA, 434 bp, Glycine max
tcacacaatttatttttttttatcaaacttgagttttggaaaaccaattactaagactttcctaactagatgatttaaatgatgcatgttaatatgtgcagccctatgatgccacaatcatgaatcatctatcttactcaccaagcaacttagctcatgaaaagatacatgttcaacattcaacatatagatattacctattctcttactgatctggacaactttaccggatatggcttcacttataagacatcaatttctattgaactctattttgaaccctttatcacaaagttgactaatgcttagaaggttatgctttagtccatccacatataacacattcttaatctgagttttatgttgattccctatatcatgagaatcattatttttcctttgttgttgtctccaaacatgaccatagtttggac

SEQ ID NO: 16009 - DNA, 431 bp, Glycine max
  unsure (1)..(431): unsure at all n locations
tgagctccttcaactgctcaaagctcttaatattttattagtatccttgnggaaccttcacccgacgaatagactgacaaaagcttattttctcctttttggacaaagtatggcacgctgggggcaaataaattctcttcccatcagaccttggatgcaactgtgatcgtatgcccatataagctagatgttgacgggtattcaagccatccttcatcttgccttgaatgttaaggagcgtaccaatcacactgtctcaaacatttttctccacatgcataacatcaatacaatgtctaacgtcacgatcagaccagcacggaagatcaaagaaaatagacctcttcttccatatgcaactcttacttttatccttcttttgggacttcccagatataggatgtaagtgtggaacccgctcatatacctgc

SEQ ID NO: 16010 - DNA, 415 bp, Glycine max
  unsure (1)..(415): unsure at all n locations
tatttgcattntaagacaaatcccccccaccccgaaggctgattctcaatccagcagtcccttaccaccttgtggtaatgcttgttattaagccatccatcanagaccttataaggcttaggaccccaatcaatgctcttagatttcatgaggatagggcagtgatcagagtagttcctttcaaggttgtgctgcgaactgtctggccacttagaaagccaaccatcagagacaacagctctatccaatttgcttttacaggaaccattangcctaacccatgtgaactgcttacccacactangaatatcttccacctccatgatagcaagccaatcattgaaatctgacatgatgctggactctgaattccatgatngcttccatctctctgaaggtgcctaatacataaaat

SEQ ID NO: 16011 - DNA, 425 bp, Glycine max
  unsure (1)..(425): unsure at all n locations
agcttgtagatccccttgcaggactttntcttgttccatattgaccaaaacaatacattntgaanaatattaaacaaacctgtgctacacatagatgacatgtgttggatacctacaaattatattatgtattgaaacaaaggtcatttttatactctgaatccttaatataacctcttatacccttttctttaaaatttacttagcgagtattttttttccagtgatcaagatgattatgaggttgtacaaaaagtgggcagggggaaatatagtgaagtttttgaaagcataaatatcaatagaaatgagcgctgtataatcaagattctgaaacctgtcaagaaaaaaaaggtactcctttctttgcttgtnttatcctagtttactcntacctgcgactgtgaataagccagcaatgatgc

SEQ ID NO: 16012 - DNA, 409 bp, Glycine max
  unsure (1)..(409): unsure at all n locations
agtctgtatgaactcttagcttatcggcctacttatatgcaacccatttgagaatagcttgcatgtttgtgaaaatcttaccacaactatgctcctccagaaagattataatttgacatattttatgtcactgtggttcatgcacaataactaactctcctataggtgttcatagcgcttattatttttaatatattatcataatgtaaaatctattgactaaacttatataattattatgctatattatgtatcattaaaatntgtgtaacatatttatgttgaaaattattaattatgtacttttattaggaatgattaaggaagataatataatcaaccttttttgtaacataatagtgcatagtgcctcacttgatatataacattatttttaagaatattgcta

SEQ ID NO: 16013 - DNA, 427 bp, Glycine max
  unsure (1)..(427): unsure at all n locations
ttgcttcattggagcttgtaggcctaggatcttcttcatcaatggattcctatgcttcttgaaagatgaatggcagtggaatggagaaggaagagagaggagatgccacttcaacgagaagatgagtttagaagaagctcaccaccataggaggccatggataatagcttggaggaagaaggagatgaatgaagggagaggaagagaagagcacaaatttttgtgctctaaaagagctctgaaatctaaagtttaattttcaaatgatcaaagttggaaaaatgcacacacataacccctatttatagcctaagtgtcacacaaaattggagggaaatctaaatttctattcaaatttcacttgaatttgaaattgaatntgtggagccaaattttggagccaaaatttcactaattattgatagtg

SEQ ID NO: 16014 - DNA, 430 bp, Glycine max
tgaaggtaaactagatgccttggttaacctggttacccaattggccatgaataaaaaatctgcacctatcgccagactttgtggtttatgctcctctgccgaccaccacacagacctttgcccttatgttcagcaatctgaagcaattgaatagcctgaagcttatgctgcaaacatctacaatagacctcctcaacctcagcagcaaaatcagccacaacaaaacaattatgacctctccagcaacaggtacaatcccgggtggaggaatcatctcaaccttagatggtcgagtccttcacaacaacagcaacaataacaacaacaacaacaacaacagcaacaacaaccccagaaacagcaaccaattgagactcctccgcaaccttcccttgaagaacttgtgaggcaaatgactatgcaaaacatg

SEQ ID NO: 16015 - DNA, 423 bp, Glycine max
  unsure (1)..(423): unsure at all n locations
agctttgagcagattcaaacgacaataactttttactcggatgtctgattgagtcccagaatatatcgacacgctctacattgaatgcttatgctctgagcaaattcacacgacaataactntttactcggatgtctgattgagtcccgtaatatatcgagaccctcgaaattgaatgttgatgctctgagcaaattcaaacgacaataactttttacacggatgtgtgattgagtcatgtaatatctcgagacgctggagattgaattctgaagctctgagcagattcgaacgacaataactatgtactcggatgtctgattgaatccaatgatatatcgacacgctcgaaatagatcatgatgctctgagcatattcaacgacataacttgtactgggatgttgaagagtctgaatatatc

SEQ ID NO: 16016 - DNA, 438 bp, Glycine max
taacaaaaggcatgcgaagtgggtggaattcctagagcaattcccttatgttatcaaacataaaaagggaaaaggtaatattgtagccgatgctctttctcggcgtcatgcattactttctatgcttgaaacaaaattgattggtcttgaatgtttgaaaagcatgtatgaaaatgatgaaacttttggagaaatttttaaaaattgtgaaaaattttcagaaaatggtttctttagacatgaaggctttcttttcaaagaaaacaaattgtgtgtgcctaaatgttctactagaaattctcttgtttgtgaagcacatgaaggaggtttaatggggcattttggggtccaaaagactctacaaacattacaagaaacattttattggcctcatatgacaaaggatgtgcagaaattttgtgaacattgcattgtatg

SEQ ID NO: 16017 - DNA, 449 bp, Glycine max
  unsure (1)..(449): unsure at all n locations
gaccttaaatctccgcttgcggtactttaactttctcaatgtacaaacattttttcacattgaatttattatacatagtatatatttccattcagccttttatataataaagttggcaattgacatatatatttcactttttttatgatatggagagtcatgagatgttttgattattgattttattctgggtacttttggtatcattccttaagactattgaagtgtggaaagagctgcatactaatgtggattaactatctaaggcctgatatcaagagaggctatttctcaagtgaataagaggaaattatcattaagatgcatgagttgctggggaacaggtatatattcgtcgattcattcttcagattaatggcattaatgatttgtcttaattaataatagaaagttcgaacagaatattagtactangttattaccatgaa

SEQ ID NO: 16018 - DNA, 387 bp, Glycine max
tatcttatcacatatggagacgcctgaaattgaaccagagaagatctcgagaaattcagatggtcataacttttcactcagatgtccgatgctggcgcatagtatattgagacgctcgaaattgaacaacggaagctctcaagaaatgtaaatgatcataaatattcactcggatgtccgattcaggcgcatcatatatcgagacgctcgaaattgaacaatggaatctctcgagaaattaaaattgtcataacttttcactcgcatgtacgattcaggcacatcagatatcgagacgctcgaaataaacaacggaacctctcgagaaattcaaatggtcataacatttcacactgaggtccgattgatgcacatcacatatggaga

SEQ ID NO: 16019 - DNA, 414 bp, Glycine max
  unsure (1)..(414): unsure at all n locations
agcttgcttttcctttgtcttttggatcttcaatacctttttcacaatcttttgctcttcaaccaagaaagctcgaatgattctacagaaccagagacaaaagtaagcaaggtactccatcaatttgcacaaagaaaattaaacatactgtagattaagaagattgagaaaaacaaacctctctctaacagcactgccagacaacacaccaccatatgcacggttcacagtccttcggttnttgggtaaccttgatctcttatattctgttggccttaaatgtggaatctgcaattgccaagcattaataaccattatgttataccgtgtatcattcatacataatcctntaccaatcatagaaagaaaaatctagttgtaggaaccttgaacatcataatcttaactnttaag

SEQ ID NO: 16020 - DNA, 431 bp, Glycine max
  unsure (1)..(431): unsure at all n locations
tacacattcgtggagaanaacagattcaagtttttctgtattggataagtcagggatctcaataaggtttcgacaaccacaaaggctaattatctttaaattagcaagattctgtgacaagaaagatgcatcacattgttcagaaattgttaaaatcataaccatgagccttaactgaaagagaaacctaagcatgactcttgcgaatgagcttcacttgaggcagcacaaaaccagttaccattgacaactctctcatgtacctttacaaattgaaagaaaaattagcatgtatgcaacattcatacctgaaccccgtcccaaggctttttaagcttgctatcaggcatgtggagctctacaatntgttcagcacanaagttagacggcaaagacttgagatagaatctatcccattcaaggtacatcaa

SEQ ID NO: 16021 - DNA, 431 bp, Glycine max
tatagaatactgccgctatattgatgcgccgtgaatggacatacgagtgaaaagtttttaccatgtgaatttctcgagagcttcctatgtttaattttgagcgtgtcgatatattatacgcctgaatcgaaccttagtgtagaaagttatgaccatttgaatgtctttagagcatccgttgttcatttttgagcgtctctatatgtgatgaggctgaatcggacctccgtgtgaaaagttatgaccttttgaatttctcgagagcttccgttgttcaattatgagcgtctcgatatattatgcgctcgaatcggacatgcatgggaaacgctaggactattcgaatctctcgagagcttccggtgtgcaattgcgagcgtctgcatatattatgcgcgggaatcgcacatacaggggaaacgttatgacca

SEQ ID NO: 16022 - DNA, 417 bp, Glycine max
tgtcgaaatgactaaaacgcattcttgcattgattgttctaagtcttggaacccttgtgacacttgtcattttgctaaacaaaagaggatgcctttccctgacaacattattgtttcctcccaatattttgatttgttgcacatggatatatggggctcttatgctcatccttcattacttggtcataaatattctcttaccatcgttgatgacaaaaacatatatacatggattattttcctataattaaaaccagaagtgtcaaatcatattaaacactttatatctatggttgacactcaattctctgtcgcagttaatagcattagatcacacaatggccctgaattttccctgaaaaatttctatgattcccaaggtatttttcatctaacttcttgtgtggagacacccca

SEQ ID NO: 16023 - DNA, 408 bp, Glycine max
  unsure (1)..(408): unsure at all n locations
tctaaaagatttgtgcacccacaaaaggaagctatttgcaatgaaaggattagcatgggcagaaatatgtcagcatttataggtaaatttgttcctcacattcctgagaaatgtaaggacccaggtactttctgtataccttgcattattgggaacagtaaatttgagaatgccatgctagatctatgagcatcagttagtgtcatgcctctgtccattttcaattctttatctcttggacctttacaatctacagatgtggtgattcatttggcaaatagaagtgttgcttaccccacaggtttcatagaggatgtgttggttcaggttggtgaacttatttttcctgttgattnttatgttcttaatacggaagaaggattttcccatggtttagttccaattatt

SEQ ID NO: 16024 - DNA, 396 bp, Glycine max
  unsure (1)..(396): unsure at all n locations
agcttagccctagaggggatggaccttttcaggttttggagaggatcaataacaatgcctataggttggacctcccagaagagtatggagttagcaccacttttaacatttctgatttaattccttttgtaggtggagctgatgttgaggaggaggaactaacatatttgaggtcaaatcctcttcaagggggaggggatgatgcaatcctccctaggaagggaccagtcacaagagccatgagcaagaggctccaagaggattgggctagagctgcttaagaaggccctacggttctcatgaacctcaaggtagatttttgagcccattggacaaggttgggtccaattatctntgtacatatttgattangatgtcattatatttggtccttgt

SEQ ID NO: 16025 - DNA, 418 bp, Glycine max
  unsure (1)..(418): unsure at all n locations
agcttgataatggaggatttccttgagggtcctctcttatgcaatcatggaacacaactccaaactcaaaaatggaggacacatgaatgacaacgccattcattcatggngctccgataaagggtaagaatggaggatttgcttgagggtcctctcttaggcaatcatggaacacaactccatactcgaaagtggaggacccacgaacaggcctaagcaatagcattcatgtggctccgaaaaaggatgagaatggaggattgccttgagggtcctctcttangcaatcatggaacacagctccaaactcgaaaatggaggacacatgaatgacaacgcaattcattcatggtgctccgaaaaagggtgagaatggaggatngccttgagggtcctctcttatgcaatcatgatacac

SEQ ID NO: 16026 - DNA, 445 bp, Glycine max
  unsure (1)..(445): unsure at all n locations
agcttttatataaacatggcctcagcaaactccttatttccagaagggaattctatcaatagacctccaatctttaatggagagggttaccattactgganaacccgaatgcaaatntttattgaggcaatagatctaaatatttgggaagccatagaaatagggccttatatacccaccacagtggaaagagtttcaatagatggtagttcatcaagtgaaagcataactatagaaaaacctagagatagatggtctgaagaggatagaaaacgagtacaatacaacttanaagccaaaaatataataacatctgccctgtgaatggatgaatatttcanggtttcaaattgtaagagtgctaaggaaatgtgggacactcttcgataacacatgaaggaactacagatgttaaaagatctangatatatgcactaactcatga

SEQ ID NO: 16027 - DNA, 433 bp, Glycine max
taccaccataggaggccatggataagagcttggaggtttaatgagatgaatgaagggagaggaagagaagagcacgaaattttatgctccaaatgagctttgaaatctgaagtttaatattcaaatgatcaaagttccaaaaaaatgcacacacaaggcctctatttatagcctaagtgtcacacaaaattggaaggaaatttgaatttctattcaaatttcacttgaatttgaaattgaatttgtggagccaaactttggagccaaaatttcactaattatgattagtgaatttaagctatggttcataccactaattaaagatcaagtccaagattctccactaagtatgcttaggtggcatgaggcatgtaaagcatgaagcacatgcacaaagtgtgactatatgatgtggcaatggggtgtagcaagc

SEQ ID NO: 16028 - DNA, 417 bp, Glycine max
  unsure (1)..(417): unsure at all n locations
ttttgcttttattttagtagatgaagatgaatctgtggccacctcatggactcctctaaggataatagcatcatttcttgcactgaattgttgggagttggaagccatcttctcaatcaaattcctagcttcagcaggggtcatatcaccaagagctccaccattggcagcatcaatcatattcctatccatgttgttaagtccctcatagaaatattgaagaaggagttgctcagaaatctggtggttaggatagctngcacacaatttcttgaatctttcctagtactcatacaagctntctccactaagttgcctgatgccttgaaatgtctttctgatggcagtggtcctagatgcanggaagattttctccaagaacactctcttaggtcatcccagctgaaacggacctgg

SEQ ID NO: 16029 - DNA, 439 bp, Glycine max
  unsure (1)..(439): unsure at all n locations
tagcttcccgccaatggtatttaaaatttcatgaggtcatttcttcatttagctntgaagagaatgtcatggatcactgtatataccagaaggtcagtgggagtaagatttgtttccttgtattatacgtagatgacattctgcttgcgactaatgataagggtatgctatatgaggtgaaacaatttctctcaaagaactttgatataaaggatatgggagaggcatcttatgtcataggcataaagatccatagagaaagatctcgaggcattntaggcttgtctcaagaaacctatatcaacaaagttttagagagatttaatatgaaagattgttcaccaagtgtagctcccattgtgaagggtgacaaacttgctntgagtcaatgccccaaaaatgattntgagcgggaacacatganaaatattccatatgc

SEQ ID NO: 16030 - DNA, 433 bp, Glycine max
tgaatagcagatccagtgcactcagcataatcatgttttatcactatgttccctaaaaattctgtgggattgagtatctaaaaagtaatgacaaaattgattagtttattaattaatggatgacttttttttatcggttaatgaatatgtacttgttgcatgcattattaacttatataatacttacttccaaccattcttgagttcctgatggttcccatgctgctaaaccaccttttctactctgcaataattaagagaaaaaagaaccacagttgcatcaaaagtaaatattctagtagtaaaagtaaatcaaacatcaattattaatgtcgtctgcgctaaccccaacttcccaatgataaaagattaaacaaagagaaggaccatcaattgattgatctattaattaattaaaagcatatgaccatga

SEQ ID NO: 16031 - DNA, 433 bp, Glycine max
  unsure (1)..(433): unsure at all n locations
tccaagaatcaagatcaagattcaagactcaagtattatgaatcaagagaagacttaatcaagataagtatgaaaaggttttttcaaaaactgagtagcacatggatttttctcaaaacatgtttaccaaagagtttttactctctggtaatcgattaccagatttttgtaatcgattaccagtagcaaaaatgtttttcaaaaaactttcaactaaatttacaacgttccaattgatttcaaaaagctgtaatcgattacaatgatttggtaatcgattaccagtgtgtttgaacgttgaaattcaaattcaaatgtgaagagtcacatcctttcacataaaagctgtgtaatcgattacactaatttggtaatcgattaccagtgattgtttctgaataaatcaaaagatgtaactcttcnaaatggtttt

SEQ ID NO: 16032 - DNA, 435 bp, Glycine max
  unsure (1)..(435): unsure at all n locations
tagcttcaacattcaattntgagcgttntgatatattacgatactcaatcggacatctgagtaaaaagttattgtcgtttgaatttgctcagagattcggtattccatttcgagcatcccgatatattacgggactcaatcagacatccaagtaaaacgttattgtcgtttgaatttgctaagagcttcgataatcaatttcgagcgtctcggtatattacgggactcaatcagacaaccgattgaaaagttattgtcgtttgaatttgctaagagcttcgataatcaatttcgagcgtctcggtatattacgtgactcagtcagacaaccgagtgaaaagttattgtcgtttgaatntgctcacagcttcaacattcaatttctagcatctcgatatattccatgactcaatcatacatccgagtaaatagttg

SEQ ID NO: 16033 - DNA, 425 bp, Glycine max
  unsure (1)..(425): unsure at all n locations
ttgagcaaattcaaacgacaataagtttttactcggatgtctgattgagtcccgaagtatatcgagacgctagaaattgaataccgaagctctgagaaaattcaaacgataataactttttactcagctgtctgattgagtcccgtaatatgtcgagacgcttgaaattgaataccgaaggtctcagcaaattcaaacgacaataactttttactcggttgtctaactgactcccgtgatatattgtgacgctcgaaattgattaccgaagctctgagcaaattcaaacgacaataacgttttactcggatgtctgattgagtccagaaatatgttgagatgcttgaaattgaagactgaagctctgagcgaattcaaacgacaataactttntactcggatgtgtgactgagtcccgtaatata

SEQ ID NO: 16034 - DNA, 390 bp, Glycine max
  unsure (1)..(390): unsure at all n locations
agcttattatatattgatacgctcgaaattaaacgtcggaaactctcgggaaattcaaatagccataaatnttcacacggatgtccgattcgggcgtataatatgtcgagaggctcgaaattgaacaatggaagctcttgagaaatttaaatgggcataacttttcacacggatgtccgattcaggcttataatatatcgatacgctcgaaattaaacatcggaaactctcaagaaattcaaatggtcataacttttcacacggatgtccgattcgatcgcataatatgtcgagaggctcgaaattgaacaatggaaactcttgagaaattcaaatggtcataacttttcacacagatgtccaattcaggcttataatatattgatacgc

SEQ ID NO: 16035 - DNA, 427 bp, Glycine max
tgaatcggacatccgtgtgaaaagttatgaccatttgtttttcacgagagcttccgttgttcaatttcgaatgtcactatatgtgatgcgccaaaattggacattcgagttaaatgttatgaccatttgaatttctcaagagcttccgttgttcaattctgagcgtctcgttatgtgatttgtctgaatcggacatccatgtgaaaagttatgaccatttgtatttctcaagagcttccgatgttcaatttcaagcctctcgacatattatgcgcccgaatcggacatccgtgtgaaaagttatgaccatttgtatttctcaagagcttccgatgttcaatttcaagcgtctcgacatattatgcgcccgaatcggacatccgtgtgaaaagttatgaccatttgaatatctcgacagcttccgatg

SEQ ID NO: 16036 - DNA, 437 bp, Glycine max
  unsure (1)..(437): unsure at all n locations
tgtccaatgaggtgacaatgaanatacctagtgttactatctgatatacagtttttgctgctcgttttattgtcaattccaactgcatcaatgcatctttaacaagcataccacgaaccagagcagcaaccaagttgaccttctttggactctaaaataccatagaaaacaaggtatgtaaaatgtgcaactagtcagatattaatcagatccttcttaaaccataaattaaggcattttccacagcaaaccagggaaggcatttcaatggctaaaaaattagatgccaacttttctgcaaaataacatgttggttaaaacacagaagtttcttagcaagtagctaggcagtggcaccacataaatgtaacaaaacattgtaattcttcaatatttatgttatggctaagctgaacatacttgtgataatacttatg

SEQ ID NO: 16037 - DNA, 438 bp, Glycine max
  unsure (1)..(438): unsure at all n locations
agcttatactaagttcagcctaccatcctcagtcagaggatataccgaagactgcttttangatccgttatggtcactatgagtatctagtcatgccccttggtatgactaatgctccaggtgtgtttatggactacatgaatagagtatttcacccttaccttgatagttntatggtagtattcatagatgatattttggtatactctaagactagagaggaacatgaagaacacttgaggattgtgttgcatacccttagggaccgacaactntatgctaagctgtccaagtgtgagttttggttagagaaagttagtttcctagggcatgtgatatctcaagggggtaaacctgtagatccctctaagatagaagtcgttcttgagtgggagagtcctaagctnttgtgtgggatacccaatgtaagcatagttt

SEQ ID NO: 16038 - DNA, 432 bp, Glycine max
  unsure (1)..(432): unsure at all n locations
agcttcttagtttcagatgatgcagctgagtttgtagctacctcatgcactcctctaatgattataacatcatttctggcgctaaactgctgggagttggaagccatcttctcaattaaatgtctagcttcaataggagtcatgtctccaagggctccaccactggcagcatctatcatacttctctccatattactgagtccttcataaaaatattggagaagaagctgctctgaaatctgatggtgagggcaactagcacatagttttttaaatctctcccagtattcatacaggctctctccactgagttttctaatacctaagttatccttcctgatggctgtggtcttggaagcanggaaaatgttttctaagaatactctcttaaggtcatcccagctcgtgatgaaccttggagcaaggtaatac

SEQ ID NO: 16039 - DNA, 429 bp, Glycine max
  unsure (1)..(429): unsure at all n locations
tatcttgtgaaatatggcataacaaatattgacgaatgtntgtttatgggtcagactattctagagcaattggaaggccttcctaggcataaagcanatgccagatatgtgaactatgttgcagaanaggacaaaaataatggtaatttatatgattcttcacttttagctaataataacatggagcttttctctgagcctgagcatgctaaggtgtttggtcatgttcgtaagctttcaaatgagagtgttgaaagcgatggaagctcaatacgaggtagtgacatgtctaattttgggattccaagttcatctggtgatggctctcatgaccttcctggatctgctttggtttcaagagagacagatattatgggccacacanagtcgaagtctactggtgaatactcaatagtccttccactagat

SEQ ID NO: 16040 - DNA, 426 bp, Glycine max
tagtgtagaactggccaccaaaataaccttttttaatttatgagttgatcaaaatgaaaccctcgtgcaacataaaaggcagaagcaaataataattatttacctcttttcttctctcagctcgctcatcacacttgaaactgaatccatattttgggagcgcccccaccctgcgaggtttggcatcttctgcagtaggacttacaactggattaaggataaaccataaatacactgtgccactctcagtaacaaactaacaacataaataatataaacaaatccacattagctccccattgcctctcaccaccataaacaatgctcaaccaggaaaaaaaaggatacgaagaagattctgcttctccttgaagattatcatggggatctttcttcgataattgtggtctagtcttctccctgtat

SEQ ID NO: 16041 - DNA, 408 bp, Glycine max
  unsure (1)..(408): unsure at all n locations
ngagtaaggcacccctttggtttgaagacgcgttcttgttgagaggcatccacataaagttctccacagaaaatgctttatcttgggaggtatacgaagattccatatagtggaccagcttccttgaactttgagagcttctttgttcaccatagtctccattaaaatatgataatctgatcaaaccgagtatgtccccatggtactaactttcaaaatcaaaatatcagaatcatgaagattgaagagtggcatcatctttatttcttgggaatcttctttattgaaaaattgatcagtaacctcaatgttccaactattgctttcaacatcaataagcgaatgtactgtcaaatgttcaagaccaaaaagaggtaaggacgaaacataatacttatctttattctg

SEQ ID NO: 16042 - DNA, 441 bp, Glycine max
  unsure (1)..(441): unsure at all n locations
ggaccttaaatctcagcttggccaggtattcatgtttatctagcctttgagtatgtccattttgatttatggggaccatctagaggaaaaactcatggtggaagctcatactttctcaccatcatagatgatttctccagaagagtatgattgtatgttttgaaaaataagtcagaatcttttcaaaaattcagagaatggcatactcttattggaaatcaacttggtacaaaattaaaagttttaaggactgacaatggcttggagtttgtttcagagcagttcaatgagttttgcaggaaaataggcatcaaaaggcacaaaacagtccctcacacaccacaacagaatggtttagcagaaaggatgaataagaccattttgganaaagtgaagtgcatgctactaagtgcaggactgccaaataccttttggggagaa

SEQ ID NO: 16043 - DNA, 423 bp, Glycine max
  unsure (1)..(423): unsure at all n locations
ttcaactttgagcctgagcaagttgaatcttattctgctcacaggctaatctgaagggtgttgtgttgaaggctangcatatagctgaagcagctttgtttcttgcttctgatgatgctgctgtttacatcagtggtcacaacttggtggtggatggtgggttctctgtggttaatagaagttattctttcacaccagcttaattacatgtagagccaaaaaaacatagttttgtggctggttggcattaatttccctagccttcatcaagttgagaacatgatgatgtcatgcagtgcgtcaaattaccttgttactgggacttttttttcatttgcactctactaataattctgcaatgtctcttctttgtttgcattttcaaagcatacattcatcaaccttgtctgcttgtgactcaaa

SEQ ID NO: 16044 - DNA, 401 bp, Glycine max
atgcagctgagttggtcgctacctcatgctcttctctaatgactatagcataattgctggcgctaaaccgctgagagtcggaagccatcttctcgatggaatatctggctccagcaggagtcatgtctacaaaggctacaccactggcatcatatatcatacttctgtccatattactgagtccttcataaaaatattatagaagaagctgctccgaaatctgatggtgaaggcaactggcacatagatgtttaaatctctctcactactcatacaggctctctccactgagttgtctaatacctgagatatccttcctgatggctagagtcctagaagcacggaaatatttttctaagaatactctcttaaagtcatcccagctcgtgatggaccatgga

SEQ ID NO: 16045 - DNA, 432 bp, Glycine max
  unsure (1)..(432): unsure at all n locations
cccatggaagctcctaatatctcccacactttatggggagggtcattcttggatggccttgattttcttagggtccacttggaccccatttctaccaactaaaaaccctaagaaaactatattatctacacaaaaggtacacttctctatatttgcatagagggtgtttttcctaaggactgaaagaacttgcctgagatgtcctaagtgatcatctaggatcctactatatactaaattatcatcaaaataaacaactacaaatctacctatgaaatcccttaagacatgatgcataagcctcataaaggtgcttggagcattagtgggcccaaaagcatcactagcccttcatacaaaccaaacttggtcttgaaagcggntntccactcatcaccctctttcattcctaattggtgataaccactttta

SEQ ID NO: 16046 - DNA, 391 bp, Glycine max
  unsure (1)..(391): unsure at all n locations
atcttggagcatgcttattacatggagtagatgcaaccaaaataaagcttcattcaaatttaaaattgtggaggtttgaccgagttatgttcaattntcctcatgtcagctttcatgggaaggaaaataacacattactaattaagtgagttttcttgtaagattcagttagaagactaattaatgtggcaccctctaccccgacatacatatagtgaaaggaaacatagaatagtgggagtaacttaaaaagatttacttcacaattcaatataaaacttctcaacggagtaaaggttcacattcacccattaaccaagttaaaacttatcggtaagaatataaaaacatgtttcggctccaaacaaagaccataccggtattataacta

SEQ ID NO: 16047 - DNA, 442 bp, Glycine max
tggacttcctgtgttttgggaacctctccttcctcaggtgtacccaaacccaatcacctggttcaagcatgactttctttctgcttttgttggcttgccttgcatagctcgcatttttcttttcaatttgagccttcacttgctcatgcaacttcttcacatactcagctttagcctgtgcatccttatgcttaaacatagcaatgttaggcataggcaacaaatcaagaggagtcaaaggattaaatccatacactatctcaaatggtgaacaattagttgtgctatggacagcccgattataagcaaactcaacatgaggcaaacaggcttcccaagatttaagatttttctttaaaacaatcctaagcagtgtgcctaaagtcctattgactacctcagtttgaccatcaatttgtgggtgacaagtagtagaaaacaa

SEQ ID NO: 16048 - DNA, 435 bp, Glycine max
  unsure (1)..(435): unsure at all n locations
cggtacctcggngaatcctctataagtcgactctgcattgcatgcaagtcttcataaactttatacaacgaatgacagctctgatatcactatgttacacacagtggcctcagatatcgataagaagggggggttgaattaagatatcaaagactttcctcaattaaatttttaattctcctttttaaaattttcaatgtacctttattatgaattactaaaaagacaattcaaaataaacttctttaatgcaaaagaaaaataacaataactaaaagaagtttaagggaaaagaaagtgcaaactcagtttatactggttcggccacactctgtgcctatgtccagcccccaagcaacccgcttgagatttccactatcttgtaaaattccttttacaatgtctgaaccaaggacaacccttcctttgtgttca

SEQ ID NO: 16049 - DNA, 383 bp, Glycine max
atcttatctttatctctaccaacaaaaaaaaaaaacccagagtaaatgggacaaaatctgattaatcagactttctaacattagatatcaatattaatattatatatagttaaataatacaaatataatgttaaattaacgtatattgtttaacatattttaaaataaacaaattcattctaaacataatacataattgcttaagagaatattaacgctaaatcatgttaggacaatccaaaccacaacgtgaacaatgttacaaaatgtatcatgttcatttctaatattcaaacctatgcaaattaactaagttggattgaatcaaggtgtgcttgaattattggtgggaaaatacaaaaacatatttgagaataaaatca

SEQ ID NO: 16050 - DNA, 391 bp, Glycine max
agcttctatatattgttcgttcctaatttctctacaattgcatcacctctcaatgagctggtgaagaagaatgtggcatttacctggggtgaaaaacaagagcaagcctttgctttgctcaaagaaaagcttactaaggcacctgttctagctcttcctgacttttctaaaacttttgagctagaatgtgatgcctctggagtgggagttggagctgtattgttacaaggtgggcaccctattgcttattttagtgaaaaactacatagtgccaccctcaactaccccacctatgataaagagctttatgccttaataagagccctccaaacttgggaacattaccttgtttccaaggaatttgtcattcatagtgatcatcaatcactta

SEQ ID NO: 16051 - DNA, 432 bp, Glycine max
  unsure (1)..(432): unsure at all n locations
ntgatttcctttgttccgganacctttcttttctcatgtgcacccaaacccaatctccgggttcgaagacaaccttctttctccctttgatggcttgtttagcatagcttttacttttcctctcaatttgatctttgactctataatgaagcttcttcacatagtccgcctttgcttgaccttctttatgcttaaaaacagaaacattaggcataggcaaaagatcaagaggagttagtggattaaaaccataaacaacttcaaggtttaagaaagaagaatcatcggatgacgccgatcgaacatttcctaatagacatcatccaaatattattcagggattgaatagaagatacaatagccgacatcggccgttgtaaatcagcgactgatatttttcagccgacgttgcgcaatttcttttacaaacgt

SEQ ID NO: 16052 - DNA, 424 bp, Glycine max
  unsure (1)..(424): unsure at all n locations
ttccagaggcaagctaatttgtacgccctcccgatggagcatttacattcattatcttctttgtggactttttctaagtgtggaattgaaatcctcaatcccttaccgattggcatcctccagctgaagtattaattgtggcaattgactaattcaacaaatgggttgaagccgagctggtagccaggatcaccattgaacaagtacataaatttttatggcaatcaataatgtgcctatttgggatgctaaaaaccttgatagtagacaatggcacacagttcaattgcaatagtgttaaagaatttgtgacagccacaatgtaaagttgatttttgcttcggtggaacaccctcaatcaaatggtaaggtagaggtggccattaaggtgatactaaagggttntaaatcaaactttcaacat

SEQ ID NO: 16053 - DNA, 359 bp, Glycine max
ttctttgagccaattcaaacgacaataactttttactcggatgtctgattgagtcccgtgatataacgagacgctcgaaattgaatgttgaagctctgagcgaattcaaacgacaataactttttactcggatgtctgattgaggcccgtaatatatcgagacgctcgaaattgaatgttgaagctctgagccaattcaaacgacaataactttttactcggatgtctgattgactctcgtcatatatcgagacgctcgaaattgaatgttgaagctctgagccaattcaaacgacaataactttttactcggatgtctgattgaggcccgtaatatatcgagacgctcgaaattgaat

SEQ ID NO: 16054 - DNA, 412 bp, Glycine max
taaacattcaacttcgagcgtctcgatatattactagtctcaatcaaacatccgagaaaaaagttattgtcgtttgaattggctcagagcttcaacattcaatttcgagcgtctcgatatatgacaggactcaatcagacatccgagtaaaaagttattgtcgtttgaattagctcagagcttcaacattcaatttcgagcgtctcgatatatcacgggactatatcaaacatccgagtaaaaagttattggcgtttgaattggctcagagcttaaacattcaatttcgagcgtctcgatatattacgagactcaatcacacatccgagaaaaaagttattgtcatttgtaattgctcagaggttcaacattcaatttcgagcgtctcgatatattacaggactcaatcaga

SEQ ID NO: 16055 - DNA, 426 bp, Glycine max
tatattataaaaataaattgttaacttataatgattattattatgatataacatgtacacatactattatgattaagtcggttaattaagttataatttgcactctgcctttatctcaaaggagtcaactcaaggtttctttattatccatttagaatgaaacacatataagttatactcgtgagcatgctaggtatccacttttaaatgaaaaaaaagtatagaggtagattatcaattactttttttaaattatattgaataacttaattattttttatagtataataacttaccataaacaaatattaaagaagtatccgtgtctattctatagtctcttcttagaaaaccataatggttggctctttattggaaataataagtcatgatagaaaatcacataaaagcccatttcctcttttc

SEQ ID NO: 16056 - DNA, 436 bp, Glycine max
  unsure (1)..(436): unsure at all n locations
tagaagatctatatatggactaaaacaagcatcctaccaatggtatatttagtttcatagtgtggtctccaaatatggattttgtggaaagtgttgtagaccaatgcatataccttaaagtcaataggagtaagttgattttcttagttctatatgaagatgacattttacttgctaggagtgacttaggtcttttgcatgacactaaatttttcctctcacaaaactttgatatgaaggatatgggtgaagcttcctatgtcattggcatagaaattcatagagatagatctctaataacattaggactatctcaaaaggcctacatagaaaagttttgaaaaaatttaatatgcaaaattgttcatcaattaccgcacctatagttaaagggaaaanttttagtatcaatcaatgtccccaaacaacattggaa

SEQ ID NO: 16057 - DNA, 357 bp, Glycine max
atattactagcaactctaagatgagcgaatagacatcttacatactaagaaggtaatgtataaatcaatcctcaccggaatgactgagtaaaaaccatttggtattggatctgaaagcattccaatctgccagagtgctagtgatgctgtcagagaagacagcacatcttcgacaacatgtcgaggagattacttattacttaaggtctcatcttgagaacccaaagaaacagatccaaatttttcaacaaaatctgaaggccaccacaacacattagatggcccttgctctgccggccctgcatcttctcgtgtctcctccatgttcttatatatttagaatgaaaaaccatttcg

SEQ ID NO: 16058 - DNA, 445 bp, Glycine max
tcaagcttctgacaaaatccatcaacacatgcggactccaatttgtggcttactattatgttcctcaattttgcatgatttgtcctcacttctctgccaacttcattctcatcatccatcacaattttcacagctttgcttacactctccttcgtgaaccagccatcttcttcacccttctccacttcaaccccaatctttaagttttcacccatcatccttgcattaactatatgatcaccatctacctgtggcagtaacactatttggcacttattcactagtgcctcagttaatgaaccagcaccacaatgtgttatgaagcaacccactgaagggtgttccaaaatcagctgttgctgtatccatccaccgaggacaattactctctcttcaaccctttccttgaacccttctgggagagcagcttcaagtgtctcaaacc

SEQ ID NO: 16059 - DNA, 379 bp, Glycine max
ttcttgagaatggagaattgcactaagcaatcactacgcatagctccaaactcgaaggtggaggacacatgaacgaaaacacaattcatggggctccgaaaaaggggttgagaatggagaattacactaagcaatcactacgcatagctccaaactcgaaggtggaggacacatgaacgataacgcaattcatggggctccgaaaagattgagaatggagaattgcactacgcaatcactacgcatagctccaaacgcgaaggtggaggacacatgaatgaaaacgcaattcatggtgctccgaaaagaatgagaatggagaattgcactaagcaatcactacgcatagctccaaactcgaaggtggaggacacatgaa

SEQ ID NO: 16060 - DNA, 424 bp, Glycine max
  unsure (1)..(424): unsure at all n locations
ntaaaagattggctaagattttgttaaaacatattctcttagacaatgaaggaaagctggagttgctgcacatgatgtccaacgttatgtcaaagaataagatcgggctgcacaatgcacaaggcaagataaagtgtcaaatgaagaattgaagctgcaggattcacgatgtcggatataatgtccaggacatcctgcctgaaaatactggaattgctaaaagcattgaagctgcaggatccacgatgtcggatacaatgtccaggacatcctgcccgaaaatactggagttgctaaaagcattgaagttgcaggatccacgatgtcggatacgatgtccaggacatcttgcccganaatactggacatataaatctgttatatctttaacagattattgtgcagttagcaagagattagatga

SEQ ID NO: 16061 - DNA, 423 bp, Glycine max
  unsure (1)..(423): unsure at all n locations
ntccttcgagtccctgcatgtttagccctgatcttggtcataggattggacgaattgatctggtcccacctttaagtttagatggtcaattagggaaagcaattgcatcgcctccaatgtctcctcgaggacttagacagctctctttgcccgtcaaatcattgcatgagaaattgcagaattcaccgcaagtgggtgttatacatttggctcttcaaaataactcagatggcttaattgttaggtatctgctactatgctactatgtttcatgaactcctattcattgtcaatagttatttttgcccgtgtggatggaagcctgatgctattgtccttttatttagttggcacaatgatgtatttgttgtggctgaacctggagagctcgctgagaaatttctacaaaatgtntaaattcag

SEQ ID NO: 16062 - DNA, 377 bp, Glycine max
tttcttttttcaggttattgtgtaaaaatcagtttgtccaatgggatgatgattttcaagtggcatttgaaaagattaaatgatgtttgatgaatcctcctatgctcatgccattggtgcccggaagacctcttatcctatacatgacagtattagatgagtcaatggggtgtgtgctcggacaacacgatgaatctggaaaaagggaatgggccatctactacttgagcaagaagttcacggcatgtagatgaactaattgttcctagagaggacatgttgtgccttggcgtgggcagctcaccgtttgaggtagtatatgctgagttacactacttggttggtgtccataatgtatcccgtcgagtacatcttcg

SEQ ID NO: 16063 - DNA, 419 bp, Glycine max
  unsure (1)..(419): unsure at all n locations
tgctgcaacagcatgtaactctttntaaaataatttctccaagaacagtggaaatagtaaaccaagtgaaaatgaacagtaccaaagaagaacaccatcttttgcaatttcaaagagctcattggttgaagggtcaataggaagatatttcttgaggaactcatcttgtgctagatagtgatttatatgtgctacatatgatgctttctctgattcacttattgtgtgaagcaatgtggttgtagctgccttgaggaacgctgacgagttctttggactacttccggttctagaattcacaaatgtttggagtttcaagtagacctgtcatcattatattatatcactattacaagttatccttggatcaaaatttaacctgatcacaatagctgaaattgttctagtatgtttctagt

SEQ ID NO: 16064 - DNA, 443 bp, Glycine max
ctttgaacttcaaatgctttaggatgtgaatcacttctgttgtcctaaatgcctgcattcatgaacatatatagaagaaataattggagaggaatcgttggctacatgaatcactgaggtgggaggactataagacaagactggttggatgggaccaacagggaggcaagggcatatggacggccttggaggactttctcgctgatgctgattccgtgtgaaataaaatagatgtcaaacatcagaaatatttaaaatgatatatgacctctcgctatccgctgccttataattcatcagccacaaattaccttgcagttgtacttcgatgtaacgtgaacagaacatgtccagagcatgtttacaaaaatatggaatatcaattaatgcatgaatagacgttacgtttcactgaggcacgtctcatttggttacatgtggag

SEQ ID NO: 16065 - DNA, 428 bp, Glycine max
tatgctacaaatatttacaatagacctcctcaatctcagctgcaaaatcaaccacagcaaagcaattatgacctttccagcaacagatacaaccctggatggaggaatcatcctaacctcagatggtccagccctcagcaacaacaacagcagcctgctccttccttccaaaatgttgctggcccaagcagaccatacattcctccaccaatccaacaacagcaacaaccccagaaacaaccaacagttgaggcccctccacaaccttccctcgaagaacttgtgaggcaaatgactatgcagaacatgcagtttcagcaagagaccagagcctccattcagagcttaaccaatcagatgggacaattagctacccaattgaatcaacaacaatcccaaaattctgacaagctgccttctcaagctgt

SEQ ID NO: 16066 - DNA, 437 bp, Glycine max
tctacctctctgggcaatcttatgtggtggatcttaccttcaaaaccttttgaccttctaccattacctgcaagcaaacattgtgttctggagtaagcttgtcttccacagacaagtcgaaatcgatttttgggtcttcaaaacctaactccacctttctcttccccatgacaactatgcagcttgcggacaacatgaacggccttcccaagattacaaggatgtcagtatcttcagagatatccataaccacaaagtctgctgggaagatcaaatgttgtaccctgaccaacacttcaatcactccacaggacctggtaatggagcggtcagctaattgcacagtcattcgagtgggcataatctccaactctcccagccttctgcacatggagagtggcatcaaattaatgttggctcccagatcaatcatagcc

SEQ ID NO: 16067 - DNA, 435 bp, Glycine max
tgctaacccatggaagctgctaatatctcccacacttttttggggtgggtcattcttggatgaccttgattttctcagggtccacttggaccccatttctaccaactacaaaacctaagaagactatattatctacacaaaaggtacacttctgtatatttgcatagagggagtttttactaaggactgaaagaacttgccggagatgtcctaagtgatcatctaggctcctactgtacactaaaatatcatcaaaataaacaactacaaatctacctatgaaatcccttaagacatgatgcataagcctcataaaggtgcttggtgcattagtgagcccaaaaggcatcactagccattcatacaaaccaaacttggtcttataagcggttttccactcatcacccttgttcatcctgatttggtgataaccac

SEQ ID NO: 16068 - DNA, 424 bp, Glycine max
ttcttccacttcatgtttcttgtggtgtctttcttcatgctacagcttctgcccaaaattcttttggtagcttcttgcttttgagcatgcttcgagccatatcaaggattgttctatttttcctttctgtcacaccattctattagggggatcttggaactattaagggacatctgattccattctcttcacagaactctttggaagggaattctcctccttggttagtactcatggctttgatcttttgactactttctttctctattatagctttgaacttcttgaaggcggaaaagactttggattctttctttaatacatatactcatgttttgcttgagaactaaccactgaaaaggatgacataggcacttttatctagtgagcatggcttgattggcccacagacgtcaacatgtat

SEQ ID NO: 16069 - DNA, 385 bp, Glycine max
  unsure (1)..(385): unsure at all n locations
agctttgagtttattcaggcgacaatatctttttactcgtatgtctgattgagtcccgtcatataacgagacgctcgaaattgaatgttgaagctctgagccaattcaaacgacaataactttttactcggatgtctgattgaatcctgtcatatatcgagacgctcgaaattgaatgttgaacctctgagcgaattcaaacgacaataactttttactcagatgtctgatatagtctcgtaatatatcgagacgctcgaaattgaatgttgaagctctgagcaaattcaaacgacaataactntttactcggatgtctgattgagtcccgtcatacatcgagacgctcanaattgaatgttgaagctctgaggaaattctaacg

SEQ ID NO: 16070 - DNA, 432 bp, Glycine max
tcaacattcaatttcgagcgtctcgatatatgacttgactcaatcaaatatccgagaaaaaagttaatgtcgtttgaatttgctcagaggttcaacattcaatttcgagcgtctcgttatattaaaggactcaatcagacatccgagtaaaaagatattgtcacctgaattggctcagagcttcaacattcaatttcgagcgtctcgatatatgacgggactcaatcagacatccgagtaaaaagttattgtcgtttgaatttgctcagagcttcaacattcaattttgagcgtctcgatgtatgacgggactcaatcagacatccgagtaaaaagttattgtcgtttgaatttgctcagagcttcaacattcaatttcgagcgtctcgatatattacgagactatatcagacatctgagtaaaaagttatt

SEQ ID NO: 16071 - DNA, 433 bp, Glycine max
  unsure (1)..(433): unsure at all n locations
tatccaaactgaaacttcaacaaattaggcactgtctaattcgttatattttcagtacacaaaatcaaagtgatcaattctaaaagttataacataaggtacattgatagttccatccataaagggtttacttaaagttgcggatctgaaagtggtccagccatcaacgacacttctgttgccagtaataactgtaacatcctttccatcgccaaacagaacaatattggtcttataacttgggatttcaacattttcctcgtaagtcccttctttgacatagatcactgtcctaccagcactgtcatttggagcaaagttgatagcctcagtgatgaagctaaagtttcccgttccatcagcagccacaacaagctctcctccatcattgctntgcaagagacggcgaacggttttcatcgacaaccacaac

SEQ ID NO: 16072 - DNA, 424 bp, Glycine max
atacctttcatcatggcatgttgacataagctctttagttgagggtaaaatttgtcaaaaaagaaataatattcgacaaaaatataagagtttgagataaaatttgtcaaataaataatattatgatcttattaaaatgtttaatggggcttaattttaaaaattttctaagttttctaccataggagctctttttttcaccccatccatgttgtcacatgtgggtgaaaagaggaaagagagggatgggatttctcttgctttaagcataacgggccaaagtgggaggcccacacgaatggttattagctcagtagtaaagtgtgtccttgataattgtgtctgcttggagtggagtgagacatgtcattgaatagcaaggagatagccacttcgttatgaaattagaaaagttaagagccct

SEQ ID NO: 16073 - DNA, 422 bp, Glycine max
  unsure (1)..(422): unsure at all n locations
tgtgcctcttcacgtccggaatatgaatgtagcttatagatccaaagacccttaggtgctttgctgatggcttcttcccgttccaagcttcaattggagtcatgtcttttacagacttagttggacatctgttgagtatgtaaacaacattgtagattgcttcagcccagaatgtgttaggtagtcccttctccttgagcatcgatctagccatttccataactgtgcaattctttctctcggacactccattttgttaaggagaatatgcgactgtaagttgtcgctcaatgccttcatcctcacaaaatctttcaaactcgcgagaggtgtactctntgccgcgatcacttcttagtacttttatccgttttccactttgattntcagcaagggccttgaactttntgaatactccaaag

SEQ ID NO: 16074 - DNA, 295 bp, Glycine max
ctttagccaattcagacaacaataactttttactcgtgatgtcttattgagtcccgtaatatatcgagacgctcgaaattgaatgttgaacctctgagcaaactcaaacgacaataactttttactcggatgtctgattgagtcccgtaatatatcgagactctcgaaattgaatgttgaatctctgagccaattcaaacgacaataaatttttgctcggatgtctgattgagtcccgtgatatatcgagacgctcgaaattgagtgtggaatctctgagccaattcaacgaaca

SEQ ID NO: 16075 - DNA, 421 bp, Glycine max
atcttgtggaaccatggagtttagcctctttgttgtacacctatacagaacatgcatagttgtcatagcagcctcaccctataaactatgaggaagatttttctctttaagcatgcttctaaccatgttcaagattgttcgattgcttctttctacaatgccattatgttgggggtgtaatgagcagttacttcatgaactataccatgctccttacagaaaccttcaaattctccagatgtgaattcacctccaccatctgttcttaagatgttaatgcattttccagattgcttcttcacaagagctatgaagtctttaaaaatgttgaacacatcactcttggctttgattgggtagagccacaccttcctgctaagatcatctacaaaagacacaaagtatctattctctcctaatg

SEQ ID NO: 16076 - DNA, 379 bp, Glycine max
tatctttggattcagaggaacagatgatcctcccggaatcactgcaagtaaattatcccatcctcctcgaatacctccacagtgcctctctatcaactccttcagtggaatactcatttcctcctcaacagtgcaaggcttgttcacatgccccgacacacaaaacaactttgtcccagcattgttcttcctaccaaaactggcaaaccattcaggcccacgccttagaatggttggagaaacagcaacagtttccacatttgtgacagtggtaggacatccatacaacccagcattggctgggaagggcggcttcaatcttggtttaccttgtttcccttcaagactctccaagagggctgtttcctcaccacaaata

SEQ ID NO: 16077 - DNA, 422 bp, Glycine max
  unsure (1)..(422): unsure at all n locations
ttgcagcgtatgccactctactctaaattcttgtttgatatgttaacaaggaagcataaatatattcatcaagaaaacatcatagtgtaaggaaactgcagtgctatgatccaaaagatccttccacccaagcataaagatcttgggagtgtaactattccttgttcaattggagaagtcaatgtgggaaaagctcttattgacctgngagctagtatcaatttgatgccattctccatgtgcagaagattgggagagttggaaataatgcccattcgaatgactttacaactagctgaccgctccattagcaggccatatggagtaattgaagatgtgttggtcagagtaaaacattntatcttcccggcagactttgtggtgatggatatctctgaagatactgacatctttgtaatatt

SEQ ID NO: 16078 - DNA, 366 bp, Glycine max
ttcttgtaataaaaaacaagtaaataatctttacttagagatgaactaacatcttttgtctgacccaaacgatgagctctatccatcgcctgtagatccaatgttggattccaatcactctcgtaaaatatgactgtgtcagcagctgtcaagttgatacccaatccaccagctcttgtactcagtaagaacacaaaaatatcactcctgaaacagagatataaagaaacaagtcatcttcagtagtctcaccaaagtagacacattaaagcatgacaacacagacattacctgtgctggaagtctctaaccatgtctctgcgatcctgaatagtggatgacccatcaagtctaaaatatctatat

SEQ ID NO: 16079 - DNA, 393 bp, Glycine max
  unsure (1)..(393): unsure at all n locations
tgtcaaaaagggaagcaagttagaaactcttttcttagcaagaacattgtttctacttcgaaaccccttgaactacttcacactgatttatttggtccctctagaactatgagtttgggttgtaattactatggcttagttatagtagatgattactcaacgttcacatggactttgtttttgaaaacaaaaaatgaagcttttgatgcttttcgcaaacttgccaaggtgattcaaaatgaaatacgtcttaacattgtttcacttagaagtgatcatgaaggtgaatttcaaaatgagtcttttgaaatattttgtgaagaaaatggaatttaccacaattnttctgccccaagaacaccccaacaaaatggtgttgtggagaggagaaat

SEQ ID NO: 16080 - DNA, 410 bp, Glycine max
tatcaatgtggcagttccggggaccattgtctaattggcgatcaatacaaaaaaaatactcaatccatgggaaaggaatgaaaatcacacactttgcctcaactctgctaaagcaattggatgtacagtagtcaacattggcacccaggacttcattgaaggaagggtatgcttgtaggcattcaagtttccacccataaaagcagaattattgtgggcgtgtacactgcagaacaacaaaatttaagattaaatttaatttataaatgaaatcctttgttaagttatgaaataggaatttttttattctaaaatcaaatcctttggtcagaaagttataagaattttttctttttttttttttaatttaggtgtgatactacaaaaaatctggcaaatttgatatttct

SEQ ID NO: 16081 - DNA, 321 bp, Glycine max
tgctcttaaactctatacaagaatgaagttctgataccactcgatagacaggtggcctcagatatctttaagaatgggggttttgaattaagatatcaaagactattctccaattaaaattttaactctcttcttgagttagaaatttacccttaatatgaattactcaaaagataatttagagtaaacttctttatagccaatgatagatgacgatatataaaagaagtttaagggaaaagagaatgccaactcatgtgttatactggttcaggcacaccctatgcgctacgtacagtctccaagcagcccgcttgagat

SEQ ID NO: 16082 - DNA, 423 bp, Glycine max
tcaagtgatacagacagtgaaatcacttttgatgtgcttgccacatcctatagagaactatgcatcaaaagtgagaagattcttcagcaagaagcacaactgaagaaggtcattgcaaatctggaggctgagaaggaggcacatgaagaggaaatctctgaacttaaaggagaaattggctttctgaattctaaactggaaaatatgacaaagtcaataaagatgctgaataaaggctcagatgtgcttgatgaggtgctacagcttgggaagaatgttggaaaccagagaggacttggatttaatcataagtctgctggcagaacaaccatgacagaatttgttcctgccaaaaacagcactggagccacgatgtcacaacatcggtctcgacatcatggaacgcagcagaaaaggagcaaa

SEQ ID NO: 16083 - DNA, 380 bp, Glycine max
ttcttgcaagatggaagcaaagaaatctatcaatggggggtagaataaccctcattaattcagtcttaacagccttacccatctatttgctgtccttcttcaagatacctaaacatgtggtgcaaaagattgtatctattcaaaggaatttcttatggggaagtcaccaagactccaacaagatcccttggggaggcgccatttgcacatgaatcactcttgaggcaaaaatcaaggatcaaatggctcagggaaggtgacagtaacacatgcttctttcataaatccataaattttagaagacattataatgcaattcaaggaatattcattgaaagtatatgggttcagcaaccaaaattggttaaggaagaagctgt

SEQ ID NO: 16084 - DNA, 388 bp, Glycine max
atgatcgttgtgtgcatgcattcttgtgggatttggtgatagtgattgtgccggagatgtagatgatataataagtactaccggatttgtattttttatgggtgattgtgtctttacatggagttctaagaggcaaggcattgtgacactttctacttgtgaagccaagtatgtagctacaacttcttgcacatgtcatgccagttggctaagaagattgctggaggaaattcagttgttgcacaaggagagcacaaagatctatgttgatcatagatctgcacaagagcttgccaggagtccagtgttgcatgaacgaactaagcatatatatacaaagtatcatttcattgtagagtgcattaccaagacagaagattaattgact

SEQ ID NO: 16085 - DNA, 404 bp, Glycine max
tatactatatcgagacgctcgaatttaattatcttatatctcttgagaaattcaaatggtcgtaactttttacacggatgtccgattcgggcgcataatatgtcgagatgctcgaaattaaacaacgaaagctcttgagaaattcaaatggtcataacttttgacacggatgtcctattcaggcaaatcacatatcgagacgctcaaaattgaacaacggaagctcctgagaaattcaaatgcttataacatatagtgacactcgaaatgtccgattcatgcttataatatatcgatacgctcgaaatataacatgtaaagctctcgcgaaatctaaatggtcataacttttcacacggatgtacgattctgacgcataatatgtcgagaggctcggaattgaa

SEQ ID NO: 16086 - DNA, 407 bp, Glycine max
  unsure (1)..(407): unsure at all n locations
tattagagttttaacacactctttttaacacactctccactgttggtcctcaattaattgagaattataaaatcagaataatgactcatcatatgagtagtgggacctgccaaatttgtgatttttaagaaatttgagccaacaaaaaaaagtgttcaagagaatatgttagagacagtgttgctaccatttctctgtttaggaatggtgtttgtagttattagtgaaaatagaaatagaaaatattttccttatgtcaaacaggcttctgcattactatttttagtttttacaacattatgatagatcattatatattttttctttctctaaaacaaatgatttatttattgtcttgnggtggtgtatataaaaactgatcaacacattntacttttctttttttg

SEQ ID NO: 16087 - DNA, 365 bp, Glycine max
tggacactttcaatatgattgtcctacgttgtattagaaaccattttatgctgagatggaggataaagaggaacaagaggatgagctcttgttaataaccttcatagattgcatacaagggaagaaggatgagtggtttctagactcgggatgcggcaaccacatgagtagtaacaaggagtggttctcagaattggatgagaactttcggcacaatgtaaggcttggtaatgatactcacatatctgtgaaggggaaaggtagtgtttggatggttgtgaatgagattatacatgtaatcacacatgtatattatgttcttgaactcaagaataattcatcgagtatatgactgcttcaagaaa

SEQ ID NO: 16088 - DNA, 354 bp, Glycine max
ttcttctatagaagggtcggtcctaatttctctacaattgcatcacctctcaatgagctggtgaagaagaatgtggcatttacctggggtgaaaaacaagagcaagcctttgcttttctcaaagaaaagcttactaaggcacttgttctagctcttcctgacttttctaaaacttttgagctagaatgcgatacctctagagtgggagttggagctgtattgttacaaggtgggcaccctattgcttattttagtgaaaaacttcatagtgccaccctcaactaccccacctatgataaagagctttatgccttaataagagccctccaaacttgggaatatgaccttgtttcc

SEQ ID NO: 16089 - DNA, 418 bp, Glycine max
tatgctacaaacatttataatagaccccctcagcttataaaccaataacaacagaataattatgatctttcaagcaacagatacaatccagattggaggaatcatccaaatctgagatggacaagtcctccacaacaacaacagcctgtccctcccttacaaaatgttgctggtccaagcaagccatatgttcctcctccaatgcaacagcagcagcagcagtcacaattgttagtgcttagcactactgagtttaaaaaggttggctaagattttgttaaaacataagcacttagacaatgaaggaaagctggagttgctgcacatgatgaccaacgctatgtcaaggaataagatcgggctgcataatgcacaaggcaagataaagtgtcaagtgatgaattgaagttgaacgatc

SEQ ID NO: 16090 - DNA, 408 bp, Glycine max
tgtgcctcttcacgtctgtttatgaatgtagcatatatgatccaaagacccttaggtgctttgctgatggcttcttcccattccaagcttcaattggagtcttgtcttttacagactcaattggacatctgccgagtatgtaaacagcagtgtagactgcttcagcccagaatgtgttaggtagtcccttttacttgagcatcaatctagccgtctgcataactgtgcgattctttctctcggacactccattttgctgaggagaatatgcgactgtacattgtctctcaatgccttcatcctcacagaatctttcatactcgtgagaggtgtactctttggcgcgatcacttcataatacttttatccgttttccactttgattttcaacaaggaccttgaactttt

SEQ ID NO: 16091 - DNA, 364 bp, Glycine max
tttcttcaacatcagaccacttccagggtgctggaactacttcacatggacttgatggggcctatgcaagttgaaagccttggaggaaagaggtatgcctatgttgttgtggatgatttctccagatttacctgggtcaactttatcagagagaaatcagacacctttgaagtattcaaagagttgagtctaagacttcaaagagaaaaagactgtgtcatcaagagaattaggagtgaccatggcagagagtttgaaaacagcaagtttactgaattctgcacatctgaaggcatcactcatgagttctctgcagccattacaccacaacaaaatggcatagttgaaaggaaaaacatgactt

SEQ ID NO: 16092 - DNA, 402 bp, Glycine max
ttccgctcggatgtccgattcatgtgtatcacatattgagacactcgaaattgatcaatggaagctctcgagatattcaaatggtcataacttttaacaaggtggtctgattcaggcgcataaaataacgagacgtttgtaattgaacaacggaagctcgagagaaattcaaatggtcataacttttcacacggaggtccgactcaggcgcgtaatatatcgagatgttcgtaattgaacaacggaagctctcgagaaattcaaatggtcaaaacttttcactcggatgtccaattcaggcacatcacatatctagacgttcgcaatggaacaacggaagctcttgagatattcaaatggtcataactcttcactcgaatgttcgattcaggtgtatcacac

SEQ ID NO: 16093 - DNA, 378 bp, Glycine max
acgttcttaacaaatggcatgcgaagtgggtggaattcctagagcaattcccttatgttatcaaacataaaaaaggaaaaggtaatattgtagccgatgctctttctcggcgtcatgcattactttctatgcttgaaacaaaatcgattggacttgaatgtttgaaaagcatgtatgaaaatgatgaaacttttggagaaattcttaaaaattgtgaaaacttttcagaaaatggtttctttagacatgaaggctttcttttcaaagaaaacaaattgtgtgtgcctaaatgttctactagaaatctgcttatttgagaagcacatgaacgaggtttaatggggcatttttgggtccaaaatactctagatacattac

SEQ ID NO: 16094 - DNA, 379 bp, Glycine max
ggtgcttaagcttcttcaactgcacaaggctcttaatgtttgaagagtatccttgtggaaccttcacccgacgaagacactgacaaaaacttatcttctcctttttggacaaggtatggcaagctaggggcaagtaaattttcttcccattagaccttggatgcaactgtgatcgtatgcccatatcagctagatcttgacaggtattgaagccatccttcatcttgccttgaatgttaaggagagtcccaatcacactatcacaaacatttttctccacatgcataacatcaatacaatgtctaacatcaagatcagatcagtacgagagatcaaagaatatggacctcttcttccatatgcaactcttacttttatc

SEQ ID NO: 16095 - DNA, 425 bp, Glycine max
  unsure (1)..(425): unsure at all n locations
ntgctatctcttctctcctaacatcatggttaatttccattccgattcctcaagttgtgcatacatacttgcaatttgtttgttgctcggcaaagaaaggccaacaaatcataggcacacctgcagatatactttcaagtgtagaattccaaccacaatgggttagaaaggccccaactgatggatgagaaagcactttctcttgaacacaccaacttgttatatatcccctgtccttgatctcatcaaagaactcttgtggcaaagatatagattcacccattactacatctggtctcattatccataagaaatgttgcttgctatttgctagtccccaagcaaattctttcaagtgatgctctgtcatcaccgttatacttccataattaacatatatgactgagttaggttcccatttgtct

SEQ ID NO: 16096 - DNA, 411 bp, Glycine max
aaactcagctctgatgcccccttctctatacccactgtttatatccaatctcaggctcctcaaggtattggtaagagcaactcccccccatccaccctgcacatctgagatccaagcctctttaatcatacaatggtaccctttatgttcaagccaccagtccaccaccctaaaaggcttagggccccaatccaccatctttgtggccaagaagatcgggcaatgatccgaataatctctttgaagaacatgccgagaagcatcatgccacaaggatagccatcgatcagacaccatgaatctgcctagtctgctcttggcactgccattgggcctaaaccaagtgaaattgcctccaaaacatcgtatgtcctggagctccatctcaaatatccagacattgaactccga

SEQ ID NO: 16097 - DNA, 420 bp, Glycine max
tgctcgtcttgctgatatttatcatgcatacttttctgatgatgaccgacgaacaatgagggatcaacttgaaacttatgtgcttcaagagagaagaaatcttctttttccacttgtgaagatgttcaaagtttggctatgaagatggttcaaactgagaaacatttggtatttccattggtttataaacttattgagctagctttgatattgccggcgtcgacaacatccgttgaaagagctctttcagcaatgaagattatcaagtctaaattgcgcaataagatcaacgatgtgtggttcaatgacttgatggtatgtgacaccgagcgggagatattcaagtcgctcgatgatattgatattattcgaacatttaccgcaaagaagtctcggaaaggacacttgcctcgtatttta

SEQ ID NO: 16098 - DNA, 424 bp, Glycine max
tgcaaaatggaagcaaagatatctctctatgggtttaagaataaccctcattaattcagttttaacagcattacccatttacttgctgtctttttttagaatccctaaaaaagtggtgcaaaagatagttactattcagagaaattttctatagggaggtgattttgaggccaacaagatcccttgggtgaaatgggacacaatttgtcttcctaagaacaaaggggggttagggattaaagacttgatcaaatttaatgaggctttgcttggcaagtggggttgggagttggctaataattagaaccaactttgggcaagaattttattgtctaaatatagcggttggaatgaatagctctctggtagaaacagtagtgatttctctcattgatggaaagatctaaagattgtatttcaatac

SEQ ID NO: 16099 - DNA, 375 bp, Glycine max
tgttcttcgagcttatgcaaatggccataatatttgacttgggcatccgattacggcccataacatatcgagaatttcgaaaatgaacacagaatctcctagcgaattcaaaccacctaacttttgacacggatatctgattgccacccataacacatcgagactctcgaaattgaacacagaatctcctggcaaattcaaactgccgagacttttcacacgaatgtatgattgaggtcaaaaatatatctcaacgctcaaaattcgacaaagaagctttggggaaattccaattgtgatgacttttgactcgggcatccgattgaggcttgagatagaatctcctagcaaattcaaatggccataacatttgac

SEQ ID NO: 16100 - DNA, 427 bp, Glycine max
  unsure (1)..(427): unsure at all n locations
ntgagaaaattctaacgacaataactttttacgcttatgttcaattgagccccatagtatatcgagacgctcgtaattgaaaatagatgctcgtagcaaattcaaacgacaataacttttaactcggatgtccgatggagtcctgcaatatattgagacactcaaaattgaaaatagaagctctgagaaaattcaaacgacaataactttttactcgaatgtctgattgtgtcccgtagtatatcgagacgcttgaaattcagatcagaagttctgagcaaaatcaaacgacaataacttttaactcgaatgtccgattgagtcccgtaatatttctagtctcacgaaattgaaaacagaagctctgagcatattcaaatgacaataactttttaatcgtatgccgattgtgtcccgtagtatattg

SEQ ID NO: 16101 - DNA, 377 bp, Glycine max
ttgcatgcatttttattgacactattgataagtctcccatggaagcacctgatctgagtgatgctgaagcaaccaaggtttttcaaaagtacctagatgagtgccttactgctaagtgcattatcttggcatcaatgagttcaaaactccagaggcaacatcaagacatggacccatatgagatcgtcgaacatcttaagaagatgtacgatggtcaaagcaggacggctagattccagttatctaaggctctgtttagatcctcacttgctgcaaatgaaaaggttggaccccatgttcttaagatgattgatctcatagaacaacttgagaagttgggtgcactcttgggaaagagctttctcaagatttgatta

SEQ ID NO: 16102 - DNA, 352 bp, Glycine max
  unsure (1)..(352): unsure at all n locations
ttgcatgcattcttntggtgggacatgttgacttgctttccaatctgacattcgccacagatcctgccttcttctattttaagatcgggaatgcctctaacagcacctttgtcaatgattttcttcatgcctcttaagtagcacatgtccaaatctttgatgccatattctgactttatcttctatggacgatagacatgttgaggagtagctggtttcttgaggagtccataggcagcagatgtccttggacctgctgcccttgattagagcttcactcttctgcttcgttaccaagcattctgactttgagaagcttacattgaatccttcatgacactactgactgatg

SEQ ID NO: 16103 - DNA, 367 bp, Glycine max
ttgtcttcttgcaagatggaagcaaagaaatctatcaatggggggtagaataaccctcattaattcagtcttaacagccttacccatctatttgctgtccttcttcaagatacctaaacatgtggtgcaaaagattgtatctattcaaaggaatttcttatggggaagtcaccaagactccaacaagatcccttggggaggcgccatttgcacatgaatcactcttgaggcaaaaatcaaggatcaaatggctcatggaaggtgacagtaacacatgcttctttcataaatccataaattttagaagacattataatgcagtctaaggaatattcattgaaagtatatgggttcagcaaccaaaatt

SEQ ID NO: 16104 - DNA, 422 bp, Glycine max
  unsure (1)..(422): unsure at all n locations
tagacaacttanagaaaccaatttggaaagcatattgagcccaacattttacactcaagatatatctatgaaatttatttggatgaatatttgggttgaatagttaactgagcccattgcatttattatgtccgaatatattcaaaggatattgaagatatcatatgtttaacatttattattaagatttagagtttagagtttatatcattatgatatgtttttatcttgtctttggatttgtttcatttattagaactcttattttgttaagatttgttttctcttttaggatcaaaatcttattttatcatatctttagttcatataagattattgttttatcttatctttaggttagacactattaaaatttgttttccgtcacttgttntgtatttccctataaataggaagccatg

SEQ ID NO: 16105 - DNA, 379 bp, Glycine max
ttcttgccattacaccacttgaccattcaactaggctgcatcaagatgaagggaaaccatatgaagatgtagcatcctacagaagattgattgggaaacttctgtacttgaacaacactaggcctgacatcacatttgccactcaacaacttagtcaattcttaagtaaacctagtatgacacactacaatgctgcctgtagggttgttaagtacctcaaaggcagtcctggccgaggcctgttcttcccaagaaagccagaaatccagctactaggattttctgatgttgattggggtggttgcttagattcaaggaggtccatttcaggatattgcttcttcttgggagcatctttgatctcttggagagctaagaa

SEQ ID NO: 16106 - DNA, 351 bp, Glycine max
tgtttttatagaaggatcgttcctaatttctctacaattgcatcacctctcaatgagctggtgaagaaaaatgtggcatttacctggggtgaaaaacaagagcaagcctttgctttgctcaaagaaaagcttactaaggcacctgttctagctcttcctgacttttgtaaaacttttgagctagaatgtgatgcctctggagtgggagttggagctgtattgctacaaggtgggcaccctattgcttattttagtgaaaaacttcatagtgccaccctcaactaccccacctatgataaagagctttatgccttaataagagcccttcaaacttgtgaacattaccttgtt

SEQ ID NO: 16107 - DNA, 386 bp, Glycine max
aagtctgctcgcatgctttctttcttcaagcttgttcagacacaattttccaaaagcattaaggctatgcggtctgataatgctaaagaattagctttgactgagtttttgcataatgcaggagtagttcaccagttttcttgcccacacagacctcaacaaaattcagtaatagagaggcgccatcaacacctattgaatgtagcacgtgctttaatgtttcaagctcagatgccaatttattttttgggagagtgtgtatccacgacagcttacatcgtcaacagaacatcaagctcaaatttgcagaaccaatcaccatatgagttgctatatggtaaagtaccagcctatgatttgataaaggtgtttgggtgcttgtgcta

SEQ ID NO: 16108 - DNA, 378 bp, Glycine max
agcttcaagaataatgacatcatccaattatttatttcccgaagggaattctataaataggcctcctatttttaatggcgtgggttaccattattggaaaacccgcatgcaaatttttatagaggtaatagatctgaatatctgggaagcaatagaaattgggccctacattcccactatggtggcaggaaatacaaccatagaaaaacctagggaagaatcgagtgaggaagaaaagagattagttcattacaatttaaaagccaaaaatataattacatctgctttaggaatggatgagtactttagggtatcaaattgtaaaagtgcaaaagatatgtgggataccctacaattaacacatgaaggtacaacaga

SEQ ID NO: 16109 - DNA, 420 bp, Glycine max
  unsure (1)..(420): unsure at all n locations
tatgctctttnggaggcaataaacattttattgttatttattgttatactttaataagattatatcaaatggacataaaaagtgcattccacaatggactaatataagaggaagtctatgtagaacaaccccctgggtttgagagtaacactttccacaacatgtttttaaactcattaaagctttgtatgggctaaagaaaactccttgagctttgtatgaataccttagttcattccttttgataaatggttttgaaagaggaaaagtggatatagctctattctgcaaaaactatgactcctaatttatattagtacaaatctatatggatgtcatcatacttggtgctactaatgaacctctatgtgaggatttctctaagttaatgtacgttgaatatgaaatgagcatgatggg

SEQ ID NO: 16110 - DNA, 367 bp, Glycine max
gaggaaattcaaacgacaataccgtttttatttttgtcggattgagtcacgcaatatcgggagacgctggaaattgaagaccgaagctctgagcaaattctaacgacaataactttgtactctgatgtccgattgagtcacggaatatgtcgagacgctagaattgggataccgaagctctgagcatattcatacgacaatgcctaatgactcggatgtgggattgagtcacgtaatatctcgagacgctcgaaattgaataccgaggctatgagcgaattcaaacgacgaataactttttactcaggtgtgcgattgagtcccataatatgacgagaccctcggaattgaataccgaagctatgag

SEQ ID NO: 16111 - DNA, 334 bp, Glycine max
ccccaatttaatggatttttaaggtttgagaagtgaaattgagaatgaggtaaatttggagcaaactctcaccgcttacaaaaattccgggtagaaatttccaggatgtcacacaaacaaacatcaaaagaggatccatatacagtgaaatcatccataaacacctcgatgcaattttctaaaaaatcactaaaaatactaatcatgcaccactagaagataccaggggcattgcacatgccgaaaggcatcctcctgtaagcaaaagtgccaaagggacatgtgaatatggtcttttcttgatccttatgaacaatagtgatttgcatataac

SEQ ID NO: 16112 - DNA, 366 bp, Glycine max
tgcttaacattaggcatgtgaagcgggcggaattcctagaggaactcccttatgttatcagacataaatagggaaaaggaaatgttgtagccgatgctctctctcggagtcatgcattactttctatgctcgaaacataatagagcgcccatgaatgttagcaccgcatgtctgaacatgatgaggcttttggagaaatttttaaagcttgagataaggcatcagaaaatggctactttagacatgaatgcttactttccaaagaaaacacatggtggatgcctaaatgtgctacaagaaaatggcacggctgtgaagcacatgaatgagggttaatgcggcatttggtggtacataagagtctaa

SEQ ID NO: 16113 - DNA, 331 bp, Glycine max
tactaaggcacctattctagctgttcctgacgtttctaatcttctgagctagaatgtgacgcctatggagtgagacctaaagctgtattgaataccaagtgggcactctattgcttattttagtgaaaaacttcacggtgccacactcatctaccccacctatgataaaaagctttatgccttaacacgagccatgcctacttgggagcatcaccttgattcccacgaatctgtcattcatagcgatcatgaatcacttatgcacattcgacggcaacagcaagttaagccaaaagcatgctagatggctacagccctatagcacttccat

SEQ ID NO: 16114 - DNA, 428 bp, Glycine max
tgtatattgtcttattcaaaacaggaccactttcatattcttcccttgcattggcataatgttcaattactgtcaaggcttttggagcatctataacttgttcaactatattttgtgcaacatttcggttgataagctgcatcaaatctctctttttcctctgtattctttcagcacgaaagtattttttggttttcaattgcttggcaactttagtttgtatctctcctttgacaatcttcttccgtatcgcatccagagaagcccccttctcaagctcttctaacaattcttttcttgcttcctcaaattccatctaattcaattaagcagtgagtgccaaaaagtattgttagagaaaatgaaatatgattgacaatctaagtaattaatatttaatactcagcagaaaaaagaagaaatcagaa

SEQ ID NO: 16115 - DNA, 367 bp, Glycine max
ttcttatagattgtccaatccataagtggttcaaataattgtttttttatttttttttcaaaaatgttgtacaaattaatttaaaattaatgacccatacaagaatcaaaccttcgagatttgtgttattagcacaacactctaaccaactaaactaataaatgaattatattatacaataattaatgtcactatatgtaatactaaaatttttaatatttaatgcgcatgaaaatttagataataaattttgcaacaattaattttgatctaacaattaatttgtttacacatgttcgtagaaaaacaaccactagaccacatgtcattcacatattggataattgaacactgcagaagttgagtg

SEQ ID NO: 16116 - DNA, 397 bp, Glycine max
  unsure (1)..(397): unsure at all n locations
tgttcttcactcatcttctccttgaagtggcatcttcaatcacctttcctccttctctattctactatcattgatcttcaagaagaaaaggactccattgatgaagaagtttcaaggcgtacaagctccacatggggctacatcagacagcgtcgactgcgtcacgtcaccagaaaccaccaagtcctcggcagcatccaggtggaacctcccattcgtcggcgagaacgagtgtgctagcatccccaagctcccgtcgaacggctccccctggctgtggtcaccactgaagaacccgatcctaatgtcggtgcttgtttataaataagtgcaacaagtttttctttcattgtgnctctcttgtgtgccttttccatctgcaacaaagcttgttcta

SEQ ID NO: 16117 - DNA, 232 bp, Glycine max
cttgtctatacagtgcactgaatgaacaggcgaatacaaggccatacagaatctgaggaattgataccgctcacggttccccgacgcgtactacccgcaaacatggagtgtcactcctgaggtgcccattgaatgaacttactttcattgattgcgttgagcttactgaccgctctccagtcgtaactgctgacaggcccacttgcttattgagaactgcaacccgaacccg

SEQ ID NO: 16118 - DNA, 408 bp, Glycine max
  unsure (1)..(408): unsure at all n locations
ttcatgacttgcaatctttctatataatggtgatctatacgaaaatgccacaaatctatagggatgacattacattntggatgggtaatggcggagcatatggttcttgaatgtgatggtttcaaggtaagctgataaagcccatgactcacttcaactgtaccaatcttcactttggtgttgatatcctgcaaaacacaagtattagaggagaagattaactcggagctgtttgcggaaatgagtttggatatggatatgagattaaagctaaaagaaggtatgtatagaacatctttcaatgtaattgaagaggtgagatggacggttcccgagtgggtggcatgaacttcgtgtccatttggtaacttaactagaatgggtttaatttggtgatatgaatcaaaa

SEQ ID NO: 16119 - DNA, 413 bp, Glycine max
tcagtggcttagtgaagatgaaaaggtaaaagtgactcaacaggttgaggtgagtctcaccattgggagatataatgatagggtgttgtgtgatatggtcccaatggaagcgacccatgtgctgttaggaagaccgtggcagtatgataccaaggcagtgcatgatggcttcaccaacaaaatctctttcaagcaagatgacaacaaaattgttctcaaaccgttatctccgagagaggtttgtgtggatcagataaaaatgagagaaaagaaaaggagtgagacacttgagaggaaaaagagtgaaacacttgagaaggaaaagaggggaaagaaaaagagtgaaacacttgacagggaaaagagagaaaacatatagagtgaaacactcgagagggaaaagagagaaaaca

SEQ ID NO: 16120 - DNA, 379 bp, Glycine max
taaaggaagtgaaagaattagcatgggcagaaatgtcttcgcattgattggtaaatttgatccccaaatcccttataaatgtaaagatccaggtacattcaacataccttgtattatagggaacaaggagtttgacaatgccatgctagatttaggagcttctattagtgttatgcctttgtctatttttaattctctatctcttggtcctttgtagtcaactaatgtggtgattcatttagctaatagaagtgttgcctatcctgctggtttcatagaggatgtcttagttagagttggtgaactaattttccctggtgattcttatatttagaatatggaggaaggattttctcatggatcacttcccatcattcta

SEQ ID NO: 16121 - DNA, 416 bp, Glycine max
tatgattccatttcctgggaattcttggattggatgtttaagtccattggcttccccagcccagttctgtacttggatcatggagtgtgtttcttccacttcctttagtgtggcagtcaatggatccatttatggtcacttcaaaggacagcggggtcttagacaagaggatcctctctccccttatctgtttgtgctctgtttggagtacttttccagagatatgagcagcctcaaggatgatgccaattttaaatttcatcccaactatgcaggtattcagctatctcatttggcttttgcagatgatattatgcttctatctagatgagatatccattctgtgttaactatgtttgccaagcttcagcacttctgtagggtttcagggctttccatcagctctgataaatctg

SEQ ID NO: 16122 - DNA, 413 bp, Glycine max
taataagaggcatgctaagtgggtagagtttttatagcaatttccatatgtcatcaaacatacaaaggggaaagggaatgtagtggctgatgcactgtctatgagacatgctttacttgctatgcttgaaactaaactgtttggactcgagtctttgaaagacatgtatgtgcatgatgtggactttgctgatatttttgctgcatgtgaaaagttttctgaatatggttactatatgcataatggattcttgttaaagcaaataaattgagtgtgcctaagtgttccattatagagttgcttgtgagtgaatcacatgagggggggttgatgggacactttggggttcaaaagaccctggaaattctgcatgagcattttctttggcctcatatgaggcgtgatgtgcataa

SEQ ID NO: 16123 - DNA, 412 bp, Glycine max
tttctcagtcgtctgtaaggatgattgggtgtcataaagcggcgatgcctactgtagactgtttttctgtcatgtttaagttgtatgtaacttgtattttcttcacagatggggcatgcatgatgacccttaacactgtaaccgttgagattcccatatgctggaaagtcattaatggtacaaaaaagcattgcacgcatttcaaaggtctccttgcgaaacgcatcaaacactactaccccctcgtcccacaactttctcagatcttcaaccaacggacttagataaacatcaatgtcatttcttggctgtcttgagcccgatatcatcatagacaacatcatgtattatcgcttcatgccaatcaaggaggcaaattgtaaattactatcagaactggccatgaactgtg

SEQ ID NO: 16124 - DNA, 412 bp, Glycine max
tgctttatttaggtgggggcatgcaatcagtttaatatgttgctggggatggatatccagcctttttactgaaatagatattatagagaagcatatcaacaaaaagaactgaaaaaaaattaaaattgttgattttcatgtattttcctttttgttgtttatctatttcacctgtcccccttaaaatatattttcttaatatatcttactgtttccacttttgatttttgtgaccctcatttgaaccactttgttgttctttacaggacaaaattgaattaagggaaggatcttggtttgaaccattaaaagatatggaaggaaagctagtgggtcttggtagtaacccaccttatataccaagtaaagacatctctggtctacaagctgaagttggtaggcatgaacctag

SEQ ID NO: 16125 - DNA, 390 bp, Glycine max
tcttcttaaacaaggttccagtgtaatattgatgtgctataatgatctataaatagctaatactaattaataagcatagtttaataaactatattgtccttgaaatatttctttattaaattataagataattattataaaaacaaataattttacaagatatagggacttataattgtatgatcatataataacctgtacactccaatatttctattggttagtcttaaaaagataaaaccaaatttacaatgaatttatattttcaaaattaaaatcatgaaataaaagtttatctgatgaataaacaactagttgactttacacaaatataacgatggcatattaataattgtttaaatctctattagcacaaactttttgttttaa

SEQ ID NO: 16126 - DNA, 413 bp, Glycine max
  unsure (1)..(413): unsure at all n locations
ttgcctanaacaaatggttaccagaagataattttgaaaaaaaatcttttagaagggttttgaaatttgaattttaaagctgtaattgattaccattgatgtgtaatcgattaccaacaacgaaactcttgaaattcaatttgaaaagtcatgatccttcaaaatataattgtgtaatcgattaccagaaacctataatcaattactagtgaagaatttcagaataagctttttgaaaagacacatctcttcaaaccattttgaaaaggcacgaagggcctatatatatgtgtgtctgacttcaaaaagtaagagagagatattctaagagaacttcattgccaaattctctctcaacaactcttgggcaaacacttgtaaatctattgagacttcatccaggaatttcaaat

SEQ ID NO: 16127 - DNA, 373 bp, Glycine max
  unsure (1)..(373): unsure at all n locations
nttatgctagcttatttaattagtgttgagtaactttagtcttcaaaacagctgaacgatgtataatgacagaactcgacacatttataagatactttatcataaatctaaattttattttgtgaataaacacatatctcgaggtgttataatcatagtatttaaatgaattttaaactcttataatttttgatctaaattgtaattttggtcctaccttgttacccaaatacatgattctggtccatatatatttttgatgtgacatatggtccacatagatatataaattggcgattttggtccacttagaacatgataactaatgacttcaaataataaagttattatatgattctataattaattaaac

SEQ ID NO: 16128 - DNA, 415 bp, Glycine max
cttcactcggagatctgattcaggcgcataatatatcgagacgcttgaaaatgaacaacgaaagctctcgagaaattccaatgctcattatctttaactcggaggtctgatttaggcgcataatatatcaagacgctcgaaattgaacaacggaagctctctagaaattgaaatggtcataacttttcactccgaggttcgattcaagtgcatgatatatccagacgctcgaaattgaacaatagaagctctcgagaaattcaaatggtcataacctttaactcggaggtccgatttatgcgcataatatatcgagacgctcgaaatttaacaatggaagctcttgtgcaattccaatggacataacttttatctcggaggtccgattcgagtgaataatatatcgagacgatcg

SEQ ID NO: 16129 - DNA, 415 bp, Glycine max
  unsure (1)..(415): unsure at all n locations
ctcccagtttttaagttcttcctcaaaactgccctactcttatttcccaaagncctattaacaacattgcgtttgcccatcggtttgagggtgacaagaggatgaaaataacaatttagtgcccaacttgctccacaaagtcctccaaaaatggcttatgaacttagagtccctatcactaacaatgctacttggcaaaccatggagtctcacaatctccttgaaaaacaaatcaaccacatgggaagcatcaatcaactgtcttacatggaataaaatgagccattttagaaaacctatcaacaaccacagaaatggaaattctaccattgcttgtttttgacagccccaaaacaaaattcatggataaatcactccaaggaatactacggaattgacaatggagtatacaatt

SEQ ID NO: 16130 - DNA, 350 bp, Glycine max
gagcaagactacttcagactgatcaaagttatttattttatgaaaacctatcataacaactagaatgtattgcttgccatcaaccatgacattattacaaagactatcctatctagaccaatatgcttactaaagaagcataactgataaaaagctgtatgatgaacctcatccccatagtgatgtaatctccattggagcttgtatgcctaggatcctcttcattaatggattcctttgcttcttggaagatgaatggcagtggaatggataaggaagagagagaggagatgccacttcagggagaatatgagactagaagaagctcaccaccataggatgccatggat

SEQ ID NO: 16131 - DNA, 404 bp, Glycine max
tcttatccaaggcacattcttggtggtgaaacttcttcttccatggcttattcccttgtggatggtgcctcccctctactcttctcctttgccttccgctgcatctccatggtggaaaatcaccattgaagctcaaagatccagcctccatagaagcttcacatgcaagcttccatcagagatagtgcaactcgatgtcaaaacaacctttctccatggaagattggaggaagacattatgatgcaacaacctgaaggttttgaaatggtagggaagaaaaattatgtatgtacgttgaaaaggtttatatatgggttgaaacaatctccaacgaagtggtaccagagagtcgatgagttcatattactcatgggtcaacaaaagtgccaatgatcatgtatca

SEQ ID NO: 16132 - DNA, 418 bp, Glycine max
tctaagcctattacagtagtgtacaaccgaatactttcttcaaataaaagaaagaaggataaagggaaggtagtggttgttcctttaaaaattaccttttagtggagtatttataatgtatatgatcttacatggtatttatttgctctagtgagtgtagacagaacatagagttagttgagcaattaagttcaccacctccaaactccagagttttgtattttccatctcattttccacaaaatggttgggaacagtttaaagcatgcttgtggaaacaacatttgttctattggagaattccttcatacaacttgatgcgcatcatatttgtgcgtgtctcatctcttttgtttgggatattgttttggaagcaaggatagacaatgttagtgatcataattttattctacttatg

SEQ ID NO: 16133 - DNA, 416 bp, Glycine max
  unsure (1)..(416): unsure at all n locations
nttaataatggtgatgtcttatttatttgtatttatgtggatgaccttatctttatcggcaataacccaaatttgtttaaagacttcaaggagtccatgtctcgtgaatttgagatgacagatatgggactcatgtcatattacttaggaagggaagtgaagcaaatggaaaatggtatctttgtctcacaagaaagctacacaaaagaagtgttgaagaaatttaatatgcttgattgcaatcccgtgaacacacctatggaaggtggcttgaagttatcaaagtttgatgaaggagagaaggtagaccccacggtcttcaagagtcttgtggggagtttgaggtatctaaccaatacaaggcccgatattctatatgcggtgggagttgtgtgtcgctttatggaggctcctac

SEQ ID NO: 16134 - DNA, 417 bp, Glycine max
tgtatcatctactaactacaaattgattttttcatcaaatatttgtattctacaggataccaataccaaggtgaggattggtacaattgaagtgaatcgcggcctctatcaattcacccccgaagcaccaaaaacacataccatatgttctatcattacacacccaaagtgtctaatcctccctgtaaatctatggcattttcgtatgggtcacccctttcccgaaagattacaagccatgcaaacatactatcctttcttaaataataacaagagtttcatttgtaatacttgccattatgccaaacataagaaattaccttttcattctagcacatctcatgcattaaatcaattcgagcttttacatgttgatatttgggggtcgtgctccaaaacatccatgcatgggcaccg

SEQ ID NO: 16135 - DNA, 405 bp, Glycine max
  unsure (1)..(405): unsure at all n locations
tgcgcatgctctcatcagtggccagcctgtagaaccaggtccacaaccccctgacctccttgataagcaaataagcttattaacaccagttgtgatggatgcaacccctattggtgtaaagtttggggattgtagctctgatgttcccaagaactcgacctttaagagagctgacatggtgtctgttactttctggtctgcgtgccctcgtaatgaccttatgactgaaggtacattttccctggtggaatttctccaaggaaaggatatgtgggttcctgcttatgatgatgatgatttctgcctgcgcttcaagtggtcaagacctttcanactcagttctcatagtaaagctaccatagaatggagaatcccaaaggatgttactcctggtgtatacagaat

SEQ ID NO: 16136 - DNA, 408 bp, Glycine max
  unsure (1)..(408): unsure at all n locations
ntaactgaatttgcaacattccaaatgatttttaattggtgtaatcgattacaatatattggtaatcgattaccagtgcatctgaacgttgaaattcaaattcaagtgtgaagagtcacatcttttcataaaatgctttgtgtaatcgattacatggttatggtaatcgattaccagtgacaagttctgaataaaaagtcaagagatgtaactcttccaatggttttctcaagattttctcaaggttataactcttcaaatggttttcttaaccagacatgaagagtctataaaagcaagaccttgacttgcattcaaataacttttacaacttttgagaaatcttgaaacctttccttctcatctttcttcttcttcctttgccagaaagctttctatgttttctgt

SEQ ID NO: 16137 - DNA, 400 bp, Glycine max
ttgccaagagactattaactactctgtattgatcattggtgattatgtcgaagctattacccctaagagaggactaagacagggtgacctactgtcaccttacctgttcattctacgccccgagggtctatctaattaaaaccctaacaaagacaacaataagagaaggaactcatggtattaaggtttgtagaaggactccaatcctcccacacctcttatttgctaatgattttttattttttttataggagtctattattcttatggaggttcttacttctttatggcaaaatctctggtcaaatgattaattatcaaaagtctgagattttcttcatcgacaacactgaacacacaattagacaccacgtagcatctgtacttggtgttaacaaac

SEQ ID NO: 16138 - DNA, 427 bp, Glycine max
tggttcaactgagtagccatctgccccatctaatttgtcaaactcttaatggaggctcttgtctcttgctgaaattgcatattctggatggtcatttgcctcactaactcctctaaggaaggttgagaaggggcctgacttgcttgttgtctttgtcgctattgctgcattggaggaggaacatatggcctgcttagactagcaacattctagaaatgagggacaaattgttgttgctgctgttgttgttgtggaggatttgcccatctcagatttggatgattcctccaacctggattgtatttgttgcttgaaagattataattattctgctgttgctggtttttttgttgagggggtctattataaatgtttgcagcataggcttcaggttgctcattgactccaggttgctgcaaagaaagat

SEQ ID NO: 16139 - DNA, 419 bp, Glycine max
tatagaatatataatataagaacactgacaatataatagtctatacatgtttcctttgatgagtctaatgccattcttccaaggaaggattttttagatgatatttcagattccgtagaagatacacatattcatggaaatgattctaaagaaaaagatgaaggaagcaatgaggattctcaagataatggggctagaggaaataatgaacttccaagagaatggaaagcctcaagagatcatcccctcgacaacattattggtgatatatcaaaaggggtaacaactagacattctcttacagatttatgcaataatatggcttttgtatctatgattgaacctaaaaatataaaagaagccataggagatgataactggatcattgccatgcaagaagaactgaatcaatttgaaag

SEQ ID NO: 16140 - DNA, 387 bp, Glycine max
tgcttagtaaagctaggcactaacaatctccccctttggcaaattttgtctaaaacatacttagacacttcctgagcaggtacgagcagttatgcatgtgggatcagcaactttcattatcagagtaatcaagcacagcggaaattctgcaagttgcaagtcgtttccaggatgtcaagacatctcacatgacatcagctttctgcttctgctccccctgtctccatgctcttactgcagcatcttctatcagctactagtcttttccaggatgtcaagacatctcatgtgacatcagctttcccttgtctccatgctcttactgcagcatcttctatcagctactattagcttacatcagtcatcatcagcagcagcagtcttccc

SEQ ID NO: 16141 - DNA, 395 bp, Glycine max
agcttgatggcgtgtaactcaccattttccataatataacactttatgtctactatcattgttattatttctttcttcgtcattgagggaaacacttgggttgccagatccctccacctttgggtgtattctttgaaagatctgtgccccctttttgcacatgttctgtagttgcatcctatccgaagccattatactgacactgcctaacgaaggcaaccattaggtccttccaagaatagactcgggaaggttccaagttagtgtaccaggtaacagctaccccagtaagactttcttggaaggaatgtatcagcaattcctcatcttttgcgtatgcccccatcttccgacaatgcatctttagatggttcttggggcaagtattccccttg

SEQ ID NO: 16142 - DNA, 428 bp, Glycine max
  unsure (1)..(428): unsure at all n locations
ntgctcctaattcctaaaaaattccctctgcctagcatgatgtacggtacaggtaatgcacctctgattattgtagtggtgaacgaggtttatttagttgttaatcattccatgaacccttttccttacatcctctttgtagttgcagaggttcaatatctaagccaggaaaaaaaacttattagtcatctaaaatcttcacaaatgtaacctaatggtgccaaatagccacatgtttacctgctcaggagcacctttgctagatcgatgccaatttccatcagaatcaatgtaagttagaggagtcctcttgtccacaagattgaatggaagaaagtggacctccctaataccagctcgtgcctgatcagttcataggaaaagtgaatttatttatcaccattcatcccacatcataaaagataatc

SEQ ID NO: 16143 - DNA, 378 bp, Glycine max
agcttgttgagcttggaagactctctgcatcaatgaagaagttagagaaagatctcaagaacaagaataaatacgatgtatgttatccattcttgtggataaattcttcaaactttctgttatgggtttctttggactgtgattgccttacttttgtatgtgtattggttacctatatatggctgcaggatgagcaataccgcgccaaactaaacaagtcaaatgagaggactctatcacttatcaaagcatgaattgatactgtggtagcagtaagactgcttcaatcggcacccaagacagctactcctcgcgtaactggggcttttggatttgattcgtctctaatatcttgctatcaggtacctgctagtataa

SEQ ID NO: 16144 - DNA, 387 bp, Glycine max
  unsure (1)..(387): unsure at all n locations
ttgcttattaagtccgtctatggattgaaacaagcctcccgccagtggtatataaaatttcatgaggtcatttcttcattcagctttgaagagaatgccatgtatcactgtatataccagaaggtcagtgagagtaggatttgtttccttgtattatacgtagatcatattttgcttgcgactaatgataagggtatgctatatgaggtgaatcaatttctctcaaagaactttgatatgaaggatatgggagaggcatcttatgtcatangcataaagatccatagagaaagatctcgaggcattttaggcttgtcccaagaaacctatatcaacaaagctttagagagaattaacatgaaagattgttcaccaagtgtagctccc

SEQ ID NO: 16145 - DNA, 421 bp, Glycine max
  unsure (1)..(421): unsure at all n locations
ntaagagcaattcccttcttcttcttatcagtttcttttgttgatttagtctttgcaactccatctcatgttcctgtaattttcaaaataaagtagcaagagacataatagacaaatctctagattctataatggttgttacttttggttgcctcattttgaaaagttcttcctaatgaagcaagatggttaactatatgtgtgaatcttttctgcatatcttgtatactttcatttgtcttcatcctaaataattcatactcatgagttagagtatttatcctagatcttttgacatcagttgttccctcatgtgtaacttgtagagtgtcccacatatccttagcactcttacaatttgacaccctanaatattcatccattcctagggcagaagtaatgatattnttagcctttaaat

SEQ ID NO: 16146 - DNA, 416 bp, Glycine max
  unsure (1)..(416): unsure at all n locations
tggcattcccattggtggaaggaccttagttttctttataatcagtctgatttccacagtatccagtagaatatggtatggaaggttggttgtggggacaaaatcaaattttggcaagattcttgactgagtgagggctgtaagcatttcaaaaaaagattcttggcaatatggaaggaaggttagtttattaataatattcaaagaaagattctcagagtagaacccgtgcagaccaaccctggatgggattcagttttcttctcttggccaagggcagaaggaaagccttgctgctagattctctgaagtggaaattaagtctgcagtttgggcttgtagtggagataaaagccctggcccgtatggtttgaacttcaactttatcaagtagttntgggaaattctaaaacctg

SEQ ID NO: 16147 - DNA, 390 bp, Glycine max
agcttgtatggttaaagtctcacgattgtcacgtgctcatgcaacaattgttagccatggctatgcgagacatcttgccaaacaaagtcaggttaacgataactcgcctgtgctttttcttccatgctatatgtagcaaagtcattgatccagtaatgtttgatgagttggaaaatgaggccacaattatactgtgcctgttggagatgtattttccccctgctttctttgacatcatgattcacttgattgtgcatctggtcagagaaatcaaatgttgtggtcctgtttatctacggtggatgtacccggttgagcgatacatgaagatcttaaaagggtatacaaagaatctatatcgtacagaagcatctattattgagaggtaca

SEQ ID NO: 16148 - DNA, 427 bp, Glycine max
  unsure (1)..(427): unsure at all n locations
tgtaatcgattacatatatactgtaatcgattaccttagttgattttcagaaaatactctcaacagtcacatgtttttacttggttcttgaatggccatcaaaggcttatatatatgtgacttgagacacgaatttgctaagagtttttcagaacaaaaaggtcttatcctcttaaaaagcaaaatcgttttatcctcttacaaattccttggccaaaacacttgtgattcaataaggatttatttgagtgctcaaattgttcaatctatctctttcaagagagattacttcttttcttcttctttattctgaaaaaggattaagagaccgagggtctcttgttgtaaagaaatctgaacacaaaggaagggttgtccttgtgtagttcagatcttgtaataggctnttacaagatagtggaactct

SEQ ID NO: 16149 - DNA, 385 bp, Glycine max
ttgcttctaaactttatacaagaatgaagctctgataccacttgttagacaagtggcctcaaatatcttaagaagggggggggggttgaattcagatattccaaactacttccccaattaaaaatctattacactttttaatcaagttatgaattcccttaatgataatcttcttaaatattaattcaaataaaacaatttgaatatgaatataaaacaataatatataaaggacgattaatggaagcgagaatgcaaactcggttttatactggttcggccacacccttgtgcctacgtccagtccccaagcaacccgcttgagagttccactatcttgtacattgcttttacaagttctaaacacacaatgacaatccttcca

SEQ ID NO: 16150 - DNA, 411 bp, Glycine max
  unsure (1)..(411): unsure at all n locations
ntnttttctctattttttgtgagctacttagttgatattgttttgttgattcactatcacatgaattatgaagccaggaacattctatgccttgccacaaagtcctcagctatttaagcaaatgctaatggtagctggttttgacaaatattatcagattgcaaggtaatattttcgtcttatgtttgagtctttatttgtagcttggcttcttttacgagaatatgttattgtcccctatgtagtgctttttcctttttctcttttaagttttttccctatattaatatgcattttgtttaagtgactttcataaactaagaatatagaatgcttgtttttgtaagctatactaaacttaaaattgaaacaattatgatgcaagtgacttttctttttggataaaatgca

SEQ ID NO: 16151 - DNA, 386 bp, Glycine max
tagctttggagtttccaagtgccaattcgtcctcttctttagtccagtcttcttctggcttcaattcatcagtgggctttccttctgtgtccagcatcttgggatgttcccagcctttgatgacagctttccaggttctgctatccagtgatttgaggaaggccaccattattgctttccagtattcatagttgcttccatcaagaattggtggtctgttcactggtcctccttctttctccatgttcatcagaatttatctccccagatctcactctgtgatttcgagtgttggctctgataccaattgaaattctgataccaggggacagatgtcgtacaggatgtcacgacatcacgcttcagaacatgcagattgtatgtgt

SEQ ID NO: 16152 - DNA, 391 bp, Glycine max
  unsure (1)..(391): unsure at all n locations
agctttttcctcgttggaaggcaacgacaaagggatctcagatagtttcaggcaagcttgccaagcggttctatggacccttccaagtcatagaatgcattgggctcgttgcatataagttacaattgccataggaagttaaaatacaccccgtattccactattccaagctgaagtctttttgcggttcaccagaaaatatggcgggaattgcctggcacaaggagttactcaacgaccaacccctcgtgtttccattaggtatcttggattaccgtagagcatccaccgaggatccctgngaggtgctagtgcaatggaatggtctctcacctgatgatacctagtgggaggattggaatcagctgtgtgaaaactaccaccttgagga

SEQ ID NO: 16153 - DNA, 417 bp, Glycine max
tgatgagaaataaatgttttgcttggtacaacatctatgttatttaatgagatcattacattatttgtgtcttaataggaagtgaaggacatacattagaggaagccaaatctatcaatctatccttgagtgcattggggaagtgtattaacgcacttgcagagaatagtgcacatgtgccatttcgtgactcagcttactagattgctacgtgattcatttggaggtaagattcagtgagtataataattcatattttgtctttgttcatttatacaaagcagtaagatttggcaaaatactcttcctaactttcaggacgtgagacagatgaagtcgagcccataccggatgctctgcctaatctggaacagtaagctgcctaatgtgtctttgatgcattttagaagtctaatc

SEQ ID NO: 16154 - DNA, 397 bp, Glycine max
agcttcatgaaaaagatggcctcagcaaattccttatttccagaaggaaattctatcaacagacctccaatctttaatggagagggttaccactactggaaaacccgaatgcaaatttttatcgaggcaatagatctaaatatctgggaagccatagaaatagggccttatatacccaccacagtagaaagagtttcaatagatggtagttcatcaagtgaaagcataaccatagaaaaacctagagatagatggtctgaagaggatagaaaacgagtacaatacaacctaaaagccaaaaacataataacatctgccctaggaatgggtgaatatttcagagtttcaaattgtaagagtgctaaggaaatgtgggacactcttcgattaacacatg

SEQ ID NO: 16155 - DNA, 426 bp, Glycine max
tgtgggatggctttgaagattgatatcaataaggcctttgatagggttgattggaattatttgttggttgttatgatcaagatgtggtttcatcagaaatgggtggattcgatgaaactttgccttgggtctacgcaattctcagtaatggttaatgaggattctttgggacctatttctcctaggagagggctaaggcagggtgaccaattgtcaccttacctgttcattatttgcactgaaggtctttcttcccttctaaaaaaatctgagaggagtggtgagttacatggtatcaaggtgtgtaaaggagtccctgtcctctcacaccttttacttgttgatgattgtttttgttttgcagggtaaatgatattgagcatattgctttgaaagctattctagattcctatggtgaaaattctg

SEQ ID NO: 16156 - DNA, 384 bp, Glycine max
agctttaaaagattggctaagattttgttaaaacataagcacttagacaatgaaggaaagctggagttgctgcacatgatgtccaacgttatgtcaaagaataagatcgggctgcacaatgcataagtcaagataaaatgtcaaatgaagcattgaagctgcaggatccacgatgtcggatacgatgtcctgacatcttgcccgaaaatactggacacatgaatctgttatatctttaacagattattgtgcagttagcaagagataagaagatctatctttatgaacgaattaaaagataattaaagttcgaatttcaaagtagaagagttcgttcagggattaaagattatagataaaaactaaaagatcaaactgtatctt

SEQ ID NO: 16157 - DNA, 333 bp, Glycine max
tttggcttttaaatgccattaagaggttcaactaccccattcatcttgggcctgcatgggggggaattatggcggtggaatcttgaaacctcacacaattcctttatcattttggtggtcaaaatggtggcattatttggataatcttcttgggccacccataccggcagaatatctctttcttaatgaacttgaccaccacacttcctttgtacaactggcatatgaagcagcttcaacccatttggtgaagtaaccgatctgcaccaaaatgaagcgacgtctattcggagcccttggctcaataggcccaatcacatctattccccacat

SEQ ID NO: 16158 - DNA, 287 bp, Glycine max
  unsure (1)..(287): unsure at all n locations
tatagaaactcaagcttctcgagaaattcgaatggttataacgttttcactcaatangtcctgatgcggcggacatcaactcatgtagacgctcgaagattgaacaacgcacgctctcgagaaactcgaatggtcataacatttcgcacacatgtccaaatctgtgacctaacatttctagacactccgcactggctggataaagatcttgtcatatccaaactgcagtaacatcgcgcgcgccatgcctatataagctcgcgagcaacggcactcccccccaacat

SEQ ID NO: 16159 - DNA, 382 bp, Glycine max
agcttcaagaaaaagatggcctcagcaaattccttatttccagaagggaattctatcaatagacctccaatctttaatggagagggccaccactactggaaaacccgaatgcacatttttatcgaggcaatagatctaaatatctgtgaagccattgacatagggccttatatacccaccacagtacaaagagtttcaatagatggtagttcatcaagtgaaagcataaccatagaaaaacctagagacagacggtctgaagaggatagaaaacgagtacaatacaacctataagccaaaaacataatatcatctgccctaggaatggatgtaatattcagagcttcaaattgcgagagtgctaaggaaatgtgggacactc

SEQ ID NO: 16160 - DNA, 388 bp, Glycine max
tgtagggttaaagtctcacgattgtgacgtgtttattcaacaattgttagtcgtggctatacgagacatcttgccaaacaaagtcaggttagcgataactcgcttgcgctttttcttccatgctatatgtagcaaagccattgatccagtcaagtttgatgagttggaaaatgaggccgcaattatactgtgccagttggagatgtattttccccctgctttctttgacatcatgatttacttgattgtgcatctggtcagagaaatcaaatgttgtggtcctgtttatctacaatggatgtacccggttgagcgatacatgaagatcttaaaagggtatacaaagaatctatatcatccagaagcatctattgtagagaggcacatt

SEQ ID NO: 16161 - DNA, 395 bp, Glycine max
agctttgagcaaattcaaacgacaataaccttttactcggatgtctgattgagtcccgtaatatatcgagacgctcaaaattgaatgttgaacctctgagcaaattcaaacgacaataactttttactcggatgtctgattgagttccgtcatatatcgagacgctcgaaattgaatgttgaagctctgagccaattcaaacgacaataactttttactcggatgtctgattgagtcccgtagtatatcgagacgctcaaaattgaatgttcaacctatgagccaattcaaacgacaataactttttactcggatgtctgattgagtcccataatatatcgagaggctcgaaattgaatgttgaacctctgaaccaattcaaaagacaatatctt

SEQ ID NO: 16162 - DNA, 429 bp, Glycine max
taaacattcaatttcgagcgtctcgatatattacgggtctcaatcagacatccgagtaaaaatttattgtcgtttgaattggctcagaggttcaacattcaatttcgagcgtctcgatatattacgggactcaataagacatccgagtaaaaagttattgtcgtttgaattggctcagagctttaacattcaatttcgagcgtctcgatatattacgggactcaatcagacatccgagtaaaaagatattgtcttttgaattggctcagaggttcaacattcaatttcgagcgtctcgatatattatgggactcaatcagacatccgagtaaaaagttaatgccgtttgaattggctcagaggttcaaaattgaatttcgagcgtctcgatatattacgggactcaatcagacatccgagtaaaaagtt

SEQ ID NO: 16163 - DNA, 423 bp, Glycine max
tgtaaggttaaagtctcacgattgtcatgtgctcatgctacaattgttagccgtggctatacgagacatcttgccaaacaaagtcaggttcacaataactcgtctgtgctttttcttccatgctatatgtagcaaagtgattgatccagtaatgtttgatgagttggaaaatgaggccgcaattatactgtgccagttggagatgtattttccccctgctttctttgacatcatgattcacttgattgtgcatctggtcagagaaatcaaatgttgcggtcctgtttatctacggtggatgtacccgattgagcgatacatgaagatcttaaaatggtatacaaagaatctatatcgtccggaagcatctattgttgagaggtacattgcagaagaagccattgaattttgttcagaatactt

SEQ ID NO: 16164 - DNA, 392 bp, Glycine max
agcttctaatgtatgtaagatgtgtattgcctctaaatgagctacaggtgcataagtttctttgtagtctattccttcttgttgagagtattctttagcaactaaccttgctttgtttttcacaacctttcaattttcattcagtttggtttgaaagactcatttctctccaatagctttctttctttttggaaattcgactgactttcaaacatcattcctctgaaactgatcaagctacttttgcattgctttaacccaattgtcatcctgcattacatcatcaatgtgtttgggtttcatttcagaaatcaatgcaataggtccttatgttctgagtgatgatcttgtttgaacatgatcaactagatcaccaataatttgactttttg

SEQ ID NO: 16165 - DNA, 327 bp, Glycine max
atcttacgctccttcaactgcacaagactcttaatatttgaagagtatacatgtggaaccttcacctgacgaagacactgacagaaactcatcttatcctttttggacaaagtatgacaagctgctggcaggttgattgtattcccatcagaccttggatgcaactgtgatcgtatccccatcttagatacatcttgacggagattcaatccatacttcatcttgccttgaatgtcaaagagcattccagtcactctgtcacgtacatttttcttctgatgcatatcatccgaccaatgccttacgcttagatgacaccatgactgc

SEQ ID NO: 16166 - DNA, 372 bp, Glycine max
tgcttttgagaaattcaaatggtcataacttttcacacggatgttagattaaggcgcatcgcatatagagacgctcgaaaatgaacaacggaagctctcgagaaattcaaatggtcataacttttcacactgacgtccgattcaggcttataatatattgatatgctcaaaaataaacatcggaagttctagagatattcaaatggtcataatttttcacatggatgtccgattccggcgcataatatgtcgagaggctcaaaattgaacatcggaaggtcttgagaaattcaaatgtgcataacttttcacacgaatgtccgattaaggcttataatatatcgatacgctcgaaattaaacaacggaactc

SEQ ID NO: 16167 - DNA, 410 bp, Glycine max
tgtagggttaaagtctcacgattgtcacgtgctcatgcaacaattgttagtcgtggctatacgagacatcttgccaaacaaagttaggttagccataactcgcctgtgttttttcttccatgctatatgtagcaaagtcattgatcctgttaagtttgatgagctggaaaatgaggcctcaattatactgtgccagttggagatgtattttccccgtgctttctttgacatcatgattcacttgattgtgcatcacgttagagaaatcaaatgttgtggtcctgtttatctacggtggatgtacccggttgagcgatacatgaagatcttaaaagggtatacaaagaatctatatcatccagaagcatctattgttgagcggtacattgtagaagaagccattgaatttt

SEQ ID NO: 16168 - DNA, 387 bp, Glycine max
agctttatagaaacctttgctttttttgctagacttgaagctataagaatcatgctttcctttgctactcataaaaatataaagttatttcaaatggacgttaaaagtgctttcttaaatggctttattgaagaggaaatatatgtcaaacaacctcttgggtttgaagatcatactcttccagaccatgctttcaaacttaaaaaagctttgtatggtctaaaacaggaaccacatgcttggtgtgacagactgagttcatttctcttagaaatggttttattaaagtcaaagtggatacaactctttctaaatgagaagttggcaaagatttcattatagttcatatgtatgttgatgatagtatttttgaagctactaatgaat

SEQ ID NO: 16169 - DNA, 393 bp, Glycine max
agcttttacctttcattttaacccttagaacttctcggccaacaatgtcatagataaagaaatgttgatgttcaaaggacactttaaatccctttttaatcaactgacctacacttagcaagttttggtcaatgttaggtacataaagaacatctgatattagtttgatacctgaacacgttgaaattgcaacaattccttttccttttactggaatatagccaccattcccaattttgacctttgagacattagttggcttcaaatccttgaatagagtcttatcatatgtcatgtggttcgtacaaccactaccaatcaaccaactttcacttgattcactactcaagaagcatgtggccacaaacagttggtcctcctcgtcttgattag

SEQ ID NO: 16170 - DNA, 432 bp, Glycine max
ctcacgcttcatgcttaactatgtatggcaaaacttcattattgttgttcatgacatacaagtgagcttgtaacagatcttctacacttggagtgatcacatgcagtccttttgaacccttaccacccactttgtcatcatgccgagactcaggaagcccaacaggtttagccttctctaagtattctgaacaaaattcaatggcttcttctgcaatgtacctctcaacaatagatgcttctggacgatatagattctttgtatacccttttaagatcttcatgtatcgctcaatcgggtacatccaccgtagataaacaggaccacaacatttgatttctctgaccagatgcacaatcaagtgaatcatgatgtcaaagaaagcagggggaaaatacatctccaactgacacattataattgcggcctcat

SEQ ID NO: 16171 - DNA, 393 bp, Glycine max
ttgctttttccttattcctcaaagaaaaggccaacgtatttgcatggaagccggtggatatgttgagcatagatccaaactttttctgtcataagttgatagtaaaccctttagtgaaacctgtgtgtcaaagaaggaggaaaatgactctcgaatgcctagaggaaattgaaaggcaagtgaaggagttgctaaggaaattgaaaggcaagtcaacccttcagcgaaacctttcatacgacttggctggccaagatcatcctagttaacaagcataacggaaaatggagaatgtgcattaactacttgatctaaacaaacattgtctgaaagactcatatccgcttcccgacatagataaaatggcggatagatctttcgactactgatatt

SEQ ID NO: 16172 - DNA, 426 bp, Glycine max
taagctctttcaattgcacaaggctcttaatatttgtagagtatccttgtggaacctttacccgacgaagacactgacaaaaacttatcttctcctttttggacaaagtatggcaggctgggggcaactaaattttcttcccatcagaccttggatgcaattgtgatcgtatgcccatatcagcgagatcttgacgggtattcaagccatccttcgtcttgccttgaatgttaagaagcgtcccaatcacactgtcacaaacatttttctccacatgcataacatcaatacaatgtgtaacgtcaagatcagaccagtacggaagatcaaagaaaatggacctcttcttccatatgcaactcttacttttatccttcttttgggtctttccaaatacaatattcaggtgttgaacccgctcatata

SEQ ID NO: 16173 - DNA, 381 bp, Glycine max
ttgttttttatgcattagcctgagcaatctttgaatctcaagccaatttgaattgcatgtgaaagttatgaacaaattaggaaacccaataaccccacaaattgtcattcaatcaaaatatagttgatccatatatctttgatttcgaacaaaagttaagggtagaatgactcttttccctttatttgacccctgattttgggtctgatcataacattactgcaatttgttggattcatcaactcttaattattttttgtgagtcctgatgaaatacaatctttcggactccatcatgcaatatctgtcatctacaaattgttgaaaaagtttcctagatctcaacattgtccttcatcttttctggtatgaatacaaaaa

SEQ ID NO: 16174 - DNA, 389 bp, Glycine max
agcttttatccaattaagacgacaatatctttttactcggatgactgattgagtcccgtcatatatcgagacgctcgaaattgaatgttgatgctctgagcaaattcaaacgacaataatattttactcggatgtttgattgagtcccgtaatatatcgagacgctcgaaattgaatgttgatgctctgagcaaattcaaacgacaataactttttactcggatgtctgattcagtcccgtcacatattgagatgctcgaaattgaatgttgaagctctcggccacttcaaacgacaacaacattttactcggatgtctgcttgagtcccgtaacatatcgagacgctcgaaattgaatgttgaagctctcagccaattcaagcgacaa

SEQ ID NO: 16175 - DNA, 426 bp, Glycine max
tagtaaagctaggcactaacagaatttgctcaatgcatcaacattcaatttcgagcttctcgatatattacgggactcaatcatacatccgagtaaaaagttattgtcgcttgaattggctaagagcttcaacattcaatttcgagcatctcgatatgtgacgggactgaatcagacatccgagtaaaaagtcattgtcgtttgaatttgctcagagcttcaacattcaatttcgagcgtctcgatatgttacgagactcaatcagacatccgagtaaaaagatattgtcgtttgaattggctcagagcttcaacattcaatttcgagcatctcgatatatgacaggactcaatcagacatccgagtaaaaagttattgtcgtctgaattggctcagagcttcaacattcaatttcgagcgtctcg

SEQ ID NO: 16176 - DNA, 422 bp, Glycine max
  unsure (1)..(422): unsure at all n locations
tgtaaaaagggaagcaagttaaaaactcctttcattttaaaaacgttgtttctactacaaaaccccttgaactacttcacatcgatttatttggtccctctagaactatgagtttaggtggaaattactatggcttagtaatagtggatgattactcaaggttcacttggactttgtttttgaaaaccaaaaaaagaagcttttgatgcttttcgcaaacttgccatggtgattcaaaatgaaaaaggtctcaacattgtttcaattagaagtgatcatggaagtgaatttcaaaatgattcttttgaaaacttttgtgaagaaaatggaatttaccacaaattntatgccccaagaacacctcaatagaatggtgttgtggaaaggaaaaatagatcccttaaagaaggtgcaagaaccct

SEQ ID NO: 16177 - DNA, 386 bp, Glycine max
  unsure (1)..(386): unsure at all n locations
ttgcttttaccaaagagattttactctctggtaatcgattaccagtggcatgttttgttttcaaaaagctttcaactaaatttacaacattccaatcaatttcaaaatggtgtaatcgattacaatatattggtaatcgattaccagtgagtttgaacgttgaaattcaaattcaaatgtgaagagtcacatcctttcacaaaaatgctttgtgtaatcgcttacaatgatttggtaattgattaccagtgataagttntaaacaaaaatcaaaagatgtaactcttccaatggttttcaagtttttctaaaggttataactcttctaatggttntcttgaccagacatgaagagtctataaaagcaagtccttaacttgcatttt

SEQ ID NO: 16178 - DNA, 426 bp, Glycine max
  unsure (1)..(426): unsure at all n locations
tagttcctagcttagccgataaggttttccaaaagtgtgctaaggaacttaacatttctatctgacacaatggtcctaggaaaaccatggagtctcacaacttcccttaaaaagagttttaagatgtgggaagcatcatccatcttgtggcatggtataaagtgtgccatcttgctaaacctatccaccaccacaaagatagagtctacacctctttgggttctagaaagcccaaggacaaagtccatactaatgtctacccaaggtgcagatgggatgggtaagggtgtgtatagcccatgaggcatcaccctagacttggcttgtaaacaagccacacacctagtgcaaagcttatggatatctttcttcacacggngccaataaaacttgtctctgagtatgacaagggtcttgtctatccca

SEQ ID NO: 16179 - DNA, 388 bp, Glycine max
agcttgtgttagttgtatggccttagccaaggaaaacaagaacaaccaaacactttcataaaagagtaatcaggttgtttgttgaatagtttctgataaggaacttcattatttatagcatatgagggcaatctgttgatgaggtaaatgcttgagacaaaggcatggtcccaataatgaaaaggtaacttggcttgagatagaaaagtgagacccaactccacaacatgtctgcgcttgctttctactactccattttggtgatgagtatgatgacatattagtttgtgctgaataccatgctctgtcaagaattttgtgaaaggtctgaactcccctccccaatcaaactgaatagccttgatagacatattaaacttatttgaaa

SEQ ID NO: 16180 - DNA, 381 bp, Glycine max
ttgcttataatatatcgatacgctcaaaattaaacatcgaaaactctcgagaaattcaaatggccgcaacttttcacacggatgtccgattcggtcgcataatatgtcgagaggctcgaaattgaacaacggaagctcttgagaaatttagacggacataactcctcacacggatcgacgacccacgcaaaccacatgaatagacgctcacaatcgtacatcggctgctcctgagaaattcaaacgatcataacatctaacatggatggtcaatcaaggctcgtcacatattgagacactggaacttgtactgcgtgagctgtggtgcaattctagaggccatatctgtttacaccgcgagccgactaagacttatcatat

SEQ ID NO: 16181 - DNA, 355 bp, Glycine max
  unsure (1)..(355): unsure at all n locations
gaaactcagctgaatcggacatccgtgtgaaaagtatgaccttttaatttctcaagagcttccgttggtaaatttcgagcctctcgacatattatgcgcccgaatcggacatacgtgtgaaaattcatgatcatttgaatttctcgagagcttccgatgtttaatttcgagcgtatcgatatattacaaccctgaatcggacctcagtgtgacaagttatgaccatttgaatttgacgagagcttccgctgctcaacnnccaacatcactataccngacgcgcccaaatcggacattcgagtgaaatgttatgaccatttggatttctcaagagattccgttgtttatttttgag

SEQ ID NO: 16182 - DNA, 414 bp, Glycine max
ttacatcccatgttgtgataaaatcttttatataattagttatgttgaggttatgaaatgatgattcaaactgtgagtatgtgataaattgaacatgtgacggatgatgaaatacatgtgtattgagatgagatgtgtgtattgagttgtgaactataaactatgcaatcacacaattgtaagaccctttaagggcgacgagtattgtgatgggatccactgtgggaatccgacgagttaaaatgattttgaaaacaattgagtaaatgtgtgtatttcatagttcatagataaagtgtatatgattcatgaggtgtgataacatgttaaattgtgattataccattgcgattaagattaagtgtatgtgataaattgagtatgtatatgattgagatatatatgtacattgaa

SEQ ID NO: 16183 - DNA, 384 bp, Glycine max
  unsure (1)..(384): unsure at all n locations
agcttcaacattcaattttgagcgtctcgatatatgacgagactacatcatacatccgagtaaaaagttatagtcgtttgaatttgctcagagcttcaacattcaatttcgagcatctcgctatattacgggactcaatcagacatccgagtaaaaagtttgttgtttgaattggctgagagcctcaacattcaatttcgagcgtctcgatatattaagggactcaatcaaacatccgagnaaaaagaaatgggcgctggaagttgctcagagcatcgacactgaattgcgagcgtctcgatatattacgggactcaatcagacatccgagtaaatagttattgtcgccggaatatgctcagaggttcaacattcaatttcgag

SEQ ID NO: 16184 - DNA, 423 bp, Glycine max
  unsure (1)..(423): unsure at all n locations
ttgaatgcactattcaatggagttgacatgaacattttcagactgatcaacacttgcacagtggccaaagatgcatgggagatcctgaaaatcactcatgaaggaacctccaaagtgaagatttccagattgcaactcttggctacaaaattcgaaaatctgaagatgaaggaggaagagtgtattcatgacttccacatgaacattcttgaaattgccaatgcctgcactgccttgggagagaggataacagatgaaaagctggtgagaaagatcctcagatccttgcctaagagatttgacatgaaagtcactgcaatagaggaggcccaagacatttgcaacatgagagtagatgaactcattggttctcttcanacctttgagctaggactctcggatagggctganaagaagagcaag

SEQ ID NO: 16185 - DNA, 397 bp, Glycine max
tggtcatagcaaaccactttgcatgccaaacatgtgttctcagcctcttggttacatccctagaagtgcaaaaaccattctctaggtttttctttagttcatatctccgatgaacacatcgaggaagcttcttttggtgattctcctccaaacctgatttggcaagggctttatcaattattcccagtttctgcctctttcttctgcacccttttcttgcaatttggttatcaaacacaattgtccttcttctcttgttcttttgagacctataatcattgcttactctattttctatgatagattgaagactatggagttcgagagcacgggattcagcatatttctgcaaattgattttccaaggtggtggtggtggtgtatgtactgaaacttg

SEQ ID NO: 16186 - DNA, 378 bp, Glycine max
  unsure (1)..(378): unsure at all n locations
ttgcttggttacctccttcttgactacatcaagaattaccgggttgagtcttctctgtggctgtcttactggtttagccccatcctctaaatttatttgatgcatacatgtggatgggctaataccaggaatgtccgccagggtccagcctataaccttcttatgcttcttgagaactgataacagcttctcctcttgctcattagcaagggaggaagatataattactggaaaactattgctatcatccaagtaagcatattttaaatttgatggtagaggctncaattctggtgtgggcgattagataatggtagaaagagatggtttctcagcctgtacctcatacagaaagtcagaggtatgtgtacttcctga

SEQ ID NO: 16187 - DNA, 326 bp, Glycine max
  unsure (1)..(326): unsure at all n locations
atgctntgatgcaaattcaaatgacaataacttttgagtcggatgttcgattgtgtctcgtaggatatcgagacgatcaaacgacaataacttttaattcgaatgtctgattgagccctttaatatatcgagacgctcgaaattgaaaacagaagctctatgaaaagtcaaatggacaaaactttcaattcggatatctgattgagtcccgtaatatatcgagacgctcgtaattgaaaactgaagctttgaggaaattcaaacgacaataacttttgaatctgatgtgcgattgtgtcccatacgatatcgagatgctcgttatt

SEQ ID NO: 16188 - DNA, 419 bp, Glycine max
tcaacatcagaccacttccagggtgctggaactacttcacatggacttgatggggcctatgcaagttgaaagccttggaggaaagaggtatgcctatgttgttgtggatgatttctccagatttacctgggtcaactttatcagagagaaatcagaaacctttgaagtattcaaagagttgagtctaagacttcaaagagaaaaggattgtgtcatcaagagaatcaggagtgaccatggcagagaatttgaaaacagcaggttcactgaattctgcacatctgaaggcatcactcatgagttctctgcagccattacaccacaacagaatggcatagttgaaaggaaaaacaggactctgcaagaggctgctagggtcatgcttcatgccaaagaacttccctataatctctgggctg

SEQ ID NO: 16189 - DNA, 422 bp, Glycine max
tgtattcatagaacatttgatattagtattttgttattaaaaaatatttttggcccctaattatttccgataaaactatcaattctgcaacaaaatggctcatgtttgtaatgcaagaaaagtgatggataagatagaagaaaccgtgaatatttttggcattggaatagacattccacccatttcatctagataaagacaacgtggtctatcataactagttcccgtcaagaaaaaaagcacagcgccaaaaacgccaataaatccatgacatgggattctatttcacaacccagcttggtagagggtgtttcttcctccaccctataaaaataaaagagcgtcccttgtatattcccaaaaaaactaatgtaaaatgtaatttacatctaggattactctttacgaaatataataggatg

SEQ ID NO: 16190 - DNA, 412 bp, Glycine max
tggaggcattacctttatggatctaaattttagttgtttagtgatgataagagccttagatatttgtttgatcaaaaagagcttaacatgaggcagaggagatggttagagttccttaaggattacgattttgagcttagctatcacccaggtaaagccaatgtagtagttgatgccttaagtagaaaatcccttcaaatgtctgctttgatggttagagagttggatctcttacagcagtttagagacatgagtttggcatgtgagattacctctagtagcattaacttgggtatgttgagagtcaccagcgaactcttgagcgagatccgtgagggtcagaagtctgacccattcttgtcagctcagttagagtccatagttgcagggagaaagagtagtcttagagtgg

SEQ ID NO: 16191 - DNA, 418 bp, Glycine max
tctcgatatattatgcacctgaatcagacttccgtttgaaaagttatgaccatttgaatttcttgagagcttccgttgggcaattttgagcgtctcgatatattatgcgcctgaattgaacttccgtgtgattagttatgaccatttgaatttctcaacagctttcgttgttcaatttcgagcgtctcggtatattatgcgtcagaatcggacttccgtgtgacaagttatgaccatttgaatttctcgagagcttccgttgttcaatttcaagcttctcgatatattatgcaccttaatcagacttccgtgtgaaaagttatgaccatttgaatttctccagagcttccgctgtttaatttcaagcttctcgatatattatgcacctgaatcagacttccgtgtgataagttatgac

SEQ ID NO: 16192 - DNA, 440 bp, Glycine max
  unsure (1)..(440): unsure at all n locations
tatagacaactcaagcttgctttgaaaacttccattcaccctaggccttacatagctacaatggtttagtgagaatggagagctaattgtagatagacaagttttgatatgcttctccattggaaaatatgttgatgagatactatttgatgtagtccctatggaggctagccatctcttacttggaaggctttggcagtatgatagggatgctgtccacaatggtgtcacaaacaaattttcatttgtacataaagggcaaaaggttacccttaaacctttgtctccaagtgaggtttgtgaggatcaaataanaatgagagtgaaaagagaacaagagagaaaagaagagaaaaataaaattgatgaaaagagagagaaacaagaaaggagagataagaaagaaaatagtggaggtaaaaaaaggagtgaaactgaaa

SEQ ID NO: 16193 - DNA, 418 bp, Glycine max
  unsure (1)..(418): unsure at all n locations
tagactctgtttcatgaagaagaggatcatctatttgagggaagagtcgcaagtttgagaataggatttaagaaactctcacgtgaaagagaggagaaatataaagaaaatacgcgaatgttctgaaagattcttctatcaagaagagaatttcaatttctcactttctagaaggaaattgaaattccacatttttagttgtttaaaattatgttttaaaattccaaaatttaaattcttcataacacaccatccccacaatggaatttagattatagaaagtgaaattctctgatcaataactgtccacaattaaaattctttatccaaaggtactctaaggcttactttacaccttcctatgtatgttgaactcactaggcttgtttaccacactnttagaagttcaatattcact

SEQ ID NO: 16194 - DNA, 418 bp, Glycine max
  unsure (1)..(418): unsure at all n locations
agcaatgncccttgatatattngagggactcatgttcactatgattgacaaattccttgggataaaggtagtgttgccatgttttcaaagcccgtactaaggcatacaactccttatcataagttgaatagttaagggtaggaccacttaacttttcactaaaataagcaattggatggccttcttgcatcaacacagccccaatcccaacatttgaagcatcacactcaatttcaaaagatttttgaaagttnggcaacgcaagtatggaggcattagatagcttttgnnnaagaacattgaaagcttcttcttgtttctctccccatttgaaaccagcatttttcttgagcacttcattgagaggtgctaccaatgtgctaaaatccttcacaaatcgtctataaaaacttgctaa

SEQ ID NO: 16195 - DNA, 416 bp, Glycine max
  unsure (1)..(416): unsure at all n locations
ntatgcttaagtacgtatggcaaaacttcattactgttgttcaagacatacaagcgagcttgtaacaaatgttctacacttggagtgatcacatgcagtcctcttaaacccttaccacccactctgtcatcatgccgagactcaggaaggccaataggtttagccttctctaagtattctgaacaaaattcaatggcttcttctgcaatgtacctctcaacaatagatgcttctggacgatatagattctttttatacccttttaagattttcatgtatcgttcaaccaggtacatccaccatagataaacaggaccacaacatttgatttctctgaccagatgcacaatcaagtgaatcatgatgtcaaagaaagcagggggaaaatacatctccgactggcacagtataattgc

SEQ ID NO: 16196 - DNA, 384 bp, Glycine max
  unsure (1)..(384): unsure at all n locations
atctttgagccaattcaaacgacaataactttttactcggatgtctgattgagtcccgtgatataacgagacgctcgaaattgaatgttgaagctctgagcgaattcaaacgacaataactttttactcggatgtctgattgaggcccgtaatatatcgagacgctcgaaattgaatgttgaagctctgagccaattcaaacgacaataactttttactcggatgtctgattgactctcgtcacatatcgagacgctcgaaattgaatgttgaagctctgagcgaattcaaacgacaataactttntactcggatgtctgattgaggcccgtaatatatcgagacgctcgaaattgaatgttgaagctctgagccaattcaaac

SEQ ID NO: 16197 - DNA, 385 bp, Glycine max
taaacattcaacttcgagcgtctcgatatattactgtagtctcaatcaaacatccgagaaaaaagttattgtcgtttgaattggctcagagcttcaacattcaatttcgagcgtctcgatatatgacaggactcaatcagacatccgagtaaaaagttattgtcgtttgaattagctcagagcttcaacattcaatttcgagcgtctcgatatatcacgggactatatcatacatccgagtaaaaagttattgtcgtttgaattggctcagagcttaaacattcaactgcgagcgtctcgatatatgacgagtctcaatcagacatccgagaaaaaagttattgtcgtatgaattggctcagaggttccacattcaatttcgagc

SEQ ID NO: 16198 - DNA, 379 bp, Glycine max
tttcatgcattctataactcggatgtccgattcaggcgcataatatatcgagacacttgatattgaataacagaagctctcgagaaattcgaatggtcataacttttcacacggatgtccgattcgggcgcataatatgtcgagacgctcgaaattgaacaacggaagctctcgagaaattctaatggtcataacttttcactcggaggaccgattcaggcgcataatatatcgagacgctcgaaattgaacaacggaagctcccgagatattcaaatggtcataacttttaactcagaggtccgattcaggcgcataatatatcgagacgctcgaaattgatcatcgaaagctctctagaaattcatatgcgcataac

SEQ ID NO: 16199 - DNA, 352 bp, Glycine max
gcttgtgcaaatgcaaacggtattatctttttactttgatgttcgatcgagtcacgttatacatcgaaacgctcgcaattgaaaacagaagctctgtgcaaattcaaacgacaatacattttaactcggatgtccgattgagtcccgtaatatatcaagacactcgaaattgagaataaaagctctgaacaaattccaacgacaataactttttactcggatgtccgattgagtccagtaatatatctagacactcgaaattgagaatagaacagctgagcaaatttaaacgacaatgacctttttactcggatgtccgatggagccccgagcgtctcgatatattatgcgc

SEQ ID NO: 16200 - DNA, 398 bp, Glycine max
aggctgctgtctttttgacacgctgggttctacaggcgattcatcaaagatttctcataagtcgccaaaccactcaacaatctgttgaacaaggatgttgcattttgtgtttaatgaagaatgtgtggaagcatttaatgatctcaagatcaaactagtagctgttccagtgcttatagcatttaatgatctcatgatagtgaggcttgttttgaagaagacacgttggagcatgagatggaattaacagcctcagccatggtattacagtctcctttggaagaagaatccaacaatgtgatagaatgcctagtcagtgaaaatgaaggagaagagctagcttgtattgaagagctggatggtccagaagataagtctgctggtcatgtgatgtttga

SEQ ID NO: 16201 - DNA, 388 bp, Glycine max
ttcttctgcttattagtgcacagctccttcaagaatttagcatatcttggaatttgctttattgcatccagcagaggtatgtttacctctacttttctaaatgtttccaatatctccttatttgcctcttccatttttttgatggaaattgctcttggagggaatggaacagggatatgctgcttctgtaaatcagaattaccagtggaagattcacctgcatagaaattgttaggtaacttactctttacatgtttgtcatcagctttttctggagtagagtaaagttgggcaggttcatttgcggatgaagaagatgttgctggttgaggtccttgacacaactctcctgatctcaatgtaatggcactcacatttttaggattct

SEQ ID NO: 16202 - DNA, 418 bp, Glycine max
ttgagaaaggtgatgtgaacaagcggttactggttatatccttcaagaagaccccaattctgagttcatttctttgctttggttgctttccattgtcgaagctcttcaaagcgcgtttgaggattccccaattgaaggtagaccacacaactgaacgtgtgttcaagaacctcgttgcttttgagcagtttcactatccagacaagccttacttttgcaactatgtttctttcattgactctctgatacacactcagcttgatgtggagttgctggttgagaaggaagtgattgggcatgaacttgggagtgataaggaagtggcaactcttgttaatgggttatgcaaacatgttgtcacaaactcaacttggtaccatcacattataaataagctcaacgaccattacatgaacga

SEQ ID NO: 16203 - DNA, 393 bp, Glycine max
  unsure (1)..(393): unsure at all n locations
ggtttgcattcttcaacatcttttttggtgtgatggtgaaagtcgggtaaactttgttattcggtgatgtattggcatttgatgccacttataagaagaataagtatcatctacctgttgtgggtttttctggtgttaatcacaacaatcaaaccatagtttatgacacaatccttgtaacaaatgcaaccgaagagacgtatgtttggttattagaacaatttgtgcaagccatgaatagtaagaaactatcaacaacgattactgatggtgatattgcaatgagaaatgcataagaaagatacttttcaaaacatgcctangttatgtgcttggcacttgatacgtaatgcanaagccaatgtaaacaatcctgcattnttgccaatgttt

SEQ ID NO: 16204 - DNA, 381 bp, Glycine max
  unsure (1)..(381): unsure at all n locations
ttcttatccaaacatatcctttattaaagttatttcttcttattctcgtaggaccatgaatggaggcaagctataactgctgctggatctggatgcgttgcagctttatcacgtgagagatatcttgtgagcaatgatcttcttatagagttccatcaggtatttgacttcaaagaactcctattttgttttcgcttatcgttcttttggtatataacactgtagattgagtgtacacatcacattaccaatttactgtatctttattatatgtcttaattcttgtacatttccacagaagcagatgcaactttagcaagattngcttgtaaaacttatatctataaatttataaaacttaataaatttagtgcatctaat

SEQ ID NO: 16205 - DNA, 405 bp, Glycine max
tcaacattcaatttcgagcgtcttcatatattatgggactcaatcagacatccgagtaaaaagttattgtcgtttgaatttgctcaaagcttcaacattcaaattcgagcgtctcgttatattataggactcagtcagacatccgagtaaaaagttattgacgtttgaatttgctcagagcttcaacattcaatttcgagcgtgtcgctatattacgggactatatcagacatccgagtaaaaagttattgtcggttgaatttgctcagagcttcaacattcaatttcgagcgtctccatatattacgggactcaatcacacatccgagtaaaaagttattggcgttagaattggctcaaagcttcaacattcaaattcgagccgctcgctatattatacgactc

SEQ ID NO: 16206 - DNA, 369 bp, Glycine max
  unsure (1)..(369): unsure at all n locations
tttctttgtttatatggaagccctgcaacaaactctagctctgaaaaattggaaataatattgtaggaaacatcaagtccttcaagtgacttcaaattctcaatcccatgcaaagtagttagagcattgctcctcaaaactagtttaacaatatgacaggaaacctgcaaggtccaacacaattgtatatgggtctccagagcaaatccctaaatgaaaggcatacaactaaaacaaaagatattaacttttctacaaataaattgctntcattgcatttaaggatcctgtcattcaactttcaatcctgaaatatcaattcattctccatgaatcgcagaagtcagcacagcaagcaaataaagacat

SEQ ID NO: 16207 - DNA, 400 bp, Glycine max
tgtagggttaaagtctcacggttgtcacgttctcgtgcaacaattgttagctgtggctatacgagacatcttgccaaacaaagtcaggttagcgatagctcgcctatgctttttcttccatgctatatgtagcaaagtcattgatccagtcaagtttgatgagttggaaaataaggccgcaattatactatgccagttggagatgtattttccccctgcttttttgacatcatgattcacttgattgtgcatctggtcagagaaatcaaatgatgtggtcctgtttatctacggtggatgtacccggttgagcgatacatgaagatcttaaaagggtatacaaagaatctatattgtccagaagcatctattgttgagaggtacattgcaaaagaagcca

SEQ ID NO: 16208 - DNA, 372 bp, Glycine max
ttcttatgttgctagcatatagcatatcatcaacatataacaccaagaatgagtatttactcccactaaacttgtggtatacacaatcatcaactgcatttgcctcaaaatcatatgaggtaatgacttgatgaaacttgtaataccattgatgggaagcttgtttcaaacaatagatgaatttatttagtttgcaaaccatagactttgagtcacctgatacaaagttttttggttgcatcatataaattgtgtcttcaatgtcaccatttagaaacgtagtcttaactacaatctaaaagttcctatagcctccatcgcaacctttttgccatcgccaacaaatatgaatctttcatcatcacttgacag

SEQ ID NO: 16209 - DNA, 405 bp, Glycine max
  unsure (1)..(405): unsure at all n locations
nttaaagcagcttttagatactgcttccctcatcagacctgtcaagccttcagccactagatcaaaaagaaggggtgccaaagggtccccttgtctcaaccctctttgaggtttgaattcagaagttgggctaccattaacaagaatagatatggaagctaaggtgagacaagcccttatccacctaatccatctctcatggaaccccattctcctcaacatatagaggagaaaatgccaagatacagaattataagccttctcaaagtccactttaaaaaccatgcaagacttcttggatcttcgagcctcctcaatcacctcattagccaccaaaactccatggagcaattgtctgccttttataaaagttgtctgcctttcatctataagataaggcatgac

SEQ ID NO: 16210 - DNA, 421 bp, Glycine max
  unsure (1)..(421): unsure at all n locations
tatgctgcaaacatctacaacagacctcctcaacctcagcagcaaaatcagccacaacagaataattatgacctctccagcaacaggtacaatcccgggtggaggaatcatcccaaccttagatggctgaatccttcacaatagcagcaactttgaaagccaatagttgcttagtgttaaaaaaaatatagagtgcaacaattatttaataacactcggcgagtgcataaacaataaagctgaagtatagagtaactttgctttgcaaagaaaaaataatgaaaaattaaatgtatagtccaacaatttctgcaaagtttcacgttagagattntctcatttctttatgattnttttcatgtgttactttgagatagagattgccttttataaaattcagtaaatgattcattgtgggatt

SEQ ID NO: 16211 - DNA, 384 bp, Glycine max
ttctttgatgcaacatttggagaggttaatgaaacaacgagatgatgcgctccatgagaggttggatcaaatggagaatagagatcataatgaagaagaaaggaggagaagagggaatgatggtgttcctagacaaaaccgaattgatggtattaaactcaacattcctccatttaaaggaaagaatgatccggaggcctacttggagtgggagatgaaaatagagcatttttctcatgcaacaactatgaggaggaccaaaaggtgaagcgtgccgccatggagttttccgactatgctcttgtgtggtggaacaagctacaaaaggagagagcaagaaatgaagagctggttgatacatggacggagatgataaagatcatg

SEQ ID NO: 16212 - DNA, 385 bp, Glycine max
tcaacattcaatatcgagcgtttcgataaattactgggacacaatagaacatacgagtaaaaacttattgtcgtttgaatttgctcagagctttggtattcaatttcgagcgtctggatatattacgtgtctcaatcagacatccgagtaaaaagttattgttgtttgaagttgctcaaagcttcaacattcaatatcgagcgtctcaatatattacgggactcaatcagacattagagtaaaaatttattatcgtttgaacttgcttagagcttcgataatcaatttcgagcgtctcgatatattaccggactcagtcagtctaccgagtaaaaagttattgccgtttgaatttgctcagagcttcggtattcaatatcgagcg

SEQ ID NO: 16213 - DNA, 377 bp, Glycine max
ttcttgtcctacaattgctagttttttcattgacagttgcccaatgggtatcatctgcattgatagcaaatctcacatccttggccaaacgaagatacatataccaatttaatataaatggagaataaattaccgttctactctgatctacaaatgctgctgattccctcacttggccattagtgatgcctggcatatatttgcgctgtttctgtactggcacagactctggagataaaggttccttgatgtcttccgcatagtgtttcaatgaatttggagagtttccctgttgacagagagcgatgataaattaacagctgacaatgaaagctatatagatccgatcaaaaagttagtctcatagataaaatcaa

SEQ ID NO: 16214 - DNA, 405 bp, Glycine max
tctttgttcctatggttcagtaaggccaacaatgttcagcgcccagggggccgccgaggaacaggtcctgtgcaacaaccccaacagccaatgccaatgatgcagcagcaggtctgctcttgcacagagtttccaatttttttgtttgtctctcacgttactcatctgcatgcatgcctgatggtgagatactttcttatttgtttgttagatgcttccaagggggcgtgtctatcgttaccctcctggccgcaacatgcaagatgtcccacttcaaggtgtagctggtggaatgatgtcagtcccttatgacatgggtggtctgccaatccgcgatgctgtgggacagccaatgcccattcaagctttggccacggctcttgcaaatgctccccctgaacagca

SEQ ID NO: 16215 - DNA, 388 bp, Glycine max
  unsure (1)..(388): unsure at all n locations
agctttgtgctaatatgttctattgacactctttatttctgaacttcttctttcacggcaaagtacttcaattccatatgcttagcacccgtagagtacttgtcgttcttagaaaagaatattgctgcggagttatcacaatacattttcagcggcctagcaatactgtcgacaattccaagccctgaaataaagttctgcaaccaattagcctaaattgtagcctcaaaacatgctacaaattcagcttccatggtggatgcagcaacaactgattgttttgcactcttccatgatatttctcctccggctaagagaaatacaaagccaagagtggattntcttgtatccacacatccagcaaagtctgagtctgaatatccaatca

SEQ ID NO: 16216 - DNA, 414 bp, Glycine max
tgtagggttaaagtctcacgattgtcacgtgctcatgcaacaattgttagtcgtggctatacgagacatcttgccaaacaaagtcaggttaacgataactcgcctgtgctttttcttccatgctatatgtagcaaagtcattgatccagtaatgtttgatgagttggaaaatgaggccgcaattatactgtgccaattggagatgtattttccccctgctttctttgacatcatgattcacttgattgtgcatctggtcagagaaatcaaatgttgtggtcctgtttatctacggtggatgtacccggttgagcgatacatgaagatcttaaaagggtatacaaagaatctatatcatccagaagcatctattgttgagaggtacattgcagaagaagccattgaatttttgtc

SEQ ID NO: 16217 - DNA, 408 bp, Glycine max
tcaagaaaaagatggcctcttcaaattccttatttccggaagggaattctatcaatagacctccaatctttaatggagagggttaccactactggaaaacccgaatgcaaatttttatcgaggcaatagatctaaatatctgggaagccatagaaatagggccttatatacccaccacagtagaaagagtttcaatagatggtagttcatcaagtgaaagcataaccatagaaaaacctagagatagatggtctgaagaggatagaaaacgagtacaatacaacttaaaagccaaaaacataataacatctgccctaggaatggatgaatatttcagggtttcaaattgtaagagtgctaaggaaatgtgggacactcttcgattagcacatgaaggaactacagatg

SEQ ID NO: 16218 - DNA, 354 bp, Glycine max
ttgtatgcatttacaataggagccagtggcatagtccatgtacttctctaactctttcttgtacaaaacacaagcatggcctattgtgttgtaaaccttgtctgccccatataggttgatcttaccaaccctattctcctttggggttatgtactttctaatctcctcaatgatgaaaaaattgatcaaatgatcctccttcactggggagctcgtcccttcatcaaccttgggaacccgaatctgccttagagcaacattaccactatgaagagggctgactatttgatcctctagaaactccttgtccaacatggcgcctatgattgtctccattacttgaacttttgactc

SEQ ID NO: 16219 - DNA, 367 bp, Glycine max
  unsure (1)..(367): unsure at all n locations
agcttctcactgtcaaaggaacccctttgcattttttcacaatttcctttccgatctccattagatttggatattccttctcttgaccttccttaaatgcccatctcacaaacagcgatatacaattctctggagaaaggccctctaaaacataagagggaatagtgcccatcattgaagcaatggagttacttcgcgttgtcactatgattntgcttcccactgcaccaacttttattaaatttttcaagtcaatccattttgtataatcatcattccatatatcatccaagaccagtaaaaatttctgaagagaaagcttgtgtctaagacgagtttgaagctgctcaatatctaagctggtgat

SEQ ID NO: 16220 - DNA, 374 bp, Glycine max
tgactgttacttgatgaatgtatgtcagctacatattctttttcagccttatattgcagaacattatcatactgatcaacaaattgcttcagagttgttagccggcttacatatccatcaaaaaatgcatgcatgctttcattgtgtggaataatagacattccagcccagaactcacctcttacaaaggaaggagcccagcgatgtctctcacagaacaactctttcaaccatttattgtccttgaggtcaaaatcctccacaatcttctttcatttctgctcaaattcacttattggatgtgtgtcatatacaacattctgcaaatgatctcttaaggactcgtaataacatttccatggattagttgggga

SEQ ID NO: 16221 - DNA, 404 bp, Glycine max
tataatatatcgagatgctcgaaattaatcatcggtagctcttgagaaaatcaattggtcataatttatcacacggatgtccgattcgggtgcataatatgtcgagacgctcgaaattgaacaacggaggctctcgagaaattcaaatggctataacctttcacacagatgttcgattcaggagcatcacatatagagacgtacgaacaacggatgcactcgagaaatacaaatggtcataacttttcacaccgagttcccattcacgctcatactatattgatacgtttgaaattaaacatcggaagctcaacgagaaattcaaatggtcataactcttcacacggatgtccgattatggagaatcacatatcaagatgctcaaaattgaccaacgaagctct

SEQ ID NO: 16222 - DNA, 369 bp, Glycine max
  unsure (1)..(369): unsure at all n locations
atcttgtgcattcaatatcctgatgagggtgttccatatgttctcaagactagactaatacatttgttgcccaagtttcatggtcttgcaggtgaagatcctcataagcatcttaaggagttccatattgtttgttccaccatgaagccccttgatgtccaggaagatcatatctttctaaaggcttttcctcattctctagagggagtgaaaaaagattggttgtactaccttgctcccagatccatctccaactgggatgaccttaagagagtgttcttggagaaattcttccttgcatctaagaccactgccatcaaaaaagacatttcangaaacttaatggagagagcttgtatgagtactggg

SEQ ID NO: 16223 - DNA, 351 bp, Glycine max
ttgaatggacaccacttcattttggtcttctttgtatacttcaccaaatgggttgaagtgggtgcgtacgccagtgtgactaggagtgtggtggttaggttaatcaagaaagagataatctgctggtatgggttacccaggaagattatcattgataatgccaccaatctgaataataaaatgatgaaagaaatgtgtgaggatttcatgatccaacatcacaattctactccttatgggcccaagatgaatagggtagttgaggctgctaacaagaacatcaagaaattagttagaagattaccgggtcatacaaggattgacacaagatgctcccttttgcactacatg

SEQ ID NO: 16224 - DNA, 327 bp, Glycine max
ttcttctcggtacatcacgggcctcaatcgtacacccatgtcaaaagttatggccctctgaattggaccatagcttccttgttaggtttcgagcgtctcgatatattgtgtctgaatcggacatccgagtgaaaagttatgacaattttaatttctcgagaacttccattattcaatgccgagcgtctctatatatcatgggcgccaatcatacactcatgtcaaaagtaatggccgtctgaatttctccagaacttccattattcaatctccagcgtctctgtatatattgctactgaatctgacattcgactgaaaagttatgac

SEQ ID NO: 16225 - DNA, 305 bp, Glycine max
aagagaaattcaacgccaagtcccaattttgaaaccatatatattgtcatataacataatcactttattagaagcgcataagacaacatactcacatggcccctgtatttgtgagctcataggaaatcaagcaagggctaccaagaatccttgttgctcaacataattgacgaaagtcggacaaggaaatgtggcattaaatggctcaaatcaaccccaatacaaaatttcattactctaagcacattgcaaacaaaagcaatccttaattacaatccagggcagatgttatttctataacaaaa

SEQ ID NO: 16226 - DNA, 346 bp, Glycine max
  unsure (1)..(346): unsure at all n locations
caatgcccggcatcagagatgcagtantcaccaccatctgtctgcccaagggtgaactcatcacatgcgtgccttgataaaatttctataactgtaaagccaatgagggtctctttcttgccagtaatagtcttcacaaactccttctcagggttcttagccaacacatcatattcaggagaccctttctcaagcataaatctcctgcaaataattggcctattcaggattaaacctccatatggatactgtccaaggtaacagcaacatgaagagttgaagcaatccatataagggtagcggatgcttcaaccaactcttcccaggtttgcatctgttgccacca

SEQ ID NO: 16227 - DNA, 391 bp, Glycine max
tcaagataaatggcctcagcaaattccttatttctataatgaaattctatcaatagacctccaatctttaatggagagggttaccactactggaaaacccgaatgcaaatttttattgaagcaatagacttaagtatttgggaagccacataaatagggccatatatacctaccatagtagaaagaattacaatagatggtagcacatcaagtgaaagcataacaatataaaaatctagacatagatggtctgaagaggatagaagatgagttcaatacaatctaaaagccaaatacataataacatctgccctgagaatggatgaatatttcacggtttccaattgcaacaatgctaaagagatgtgggacactctacaattaacacatg

SEQ ID NO: 16228 - DNA, 367 bp, Glycine max
  unsure (1)..(367): unsure at all n locations
ttcttgcacacaagattctccttgcctggcacctcnaaaccttcaggttgggtcatattgatgtcttcctctaaatccccatgcaagaatgcagttttaacatctaactactccaagtgaagattctctgcagctacaatactcagaataactctgatggtagtcatctttacaactggagagaagatttctgtgaaatcaattccttgtttctgctgaaaccttttcaccacaagtctctccttgtatcttcttctatcgtcggatttttcctttaacctatagactcacctattctgtaacgctgtctttccttctataaatttagttaaagaccacgtcttattcttttgaaggggtgtcatct

SEQ ID NO: 16229 - DNA, 388 bp, Glycine max
gtgcataccccaaggatccattaggattttacttgtgaaagagagccatgagggtgggctcatgggccactttgggatagacaagacccttgtcttactcaaagaaaagttttattggccccatatgaagaaagatgtccataagcattgcactaggtgtgtggcttgtttacaagccaagtctagggtgatgcctcatgggctatacacacccttacccatcccagctgcaccttgggtagacattagtatggactttgtccttgggcttcctagaacccaaagaggtgtagactctatctttgtggtggtggataggtttagcatgatggcacactttataccatgccacaagatggatgatgcgttccacatctcaaaactcttt

SEQ ID NO: 16230 - DNA, 358 bp, Glycine max
  unsure (1)..(358): unsure at all n locations
ctttcactcgcatgtccgattcaagcgcatagcgtatcgagacgctagaaatctaacaaaggaagctctcgagaaattcaaatggtcataacttttcactcgcatgtccgattcaggcgcataacatatcgagacgcttgaaattgaacaactgattttctcgagaaattcaaatggtcataacttttaactcgcatgtccgattcaagcgcataacatatcgagacgctcgaaattgaacaacggatgttctcgagaaattcaaatggtcataacttttcactctcatgtgcgattcaggcgaataacttatcgagacgctcganattgaacaacggaagctctcgagatattcaaa

SEQ ID NO: 16231 - DNA, 374 bp, Glycine max
tttttattgctgcttaaagcatgtgtgatatacaaaatctgaagatcctaatgagtggtgaatttgatatgaaagatctaggggctgcaaagaaaatcttaggaatggagatctatagggatagaactcagaaaaggctatttttgtctcaaaaggattacattcagaagatacttgtgaggtttggaatggctaactctaaacctatcagcactcccctttcagaaaaagagaagttgtctgttatgataaagattcaagctcaggctgatcaggattatatgtcaaaggtttcatactcaagtgttgttggcagtctcatgtatgccatggtctgcacaagacctgaccttgcttatgctgttagcatggtc

SEQ ID NO: 16232 - DNA, 377 bp, Glycine max
ttcttgtagggttaaagtctcacttattgtcacgtgctcatgcaacaattgttatccgtggctatacgagacatcttgccaaacaaagtcaagttcacgataactcgcctgtgctttttcttccatgctatatgtagcaaagtgattgatccagtaatgtttgatgagctggaaaatgaagccgcaattatattgtgtcagttggagatgtattctccccctgctttctttgacatcatgattcacttgattgtgcatctagtcagagaaatcaaatgttgtggtcctgtttatctacagtggatgtacccggttgagcgatacatgaagatcttaaaagggtatgcaaagaatctatatcatccgaaagcatctat

SEQ ID NO: 16233 - DNA, 371 bp, Glycine max
tgcatgtcttcaacatctgaccacttccagggtgctggaactacttcacatggatttgatggggcctatgcaagttgaaagccttggaggaaagaggtatgcctatgttgttgtggatgatttctccagatttacctgggtaaactttatcagagagaaatcagaaacctttgaagtattcaaagagttgagtctaagacttcaaagagagaaagactgtgtcatcaagagaatcacgagtgaccatggcagagaatttgaaaacagcaggttcactgaattctgcacatctgaaggcatcactcatgagttctctgcagccattacaccacaacagaatgggatagttgagaggaaaaacaggaccttgc

SEQ ID NO: 16234 - DNA, 360 bp, Glycine max
taaacattcaatttcgaggctctcgatatattacggtacttaatcaagcatccaagaaaaaatttattgtcgtttgaatttgctcagagattcaacattcaatttcgagcgtctcgatatattacgggactcaatcagacatccgagtaaaaagttattgtcgtttgaattggctccgagcttcaacattcaatttcgagcgtctcgatatgttacgagactcaatcagacatccgagtaaaaagctattgtcggttgaatttgctcagagattcaacattgaatttcgagggtctcgatatcttacgggactcaatcagacatccgagtgaataggtattggcgtttgaattggctcag

SEQ ID NO: 16235 - DNA, 393 bp, Glycine max
tatgctgcaaacatttacaatatatttcctcaaccttaacagcaaaaccaacctcagcaaaacaattatcacctctccagcaatagatacaaccttggatggaggaatcaccctaatctcagatggtctagccctcaacagcaacaacagtagcctgctccttccttccaaaatgctgctggcccaagcagaccatacattcctccaccaatccaacaacaacaacagccccaaaaacaaccaacagttgagacccctccacaaccttccctcgaagaacttgtgaggcaaatgactatgccgaacatgcagtttctgcaaaagaccagagcctccattcaaagcttaaccaatcagatgggacaattggctacccaattgaatcaacaacag

SEQ ID NO: 16236 - DNA, 406 bp, Glycine max
  unsure (1)..(406): unsure at all n locations
tcttagtttcagatgatgcagatgggttggtagctacctcatgcactcctctaatgactatggcatcatttctggcactaaactgctgggagttggaagccatcttctcaattaaatttctggcttcagcaggagtcattgtctccaaggctccaccactggcagcatctatcatacttctctccatattactgagtccttcataaaaatattggagaagaagctgttctgaaatctgatggtgggggcaactggcacatagtttcttaaatctctcccagtactcatacaggctctctccattgagttgcctaatacctgagatatccttcctgatggctgtggtccctgaagcagggaaaattnntttcaagaatactctcttaaggtcatcccagctcgtgat

SEQ ID NO: 16237 - DNA, 398 bp, Glycine max
tgaatcagacctcagtgtgaaaagttatgaccattttaattttacgagagcttacgttgttcaatttctagcatctcgacatattatgcgcccgaatcggacatccgtgtgaaatgttatgaccatttgaatttctcgagagctatcgatgtttaatttcgagcgtatcgatttattgtaagcctgaaccggacatccgagtgaaaatttatgaccatttgaatttcacgagagcttccgttgatcaatttcgagtgtcactatatgggatgcgccccagttagacattcgagttaaatgttatgaccatttgaatttctcaagagcttccgttgttcaattctgagcgtctcgttatgtgatttgctttgatcgtaaactccggtgaaaagttatga

SEQ ID NO: 16238 - DNA, 286 bp, Glycine max
caccatacagacctttggccttccaatgcacaacctggagcaattgaacagcccgaaacttatgctgcaaacatttacaatatacctcctcaacctcagcagcaaaatcaaccaccatagaacaattatgacctctccagcaacagatacaaccctggatggaagaatcaccctaatctcagatggtctaaccctcagcaacaacaacaacagcctggctcttccttacaaaaggtgttggcccaagcagaccatacattcctccaccaatccaacaacagcaata

SEQ ID NO: 16239 - DNA, 400 bp, Glycine max
tcatttctggtccataggaagacaaactatatcctgtagtttaaggacactttcaactttttacttgttatgttcataccacatttaactcataatatcattaacattcaacaggaatcactgagaactttgaagcattgttcctttcctaatgtatctctggaaggcctaatatctgaccaatggaaagatatgggatggcaaagacctaatccatcgaatgactttaagtacacaaatatgttcttatgagagctcacgtgacattttggtcacttttcctatgtgaaagaatttgcttattaaatgttatgaaaacagtgtcattttagtgctgctaacggttatggtagcgtatacaattcactaatttaatttatgggatataattaaaccaaat

SEQ ID NO: 16240 - DNA, 359 bp, Glycine max
agcttgtagggttaaagtctcacgattgtcacgtgctcatgcaacaattgttagccgtggctatacgagacatcttgccaaacaaagtcaggttcacgataactcgcctgtgctttttcttccatgctatatgtagcaaagtgattgatccagtaatgtttgatgagttggaaaatgaggccgcaattatattgtgtcagttggagatgtattttccccctgctttctttgacatcatgattcacttgattgtgcatctagtcagagaaatcaaatgttgtggtcctgtttatctacggtggatgtacccggttgagcgatacatgaagatcttaaaagggtatacaaagaatctatat

SEQ ID NO: 16241 - DNA, 375 bp, Glycine max
atcttgcagacctaacattatctatgtatgataagcaaaacacatctcaacacatgataataataactagcactatattattcttttaattatagctcaaattcaaatggttgtgattttgtatttgaagatactctccacaaaatatattaaatcgcatatataaataatggtgttgacaagaactactaatacgtcccatgaccccaccccttatctacttattccatattgacacatatgcataattaatattaagctataaacttataaaaaacaaatttttatgttggcaaaaaaatgtcaatattaacaattatctatcactagacaataaataaattcgactaacaaaatttaaatatttaaataaaa

SEQ ID NO: 16242 - DNA, 375 bp, Glycine max
ttcttgtaatctttcacacatatactgtaatcgattaccagagtagattttcagaaaatattctcaacagtcacatctttttatgtgattcttgaatggctatcaaaggcctatatatatgtgacttgagacacgaatttgctaagagtttttcagaacaaaaaaagtcttatcctcttataaagcaaaattgttttatcctcttacaaattccttggccaaattacttgtgattcaataaggaatttttgagtgctcaaattgatcaatctatctctttcaagagagatttcttcttttcttcttcttcattctgaaaagggattaagagaccgagggtctcttgttgtgaaagaattctaaagacaacggaag

SEQ ID NO: 16243 - DNA, 353 bp, Glycine max
ttttcatgcattcttgctagccaagatgtgctgtagccttcggattgagcttgaacttgggcctgaatcagtccctgaccctgagttctccttctccttctcctctttcaaggcacggattagccgatttggcagatacagataccgatcctgaaagcgggaacgattggcgacaattctccgcccaggtctccatacccaaatgtcacccttttccggccaattttccggcgcatatggaaatccctcgccggacattccctgtgccactggctgtaaattcaataatacattattctcctccatgctcatcttccatctccatctccatctcgaacgctacttatctagct

SEQ ID NO: 16244 - DNA, 375 bp, Glycine max
tgacccttacgagatagatgggacgatttttatattaacttggagaaaccttccatgaatctctggtaatatcctgctaggcccaaaaaactgctaaattcaaaaacagacttaagactctcgcactcgagaatgacttctatcttagaggagatacagctataccccttgagatatcacatgccctaggaagctaactttctctaaccaaagctcacactcggacaacttagcatagattattcattcgtatgggtatgcagcacaaacctaaagagctcttcatgttcctctttagccctggaatataccacaatatgttctatgaatactaccacaaaactaacgaggtaagggtgaaagactctatacatg

SEQ ID NO: 16245 - DNA, 361 bp, Glycine max
ttcttgcttatctcttcagggagctcaacacagtactgcatatgttccttcaacttggacctacagcaagcaataaaaacaaagtatataactatatattctctaaaacaacaaaaatcacaacaaatccagcatcatcaagttcacatatcacaaattcaatacccaaattctttgttcaggctgttcgcggccgcagtcgtggccttcccgccaccgtatttcgccacaaaatcatccttcgcacgctccagaaaagccacaggcacctgtctcccaatcgattcatccgcaacaacacaataagctaaaaaaaagtgagtcagacattcatttccaaaaacataacgctgaacttcaa

SEQ ID NO: 16246 - DNA, 373 bp, Glycine max
ttcttcattcttagaatgaagttagtagagatacatatatcgtgaataatcatctataaaggttatgaagtatttcggactatttgcatccatgtctggacaacatatgtctgtatgtatgatttctaataaattagaactcctctttgcaccctttttagacttgttagtttgcttacccttaatgcaatctacacaagtctcaaaatcagcgaaatccaaagtactaagtactccttcatttactaatcgcttgattctttcaatagagatatgtcctaatctccggtgccacaacatagaggattcttcattcacaatacatcgtttttaacccaacagaaacatgcatagaagtagcatcatttttgaa

SEQ ID NO: 16247 - DNA, 378 bp, Glycine max
ttttttatcatgttcacgacaaaggactaaagaagaaatctccgtcttatgaccactacaaatcaagtcctccttgcctaacacatgatcaagccttgagcacaacaggcacggaatttgcaatttgcagtaaccagcaaactttgctataacataagaaaaaacggcatcgataaacaggaaaaagatcagcaaccattcgagaaaagccgatgccaaggccgtggtaacacccggggagagcttacgccactcagaagatgaaattccagtggtagccatcatccaaccaactcaattagcttcgaaaggagaaaccgattgctgaaagttgaaacagatcaaactatgaccttcttcccaaaatgatatgaataa

SEQ ID NO: 16248 - DNA, 382 bp, Glycine max
agcttatcagattaacattttttttcaaaatgcaacaatgagaaaagaaagcacaaagaggaaattcacagaaccaaatgagattaacatcaattcacattttgtttctaaagaatataagagaaaacacccgattcactcaggcagaggaaaacctctcaaaggtgcataattctcatgcaggcaattgttccatcacaattccaatcactgatatgtcataaatcaatttttgcaagtcatttcccatcaaatcaaagataaattgcataatcatcatggatcattagggcttttaggatttggactagctttgaaagaaatattggtttttctggatattcaaaaataccttgagaataggaaagcaacataaaaacaa

SEQ ID NO: 16249 - DNA, 416 bp, Glycine max
  unsure (1)..(416): unsure at all n locations
gacctatgatactcagcttcaatgtccttcttgatcaaagcttcgaagcaaatgttttttatatcgacattnttttcataaagtctatatatttactttaactataaaatatatcacacatattaccaatgttttgttgaggaagctcattgattatgccaatggttcatcttaaccaggtctctgattttggattggctaagttgaccaatgatactaatacacatgtctctactcgtgtcatgggaacattcgggtaatttcgccaccccatggtttaatacctacgtagaaactataaagaaattgataaaaatgggaattaatagtttaaatttgcatgtctaaacaggtatcttgccccagaatactcatcaagtggaacattgacagagaaatctgacgttttctcattt

SEQ ID NO: 16250 - DNA, 268 bp, Glycine max
  unsure (1)..(268): unsure at all n locations
tttgcattagacattttgccctcacatagttctttcgacgggaagggttgcggagggagcctcaactactttgttagtttcatggggcctgttcgctgtttgttggatttggtggagcgaatgtantggtctactctgggccatgtagcattttggaaggaaggagtaagttgctgttgttgttgatggctagaccatctgagattatggtgattcctccatctgggattgtatctattgctggagaggtcataattgctatgctatg

SEQ ID NO: 16251 - DNA, 367 bp, Glycine max
  unsure (1)..(367): unsure at all n locations
ttcttgcaagatggaagcaaagaaatctatcaatggggggtagaataaccctcattaattcagtcttaacagccttacccatctatttgctgtccttcttcaagatacctaaacatgtggtgcaaaagattgtatctattcaaaggaatttcttatggggaagtcaccaagactccaacaagatcccttggggaggcgccatttgcacatgaatcactcttgaggcaaaaatcaaggatcaaatggctcanggaaggtgacagtaacacatgcttctttcataaatccataaattttagaagacattataatgcaattcaaggaatattcattgaaagtatatgggttcagcaaccaaaattggtta

SEQ ID NO: 16252 - DNA, 402 bp, Glycine max
  unsure (1)..(402): unsure at all n locations
tacataatatgtctgaagtttagtacatatgctttttctttaatttcangatcctaagatgttgagtttttaattaaaccatgtgtggcaggaaatgaatgttctgagagattggcatactatgggatgagtacaaacctggtgaactatcttcgggagcgtttcaaccagggaaatgcaaccgctgcaaataatgtcacaacctggccaggaacatgctacatcacaccattgattggagcctttctagctgattcatacttgggaagatactggacaatttccagtttctcaattgtctatgttattgtaagtttagagattttttttttcttgtttgttgagtccccatgttatgctaaaggcatttagtcttcactcttctgacctcagtttatattt

SEQ ID NO: 16253 - DNA, 356 bp, Glycine max
tgcttaataaggctatacgctggaccctggctgacattcctggtattagcccatccacatgtatgcatcagataaatttataggatggggctaaaccagcaagacaaccacagagaagactcaacccggtgattcttgatgaagtgaagaaggaggtaaccaagcttttgcaagctggaatcatttatcctatctccgacagccaatgggtgagtcccgtccaggtagtctcgaagaaaaccggcctcaccgtcataaaaaatgagaaggaggagctgattcctactcgggtgcagaacagttggagagtctgcatctactataggaggctaaaccaagttaccaaaaaggaccac

SEQ ID NO: 16254 - DNA, 376 bp, Glycine max
ttgatcaatgttctggattgtctaactagtgaaaatgagaaagatctaagggctttcttgtaagacttagatcgtgaagaaaccattcctgcagggggaaccaactttgaagaattgaaaagcgggagtcaatccgagaagaccaaggtggagttgaagatcctacccaaccacctgaagtatgtgttcttggaggagaacgagaccaagcccgtggtgatcagcaattagctaacagtagaggaagataacaggttggtagaggtcctcaagagacacagggaggcaattaggtggcacatatcagatctaaaaggaattagccttgtctactgtatgcacaagataatgatggaagaagactatagacctgtca

SEQ ID NO: 16255 - DNA, 377 bp, Glycine max
ttctttttcgtctttaagaagttcaaagctacagtggagaaaaaaagtggttgagaaatcaaagatatgaggactgaccaaggaggagaattcacttccaaagagttttgagagttctgtgaagagaatggaatcagatgtcccctgatggttccaagatccccccaatagaatggtgtgacggaaagaaaaaatagaataatccttgatatggctcaaagcatgctcaaaagcaagaaattgccaaaagaattttgggcagaagctgtggcatggccgtttatctattcaatcgatcaccgacaagaagtgtatggggaaagacaccacaagaagtatggagtgggagaaagtctggtatctctcacttgagggtc

SEQ ID NO: 16256 - DNA, 373 bp, Glycine max
atcttggcattttgatgctgccactgtctatggggagggcgttttcaacatcagatcaaaggtttacatgtcaccaaaactgtggtatctcagagtcaatgtaatagaagctcaagatgtgataccgggtgacagataccgcctaccggaggtttttgtgaaagctcaagtgagctgccaagtgctgacaaccaagatatgccccagcagaacaaccaccccattctggaacgaagatttgatctttgtagcctgtgagccatttgaggagcaattaacaatcactgtggaggatcgtgtgcacccttcaaaagatgaggtactggggaagataagcctaccaatgaccctctttgagaagcgattagaccat

SEQ ID NO: 16257 - DNA, 357 bp, Glycine max
ttcttcaacatcagaccacttccagggtgctggaactacttcacatggacttgatggggcctatgcaagttgaaagccttggaggaaagaggtatgcctatgttgttgtggatgatttctccagatttacctgggtcaactttatcagagagaaatcagacacctttgaagtattcaaggagttgagtctaagacttcaaagagaaaaagactgtgtcatcaagagaatcaggagtgaccatggcagagagtttgaaaacagcaggtttactgaattctgcacatctgaaggcatcactcatgagttctctgcagccattacaccacaacaaaatgacatagttgaaaggaaaaaca

SEQ ID NO: 16258 - DNA, 378 bp, Glycine max
agcttgaagattagactatacgaggtatcttccttgggtatagcaatatctctaagggctactgtgtctacaacttgcaaactaagaaactcgtcatcagtcgagatgttgaagttgatgagtacgcttcttggaattgggatgaagaaaaagtggagaagaacgttcttatacccgctcaactacctcaagaagaagctgaggaagaagacccaggtgaaccaccttcacctgcaccacaacaacaagatcaagaactatcatcaccagagtctactccaagatgagtaagatctttggtggacatatatgaaacctgtaacttagccatacttgaacctggaagctttgaagaagcgtcaaagcaggacatatggg

SEQ ID NO: 16259 - DNA, 354 bp, Glycine max
ttcttagacgaccttgtttgagtcgagaatactttattatttatttggacaagtttgaatatgatgtagaagaaaatgaatgtgagcctttttcccctttgaaagacttaaaaaaaaagttttaaaaatacttttaattaagatttgaattttttttccttattagtatatatgtgaggggtagagagtgtcacaagatattaggagcttccatgggttagcaagcttctataaaaggttcgttcctaatttctctacaattgcatcacctctcaatgagctggtgaagaaagatgtggcatttacctggggtgaaaaacaagagcaagcctttgctttgttcatagaaaagct

SEQ ID NO: 16260 - DNA, 368 bp, Glycine max
ttcttaagctccttcaactgcacaaggctcttaatatttgaagagtatccttgtggaaccttcacccgacgaagacactgacaaaaacttatctattccttcttggacaaagtatggcaggctgggggcaagtaaattttcttcccatcagaccttggatgcaactgtgatcgtatacccatatcagctagatcttgacgggtattcaagccatccttcgtcttgccttgaatgttaaggagcgtcccaatcacactgtcacaaacatttttctccacatggataacatcaatacaatgtctaacgtcaagatcacactagtatggaagatcaacgaaaatggacctcttcttccatatgcaactctg

SEQ ID NO: 16261 - DNA, 370 bp, Glycine max
  unsure (1)..(370): unsure at all n locations
acttaattaacaaaatctaatccggaaatatatcttatgnncttgtttgtttaaagaaagtgataaatcagcttcaaatcaaacaacctgcaattgagtgctctcgtccagtacgacaacgtcttggatatggatgttcactgcacccaagaattggtcttttgagatcaatgctgaaatcaggatctccaagatcattgtaaacatcataatcatagattctttcataactcttacgttctccttctccatttcctctcaatagcattagctccacttctctaagtcttctcaacccacatggtgtttgtgatggcaaataagactgtttcagaataagttaactcgatttaaaaaaaaaaagcctata

SEQ ID NO: 16262 - DNA, 429 bp, Glycine max
  unsure (1)..(429): unsure at all n locations
tgccacggtccgagcattgtgatgagtgggtaacatacccaggcgcaaccccttcgaaaacctatcgacgatgacaaagatacacgtgttgcccttgtaagagggtaatcccacgataaagtccatggataaataatcccatggttgtactggtatcggaagaggactcaacagcccatctggttttctgttatcgtatttggtacattggcacgttaagcatcctgctatgaaggcacgggtatcagctctaacggaatcccacgtaaagttttcttgtaagcgatgaagcgttttctgaatccccatgtgaccacctgtcggagattggtggaatgcttctagtaacaacttagtgaaggaggaatttgagggaatccanatacggcctctgtgtaagatcanataagcagttaacgtgtactctgg

SEQ ID NO: 16263 - DNA, 413 bp, Glycine max
  unsure (1)..(413): unsure at all n locations
gtctatgtggataaaagagcttaanaactgagatgttagaaaaggttggttatccattataaatgtcttaatcattttctcaaagatgataagtctcccatcccgaaagcttcttcactcccaaccttgatcagaaaatcaaacttattttcaaagtttgatttaaaattagggttttggcaacttggcttacaactagaagatcagtataaaactgaagatcagtattaaacagtcttttgtgttccgaatgctcagtaccaatggacagtccttccttttggtttaaaagtatcaccctttctcttccacaaagccatgactaagatttttagcctattttggacaacatcattgnttacatagatgatatccttttctgttcaaaagacattgtctctcataaaaactta

SEQ ID NO: 16264 - DNA, 302 bp, Glycine max
  unsure (1)..(302): unsure at all n locations
ctcagcttgaccattcccttgcctctttgttggtttgctattangtactcangcacatcacgtangtgcggaggtggtggattcttgctcaaaactttgtcatgcttcagtagatctgttcaaatacaatttcaatcctttaaatttaacttcaaacataagttttaaaaaaaataaaaaacaataaatgccaattgtatattttaacgataacatcaacctattacattacctaggtcttttggattagtttcgaagtgggctttcaacctaaaataaaagcacaagtttgcagaaatgaa

SEQ ID NO: 16265 - DNA, 418 bp, Glycine max
  unsure (1)..(418): unsure at all n locations
cttcaaactcagcttggtaacaatatcctttanataagaaaaatgtttataatatcttatcaatactaattaatgaacttaaaggcgaaatacggaagataaaaaattacaatgttcatattttttatgatttatgcatttaatattttttttcttttaatttcttaactaatatctaaaagcgctaattaacaagaaccataaaagtaaaccaatgagtaactaacaatcccgttataaaaaaaaaggttatcatcatgtcttttttggactaatcatatcatcctatgatttcatttgacaaataataaagttaaaaatgaatcgaaattaaaatacataggaccgaataggagttatgagttaatatatttaattaagacacatatctgttaacaanattgatacagcttgaatg

SEQ ID NO: 16266 - DNA, 385 bp, Glycine max
  unsure (1)..(385): unsure at all n locations
tcttagtctcaactgatgaagatgtaattcgggctactctatgcactcctctaatgacaatagcatcatttttggcactaaattgctaggagtttgaagccatcttctcaattaaatttctggcttcaataggggtcatgtctccaagggctccaccactggcagcatcaatcatacttctctccatgttactgagtccttcataaaaatattggagaagaagctgctcagaaatctggtggtgagggcaactgacacatagttntttaaatctctcccaatattcatataggctctctccactgagttgcctaatgcctgaaatatcctttctaatggtcgtggtcctagaagcagggaaatttttttctgagaatactctctt

SEQ ID NO: 16267 - DNA, 410 bp, Glycine max
  unsure (1)..(410): unsure at all n locations
tgtagcaattcttctaggcttggagtcataacatgcaatcctctagaacccttacctcccactctttcgttataccgagactcgggaaccccaataagttttgcctttntaatgtactccgaacaaaacttaatagctttttttgccacgtaccttttaacaatagatgcttcaggatagtgtaaattctttgcatacccttttatgatcttcatgtattgctcaaccgaatacttgcattggaaataaacaaaaccacaacatttaatttccctcaccagatgaacaattaatagaaccatgatgctgaaaaacaaaggaggaaaatacatctccaatggacataagataataacaacctcattttctacctcatctaacttgacaggatcaatgcacttgctacatat

SEQ ID NO: 16268 - DNA, 371 bp, Glycine max
ctaatgaattgggctctaattgcccatcagacatggcaagttaagccaaatttaatttactttacctcacggcatcaagcaatttgcttgcaattccttttcttctgttagagggagcaacccaaatggccctaatgccacaagcagcgatggttggtttgctatcacagaagattgcaccttccatcctttcaaaatcactcaaggaagcaacttttttttcaacctccctttggaaaataacattcccaaaccgaaaagtggtagaacgcgtcctcacttcccttttcttcacgctatcaggagagccagacacaactttgaatgccttttcaatgggttctgcaacgaggcactccacaaccctgtga

SEQ ID NO: 16269 - DNA, 398 bp, Glycine max
tgtttgtcgtcttcaacgttctctctacgggcttaaacaagccagccgacaatggtttaccaaactatcaagtttcttagtctcccatgggttccaacaatctaactcggaccactctcttttcttaaagctcactaagtcagccactactatactcttggtgtacgtcgatgatatcatactcacagggaacagtatgctggaaatacaagatatcaccaccctcttggattaaacattcaaaataaaagatcttggtgacttgaaggtctttttgtgactcgagattgcccgtaccaatcatggaatccatttatggcaacgaaaatatgccttagacattttgtctgattcagatatgctaggatgcaagccacactcgacacccatggattatt

SEQ ID NO: 16270 - DNA, 444 bp, Glycine max
actatcaatactcagcttaacattcaatttcgaggctctcgatatattactgtacttaatcaagcatccaagaaaaaatttattgtcgtttgaatttgctcagagattcaacattcaatttcgagcgtctcgatatattacgggactcaatcagacatccgagtaaaaagttattgtcgtttgaattggctccgagcttcaacattcaatttcgagcgtctcgatatgttacgagactcaatcagacatccgagtaaaaagctattgtcgtttgaatttgctcagagattcaacattgaatttcgagggtctcgatatcttacgggactcaatcagacatccgagtgaatagttattgtcgtttgaattggctcagagcttcaacattcaatttcgagggtctcgatatattacgggactcaatcagacatccgagtaaaaatt

SEQ ID NO: 16271 - DNA, 402 bp, Glycine max
gagagcttccgtgttcaatttcgagtgcctgtatattgatgcgcctgaatcggacatccgagtgaaaagttatgaccatttgaatttctcgagagcttcctatgtttaattttgagcgtctcgatatattatacgcctgaatcgaacctcagtgtaaaaagttatgaccatttgaatttctttagagcatccgttgttcattttcgagcgtctctatatgtgatgcaccttaatcggacctccgtgtgaaaagttatgaccatttgaatttctcgagagcttccgttgttcaatttcgagcgtctcgacatattatgcgcccgaatcggacatccatgggaaaagctatgactatttgaatttctcgagagcttccgtagttcaatttcgagcgtctggaca

SEQ ID NO: 16272 - DNA, 431 bp, Glycine max
  unsure (1)..(431): unsure at all n locations
nttgagcaattcanatggtcataacttttcactcgtaggtccgattcatgcgcataatatatcgagacgctcgaaattgaacaatggaagctcttgagcaattcaaatggtcataactttttactcagatgtcctattcaggcaaataatatatcgagacgctcaaaattgaacaacagaagctcttgagaaattcaaatggtcataacttttaactcggaggtctgattgaggcgcattatatatcaagacgctcgaaattgaacaatggaagctcttgagcaattcaaatggtcataacttttcactcggaggtcctattaaggcgcataatatatcgagatgctcgaaattgagcaatggaagctcttgagcaataacaatggtcataacttntatactcgaggttcgatngaggcgcataatgtatc

SEQ ID NO: 16273 - DNA, 434 bp, Glycine max
  unsure (1)..(434): unsure at all n locations
tgctggcctcaaacttgctaataatatgctgccacacttaccgacatttagagcttacccctaaaggaataccaaggtaagaaaaaggaaattccagttggctgcaattgagagaagaagctgcctccctacaccagcccacagatttacccaaacacccaaattggctcttattataggttatctttaaaccagaaaccaattcaaagcttttcaggatacactttaaaactttaacattatcattagtggcagtcccaaagaacaaggtgtcatcagcatattgaagtatattaacttcctcttttntctttcccacttggcagctattgaagagattcttttctactgctgatctcatcaacccagtaatgccttccaccactatattaaatagcaaaggtgcaaggtggtcaccttgccttaagcctctc

SEQ ID NO: 16274 - DNA, 441 bp, Glycine max
  unsure (1)..(441): unsure at all n locations
gtactctagcttaaagattggctaagattttgttaaaacataagcacttanacaatgaaggaaagctggagttgctgcacatgatgtccaacgttatgtcaaagaataagatcgggctgcacaatgcacaaagcaagataaagtgtcaaatgaagaattgaagctgcaggattcacgatgtcggatataatgtccaggacatcctgcctgaaaatactggaattgctaaaagcattgaagctgcaggatccacgatgtcggatacaatgtccaggacatcctgcccgaaaatactggagttgctaaaagcatttgaagttgcagatccacgatgtcggatacgatgtccaggacatcttgcccgaaaatactggacatataaatctgttatatctttaacagattattgtgcagttagcaagagattagatgatctatctt

SEQ ID NO: 16275 - DNA, 421 bp, Glycine max
  unsure (1)..(421): unsure at all n locations
tctgttctgaattcgagcatctcatatactactggaaacaatcggacatccgagtaaaaaggtttgttgtttgaattttctaagaggttatgatttcaattntgagcgtctcgatatattacgagactcaatcaggcatccgagtaaaaagttattgtcgttagatttttcttagagcttctatttccgattatgagcgtctcgatatattacgagattcattcggacatccgagtaaaaagttattgtcgtttgattttgctcanagcttctgttatgaatttcgagtgtctcgatatactacgggacacaatcggacatccgagtaaaaaggtattgacatttgaatttgctcatagcattcgttgtcaattacgagcgtctagatatattaaaggattcattcggacatccgagtaaa

SEQ ID NO: 16276 - DNA, 386 bp, Glycine max
  unsure (1)..(386): unsure at all n locations
ntaatactattcaatgttacaccatcatatagactatataacgattggtggcggttgtgtcggcaacgataaccgtgataatagcggtgacaataataataacgatggtggtggcgatgatggtattgatggtggtgataatggtggcaatggcgatagcggcgacaatgaaggcaacaacaatgacggtggtggtggcggcgacgatggtggcgacaatggtaggagtgacaacgccagtgatggtggtgtgatggctgtcatggtggagaagcgatgatggtggggaagatggtgatgatggtggtggcgatgatgacagtgatagtgatggggttggtgagggcaactatcctattctgttgctctctaaccaattcaccccc

SEQ ID NO: 16277 - DNA, 408 bp, Glycine max
  unsure (1)..(408): unsure at all n locations
ttctggtgggacatcttcacttgctttccaatctgacattcaccacagattctgccttcttctattttcaaattgagaatgcctctaacagcacctttgtcaatgattatcttcatgcctcttaagtgcagatgtccaaatctttgatgccatattctgacttcatcttctttggaggatagacatgtggaggagtaactggtttcttgaggtgtccataggtaacagttgtcctttgttctgctgcccttcattagaacttcactcttctcatttgtcaccaagcattctgactttgtgaagtttacattgaatccttcatcacacaactgactgatgctgatcaagtttgcagtcagtcccttcaccagcagtactntgtccagactaagaagtccatcatgggct

SEQ ID NO: 16278 - DNA, 407 bp, Glycine max
tcaagaaaaagatggcctcagcaaattccttatttccagaagggaattctatcaatagacctccaatctttaatggagagggttaccactactggaaaacccgaatgcaaatttttatcgaggcaatagatctaaatatctgggaagccataaaaatagggccttatatacccaccacagtagaaagagtttcaatagatggtagttcatcaagtgaaagcataaccatagaaaaacctagagataaatggtctgaagaggatagaaaacgagtacaatacaacttaaaagccaaaaacataataacatatgccctaggaatggatgaatatttcagggtttcaaattgtaagagtgctaaggaaatgtgggacactcttcgattaacacatgaaggaactacagat

SEQ ID NO: 16279 - DNA, 412 bp, Glycine max
tccatcacttttcacacagaggtcagattcgggctcataatatgtcgagatgctcggaattgaaccacggaagctctcgagtaattcaaatggtcataacttttcacacagatgtccgattcgggcgcataatatgtcgagtagctcgaaattgaacaacggaagctgtcgagaaattcaaatggtcataatttttcacacggaggtcagattcgggcacataatatgttgagatgctcggaattgaaccacgaaagctctcgagaaattcaaatggtcataacttttcacacggttgtccgattcacgcgtatgacatatacagacgctcgaaattgaacatcgaaagctcttgagaaaatcagatggtcataacttttcacacggatgttcgagtaaggtgcatcacata

SEQ ID NO: 16280 - DNA, 345 bp, Glycine max
agcttccattttcaatttggagcgtctcgatatattacgggtgtcaactggacatccgtgtataaagttattgtcgtttcaatttgctcagagcttcggttctaaattttgagcgtctctaaatattacgggactcaataagacatctgagtaaaaagttattgtatgttgaatttgctacgagcttccgttttcaacttggagcgtctcgatatataacgggactcaatcggacatccgcgtataaagttattgtcgattgaatttgctaccagcttcagtattcaatttggagagtctcgatatatttcgggactcaaccagacatccgagtaaaaagttatt

SEQ ID NO: 16281 - DNA, 395 bp, Glycine max
tgtagcaatatcaaacgaaaataactttatacacggatgtccgaatgagtctcgtaatatatcgatacgctccaaattgaaaacataagcccgtagacaattcaaaggacaataactttttactcggatgtccgatagagtctcgtaatataatgggacctccaaattgaaaatggaagctcctatcaaattcaaacgacaataactttttgctcggatgtacgattgagtcccgtactatattgagatgctcgaaattgacgacacaagctctgaacaattttgaacgacaataaatatattctcggatgttctattgagtcccgtaatatatcgtgctacttccaattgtaaatggaagctcgtaggaaattcatacgacaataactttatac

SEQ ID NO: 16282 - DNA, 429 bp, Glycine max
gacactatagacaactccacgcttaggattcaacattaattaccgtgcttctttcccacttgttgaattatatgcgactttatctagatgaaaacgatcgaattctactccctgcgggatattggattatatctgggccaccaatcccgtggaagaatcattggaaaggatgggaaacaacaccggaggatttgaatgatgagcagaccaaaattgagaatgtagccaaaagcctgtgctggaacaagctactggagaaggacgatatagccatttggcagaaagccaagaaccatttggattgcaaagccaaccgtaagctctctcacaatctgcctctctgcaaggcacacagtaaccctgacacggcctggtatgtgcttcatattccattgtcccttgtatttcattcacgaaatatttccatct

SEQ ID NO: 16283 - DNA, 404 bp, Glycine max
  unsure (1)..(404): unsure at all n locations
tctacagaaggtttgttcctaatttctctacaattgccttacctctcaatgagctggtgaagaagaatgtggcatttacttggggtgaaagacaagagcaagccttttttttctcaaagaaaagctcatcaaggcacttgttctagctcttcctcacttttctaaaacttttgagctagaatttgatgcctctggagtgggagttggagctatattgttacaaggcgggcaccctattgcttattttagtgaaaaacttcatggtgcccccctcagctaccccacctatgataaagagctntatgccttaataagagccctccaaacttgggaacattaccttgtttccaaggaatttgtcattcatagtgatcatgaatcacttaagtacattagatgacata

SEQ ID NO: 16284 - DNA, 384 bp, Glycine max
agcttatcaacatcaaacttggagaaagagttcttggggtcaagacatgagaagcaatcaagtataatgttacttccttcactaaagcggtgatccatctccacacatattttatcaatagcaacataaaaaatctctgcacggtaatgatgaagattagtgatagtcctcccttctgctcttgaacgaccccgaactggtatttcgtcatccatatttggtaccagaatacttttagcaacacacaaaatccttggacatcggcaaaaaaattattccagccactctctctcattgtgcccaaccgagctttgacaacatcaactaattctctttgcaatatatttgaaagctcgtttgtttcctatgacctggatcacgcac

SEQ ID NO: 16285 - DNA, 431 bp, Glycine max
  unsure (1)..(431): unsure at all n locations
acactatanacaactcatgcttaagccttgaattgagtgccattaccgtgttgatttttaagggagaccatatctgtagatgaggtgtttccaggtgaacttttctacctccctaactgaaatatcttgtaatggccttgcctcagtccacttagtgaaatagtcgatggtgaccaataagaacttgaccactcctatggcttttggcaatgggttcaatatgtccatgccccatatggcgataggccaagtggaactcaagctatggtggttgttgggaggggtgcgtggaacatctgtgaattcttacctcctctgtaagtagaaggtggcagccaataatatccgatacacaacactttggttgctagggaacgacctccgatatggaggccacatattctttcatgttagtatcgcatgacatagtc

SEQ ID NO: 16286 - DNA, 403 bp, Glycine max
tgaagacaaactggatgcgttggtcaacttggtaacccagctggccttgaatcagaaatctgtacctgtcgcaagggtttgtggtttgtgctcctctgctgaccaccatacagacctttgcccttccatgcagcaacctggagcaattgagcagcctgaagcttatgctgcaaatatttacaatagacctcctcaacctcagcagcaaaatcaaccacagtagagcaattatgacctttccagcaacagatacaaccctggatggaggaatcaccctaacctcagatggtccagccctcagcaacaacaacagcagcctgctccttccttccaaaatgctgctggcccaagcagaccatacattcctccaccaatccaacaacagcagcaacctcagaaacag

SEQ ID NO: 16287 - DNA, 382 bp, Glycine max
agcttcaactttcaatatcgagcgtttcgatatattacgggactgaatcagacatccgagtaaaaagttattgtcgttttaatttgcttagagcttcggtattgcatttcgagcgtctcgatatattacgggattcaatcagacatcagagtaaatagttattatcgttttaacttgcttagagcttcgataatcaatttcgagcgtctcgatatattacgggactcagtcagacaaccgagtaaaaagttattgtcgcttgaatttgctcagagcttcggtattcaatttcgagcgtctcgacatattacgggactcaattagacatccgagtaaaaagttattgtcgtttgagtgttctcagagcttcggtattcaattt

SEQ ID NO: 16288 - DNA, 369 bp, Glycine max
tgctttgagcaaattcaaacgacaataacttttgactcggatgtccgattgtgtcccgtagtatatcgagacgctcgtaattgaaaacggaagctctaagcaaattcaaacgacaataacttttgactcgggtgtccgattgtgtcctgtagtatatcgagacgctcgaaattgaaaactgaagctctgagaaaaatcaaacgacgataactttttactcggatgtccgattgaatcccgtaatatatcgagacgctcgtaattgaaaatagaagctctgagcaaattcaaacgacaataacttttgactcggatgtccgattgtgtcctgtaatatatcgagacactcgtaattggaacagaagctct

SEQ ID NO: 16289 - DNA, 414 bp, Glycine max
tctgttttcaatttcgagcgtctcgatattttacggtgctctatccgacatccgagttaaaagttattgtcgtttgatttttctaatagcttttcttttcaattacgagcgtctcgatatactacgggacacaatcggacacccgagttaaaagttattgtcgtttgaatttgctcaaagcttttgttgtcaattacgagcgtctcgatatattacgggactcaatcggacatccgagtaaaaatttattgtcgttggatttttctcagagcttcagttttcaattacgagcgtctcgatatactacgggacacaatcggacacccgagataaaagttattgttcgttgaatttgctcagagattctgttttcaattacgagcgtctttagatattacgggactcaatcggaca

SEQ ID NO: 16290 - DNA, 419 bp, Glycine max
tatcaatacatttgaagaggccatccaccacttcattatcactgtcaatgtttggattggtgtaaaagaactttggattcagataataacccgctgcatgcaaagggtggtgaagttggcaatcccatcttttatcaatgattgcaaggatatccttatacttcccttcattgttattgaaagctctttgaattgcttctttggccctatccattgcttcataaatgaaacccattgtaggttttttttcattatccaccaacctcaacacacttacaagaggccccatagcctttaaagcataaacaacatcattccaaaatgatggcataagaacaacatctgttgcttgcttccccttgggctctttagctgccttagacttcaaccattcatctgaattaaacatccttctaaga

SEQ ID NO: 16291 - DNA, 381 bp, Glycine max
tgcttatagttattggagggagaataaaacaatccaaaatcaattgtacccttcaagtaacaaagaattctttttgcggcttttagatgaggagaggtaggagcctccgtaaagcgacacacaactcccaccgcatatagaatatcaggccttgtattggttagatatcttaaactccccacaagactcttgaagaccgtggagtctaccttctctccttcatcaaactttgataacttcatgccaccttccatatgtgttttcacgggattacaatcaagcatattaaatttcttcaacacttcttttgtgtagcttccttgtgagacaaagataccattctacgtttgcttcacttccattcccaagtaatatgacatg

SEQ ID NO: 16292 - DNA, 388 bp, Glycine max
agcttgtttaccccatgttgaatttgcttacaatagagctgttcatagcaccaacaattgttctccttttgaagttgtttatggttttaacccactaactcctcttatcttttgcctatgcctaatgtttatgtttttaagcataaagaaggtcaagcaaaaggcggactatgtgaagaagcttcatgagagagtcaaagatcaaattgagagaaaaaataaaagctatgctaaacaagccaacaaagggagaaagaaggttgtcttcgaacccagagattgggtttgggtgcacatgagaaaagaaaggtttcgaaacaaaggaaatcaaagcttcaaccaaggggagatggaccatttcaagtgcttgaaagaatcaatgacaatg

SEQ ID NO: 16293 - DNA, 383 bp, Glycine max
agcatctcgtgccaatccttgtatgacacggtcatcttttggataatcttttttatattcttattggccgcttccacggctccattcatctttggccggtagggcgtggaattgtgatgctgggttttaaactcctcgcacatttccgccatcatcttattattccggttggtgccgttgtccgtgataatcttccttggcaaaccatatcgacagatgatctctttcttaatgaacctgaccaccacattcctcgtgacattggtatatgaagccgcctcgacccacttggtgaaataatctatcactacgaggatgaagcgatgaccattcgaggccttgggctcgatggccccgatgacatctattccccacatggagaa

SEQ ID NO: 16294 - DNA, 412 bp, Glycine max
  unsure (1)..(412): unsure at all n locations
ntgcacgtatcggtcaagtgtatggaccacgttgtatccaaggtgctcatcgataatggttccagtttaaacgtgatgcccaagagcactttggagaaattaccattcaatgcttcccacctaaagccaagttccatggtggttcgtgccttcgaaggcacccggcgagaggttaagggagagatcgacctccctgtacagatagaccctcacacctgtcaagttaccttccaaataatggatattaaccccccttacagctgcctgttggggcgcccgtggatccactcggtgggagttgttccctctacactccaccaaaagttgaaattcgtagtggaagggcatctggtcatcgtatcaggcgaggaagacatcttggtaagctgcccatcctctatgccttatgtgg

SEQ ID NO: 16295 - DNA, 384 bp, Glycine max
agctttaagtgtgattcctttctttttcttgtcattctcctcatgctgattcaatcttattagttccatttcatgttcctgtaactttccaaacaaagttgcaagagacatgtttgaaagatcccttgattctgtaatagccattacctttgattgtcattccctgcttaaacatctcaaaactttattaataagatccttattgggaaatatctttcctaatgatgcaagatgatttactatgtgtgtgaatctcttttgcatgtcctgtatagtttcattaggattcatcctatacaattcatattcatgagttaggtatttattctagacctttttacatttgtagttccttcatgggttacttgtaagttattccacata

SEQ ID NO: 16296 - DNA, 425 bp, Glycine max
tgcaccaacttctcatttcatccataagatactagttcatattttaatttaatgttcagtaacaagactaaacatcataataagaccaaagatatataaattttttatttgatacttatctgtatatactaaaaggaaaactgctgaaattagtaattattgattatttttgcaacatataggaaagaagacgttatgtgtgcttttttagtgatacgatgttatgtgtttaacagactaataatatagttttacgtattgaaacatcaaattataaatattttgtataaaaattaatggtatatagttgttggatgtatttattcagaaaaaaaggttattgggtgtatttctttttattggccctccctgtcttctaagtttaagtttgtccctgcaacatgtcattgaccaattctatgttt

SEQ ID NO: 16297 - DNA, 415 bp, Glycine max
gtgagaaatacttgctcgatatggccgacgtattactggtccctgtcacataccacgctctagggcatgccatgaaccttgccatagattctcatgactaactgagctacaccaccggcggagcgttgctgtggaagtgatcccagatgagaacctttcgcaagcggtcaaccaccaccaacataactgagtgaccgtgatacgaaggaagaccaacactactgtctagagagaaatcctgccatggttacgccgaaatcggaaggggagacaggaggcctggggcacgactgagaactgacttagttggctgactggtggcagagctcgtgaccaatagatggatgcctcgatgcatagatggccagacaaaattctctcgagtacgggctaacgtcgtcattactcccatatg

SEQ ID NO: 16298 - DNA, 409 bp, Glycine max
tgacaaaaggcctacctcatgtggtatgcgtccaatgaagttgtttaaaccgaagctaacgcgagataaggaagaaaggtttccaatccaagttgggattgttcctgtaagattgttaagacctgcagctagcactcttagatttgtgcagtggctgagattacttggaaaactgccaccaaagttgtttatgctgaagtttaggtattgaaggtatagtaaacgaccaacctcttgaggaaattcaccatggaagctattgtttaacaagttgactgtggtgaggaatgtgaggtttcctatgaagggtgtaagagtgcctcctagtctcagttgctcaaggctaaggtgtgtgactcttccattggagatgttgcatgtgattcctatccaatcgcagtgattgatg

SEQ ID NO: 16299 - DNA, 422 bp, Glycine max
tagaatacctgctgccaattcagttcccaagtctaattacaatttcatttccattaaatctgtattgtcttgtaataaagaagtcattgatatttggcatttccgtttgggtcatccttcatatgataggatgcaagtgttgaaacaaacttatcctatgttgacttgtgataaaacctttgtttgtgatacttgccataaagcaaaacagagaaaacttccatttcccaatagtgactcctatgcttctagtcctttctctttgatacatgtagatatttggggtccttgtaccacaactactttgaatggacataagtattttcttacaattatggatgatcatactacgattgtttggagttttataatgacttcaaaagctcagactcaaactcatttacaagcctttgtttcctatg

SEQ ID NO: 16300 - DNA, 257 bp, Glycine max
tgtagcaaatgcaaacggcgataacgttttatctctttgttcgattgagtcacgtaatacatcgaaacgctcgaaattgaaaacagaagctctgtgcaaattctgacgacaatacattttaactcggatgtccgattgagtcccgtaatatatcatgacactcgaaattgagaataaaagctctgaacaaattcaaacgacaataactttgtactcggatgtccgattgagtccaccaatatgtctagacactctta

SEQ ID NO: 16301 - DNA, 377 bp, Glycine max
tgcttggtatgaaaagttaagttcttttttaactgaaaatagttttatatgaaggaaagtagatactactttgtttcacaaagattatggaaccctaaaccctaatcatctagatatatatggatgatatcatattcggttgtactattgactctctgcgaaaggatttttccaagtttatgcaggccgagatcgaaatgagtgtgatgggagaattgaagtttttccttggacttcaaatcaaacaagcagacgaaggcatatgcatacatcatacaaagtacgtgaaggaactcttgaaaaaattttagatggacgatgcaatatatatgaaaactctcatacatccgaccactatacttagactagatgatgat

SEQ ID NO: 16302 - DNA, 415 bp, Glycine max
cttctggtgggacatcttgacttgctttccaatctgacattcaccacttattctgccttcttctattttcagattgggaatgcctctaacagcacctttgtcaatgattttcttcatgcctcttaagtgcagatgtccaaatctttgatgccatattttgacttcatcttctttggagaatagacatgtggaggagtaactggtttcttgaggggtccataggtaacagttgtcctttgatctgctgcccttcattaagacttcactcttctcatttgtcaccaagcattctgactttgtgaagcttacattgaatccttcatcacacaactgactgatgctgatcaagctcgcagacagtcccttcaccagcagtactttgttcagactaagaagtccctcatggactatcttt

SEQ ID NO: 16303 - DNA, 381 bp, Glycine max
agcttgtaatcgattaacgtaattgtgtaatcgattaccagacataaaaaattcaaatttcaagtctaaagagtcacaaatcttcagaaactaactgtgtaatcgattaccacttttatgtaattgattaccagtaaggaatttttgaaaataacttccaagagtcacaactgttcaagaaatttgttatgaccatctaaggcctataaataggtgatttgggatacaaaattttttagagtgtttctgaacaaaattgtcttatcctctcaaaaccaaattgtcttatcactctcaaaatattccttggccaaacacttgcaaattcaataaggaatcttgagggagcttcacattgtaatatccttctcttaaagagag

SEQ ID NO: 16304 - DNA, 422 bp, Glycine max
tgtcccaattgagccagtttattcctcttgttgatgcaccttttgatccccaccaaaataaattcagcatcatttaaatctcatcctctagtgtggttggaagcaagtggatactcatgcaatatgaagggatttcctaattagaagttccttattactagctttggaaagatactttctcgagtagtgattgatgcattccaaaatttgatcctttagacaactgaaaatttctttatttcatttgcctatgatagaagggaggcctaagtattttctagaccctatgattgtagaggcacccaaaagaaacatgattgtttgcgtcaaatattgttgagtgttggtgctgaaaaaattttatgacttgtctaaattaatcatttggtcaaaagcccttccataggtatctaggaattgag

SEQ ID NO: 16305 - DNA, 420 bp, Glycine max
tttgttttcaattacgagcgtcctgatatattacggtatcttttcggacatccgagtcaaaagtgattgtcgttagaatttgctcagagcttctgtcttcaattacgagcgtctccatgtattacgggactcaatcggacatccgagtaaaaagatattgtcgtttgattcttctcagagcttcaattttcaattacgagagtctcgatatactacgggacacaatcggacatccgagtcagaagttattgtcgtttgaattggctcagagcttctgttttcaattacgagcatctcgatttaatacgggacacaatcggacatccgagtcaaaagttattgtccgttggatttgctcagagcttctgttttcaattacgagcgtctcgatatattaccggactcaatcggacatccgag

SEQ ID NO: 16306 - DNA, 374 bp, Glycine max
agcttgcctgaaactatatgagatccctttgtcgttgccttccaacgagggtgaagcttaaggagaacccaatctcctatctggtagttcacttcacgacgtttcccatcagcttggcttttcatagcagcttgttccttagaagcttatttcgaatagcttggaaagtgttatccctatcagttaacatctcttcaacggcctcaatgttcgaagaccctgtaatatattcaggaaagttaaagggttttcggccaaaggtgacaccatacggattggctccagttcccgcattccatgaagtattatgggaccattcgacccacgggaggagcttcccccccatgcttggccgacgatggatgaaggctcgc

SEQ ID NO: 16307 - DNA, 422 bp, Glycine max
  unsure (1)..(422): unsure at all n locations
tctaaactntatacaagaacgaagctctgataccacttgttagacaagtggcctcagatatcttaattagggggggtcgaattaagatattgcaaactatttccccaattaaaaatctatttcaatttcaatgcaagttacaagttcccttaaaatgaactcttaaataatgattcaaatagaacaatctgaatataaatgtaaagcaataataaataaaagagtttaagggaagagaaagtgcaaactcatatttatactggttcgaccacacccttgtgcctacgtccagtccccaagcaacccgcttgagagtttcactatcttgtaaaatccctttacaagttctgagcacacaaggacaatccttcctttgtgttcatatttttttacaacaagagaccctcggtctctcaatccct

SEQ ID NO: 16308 - DNA, 362 bp, Glycine max
tgcttccattttcaattacaagcgactcgagatattacgggactcaatcggacattcgagtaaaaagtcattgttatttgaatatgttcacagctactgtattcaattttgagcgtcatgatatattttgggactcaatcggacatccgtgctaaaagttattgtcgattgcatttgctacgaggcttcgttttcaattacgagcgtctcgagatattacgaaactcaatccaacctccgagctaaaagttattgccgatggcatttgctacaagcttgcgttatcaattacgagcgcctctatatattacgggacttaatccgacctccgagataaaagttattgtcatttgaaattgcta

SEQ ID NO: 16309 - DNA, 406 bp, Glycine max
  unsure (1)..(406): unsure at all n locations
tccatcaggaagggtcgtccctgtgtggttcagactttgtaaaaggagttttacaaagagagtggaaaatttcaagtgggttgcttgaggactggacgtagacacgggaagtggccgaaccagtataaatcaagtttgcattccttctttccttaaacttcttttatttattgctatttatcttttgctttaaagaagtttattttgaattgtcttttgagtaattcatgttaagggtgcattgttaatccaaaaagagagagtgaaagtttaattggggaatagtctttgtattttaattcaaccccccaccccttcttaagataactgaggccatttgtccaacatcctattcttgataactcacttctctctaanaagacaaactttccggaatgataaaatg

SEQ ID NO: 16310 - DNA, 417 bp, Glycine max
ctataaggaacatgctggagaggaattgaagttggtgtgcttccagaagtgatgccacgccaactgaataggccactatgtgatttcatatctagttaaacacctcacataaggatctaagcatcagttcactacttcagtctgcccatctattagaggacaataagcagtgctaatcttcaagagggtacctggtctctggaacacttccttgcaccagagactcatgaaaagactgtcgatgccagatactactgatgcaagataaccatgcacactcaccacttctttaatgaataactcagctactccctcagttgtataagggtgactccatgccaaaaaatgagctcacttagtcagcctatccactaccactgatatagtagccttccctagagctactggtaagccttc

SEQ ID NO: 16311 - DNA, 424 bp, Glycine max
  unsure (1)..(424): unsure at all n locations
ntataaggagacattttggtagagatattgaagttggtattaatccagaattcagcccaggccaagtagttaggccactattttagtttagttctagttaaacacctcaaataaggttctaagcatcagttcactacttcagtctgcccatctatttgaggacaataggcagtgctcatcttcaattgggttcctggtctcttgaacaattccttccaaaagagactcatgaaaagtctgtctctgtcagatactattgatgcaggaaaaccatgcagtctcaccacttctttaatgaataactcagctacttccttagttgtataagggtgacttaatgccaaaaaatgagcttacttagtcagcctatccactaccactaatatagtgtccttcccttgagcttttggtaagcctccaatga

SEQ ID NO: 16312 - DNA, 383 bp, Glycine max
agcttgttccatttggtccattgctgagaagttatggtgatacaattgcaactgcaaaaacaatcggacaatattgggaagaagatctatcctgcatgagttggcttgatcaacaacctcatggttctgtcttgtatgttgcctttggtagtttcactcattttgaccaaaaccaattcaatgaactagctcttggacttgacctcaccaatagaccttttctttgggttgtgcatcaagacaataagagggtataccctaatgaattcttggcgtgtaaaggtaagattgtgagttgggctcctcaacaaaaggtgctaagccaccctgctatagcatgttttgtcacccattgtggttggggacatgctacgtgcacccag

SEQ ID NO: 16313 - DNA, 422 bp, Glycine max
  unsure (1)..(422): unsure at all n locations
ntgcagtagatgccactctactctaaatttttgaaagatatgttaacaaggaagcacaaatatattcatcaggaaaacatcatagtggaaggaaattgcagtgttgtgatccagaaaatccttccacccaagcataaagatcctgggagtgtaacaattccttgttcaattggagaagtcaatgtgggaaaagctcttattgacctaggagccaacatcaatttgatgccactctccatgtgttgaagattgggagagttggaaataatgcccactcgaatgactttacaattagctgaccgctccattaccaggccatatagagtaattgaagatgttttggtcagagtaaaatattttatcttcccagcagactttgtggtaatggatatctctgaagatactgacatccctgtaatatt

SEQ ID NO: 16314 - DNA, 377 bp, Glycine max
agctttgagcaaattcaaacgacaataacatattactcggatgtccgattgtgtcccgtagtatatcgagacactcaaaattcagaatagaaggtctgagtaaaatgaaacgacaataactttttactcggatgtccgattgagtctcgtaatatatcgagatgctcgaaattgaaaacgaaagctcgtagcaaatgcaaaccacaataacttttaacttggatgtccgattgtgtcccgtaatatatcgagatgctccaaattgaaaacagaagctctgaccaaaatctaacgacaataacattttactcggatgtccaaatgaatcccgtaatatatcgagatgctcgtaattgaaaacggaagctctgagcaaa

SEQ ID NO: 16315 - DNA, 403 bp, Glycine max
tattgtcgtttgaatatgcttagaccttatgttttttatttcgagcgccacgatatagtacgggacacaatcggacatccgagtaaaaaggtatagttttttgaatttcctcagagcatcagttttcaatttcgagtgtctccatatattacaggactcaatcagacatccgagttaaaagttattgtcgtttgaatatgctacgagcttctgttttcaattgcgagcgtctagatatactaagggacacaatcgtccatccgagaaaaaagtgaatgtcgtttgaatttgcacagagcttctgatttcaatttcgagcgtgtcaatatactacgggactcgatcggacatccgagttaagagttattatggtttgaattttctaggacctactattatcaat

SEQ ID NO: 16316 - DNA, 387 bp, Glycine max
agcttgagaccatatactaacacactttgacaatcatccgctactaccacattgtaaccttcgtcatcacttgggtcagaccgcatatggtcatcagtttcactcccattatcatactcagaccgcacatatgccatgtcaatagttcttcttcctgcttcttgccatgctagtaacctagcaggatcaaccttcggagattgacgtctgatggtgaagtaatcagaggataacagagatccatcatcacaatttttctcagtcatgtaacccttttcgcaggagactttgtccatggatacagattgtgaacttttcagtatcatgttaactactctggcgacactaacacatatatctttatgtaagagagccttgatcatatga

SEQ ID NO: 16317 - DNA, 389 bp, Glycine max
agcttattcattgatgaacaatgaaaccttgttttattgaactaattgctttccacatcatctcaggttgccgagattctcaaagatcgtccatcatggtattgtgactgtcgatgcctcaatgtattgagtgtagtctcaacagggaatgggggcacaatagagcttatgtacatgcaggtctactgattattttatacaaaagaaaagttgaactatagtttaaattatcttttaattattcctatgttgttttcttgatattcaaatttgattttttttctaaacatatgcaccaacaacattggcagctgcaagagacttctggactttgagatacgctactagtttggaagatggaagtcttatggtattgagtggaatcttga

SEQ ID NO: 16318 - DNA, 386 bp, Glycine max
agcttgctcatataggtttccttgtttaagagttggtacatagatagcggatgctctaaacatatgacgggagatgcatcaaagttcactcttatctctcccaagaaaagtggacatgtgacttatggcgacaacaataaaggtagaattcttggagttggaaaaatatgtacaaactcatctttcttcattgagaatattctacttggtaaaggtcttaagcacaatttgctaactgtcagtcaattatgtgataaaggctatctaatatcatatgattctcataaatgtgttattgaaaatgagcatgataggaatataaagcatacaggtgatagaacaaataatgtgtacgtgatagatttaagtcaaaaacaataccatga

SEQ ID NO: 16319 - DNA, 353 bp, Glycine max
agcttctcgatatattatgcacatgaatcggacctccgagtgacaagttatggccatttgaatttttcgagagcttacgctgctcaatttcgagcgtctcgatttattatactcctgaatcggacctccgagtgaaaagttaagaccatttgaatttctcgagagcttccgttgttcaattgtgagcgtctcgatatattatgcgcctgaatcggaccttcgagtgacgagttatgagcattagaatttctcgagagcttccgttgctcaattacgaacgtttcgatatattatactcctgaatcggacctccgagtgaaaagttatgaccatttgaatttctcgagagcttt

SEQ ID NO: 16320 - DNA, 348 bp, Glycine max
ttcttctcgatatattatgcgcctgaatcggacatccgtttgaaaagttatgaccatttgaatttctcgagagctttcgttgttcaatttcgagcgtctcgatatattatgcaccggaatcggacttccgtgtgacaagttatgactaattgaatttctcgagagcattcgttgttgaatttcaagcgtctcgatatattttgcgcctgaaacggactttcatgtgacaagttatgaccattggaatatctcgagagcttccgatgttcattatcgagcttctcgatatattatgcgcctgaatccgacattcgtgtgacaagttatgaccatttgaatttctcgaga

SEQ ID NO: 16321 - DNA, 384 bp, Glycine max
agcttgagattttctattaaatttataaccattcctttcatgtgcaatctatacattgaaagccaaaggcccacaacttatgtgcttgatatgtaactgcttactcagtttttgtggatcacatcgaagctcatgctgggagtgtcaacaatctcgctttttcttatccaaacgaacagctttgtgttgtgacctgaggagaggataaggtcatcaaggttaattgtcacataatttgtcatagatatctatatcaatatcaattaaaaaaccaatttcgagtgttcaagatattgcacgtatgggatgccgttactggtgcagagcagtatacttatgagggacatgaagcacctgttattctgtatgccctcatcacataga

SEQ ID NO: 16322 - DNA, 376 bp, Glycine max
  unsure (1)..(376): unsure at all n locations
agcttcttattcatattgtttggtacataagcttcttattcacataacaccaatagtattccatttataagcagagattgacgattcaaattacatatttataagagaccaaccaaacacaaagcaaccacagcttataacacccgtaacaaatcctagaacatttgaatttgcaaaggcgggccatgaccactttattctaaaacttcaaacacaacacatacttattatttattgatacatgtattacagctatctctgcttgaaggttatgcatgttgatctcacttgcagctgcatgggtcgcaagtgcagtntgatccacagttgcagccaccgttctcagctgcaacacccatttcagcaccctcgaatt

SEQ ID NO: 16323 - DNA, 361 bp, Glycine max
ttcttgcatgatttacatctccccctttctcaagcaaattcttcttgatatcatcaaaatcttcatgatcccgactcgttggtggaggatgcatgaatgacaatcaattcatggggctccgaataaaagtggagaatggaggataggcgaatagcgctaggcaatcaattcgcggttctcccgactcgttggtggaggatgaatgaatgacaatcaactcatggggctccgaataaaagtggagaatggaggataggagaatagcgctgggcaatcaattcgcggggctgcagactccatggtggaggatgcatgaatgacaatcaactagtagggctacgaataaaagtggagaatggag

SEQ ID NO: 16324 - DNA, 366 bp, Glycine max
ttcttgaaattgaacaacggaagctctcgagaaattcaaatggacataacttttcaaatggaagtccgattcaggcgcataatatatcgagaaggtcgaaattgaacaacagaagctctcgaggaatttaaatggtcataacttgttacacggaagtccgatttaggcgcataatatatcgagacgctcgaaattgaacaacggaagctctcgagaaattcaaatggtcataacttgtcacacggaggtctgattccggcggatagtatatcgagaaggtcggaattgaacaacggaagctctcgagaaattcaaatggtcataacttttgaaacggtagtccgattaaggtgcattatatatcga

SEQ ID NO: 16325 - DNA, 309 bp, Glycine max
atgcaaccttggcatgctatcttgaaagacttggagtatctatataaagagtaataatttgcatcttgaacatcaacggccttggaatcgatgcaatcctcccaatgtgactctctcatgatcgagccatatatgctggagaatgccctatggttcttatgagccttacggtagattttgggcccatggactaagtctgagcccactcatctttgtacatattaaatcacggttccattatttctaggccttatattcaaggcttcatactgaatggagggtaccctactcatgtaagaattttatacc

SEQ ID NO: 16326 - DNA, 382 bp, Glycine max
tgcttgtgccaataaagatggtgaaaaaattcaagaatagttcaataccatttcatctcttgaaaatctacacccttgtggagtggatcccacctcaagagttccaatcttacatacggagagaagatcagtggaagactcaatgacatataagcatctttataggttgatgagtactctcttttgcattcttccattctacttttgaccaaggatagttgaccatattcctcagaagcatcactgaaaatctcatcagcagcctgcagcaccaaatcacttcgtgactgatatgcttggctctcactatcactctcatcagtgcttgattcaccttctattttatgatcatcccattccatggatgtgaccttattattac

SEQ ID NO: 16327 - DNA, 344 bp, Glycine max
agtacctctgttccggaaacctttcttttgtcatgtgcacccaaacccaatctccgggttcgaagacaaccttctttcttcctttgttggcttgcttagcatagcttttattgttcctctcaatttgatctttgactctcccatgaagcttcttcacatagactgtctttgcttgaccttctttatgcttaaaaacagaaacattatgcataggcaaaagatcaagatgagttagtgggttaaaaccataaacaacttcaaaatcatcaaaagtattagtggtcaacatctgatttttgctaacaagatatatagtgactgtgtagcacgaaacaacctcttga

SEQ ID NO: 16328 - DNA, 395 bp, Glycine max
  unsure (1)..(395): unsure at all n locations
ttcttgagaccatagacaaacacactttgacaatcatctgctactaccacattgtaaccttcgtcatcacttgggtcagaccgcatatggtcatcagtttcactcccattatcatactcagaccgcacatatgccatctcaatagttcttcttcctgcttcttgccatgctagtaacctagcaggatcagccttcggagattgtcttctgatggtgaagtaatcagaggataacagaaatccatcatcacaattnttctcagtcatgtaacccttttcgcaggagactttgtccatggatacagattgtgaacttttcagtatcatgttaactactttggcaacactagcacatttttctttatttaggaaagccttgatcatatgaagatcaag

SEQ ID NO: 16329 - DNA, 394 bp, Glycine max
tgcttgcacacaagattttccttgcctggcacttcaaaaccttctgcaaaaccttttggttgggtcatatagatgtcttcctctaaatccccatgcaagaatgcagttttaacatctaactgctctaagtgaagattctttgcagctacaatactcataataactttgatggtagtcatctttacaactggagagaagatctctgtgaaatcaattccttgtttttgttgaaaccctgtcaccacaagtctcgccttgtatcttcttctactgacaaattcttcctttagcctatagacccacttattctgtaacactttctttccttctgacaatttaattaaataccacatcttattcttctcaaggaatgccatctcatctgtcattgcta

SEQ ID NO: 16330 - DNA, 389 bp, Glycine max
atcttcaacatcatactccttccattgtgctggaactacttcacatggacttgatggggcctatgcgagttgaaagccttggaggaaagaggtatgcctatgttgttggggatgatttctccagatttacctgggtcatgcttcatgccatagaactttcctataatctctgggctgaaaccatgaacacagcatgctacatccacaacagagtcacacttagaagaaggactccaaccactctgtatgaaatctggaaagggaggaagcctactgtcaagcacttccacatctttggaagtgcatgttacatctttggcagatatatagcaaaggagatagatggatcccaagagtgatgcaggaatattcctgggatactctacaaa

SEQ ID NO: 16331 - DNA, 380 bp, Glycine max
agcttctggtgggacatcttgacttgctttccaatctgacattcaccacagattctgccttcttctattttcagattgggaatgcctctaacagcacctttgtcaatgattttcttcatgcctcttaagtgcagatgtccaaatctttgatgccatattttgacttcatcttctttggagaatagacatgtggaggagtaactggtttcttgaggtgtccataggtaacagttgtcctttgatctgctgcccttcattaggacttcactcttctcatttgtcaccaagcattctgactttgtgaagtttacattgaatccttcatcacacaattgactgatgctgatcaatgtcgcagtcagtcccttcaccagcagtac

SEQ ID NO: 16332 - DNA, 284 bp, Glycine max
agcttctcgatatattatgcgcctgaatcagacttgcggtgaaaagttatgaccctatgaatttctcgagagcgtgtgttgtccaattacgagcgtctggagatagtatgcgcctgaatctgactttcctgggatagagaatgaccatatagaatgtggcgagagcttccgatcttgtatatagagcgtatggatgaatgattaaccggaatcggacttccgtgaggcaatctatgaccatgggagtaccgagatagcattccctgcttaaacacaagcgtctg

SEQ ID NO: 16333 - DNA, 388 bp, Glycine max
agctgctgcgagattttttccttgagaagctagagcttagctacgcacacccatctaaaaactaagctcaccttcttgagaagctagagcttagctacacacacccattttaaaactaagctcacctccttgacaaaatacatgaaaatacaaaaaaaagtccctactacaaagactactcaaaatgccctaaaatacaaggctaaaaccctatactactagaatggtcaaaatacaaggcccaaaagaaggaaaaacctattctaatatttacaaagaagagtgaatccaaccttgacccatgggctggaaaatctaccctaaggttcatgagaatcctatggccttctttggtagctatagcccaagcctcttggagtcttctatc

SEQ ID NO: 16334 - DNA, 379 bp, Glycine max
  unsure (1)..(379): unsure at all n locations
atcttttgcttcatctgtagtcatttgacttctggacaaaaggaaggtgatgaactaaggaggaattcaaatgtaatggagattctcagaaagacaaggtttccccgagttcaagacatgggagatgagagttctcctcagacaattctggatcatgagtaagcccttcatctcttttccttgaatctttactagcaactgatgcttagagatcgtgaaactaaataaaatgcagtcctaagtcttaagttttaccctggccaagacctaaacttgtggtttaattggtgtagtcgaataatttggctgggggatttaaattaccggatagccctttcttaccgtgcagcanaggctcttgttgagatgcataattgga

SEQ ID NO: 16335 - DNA, 333 bp, Glycine max
tagcttgatacgtatccacaaacgaggttgaatgccaccattcttgatgtggtgtataagaaagtgatgaagctactaattgtatggagcatgtaccccattccttataacacgagcgtttcacctatcttagtggtcccttagaactcacgcatccctattgggaggaaccatgataatgagttgatctcgactataaaggccaatctttggcatgtctgcgtggattatacgagactgcccgctgctactaggttggatcacttgcctctctcattcattgattaagatctggagaggttggcatgtttatcacattattgctttcttgat

SEQ ID NO: 16336 - DNA, 374 bp, Glycine max
ttgcatgcattcttcgggaacgacaccttccggcaaccaggaattaactttccgagaacgcgcgctttcttctgcacagccggcaagcttcttcgaatctcatgcgtcgtcttcttcatgaattcgttggcggagtacttcttgaccttcttgtggtgtctctgcttccagcggcagatcggatttgagagaatggcgcggctccggcgagttctgcctttggcagtggcggcgaagacgcggtcagcggaggcgcggacttcgagggcggcggtagggttgctgttgcggcggagcgagtggatgagcttggaggagtagatgcgctgttcggttatggaagtccaggatggagtgagagcgaatgagttttg

SEQ ID NO: 16337 - DNA, 377 bp, Glycine max
agcttgagaaagagacaccttttggttgcaaacaatgtataagaaacaagtgtgacacctaaattccaagcatgcgaaggttcaacatagaaataacaaaactaagaataataaataaagggggggaagagttgaatttaatgaatggattacaattaccaatggtgggggaaagatcttcaacagaacttgaaataaagctgacaagtaggctactttttcccaccccggaatctccaatcaacaagatcttgaaagagagatcatagccactgctctgacctgaggatgaactcattctctcttcctctgatgaatgtcttaggtgtgtgtgtcaaaaagtacagtgaaagaaacgtatgcaagggtgagagaga

SEQ ID NO: 16338 - DNA, 376 bp, Glycine max
atctttgatgaaaaatgtggagaggttaatgaaacaacgagatgatgcgctccatgagaggttggatcaaatggagaatagatatcctaatggagaagaaaggaggataagagggaatgatggtgttcctagacaaaagcgaattgatggtattaaactcaacattcctccctttaaaggaaagaatgatccggaggactacttggagtgggagatgaaaatagagcatgttttctcgtgcaacaactatgaggaggaccaaaaggtaaagcttgccgccacggagttttctgactatgctcttgtgtggtggaacaagctacaaaaggagagagcaagaaatgaagagccaatggttgatacatgggcagagatg

SEQ ID NO: 16339 - DNA, 377 bp, Glycine max
atcattatacatagtccgcctttgcttgaccttctttatgcttaaaaacagaaacattaagcaaaagatcaagaggaattagtgggttaaaaccataaacaacttctaaaggagaacaattagtggtgctatgaacaactctattgtaagcaaattcaacatggggtaaacaagcttcccaagtttttaagttattcctcaaaactgtcctaagcaaagttcccaaagtcctattaacaacttccgtttgcccatcggtttgtgggtgacaagtggttgaaaataacaatttagtgcccaacttgcttcacaaagtcctccaaaaacgcagatcatgaagcctaggtataggatgcgtatacttaatggcgatgtta

SEQ ID NO: 16340 - DNA, 403 bp, Glycine max
  unsure (1)..(403): unsure at all n locations
ctaagcttaacaagttagcctccatcctcatttgattttatcctgaacggaccattcaatccctggaggaccgtttgaggtcatgtgtcttatagcaaaaggggagagctttctttcattgatagagttcacttacaacaacagttatcactctaccataggcatggctccctatgaagctctgtatggtaaaaggtgtaggacacctctatgttggctaaagccctgagaagacctcaccttaggacttgaagtggtacaacaaaccaccganaaagtcaagttgatccatgaaaggatgaggactgctcagagtatgtagataagttatcacgattagaggatgaaagacttggaattcgaggatggcgatcatgtattctagaaagtcactctgtggact

SEQ ID NO: 16341 - DNA, 431 bp, Glycine max
gacctataaaactaagctatgctgcaacattataatagaccccctcagcttctaaaccaacaacagcagaataattatgatctttcaagcaacacatacaatccagcttggagaaatcatccaaatctgagatggacaagtcctccacaacaacaacagcatgttccttcttttcagaatgctattggtccaagcaagctgtatgttcctcctccaatacaacaacaacagtcacaacaaagacaacaagcaactgaggctcctcctcaaccttccatagaagagttagtgaggcaaatgactatccagaacatgcaattttagcaagagacaagagcctccattcagagtttgacaaatcaaatggggtagatggctactcagatgaaccaagctcagtcccaaaattctaaaaaattgccttcacaaac

SEQ ID NO: 16342 - DNA, 413 bp, Glycine max
  unsure (1)..(413): unsure at all n locations
tatgaaacctaaagaaaacaagaaataatatgtcttaatattacaatngatatgatttttgaaaagaaaatattataaaaaaacaaaactaaccatgttggatggcatgtgcttaaatctgtaataacagtagtaaaaacaatcttctttaaaagacccttagacctcaaaattcgaagtggaacgtgctgcatcagtggatgcacactgattattatatctggctgatatttcattaggcctttagcaacctcgctgtaaaaagagaaaaagatattttaactgtgacatttgatgttacatcatatttgagaagagatacacatgcacaagaaagtatttttctgaaacatggaatgcagaaaaagtcaataagttttgtctaatattaacacaatgcacaacatacattg

SEQ ID NO: 16343 - DNA, 406 bp, Glycine max
tagtgacataagccaaacacatggtattggctaatgtccctatgaaagcccatccatgtcccaggttccaagcaaacacagccattccccaccaccacacctgctctccaaagtaatttggatgccgagaataataccacaaccctttgtcaagaatagggacctccttgttctttctactcacaaagttgtaaagctgagtatcagcaatgtatgccgtgacaatgccagatacacacacaactatggctaccaagtcccacatgctcagaggctggttcaccgagtggatgacatagaacggaagagacaatccaatcagaaacacctgcaaggttgtcttgatgtaaattaaaagtaaaagcaagggaaaatgatgactaagagtaaccttaattacctgctg

SEQ ID NO: 16344 - DNA, 414 bp, Glycine max
tacatcaataggaataataataaaaaagaaggcatatattttctgccctctatagctctacgattgtataattggcccctcaaaaaattagttacacatttatcttataaaatttaataattttgaccttttgttattttgccatcaaatttttaacataaaggactaatgtgatatttaagtgataaaataacacgaatacattaatattataaatgacatgatattttaaatatagactaatatgacatggattgttcaaattgtgatcattgttactacgtcactaaactattagtgcaagtagcatatatattagattactagtttattttttatatcgcgtcaatgctatattattacttaaatatcatgtcaataattgttaaaaatcactaacgtaaaaaaatgtgg

SEQ ID NO: 16345 - DNA, 368 bp, Glycine max
aaactcaagctaaaaaaggcatgcgaagtgggtggaattcctagtgcaattcctcttagtcatcaaacataggaagggaaaaggtaatattgtatccagtgctctttctcggcgtgatgcatcactttctatgcttgaaacaaaatggattggtctagaatgtttgaaaagcatgtctgaaaatgatgaaactattggagaaatttgtaaaaattgtgaaaaatcctcacataatggtttctgtaaacatgatcgcttacttgtcaaagacaacaaattgagtgtgccttaatgatatagtagaaatacgctcgtttgtgaagcacatgatagatgtttaatggggcatcttggggtccaaaggactc

SEQ ID NO: 16346 - DNA, 372 bp, Glycine max
  unsure (1)..(372): unsure at all n locations
atcttcttaanagcacttgactcgatttgcctaattctctccctactcacacccaacatctcccctatctcttgcagggtcttcgtccttccatcatccataccaaatctccatcttaccacctgcctctctcttgcattgagactgtccagagcctcttctaggtccttcttcatgaactgcttaaggagctgttcttcagctgtttcggcatcaggatcagaaattacttcctggtaaaaaacacacaagtatcagcaaaatgaacatcaaatgaaagcaaagagttttttttttttttttctggagcaaaaatttgaacgagattaggacagactgagggtttaagattctggttgatcccaatctttt

SEQ ID NO: 16347 - DNA, 384 bp, Glycine max
  unsure (1)..(384): unsure at all n locations
tattcttcattaagaggcttcctctagaagcttcctcgtggcttctttgagaagttttctcaagaggcttctttgagaagctacatccttatctatccatccctctattaactaaattaacttccttaaaaataattacggatgaaaataacgcaacaaataatcaaacatcaaacataattactaataatatatagatatatatatcagggtgttacacatcatatattgagacgctcgaaattgaacaatggaagctctcgagaaattaaaattgtcataaattttcacacggatgtccgatcaggcacatcagatatcgagacgctcgaaattaaaaaaacggatctcgagaaattcaaatggtcataattntcacacgga

SEQ ID NO: 16348 - DNA, 371 bp, Glycine max
ttctttcacatggatgtccgattcggggacataatatatcgagacgctcgaaatcgaacaacggaagctctcgataaattcgaatggtcataacatttcactcggatgtccgattcggggacataatatatcgagacactcgaaattgaacaacggaagctctcatgatattcgaatgctcataacatttcacacggatgtccgattcggggacataactcatctagacgctcgaaattgaacaacggaagctctcgagaaattcgaatggtcataagatttcacacgaatgttcgattcggggacataatatatcgatacgctcgaaattgaacaaccgaagctctctagaaattcgaatggtcataaca

SEQ ID NO: 16349 - DNA, 358 bp, Glycine max
  unsure (1)..(358): unsure at all n locations
tcagctntgtccccaaagcttcatgtagactcgttttaaatcgcgaagtgaacctcggatccctgtcagatacaatactacaaggaattccatgcaaccttactacttccttgatgtacaactacactagctttgccattctatacttcatccgaatgaaatgttatgaccattcgaatatctcgagagcttccgttgctcgacttctagcgtctcgatatattatgtccctgaatcgaacatccgagtgaaatgttatgactattcgaatttctcgagagcttccggtgttcaatatcaagcggctagatgagttatgtccccgaatctaacatctgtgtgaaaagatatgaccatt

SEQ ID NO: 16350 - DNA, 375 bp, Glycine max
tgcttgcagcgcatttctgatgaactttaccagaaattgcggtaggaggtcccaggactgggaagctcccagtgaagggttctgcctttcttacagctgaaggatcatccagatcaagccttgctataagttcaccagcctgcaaaaggtgatacaattttattatctttttcaatttcaacaattgtacttcctatgtggaatagaatgctatatacctgcattgcttgaccttcagacattttgaaatgaataatcccagaagcaggcgaaagaagaggcatgcacattttcatgacctcaacttcagcatacggtgtgtcagcatcaacatgactgtcatctgcaaccaaatatctcagaagcttgcatggt

SEQ ID NO: 16351 - DNA, 381 bp, Glycine max
ttgtaagttatatattcaatatattttatatgttttatttatgtacatgtttatattttgataaatgaataattttaggtagtataagtcaatatatttgatatcttttatttatgtacatgtttatattttgataaatgaataattttaggtagtataagataataattttgtatagggctctttgtattgttaatgttatatatgctagattatattttgataaataaatagttttaggtagtataagattatagtttgaattgttaatgttatatggtagattagatttaggtttatatgataaattaagaatacttttacatactctaagttattaattttatatggtagattaggaatatttttaattttgatatg

SEQ ID NO: 16352 - DNA, 419 bp, Glycine max
  unsure (1)..(419): unsure at all n locations
tgtgtctaagctgactatgtagctgctcaatatcttagttgttaatgctttcatggggagcaagagcaattgatggagctgaggtagaagctgaagcacagttgatgattggaatgattatctgcctaatgtcaaagtcatcagagacacacacccacatctntaattggaaaagttcatcaatcctcttatcattgaacaccaactttgcaagtgtagtcttccccatgcctccaagacccactatgggaataacacacacacttttatctccatcaccatccccatgagggtgaggttgcatcaaaagcttgataatttcttccctatcattatcccttccaatcactgctgaagcatcaatatgtgaataagtcatttctcttctttgcacaagtctgtggtcaacagaaatcctc

SEQ ID NO: 16353 - DNA, 383 bp, Glycine max
  unsure (1)..(383): unsure at all n locations
ttattcttcttcaactgcacaaggctcttaatatttgaagagtatccttgtggaaccttcacccgacgaagacactgacaaaaacttatctattccttcttggacaaagtatggcaggctgggggcaagtaaattttcttcccatcagaccttggatgcaactgtgatcgtatacccatatcagctagatcttgacgggtattcaagccatccttcgtcttgccttgaatgttaaggagcgtcccaatcacactgtcacaaacatttttctccacatggataacatcaatacaatgtctaacgtcaagatcacactagtatggaagatcaacgaaaatggacctcttcttccatatgcaactctgactnttatccttcttttg

SEQ ID NO: 16354 - DNA, 405 bp, Glycine max
ttgatggagagatatggcctcctctagtttctcattcttatacaagaatacaacagatttatgaacatttattttttgtcccgagccactacaaaagcatacataatagatctgataacctaagcttgatgtacagaagcctcaaccacgaattatgtcatcgatgaagaatacatgcaccactgtgactcctgtactattcccaaaccagaagggtttgcaattaccctcattgactgacttttaaatgagatatgctaggctctccatgtgcaagacaaagaggtacgggggtgaagggtccccttgcctcagtccccatgtaggagcaagagaattgcaattgatagctaacgaagtgctcatacaattagagagaatatcagtcatccaagagggaatctt

SEQ ID NO: 16355 - DNA, 415 bp, Glycine max
tggtcttaattataccaagatagatgtttgccctatgagttgcatgttgtattgggaagaagatgaaaatttgcagatttgcaaacattgcagaaaatctagatggaaagcaaaaggtaataatggtaaaaagaatgtactagcagatactttcctttgaaaccaaggttgcagaggttatttgtgtgttccaaaatagcaaagtccatgagatgacattttttaaatagcaacccaaatggattgttgaggcatccaagagttgctaatgcatggaaaagttttgatcaaattcaacctgaatttgctttagaacctagaaatgttcgccttggccttgcaagtgatggcttcagcacatgccgaaccatgaataataagcatactatatggtcggtgcttctaattccataca

SEQ ID NO: 16356 - DNA, 399 bp, Glycine max
  unsure (1)..(399): unsure at all n locations
ntgtgctccaactcaacaggtaggtgatttgatttattatagaccaattggaagggaccaatcctttgtatgctattttgtatgcccacaaagcttcatctagtttttgggaccaatccttccttgactgagcaattgttttctctaggatctcctagaattccctattagagacttcagcttgcccattggtctgggggtggtaaagtgaagctaccatgtgtttgacagtatagtgttggaggactttcttgagttgggaattacataaagaagatcctccgtcacttatcaatacccttggtgatgcaatcctaccccgcaagggcattggatagaaaactccaagtagattgggccagatatgcaagagaaggccctatggttcttatgagcctt

SEQ ID NO: 16357 - DNA, 419 bp, Glycine max
  unsure (1)..(419): unsure at all n locations
gctacaaggattntgcgagactccttngagggaaatttaatttgtataattgctactatttccccgtctgcttgttgtatggaagaaacacttactacattagactatgctagccgtgcaaaaagcataaagaataagcctgaggtcagttaccactgctattgttccttacaagttacaattcttctaaaagcagttttaaagctttgtgtgttttttaaaaggcaaaccaaaaggtttcgaaggttgttttgttgaaggacttgtacagggaaattgatagggtgaaagaaggtacactcaccaccactattagttttggaatgtagagaagattttgtatcttatcttttgtataatatgaatattgcagatattcgagcaacaagggaaaagaatggtgtatatatttctcatga

SEQ ID NO: 16358 - DNA, 382 bp, Glycine max
ttcttgtgccaataaagatggtgaaaaaattcaagaatagttcaataccatttcatctcttgaaaatctacacccttgtggagtggatcccacctcaagagttccaatcttacatacggagagaagatcagtggaagactcaatgacatataagcatctttataggttgatgagtactctcttttccattcttccattctacttttgaccaaggatagttgaccatattcctcagaagcatcactgaaaatctcatcagcagcctgcagcaccaaatcactttgtgactgatatgcttggctctcactatcactctcatcagtgcttgattcaccttctattttatgatcatcccattccatggatgtgaccttattataac

SEQ ID NO: 16359 - DNA, 381 bp, Glycine max
tttatcttgatgcaatcctaccccgcaagggcattggatagaagagtccaagaacattggaccaaagatgcaagagaaggccctagggttctcatgagtcttaaggtagatttcgggcccatgggctaagtacgagcccacttatctttgtaaatattagattaaggtttcattatttttgggccttgtagttagggctccataatgtaggtagggtgccttagaaatataggatttttcagcccttgtattttagggcacctagactagtttttgtattaggggtagttttgtaatttcatatgcactaagtgaatatttgatcgtgtggttggaaataaatttaattgaattggtagaagcccaatccaattaaatttt

SEQ ID NO: 16360 - DNA, 383 bp, Glycine max
tcattcttctacattcaatttcgagcttttcgatatattacgggactcaatcggacatccgagtaaaaagttattgtagtttgaatttgctcagggcttcggtattccatttcgagcgtctcgatatattacgggactcaatcagacatccgagtaaaaagttattgtcgtttgaatttgctcagagcttctacattccatttcgagcgtttcgatatattacgggactcaatcagacatccgagtaaaaagttattgttgtttgaatttgctcagagcttcggtattccatttcgagcgtctcgatatattacgggactcaatcagacatccgagtaaaaagttattgtcgtttgaattggctcagagcttctacattcaat

SEQ ID NO: 16361 - DNA, 411 bp, Glycine max
gtgagaaaattcaaacgacaataactttttactcttatgtctgattgagtcccgtaatatatcgagacgctcgaaattgaataccgaagcgctgagcaaattcaaacgacaataactttttactcggatgtctgattgagtcccgtaatatatcgaaaagctcgaatgtgaatgtagaagctcagagcaaattcaaacgacaataactttttactcggatgtctgattgagtcccgtaatatatcgagatgctcgaaatggaataccgaagctctgagcaaattcaaacaataataactttttactcggatgtccgattgagtcccgtaatatatcggaacgctcgaaattgaatgttgaagctctgagcaaattcaaacgacaataaacttttactcggatgtctgattg

SEQ ID NO: 16362 - DNA, 378 bp, Glycine max
tattcttgaaatcatctattcagatgtttgtagccctatacaagtagagtcccttggaggaaataggtactttgtaacctttatagatgatttcactagaaagacttggatttatatgatcaaaagaaagagtgatgtgtttaatatatttaagaagtacaaagcttatattgaaaatcaaagttctaggaagattaaagtgttgagaactgatggaggtggtgaatacacctcaaaagaattcctagaattttgtgatgaagcaggaattgtacatgagttcacaccaccctacactccacaacacaatgggttagcagaaaggaagaatagaaaaattatgaatgcggttaggagaatactcaaatgcaaggatct

SEQ ID NO: 16363 - DNA, 420 bp, Glycine max
  unsure (1)..(420): unsure at all n locations
ntaaataggcattcctatctgcaaaagaataaattttctggtagaaaataaactcaacccaagtgtgagatggttgatgcatccaataaaaaggtgagacttcataaatcataaaaatgatggtttactcaaataaattacattttatttttcaagaacaatttaaattgtgttgagattttttttggtaaatcataaaatgatgtagaaattaaatttaaagatagaaatgaaagagattgacaaggagaagtaattgaattaagacatgaaccatcaatgagttgtatatggggtttgtagtcaagaactaatctttatgtgttaattattaaatcatttaatttatatatgaaaatactagaaattttaaagacaattatttataagaaacttataatatgactatacttgattcac

SEQ ID NO: 16364 - DNA, 377 bp, Glycine max
atcatattataaattcgaatggccattgcttttcactcgaaggtccgatcaggcgcatcacatatagagacgctcgaaattgaacaacggaagctctcgagatatgcaaatggtcataacttttaactcggaggtcggattcatgcacattatatatcgagacgcccgatattgaacaacggaagctcttgagaaattcaaacggtcattactttttactcggaggttcgattcaagcgcgtcacatatagagacgctcgcaattgaacaacggaagctctcgagatattcaaattgtcataactttcaactcggaggtccgattcatgcacatataatatcgagacgctcgaaattgaacaatggaatccctcgag

SEQ ID NO: 16365 - DNA, 429 bp, Glycine max
tactcaagcttaaaggagaagttggttttctgaactctaaactttttactttacttattcaataaagatgctgaatgagagctcatatatgcttgatgaggtgctacagcttgggaagaatgttggaaaccagagaggacttgggtttaatcataaacctgctggcagaataaccatgacagaatttgttcctgccaaaaacagcactggagccacgatgtcacaacatcggtctcgacatcatggaacgcagcataaaaagagtaaaagaaagaagtggaggtgtcactactgtggcaagtatggtcacataaagcccttttgctatcatctacatggccatccacatcatggaactcaaagtagcagcagcagaaggaagatgatgtgggttccaaaacacaagattgtcagtcttgttgttcatac

SEQ ID NO: 16366 - DNA, 407 bp, Glycine max
tgcacacaagattctccttacctggcacttcaatttcttctgggtgggacatatagatgtcttcctctaaatccccatgtaagaaagtagttttaacgtgtaactgctctaagtgaagattctctacagctacaatatttagactaactctgatgatagtcatctttacaactggagagaagatctctttgaaatcaattccttgtttctgctgaaaccctttcaccataagtctcgccttgtattttcttctaccatcatattctccctttagcctataaacccacttattctgtaacactttctttccttctgacaattcaattaaagaccacgtcttattcttctgaacggatgtcatctcatctatcattgctagctcccactcaatagaatcattccccttc

SEQ ID NO: 16367 - DNA, 377 bp, Glycine max
tctttctttttagtctcagctgatgaagatgaattcgtggctacttcatgcactcctctaatgacaataacatcatttctggcactaaattgctgggagtttgaagccgtcttctcaattaaatttctggcttgagcaggggtcatgtctccaagggctccaccactggcagcatctatcatacttctctcaatgttactgagtccttcataaaaatattggagaagaagctgctcagaaatctggtggtgaaggcaactggcacatagttttttaaatctctcccagtattcatataggctctctccactgagttgcctaatgcctgaaatatcctttctgatggcagtggtcctagatgtagggaagaatttctc

SEQ ID NO: 16368 - DNA, 382 bp, Glycine max
  unsure (1)..(382): unsure at all n locations
taatcttattttgcaaatattnacaatagacctcctgaacctcagcagcaaaatcaaccacagcagagcaattatgacctttccagcaacagatacaaccctggatggaggaatcaccctaaccttagatggtccagccctcagcaacaacaacaacagcctgctccttccttccaaaatgctgctggcccaagcagaccatacattcctccaccaatccaacaacagcaacaaccccagatacaaccaacagttgaggcccctccacaaccttccctcgaagaacttgtgaggcaactgactatgcataacctgcagtttcagcaagagaccagagccttcattcagagcttaaccaatcagatgggacaattagctaccc

SEQ ID NO: 16369 - DNA, 294 bp, Glycine max
gatacccagcaggcacagaatcacaaaccaatacctgatgcaagggtccgcgggttgtgcaccactactgaccacaatacagaccggtgcccttccatgcagcaaccaggaacaatagagcagccagaagcataagctgcaaatataaacaatagacctgctcaacctcagcagcaaaagcaaccacagcaaagcaattatgacctctgcagcaacagatacaaccctggacggaggaatcacctcaacctcagaagggcagccctcagcaacaacaacaacagcctgcaccat

SEQ ID NO: 16370 - DNA, 383 bp, Glycine max
ttcttgggtgatatggaatctctgtaatttggagaataaaattatatcagtagaaagaatacttcaatatactagtattccttgcgagcctccccttgttgtagaagacaatcggccagatccttcttggcccttgtatggtgaggttgacatacaagatttgcaggtagattgagttcttatattttttaaagttttgtacttttattttctttcattttgtggataattgatttataaaattcatgctaaggtttttttttcctaaatggttacaagctagtatctgaaacagaataattgtgccaacatatttaatagcataatttttacactatgtttgtaatgatgtgttgccatgatgaaggttcgttatgctccac

SEQ ID NO: 16371 - DNA, 420 bp, Glycine max
tctctcagcaactttgactgcaaaacttcacaggagctacatggcttctttgcaagtgacaagacaagctttggcatctgagtctcagagaacaccaccctcagtgcaaaatgcaacaacctccacaaccacaccaattagcaacaacttcagtgtgaagagtgagcaaactcatgcagtgttgccacataagagaccagaggaggagcaagagtcagaggcaaataggggtgtgaaaagggttaaggctgtggaaaatgttcctctgcaattcaagcctcttgaggaagatcacatagagcaaatgattgaggagcttcttgattatggatctattgaactctgctctgtcatttcaccccaggccctctaattgaatgtgcatgtttttgagctgaatttaaagtcacaattgtaggt

SEQ ID NO: 16372 - DNA, 413 bp, Glycine max
  unsure (1)..(413): unsure at all n locations
ntgtataatcacatcagcccacaatttgtatgtttatgctctctcaatgatgttagaggaagttcagccaaatatgggttagcatatctgcaagagggaattctttctgatatagctggtgagaatatcaaagtggataatgagcacaaaggaattccaatcctgattaggaagttgcacggcaaaagggttcttttgatacttgataatgtggacaagctggagcaattggagtatttagcaggagaatgcaattggtttggtttgggcagtagaattatcataactagcaggtgtaaagatgttctagctgctcatggagttgaaaatatatatgatgtacctacgttaggatattatgaagctgtgcaacttttaagttccaaggtaaccacgggacctgtacctgatta

SEQ ID NO: 16373 - DNA, 418 bp, Glycine max
  unsure (1)..(418): unsure at all n locations
ntaacattcaatttcgagcgtctcgatatattacgttcctctatcagacatccgagtaaaaagttatggtcgtttgtatttgctcagagcttccacgttcaatttcgagcgtctcgatatgttacgggactcaatcagacatccgggaaaaaagttattgtcgtttgagttggctcagagattcaacattcaatttcgagcgtctcgatatattacgggactcaatcagacatccgagtaaaaagttattgtcgtttgaattggcttagagcttcaacagtcaatttcgagcgtcttgatatgttactgctcctgaatcagacatgcgagtgaaaagttatgaccattttaatttcttgagagcttccgttgttcaatttctagcgtctcgatatgttatgtgtctgaatcggacatg

SEQ ID NO: 16374 - DNA, 381 bp, Glycine max
atcttgcgttttatttcagacattcctttatttgcgcagcccaagtcagtatctagctcctctcgcatctctgatagaagtgtcttctgtagatcttccaggccattgattttgtttgatttttctctaacattggaaagaaaacttgcggcatcaaagtggttcacaatgttgttatacaaagctgtggcaagttctgtttttccgactccagggagtccccatacacccaacatgcgtacagtttcatcataaggcttcatgtctaggagtgacattacctcttccatgcggggccaaagtccaatagggttctgaccagtatgtaaaggattatgagctatgtgtttatagaccttgtcagctatcttttcaataaat

SEQ ID NO: 16375 - DNA, 421 bp, Glycine max
tgcaagttggtaggggatgagaagaataggctgttgataatgatgtatggaatccgtaaattgaaggggattatggaggtggagaagagaaagaatgattctgagaggaaggaagacactgaagcatgcaagttacttggagaagagaagaaaaaggttgctgaaaaggaaaaggaaattggtagattgaaggggtgtatagaggagaagaagagaagggttgattctgagaggaagaaagctactgaagcttgcaagttactagaagaagagaagaataaggctgccgtaaagggggagattgccagaattgaagcagagaaggcagtgaagtatagttttcagattggtcaattagagaaacaggttaatgaagcaaaaacaaagttggtgtctgagatttctacgtttagagaggcaa

SEQ ID NO: 16376 - DNA, 420 bp, Glycine max
  unsure (1)..(420): unsure at all n locations
ttgtatgggtccatttacaaggagtttgagggttatgtnttatttccgacgttagagaaacctcaaatcaaaagggcctacaacatcttcaacaagagcttctatcagagatacttgggcgcaacgatattaagctaaaaaaaatgaagaaatcaataaaaaaatagacttgggttaaaaagagttctaatatttctagacgatgttgataacatcgaacagatggagaatttggcaaaggaatgtgattagtttggtcctagaagcatgataatcataacaacaagagatacacatttgctagatcttgttggggtcgaaaagagatatgaagtgaaagtgctaaacgaccaagaatctctggagttcttttgtaagagtgcctttagaaagagttgtcctgaaacaaactacaaagat

SEQ ID NO: 16377 - DNA, 367 bp, Glycine max
ttcttgcatccagctcacgaatggatgattaacttgaagaagtctaagaaccaattatatgtttgttgaggaaacatcatccagagtcttgaatcattggtgatcataaggaaaaagtccagacaaggaactctttcaagcatacaactctacttttcgagatcgggccgaaacgcatagatgatgctatgtctaatgaatactgggtcaaagcaatgaaagataagttggaccagtttcagaagaatgatgtctagaagcttgtagaacttcccaaaggcatatatgctattggagcaaagtgggtgttcagaaacaagctcgatgaaatatgtaaggttgtgagtggaacaaagctaggcttgtg

SEQ ID NO: 16378 - DNA, 420 bp, Glycine max
  unsure (1)..(420): unsure at all n locations
ntaacattcaatttcgagcgtctcgatatattacgttcctctatcagacatccgagtaaaaagttatggtcgtttgtatttgctcagagcttccacgttcaatttcgagcgtctcgatatgttacgggactcaatcagacatccgggaaaaaagttattgtcgtttgagttggctcagagattcaacattcaatttcgagcgtctcgatatattacgggactcaatcagacatccgagtaaaaagttattgtcgtttgaattggcttanagcttcaacagtcaatttcgagcgtcttgatatgttactgctcctgaatcagacatgcgagtgaaaagttatgaccattttaatttcttgagagcttccgttgttcaatttctagcgtctcgatatgttatgtgtctgaatcggacatgcg

SEQ ID NO: 16379 - DNA, 385 bp, Glycine max
  unsure (1)..(385): unsure at all n locations
attctttatatatatcgaggcgctcgaaattgaacaacggaagctcttgagaaattcaaatggtcataacttttaactcggatgtgcaattcatgcgcatcacatatagagacgctaaaaaatgaacaacggaagctctccaaaagttaaaatggtcataagctttcacactgatgtccgattcaggcttatattatatcgagacgctcaaaattaaacatcgaatgctctcgagaaattcaaatggtcataactcttcactcggatgtacgaatcaagcgcatcacatataccgacgctcgaaagtgaacaacggaagctcccgaaaaattcaaatggtcataactntacacactgaggtccgattcaagcatataatatatcg

SEQ ID NO: 16380 - DNA, 377 bp, Glycine max
ttcttttcctctagctgttctgataaggtttccaaacgttagagaaggagaagagattgaagccttcattctactgcctgcatgcaatgaatatttctccctaacaagatcaattttcaaatcgcaacggtgaaaatatgcagaaatgaatttcgaaccaggtgtcccaatttcacaatgatccaacggttaatgagtctgggattatagttttactaggacaggttttgggtctctgcaggaaaagaaaaagttaagatgagaagggaatttctctcacctccaactctgattcgcaatttccatcggtgagaatacttgaatatgagctgcaaacttggtgctcaaatttcacaacaatccaacgattaacgagt

SEQ ID NO: 16381 - DNA, 408 bp, Glycine max
  unsure (1)..(408): unsure at all n locations
tgcatgagatgcagggtattttctcacaaatattattcattactccaaggttttccatagttatgactttggcaagtattatttggtactccaaggtgttttttaccaagcaatatacacacacaacttaccttgcaagaataacctatgagcaactgaagttataaaaatagcatgagctctctgccaatttgcacactgaagaaattggtcaagggcttttgagtgatccccattataattataataaattgcctgcaccgccataacaaaatcattcaaacaacaataagagtcatttaaagaataatacaatactttgcaacnattccagcattagcaagcccattaatcagtaaagaacaccatgacaacaatttaattcagtttagtcataaattgatcata

SEQ ID NO: 16382 - DNA, 335 bp, Glycine max
tctttcttctgcaagccctgttctatatgctagattgaatagtggggagcttgctcttcgacttggtgctgatcatcctgctggagatatgacattgttggaaactggcgaacctgtgtattctccaatcactcaggtttgataaatatttttttttctgtataatcactatttaaaaatactcttgtacttgagaactttgggactgtttcatgtatgaaggacctttgcttacagaaaatctaatcatggaaacagaggagtctgtgctgcggacagggaggtctgtatgctaactgagattcatccatgacacaatctgttatcttaaatct

SEQ ID NO: 16383 - DNA, 357 bp, Glycine max
ttcttgtagaactccccaaagtaagatctactcttggagcaaagtgggtgttcaaaagctagacaaaataggtaaggttgtgaggaacaatgctagacttgtgaccaaaggttactcacaataggaaggtatacattatattgaaacttttgctcctgttgctcatctagaggcaatatgcattatactatcctttgttgctcatcatggtatgatgtggtatcaaatagacgtaaaaagcactttcttcaatggacttatcaagaagtttatgtggaacaaccccctgcgtttgagagttctatctaccctcatcatgttttcaaaattaataaagctttgtatgtgttaaagcaa

SEQ ID NO: 16384 - DNA, 376 bp, Glycine max
atcttgtaatcgattacacaagtcttgtaatcgattaccagaggggatttttagaaaataatttccaagagtcacatctattcaaatgttttatgaatggccatcaaaagtgacttggaaacacgaatttaaagagagttttcattgcccaaacagttttatgctctcaaaagattaagagtttttctgaactgaaatgtcttatcctctcaaaaagattccttggtcaaccacttgcatattcaataaggaattttgattgatcttcattgtacaatctatctcttttaagagagatttcttcttctcttcttcttatttctgacacaagatttaagagaccgtgggtctcttgttgtagagaattcttgaacac

SEQ ID NO: 16385 - DNA, 364 bp, Glycine max
ttctttcattgttcaattcccagcgtcacgatatattatgcccctgaatcggacctccgagtgaaaagatatgaccatttgaattgctcaagagcttccattgatcaatttcgagcgtctcgatatattatgcgccataatccgacctgcgagtaagaatttatgaccctttgaattgctcgagagcattcgttgatcaatttcaagcgtctagatatattatgtgcctgaatcggacctccgagtgggaacgtatgaccatttgaatttctcgagagcttccattacttagtctctagcatctcgatgtattatgtgctctaatcggactttcgagtgaaacgttttgacgcattcgaatttc

SEQ ID NO: 16386 - DNA, 350 bp, Glycine max
atcttctcgatatattatgcacatgaatcggacctccgagtgacaagttatggccatttgaatttttctagagcttccgctgctcaatttcgagcgtctcgatatattatactcctgaatcggacctccgagtgaaaagttaagaccatttgaatttctcgagagcttccgttgttcaatcttgagcgtctcgatatattatgcgcctgagtcggacctccgagtggcgagttatgaacatttgaatctctcgagagcttccgttgctcattttcgaccgtcttcatatattatactcctgaatcggacctccattgaaaagtttgaccatttgaattctccagagcttc

SEQ ID NO: 16387 - DNA, 375 bp, Glycine max
tcaattttgcagcgcatttctgatgaactttaccagaaattgcggtaggaggtcccaggactgggaaactcccagtgaacggttctgcctttcttacaactgaacgatcatccatatcaagccttgctataagttcaccagcctgcaaaaggtgatacaattttattatctttttcaatttcaacaattgtacttactatgtggaatagaatgctatatacctgcattgcttgaccttcagacattttgaaatgaataatcccataaacatgcgaaagaagaggcatgcacattttcatgacctcaacttcatcatacggtgtgtcatcatcaacatgactgtcatctgcaaccaaatatttcataagcttgcat

SEQ ID NO: 16388 - DNA, 378 bp, Glycine max
tctatagaaggttcgttcctaatttctctactatttcatcacctctcaatgagctggtgaagaagaatgtggcatttacctgcggtgaaaaacaagatcaagcctttgctttgctcagagaaaagcttactaaggcacctgttctagctcttcctgacttttctaaaacttttgagctagaatgtgatgcctctggagtgggagttggagctgtattgttacaaggtgggcaccctattgcttattttagtgaaaaacttcatagtgccaccctcaactaccccacctatgataaagagctttatgccttaataagagcccttcatacttgggaacattaccttgttttcaaagaatttgtcattcatagagatcatc

SEQ ID NO: 16389 - DNA, 217 bp, Glycine max
ttctttcgttttcaattacttgtgtctcgatatcctacgggacacaatcggacatccgagtcaaaagttattatcgtttgacttttcttagagctcccgagttcaatttctagcgtctcgatatattaaagggctcaatcggacatccgagttaaaagttattgtcgttagacttttcttagagctttcgttgtcaatttcgagcgtcttgatatat

SEQ ID NO: 16390 - DNA, 390 bp, Glycine max
  unsure (1)..(390): unsure at all n locations
ntggagtttccaagtgccaattcgtcctcttctttagtccattcttcttctggcttcaattcatcagtgggctttccttctgtgtccagcatcttgggatgttcccagcctttgatgacagctttccaggttctgctatccagtgatttgaggaaggccaccattcttgctttccagtattcatagttgcttccatcaagaattggtggtctgttcactggtcctccttctttctccatgttcatcagaatttatctccccagatctcactctgtgatttcgagtgttggctctgataccaattgaaattctgataccagtggacagatgtcgtacaggatgtcacgacatcacgcttcaaacatgcagtttatgtgtgtccgtatgaac

SEQ ID NO: 16391 - DNA, 350 bp, Glycine max
atctttgatcggtaatttgcgaccagaggtcgttaagctcgtctctgctgatcttttcaaccttcagtctacgtctacgactcagcgcgtcaaatagttccagagcgaactccttagagtccttcatcccttcaaaaaattaaacaaagcatacaaaactcttcaaacaaggagtgaaaatgacaaaccgattaaatgcacatgcgaaacgcaagaatctgaactgaaatttgaaaaggaatcgtacctatgcattgcgcaaaatcagtgcgagaaagataaccgtccttggcaagactatagaaattgctgtgcacctcgttccacgcgttagcgccattggatttact

SEQ ID NO: 16392 - DNA, 409 bp, Glycine max
tcatatatatatatattaccttgcctacatccgttcttatactatgtaaaaatgatctatatatcaaattctatctatcctttcgtttgttatcaatcttatacacacaatgacatatcaaattataccatggtaattttgataattattatactatttttatatacgagggaagatcaaattataccagtataattttgataattattacactatttttatatacgagaataaatcaaatcataccgatataactttgataactattgcattatttttataacttgatatataatgtaatttttattgatataactgttaagttatattcacatattatcaagattgtccgtattatattttgtcaaaattgaacaacaagaaagtaatcacattatctatatgttaa

SEQ ID NO: 16393 - DNA, 314 bp, Glycine max
atcttgtcttttcccttgatatattagagggactcatgctcactatgaatgacaaatcacttgggataaaagtaatgttgccatgataccaaagcccgtactaaggcatacaacaccttatcataagtataatagttaagggtaggaccacttaacttttcactaatataagcaattggatgaccttcttgcatcacaacagccccaatcccaacatttgaagcatcacactcaatttcaaactatattgaaagttcggcaaagcaagtatgggggcattatctaactcttgcttataaacattgaaagcttct

SEQ ID NO: 16394 - DNA, 298 bp, Glycine max
tgggttaaaaaccacccctcaccctatgccttttattttgcaatggtcgaatgacaatggtgaattggttgtggataaacaagcatcacttacattcttcataggaaaatatgttgacgatgtgcttcgtgatatggttcccattgaagactaacatgtgttgcttgtacgaccttgtcattatgatagagatgctgttcacaatggggtcaccaatcaatattctgtcttccataaatgtaaaaaggttgttctctcacctttgcctccaatgaggtgtgtgaggatcatctaaccc

SEQ ID NO: 16395 - DNA, 335 bp, Glycine max
  unsure (1)..(335): unsure at all n locations
tttctntttctgaaagatagaaatttgaaatttgaaatttgaaagctgttatcgattaccacttgtatgtaaatgattaccagtaacggaactaaaaaaattcaaattgaaaaggcatgacttctcattacataactgtgtaatcgattaccaaagaagtgtaatcgattaccagtgaggaaattataaaagttactctgaaaagtcacatcccttcataagttttcgaaaaaccaccaagggcctattaatatgtgacttatctatgatagttttgagaagtttttcaaaaccttattgtcttatcctctcaaaaacaaatcattggccaaaca

SEQ ID NO: 16396 - DNA, 303 bp, Glycine max
  unsure (1)..(303): unsure at all n locations
tttcttccaagtanttaactgcttgctgggaactgtcctaagcaaagcccccaaagacctattaacaaacgaccgtttgcccatcggtatgagggtgaccactggttgaaaataacaatttagtgcccaacttgctccacaaagtcctccataaatggctgacgaacttagagtccctataactaacaatgctccttggcaaaccatggagtctcacaatctccgtgaaaacaaatcaggcacatgggaagccataataacttgtttacatggaataaaatgagccaattctaaaaacctatc

SEQ ID NO: 16397 - DNA, 367 bp, Glycine max
atcttgtaatcgattacacaagtcttgtgatcgattactagaggagattttcaaaaaataatttccaagagtcacatctgttcaaatggtttttgaatggccatcaaaggtctatttgtatgtgacttggaacacaaatctgcttagattttttcagaacaaaaaggtcttatcctctcaaaagcaaaattatcttatcctcttaaaaattccttggacaatacacttgcgattcaataaggaattattttgagttctccattgttcaatctatctctttcaagagagatttcttcttctcttcatcttatttctaaaaagggattaagagatcgaggatctcttattgtaaagcaatctgaacaca

SEQ ID NO: 16398 - DNA, 339 bp, Glycine max
ttctatccttgccccttgatatatgagagggagctttgtgaactatgaatgacccattccttgtgatataggaaatgtggccatgctcacaaagcccgaactaatgcgtacaacttcttatcataagttaaataggtgagggtgggaccactcaactctccactaaaatgagcaattggatgggctctctgcatcaacacaaccccaatcccgacatttgaagcatcgaactcgattacgaaaaatccttgaaagattcgcgacgcaagtatgggggcaataattaacatgttgcttaacaacattgaaagcttcttcctgtttatctccccatttgaa

SEQ ID NO: 16399 - DNA, 368 bp, Glycine max
tcatttcttaagaataatggcctcatcgaacgatttatttcctgaagggaattcaataaatatacctcctattttcaatggagtgggttaccattactggaaaacccgtatgcaaatttttatagatgcaatagatttaaatgtttgggatgcaatagaagtatggccctatattcccactatggtggctggaatttaaaccatagaaaagcctaaggaagaatggactgaagatgaaaagagattactgcaatacaacatagaagacacaaatataattacgtatgccttacgaatggatgagtactctaaggtatcaaattgtaaaagtgctaaagaaatgtgggataccctacaacgtacacatg

SEQ ID NO: 16400 - DNA, 402 bp, Glycine max
tgtgtgtccggtgtgcatgaagtcatggactctattatcaatggtgtttaacctggttaatatgaatgccaaatatggatggagtgacaaaagcttcactatattgcttaatgtaatgcaacgtatgcttccagaataaaacagatcgccaaatagttactatggggcaaagaagatactgtgtccgatgagtatggagtattagaaaattcatgcatgccttaatgattgcatgctgtacaaagatgagtttgaagatatgcataaatgccctatgtgtgctgtatcacagtacaaagtgatagatgatacaaatatagcagtgatgaaagcatatacgaagacccccctatgaagatgtgatggtatcttcctatcattccaaggtgtaagcatctattt

SEQ ID NO: 16401 - DNA, 377 bp, Glycine max
tcattcttgttcactaaagaaaaagtatcagagaaatcgattccatcttgatgagtatatcctttggcaaccaatgagctatgtatctatccacagagccatccattttatatttaaccttatacatccagctacaacctatacaatgcttatcaggtggtaagggaacaagtgtccaggtggaatttgcctcaagagctttgatttcctcattcattgcctgacgccactcaggatagggggcagcttgatgataaaattgaggttcatatacaactaaaatctggttaatgagagctctgtaaggggagctaagagccaataatgaacaatgatgctggatcggatatgcaatcttagatattggtgtaacatag

SEQ ID NO: 16402 - DNA, 380 bp, Glycine max
tgtgcattcaatatcctaatgagggtgttccatatgttctcaagactggactaatacatttgctgcccaagtttcacggtcttgtaggtgaagatcctcataagcatcttaaggagttccttattatctgttccaccatgaagccccctgatgtccaggaagatcatatctttctaaaagattttcctcattctctggagggagtggcaaaagattggttgtactacctttctcccagatccatctccaactgggatgaccttaagagggtgttcttggagaaattcttccctacatctaggaccacgaccatcagaaaaaacatttcaggcatcatgcaacttattggagagagcttgtatgagtactgtgaaagattc

SEQ ID NO: 16403 - DNA, 393 bp, Glycine max
tcttatccaaggcaattcttggtggtgaagctccttcttccttggcttattccctagtggatggtgcctcccctctcctcttctcctttgccttccgctgcatctccatggtgaaaaatcaccattgaaggacctcattggagctcaaagatccagcctccatagaatcttcacaagcaagcttccatcacctcttttcctgtacatgactgtgttagacgagtctatgggatgcgtgttgggtcaacatgatgactctgggaaaaaggaacaagccatttactacctaagcaagaagtttaccgcatgtgagatgaattacacaatgctggaaaggacgtgctgcgccctgttatatgcgtcacatcgtcttatgcagtacatgctcagtca

SEQ ID NO: 16404 - DNA, 399 bp, Glycine max
  unsure (1)..(399): unsure at all n locations
ntaactaatatctttttctaaagctcccatttatctttatcagtatttgattccaagtgagctatttgtgaataactttttcaaatcatataatataaccttcagtatccatatccgtgcatgtctttcggaaaagagaaataatatgcgcgcggacacattcatatatgaataaatcgtcaactttgtccccgtgtgaaatatcgacgaattagttctaaattttaaatttaattattaaatatgaaaaatgtaataaattaattatacaggtcatttaatgataaattaatctggttaaattaatcttaaaaaatattacttattctcaaattggtctttaaatattataacaaaataataaaattatctaacaaaattaacaataaaattaatttt

SEQ ID NO: 16405 - DNA, 375 bp, Glycine max
ttctttcttgtactgatcaagacagttggaatgacgaaagctagttccacacatatagggacggcaacccttgtcatgagaagaacaaagaagaagaacagcattgtgtggatattccatgcacacagaacatgtaacatcttcccactctttcttttccaaagccttagaacatttgttttggcagaggtcctcacaaatgtcccttttgcaagaagccagtgggtatggagtcactctgaattgacgagaagcaatcctgtgtcttcccctgctaccttttgccatttccgatattccaacagaatctggaatttaaactgtcaaaatgttatcaaggaatctaaatgaaatgcattcatatattttttatgt

SEQ ID NO: 16406 - DNA, 377 bp, Glycine max
agcttggagaagggaaaccagaaaatcagaatcatgccataatctttacacggggtgatgcagttcagaccattgatatgaatcaagacaattattttgaggaggctctcaaaatgcggaatctgttggaggagttcaatatgtcctacggtattaagaaaccaaccattttgggggtccgagaaaatatcttcacgggatctgtttcctcacttgcatggttcatgtcagctcaagagacaagttttgtgacactgggtcagcgagttctggcaaaccctttgaaagtacgaatgcactatggtcatccggacgtgtttgacagattctggttcttgggtcggggtggagtcagcaaggcctctagagtgattaat

SEQ ID NO: 16407 - DNA, 377 bp, Glycine max
agcttatgctacaaacatttataatagaccccctcaacaacaaaaccaacaacaacagaataattatgatctttcaagcaatagatacaatccaggttggagaaatcatccaaatctgagatgggcaagtcctccacaactacaacatcctgcccctcctttccaaaatgttgttggtccaagcaagccatatgttcctcctccaatacagcaacaacaacaacagtagcagcagtcacaacaaagacaacaagcaacgaggctcctcctcaaccttccttataagagttagtgaggcaaatgaccatccagaatatgcaattttatcaagagacaagatcctccattcagagtttgacaaatcagatggggcagat

SEQ ID NO: 16408 - DNA, 431 bp, Glycine max
gtggagtttccaagtgccaattcgtcctcttcttttttctattcttcttctggcttcaattcatcagtgggctttccttctgtgtccagcatcttgggatgttcctagcctttgatgacagctttccaggttctgctatccagtgatttgaggaaggccaccattcttgctttccaatattcatagttgcttccatcaagaattggtggtctgttcactggtccgtcttctttctccatgttcatcagaatttatctccctagatctcactctgtgatttcgagtgttggctctgataccaattgaaattctgataccaggggacagatgtcgtaccggatgtcacgacatcacgcttcataacatgcatattgtatgtgtccgtatgaacagattgaacaagtttataacacaacgagaattgtttaccc

SEQ ID NO: 16409 - DNA, 374 bp, Glycine max
ttgtcttcagaattcaatttctagcgtctcaatagattacgggactcaatcagacatccgagcaaaacgttattgtcgtttggattagttcagagcttcagaattcaatttcgatcgtctcgatatattacgggtctcaatcaaacatctgaggaaaaaagttattgtcgtttgaatttgctgagagcttcaacattcaattttgagcgtctcgatgtattacgggactttatcagacatccgagttaaaagttattggtggttgaatttactgagagcttcaacattcaatttcgagcgtctcgatattttacgggactcaatcagacatccgagtgaaaagttattgtccgttgaattagctcagagattca

SEQ ID NO: 16410 - DNA, 425 bp, Glycine max
tcagcttgagctattcaacgacaatacgtttgctctgtgtatgattgagtcccgtaatgtgttgagacgcttgaaattgaattttgaagctgagagctaattcaaacgacaataactttttactcggatgtctgattgagtcccgtaatacatcgagacgctcgaaattgaatgttgaagctctcagcaaattcaaacgacaataacttttttcctcagatgtctgattgagacccgtaatatatcgagatgatcgaaattgaattctgaagctctgagctaattcaaacgacaataatgatttgctcggatgtctgattgagtcccgtaatacatcgagacgctcgaaattgaatgtcgaagctctcagcaaattcaaacgacaataactttttgctcggatgtctgattgaggctcgtaatct

SEQ ID NO: 16411 - DNA, 376 bp, Glycine max
ttgttagaacctataagttcaagagccaaaggaatgccggaagcaaaagtgattgcacggtttaatttattaatgaaatctggatgaactctgtcggttctgaaggccttccaacaaagcaattcgagagcttcaccattggccaaaacttccacctcgtataccttgtcaaccccatgggctttaagcaaatgtctgtctctagtggtaatgatgactctgctgccagggccaaaccaatcaagacttccaacaagagctcgcaagtcatctatctcacagacatcgtcaagaaccaaaagaagcctcttcctggggagcatcttctttattagtgaaactccttgctcgacacttgtcagacgaatattgttct

SEQ ID NO: 16412 - DNA, 325 bp, Glycine max
tgctttgaatgctctattcaatggagttgacaagaatatcttcagactgatcaacacatgcacaatggccaaggatgcatgggagatcctgaaaaccactcatgaaggaacctccaaagtgaagatgtccatattgcagctattggccacataattccaaaatctgaagatgaaggacgaagagtgtattcatgacttccacatgaacattcttgaaattgccaatgcttgcactgccttgggagaaaggatgacatatgaatagctggcgagaaagatcctcagatgcttgcctaagagatttgacatgaaagtcactgcaatc

SEQ ID NO: 16413 - DNA, 416 bp, Glycine max
gtaaaagattggctaagattttgttaaaacataagcacttagacaatgaaggaaagctggagttgctgcacaagatgtccaacgttatgtctaagaataagatcgggctgcacaatgcacaaggcaagataaagtgtcaaatgaagaattgaagctgcaggattcacgatgtctgatacaatgtccaggacatcctgcctgaaaatactggaattgctaaaagcattgaagctgcaggatccacgatgtcagatacaatgtccaggacatcttgcccgaaaatactggagttgctaaaagcattgaagttgcaggatccacgatgtcggatacgatgtccattacatcttgcccgaaaatactgtacatataaatctgttatatctttaacagattattgtgcagttagcaagaga

SEQ ID NO: 16414 - DNA, 430 bp, Glycine max
ctttcctttggttgttctattagggtttccaagcgttagagagaatgagaatagattgtagtcttaatatcactgtcttcgtgcgaggggaatttctctctctacagacattattttgcaaatcccaacagtgagaatctgcgaaaatgagtttcgaaggtggtacccaaattttaggacaatctaacggttaatgagtttgagatcgtaattttactgggataaatttgggtgtatgcgagaaaaagggagggttttgggagaggatagagagaatgaatttgggaggaaggaggagtgtaaagacatatcgtaattgtaaaaattgacctaatctgtctctatttatagctagggtattctgagacgattatttttttttttttttataaaaatgaactctattttactctttcataaaataaataac

SEQ ID NO: 16415 - DNA, 380 bp, Glycine max
  unsure (1)..(380): unsure at all n locations
tttctttaagttgngataattctgagaagtggttaaatgccatgaaagaagagataaattccatggaacataatggtgtttaggaccttgtagaattaccaaagggttgtaagagagttggttgtaagtgggtcttcaagactaaacgtaactctcatggcaaccttgaacattacaaggctagacttgttgctaagggatttactcagaaagatgacattgattataaagagaccttttcaccggcctcacaaaaggattctttcatgattatcatggcattaatagcccattatgacttggagctacatcagatggatgtgaaaactgcctttcttaatggagatttaaagaatgtttgtatggaccaaccaatgggg

SEQ ID NO: 16416 - DNA, 426 bp, Glycine max
  unsure (1)..(426): unsure at all n locations
cctatggactgagcaaaaaggctcaagtcatcaaatactactcatcttttaaagcacaaagcgaggattggaacctcaaccctatgttcttttaaaagactgcaatgagaaaattacagaggataggaatccctgggggaaaccaagaagaatacacaaaaataaaaacatgcagcgacttccttaattgccccaaatcttaagcgtagtatcgcttgacaacgtcggagttcacgggtgaagatagctcctcgttatccatgttggcgagcaccagggcccctctagagaaatccctttttacaatgaaaggaccttcgtagttcggggcccactttcccatatgtcttccagagcttgggagactttcttcagcaccaagtccccttcgctaaacctgcgcangcgtaccttcttgtcagaagc

SEQ ID NO: 16417 - DNA, 383 bp, Glycine max
agctttggtcctattcaaatagccataacttttgacatgggggtacgattgaggcccatgatatatcgagaggctcgaaattgaaaaatggaagttctcgagaaattcaaatggtcataacttttaacttggatgtccgattcacgcacataatatatcgagacacacaaaattgaaaaatggaattctcgagaaattcaaatgttcataacttttgcctcgaatgtcagatttaggcacataatatatcgagacgctcgaaattaaacaagaaagctctggtccaattcaaacggccataacttttgacatgagtgtatgattgaggcccatgatatatagagacgctcgaaattgaataatggaagttctcgagaaattaa

SEQ ID NO: 16418 - DNA, 414 bp, Glycine max
agcttcaaccaggggagatggaccatttcaagtgcttgaaagaatctttgacaatgcttacaaagttgagctgcccggtgagtataatgttagttccaccttcaatgtctctgatttacctgtttttgatgcacatggagaattcgatttgaggacaaatccttctcatgagggagagaatgatgaggacatgaccaacagcaagggcaaggatccacttgaaggacttggaggacctatgacaagggctagagcaaggaaagccaaggaagctcttcaacaagtgctgtccatactatttgaatacaagcccaagtttcaaggagaaaagtccaaggttgtgagttgtatcatggcccaaatggaggaggactaaatgacaccactttggttcaattttagagtgtttactta

SEQ ID NO: 16419 - DNA, 425 bp, Glycine max
tatgctgcaaacatctacaatagacctcctcatcctttcagcaaaatcaaccacagtagaataattatgacctctccagcaacagatacaatcccagatggaggaatcacctgttagacaaatggcctaagttatcttaagaagggggggttgaattaagataacaagaactattccccaattaaaattttactctctctttttagattaacaatgcacccttaacatgaattactcaaaagacaattcaaaataaacttctttcaagccaaagataaatagcaataaataaaagaagtttaagggaagagagaaatgcaaacttgatttataccagttcggtcacttcctgtgcctacgtccagtcctcaagcaacccacttgagattttccactctctttgtaaaatccttttacaaagtctg

SEQ ID NO: 16420 - DNA, 429 bp, Glycine max
taacaatccttgtgatctattacaggatatttctattcctatcacatagcttgcatcactcatatccttcatttcaaagttactagaaagaaacttcttagtctcatgaagaagaccaagatcattagttgcaacaatatatcatcaacctacaggattagaaaataaccttactcccactgaccttcagatatatacaccgatcaacagtattttccttaaatccaaaggaaacaatggtatcattaaacttcaaataccattggcgagaagcttgcttaaaaccatatattgatttctttaatttgcacaccatatgttcctttccctcaactgagaaccccattggttgatccatataaacattctcctctaaatctccattaagaaaggcaattttcacatccatctgatgtagctccaagtcat

SEQ ID NO: 16421 - DNA, 453 bp, Glycine max
taggacacttaaatctcagcttccatatatctctcccaagagaagcgggcatgtaacttatggtgacaacaacaaaggtagaaagaattcttggagttggaaaaacaggtacaaattattcaaactccattgaaaatgttctacttgttgaaggccttaagcacaacttgcttagtgttagtcaattatgtgataaaggctatctagtatcatttgattctcaaaaatgtctcattgaacataaacatgatactaatataaaacatatagggtatagagtcaacaatgtttatatgatagacataagccaaaaattagataataataaattttttcttagcaaagatgatgatccatggctatggcataaacgtattgctcacataaacatgaaacacttaaataaattaatttcaaaagatttagttgttggtttgcctaaattgaaatttg

SEQ ID NO: 16422 - DNA, 381 bp, Glycine max
agcttgaaggcaaactggatgcgttggtcaacttggtaacccaactggccttgaatcagaaatctgtacctgtcgcaagggtttgtggtttgtgctcctctgctgaccaccatacagacctttgcccttccatgcagcaacctggagcaattgagcagcctgaaacttatgctgcaaatatttacaatagacctcctcaacctcagcagcaaaatcaaccacaggagagcaattatgacctttccagcaacagatacaaccctggatggaggaatcaccctagccttagatggtccagccctcagcaacaacaacagcagcctgctccttccttccaaaatgctgctggcccaagcagaccatacattcctccaccaatcc

SEQ ID NO: 16423 - DNA, 423 bp, Glycine max
atggccccctgcattcagaacaaaacccctaccatggatgcagagacgggaagcaaactcttgaggatcaatcctcatcctcgtaaatctggaataggtaggcagtgtctcaccctcctctaaaactattggggtttcaaagaaggtatttaggctgtcagcatcaatcttgattaagtgtcctgatgcaatcctaccccgcaagggcattggatagaaaactccaagtagattgggccaaagatgcaagagaaggccctagggttcttatgagccttaaggtagatttcgggcccatgggctaagtatgagcccacttatctttgtaaatattagattaaggtttcattatttttgggccttgtatttagggctccataatgtaagtagggtaccctagaaatataggatgtttcagccctt

SEQ ID NO: 16424 - DNA, 380 bp, Glycine max
agcttgtatcaaattcaaacgacaataacgttttactcggatgtttgattgcgtctcgtaatatatcgagacgctcgaaattgaaaacggatgctcgtagcaaatgcaaaccgcaataacttttaactcggatgtatgattgagtaccataatagatcgagacgctcgaaattgaaaaaagaagttctgagcaaattcaaacgactataactttttactcggatgtctgattgagtcccgtaatatattgaggagcacgaaattgagaacagaagctctgaccataatcaaaccaaaataactttatattcggatttgcgattgagtcccgtaatatatgaagacgctccaaattgaaaacagaagctctgaacaaattc

SEQ ID NO: 16425 - DNA, 430 bp, Glycine max
  unsure (1)..(430): unsure at all n locations
cttgagccaattcaaacgacaataactgtntactcgaatgtctgattgagtcccataatatatcgagacggtcgaaattgaatgttgaatctctgagcaaattcaaacgacaatagctttttactcggacgtctgattgagtcccgtaacatatcgagacgctcgaaattgaatgttgaacctccgagacaattcaaacgacaataactttttacgcggatgtctgattgattcccgtaatatatcgagaccctcgaaattgaatgttgaagccctgagccaattcaaacgacaataaatttttactcggatgtctgattgagtccccgtaatatagcgagacgctcaaaatggaatgttgaacctttgagccaattcaaacgacaataaccgttttactcggatgtctgatggagtcccgtactatatc

SEQ ID NO: 16426 - DNA, 352 bp, Glycine max
agcttattctgcaaacattactaatacacctcctctacagcaaaaccaataattgcataataattatgacctttcaagcaatagatacaatccaggttggaggaatcatccaaatctgagatggacaagtcctccacaacaacaacagattgtgcctcttttttagaatgctgtctagacaagcatgccatatgttgctcctccactacagcagcagtcacatcaaagacaacaagcaactgaggctcctcctcaacctttcttagaagagttagtgaggcaaatgaccatacagaatatgcagtttcagcaagagacaagagtcttcattcagagtctgacgaatcacatg

SEQ ID NO: 16427 - DNA, 424 bp, Glycine max
tgaccctgttgtaagagggtaaaaagtgaaagttaatctgttgcaccaacaaagttcttcaaggaccagaaaaaaggtaccatatgattgaaatcttgctgtagcattgatcaactcatctagaacgtttagaccgtatttccaaaaccattatattaaagtgataattgatcatcccattcaacgagtaaagagaaaatctaagcttacaagtacaatggtagcgtggatagtcgaactttttgagttcggtttgaaatttgagccaagaggtgccatcaaagggtagtacttggtcgacttcatggacgagctacttcccaatgaaggctacaacgaacgttagtggacattatacattgatggaacttctaacaacaatagtactggtgttggggttactctgataggaccagatgccatc

SEQ ID NO: 16428 - DNA, 369 bp, Glycine max
tgcttgtgtctacaccgctttgcactggataactttttctttaattattttttttatatagaagtgtttaactggaattagaatatttgatgtataatgtttggattttctttgtataagtattgagaactctgtttggttatgattatcaggcaagcaaaggatgttgttaaaggtataaagaagcggattggaagtaaaaattcaaaagttcaacttcttgcactaactgtaagcaagagtgttgtaatacaaccttttttctcttaaactctgttgatggcattgatctaaattctttttgtatctaagcatgtttgcttcaattgcaccattttgaccttctaaactttacattcttgactgatt

SEQ ID NO: 16429 - DNA, 374 bp, Glycine max
agcttgagtcctttaagcttagaaactatatgagacatttccatgatgtactctctaatttttttcccgttatactttatggaaatcaagtggtgtagcaatgtacttgtttttgccttatcgcttttttcaaagcatttctctagtttatcaaggaaatccttagcattggtgatcccttcggtcattgcaccccttaaggattttggaatgccacactacaatcttggtttttatattttgttgaacaaatggtctcagttatcttaagaagggggggttgaattaagataacaagaattattccccaattaaaatttcactctctctttttggattaacaatgcaccttcaacatgaattactcataagac

SEQ ID NO: 16430 - DNA, 433 bp, Glycine max
cagcttgccaccataggaagccatggataagagcttgatggtatgagaagatgaattgagggagaggggaagaaggagcacgaaattttgtgcctcaaaagaggtttgaactttgaattttaattttcaaatgattaaagttcaaaaaaaggtacacacatgacctctatttatagcctaagtgtcacacaaaattcgagggatatttgaattttacttggatttgaaattaaatttgttgagccaaattttggaaccaaaatttcactaattatgattagtgaattttagttatggttcagtccactaatccaagatcaagtccaagattttccactaagtgtgcttaggtgtcatgaggcatgtaaagcatgaaggacatgcacatagtgtgactatatgatgtggcaatggggtgtagcaagcaaatgtt

SEQ ID NO: 16431 - DNA, 414 bp, Glycine max
tctagatctatttcattccagtgtgaattcaccgatggtcttacatgcctatcaatttttatttggttagtcttcgaaccacatcatactttgagagaggtatgctctgatacccacaaacctactcacacataatgtctggttgcttttaggattgttggttgttcccataaattaatataagactttttggtatgttttgtccacacttactaaaaaaacttctcagaaggtcacccatcccataattactttaagctaaccatgtttgactatagagttcttaagtgatggattaccgaaaaatatattcatctcgttagtataggtaatactaattaatttctaagttatcctcaattgtgcagtttcatacttacaccatctttagatctctcttattctgaggtgcat

SEQ ID NO: 16432 - DNA, 375 bp, Glycine max
tagctttatgcatatggaatcaaaatataacaaatgacatgtatctcatgtcaaaaaattttttacacttcttcttaagaatttcctattgacaatttaaggtaatattatccattacgaaattctccattgagtcagttcaatggtcacattcatatgcacataatttatatatgtaaattaataaatgagatctattaatgttcattcaatgaatactatcacatatgtcaatctatccaaattattaatgtcatattcataataatcttaggatcaagaacaattaaaattaaaattatgagagacttttttctcattttcataatctctattatgataacaaatctttaattttaatcaaggaccttatca

SEQ ID NO: 16433 - DNA, 380 bp, Glycine max
agcttttcttttagcaaagcaaaggcttgctcttgtttttcaccccaggtaaatgccacattcttcttcactagctcattgagaggtgatgcaattgtagagaaattaggaacgaaccttctatagaagcttgccaacccatggaagctcctaatatctctcacactttttagggtgggccattcttggatggccttgattttctcagggtccacttggaccccatttctaccaactacaaaccctaagaaaaatatattatctacacaaaaagtacacttctctatatttgcatatagggtatttttcctaaggactgaaagaacttgcctgagatgtcctaagtgatcatctaggctcctactatacactaaaatatc

SEQ ID NO: 16434 - DNA, 383 bp, Glycine max
agcttatgctgcaaatatttacaatagacctcctcaacctcagcagcaaaatcaaccacagcagaacaattatgacctttccagcaacagatacaaccctggatggaggaatcaccctaacctcagatggtctagccctcagcaacaacagcagcctgctccttccttccaaaatgctgctggcccaagcagaccatacattcctccaccaatccaacaacagcaacaaccccagaaacagccaacagttgaggcccctccacaaccttccctcgaagaacttgtgaggcaaatgactatgcagaacatgcagtttcagcaagagaccagagcctccattcagagcttaaccaatcagatgggacaattggctacccaattga

SEQ ID NO: 16435 - DNA, 429 bp, Glycine max
  unsure (1)..(429): unsure at all n locations
ntgaatgctctattcaatggagtggacaagaatatcttcagactgatcaacacatgtacagtggccaaggatgcttgggagatcctaaaaatcactcatgaaggaacctccaaagtgaagatgtccagattgcaactattggccacaaaattcgaaaatctgaagatgaaggaggaagaatgcattcatgacttccacatgaacattcttgaaattgccaatgcttgcactgccttgggagagaagatgacagatgaaaagctggtgagaaagatcctcagatccttgcctaagagatttgacatgaaagtcactgcaatagaggaggcccaagacatttgcaacatgagagtggatgaactcattggttcccttcaaacctttgagctatgactctcggatagggctganaagaagagcatgaatctg

SEQ ID NO: 16436 - DNA, 376 bp, Glycine max
ttgtctttcaagtttttaagttcttcctcagaactgtcctaagcaaagttcccaaagtcctattaacaacttccgtttgcccatctgtttgtgggtgacaagtggttgaaaataacaatttagtgcccaacttgctccacaaagtcctccaaaaatggcttatgaacttatagtccctatcactaacaatgctccttggcaaaacatggagtctcacaatctccttgaaaaacaaatcagccacatgggaagcatcattaacttttttacatggaataaaatgagccattttatgaaacctatcaacaaccacaaaaatggaatctctaccattgcttgtttttggcagccccataacaaaatccatggattaatc

SEQ ID NO: 16437 - DNA, 417 bp, Glycine max
gtgagcaaattcaaacgacaataacttttaactcggatgtccgaataagtcccgtaatatatcgagacgctcgtaattgaaaactgaagctctgagcaaattcaaacgacattaacatttgactcggatgtccgattgcgtcccgtaggatatcgagacgctccaaattcaaaacggaagctttgagaaaaatctaacgataataacttttaactcggatgtctgatcgagccctgtaatatatcaagatgctcgaaattgaaaacggaggctctaagaaaagtcaaacgacaataacttttgacttggatgtccgattgtgtcccgtaggatatcgagatgctcgtaattgaaaacggaagctcggagaataatcaaacgacaataactcgaaattctgataccaggggacagatg

SEQ ID NO: 16438 - DNA, 398 bp, Glycine max
atagctctagaggcgagctgccggctttctctcttgaaattgaacaacaaaagctgtcgagatattcaaaatggtcataacttttaactcggaggtccgattcaggcgcatcacatatatatacgctcgagattgaacaacataatctctcgacatatacatatagtggtaacttttaactcggaggtcctatttatgcacatcatatgtcgagacactcgaaatcgaacaatggaatctcttgagctattcaaatggtcttaacttttgactcagaggtccgatgcaagcgtgtaatatatcgagacgctcggaattgcgcaaccgaagctactgtgaattgaaaatggccgttacttttcacttggaggtccgatatacgcgcatacatatttaga

SEQ ID NO: 16439 - DNA, 378 bp, Glycine max
agtcacacaagttacccaggactacgtaggtctgaattcctcatttgaggatacataggagcaagagcctcgcttttgtcggccgccccacaatttctgtcatactgacactggagtcacgtgacatgcggagatacccaagtggttgtccgcactttcataaacattcttttgctatctgtaggacagaaagcctgatagcatgcagagactaacatcgtcttctgcacccttcgtcaatcgcggcccaacaagcccgttgacatgcggagatttacgtcatcttccgcgctcacaagatctgtcatactgacatttgagtcacgctgacggacggaaatacccgagtggttatccgtctaaacattcttttgctat

SEQ ID NO: 16440 - DNA, 382 bp, Glycine max
agcttgacgtttatctcaaaattgcaaagacatgaccttgtgagaggtttaccaaggatgtcatacaaagatgaaacaaattaaaacctctttttcaagcaaaaactttgtttcctcaagaccacttgaactattacatattgatctgtttggctacaatgaatgactacattagatggacatgggtaatgttccttgctcataagaatgagtcctttgaggtattctttaaattttataaaagagcttaaaatgaaaaaaaagtatgcgttacttcaattagaagtgatcatggtggagagtttgaaaatgagaactttcgtctattctatgaagaaaatggaacttttcataatttcttcatgtcataccctaatttcat

SEQ ID NO: 16441 - DNA, 427 bp, Glycine max
  unsure (1)..(427): unsure at all n locations
ntgtatggtagaaggtgtaggacacccctatgttggttatagcccggagaaggcctcaccttatgaccagaagtggtacagcaaaccactgagaaagttaagttaattcaggaaaggatgaaaactgttcagagtagccagaaaagttatcatgataagaagaggaaagatctggaattcaaggttggtgatcatgtattcttgaaagtcactccgtggactggggttggtcgagcattgaaatctcgaaaactcacacctcgcttaattggtcctttccaaattcttaagagagttggccctgtggcataccaaattgcattacccctgtctctttctaatcttcacaatgtctttcatatgtctcaactccataagtatatctgtgatccatcccatgtgattgaattggatgatgtacaagtga

SEQ ID NO: 16442 - DNA, 376 bp, Glycine max
tgcttctaaactttgtacaagaatgaagctctgataccacttgttagacaagtggcctcagatatcttaagaagggggggttgaattaagatattccaaactttttttccctaattaaaaatctatcttactttttacttaagttatgaattcccttaatgacaatcttcttaaatattaattcaaatgaagcaacttgaatatgaatataaagcaataataaataaaggagattaagggaagagaaaatgcaaactcagttttatactggttcggccacacccttgtgcctacgtccagtccccaagcaacccgcttgagagttccactaacttgtaaattccttttacaagttctaaacacacaaggacaaccc

SEQ ID NO: 16443 - DNA, 431 bp, Glycine max
tatgagcatgaaacctttctccaccaaccgagatagtaacatctaatgattcctcatcctctaacaacatcccaaaatgttcaccaatatcagattcaggaacctgtattgtgtttaactgagaagaatctatggacgacactaaaaccgcaatagtgcaatttatcttcaagcagtcatccttgagaaaatttgacgtctcaaggtgtctccgtttgaaaaaccgcgtatagcccctattacgcaacaagtgcatcattgatcactatatacgtaatgtacaccacaaaaaatggatacaagagctaataaatcatgatgatatccaaatcatatcaccaaaatcacaaggttctctagttcctttggaaatttaatttttatgtcttatattctaataaaagagctatctctttaacccctgacaatag

SEQ ID NO: 16444 - DNA, 417 bp, Glycine max
ctgaatggaggctctgatctcttgttgaaactgcttagtcattgtcctcacaagttcttcaagggaaggttgtggaggggcctcaactgtttgatgtttctggggctgttgatgttgttgctgtcggattgctggaggaacgtatggtctgctcgggctatcagcattttgacaataagtctgctgttgatgctgctgctgctgtgaaggatccgaccatctaaggttgggatgattcctccatccgggattgtacctgttgctggagaggtcataattattctgttgtggtctgtgtggttgccagcataggagcataaaccacagagtctggcgacaggcgcagattattgattcatggccatttgggttaccaggttaaccaaggcatctagtttaccttcaagcttcttagtc

SEQ ID NO: 16445 - DNA, 360 bp, Glycine max
acacataaacatgtatagaaagttaaataaattaagaagtaataggtcaaataataaattgaaattgagacgaaaattaagtatcatttcagaattcaacacataaaatacttttatatgcactctttagtttaattatttattaacccttttaaattgaaaataatagtaggttaattgtaatattatacaacattattgtgtcaatgtaaatattaatattgggggaagtgtatatgattcatgaggtgtgataacatgttgcgctaagattataacactgtgattgagaatgagtgaatgtgataaacgaataatgtttgaatcggaagatatatgtgtactgagattttatatgca

SEQ ID NO: 16446 - DNA, 412 bp, Glycine max
  unsure (1)..(412): unsure at all n locations
tctctcagcaactntgactgcaaaacttcacaggtgctacatggcttctttgcaagtgacaagacaagctttggcatctgagtctcagagaacaccaccctcagtgcaaaatgcaacaacctccacaaccacaccaattagcaacaacttcagtgtgaagagtgagcaaactcatgcagtgttgccacataagagaccagaggaggagcaagagtcagaggcaaatacgggtgtgaaaagggttaaggctgtggaaaatgttcctctgcaattcaagcctcttgaggaagatcacatagagcaaatgattgaggagcttcttgattatggatctattgaactctgctctgtcatttcaccccangccctctaattgaatgtgcatgtttttgagctgaatctaaagtcacaa

SEQ ID NO: 16447 - DNA, 340 bp, Glycine max
ttcatgctattctgtacggttaaagtctcacgattgtcacatgtcgatgcaacaatggttattcgtggctatacaagacatcttgccaaacaaagtcaagttagccataactcgcctgtgcttcttcttccatgccatatgtagcaaagtcgttgatcctgtcaagcctgatgaattggaaaatgataccgcaattatactatgccatgtggagatgtattttccccctgctttctttgacatcatgattcacttgattgtgcatttggtcatagaaatcaaatgttgaggtcctgttcatttgcggaggatgtacccggttgagcgatacttgaagatc

SEQ ID NO: 16448 - DNA, 413 bp, Glycine max
tcgcacttgataatggatacacatgaacagcgctaatcaatgacattcatggtgctccgaataaaggtggagtatggaggattgccttgagggtcctctcttatgcaatcatggaacacagctccaaactcgaaagtggaggacacatgaacaaccctaagcaataacattcatgtggctctggaacacgatgagaatggaagattgccttgacggtcctctcttaggcaatcatggaacacagctccaaactcgaaagtggaggacacatgaacagccctaagcaataacattcatgtggctccggaaccggatgagaatggaagattgccttcagggtcctctcttacgcaatcatggaacacagctccaaactcgaaagtggaggacacatgaatgacaacgcaattcaa

SEQ ID NO: 16449 - DNA, 412 bp, Glycine max
tgaaggtaggagaagatgagtgaaaggagagggatagaaggagcacgaaattttgtgcctcaaatgaggtttgaactttgaagtgtaattctcaaatgaccaaagttgaaaaatgcacacacatggcctctatttatagcctaagggtcacacaaaattggagggaaatttgaatttctattcaaatttcacttgaatttgaaattgaatttgtggagccaaatttaggagccaaaatttcactaattatgattagtgaattttagctatggttcagcccactaatccaagatcaagttcaaaattctctactaagtgtgcttaggtgtcatgaggcatgtaaaacatgaaggacatgcacaaagtgtgattatatgatgtgacaatgaggtgtaacaagcaaatgctcacc

SEQ ID NO: 16450 - DNA, 435 bp, Glycine max
ttggttgtcatgatgaattagattcattgcatagtaatgataacagaaactttattgtcatacaagactttcttagtacattagaagaaattcctagttccttgagcatccattgcaacaaaatccttcatatataccattggccaaagccctaaattctgcttcagcaatgcttctagctaccacaatctgcttcttgcttctccaagtaaccaagtttcccctcacgtgatataatatggatgaaacaccaagatacacaagtaaacagatgaaaaataaatccaaatgtgcagctagacaacttgcatgtgactactattactaatttactatgcacatatgtaaagatatattcattattcaacataaacatatccccccaccccccccaccccagaagaaaatgtactacaagggaaaggtataccatta

SEQ ID NO: 16451 - DNA, 415 bp, Glycine max
  unsure (1)..(415): unsure at all n locations
ntgcgattcgggccagacgccagtgtcgaggacatcgatgacgacgtcgtgtgaggcctggtggaggtcttgccagaaggcggaatgggcctggaggcccaggaactcgggggtgcgagtggtgtgaagcgtgtagcgcgtgtcttcgtagacggccaagacggaatgggaagctcgaagcgcgtgggcttgttgagggtcgagagtggcagcgaagccgttgtaagcggcggtgtaggcatagaggagagagtctggagaagaatcgagtgtggcagtgtaccagtcacggtgcgtggggtgcacggtggaatcgtggcggtgtttcatgtgtactatgtaagtcttcttggtcgcagatagtagtgtgagttggaggagaaagaatgagaagaaggaaagggaaattgatgac

SEQ ID NO: 16452 - DNA, 435 bp, Glycine max
taatactcataatcacatctataggactaaggtcctttatattttaattactagataagaaagacttcacatcatttatgaaatgcataccactaccaaatatcaatatgtcatccacattcacacatttatcattattattgatttgaaaaccatacaaaagaacaacttgatcaaacttttcgtgtcattactttggagcttgtttcaaatcatataaagatttaccaagaatctataagtagtactatgcaaagaatatccaacaaaaacataatcaacagtctttggtccaattttccttttcttattaatagggatgttaacctttgctagacacccacacactttaagatattttagatttgattatctttttctccatagctcaaaaggggtattttttaaaaaataattataaggtaccatattaaa

SEQ ID NO: 16453 - DNA, 381 bp, Glycine max
  unsure (1)..(381): unsure at all n locations
tgcttcgaaacctcacgggattaaaaagttgaaaatttcatatgatgatgctttgctaaggctggaaagaattccagatgttattggcatcaatgatgctccaagtgttggtgaagataatcctgaagtttggcatgttcaggtaattagttatctaataatgctgaataaatattttgattttctagaagcaattattttctcatttactctaaaatgaaattatcgattatgtctactttggaatgtagatatttcgttcaattgattcaaattccgttaaggggtttccaaaggatccaaaagatgcaacgagcaaggtgaatgaaaagccttgtgtttcaattnttgtttgtcagacttggtttaacctatcaaacc

SEQ ID NO: 16454 - DNA, 407 bp, Glycine max
aacttatcacactgagctccgattcagtcttacaatatattgagaccctcgaaattaaacatcggaagctctcgagaaattcaaatggtcataacgtttcacacgaaggtcagattcaggcacataatatgtcgagatgctcggaattcaaccacggaagctctcaagaaattcaaatggtcataacttttcacacggatgttcgattcgggcatataatatgtcgcgatgctcggaattgaaccacgaaagctctcgagaaattcaaatggtcataacttttcacacggatgtccgattcgggcgcataatatgtcgagatactcgacatagaacaacgaaagctctcgagaaattcaaatgggcataacatttcacacggatgtcagattcggcacataatatgt

SEQ ID NO: 16455 - DNA, 348 bp, Glycine max
  unsure (1)..(348): unsure at all n locations
aacatctccagtgttaattttgcccgaccctaagagaccatttgaagtgtattgtgatgcaagcgggcaaggcttggggtgtgtgttaatgcaagagggaagaatagtggcttatgcttcacgccaattgcgtcctcgtgaagttaactatccgacccatgatttggaactagcagctatggtctttgccttaaagatttggaggcattatttataccgtactggttttgaagttttcagtgatcacaagagtctcaaatacttgtttgatcagaacgaactcaatatgaggcaatgaagatggatggagttcctcaaggattatgattntggtctttcctaccatcc

SEQ ID NO: 16456 - DNA, 369 bp, Glycine max
  unsure (1)..(369): unsure at all n locations
tatcttcggggacaggcgtgggtttgtttcagtgaagtcactgctgcaagcaatgcagtgcgacaaatgcaaaacttccctttctatgacaaacctatggtaattgttagattacacttatctagtatttattattacaccgaaacttatgattctgattcatatgtaattacctaatggtaatcaacttatagtgctgttgataatttctttacagttctgttcataactctattatatcttgtaccaaactttnggaaccatttctagtaaccaatgttatcttactgttcttttccccttttatcttgtatgttctagattctcttacttggctactagggatttatgttcgtgcccaaaaaatac

SEQ ID NO: 16457 - DNA, 414 bp, Glycine max
tgtgaaggaataccttgaagataattccaaaccattagtaattgaccgtaactttgtgattgatgcgctaccttcgggaaaaatcaatgaccttcgcaaaaatataaagctggtaatgggcgttgggtttgcaaaggagtgctacgaggtgtactgtaactggaggagggaaagcttaaaggagtgcttaataaatttattaggcttgccagagattaatgtggaggagaaaagtagattgttggaatttgaaaattacattcttagaagacgtattgaggctatccaggtcgctcttggaacactaattcccagtgagcgacgactctgtgatagcgtcttccaggggttctcttatgtggctgatctttgtttcactgatatttgtcggggaacctcaattcaattgctgaa

SEQ ID NO: 16458 - DNA, 370 bp, Glycine max
ttctttttctttatgattttgatctgaagctattgtatggcattcacaaggcttcatcttctggcgccatgaagcttgaacccaaagcttttggtggcaaatttcctgctcaggttagtctctttcattttcctgtctaattaaattatcctgatcctgtcgttgattaatatgctgatggctcatggctaacaccttcaggtgcggttcaaaattgcttctgattgtgttccattacccgaaagcattttcaaaaaagccatcaaggataattataatgaaaagcacaagttcagaacagaacttaccgttagacaagtaagaattaaatgtaacctctggtggcctgtctgtctgtttctatcattct

SEQ ID NO: 16459 - DNA, 368 bp, Glycine max
agcttgtgaaaacaaaaaagtgcaacacatttgatatagtttataggcttctgaagttggctctagtcttgccagtagcaagtgcaagtgtgaaacgtgttttttcagctatgaagtttgtgaagagtcaactatgtaacaaaatggatgatcaatggttaaataatcgtcttgtaacttttatagaaagagatgttcttggaacaatcaacaatgaagttattttagctcattttcaaaaaatggatagtagacgatttttattgtaaatacatttccttaaacaacattatttcttattttcaatatattttagtctattagttcttttatattttacccacactgatatttattgtctggatccg

SEQ ID NO: 16460 - DNA, 347 bp, Glycine max
  unsure (1)..(347): unsure at all n locations
ctcncactcgataatggagacacatgaacagcgctttgcaatgacattcacggagctccaaataagagaggtatattgaggaatgtcttgagggtcctctcttatgcaatcatggaacacagctccaaactcgaaagtggaggacacatgaacaaccctaagcaataacattcatgtggctctggaacaggatgagaatggacgattgacttgagggtcctctcttaggcaatcatggaacacagctccaaactcgaaagtggaggacacatgaacagccctaagcaataacattcatgtggctccggaaccggatgataatggaggattgccttcacggacctctc

SEQ ID NO: 16461 - DNA, 372 bp, Glycine max
  unsure (1)..(372): unsure at all n locations
ttgcttggaccctcaagaaattttggtgctactattgaacaaccttccaacagtacaagttctgatcttaatattgtcttagtttctcaagttgcacagccttctgatgctcctttgcagttttcaacttctttcctttcttttgctagtgtttcaaatggaaaaaatgagggtttggatgttggaatctcacgtgaggatgagatggaggaagaagctcctgagacaagtaacaacacaactgaacttattttaagaagctntggcgggtttgcgattaactcaaaccctaacccatcaatgcctaagacaaatccttttgggggttcatttaataatttagcaacaagtttatcatgctctacagttaca

SEQ ID NO: 16462 - DNA, 413 bp, Glycine max
tggatttccttttagtaaggaatctatccttccttatatggagccaaacctagtcccccttattaagaactagctcctttcctcctctattgcctttagttgaataaacctttgtttggttctctatttggttcttaaccctctcatgcaacttcttcacaaactatgacctacattccccttctttatgtataaaagaagtgtcaagtgggaagggaatgaggtctaagggtgttatgggattgaacccatagacaacctcaaaaggggattgctaggtggttctatgaacccccctattgtacgaaaattttacatgaggaatatactcatcccaagacttatggttgccttttagaagagcccttaaaagggtggataaagacctattcactacctctgttggcccctta

SEQ ID NO: 16463 - DNA, 427 bp, Glycine max
  unsure (1)..(427): unsure at all n locations
ttgaaatgttagattctcagactcggattatggatgccacagctggagactgaatgttgatttgttatgtgtgcatatatagtcagttcttgatgtaaatttcattctttaggtatcatcttattggagattttaacattttatatgtacagtctagcaattttaacagcatatctcttgtagggctcatgttagactacaaagaagttaccctatctcactttagttntgctagcttctttctgatgttcaacactgggactttatgtccatattgatgttttgcttccttttggtatttgagagaagcaaaatttgatctaacttctatttaaccaaaagatataagcctctcatggaaaaactctctatgggtttgatgtactttgatcttaaacaagcgtccaacatatggttacctggttgg

SEQ ID NO: 16464 - DNA, 410 bp, Glycine max
tgtggctcttcacgtctggaatatgaatgtagcatatagatccaaagacccttagatgctttgctgatggcttcttcccgttccaagcttcaattggagtcttgtcttttacagacttagttggacatctgctgagtatgtaaacatcagtgtatactgcttcagcccagaatgtgttatgtagtcccttcttcatgagcataaatctagccatctccataactgtgcgattctttctctcagacactccattttgttgaggagaatatgcgactgtaagatggcgctcaatgccttcatcctcacataatctatcgaactcgcgagaggtgtactctatgtcgcgacactgcttaatactttatcacctttcactttgattttaacaagggccttgaactgttagaata

SEQ ID NO: 16465 - DNA, 382 bp, Glycine max
agcttaaacattcaacttcgagcgtctcgatatattacgagtctcaaacagacatccgagtaaaaagttattcgtttgaatttgctcagagcttcaacgttcaattttgagcgtctcgttatattacgggactcaatcagacatccgagtaaaaagttattgtcttttggattggctcagagattcaacattcaatttcgagcgtctcgatatatcacgggactcaatcagacatccgagtaaaatgatattgtcccctgaattggctcagagcttcaacattcaatttcgagcatctcgatatatgacgggactcaatcagacatccgtgtaaaaagttattgtgcgttggattggctcagagcttcaacattcaatttcc

SEQ ID NO: 16466 - DNA, 422 bp, Glycine max
tcttggggttggctggctattatagaaaattcattgagtgattttctaaattggcactgcctctaactaagttgactcgtaagaatgagaaatttgtctggaatgagaagtgtgatcaaagtttccaagagttgaagaggcggttgacaacagctccagtgttagttttgcccgaccctaagagaccatttgaagtgtattgcgatgcaagcgggcaaggcttggggtgtgtgttaatgcaagagggaagagtagtggcgtatgcttcacgccaattgcgtcctcatgaagttaactatccgacccatgacttggaactagcagcggtggtgtttgctttaaagatttggaggcattatttatacggtactcgttttgaagttttcagtgatcacaagagtctcatatacttgttcgatcag

SEQ ID NO: 16467 - DNA, 407 bp, Glycine max
tgttgaggccattattcttgaagcttctaaactttatacaagaatgaagctctgataccacttgtttgacaagtggccttagaaatcttaagaatggggggttgaattaagattatgcttactattcccccaattaaaacctactcagatttttatgcaagttctgagttccctttataataaatgacttagatgatgaatcaaatgagcaaactgaaatgagactaataaacaacagctaatataagagataaggggaagagagaatgcacaaccagatttatactggttcggccacacccttctgcctacttccagtctccaagcaacccgcttgagagtatcactatctttgtaaattctttactagtattgtaccacacaacgactttctgatgaaaatcctg

SEQ ID NO: 16468 - DNA, 385 bp, Glycine max
taataaatgtatatattgtttagaacaagcttcccgtcagaggtaccttaagtttcatgggataatttcttcatttggttttgatgaaaaccccatggatcaatgcatataccacaaggttagtgggagtaaaatatgctttcttgttttatatgtagatgatattttactagcagccaatgatcggggttcgctacatgaggtgaaacaatttctctctaagaattttgacatgaaggatatgggtgatgcatcttatgtcatcggcatttacattcatagagatagatctcgaggtattttatgtgtatcacacgaaacctatattgacaaaattctagaagagatatcggatgaaagattgtcaccaactgttgcccccatt

SEQ ID NO: 16469 - DNA, 351 bp, Glycine max
tctaaatgtttcaagcattggacgattcttatgaagaattaaatacgatagatcgtgaagtgtcttatgatagacaatgacttggaattctattctacgaaattcaatgaattctatcaagattaaggcatcacaagatagagtaacttacgctatactttgtctcaaactggagtaactgatagaataaactagaccctattggaaagggcgcaatacattctatccaatgtaggagttgaataggagtgtctgggctgaaacattcaacgcaacatactatctcaagaatcattcaccatgcactatcataaattttagaactcgtagtgaagaatggtctaacaaact

SEQ ID NO: 16470 - DNA, 412 bp, Glycine max
tctctcagcaactttgactgcaaaacttcacaggtgctttatggcttctttgcaagtgacaagacaagctttggcatctgagtctcagagaacaccaccctcagtgcaaaatgcaacaacctccacaaccacaccaattagcaacaacttcagtgtgaagagtgagcaaactcatgcagtgttgccacataagagaccagaggaggagcaagagtcagaggcaaataggggtgtgaaaagggttaaggctgtggaaaatgttcctctgcaattcaagcctcttgaggaagatcacatagagcaaatgattgaggagcttcttgattatggatctattgaactctgctctgtcatttcaccccaggccctctaattgaatgtgcatgtttttgagctgaatttaaagtcacaa

SEQ ID NO: 16471 - DNA, 413 bp, Glycine max
  unsure (1)..(413): unsure at all n locations
taatgaccctcaatctttcaatgattatagacctatctttcttatagggtgtgtctataaaattgtggcaaaagttttggccaagaggctggccattgtattacctcatcttatagatgaaaggcagacggcttttatgaaggggagacacatccttcatggtgttttgattgccaacgaggctttagctgaggccaagtctagaaataaaccttgcatggtcttcaaagcggattttgaaaaggcatacgattcggtttattggggatttcttgactacatgctcatgaggatgggattctgtgaaaggtggaggaaatggataaatggttgtctatccactgcaaccatatccattntagttaatggaagcccatctaaggaatttgctcctaagagaggtctaaggcaag

SEQ ID NO: 16472 - DNA, 354 bp, Glycine max
  unsure (1)..(354): unsure at all n locations
ttctttgatgtatgagaagatgagtggagggagagggagagaaggggcacaaaatttatgcatcaaataaggtctaaactttgaagtgtgatttcttaaatgatcaaagttgaaaaaatgcacacacaaaagctttatttatagcctaaatgtcacacaaaattggagggaaatttgaatttctattcaaaattcacttgaatntgaatttgtggagccaaaattttgctaattatgattagtgaatttcagctatggttcagcccactaatccaagatcaagtctaatattctccactaagtgtgcttagatgtcacgagacatgtaaagcatgaaggacatgcacaaagtgt

SEQ ID NO: 16473 - DNA, 430 bp, Glycine max
gacctataaaactcagcttccaggatggccccctgcattcagaacttaacttctaccagggatgcagagacgggaagcaaactcttgaggatcaatcctcatcctcgtaaatctggaataggtaggcagtgtctcaccctcctctaaaactattggggtttcaaagaaggtatttaggctgtcagcatcaatcttgattaagtgtcctgatgcaatcctaccccgcaagggcattggatagaaaactccaagtagattgggccaaagatgcaagagaaggccctagggttcttatgagccttagggtagatttcgggcccatgggctaagtatgagcccacttatctttgtaaatattaaattaaggtttcattatttttgggccttgcatttacggctccataatgtaagtagggtaccctagaaatat

SEQ ID NO: 16474 - DNA, 402 bp, Glycine max
  unsure (1)..(402): unsure at all n locations
tcaagaaaaagatggcctcagcaaattccttatttccagaagggaattctatcaatagacctccaatctttaatggagaaggttaccactactggaaaacccgaatgcaaatttttattgaggcaatagatctaaatgtctgggaagccatagaaatagggccttatatacccaccacagtagaaagaattacaatagatggtagttcatcaagtgaaagcataactatagaaaaacctagagatagatggtctgaagaggatagaaaacgagtacaatacaacttaaaagccaaaaacataataacatctgccctgngaatggatgaatatttcagggtttcaaattgtaagagtgctaacgaaatgtgggacactcttcgattaacacatgaaggaacta

SEQ ID NO: 16475 - DNA, 406 bp, Glycine max
tgccgccacggagttttccgactattctcttgtgtggtggaacaagctacaaaaggagagagcatgatatgaagagccaatggttgatacatggacggagatgaaaaagatcatgaggaagcggtatgttccggctagttactcaagggacttgaaattcaagctccaaaaactaacccaaggcaacaagggggttggggagtatttcaaggaaatggatgtgctcatgattcaagcaaatattgaagaagatgaggaggtaactatggctcgatttcttaatggtttgactaatgatatccgtgatattgttgagctgcaagagtttgttgaaatggatgatttgctttacaaagcaatccaagtggagcaacaattaaaaaggaagggagtggctaagaggagt

SEQ ID NO: 16476 - DNA, 338 bp, Glycine max
  unsure (1)..(338): unsure at all n locations
ttcttgcagcgcatttctgatgaactttaccagaaattgcggtaggaggtcccaagactgggaagctcccagtgaagggttctgcctttcttacagctgaaggatcatccagatcaagccttgctataagttcaccagcctgcaaaaggtgatacaattttattatctttttcaatttcaacaattgtacttcctatgtggaatagaatgctatatacctgcattgcttgaccttcagacattttgaaatgaataatcccagaagcangcgaaagaagaggcatgcacattttcatgacctcaacttcagcatacggtgtgtcagcatcaacatgact

SEQ ID NO: 16477 - DNA, 258 bp, Glycine max
  unsure (1)..(258): unsure at all n locations
gctaacccatggaagctcctaatatctcccacactttttggggtgggccattcttggaaggacttgattatctcaagttccacttggaccccatttctaccaactacgatacctaagaaaactatattatctacacaaaaggtacacttctctatatttgcatagagggtgttttcctaaggacagaaataactttctgatatgtactaatgatctttangctcctactatccctaaaattcatcaaataacaacaca

SEQ ID NO: 16478 - DNA, 405 bp, Glycine max
tcatgctcaagtatgtatggcaaaacttataattgttgttcaagacatacaagtgagcttgttacaaatcttctacacttggagtgatgacatgcagtcctcttgaacctttaccaccgactatgacctcatgccaacactcaagacggccaagacgtatatccttctcaatgtagactcaacaagagtcaattgctacttctgcgcatatacctgtgaacaatagatgcttctggatgatacaaattctttatgtatccttttaagatcttcatgtatcactcaaccgggtacatccaccgcaaataaacaagaccacaacatttgatttctctgaccagatgcacactcaagtgaatcatgatgtcaaagatggtagggggaaaatacatctccaactggcat

SEQ ID NO: 16479 - DNA, 397 bp, Glycine max
taaacattcaatttcgagcgtctcgttatattactggactcaatcagacatccgagtaaaaacttattgtcgtatgaattggcttaaagcttaaacattcaactttgagcgtctcgatatattacgggactcaatcagacatccgagtaaaaagttattgccgtttgaattggctcagaggttcaaaattcaatttcgagcgtctcgatatatttcgggactcaatcagacatccgagtaaaaagttattgtcgtttgagttggcttagaggttcaacattcaatttcgagcgtcccgatatattacgtcactgaattggacatccgagtgaaaagttattgacgtttgaatttgctctgagcttcaacattcaatctcgagcgtctcgatatatta

SEQ ID NO: 16480 - DNA, 413 bp, Glycine max
tcttagtttcagatgatgcagatgagtttgtggctacctcatgcactcctctaatgactatagcatcatttctagcgctaaactactgggagtttgaagccatcttcttaattaaatttctggcttcaacaggagtcatgtctctaagggctccaccactggcagcatctatcatacttctctctatgttattgagtccttcataaaaatattggagaagaagctgctccgaaatctgatggtgagggcaactgacacatagttttttaaatctctcccagtattcatataggctctccccactaagttgtctaatacttgaaatatcctttctgatggttgtggtcctggaagcagggaaatctttttctaagaatactctcttgagatcatcccagctcgtgatggacctt

SEQ ID NO: 16481 - DNA, 412 bp, Glycine max
tatgctgcaaacattacaacagacctcctcaatttcagcagcaaaatcaaccacagcagaacaattatgacctctccagcaacagatacaatcccggatggaggaatcaccctaatctcagatggtctagccctcaacaacaacaacagcagcctgctccttcctttcaaaatgatgctggcctaagcaagccatacattcctccaccaatccaacaacagcaacagccccagaaacaacaaacagttgaggctcctccgcaaccttccctcgaagaacttgtgaggcaaatgactatgcagaacatgtagtttcaacaagagaacagagcctccattcagagcttaactcgccagatgggacaattggctacacaattaaatcaacaacagtcccagaattctgacaagtt

SEQ ID NO: 16482 - DNA, 412 bp, Glycine max
tggattgcagatccagtgcactcaacatattcatttttatctacaatgtccgcaaaaaattctgtgggattgagtaactaagaatcaccaacaaagttaattagtttattaatcaagtacttttttttatcaatttataaatacatacgtgttgcattattaattaatttaatacttacttctaaccactcttgagctcctgcaggctcccatgctgctaaaccaccttttttactctgcaataaaaaaaatgtggtttagttaaaaataaatgtggtagtaaaagtaaataaagcatcaatgatcaaagtcctttgtcaaccctaacttattattgatcaaatattaagtaacaaagaaaaggggccattagttgattgatgattggttaattaaaaggatatggacataa

SEQ ID NO: 16483 - DNA, 417 bp, Glycine max
  unsure (1)..(417): unsure at all n locations
tctaaactttgtacaagaatgaagctctgatacctcttgttttacaagtggcctcagatatcttaagaagggggggttgaattaagatattccaaacttttctcctaattaaaaatctatcttactttttacttaagttatgaattcccttaatgacaatcttcttaaatattaattcaaatgaagcaacttgaattatgaatataaagcaataataaataaaggagattaagggaagagaaaatgcaaactcagttttatactggttcggccacacccttgtgcctacgtccagtccccaagcaacccgcttgagagttccactaacttgtaaattccttttacaagttctaaacacacaaggacaacccttcctttgtgtttagagattctntacaacaagagactcacagtctc

SEQ ID NO: 16484 - DNA, 233 bp, Glycine max
ttctttgaaatctcggataaaccaaatcatgttgataaattgcaaaaagctctttatggtttgaaacaagcccttagggcttggtatgaacgcttaagtaaatttcttctaaaaaaagaattctctagaaggaaagtggataccacattgttcatacaagaataagcataatgatattttggctggtccaaaaatatgatgatgatataaattttggaaccactaatgattca

SEQ ID NO: 16485 - DNA, 415 bp, Glycine max
tgtgcattcaatatcctgatgaggatgttccatatgttttcaagactggactaatacatttgctgcccaagtttcatgatcttgcaggtgaagatcctcataagcatcttaaggagttccatattgtctgttccaccatgaaatcccttgatgtccaagaagatcatatctttctaaaggcttttcctcattctctagagggagtggcgaaggattggctgtactaccttgctcccaagtccattaccagctgggatgaccttaagaaggtgttcttggataaattcttccctgcatctaggaccactgccatcagaaaagacatttcaggcatcatgaaacttagtggagagatcttgtatgagtactgggaaagattcaagatattgtgtgaaagctgtcctcactaccagat

SEQ ID NO: 16486 - DNA, 401 bp, Glycine max
gttttggttgtgcatcttcttctctgtttgttgattcttttcatggctaggctggtaaatgccaacaacttctcctgtcacagttgggtgttcccaaaacatgtctctcaccttttcaaaataaccgtagctcaaggatgtcatcagcacagcttttgatttcggctttcctggtgaattaacaatatcccccttttggttaacatcaggcaaaagattctccttcaaagtgcaagctaagatctgatccaacacatgttgaaatggtccagttctagtatcaaacactcttatttggatgcctactctttcatcaacgtcagctaaataagcttgatagtatctgctaacaagtcctcatactttgttggtagggtggaacagatatctacccaagaaat

SEQ ID NO: 16487 - DNA, 351 bp, Glycine max
ttcttctcgatatgtgatgtgcatgaatcgaacatccgagttaaaagttatggcgatttgaatttctcgaaagctttcggtatttaattttgagcatctcgacacatgatgcgcccgaattggacatccgtgtgaaagttaagaccacttgaatttctcgagagcttcgctattcaatttggagcgtctcgatatgttatgcgcctgaatcatacatccgagtgaaaagttatgaccatttgaatttctcaagagcttccgttgttaaatttcgagcatctcgatatgtaatgcgcctgtatctgacatccgagtcaaaaggtatgaccttctgaatttctcgagagcttc

SEQ ID NO: 16488 - DNA, 331 bp, Glycine max
  unsure (1)..(331): unsure at all n locations
agctttaatgtgatgcatttggggcaggcataggtttgtgttgatccaagaagggcatcctattgcatatttttttagaaactgaatgaagctgctcttagttattctacatatgataaggaattgtatgccttaattagagctttgtagacttagcaacattatctcttgcccaaggaatttgttattcatagtaatcatgagtctttgaaatatttgaaaggacaaggaaagttgaacaagaggcatgaantttttattcactatgatcatgagtctttgaaatatctgaaaggacaaggaaagttgaacaagaagcatgctcttgttg

SEQ ID NO: 16489 - DNA, 361 bp, Glycine max
attcttttctatgcagagaatatccaaggaaaataccttcatctgacttagcatcaaattttcctaagttatcttttccattattcaatacaaaacatttacaaccaaagatatgaagatgagagatgtttggttttctgccattgaccaattcatatggagttttctttaaaatgggtcttattaaagccctatttaaactgtagcatgcagtgttaacggcttcagcccaaaagtattttggaagaggagtatcatttaataaagttctagcaatctcttccagagatctatttttcctttcaacaacaccattttgatgaggggctcttggtgcagaaaaggtatgcttaatcccatg

SEQ ID NO: 16490 - DNA, 323 bp, Glycine max
  unsure (1)..(323): unsure at all n locations
atcttgagccatcacccaatcttgcaacacaatgttgggtccaaggttatcaaactcgacagtttacgtaaactcgtaagagttccatagactcaactcgtagacttatacgagtccacttcatataaaaataataacaaaatatctataaataacataccaattaaacattttaacaatataataaagcaaaatagtaaatcataaatttcacaatactgaaataaccaagtctagtaatgcatcactactagataataacttgcagattntatagtagtggtagagcattcccatcaaggatntgatgttattagagaata

SEQ ID NO: 16491 - DNA, 348 bp, Glycine max
gcatttctgatgaactttaccaaaaattgcggtaggaagtcccaagactgggaagctcccagtgaagggttctgcctttcttacagctgaaggatcatccagatcaagccttgctataagttcaccagcctgcaaaaggtgatacaattttattatctttttcaatttcaacaattgtacttcctatgtggaataaaatgctatatacctgcattgcttgaccttcagacattttgaaatgaataatcccacaagcaggcgaaagaaaggcatgcacatttttatgacctcaacttcagcatacggtgtgtcaccatcaacatgactgtcatctgcaaccaaatatct

SEQ ID NO: 16492 - DNA, 239 bp, Glycine max
tcttgatgtcctggatcgtcttcatcaatggagtcctttgattcttgataatccctggctacagatttggtaaggcagaaaggtgattgtaaacgccactttctggagaaaatgagtcaacaacaagctcaccaccatatgaagccgtggataagagtttgaagtatgacaaaatgaccgaatggagagagagaggggggacgggggctcacagtataaatccctttgatgacgacctg

SEQ ID NO: 16493 - DNA, 412 bp, Glycine max
  unsure (1)..(412): unsure at all n locations
ttttgaaatttcaaaaatatggtatttactctctttgttttaattaccagaggatgtaatcgattaccagtggccaaagtagtttctgaaatgttcttaaaattttgaatttgattttaaaagcctataatcgattacacaagacttgtaatcgattaccagaagttctaaacattttataaaagtctttagaaatttgaatttaaatttcaaagcctgtaatcgattacagcttgtgtgtaatcgattaccataacttaaaattcaaatttcaagtctttagagtcacaactctttagaaaaataactgtgtaatcgattacaccattttggtaatcgattactagtaaggaattttcaaaaataactcccaacaatcacatctattcaaatgtntttgaatggccatcaa

SEQ ID NO: 16494 - DNA, 328 bp, Glycine max
  unsure (1)..(328): unsure at all n locations
tttcttgtatgcttaaagtctcacgattgtcacgtgctcatgcaacaattgttagccgtggctatacgagacatcttgccaaacaaagtcaggttagccataactcgcctatgctttttcttccatgctatatgtagcaaagtcattgatcctatgaagtttgatgagctggaaaatgaggctgcaattatactgtgccagttggagatgtattttccccctgctttctttgacatcatgattcacttaattgtgcatatggtaagagaaatcannatgtgtggtccctgttatctacngtggatgtnacccggtgagcgatacatga

SEQ ID NO: 16495 - DNA, 412 bp, Glycine max
ttgataaatcttcggtagtaaccagtcaatctattataaccctttaactattagacattggtaggcttcggccaatctaacaccgcttgcaccttcccagcatccaatgctactccagctccagagactttatgaccaaggtattccacctcaagtaatccaaatgaacacttagagagttgagaaaataaaacatactattgtagtgtctgtaagacatactccaaatgacacaaatgagtagactaggaagggctatagaccagtatatcatcggaaaaaaacaagcacaaattttcctaactcattttgaaaaataatgttcatcaaacattgaaaggtagttggtgcatttgtgagtccaaatggcataacaagccattcataatggccatgatgagtcctaaaagca

SEQ ID NO: 16496 - DNA, 335 bp, Glycine max
ttcttgtccttttgggctttcactaagggtggaaatgagtgagccaaacttgaattgagttgaacacataaggcttgagtttgactaattatctctaataggcttaactttgtcatacataaaagtctagcttggcgagtctaattaaaagcttgcttaaagacgtctttgatcaattaattattttaaaatctagtgaaatactaactaaaaaaaagaaacttataaaatttaatatgagtaatgtacaaatccaaaaataattgataaacaaaatcatattgaattcaagtagttaaaatacaaagaatatataaaaaatgaaaaaaagagag

SEQ ID NO: 16497 - DNA, 334 bp, Glycine max
  unsure (1)..(334): unsure at all n locations
tttctttaacataaagagcatacttatttttacaacgaacaaacccattgtcttggaagtacttgtcaatgcgactattccatgccctcggtgcttgctttagaccatacaacgccttgttcaatttcaagatatttccttcttgacctttgatgagaaaacccattggttgttcaacataaacattttcttcaagatagccatttagcaatgccgattntacatcaagctgaaaaactctccacttcatttgagctgccaaggaaataaaaagacgaattgtctccatgcagacaaccggtgcaaacacttcatcataatcaactccatattg

SEQ ID NO: 16498 - DNA, 410 bp, Glycine max
tactgttgacaaaaatcttattgatgttggttatttaatggttttacttgcagtgataaggccttaactttttacttatatgcacattttctaattatttttgtttaaaccaataaggtttttacaaaaggagtggatgcggatactgtggttttgatggcagctcaagcttcaagacttgagaatcaagatgcaatagacactgccatagttggaatgttggctgatccaaaagaggttagtcattgatatattattcaccgcgattcttttgatgacatatttattagctgcaagcctctaactgtaatctgcagatcatcataattgttactgtattttagtttgcgttttaattttcttgtctaacttactgctacaaaggctcgtcttggtatccaagaagtaca

SEQ ID NO: 16499 - DNA, 407 bp, Glycine max
tctggtgggacatcttgacttgctttccaatctgacattcaccacagattctgccttcttctattttcagattgggaatgcctctaacagcacctttgtcaatgattttcttcatgcctcttaagtgcagatgtccaaatctttgatgccatattctgacttcatcttctttggaggatagacatgtggaggagtagctggtttcttgaggtgtccataggtaacagttgtcctttgatctgctgcccttcattagaacttcactcttctcatttgtcaccaagcattctgactttgtgaagtttacattgaatccttcatcacacaactgactgatgctgatcaggtttgcagtcagtcccttcaccagcagtactttgttcagactaagaagtccatcatgaact

SEQ ID NO: 16500 - DNA, 417 bp, Glycine max
tatggtgaataccaatgtttttgtagcatcatatctggtaggctcatcttacgtgattctgccttggctttatctacacagacttcactcaagtcagagaaacagaaagctgatgactttgaaagaaaatacaacgaagcccaagtttgtagcgaagaaagaggtaaaaaactggaagacacggagaagaagacacgtcagcttcaagaatcactgactaggtaatataaataatgaaaagtatgccctgatgtaattgttttcccgtgataatcaatgatgtcttgcaagggagagccttgtcacaatgttaaggttgttacttgtaaccctgaggttaccagtacaaatcttggaaacagtctctctgcttatggagttacagctgcatacatttactactccagaccctacttg

SEQ ID NO: 16501 - DNA, 415 bp, Glycine max
  unsure (1)..(415): unsure at all n locations
tgtagtgcagctccagatttcataattggttcattatcaggatgatagtcacagcctgcttcaaggatttgcttaccagatgacagtaaagttggaactttgtcatgacgaacctgcttctgattctcttttaactcaaaatcattagcataaggaagattagtatgtccattaaaataaccattgtttattgcggaagcgtcaagaagtgggttaaagaactgaaaaataaaaccagctgccaaacttgaacggtaagtggtttttgaggtatcatctttaggtacaatagtggctgtaaccaagatgacagcatcgtatagaatgctagcacttaaaagctttccagctaaaaactcctcaacattntttgctctgattgcatgcttactcccataagcaccaaaagacaacc

SEQ ID NO: 16502 - DNA, 414 bp, Glycine max
tttgcaagtattttacccaagaaaacaggaaagttttataaaaggaaaacagaaatataatagagatgaagtccaacaatacatacatccaatgcgctcagcttcaaccatacgaagatctaaaggaatttcttgaaactgtgcagcaatttgatgatctccaagagataaattgtgtgaaacatatgcttttatggtgcctgctccctttgtgaatcctgtgtcaacggtcaaatggataggattgggtacttctcgagaataaaattcatggattaatgcactaccaccagttactccaagaccagttgaatacctgcatgaaataaccataattagctacagtgaaaggaggttcataaactggtataatagaacattctctaagaacataaagagtaagaaggaataaaa

SEQ ID NO: 16503 - DNA, 327 bp, Glycine max
ttttctttgaatgggctaatgaggatagctgatgccagctccattggagcttgtaggcctaagatcttcttcatcaatggattcctttgcttcttggaagatgaatggcagcggaatggagaaagggagagagagaggagacgccacttcaaggagaagatgagtctagaagaagctcaccaccatatgaggccatggataagagcttggaggaagaaggagatgaatgaacggagagggagagaagagcacgacattttgtgctccaatgaactttgaatctgaagttaatatcaaatgatccaagtcaaaaaatgccaccctgac

SEQ ID NO: 16504 - DNA, 410 bp, Glycine max
tcaacatcagaccacgaccagggtgctggaactatttcacatggacttgatggggcctatgcaagttgaaagccttggaggaaagaggtatgcttatgttgttgtggatgatttctccagatttacctgggtcaactttatcagagagaaatcagacacctttgaagtattcaaggagttgagtctaaggcttcaaagagaaaaagactgtgtcatcaagagaatcaggagtgaccatggcagagagtttgaaaacagcaaatttactgaatactgcacatctgaaggcatcactcatgagttctctgcagccattacaccacaacagaatggcatagttgaaaggaaaaacaggactttgcaagaggctgctagggtcatgcttcatgccaaagaacttccctataatc

SEQ ID NO: 16505 - DNA, 401 bp, Glycine max
ttatacagatgaccacttgcgtattttcgcctgccctttaacttcacgggttattattgacagagattgatggtgcgcggtatatgacgtatatctctgcacgtcacctgagttcagagtcagtgtgacacaaattgcggggcggccgacaaaagtgagtctcttgctcctacgtatcctcaatttgtgatgaggaacttaaacttacggtattcttgatactgtgagactaaatagtctcggtgttttttcactacaatgcgaacatgcattagtaaagaaacaaaacttccaactgatcaaagcaacatatgcttttttctatgaagacaatgtgtctattgcggaaagagagtgtactgataataatttcacataaccatatatgagattttgatgat

SEQ ID NO: 16506 - DNA, 392 bp, Glycine max
gatgaaacggtggccttctcatggactctttcgaatgaaaatagcagcatttcttgcactgaagttgtgggagtaggaagccatcttctcaatcaaattcctaacctcagtatgggtcatatcaccaagagctccaccactggcagcatcaatcatactcctctccatgttgctaaggccctcatagaaatactatataaggagttgctcagaaatctagtggtgaggacagctcgcacacaatttcttgaatctttcccagtactcatacaagctctctccactaagttgcctaatgcctgaaatgtcttttctgatggcagtggtcctagatgcaaggaagaatatctccaagaacacccttttaaggtcatcccagctgagaatggatc

SEQ ID NO: 16507 - DNA, 374 bp, Glycine max
ttcttgcaacatatcacctatgttcaccactagggttccttcacatgggtttatatctatccactctcccttatttgatctgacttgaagccctcctatctcatgttgatataagatagtaatacaactcatatcaatgtgcatcccaagcccctcaacttgatcttctataacttctggagctgagtaatcgtttacccaacatatccaaccatgaacactccttcatacttgattcacttcttgtctgttcttttggttactttcatccgatagtcttcatgatgcaaaccatttaccttccaaaagtttacctatacctcaatttttgctactgcacatggtaattggtaagcctaacaagtacatggaaa

SEQ ID NO: 16508 - DNA, 396 bp, Glycine max
  unsure (1)..(396): unsure at all n locations
tgttcattagattnttcaaaaattattataaaatattccaagcatcataagcataaatgcataacacaacaaatctattctcataaacaacaacaaaatccgccgacgaaatttcttgatgataatgcttttttgataaactaatcaacgacgctaagaaattgagttaaaccttgattcctaatcagaaacagaatcctcaccatgaagcagttccaaggccactccgtcccgtcctctctcgaaaccttcggcctcgaaatcccccaataactggactccaccacgctcttctcagactcggccttctccttctccggaaacttcgcttccgccggcgaagccatcgtcctcttccagtagaagaaccctccattcgcgccgccagcgcagagt

SEQ ID NO: 16509 - DNA, 380 bp, Glycine max
  unsure (1)..(380): unsure at all n locations
agcttatgctgccaacacttataatagaccccctcagcagcaaaagcaacaacaacagaataattatgatctttcaagcaacagatacaatccaagttggagaaatcatctaaatctgagatgggcaagtcctccacaacaacaacaacctgtccctcttttccagaatgttgctggtccaagcaagccatatgttcctcctccaatacagcaacaacaacaacaacagtcacaacaaagacaacaagcaactgaggctcctcctcaaccttccttagaagaattagtgaggcaaatgaccatccagaatatgaaatttcagcaagagacaagagcctncattcagagtctgacanatcagatggggcagatggctactc

SEQ ID NO: 16510 - DNA, 416 bp, Glycine max
tatgacaatttgaaattttcgagagcttccgaagattaatttcgagcgtcttgatatattataagtctgaatcggacctccgtgtgataagttatgaccatttgaatttctcgagagctttcgttgttcaatttcgagcgtctcgatgtattatgcgcctgaattggacgtccgagttaaaaggtatgactatttttatttctcgagagcttctgttgttcaattttgagcgtctctttatgtgatgcgcctaaatcagactttcgagttaaaagttatgaccatttgaatttctcgatagctttcgttattcaatcttgagcttctctatatgtgatgcgccagaatcagacttctgtgttaaaagttatgaccatttgaatttctcgagagctttcgttgttcaatttgatatg

SEQ ID NO: 16511 - DNA, 356 bp, Glycine max
attttgggatgaaacagatgtgattcatcaaaaattacatctctgctgagaagaactttcctttcagttggtgaccagatcctatagcctttcactccatcaccataacccatgaacagaccctttctacattaacatgataataagcattgcagccaaatactcttaggtttgagtagtttggtggtttgccattccatatttcaataggagttttaagtcctatagcagtagagggtgttctattaattagaaagcaagttgtattgatagcttctccccaaaaacttctgttgagaccagcataggacaatagacatcttgttctttccaggagtgttctattcattctttca

SEQ ID NO: 16512 - DNA, 349 bp, Glycine max
ttcttgccgccattttttttccgactatgttcttgtgtggtggaacacgcttcaaaaggagagagctagaaatgaagagccaatggttgatacatggacggagatgaaaaagatcatgaggaagcggtatgttccggctagttactcaagggacttgaaattcaagctccaaaaactaacccaaggcaacaagggggttgaggagtatttcaaggaaatggatgtgctcatgattcaagcacatattgaagaaaagacgaggtaactatggctcgatttcttaatgggttgactaatgatatccgtgatattgttgagctgcaggagtttgttgaatggatgatttgct

SEQ ID NO: 16513 - DNA, 387 bp, Glycine max
ttgaacaacggaagctctcgagaaaatcgtgtggtcataaattttcacacagatgtccgattcggggaaataatatatcgagacgcacgaaattgaacaacggaagctctcgagaaatttgaatggtcataacatttcactcggatgttcgatccggggacataatttatcgagacgctcgaaattgaacaaccgaagctctcgacaaattagaatggtcgtaacttttcacgcgaatgttcgattcggggacataactcatctagacgctcgaaattgatacaacggaagctctcgagaaaattgaatggtcataagttttcacacggatgtccgattcgggaacataatatatcgagacgatcgaaagtgaacaacggaagctct

SEQ ID NO: 16514 - DNA, 330 bp, Glycine max
  unsure (1)..(330): unsure at all n locations
cttagttcttagttatgaacagacacaattcacatgcagtaccgtttggttcatattgctgctggagaattacttacggcagaaattgccactggaagtgataatggaaagcgagccccacagtatatggagaagggacagttggtccctgacgaaattgttgcgatggtatgtatgtatgtatgtcgtgactaatttctcttcaattcttgtttctcatatcatatccttgcttctgtttatgctatatagatggtaaagagcgtctcttgaaaccagattcnaaagagaatggttggcttttggatggatatcccacgagcttatcac

SEQ ID NO: 16515 - DNA, 373 bp, Glycine max
atacccaaaatcttatctacagaaccaaggtctttcatatcaaaatttctagacaagaaaaacttcacatcatttatgaaattcatttactaccaaatatcaatatgtcatccagatacataaaatgacgcatccattatcatcaaattgtttcacatacacacatttatcactatcattaatttgaaaatcatacaaaagaataacttaatcaaacttttgtgtcaatgatttggagcttgtttcaaaccatacaaagaattaacaatttatttttcaagaaaaaatattttcaaagaaagtcacatctatagactccataatagtaccattagaaatttcaaatacttctgaattaataattaagaatcta

SEQ ID NO: 16516 - DNA, 403 bp, Glycine max
tctcatttgatccaacagaggatgagcatacaacctatttcactcaagtcacacccacggaattcaagcacaagagacttgatcattgccatcttgaaagaatgctaaacatgaaaaaaagaaaatatgcaaaagaaaattgaagaagtttcaaatggaagaatgcaagtctgttagcacaccaatgaatcaaaaggagaagtttagcaaggaagaaggtgttgataacattgatgaaggatattatgggagcttgattggatgtctaatgtatctcactacaacaagatcaaacattctatttgctcaaaagaacaaaactggaatttttgttgacaatcaagtagccattgctattgcaaacaatctcgtgtgtcatgggaagactaaacatttcaacatc

SEQ ID NO: 16517 - DNA, 368 bp, Glycine max
  unsure (1)..(368): unsure at all n locations
atgcgaaccaggaaaaatgaaatgaacagaaaacgcttgtgggattatcgtctacgggccttatacagagaaacgaatcaaggacctaaaaagggattattaaagaggttaaaaaaacggaaattgtaaaacaagaataacataataacagtattttacttgagtcataacataatttcttttatatttattatttgataatcgatacacattataagtatttagttttactatttatattggttactagatataaaacttagacggaatatacgcgttaaccgtaaaaatcataaaaatgtctttcgatagataagtatatnttcatgctagaatttattgacacatacgaattttgtgtatcatga

SEQ ID NO: 16518 - DNA, 387 bp, Glycine max
  unsure (1)..(387): unsure at all n locations
atcttaaagatgctccaaattaagatttcaaccactcgtttcagagtcttaatttcattattagattctacatgcatgtacttgtgtatatttcatgtgttgttgcataccgtaaagataataaataaattaaagtagcaaagattacaacggttatgcttactagcatatttggaatattattaaatagaaattntattaaaaatataataaatatactgataatattaaatgttatacacattttaatacatattttcatttaatgttatagtataattatccatctatttattcaggggtttggatcaacctctgatccaacccgattcaatccaattaaattagattgaattttttaagtgtttaagtcaaattcaattcaac

SEQ ID NO: 16519 - DNA, 370 bp, Glycine max
ttctttgaatagtatgaaagaccctcccttctactttgtaaaatagattcaatagaaactaggaaaataaacaaatatattcgccgagaaataggagagagggatttgaaccctcaatagttctttttttcgaactatattgattttcaagactgaagttgtcaaccactcaaccatctctccaaaagataatttatattctatatttatttcattgaataaaacatgagcatataaattgatacttattatgtgtgtacccataagggttgaacaactaccaagggtatggctgagaaccttttcggtcaaagccaaacacccccagccataaccagatatcccaaggtgactaattacccctcgggct

SEQ ID NO: 16520 - DNA, 392 bp, Glycine max
  unsure (1)..(392): unsure at all n locations
ctgganaatgatttcttttcaaaagttagtcgtattatgcgactaacaaactgcaaataaagcaaacaaagaatggtaaatttattagtcagtcaaaatattgcaaagaactaactaacaagtttgggatggaaaatgctaaacacatggccactcctatgagcactgcctgctatctggataaagatgaaaccgatcagtcaatagatataaagaaatatagaggtatgatcagatctcttctttatttatttgcaagtagacttgatataatgtttagtgtttgtatgtgtgcaagataccaagcaaatcccaaagaatctcaccttagtgcagttaaaagaataatgagatacttattaggcactataaatctatgattatggtatcct

SEQ ID NO: 16521 - DNA, 345 bp, Glycine max
ttttaagcctaagatacttatctgtggggggagttcgtatcccagggaatgggactatgccaagttcaaacaggttgctgataagtgtggggcagtgttgatgtgtgatatggctcatatcagtggtcttgtagcggctaaggtgatttgaattttctgtcttttctctttgttcttgttgaattatgttatcgattttatggttgtttatgcatctgaattagttttctttggagtgtagaggcagatgtattgtatgctctagaactagtatagatggagttgatagaacaatttacgtgcctgtactatgaaccaacatcttcagacttattcctgtcttat

SEQ ID NO: 16522 - DNA, 365 bp, Glycine max
  unsure (1)..(365): unsure at all n locations
tttgcatgcattcttgaacttttaaagcgtaaagttacgttactgtgttatttattaagattaatcctttagaaagcgtaaacatgttgttgtgcttgaattatttattaaaattaattgtatgtttattttggtatttaagcatacaatattaagctaaactaaataatttatgcatattaaatttaatggttaagagtttatatgtttcaaatattagataatcatatgcatataatatttatttaattctgaagttttgtgtgtatgatttatgattttatacatgcganattatcttgaatattntatacaatattatttggtttatttacattatttaaaatattatataaataattagc

SEQ ID NO: 16523 - DNA, 356 bp, Glycine max
tgtcttaacatcagaccacttccagggtgctggaactacttcacatggacttgatggggcctatgcaagttgaaagccttggaagaaagaggtatgcctatgttgttgcggatgatttcttcagatttacctgggtcaactttatcatagagagatcagaaacctttgaagtattcagagagttgagtctaagacttcaaacagactgtgtcttcaagagaatcaggagtgaccatggcagataatttgaaaacagcaagctcactgaattctgcacatctgaaggcatcactcatgagttctctgtagccaatacaccacaacaccatggcatagttgaacggaaaacaagactt

SEQ ID NO: 16524 - DNA, 388 bp, Glycine max
  unsure (1)..(388): unsure at all n locations
cgctttgagaaactcanatggtcattacttttcactcggatgtccgattcatgcgcatcacatgtcgagacgctcgaaattgataaatggaagctcttgagcaattcaaatggtcataaattttcactcgtacgtccaatacaggcgcataatatatcgagaggctcgaaattgaacaacggaagctctcgagaaattcaaatggtcataacttttcactcggaggtccgattcatgtgtataacatatcgagacgcttgaaattgagcaacggaagctctcgagaatttcaaatggtcattacttttcacttggaggtccgattcaggcgcataacatatagagacgctccaaattgattaacggaagctctagagaaattcaaatg

SEQ ID NO: 16525 - DNA, 356 bp, Glycine max
  unsure (1)..(356): unsure at all n locations
atctngacaggtttatgtgcaagtgctgctactggtggaggcacttgaatttggttgccagacctcaaggtgatggcactcacattttttggattctgcaaagtttgtgaagtcaatttgtcagaattttgggactgagcttgattcatctgagtagccatctgccccatttgatttgtcagactctgaatggaggctcttgtctcttgctgaaattgcatattctggatggtcatttgcctcactaactcttctaaggaaggttgaggaggagcctcagtttcttgttgtctttgttgtgactgctgctgtattggaggaggaacatatggcttgcttggaccagcaacattctg

SEQ ID NO: 16526 - DNA, 418 bp, Glycine max
  unsure (1)..(418): unsure at all n locations
nttcctatggttgttctactagggtttccaagcatcatagagaaggagaagggattagagccaccatttcactatctccgtgtgagggaaatttctctctctatagacattatttcacaaatcccaacagtgaaaatttgcagaaatgagttcctaacctggttttcaaatttcatgatgatctaatggttaacgagtttgagatcgtagttttactcagacaaatttgggtgtatgcgagaaaaagaaaggattttgagagagggagaagggaaaacgaatttgagaggaagagagagcgtaaagacatatcgtaaatgtaaaaactaacctaatatgtctttatttatagttagagtgatctcagcctattatttactctatttttcttaaatttataaaaagaaactctatttta

SEQ ID NO: 16527 - DNA, 394 bp, Glycine max
tgtaatcgattacacacatattgtaatcgattactataggagtttttcagaaaacattctcaacagtcacatctttttgtgtggttcttgaatggctatcataggcctatatatatgtgacttgagacacgaatttcataagagtttttcagaacaaaaagatcttatcctcttataaagcaaaatcgttttatcctcttacaaattccttggccaaattacttgtgattcaataaggaattatttgagtgctcaaattattcaatctatctctttcaagagagatttcttcttttcttcttcttcattctgaaaagggattaagagaccgagggtctcttgttgtgaaagaattctaaacacaaaggaagggttgtccttgtgtgtttagaac

SEQ ID NO: 16528 - DNA, 376 bp, Glycine max
ttctttgatgcaacatttggagaggttaatgaaacaacaagatgatgcgctccatgagaggttggatcaaatggagaatagagatcataatgaagaagaaaggaggagaagagggaatgatggtgttcctagacaaaaccgaattgatggtattaaactcaacattcctccatttaaaggaaagaatgatccggaggcctacgttgagtgggagatgaaaatagagcatgttttctcatgcaacaactatgaggaggaccagaaggtgaagcttgccgccacggagttttccgactatgctcttgtgtggtggaacaagctacaaaaggagagagcaagaaatgaagagccaatggttgatacatggacggagatg

SEQ ID NO: 16529 - DNA, 407 bp, Glycine max
tgtacattcaatttcgagcgttccgatatattacggtactcaatcggacatccgagtaaaaagttattgttgtttgaatttgttcagagcttcaacattcaatttcgagcttttcgatatattacgggacacaatcagacatccgagtaaaaagttattctcgtttgaatttgctcagggcttcggtaatccatttcgagcgtctcgatatattacgggactcaatcagacatccgagtaaaaagttattgacgtttgaatttgctcagagcttctacattcacattcgagcttttcgatatattacggactccatcagacatccgagtaaaaagtgctttgcggttgaatttgcttagagcttctacaatcaatttcgagcctttcgatatattacgggactcaat

SEQ ID NO: 16530 - DNA, 285 bp, Glycine max
tgcttgagccagttccaaatcactatgttgccttgagccatccccgacaacagttcctgagccataaggggacccacctttgaccttctccatctcatacatgccatctccaaatgtgtacccaaccggaacataaatcattccatggagaacaagctgagtgacagaggtcaacggggtctcttcttgtacacctccttgagaactagtgcttgagaagaaccctgcaggtttttctgctagtgcctgtgtatgccacagccctatagagccttctaaaaatgc

SEQ ID NO: 16531 - DNA, 294 bp, Glycine max
gtcacctgcggcatgcattttgagtttttcttcatggacgtcccgtggtgttcgtatgaatcttttggtgattcttacgggaagatggtgatgtagctccatgtggagcttgtatgccatcgatcttcttcatcaatggagtcctttgctccttaaagcataatgacatcggaatggatttggaacaatgatgatcggagacacctcttcatggagaagatgaatcaagaagaaacccaccaccataggaaaccatggataagagcttgaaggcttgagaacatgaatggaggg

SEQ ID NO: 16532 - DNA, 373 bp, Glycine max
  unsure (1)..(373): unsure at all n locations
ttctttgatatgncgggtgtgtaaacagcgatatatacacttattgngattggcaataaatagttactaacattaactggttctcaaattatatttataaactgggtaaaaatatgtctcacaatagcttatacatttgtttgatgccagattattggggcctggcaaaaacctgttatggttattgtaactgaacttctcttatgtggaacattgcgcaaatatctgcggagtatcccggccaatgtgctcggatgttcgcgcaacaattggatttgctctttgtattgcccgagcaataggaatgcttacactctcatgggatcattcaccgcgaccttaaacctggtattgtatatgaatgtccaacttg

SEQ ID NO: 16533 - DNA, 399 bp, Glycine max
tcaagaattatggcctcatcaaactacttggttccttaaggaaattctataaataaacctcccatctttaatggagtgggttaccactactggaaaacccgcatgcaaatctttatagaggcaatagatttaaatatttgggaagccatagaacaaggaccttatgttccctctataatagccggaagtgcaacaatagaaaaacctagagcagattcgactgaggaagaaagaagattagtacaatataatttaaaggccaaaaatattattacatctgccttaggaatagatgaatactttagggtttcaaattgtaaaagtgctaaggatatgtgggatacactacaagtaacacatgaaggcacaacaaatgttaaaagatctaggataaacact

SEQ ID NO: 16534 - DNA, 349 bp, Glycine max
tgtaaatcaaattccccttctcttcatcctcagttatctgcaagtactcggccgcgcttcgcgcggccacaatgttgtaagcactgagagtgatggttatgccatagcagaacttggcacacagctcaaatgcttccaccccacccggaaaatcacggagtcggactatttggtgctgtggagaatcagaactctctgagcataacctttgcaggcgcaaacatttggacaatagtggaaactgaacaacatcatgaacttgtgtgactaagcaatataaagattgaacaagtcttgttcaaaacacaaaatggactgagatatacaacttgaagagcttctaattttc

SEQ ID NO: 16535 - DNA, 387 bp, Glycine max
agtcttctatagaatgttcgttcctaatttctctacaattgcatcacctctcaatgagctggtgaagaagaatgtggcatttacctggggtgaaaaacaagagcaagcctttgctttgctcaaagaaaagcttactaaggcacctgttctagctcttcctgacttttctaaaacttttgagctaaaatgtgatgcctctggagtgggagttggagctgtattgttacaaggtgggcaccctattgcttattttagtgaaaaacttcatagtgccaccctcaactaccccacctatgataaagagctttatgccttaataagagccctccaaacttgggaacattacctttgttccaaggaatttgtcattcatagtgatcatcaatc

SEQ ID NO: 16536 - DNA, 373 bp, Glycine max
  unsure (1)..(373): unsure at all n locations
ttcttctaacaatttcatgtattattacgtgtttaacatatttattactcattgttttgccttttgccgtaggatatgatgcaatcctacccctcaagggcattggatagaagactccaagaagattgggccagagatgcaagagaaggccctaagattctcatgagccctatggtagattttgggcccatggactaagtatgagcccacttatctttgtacatattagattacgatttcattatttttaggccttgtatttagagctccataatgtangtagggtaccctagaaatgtangatttttcagcccttgtattttatggcacctagactagtttttgtattangggtaagtttgaatttcacatg

SEQ ID NO: 16537 - DNA, 412 bp, Glycine max
  unsure (1)..(412): unsure at all n locations
gggttacctccttcactacatcaagaatcaccgagttgactcttctatgtggttgtcttactggtttagccccatcctctaaatttatccgatgcatacatgtggatggggtaataccaggaatgtccgccagggtccagcctatagccttcttatgcttcttgagaactgataacaacttctcctcttgctcatcagcaagggaggcatatataattattggaaaacttttgctatcatccaagtaagcatattttaaatttgatggtagaggcttcaattctggtgtgggcggctggataatggtagaaagagatggtttctcagcctgtacctcataaagaaagtcagaggtatgtgtacttcctgaaacatggttagttctatctgactctaganaatctatctcaag

SEQ ID NO: 16538 - DNA, 388 bp, Glycine max
tttgcatgcattctttgcagagactgctccatatcccaacaagccatcactgcctccatggcatgaacacggacatgctgctgcagttgttctttaaaggcacagagcaacagaacataatgggtctgcaacaaacaaaataacaaaactcataaaaaacaagctcttcacattaacatttaagcacattaattaagaatgagaaacaaaacccatcaaaaggacaagaactgagaaggactatgtaaatacaagtgtaaataaaccccaagatgccaaacttatataaatgtccctacaaagttaacaaaatgttatagtgattcagtactccaatcattatatgtagagtggatattaagtcagaatcaaatcttaactttaatat

SEQ ID NO: 16539 - DNA, 360 bp, Glycine max
tgcttccttaagaagattcctaaagaagctagagcttagctacacacacctctctaatagctaagttcacctccttgagatgagaagctagagcttagctacacaccccctataatagctaagctcacccatatggcaaaaaaacatgaaaatacaaaaaaaaaagtccctattacaaagactactcaaaatgccccgaaaatacaaggctaaaaccctatactactagaatggccaaaatacaaggcccaaatgaaggaaaaacctattctaatatttataaagataagcgggctcatacttagcccatgggctcgaaatctaccctaaggctcatgagaaccctagggccttcccttg

SEQ ID NO: 16540 - DNA, 401 bp, Glycine max
tgtgaaagcattatatgggttgaagctagttgtaatagcttggattgagagactaagttcattcttagttcataatggtttctctagaggaatagtagacactacactatttagaaagactcgtaaagaggatctgctaattgtacagatcgatttatgtagataacatcatctttggggctactaaagaaataatgtgcaaagaggtttatgagctgatgaaagaagaatttgaaatgagcatgatgggagacctaaagttctttataggacttcaaatcattcaaaaatatcatgacatttttatccatcaagagaaattcaccaaggaccattcaaagaggttcataatggatgaagctaaaccaatagctacccctatgcatccatctactgtcatt

SEQ ID NO: 16541 - DNA, 325 bp, Glycine max
ttcttgcagtttctgggaggctttgccaaagttttcttcgtgtttggtcatgtgctcaccataactctctgtttgcttccgtacatctgagggatctacatggtaaaaaactgggaaaacaagttgtttcatctcactgatcttggactgctccaggatcttaacaagttcatcaaggcaccatgtggaggatgcgtagttcttagaaaacacaatgattaaaatcttagattcttcaatggccttggatagagaaggtgaaataacattccccaccggcaggtccctatcatcaaagaaaattttcatcccttttccggacaac

SEQ ID NO: 16542 - DNA, 390 bp, Glycine max
ctgagatccatagatctaatgcaaggtatatgtttcatagaagggatttcgttgcttgtgttggttgattccagagccatctattcctttatatcctgtgtgtaagtagaaaaacttaagcttttctgtgtcttctttaaataaagatctagtggtggagacccctactagtggctatgtgataacttcttatgtgtgtttgaaaagtcctgcggagatgtctaggagaacattcttgattgatttgatttgtttgcctttgaaccagattgatgttattcttggtgtggactggatatcttccaaccatgtcttgttaaactgtattgataaaagagtggtgttcgatgattctgtatccgagtaagatatgaagttgatctctgccaa

SEQ ID NO: 16543 - DNA, 390 bp, Glycine max
ttctttgtacaacctctgcattgttgagcttctgcagcttactaacagaagttgctgccctgattttaccaacatcattttctgaaaacacaaagctaccggatatatcccatagctccacagtcccctcatcatgcaaggtcacgaacttgacaccagtaagaatgagattcttcacagcagacaggaagtaaactttattagaattcaaaaacatgatttaaaattatagagttagcactatcatctttaaagcttgaacctaaatatcacaaccatcaaacaaaaaatcaagtcacacacaaatgataaaactataacctaagttaacaaaaaaaaattacaactgtcaactggtaatcaaggtttaaaaaaaaaagtctgcaacat

SEQ ID NO: 16544 - DNA, 419 bp, Glycine max
  unsure (1)..(419): unsure at all n locations
taagaaatctatatatggtttanaacaagtgccctgttatggtaccttaagtttcatgggataatttcttcatttggttttgataaaaccccatggatcaatgcatataccacaaggttaacgagagtaaaatatgttttcttgttttatatgtaaatgatattttacttgcagccaatgatcggggtttgctacatgaggtgaaacaatttctctctaagaattttgacatgatgggtatgggtgatgcattgtatgtcattggtatttagattcatagagatagacctcaaggtattttaggttcatcataggaaacctatattaacaaaattttagagagattgcagatgaaagattgttcactaagtgtcgctcccattgtgaagggtgataggtttaatcagaaccaataccca

SEQ ID NO: 16545 - DNA, 407 bp, Glycine max
  unsure (1)..(407): unsure at all n locations
cccgggatcctctgagccgccttttgcatgcaatcttgtagggttaaagtctcactattgtcacgtgctcatgcaacaattgttagccatggctatgcgagacatcttgccaaacaaagtcaggttaacgataactcgcctgtgctttttcttccatgctatatgtagcaaagtcattgatccagtaatgtttgatgagttggaaaatgaagccacaattatactgcgcctgttggagatgtattttccccctgctttctttgacatcatgattcacttgattgtgcatctggtcagagaaatcacatgttgtggtcctgtntatctacggtggatgtacccggttgagcgatacatgaagatcttactagggtatacagagaatctatatcgtacagaagcatcta

SEQ ID NO: 16546 - DNA, 381 bp, Glycine max
agcttgttcatccaataccctgatgaggatgtcccatatgttcttaaaactggactgattcatttgcttccaaagtttcatggccttgcaggtgaacacccgcacaaacatttgaaagaatttcacattgtctgctccaccatgaaacccccagatgtccaagaggatcacatatttctgaaggcttttcctcattcattagagggagtggccaaggactggctgtattaccttgctccaaggtccatcacgagctgggatgaccttacgagagtattcttagagaaatttttccctgcttccatgaccacagccatcaggtaagatatctcatgtattagacaactcaatggagagagcctgtatgagtactgcgagaga

SEQ ID NO: 16547 - DNA, 308 bp, Glycine max
tatcccatgcctttatagcggatgtagcatcacaaatcttcttgtacgcatcatcatctaatgctcgatagatgatgaacagagctttcttgcctctctctcttgaatccttaaaagtacttctttggtgcttggaatattgaagtctcatgttgcggctccttatagcctttttcaaccatttcccacacattatgtgctccaagacgggcttccattttgatgctccaattgtcatacgtgcccccctatacaagtggaacttggaaggatgacgtccatttcttacattactctagaggaatttc

SEQ ID NO: 16548 - DNA, 384 bp, Glycine max
agcttctaaactttatacaagaatgaagctctgataccacttgttagacaagtggcctcagatatcttaagaagggggggttgaattaagatattccaaactacttacccaattaaaaatctatttcactttttattcaagttataaaatcccttaacaatgaacttcttaaatattaattcaaataaaaaaattttgaatatgaatataaagcaataataaacaaaggagtttaagagaagagaaagtgcaaactcagatctatactggttcggccacacccttaatgaattgagcactcaaataattccttaatgaattgcaattgaattggccaaggaattcttaagaggataatatgattttgctctttgataggacaaa

SEQ ID NO: 16549 - DNA, 373 bp, Glycine max
cttcttctgcttgcaatttcgagcgtctcgatatatgaagggactcaatcggacatccgagtatattatcttttttgcattgtgaagcacgcaccgagcttctgttttcaatttcgagcattgtgatgcattacgtgactaaatagaacattcaagtaaaatgctattgccgtttgcatttgctacaagcttctgagttaaaagttattgcagtttgcatttgctacaagcttccgctttcaactacgagcgtctcgatatattactggactcaatcgatcatcagagcaaaaagttattgtcgttagaatttgttcagtgcttccgttttcaatttggagcgtatcgatatattacgggactcaatcggaca

SEQ ID NO: 16550 - DNA, 375 bp, Glycine max
tttcttcgtgggtagaggggctctgtctcatataatggcttgatcactggctgacatattctcaattagctctgttgcttctttcggggtcttcagttttatctttccccctgtacaagcatctaatagttgcttggtttgtggtctcaacccatatataaacatattcaattggattggctaagaaaacccatgagtgggagtttttcttaacatgcctctgaatctctccaatgcttcactcagagattcatcacgaaactgatgaaatgaaaaaattgcagcttatccttctacagacttggactctgggaagaatttctttaggaactcttcaacaacttcttcctacgttttcagactgatacccttaca

SEQ ID NO: 16551 - DNA, 331 bp, Glycine max
cggtcaagtggatacggaattgtttataaggtatgttgatttatatttttcatggaatcacatatcttgataataatttgagaattacatatgcgctagactttgaaatattgtatttattagggtacgctctctgatggacaagaaattgctattaaaagattgtttatcaattctaaccaaggagatacataatttaagactgaaatttcgctaacaggaaagctttagcaccgaaacttaattacactacttggcttctgctttgctaaaagagaaagatatttgattatgagtttgttcccaataaaaacctagatttattatattt

SEQ ID NO: 16552 - DNA, 384 bp, Glycine max
agcttgtatggttaaagtctcacgattgtcacgtgctcatgcaacaattgttagtcatggctatacgagacatcttgccaaacaaagtcaggttagcgataactcgcctgtgctttttcttccatgctatatgtaggaaagtcattgatctaatcaagtttgatgagttggaaaatgaggccgcaattatactgtgccagttggagatgtattttccccctgctatctttgacatcatgattcacttgattgtgcatctggtcagagaaatcaaatattgtggtcctgtttatctacggtggatgtacccggttgagcgatacatgaagatcttaaaagggtatacaaagaatctatatcgtccagaagcatctattgttgaga

SEQ ID NO: 16553 - DNA, 425 bp, Glycine max
  unsure (1)..(425): unsure at all n locations
tcttatccaaggctcatcttggtggtgaaactccttcttccatggcttattccctagtggatggcgcctcctctcacctcttctcctttgtcttccgctgcatctggaaaatcaccattaaaggacctcattgaagctcaaatatccagcctccatagaagccccacaagcaagcttccatcagaatggcaggggaaaatggtcctttttggtaacctggttcagcctgctatagtcaatgcagactctccaactgttctgcacccaagtaggaatcagctcctccttctcattntttatcacggtgaggccggttttcttcaggattacctggacagaactcacccattggctgtcggagataggataaatgattccagttngcaaaagcttggttacctccttcttcactacatcaagaatca

SEQ ID NO: 16554 - DNA, 377 bp, Glycine max
  unsure (1)..(377): unsure at all n locations
agcttacaaaaatttgtaaagggtgtcaatgagatatttggacaagagtacttgagaagacccaacaacaatgacatcaatcgcctactacaaattggagatggacaagggtttccaggtatgttaggttttattgattgcatacattgggagtggaaaaattttctgtcagaccctaattttgtccaaggacaatcattcatggatattttgattctcgctagccaaattgagctgtttgacaccagttaccgcgcaagacgaaagatcattcgatgttttggtcaagggtgtgaaagatactaaaagggaggggcaaaagggtcttttcanggttatttctagaccctggctcgcccaggctagcctttggctct

SEQ ID NO: 16555 - DNA, 384 bp, Glycine max
agcttatagaagaataagaaaggggcaaacagaagactcaccatcctgtcactgaaaacactcctctccatcaaacgaagaggcttgattccagcagatgactctctttcctgcatgacccgtgtgacaaacacatagttctgaaaggtgtaggcataccgttgcggctcggcataaaaagcatccaaaatgttaaagtgatcaggtccaacatcctgccacttgctaatgggttcatgaaccacctcaacaagatcacgcaactcgatcgtttcattcgctattctctggaggaaggtagtcttgccaacgctaatgttaccctcaacacagaatgttaagcgcttcttctgaacagaggaagaggaattgtcttccaactcc

SEQ ID NO: 16556 - DNA, 408 bp, Glycine max
  unsure (1)..(408): unsure at all n locations
ttctgtgtctnttttaaataaagatatggtggtatataccccaactagtggttctatgttaacttctaatgtgtgtttgaattgtcctgtggaaatttctggcagaacatttgtgattgatctaatttgtttgccctttagccaaattgatgttattctaggtatgaactggttatcttccaaccatgtcttgttaaactgttttaataaaactgtggtgtttgatggttctggagtaagtaaggatatgatatttatctctaccaaccaagttgtgacatctttaaaagaagattctcaagtgtacatgatcttgtctaacctagaaataaagaccaaggtttccatgtgtgaccttcctgttgttagagagttctctgaagtgttccctgaggatatatctggtct

SEQ ID NO: 16557 - DNA, 417 bp, Glycine max
taaacattcaattgcgagagtctcgttatattacggtactcaatcagacatccgagtaaaaagttattgtcgtatgaattggcttacagcatagacattcaactttgagcctctcgatatattacgggactcaatcagacatccgagtaaaaagttattgtcgcttgaatttgctcagaggttcaaaattcaatttcgagcgtatcgatatatttcgggactcaatcagacatccgagtaaaaagttattgccttttgagttggctcagaggttcaacattcaatttcgagcgtcccgatatttacgccactgaatctgacatcccaggaaaaagctattgtcgctagaatatgctctgagcttcaacattatattacgagcgtctccatttttttcgggactcagtctgacatccc

SEQ ID NO: 16558 - DNA, 382 bp, Glycine max
tgttaatgtctaccatgaaaagcggttaccttgttgtattgggttgaaaaaaaatatataatttaggaatgattacatatcttgtattaccaaatgatagaattttttacgaacatccaataattgcattgactaataaataaatatttaactataactaattattatatataaaagaaataggatgtttagatgtacattgtattatatctattttatctttataactatattcataacttattatttgatttatattattacctgatataatcacccgctaactaattattatttttcattgaataaataaacatgaataaacagttacacgtgcatgtttattcctaaaatgttataataatatgtcattacctcaaca

SEQ ID NO: 16559 - DNA, 423 bp, Glycine max
tagcccatcatcaatattgatttcaagaaacaaaaaagcaagtagatatatcagtgaactgagccagaccaaggaaaaatacatcaaagaaaataaataatctagtatagctaattttataatcagataaagcatctgagacctgctgccatgtggtatcaacaggaggctgccgccgagcatcgccagcatcaaaatccagtacaccataatccctcaaccgaatctacacagcaataactaaaatcagaagtctttttgaggattaaatgcatggcattatctataagacacatttttcaaattgagacaaacccgaaggaaggcacggattctttgcaaattcccaacaccaccaccaagagcagcctaccattagataaaaaagcaagcagaaattaagtgttgataacaaatacaaat

SEQ ID NO: 16560 - DNA, 361 bp, Glycine max
agcttctgttgttcaatttcgagcgtctcaatatattattggcctgaattagacatccgaatcaaaagttatggttgtttatattatccatgtgcttcaatgttcaatttttagcatcttgatatattatgcagcttaatcgggcatctgagtgaaaagttatgtcatacgagttagccgagaacttcgttgttcgatttcgagcatctcgacatattatttgcctgaatcggacatcagagtcaaaagttatggcagtttaaactttccatgtgcttccatgattaattttgagcatctcgatatattatgcacctgaatcggactactgagcgaatagttatgccatatgagatagctg

SEQ ID NO: 16561 - DNA, 387 bp, Glycine max
agctttacattactcctcatgcttctcaccatgtctaataaggttcgatttcttcgttctgccacactattatgatctggagaactatgcatagtgtattggacaacaatcccatgttcttgaagaaatttcgcaaatgaacctggtgcttgtccatcctctgtgtatctaccataatactccccacctctatctgatctcacgatcttaatttgttttccacattgtatctcaacttcagccttaaaaactttaaaggcatctaaagcttcattcttagaatgaagtaagtatagatacatatatcgtgaataatcatctatagaggttatgaagtatttcggacaatatgcattcatgtctggacaacatatgtcttgtatgtat

SEQ ID NO: 16562 - DNA, 421 bp, Glycine max
tatgctgcaaacatctacaacagacctcctcaacctcagcagcaaaatcagccacaacgaaacaattatgacctctccagcaacaggtacaatctcgggtggaggaatcatcctaaccttagatggtcgaatccttcacaacagcagcaacaacaacaacagccttattttcagaatgctgctggtccaagcaaaccatacgttcctccaccaatccaacagcaacaacagcaacagccccagaaacaacaaacagttgaggctcctccgcaaccttcccttgaagaacttgtgagacaaatgactatgcaaaacatgcagtttcaacaagagactagagcctccattcagagcttaactactcagatgggacaattggctacacagttaaatcaacaacagtcccagaattatgacagat

SEQ ID NO: 16563 - DNA, 414 bp, Glycine max
tcttattcacataacaccaatagtattccatttataagcagagattgacgattcaaattacatatttataagagaccaaccaaacacaaagcaaccacagcttaaaacacccgtaacaaatcctagaacatttgaatttgcaaaggcgggccatgaccactttattctaaaacttcaaacacaacacatacttattatttattgatacatgtattacagctatctctgcttgaaggttatgcatgttgatctcacttgcagctgcatgggtcgcaagtgcagtttgatccacagttgcagccaccgttctcagctgcaacacccatttcagcaccctcgaattgggccttcaccggcccaacacccaaaactagagtctcatttgtgatcttctcaacgtagtcaaaagagtac

SEQ ID NO: 16564 - DNA, 375 bp, Glycine max
agcttgctttttgcaattctaagacactagagagcttccaagtatatgacatgtcccacttgtactttttctatctaatttgcatcctgcaaaatcagaatatgaaaaacctgttatgtttaaggaggtacctttaggataccacataagcaaacacttagcatgatatccaatctacttgcagttaggtagagaagtgattcaatcatacctctgtatcttgattcatccactaatttacctttctcatcaaagtcaaggtaggttgatgtagacataggagtagatgcttctttgcattttttcataccaaatttctttatcggttttatgcaatatttggtttgactgaggaaggttccatgtttcaattgc

SEQ ID NO: 16565 - DNA, 386 bp, Glycine max
agcttgttcttgattttttctaagttctttaacaagcttggaacaatatatttgtccttcatttaactgtctttgggcttggcggccacgatcaacaaagtactttgggcacctatgttaaacaaatggcctcagttatcttaagaagggggggttgaattaagatattccaaactatttcccctaattaaaaatctatttcactttttactcaagttatgaattcccttaatgacaatcttcttaaatattaattcaaatgaaacaatttgaatatgaatataaagaaataataaataaaggagattaagggaagagaaaatgcaaactcagttttatactggttcggccacacccttgtgcctacgtccagtccccaagcaacc

SEQ ID NO: 16566 - DNA, 424 bp, Glycine max
ttcgacctcttgaaaaagacgctaataattgcaccagttatagtggctcccaattaggggcaagaatttgaattaatgtgtgatgctagtgactatgcggtagagtagtattaggacaaaagagaaatggaagatttcatgctatctactatgccaacaaagtgctaaatggagcccaaaccaactacacaacaacggagaagaagatgctagcagtgtttatgcccttgaaaatttttgatcatatcttgtaggatcaaagatcattgtgcaaactaaccatttagctataaaatatctactcgctaaagcggattcgaagccaagattaattagatgggtcctgctactacaagagtttagtttagagatttaagataaaaatgggtgtgacaacctagtagttgatcttttatcgagacta

SEQ ID NO: 16567 - DNA, 413 bp, Glycine max
agctggtttggaagcttgagatgagtttgttggaccaagtggcctcggaataattaagaaggggggttgaattaattatgaacgtgtcttagctaattaaagaattatccttcttaatattactagattcaatgaagctttacaactaagttatgagaaagtaaagaacagaaacaataacttagacaaaagtaaagcagaaataaaaagtgcacagcggaaaataaagagtgtagggaagaagaagacaaacacaagatttatactggttcggccacaacccgtgcctacatccagtccccaagcaaccaccgattcttgagatttccaataaccttgttaaatcctttacaagcaaagatccacaacggatgtatcctcccttgttctctttgaacaaccaagtggatgta

SEQ ID NO: 16568 - DNA, 423 bp, Glycine max
tcttgctgatgtcatagtcttgaagtatgtctatgataccaaaaaacaaaaccacctcatagaactctccaattggttctcctacaagttgtaattcacaaccacttctcctcaccgtcctttcagcccttgctggcatgttcacccccaatttgatactcgcccaactgctaacacaaattagatagatgtaatatccaacaagacatgacttaagtaataatggtcagccggagctcgggaggaggttttaagataaattcgtagaagcaaggtacaaaatatacaaccatattaagaaattaaatatgccttacatcatgttgaaatattaatttttccaaattcaattgaacttaattatgccaatgtcaagatgaaaacaaaatgtgcattatattggcaacctatataaagagaaag

SEQ ID NO: 16569 - DNA, 420 bp, Glycine max
tatgctgcaaatatttacaatagacctcctcaacctcagcagcaaaatcaaccacagccgaacaattatgacctctccagcaacagatacaaccctggatggaggaatcaccctaacctcagatggtccagccctcagcaacaacaacagcagcctgctccttccttccaaaatgctgttggcctaagcagaccatacattcctccaccaatccaagaacaacaacaaccccagaaacagccaacagttgaggcccctccacaaccttccctcgaagaacttgtgaggcaaatgactatgcagaacatgcagtttcagcaagagaccagagcctccattcagagcttaaccaatcagatgggacaattggctacccaattgaatcaacaacagtcccagaattctgacaagcttccttct

SEQ ID NO: 16570 - DNA, 426 bp, Glycine max
tgaaggcatgtaacccacaatcttttcatagtagaactgatgcaatcctaccctcccaagggaattggatagcagactccaagaagattgggccaaagatgcaagagaaggccttaggattctcatgagccttagggtagattttgggcccatgggctaagtatgagcccacttatctttctacatattagattaaggtttcattaatttggggccttgtatttaaggctccataatataggtagggtaccctagaaatgtaggatttttcagcccttgtattttagggcacctagactagtttttgtattacgggtagttttgtaatttcacatgcattaagtgaatatttgatgtgtgcgttgagaaataaatctaattgaattgggagaagcccaatccaattataatttagagggggaggtg

SEQ ID NO: 16571 - DNA, 333 bp, Glycine max
agcttctcaatatattatgcgcctgaatcggacttccgtttgaaaagttatgaccatttgaatttctcgagagcattcgttgttcaatttcgagggtgtcgatgtattatgcgcctgaaccggacttccgtgtgacaagttatgaccatatgaatttctcgagagctttcgttgttcaatttcgagcgtctagatatagtatgcgcctgaatcggacttacgtgtgacaagttttgaccatttgaatttctcgcgagcagtcgtggttcaatttacaccttctcgatatattatgcgcctaaattggacttccgtttgaaaagttatgaccat

SEQ ID NO: 16572 - DNA, 416 bp, Glycine max
tctcgatatattatgcgcctgaatcggatgtccatttgaaaagttatgaccatttgaatttctcgagagcatccgttgttcaattttgaccggctcgatatattatgcgcctgaatcggacttccgtgtgataagttatgaccatttgaatttctcgagagcttccgttgttcaatttcaagcttttcgatatattatgcacctgaatcggacttccgtgtgacaagttatgaccatttgaatttctcgagagcttccgttgttcaatttcaagcttctcgatatattatgcgcctgaatcggacttccatttgaaaagttatgaccatatgaatttatcgagagcattcgtagttcaatttcgaccgtctcgatatattatgcgccataatcggacttccgtgtgacaagtcatg

SEQ ID NO: 16573 - DNA, 390 bp, Glycine max
agcttccttaagaaaattcctaaagaagctagagcttagcaacacacacatctctaatagctaagctcacctccttgagatgagaagctagagcttagctacacaccccctataatagctaagctcacccccatgacaaaaaaaagatgaaaatacaaaaaaaaaagtccttactacaaagactactcaaaatgccccgaaatacaaggctaaaaccctatactactagaatggccaaaatacaaggcccaaacgaaggaaaaacctattctaatatttacaaagataagcgggctcatacttagcccatgggctcaaaatataccctaaggctcatgagaaccctagggccttcccttggatctctagcccaatctacttggagtcttc

SEQ ID NO: 16574 - DNA, 420 bp, Glycine max
tccattgttcaatttcgggcttctcgatacattagacgcctgaatcggacctctgagttaaaagttatgaccatttgaatatctcgagagcttccgttgttcaatttcaagcgtctctatatgtgatgcgccttaatcggacttccgagtgaaaagtaatgaccatttgaatttctcaagagcttccgctgttcaatttctggcgtctcgatatattatgtgcctgaatccgacctccgagtgaaaagttatgaccatttgaatatctcgagaacttccgttgttcaattgcgagcgtctctatatgtgatgcgctcgaatcggacgtccgagtgaaaagtaatgaccatttgaatttctcaggagcttacgctgttcaatttcgagcgtctcgatatattatacgcctgaatcggacct

SEQ ID NO: 16575 - DNA, 350 bp, Glycine max
agcttaaacattcaacttcgagcgtctcgatatattacgagtctcaaacagacatccgagtaaaaagttattcgtttgaatttgctcagagcttcaacgttcaattttgagcgtctcgttatattacgggactcaatcagacatccgagtaaaaagttattgtcttttggattggctcagagattcaacattcaatttcgagcgtctcgttatatcacgggactcaatcagacatccgagtaaaatgatattgtcccctgaattggctcaaagcttcaacattcaatttcgagcatctcgatatatgacgggactcaatcagacatccgggtaaaaagatattgtcgttt

SEQ ID NO: 16576 - DNA, 384 bp, Glycine max
agcttatcaagaggatgtaatttagttattttgcatgaattgttgcaaaactcacatacttgagttcaatttttatgaataaaaaaaatgtttaaagctaattacacacttcaacaacaattatatttattgtaatgagaatgggacaaattcaatgaattattgtaaattcattttagaatattttcttaataatcttctaacttattaaattaagaaatattcattgtttttatatttatcaatttaataatatggaataaatttaacgaattattgtacgagacaaaagcttgcaacttttaccttagtgattcataattataattattaatgtgttgataagaaaggtaggaatataggtaaaaatgcactacaagataa

SEQ ID NO: 16577 - DNA, 416 bp, Glycine max
  unsure (1)..(416): unsure at all n locations
tgtaatcgattacacaaatactgtaatcgattaccataacagattttcagaaaatattctcaacagtcacatctttttatgtggttcttgaatggctatcaaaggcttatatatatgtgacttgagacacgaatttgctaagagttttttagaacaaaaaggtcttatcctcttaaaaagcaaaatcgttttatcctcttacaaattccttggccaaaacacttgtgattcaataaggaattatttgggtgctcaaattgttcaatctatctctttcaagagagattacttcttctcttcttctttattctgaaaaaggattaagagaccgagggtctcttgttgtaaagaaatttgaacacaaaggaaggattgtccttgtgtggttcagatcttgtaatanggttttacaagat

SEQ ID NO: 16578 - DNA, 351 bp, Glycine max
agctttgagccaattcaaacgacaataactttttactcggatgtctgattgagtcccgccatatatcgagacgctcgaaattgaatgttgaagctctgagccaattcacgcgacaatatctttttactcggatgtctgattgagttctttaatataacgagacgctcgaaattgattgttgaacctctgagcaaattcaaacgacaataacttttttctcggatgtctgattgagtcctgtcatatatcgagacgctcgaaattgaatgttgaagctctgagccaattcaaacgacaataactttttactcggatgtctgattgagtcctgtcatatatcgagacgctcga

SEQ ID NO: 16579 - DNA, 404 bp, Glycine max
  unsure (1)..(404): unsure at all n locations
ntaacttaatcaattcaaaagccttttgtgcttgttcattccacccaaacgcacccttcttcaaacattcggtcataggacttgctatagtgctaaaattctggataaagcgtcgataaaatgatgcaagaccaaggaaagatctcacctccgaaactgttgtagggctcggccaagtcttgatagcatccacttttgtttgatcaacggatactccatctttagacaccacatatccaagaaacaccacactttcaaccaagaaatcacacttttccctcttcccatagagtttttgtgctcttagggtctcaaatatttgtttcacatgagtgaaatgctcctctatagatttgctatacaccaatatgtcatcaagataaacaacaacaaacttacccaca

SEQ ID NO: 16580 - DNA, 416 bp, Glycine max
tcgagaaaattcaaacgacattaactttttactccgatgtccaattgagtcccataatatatcgagacgctcaaaatttaaaaaagaaactctgagcaaattcaaacgacaataacattttactcggatgtccaattgaatcccataatatattgagacgctcgaaatttaaaacagaagctctaagcaaattcaaacgacaataacattttactcggatgtgctattgagtcccgtaatatatcgagacactcaaaatttaaaacagaagctcatagaaaattctaacgacaataacattttactcggttgtccgattgagtcctgtaaaatatcgagacactccaaattgaaaacagaagctccgagaaaattcaaaggacattaactttatactcggatgtcttatggagtcc

SEQ ID NO: 16581 - DNA, 454 bp, Glycine max
  unsure (1)..(454): unsure at all n locations
tcaagaataatgacctcagcaaacttcttattcttatattgattctcaataaattggcctcccatttttaatggagagggttaccactactggaaaatccgaatgcaaattttcattgaggcaatagatttaaacatttgggaagccatagaagttggaccttatgtacccaccatggtggctggaaatacaacaatagagaagcctagagaagagtggtctgaagaagaaagaagattagtgcagtataatttaaaggctaaaaacatcattacctctgccctaggaatggatgaatattttaaggtgtcaaattgtaagagtgctaaggatatgtgggacactctactaggtacacatgacggaacaaatgatgtcaaaagatctacgataaatactntaactcatgagtatngaattattangatgaagacaaatgagagtatacaagata

SEQ ID NO: 16582 - DNA, 449 bp, Glycine max
  unsure (1)..(449): unsure at all n locations
tgctcttccatattgtgagtctttgctgaaacttgattataactggttcccaagttgatcagagagttggactaaccccgactggcagtcccaaaaagtgaaaaggtggagaagcaaccctgcatgaaaggaaatttgcagctggctcattaaatctttggtttgtgccaatcccataaaagacactcttaaggaagttaactaacaatccagagaccaattcgaagcctcggaatattgcttttattgcccaaagactatcatgagtcacctgtcccaccataactgaatcatcagtgtattggagaattgagtattggaactcttctccaactttcatacctttgaatagtcttttctccaccgtgctatgaaccgccccgttagaccttgagcagctatcaagaacanaaatggagacaacggatcaccctgcttcaagcctctta

SEQ ID NO: 16583 - DNA, 405 bp, Glycine max
  unsure (1)..(405): unsure at all n locations
agcttaatctgttttctctgctctttgatcccgtgaaaaaaaaaatggctggagatgaagaaaagcttcgaatagtgtgatgtttccatggctagcctttggtcacatgatcccaaaccttgagctggccaaactcattgctcaaaagggtcaccacgtgagtttcgtatccacccaagaaacatagagcgtcttccaaaaccgtcactaaacacacttgatatcaatttcgtgaaccttccactgcctaaagtccaaaaccttccagaaaacgcagaagccaacactgacatcccctacgacgtctttgaacacctcanagaagcctacgacgttctccaagaaccgctgaaacgttntctcgaatcttccanacccgattgagtcttctacgacttcgctccc

SEQ ID NO: 16584 - DNA, 409 bp, Glycine max
agcttgccttgccccttgatatattcgagggactcatggtcactatgaatgacaaattccttgggataaaggtagtgttgccatgttttcaaagcccgtactaaggcatacaactccttatcataagttgaatagttaagggtaggaccacttaacttttcactaaaataagcaattggatggccttcttgcatcaacacagccccaatcccaacatttgaagcatcacactcaatttcaaaagatttttgaaagtttggcaacgcaagtatgggggcattagttagctgttgcttaagaacattgacagcttcttcttgtttctctccacatttgaaaccaacatatttcttgagcacttcattgagaggtgctgccaatgtgctaaaatccttcacaaatcgtctat

SEQ ID NO: 16585 - DNA, 460 bp, Glycine max
actaagctcgaattgaaaatggaagctctcagaaaacaaattgtcttacttttcactcggattgccgattcaggtgcataacatatcgagacgctcaaaattgaacaacagaagctctcgagaaattcaaatggtcataagttttcacatggatatccgattctgtgttataatatatcgagacggtcgaaattgaacaacgactctagaaattcaaatggtcataacttttcactcggatgttcgattcaggcgcataacatatcgagacactcggaattgaacaatggaagctctcgagaaatacaaatggtcataacttctcactcggatggccgattaaggcgcatcacatatcgagacgctcaaaattgaacaacggaagctctcgagaaattcaaatggtcataacttttaactcagatgtccgattcggggataaaatatatcgagacgctcg

SEQ ID NO: 16586 - DNA, 394 bp, Glycine max
tgtcttagtggctttgtgaagatgaagaggtaaaagtgactcaacaggttgaggtgtgtctcaccattgggagatataatgacaaggtgctgtgtgatgtggtcccaatggaagcgacccatgtgctgttaagaagatcgaggcagtatgataccaaggcagtgcatgatggcttcaccaactacatctctttctagcgagctgacaagaagattgttctcaaaccgttatctcctcaagaggtttgtgaggatcagataaaaatgagagatatgatgaagagtgagacactcgagaggaaaaagagtgagacacttgagaaggataagtgaggaaagagaaagagtgaaacacttgagagggaaaagagagaatacatagagagtgaaacact

SEQ ID NO: 16587 - DNA, 411 bp, Glycine max
ttcttgtcgccacggagttttccgactatgctcttgtgtggtggaacaagctacaaaaggagagagcaagaaatgaagagccaatggttgatacatggacggagatgaaaaagatcatgaggaagcggtatgtgtcggctagttactcaagggaattgaaattcaagctccaaaaactaacccaaggcaacaagggggttaagaagtatttcaaggaaatggatgtgctcatgattcaagcaaagattgaagaagatgataaggtaactatggctcgatttcttaatggtttgactaatgatatccgtgatattgttgagctgcaggagtttgttgaaatggatgatttgtttcacaaagcaatccaagtagagcaacaattaaaaaggaagggagtggctaagaggagtt

SEQ ID NO: 16588 - DNA, 443 bp, Glycine max
ttatatacacaaaccaaggtaccatgagagtgtttcatatcagatacaagaacaatgctgataagaattacacttactccagtgaacacagttatagcatcttcggccttagaaccatcagttggatatgactcacgccatatctgccaaacacctatcacactaaattttggcaaaaactcaaccttcgacatgacatataaattcttagccacaataaaatatttaaaatggatactgtctatttagaggccactataacaaaagttaagagttcttatctcttgttttagtaatgtatcttcttcgcaagcagaagtgaagataatatattaccgtggagcctgcatagagaggggccattaaaccattgaaaaacccatgaacatgtatattatatatgttaaggactgacgtaataaagatatcccaaatgttttaaa

SEQ ID NO: 16589 - DNA, 411 bp, Glycine max
  unsure (1)..(411): unsure at all n locations
ttttcatgcaagtttaccagaaatacttttatcaacttttacagattaattttgaaaaaatttaatattcaaattgttggtattttaggatcctggtgaacccataaaataaaaaatgttcaattttgatgaaaatgcttgttgaaagctgttctgagtacgtacttcatactacatgtatgttatttaccatatatgatcaaatgaaataaaatagtaaaaaaaaatgcacatataaagtaatgtatgtgtaaattttgatgtaactcattttattaatttcaaaaattaaattcttattagtaatttccagttgataaataatcttattttatactaatgacttaaataacactttaatttacaaagagctntaatttaattggtttaacaggtgcgttaattattaca

SEQ ID NO: 16590 - DNA, 459 bp, Glycine max
  unsure (1)..(459): unsure at all n locations
actcaagctacaagacaaagatggcctcaacaaataccaatcaccttattgaattctatcaatagacctccaatctttaatggagagggttaccactactggaaaacccgaatgcaaatttttattgaggcaatagatctaaatatttgggaagccatagaaatagggccttatatacccactacagtagaaagagttacaatagatggtagttcatcaagtgaaaacataactatagaaaaacctagagatagatggtctgaagaggatagaaaacgagtacaatacaacttanaagccaaaaacataataacatctgccctgcgaatggatgaatatttcagggtttcaaattgtaagagtgctaaggaaatgtgggacactcttcgattaacacatgaaggaactacagatgataaaagatctaggatatatgcactaactcatgagtatgaatta

SEQ ID NO: 16591 - DNA, 414 bp, Glycine max
  unsure (1)..(414): unsure at all n locations
agtttcttcatcagaccacttccagggtgctggaactacttcacatggatttgatggggcctatgcaggttgaaagccttggaggaaagaggtatgcctatgttgttgtggatgatttctccagatttacctgngtcaactttatcagagagaaatcagaaacctttgaagtattcaaagagttgagtctaagacttcaaagagaaaaagactgtgtcatcaagagaatcaggagtgaccatggcagagaatttgaaaacagcaggttcactgaattctgcacatctgaaggcatcactcatgagttctctgcagccattacaccacaacagaatgggatagttgagaggaaaaacaggactttgcaagaggctgctagggtcatgcttcatgccaaagaacttccctataatc

SEQ ID NO: 16592 - DNA, 450 bp, Glycine max
  unsure (1)..(450): unsure at all n locations
tgtaagatttgcaagatcatcttccttgacaacttccttgaaaaagattgccgtcaatatgaagagagaacaatttagagagtgatcgaagactttcaaatggatttccactgaatttattcatagagagatcgagatatcttaatgatgaaagttttccaaatgatctaggaagagcaccaccaattgagttgttggaaaaaagtaacgtgtcaatatttttaaatgccccaatatgatctgtcagattgcctgaaagtcgtgaactctgaactgcaagtcttgtgagtccatgggaaatacaaggagcaagaatttctaaaagttcattaacctgttggttgagtttgagatatgataaatctatcacccttaagttgcagagattacccanagaagttggaatgtttccttcaagttgattatgtgataaatcaagttcaacaagag

SEQ ID NO: 16593 - DNA, 409 bp, Glycine max
  unsure (1)..(409): unsure at all n locations
ttatcccatgcttctttggccgtcgttgcgttggatatcttctcaaatgtatcttcatccaccgattgataaatgagaaagagagctttcttgtctctctttcttgactccttcaacgtctcctttacaccttggcttagcaaggcttcatcttgctcctcaaagtcattctctacgatatcccacacatcttgagctcctagtagcgccttcatcttgatactccaattatcatagttgttctttgtgagcatcggcatttggaaaggaaaacctccattcgccatcttttgaggatcttgaagctctgataccactntgttggaaataaggctntntatgtttaggaaaagtgtttaggaatattggagactntgaatagaaacttgataggaaggagaattcttta

SEQ ID NO: 16594 - DNA, 452 bp, Glycine max
  unsure (1)..(452): unsure at all n locations
ntagccgctntaaactctgcatttagttcatcatcttggtttaagacttttactcctaggccatctggaagaggtcaaggatcacaaagagctgcagcagtggctgctctttcacaagttcttacggccgaaaagaaaaaatcacctgatggttctcctgttgctagcaggagtcctatcactcaaggtagcgctactggtaagaaaaacagttcttgtctaaatatgatgttgcattccctgaatacaatgggttggctgggttgaatattttactacaccctattactttggtttatacttttgaaatttgaataattaatataatcctttttgtttagttctaattatttgatattttttaatcataataatagatactgctagtaaactactaagagtggagctctaagcgctacattgatgtactactaaggggtttattgagattc

SEQ ID NO: 16595 - DNA, 463 bp, Glycine max
  unsure (1)..(463): unsure at all n locations
tactttagctagatgggtcgattgccaaacataaagctaggctggtggctattggattcatgcaacaagaaggtttagactatactgaagtatttgctctagtagcaagattggagactgtaagattgattgtttccctggctagctggagaaattggaaactgtggctactaaatgtcaagtcagcctttctaaatgggccacttgatgaagaagtttttgtggtacaacctcctggcttcatatgtaaaggtaaagaacaaaaggttttgagactgaagaaggccttgtatggcttgaaacaagcacctagggcatggaacaaaaggattgattcctttctcactggttttggctttcagaaatgctcagttgagcatggtgtgtatatcanaacagtaagtgaaactaagattgtggtgctatacttagatgatgatgatttactcatcactgatagtag

SEQ ID NO: 16596 - DNA, 406 bp, Glycine max
  unsure (1)..(406): unsure at all n locations
agcttttcactctatctatttttattaaaactcacataagacgataatgtgtatctattttaagaaaaaatgaaatttttaaaaatactattcaaccttccttgtgttatttgtctatgcacaaataatgtaaggacataaatagctcactagaaatgaagcttccatttgaacttcatttgaaatatataatttgtctttaaatacaaagaaatcacgttttctcaaaaattaataaataagtaaaaatgaaaatgacaaaacaatcttgttcccttttaattnttctttctccttttcaccttttcactaaatcatgtatttaattaatataattaattatgtaataaaaataaaggcatcctanaataaaggtctagtaataatcactttagatgcacttctg

SEQ ID NO: 16597 - DNA, 402 bp, Glycine max
ttcttggatttccttttagtagggaatctatccttcctaagatggagccaaacccagtcaccctcattaagaactagctcttttcttcctctattgcctttagttgaatacacctttgtttggttctctatttggttcttaaccctctcatgcatcttctttacaaattctgacctagattccccttctttatgtataaaagaagtgtccagtgggaggggaatgaggtctaacggtgttaggggattaaacccatagacaacctcaaaaggggactgcttggtggttctatgaacccccctgttgtaggcaaattctacatgaggaagatactcatcccaagacttatggttgcctttcagaagagcccttataagggcggataaagacctattcactacc

SEQ ID NO: 16598 - DNA, 397 bp, Glycine max
tagtttacaaaaacaggttctgaggatcttgttgatcctaccttgtatcgttatgtggttggtgctctacattatgctactatcacacatccaaaaattagtttctctgacaataaagttttccaatttatgagtcagccaacagaacaggattgggttgctgtcaagagaatccccgggtatctaaagggcacacttcattttgggctgaaactggaacccaatttttctacaaagcactactctgttcatgccttttgcgatgctgactgggcttcagaccttgatgatcgaagctctacctctggggctgttgtgatcttacgcccaaatcttgtctcttggtgatccaaacagcaatctgttgtggccaggtccagtactgatgcagagtaca

SEQ ID NO: 16599 - DNA, 453 bp, Glycine max
gtcatcctatccaaaatatccaatgcttccttctacttgactctctcttacagaaactttgaatgacagatgtataagtgacaacatttggagtacaaactccacctttctccatttcatccaacaattgcaatgctctttccatagacccagacctacaaaagccatctaaaatggccgataaaatcaccaaattgggcgaacatccatgtagtctcataaccttaagcacagagtaggcctcctcagatcgacccgcgttagagaatccctcaactattgccatatacgtaataagatcaggacaaaggccattggaactcatctcactggtcaacttcagagccgtttcaatgtcacccttcttgcaacacaaccttataaccagattatacatgacagtgtcagcgtggaggttgaaagtgtcctccatcttcctcaacacccacagag

SEQ ID NO: 16600 - DNA, 415 bp, Glycine max
agctttgatggtgtcgagaagaaatcacatgtttgtcatcatcaaaaagggggagaatgtgaatgtatgtatacatgattttgatgatgtctaaagaagaatcaaacaaggctcattttgcttcaagattaatacaagattgtttcaacaaacaaagccttgattcaagatttcttcaagatcaagccttgcctcaaaatgtagagatttcaagtcatccaaggcacatgtaatcgattaccaatacatgtaatcgattaccaaggcacatgaaagtgtgtaatcgattacacatcatatgtaatcgattaccatagactctgaacgttgggaattcaaattttaaatgaagagtcacaactgttcaagataaacaattgtgtaatcgattacactaattctgtaatcgattacc

SEQ ID NO: 16601 - DNA, 436 bp, Glycine max
  unsure (1)..(436): unsure at all n locations
tactaagcttgttgggcatgccgggttctacaggcgattcataattgatannctaaangtcgccaaaccacttagcagtttgttgaataaagatgttgctattttgtttaatgaagagtgtatggatgcatttaatgatttgaacaccagattagtgtctgctccagtaattatagcaccaaattgggggcaagaatttgagctgatgtgtgatgcaagtgattatgccatatgtgcagtgcttggacaaaggaagggaaaaaattttaatgctatatactacgccaacatggttctaaatgatgcacaagtgaactattctaccacagaaaaagaaatgctggtaattgtttatgcacttgtaaagttcatatcttatctggtaggctcaagagttatcatctacactgatcacgcagctattacatatttgctc

SEQ ID NO: 16602 - DNA, 338 bp, Glycine max
atttttggagatatcaagtgccaacacgacatcttcttttgaccagacatcatctggctccaattcattagcgggcctaacttcagtgaccaacatcatgggatgtacccagcctttgatgaccgctttccaagttctgctatccagagatctgaggaaggccaccatccttgctatccagtattcataacaggatccatccagaatagagggtctgtaaactgatccaccttctatcaccatgttcaacagacaagatctccctagatctcactcacagataccgagtgccacgactgataccaatcgaaattatgataccaaagccacatgacgta

SEQ ID NO: 16603 - DNA, 380 bp, Glycine max
actcggccttcttctatgatcagattgggaatgcctctaacagcacctttgtcaatgattatcttcatgcctcttaagtgcatatgtccaaatctttgatgccatatattgacttcatcttctttggagactagacatgtggaggagtaactggtttcttgaggtgtccatatgtaacagttgtcctttgatctgctgcccttcattatgacttcactcttctaatttgtcaccaagcattctgactttgtgacagttacattgagtacttcatgacacaactgactgatgctgatcaagctctcagtcagtccctttaccagcagtactttgttcagactaggaagtccttcatggactacctgtaccattccagtgat

SEQ ID NO: 16604 - DNA, 425 bp, Glycine max
  unsure (1)..(425): unsure at all n locations
tctatagaaggttcattcctaatttctctacatttgttctcctctcaatgagctggngaagaagaatgtggcatttacctgtggtgaaaaacaagagcaagcctttgctttgctcaaagaaaagcttactaaggcacctattctagctcttcctgacttttctaaaacttttgagctagaatgtgatgcctctggagtgggagtcggagctgtattgttacaaggtggacaccctattgcttatcttactgaaaaactttatagtgccaccctcaactaccccacctatgataaagagctctatgccttaataagagctctccaaacttgggaacattaccttgtttccaaggaatttgtcattcatagtgatcatcaatcacttagtacattagagggcacagcaagttaaacataaggcatgc

SEQ ID NO: 16605 - DNA, 400 bp, Glycine max
agcttattccaagccacgattgatcagatggatactgctgcttcaagaatttgatttagtcatcaaggacaaaaaatgttctaaaaatgtggtagcagaccacctatccagattggtgaatgaagatgtcacttcaaaagaggttgaaataagagataaatttcttgatgaatctttgtttctgattgcagggagaccctggttagctgatatggctaattacaaggcagcaggtgtcataccaaaagacctcaattggcagcagagaaagagattcttctatgatgcacacttattcaaagtaagtgtagataatctccttcgaagatgtgtgacaagtgaggaggccgacggcatattgtggcattgtcacaattcaccatgtggcgggcattatggc

SEQ ID NO: 16606 - DNA, 445 bp, Glycine max
tctcgtcatgactgttggattaaggcgatgcttactgtgttacatgctcttcaacagaaccaaacttggactcttacctctctaccaccacataaaacaaccattggttgtcgctaggtttacaagataaagtatcatgttgacggctccgttgaaaggtacaaagcacgcctagtcgcgaaagggtatacccaaatggaaggtttggactttctagacaccttctctccggtagcaaaactcaccactgtgcgtttactcctcgccctaactgcacttaataattggcacttacgacaactagatgtgaataacgctctccttcatggcgagcttaatgaagaagtctacatgcacattccttagggtctttctgtggataatcctcatcttgtttgtcgccttcaacattccttatatgggctcaaacaagccagtcgacaat

SEQ ID NO: 16607 - DNA, 399 bp, Glycine max
  unsure (1)..(399): unsure at all n locations
agctttattcccctaggcaattgttgtagtggtttatcaccaccagaatgttgttgtagcagttttatgcaaccagaaaattttctctgctgtcattgttagagactaaagcttaactttcaagcatgtgtaagaactaaaatttacaattttctcgaaactaaactataaaatggaaacaaccaagggggaagatgaataatttaacatcaattataacataccttttgaaaattagtctccgcatcattttcttcttccgccttgatgatatctgtgaggtggtcaatcaggttcaactcccacgtatttttctgattaattntctgcaagcacacaaaataaaaaaaataaaaaaattatttcttctttttgtttttttttgtggggggggggggg

SEQ ID NO: 16608 - DNA, 337 bp, Glycine max
  unsure (1)..(337): unsure at all n locations
tgtttccattatgatgaaatcctcccaaggagaggacccatcaccaaagccatggctaggagactccaagaagattcggccagaaatacaggagaaggtcctanagttctcatgagccttacggtagattctgngtcaatggactaagtatgagaccacttatttttgtacatattagtttagggtttcattatttttgggtcttgtatttacggctccatagtgtagggagggtaccctaataatgtaggatttttcaacccttgtattttagggcacttgactagttttgtataagggtagttttgtaatttacatgcattaagtgcactatttg

SEQ ID NO: 16609 - DNA, 389 bp, Glycine max
ttcttctatgaactacaattatgaatagagaattggcggtaaggatgcaacttcaaataaacccattggccttctgtgaatgttttgtctgtgcgcttaagattgctctgttgggtcatacgattccttgctcgaatgagatttgttttcagtagctacaatatctctttcttttgagaaagtaattcctctaacaaagaaattttggacacactaagtacatgggaggcaatacaaggaggcaatatgccatacaacggttcacatagggacatacctatggctgaatgataggaggaattgtaccaaaattcagccaatgggaggaaacggatccaccattgtggttcatcactcacaaagcaacacaagtacgtctttaaacatct

SEQ ID NO: 16610 - DNA, 407 bp, Glycine max
ttgcttgcaaacttgatcatcctgagataataggtggtcattctcattcgaagtggatggtgcaacatatttctttggcctaatactaacttcaacatttttacagcttctaatgttatgattggtttggccacaccttccacatgtaaactcaaccaatttcctctttaacttatgtactgagacattggcctcatgtacagatctccttctatatttcattggccttcctgtatggacccttttatgtggaggaacagggcgagtatattgagtctgggtccaatattgcggtccttggactgggtcaataaaatgctggtatgtcttatgatagacttctattgacagccactcatgacacgtgtcctcatgcttccctcctttgagagttattgccgcaatgg

SEQ ID NO: 16611 - DNA, 374 bp, Glycine max
  unsure (1)..(374): unsure at all n locations
gcatgatcaagacaatgcctattgaacctgatttatttgtgtggggtgcattgctggctgcttgtagaaatcataggcatgtggagctcgcggaagtggctgctatgcatctaatggaattagagcctgagagtgctgcgaaccctcttctgctgtccagcgtatatgctgatgctggcaaatggggaaagtttgagagggtcaagaaaaggataaagaagggaaaactgagaaaacttcaaggtttgagttggatagaaaatttataacattatangtacgttggttggtagaggccatangttttgcttcttcatgaagagaagggcacacctactggtataatttttgatgtatcgnttgtgctcctcatg

SEQ ID NO: 16612 - DNA, 458 bp, Glycine max
  unsure (1)..(458): unsure at all n locations
ntggagtaaaaggcttactaaagaaggcaatagggtgttctttctgcgataagactgcacccatgtcgacaccaaacacgtttgtttccaaggaaaaagggataatgaagtccggcaagagtaaagtaggggctatagaaagcacatccttcaatccagtgaaaacttgttgcgccttagatgaccactcaaaggggtacttcataagtaacctggttaaataagctgcaatggaggcatagccacgaataaatcggtgatagaaacccgagaggcccaaaaaactgtgcaaggccttggaggaatgaggtgtgggtcactgctaaatggcttggaccttagccgacactggttcaactccttgtgcaaaaaccaggtgacccaagaactcaacttgttgctgggcaaaggtgcacttggatagtttgaggaagaactgaccatctagaaggacctga

SEQ ID NO: 16613 - DNA, 447 bp, Glycine max
ctatagaaactcagcttgaaatgggaatgcactagcatcctactctttctccaaactcgaaggtggaggacacatgaacgaaaacacaattcatggggctccgaaaaaggggttgagaatggagaattacactaagcaatcactacgcatagctccaaactcgaaggtggaggacacatgaaagataacgcaattcatggggctccgaaaagattgagaatggagaattgcactacgcaatcactacgcatagctccaaacgcgaaggtggaggacacatgaatgaaaacgcaattcatggggctccgaaaagattgagaatggagaattgcactaagcaatcactacgcatagctccaaactcaaaggtggaggacacatgaacataacgcaattcatggcgcttcggaaagagtgagaatggagagaggaactaatcaatcacta

SEQ ID NO: 16614 - DNA, 409 bp, Glycine max
  unsure (1)..(409): unsure at all n locations
tgtttggacttcctgtgttttgggaacctctccttcctcaggtgtacccaaacccaatcacttggttcaagcacgactttctttctgcttttgttggcttgccttgcatagctcgcatttttcttttcaatttgaaccttcacttgctcatgcaacttcttcatatactcagctttagcctgtgcatccttatgcttaaacatagcaatgttaggcataggcaacaaatcaagaggagtcaaaggattaaatccatacactatctcanatggtgaacaattagttgtgctatggacagcccgattataagcaaactcaacatgaggcanacaggcttcccaagatttaagattnttctttaaaacagtcctaagcagtgtgcctaaagtcctatggactacctcagttt

SEQ ID NO: 16615 - DNA, 446 bp, Glycine max
tgtggaaacaaaaaagtgcaacacatttgattagtttataggcttctgaagttggctttagtcttgccggtagcaactgcaagcgtggtacatgttttttcagctatgaagtttgtgaagagtcagctatgtaacaaaatgggtgatcaatggttaaatgatctgaaattctgatactggggacagatgtcgtacaggatgtcacgacatcgcgcttcagaacatgcagattatatgtgtgtccgtatgaacagattaaacaagtaaataacacatgagaattgttaacccagttcggtgcaacctcacctacatctgggggctaccaagccagggaggaaatccactaaaatagtgttagttcaaggtctaacagccactgtttacaaccttctcacctaaccactacccatgcgacctctacctatgagccactcttagatatg

SEQ ID NO: 16616 - DNA, 447 bp, Glycine max
  unsure (1)..(447): unsure at all n locations
ntggagtaaaaggcttactaaagaaggcaatagggtgtcctttctgcgataagactgcacccatgtcgacaccaaacacgtttgtttccaaggaaaaagggataatgaagtccggcaagagtaaagtaggggctatagaaagcacatccttcaatccagtgaaaacttgttgcgccttagatgaccactcaaaggggtacttcataagtaacctggttaaataagctgcaatggaggcatagccacgaataaatcggtgatagaaacccgagaggcccaaaaaactgtgcaaggccttggaggaatgaggtgtgggtcactgctaaatggcttggaccttagccgacactggttcaactccttgtgcaaaaaccaggtgacccaagaactcaacttgttgctgggcaaaggtgcacttggatagtttgaggaagaactgaccatcta

SEQ ID NO: 16617 - DNA, 404 bp, Glycine max
  unsure (1)..(404): unsure at all n locations
agctttattaggattcttccctcttagtcatgtttctttccatctacaaagacttgaatttgagaatttacttaggaaatctaatatcattctcatcaatgacttataagtgatctcgtgtatatatatatatagtggtgtgtgtataaaatatagtcatctgtcactattttcatgccaacaatatagtaccaaatagataattaaattacaaaaattaatgaggttaataattatgtagatgatgtaaaaatttcttaaggggtttcctagactatcaatgataggaaacaacaggatcttgaaacctatggttctcacaaacaatcaataaacaacaatagataatgatgtgtacctttctccataggaagacttgtnacttctccatangaacttctctc

SEQ ID NO: 16618 - DNA, 462 bp, Glycine max
  unsure (1)..(462): unsure at all n locations
actacgctaagctcttaactgcacaagctctaatattgtgttatccttgtggaaccttcacttgatgaagacactgacaaaaacttatcttctcctttgtggacaaagtgtgacaagcctgnggcaagtaaattttcttcccatcagaccttggatgcaactgtgctcgtatccccatgtcagctagatcttgacggatattcaagccatccttcgtcttgccttgaatgtttaggagcgtcccaatcacattatcacatacatttttctccacatgcataacatcaatacaatgtctaacgtccagatcagaccagtatgggagatcaaagaaaatggacctcttcttccatatgcaagtcttactcttatccttcttttgggtctttccaaatacaatattcaggtgttgaacccgctggtatacctgttcaccagtcaacagtatcggtgcaatatcgt

SEQ ID NO: 16619 - DNA, 447 bp, Glycine max
gtaatgtttcaagaatgtccttatgtatattatatacattgttatgctcatcaattacaacttgctcttgttgcttcaactagatgggtagttgatgtacgcgcttttttttaaacttgaatatgattgtaaatgttgtgtgttcttcttgtaaacacaatcatgagttacaagttgcttatgtaactaaaatttctcatttgattgccaatgatgagattgatattggaaggggaactaatcaaattgacacattacagagactgggagataccagatggagttctcatttcaattcgattggtattcttttatgcatgtataatgcatctacagcagttcttgaagaattagctgctaaatgatctactgctactcaatgaggtatgctactgattggccaaaagcatattgtcatttgatgtattttactctatatgtatgaaa

SEQ ID NO: 16620 - DNA, 412 bp, Glycine max
  unsure (1)..(412): unsure at all n locations
agtgagctgatcatttgtagccagtgatgagaagaggaaaggttgcgtantgaacttaccttaagttttgtcaaggaagaaagattagtcaaccactctgcatccttagatttgacatcaaaattgccaccaagtccaagagtgtgcaacaaaggaagattcccaacctggaaagggagtgctcccgaaaatgaattctcaccaagatcaagatacctcaactgtgagagattttcaagttgatatgggagttccccatctagatcattatcacttagatcaagatattgtaaatgcgtaaggtttccaagttgataagggagttccccatctagatcattatcacttagatcaagatattgtaaatgtgtaaggtttccaagttgataagggaattgtccatggagataaa

SEQ ID NO: 16621 - DNA, 410 bp, Glycine max
  unsure (1)..(410): unsure at all n locations
agtcttcccaatgtcttcaagcattaaatcaatacaatgagctgcacaaggagtccaataaatgtttccttttgtcctctaacaacttacctgctaaaacatagttgctcccattatcagttacaacttgaacaacgttctcttccccaacttcctccacaatagcatcaagcaactcaaaaagcttttcacctgtctttacaaaatcagagtcatcaacagacttcaaaaacattgtaccaacttgagagttaataaaaaactaatgatgcatctttgtttccaatcagtccatgcatcggacataatagtacaaccatacttgacccattgctccttgtggcctttcatcaaattntcagtgtattcaacttccttcttcaggagtggaactctgatgtcatgatagc

SEQ ID NO: 16622 - DNA, 399 bp, Glycine max
agcttttgaaacagttttgagatactgcttgcctcataagccctgttaggccttcagccactaaatcaaagagaaaaggggccaaaggatctccttgtcgcagccctctttgaggtttaaactctgaagtagggcttccattaacaagaatagagatggaagctgaagagaagcaggcctttatccatctaatccatctctcatgaaaccccattctcttcatcatataaatgagaaattgccacgaaacagaatcataagccttctcaaagtctaccttatagaccatacaagacttcttggatcttcgagcctcctcaatcacctcattagccaccaaaactccatgaagcaaatgtctgccttttatatatgttgtctgcctttcatctataagac

SEQ ID NO: 16623 - DNA, 456 bp, Glycine max
  unsure (1)..(456): unsure at all n locations
tagacgaagaacaagagaggttagatgtaaaagaatagatacgcgagcaaaatagggttcgcatctgatataatttaaaatgtaagtccaacatcagttttcaataaataaataaaaatcgatgttaacaaaatgatgttaacattaacatcggttttctgcaagaaaccgatgttaacttatcacacattaacatcaattttctaaaaacccgatgttaacgaacttacgttaacatcggttcttccaaaatcgatgttaactaataaatgttgacatcggtttttcaagaaccgatgttaatgaaaagtcacttcattaacatcgaattttcaaaaaaccgatgttaatgaatacacattatttgcaattatgtcaccgcatttatcttaacatcggttntgtcaaaaatcgatattaatttgccgatgttaaatctgctntgtgtagtagtgt

SEQ ID NO: 16624 - DNA, 450 bp, Glycine max
tctttgagaaaaatttcttgagaagctagagtttagttacacacacacctctcataactaagctcacctccttgagaagcttccttaagaggattcctaaagaagctagagcttagctacacatacctctctaatagcaaagctcacctccttgagatgagaagctagagcttagctacacaccccctataatagctaagctcacccccatgacaaaatacatgaaaatacaaaaaaaatccctactacaaagactactcaaaatgcctcgaaatacaaggctaaaaccctatattactagaatggccaaaatacaagacccaaacgaaaggaaaaacctattctaatatttacaaagataagcgggctcatacttagcccatgggctcaaaatctaccctaaggctcatgagaaccctagggccttcccttggatctctggtccaatct

SEQ ID NO: 16625 - DNA, 401 bp, Glycine max
  unsure (1)..(401): unsure at all n locations
agctttgaaggcatctacctcttgaagaggcagaggtaagggcatagggataagtggtagaggtagaggacggggagatcaaacactattagaaaatacactttcaacatcggttatttggggccttctacatcggttgtaaaaccgatgttgaaagcatcgatgttgaatgtattgttgttaacatcggttttaaaaactgatgttaacataaaaatattaacatcagttttataaataaccgatgttataaagaaagaagtacaacaaaataagtgtatgcgtgagggacgttggcatcagttttctgtaaaaaccgatgtgaatatgttatattaacatcagttnttagaggaaaccgatgtgaacgttcatcattcatgcacctattntgctatagt

SEQ ID NO: 16626 - DNA, 396 bp, Glycine max
  unsure (1)..(396): unsure at all n locations
tcgcaatgctntcactgattgcggtagaggcctctcatgaatagcctgtaacttttctgggactggttcaactccattgccggagacgagatgtcccaggtactccagttgggactgggcaaaagcgcatttgggtcgtttcaaggagaacttccctgaaagcaagagcttgaacgctgtttcgaggtgacccacatggtccgccatggttttactatagaccaacacatcatcgaagaagacgatgatgaatctgcgtaagcagggctgaaagagctgattcatagtagcttgaaaggttgatagagcattacacaaaccaaagggcattactcagaactcgtaatgcccttgatgggttctgaattccgttttgtgaatatcatcatctttcat

SEQ ID NO: 16627 - DNA, 390 bp, Glycine max
tcgcaatgctttcactgattgcggtagaggccactcatgtatagcctgtaacttttctgggactggttcaactccattgccggagacgagatgtcccaggtactccagttgggactgggcaaaagcgcatttgggtcgtttcaaggagaacttccctgaaagcaagagcttgaacgctgtttcgaggtgacccacatggtccgccatggttttactatagaccaacacatcatcgaagaagacgatgatgaatctgcgtaagcagggctgaaagagctgattcatagtagcttgaaaggttgatagagcattacacaaaccatagggcattactcagaactcgtaatgcccttgatgggttctgaattccgtttgtgaatatcatcatct

SEQ ID NO: 16628 - DNA, 342 bp, Glycine max
tagcttgttaacccatggaagctcctaatatctcccacactttttggggtgggccattcttatatggccttgattctctcagggtccacttggaccccatttctaccaactacaaacattaataaaactatattatctacacaaaaagtacacttctctatattggcatagagagtgtttatcctaatgactgaaagaacttgccttacatgtcctaagtgatatatgctcttactatacactaaaatatcatcaaaataaacaactacaaatctacctataaaatgccttaatacatgatgcataagcctcataaatgcgcttgttgcattattgaaccca

SEQ ID NO: 16629 - DNA, 400 bp, Glycine max
  unsure (1)..(400): unsure at all n locations
agcttattgccacatcactgcactcattttgaatatgtgctgaaattaaagcagtccacatcacagtgcttttaaggttagaaaactccgacataaaagaattcgctaccacataaaagacccctcttcactatagcacaatggatcagcattcctaaaattaccttggcagaacccttgcaaacatctatgaggcttgcaaatgtaatctcagatggcttcagtcccaatatctgcatctcataaagaagattaatagattcttttgtgttttttagagcatatcctgcaatcagagcattcacagagaccacactctgctccggcatgctagaataaattntatgtgtatcttcgatgtccccgcactttgaatacatgtcaataagagaacttccag

SEQ ID NO: 16630 - DNA, 388 bp, Glycine max
agctttttcctatggctgaggccaaatgcagtgttaacttggtttgaatttgaggaccttatgagggccaccgacaatttttcacctcagaacttcattggaagaggtgggtttgggttggtttacaagggcattctacctgatggctcaatggttgctgtgaaaaggcttgaagaatcagattctcaaggtgatgctttgttctgcagtgaggtggagattgttagcaacttgaagcaccgaaatctggtaccgctaaaagggtgttgtgtggttgatgaggggaatgataatcacaattctgagtacggaagaaggtatctagttcatgaatatatgccaaatggtagccttgaagaccatctctttccaaccaaactagacaatc

SEQ ID NO: 16631 - DNA, 414 bp, Glycine max
tgttaagctctcaaattgttacaaataaaatataagcattctattatttttcactcgtcagcttgacggttcagtgattttacctgtatttcattaaattttttaaattattttataagcaatttccaaaataaataaaatagaagcaaacttatttcatgctggaactgtttgataattcagatgaaactgaacactttaacttcagttaagaaaccactgcccatgctatatctgtattggaacatattctacaaatttaactaaatacatatatttttaatatgctgcatgtaaacttacatgtctgacttccgacccaactgtttctgtggtaaaataatttgcaccgaatgggaatcatcagtgctggggattgggtgactcattatggctattgctcttgcaacccta

SEQ ID NO: 16632 - DNA, 402 bp, Glycine max
agcttgaggggctcttctctgagaagattctgcagacaaaggaaaacagaaaattttgaacaaattttcaaaactctggctaaaatcatctaaaaacttcaacatagcaaaagtaagtaactgacattgctaaagcatgcaagaacccgaggaacaccctcacttggaccatcaatgccaggaatgaaatccattcgaggtccaatccagttaaaaggcctcacaattgtgaactccaagccattttcagcaccctcagctgccaataatcacacatcagtgagaattaacaaaattgaaaaagaaaaaaaaaaacaacacctaaacaaaaacaaatcaaaactcaccataaatcagcctctcaatcaactgtttcgcacaggcataagaccacctctgttt

SEQ ID NO: 16633 - DNA, 431 bp, Glycine max
  unsure (1)..(431): unsure at all n locations
atactcaagcttgcagaccagtgatntgtttgaggtaacaaatccgggatgctgttgcatgtagacctcttcctctaagatgccattaaggaaggcattgttcacatccaactgctgtattggccagttattagtgacagcaagagtaagaagaagtttcagtgataggcttgataactggtgagaatgtttctgtataatcagtaccaaactgctgatgaaagccttttgccactagtctagctttgtacttatttacagtaccatcataattttctttgacccgaaacacccacttgcaaccaatatgattactatcaaggctccatgtattgtttttaatcaaggcatcatactcagtttgcatagcagccaaccatgtagtatcgctaaggcttgtttagtagatatgggttccaaatgagtcaaaa

SEQ ID NO: 16634 - DNA, 412 bp, Glycine max
tgtaatcgattacacacatactataatcgattaccagattatattttcataaaatattctcaattgtcacatcttttcatttggttcttgaatggctatcaaaggcctatatatatgtgacttgagacacgaatatgctaagagtttttaagaacaaaaaggtcttatcctcttaaaaagcaaaatcgtattatcctcttacaaattccttggcgcaaaacacttgtgattcaataaggaattatttgagtgctcaaattgttcaatctatctctttcaagagagatttcttcttcttttcttctttattctgaaaagggattaagagaccgagggtctcttgttgtgaaagaattctaaacacaaaggaaggattgtccttgtgtgtataaaacttgtaaaaggaatatac

SEQ ID NO: 16635 - DNA, 319 bp, Glycine max
agccttgcccgcatgcctgtccaacatctggtccatgaacggcaaaggagaatgatctttccttgaggcttcattgagcttgcggtaattgacgcatattctcacaaccaacgataaacttcgttgggattaggacattcttgtcattgcaaatgactaccgtaccccctgtattcggcaccacctggactacgattacataaccactgtgggaaatggggtacatacgcccaacactaaaaagctgaagcacctgtttcctcacctcttacttcattgatggaggaagcacttgtatgaggctggctgactggtctat

SEQ ID NO: 16636 - DNA, 422 bp, Glycine max
tcttagggcatgccgggttctacaggcgattcataaaagatttctcataggttgccaaaccacttagcaatttgttgaataaagatgttgctattttgtttaatgaagagtgtatggatgcatttaatgatttgaaaaccagattagtgtctgctccagtaattatagcaccaaattgggggcaagaatttgagctgatgtgtgatgcaagtgattatgccataggtgcagtgcttggacaaaggaagggaaaaaattttaatgctatatactacgccaacaaggttctaaatgatgcacaagtgaactattctaccacagaaaaagaaatgctggtaattgtttatgcacttgaaaagttcagatcttatctggtaggctcaagagttatcatctacactgatcacgcagctattaaatat

SEQ ID NO: 16637 - DNA, 441 bp, Glycine max
aatactcaagcttgttagatatgcacgatcatcttccttgacaactccgtgattaagattgccgtcaatatgaagagagaacaatttagagagtgatcgaagactttcaaatggatttccactgaatttattcatagagagatcgagatatcttaatgatgaaagttttccaaatgatctaggaagagcaccaccaattgagttgttggaaaaaagtaacgtgtcaatatttttaaatgccccaatatgatctgtcagattgcctgaaagtcgtgaactctgaactgcaagtcttgtgagtccatgggaaatacaaggagcacgaatctctaaaagttcattaacctgttggttgagtttgagatatgataaatctatcacccttaagttgcagagattacccaaagaagttggaatgtttccttcaagttgattatgtga

SEQ ID NO: 16638 - DNA, 393 bp, Glycine max
agcttcttgcagttggacaacagtggttagcctctcgaaatctccacctaagtagtgtttgattctaatgccattcacagtccatgtccttttggtggttgggtcctccaatatcattgctccatgtggcataacttttttgatgaagaatggtcaaaccacttgcacttcagcttacttggaaacaatgttaatctagaattaaataacaatacttgttggccaagctgaaaattcctttttgacaactttttgtcatgatagattgttactctttgcttataaagattggaattctcataagcttgaaccctcagttcctccaattcatggagttgaagctctctgtgttcaccatttgcattcgagtcgaagttcacaaattataatgcc

SEQ ID NO: 16639 - DNA, 379 bp, Glycine max
agcttttggcaaatgaagaagaagaagaaattcaagaggatgttcaaagagattcaaaggatgtaacagattgtaatcaatgtatttaaaatgcaagttaagttcttgcctttatagactcttcaagtctggtcaagaaaaccattacaagagttataacctttagaaaacctttggaagagttacatcttttgatttttattcaaaacttatcattggtaatcgattaccaaatcattgtaatcgattatacaaagcatttttgtaaaacgatgtgactcttcacatttgaatttgaatttcaacgttcaaacacactggtaatcgattaccaatatattgcaatcgattacaccattatgaaattgaatggaacatt

SEQ ID NO: 16640 - DNA, 251 bp, Glycine max
tagcttcatagaagtgtatgtggctcgaaacatagcatcgatgcactggtacttgacgttatatgacttaatgatcaactcaggattcaacagatgtgacatggaccatctctgccgcgctaagatatatactaatagctatgccatccttgtcgagtatgtggatgacatgaatattacaggatctcgtatggcacaaatgcacaggttgaagcaccaattggcagaaaactttgatatgatagatcttg

SEQ ID NO: 16641 - DNA, 394 bp, Glycine max
tcaagcttttagccaactcaaacgataataactttttactcggatgtctgattgagtcccgtaacatatcgagacgctcgaaattgaatgttgaacctctgagccaattcaaacgacaataacttttttcacggatgtctgattgagtcccgtaacatattgagacgctcgaaattgaatgttgaacctctgagcaaattcaaacgacaataactttttactcggatgtctgattgagtcccgtaacatatcgagacgctcgaaattgaatgttgaagctctgagccaatacaaacgaccataactttttactcggatgtctgattgagtcccgtaacatatcgagacgctcgaaattgaatgttgaagctctgagccaatacaaacgaccata

SEQ ID NO: 16642 - DNA, 395 bp, Glycine max
agcttgaaggtatactagatgccttggttaacttggtaacccagctggccttgaataaaaaatttgtacctgtcgcaagagtctgtggtttatgctcctctgctgaccaccatacagacctttgcccttctatgcagcaacctggagcaattgagcagcctgaagcttatgctgcaaacatttacaatagaccttctcatcctcaatagcaaaatcaaccacaacaaaacaattatggcctctccagcaacagatacaatcccggatggaggaatcaccctaatctcatatggtctagccctcaacaacaacaacaacaacctgctccttccttccaaaatgttgttagcccaagcagaccatacattcctccaccaatccaacaacagcaacat

SEQ ID NO: 16643 - DNA, 418 bp, Glycine max
  unsure (1)..(418): unsure at all n locations
tgtaatcgattaccagagcagattntcagaaaatattctcttcagtcacatctttttatgtggttcttgaatggctatcaaaggcctacatatatgtgacttgagacacgaatttgctaagagtttttcagaacaaaaaggtcttatcctcttataaagcaaaatcgttttatcctcttacaaattccttggctaaataacttgtgattcaataaggaattatttgagtgctcaaattgttcaatctatctctttcaagagagatttcttcttttcttcttcttcattctgaaaagggattaagagaccgagggtctcttgttgtgaaagaattctaaacacaaaggaagggttgtccttgtgtgtttagaacttgtaaaaggaatttacaagatagtggaactctcaagcgggttgc

SEQ ID NO: 16644 - DNA, 402 bp, Glycine max
agcttgtgaatttattgtgcttggtgactaattggtgcagaaaaacaaagtaaagctcaaagaaacaaaattgaagaactgaagtagctcgctcagcacgtcttaggcgcttagcgcaacacagtggcttagcgggcaacagaagcttagcgtcaagaagtatggagaagtctggaacatgaaggcttgcttaacctgcagctcgtttctatgtttgggatgatccccacttattcaagattggagcggataatctattgagaagatgtgttaccatggaagaagctagaagtatattatggcattgtcacaattctccttatggcagatactacagtggggataggacaactgctaaggtgctacaagctgaattttttttgccttctatcttcaaggatg

SEQ ID NO: 16645 - DNA, 420 bp, Glycine max
aagctccttcaactgcacaaggctatcaatataagaagagtatgcttgtggaaccttcacccgacgaagacactgacaaaaacttatcttttcctttcctgacaaaatatggaacgctatgtgcaagtaaataatcttcccatcaaaccttggatgcaactgcgatcgtatgcccatatcagctatatcttgatgggtattgaagccatacttcgtctagcattgaatgttaaggaacgttccaatcacactgtcacaaacattactgtgcacatgcataacatcaatacaatgttgaacgtaaatatcacaccataacggaagatcaaagataatggacctcttcttacatatgcagctattactttcatccctcttttgagtctagccaaatacaataatcacgtgtggaacccgctc

SEQ ID NO: 16646 - DNA, 405 bp, Glycine max
agcttttcacaaacttactctcttgcttgaccattaaccaccctccttagcttctgccaagactctgcaattggctcattaaccatatcaccaccaccagcatactctccttctcccaacctatcttctcttctcctctgcactatccctaatttacaccaccacttaccccacttgcgaaacctgttcaatcccttttggccatccccatatgcagcatcacaagcatcatccttagaagcagactccattacactatcagatagaacactattggacgtttgcaaattcgcatccctcaaatcattctcagttatcaatacctttgccccatagaacaactcactggaggcaggggaaaccttagcattagatatcactctcaattcatcaacatcccccatt

SEQ ID NO: 16647 - DNA, 400 bp, Glycine max
agcttgtttatttcatcgttgtttaccaagctgctcaatggtctggctatcttggagaagtccttgatgaatcttcgatagaaacctgtatgtccaagaaaacttcttatacccttggcatttactggtggtggtaacttctcaatgacatcaatttttgctttttccaccttaatgcctcaggttgaaattttgtggcccaacactatcccttctcaaaccatgaagtgacacttctcccaattcagcaccagatttatctcaacagatcttcatagcaccggctctagattcatcaagcaacaatcataggaaggcccacaaactgagaagtcatccatgaagacttctatgcacttctctaccatgtcagcaaagatggctagcttgcacctttgga

SEQ ID NO: 16648 - DNA, 396 bp, Glycine max
agctttattttggctcattacctgtcataggcttcttttaaaggctcggctcggcttacataagagtatgccttgacctacgagcctatttaaaagtctacttaaagacgtatttaaccaattaattgttttaaaacctagtaaaatactaactaagaaaaaaaacttataaaatttcctgtacaaatccaaaaataattgataaacaaaattatattgaattcaagttatttaaacacaaagtatatcaaaagaaaatgaaaaaaaaatgcataatattaaaaaatatatggattagagatgatttatactaatatagccaaataaaaatatttaaattatttgaaaatgtctttacaaaacattattgtctttgaaagtattaatctcgttgca

SEQ ID NO: 16649 - DNA, 394 bp, Glycine max
agctttatctcacctactattcgggttatgtacgcaaaacgatctggctgcaatcctctattcagcatctcatcaaacaattccttagccattggcaagttccccaacttgcaaaatcctctaacaagaattgtaaaagtaaatacatcaggatcaggcccatgtttgatcatttcatcttttagccgcatggcaacatccaagtcccccattctgcaaagaccatcgataagcgtattataggtcacaacactgggaacaagacccctgaatcttaactcagcaaataagagaaaagcctcccctatgtttcccaatctggtgtaaccataaatcagagtgttatacgaaaccaaatccggcatcagattctggttcaccataacatccagca

SEQ ID NO: 16650 - DNA, 379 bp, Glycine max
  unsure (1)..(379): unsure at all n locations
tctgcatgctagcntttatccaatacaaacgaccataactttttactcggatgtttgattgaggctcgtaatatatcgagacgctcgaaattgaatgttgaagctctgagccaatataaacgacaatgaccttttactcggatgtttgattgagtcccgtaacatatcgagacactcgaaattgaatgttgaacctctgtgcatattcaaacgacaataaatttttactcagatgtctgattgagtcccgtaacttatcgagacgctcgaaattgaacgttgaagctctgagccaatacaaacgaccataactttttactcggatgtctgattgaggctcgtaatatatcgagacgctcgaaattgaatgttgaacctc

SEQ ID NO: 16651 - DNA, 410 bp, Glycine max
  unsure (1)..(410): unsure at all n locations
tcaacattcaattgtgagcgtctcgatatattacgggactcaatcagacatcagagaaaaaagttattgtcgtttgaattggctcagagcttcaacattcaatttcgagcatctcgatatgttacgggactcaatcagacatccgagaaaaaagttattgtcgtttgaattagctcagaagttcaacattcaatttcgagcgtctcgatatgttacgggactcaatcatacatccgagtaaaaagttattgtcgtttgaatttgctaagaggttcaacattcaatttcgagcgtctcgatatgttacggggctcaatcagacatccgagtaaaaatttattgtcgtttgaatttgctcanagattcaacattcaatttcgagcgtctcgatatgttacgggactcaatca

SEQ ID NO: 16652 - DNA, 425 bp, Glycine max
  unsure (1)..(425): unsure at all n locations
tagggctgaaaggtttgttgaaatacgcaatagggtggccatattgagaaagaactgcacccattccgacgctggaggcgtccgtctccaccgtgaatgggagctgaaaanttggtaaggtgagtaccggaactgaagacagagctgccttaaggtgttcaaaagctgattgtgcttggggtgttcactaaacaggttcttttgtggtgagctttaccaagggagcagcaatggtggcatatccctttatgaaacgccgatagaatccggcaagtcccaggatgccacgcacaacccttgaagattgaggtatgggccattgaaggatggcctctaccttcgaggctaccggttctactcccttcttcgagaccatatggcctaaatattcaacctgcaactgcgcgaataagcattttgataat

SEQ ID NO: 16653 - DNA, 394 bp, Glycine max
  unsure (1)..(394): unsure at all n locations
agctttcagcaaattcaaacgacaataacttttttcctcagatgtctgattgagacccgtaatatatcgagacgatcgaaattgaattctgaagctctgagctaattcaaacgacaataatgatttgctcggatgtctgattgagtcccgtaatacatcgagacgctcgaaattgaatgctgaagctctcagctaattcaaacgacaataactttttactcggatgtctgattgagtcccgtaaaatatcgagacgctcaaaattgaatgttgaagctctcagcaaattcaaacgacaataactttnttcctcagatgtctgattgagactcgtaatatatcgagacgatcgaaattgaattctgaagctctgagctaattcaaacgacaataa

SEQ ID NO: 16654 - DNA, 425 bp, Glycine max
tcagaattcaatttcgagcgtctcaatagattacgggactctttcagtcttccgagcaaaacgttattgtcgtttggattagttcaaagcttcagaattcaatttcgatcgtctcgatatattacgggtctcaatcagacatctgaggaaaaaagttattgtcgtttgaatttgctgagagttcaacattcaattttgagcgtctcgatgtattacgggacttaatcagacatccgagttaaaagctattggtgtttgaatttgccgagagcttcaacattcaatttcgagcgtctcgatattataccggactcaatcagacatccgagtaaaaagatattgtcgtttgaatatgctgagagcttcaacattcaatttcgagcgtctcgatgtattacaggactcaatcagacatccgagcaaat

SEQ ID NO: 16655 - DNA, 423 bp, Glycine max
tgaagacaagactatacgaggtatcttccttgggtatagctttatctctattggctaccgtgtctacaacttgcaaactaagaaactcgtcattagtcgagatgttgaagttgatgagtacgcttcttggaattgggatgaagaaaaagtggagaagaacgttcttatacccgctcaactacctcaagaagaagctgaggaagaaaacccaggtgaaccaccttcgcctccaccacaacaacaagatcaagaactatcatcaccagagtctactccaagacgagtaagatctttggtggacatatatgaaacctgcaacttggccatactcaaacctggaagctttgaagaagcgtcaaagcaggaagtatgggttaaggcaatggaagaagagatatagatgatcgagaaaaacaacacatg

SEQ ID NO: 16656 - DNA, 390 bp, Glycine max
agctttattagtcttatccttgggccgaccagcatacatgatgaagggaagggcaaacaagcaaaagtcatacctcatgcatatatttatctccatccatattcaacaaatcatggcacatagcatcataggtccattcatgaatgacaggtgcaatctgtggtgcagattcaatacagtcatcaaaattgagagctataaaaggagacattcatattcatagtgaagagacatttttaacctgatctatggatctgtcaacaatgagcatatcacaagtttcattatgtggaaaaccgggaatggtagatttatatttagaaaccatgtcccaaacagcattagcaagcttggtaggaactaattcacgaaccgctgctgctgtagact

SEQ ID NO: 16657 - DNA, 403 bp, Glycine max
tgtacacatactaaggtttctccttatcttcaaatctatgtgtatgcttcacatacacttcttcatttatgaatccattcagaaaggaactattgacatccatctaatagagcttgatgtctttatgtgttgcataggctaaaagtattatgatggcttcaagtcttgctattggtgcaaaggtttctttatagtcaattccttcctgttgactatacccttgagtaactagtctagccttgttttttactacttctccttcttcattaagcttgttttggaacacccatttggttccaatcgctaaccgattcttaggagggaaacaagattccaaaccttgttcttagtgagttgacgtattttctcttccatagaagtcacccaagaatattcatgcaat

SEQ ID NO: 16658 - DNA, 404 bp, Glycine max
agcttctacattcaatttcgagcgtctcgatatatgacgggactcaatcagacatccgagtaaaaagttattgtcgtttgaatttgctcagagcatcaacattcaatttcgagcgtctcgatatattacgggactcaatcaaacatccgagtaaaaagttattgtcgtttgaatttgcatagagggtcaacattcaatttcgagcgtctcgatatattacgggactcaatcagacatccgagtaaaaagttattgtcgtttgaattggctgagagcttcaacattcaatttcgagcgtctcgatatatgacgggactcaatcagacatccgagtaaaaagttattgtcgtttgaattggctgagagcttcaacattcaatttcgagcgtctcgatatatgacgg

SEQ ID NO: 16659 - DNA, 421 bp, Glycine max
  unsure (1)..(421): unsure at all n locations
ttgagccaattcagacgacaatatctttntactcggatgtcttattgagtcccgtcatatatcgagacgctcgaaattgaatgttgatgctctgagcaaattcaaacgacaataactttttacttggatgtctgattgagtcctgtcatatatctagatgctcgaaattgaatgttgatcatctaagtaaattcaaacgacaatatctttttactcggatgtctgattgagtcccgtcatatatcgacacgctcgaaattgaatgttgaatctctgagccaattcaaacgacaataactttttactcggatgtctgattgagtcccgtcacatatctagacgctcgaaattgaatgttgatgctctgagcaaatttaaacgacaatatctttttactcagatgtctgattgagtcccgtaa

SEQ ID NO: 16660 - DNA, 367 bp, Glycine max
agcttcaaactcgaaggtggaggacacatgaacgaaaattcaattcatggggctccgaaaaaggttgagaatggagaattgcacaaagcaatcactacgcatagctccaaactcgaaggtggaggacacatgaacgaaaacgcaattcatgggctccgaaaaagggttgagaatggagaattgcactaagcaatcactacgcatggctccacactcgaaggtggaggacacatgaacgaaaacgcaattcatggggctccgaaaaaggttgagaatggagaattgcactaagaaatcactacgcatagcttcaaactcgaaggtggaggacacatgaacgacaattcattcatggggctccgaaaaa

SEQ ID NO: 16661 - DNA, 403 bp, Glycine max
aattcattttgctatccgacttttaaataataataataataataacctaaagggttatattaacatttacatttatataataaaataatctggtaggctttaaaatattttttgaatgacttaaggggtaacatttttaactaattatacttttataaaatcattaaactaatttatttcctaaaaaaagtgtggtatgacttgactggacgtaatctgtgtataaactattatttacattatcaataaaaaattatcctttatatgattttggtggtaagtaattaaattacttatcatatattatttggaatgagattaaagtataaaaaatggtacatgcatatattatttatttaataattatatatcctattagaattttcattccttttctatatct

SEQ ID NO: 16662 - DNA, 446 bp, Glycine max
  unsure (1)..(446): unsure at all n locations
atcttgtcatatgtccccaagacaaactagtatcacggaagaagaaaaagatgggagaagaatgatgcaaagcagtcagagatgaagtatacaagctcctcaaagtcaacttcatcagagaattcagcttttccaccaggctcaccaatgtcgtcatggtcaaaaaggccaatggcaaatggggaatgtgcaccgactacaccgatctgaacagggtgtgtcccaaggatgcataccctctgcccaacatcaacaagctagtcaatggagtgtttccaagttctaagcttcctagacgcctactatggatacaactagatccggatgcatgctcaagacgaggagaaaatgacattcatcattgaagatgccaactnttgctacaaggccatgccttttgccttaaaatggaggcgctacatactagagatgggtggtcagatctt

SEQ ID NO: 16663 - DNA, 346 bp, Glycine max
aatcaaccacagcagaacaattatgacctctccagcaacagatacaaccctggatggaggaatcaccctaacctcagatggtccaaccctcaacaacaacaacagcagcctgcttcttccttccaaaatgttgttggcccaagcagaccatacattcctccaccaatccaacaacaacaacaaccccagaaacaaccaacagttgaggcccctccacaaccttccctcgaagaacttgtgaggcaaatgactatgcagaacatgcagtttcagcaagagaccagagcctccattcagagcttaaccaatcagatgggacaaatggctacccaattgaatcaacaaa

SEQ ID NO: 16664 - DNA, 446 bp, Glycine max
  unsure (1)..(446): unsure at all n locations
agcttatgctgtaagaagtaagatgtgtgcttgagatgtgtttaaaccttatctcaacaggaaagcttgatgaagttgggatgatataccagttcggtgctggtagatggaagcttagtagaggaagcatggtcattgctcaaggtaagaaggaaggctccttgtacatcatgccagganagatatgcaaatggaagatgaatgttgctcaagatacaaccaaagaattatgacacaagagattgngtcacatgagtgagaaaggtttggagtttctaacanaggatcactgtccaaacataaagggccagccacttgaatcttgcgaagactgtcttgcangtaaaaagtgcaaagtgtctttccaaagatcggatgaggctagaaggagaaaaaaatcctagatcttgtccattcaaatggttgctcaatgtctgaaaagtctc

SEQ ID NO: 16665 - DNA, 431 bp, Glycine max
  unsure (1)..(431): unsure at all n locations
atcttttataatatgaaattgtctgtaagtcatttgagaattnttggttgtacaacatatgcattagttgatttatggactaagttggatgataaatctatcaaatgtgtatttattggctatgctactcagtcaaaggcatacagactgtataacccactaactggcaagataattgtcagtacaaatgttgtatttgatgaagatgcaggctgggtttgggaggaatgtgaaatcagtcaaagtgttcagcagaaatcagtcaattttgatggtttagaggaggtctcanatgtgccacataatgatcacactccaagccctccttcaatgccatcaagccagggatcattaactccttcaagccaggtatcatctagctcatcaagtgantttgctccaaggagatacaaatctttggcagacttgta

SEQ ID NO: 16666 - DNA, 421 bp, Glycine max
  unsure (1)..(421): unsure at all n locations
tgcttattttgatgatgccaaagactcaagtcaagaatcaagattgaagcaaatttcaagaatcaaagggtcattcaatcaagaatcaagattcaagagaagactcaagatatgtaagaacctcaagaaaaacatcaagataagtataaaaagaatttttcaaagaaaagattgaatgacacaatttgtccaaaataatttttcaaagaaaaatcttttaccagagtttttactctctggtaatcgattaccatacagtaatcgattaccagaagtccaaaacaattntataactgttntacaaagtagtaatcgattaccatgggcatgtaaccgattaccaatgttnttgaacgttgaatttcanatctcaagagtcataacttgtgacanaatattttcaaaatagtgtaatcgacta

SEQ ID NO: 16667 - DNA, 359 bp, Glycine max
  unsure (1)..(359): unsure at all n locations
agcttgttgtattggnttcttcctcttcttctctggcagtgcaaatggattggattatggaactgttggagagcaatttggaagccaagtccaaaatttacaaggaccctgctttgagttatattttcttgatgaacaatgggaggtacattgttcagaagacaaagatagtgaattgggaaccctctttggagaagaatggatcagaanacacgctgcaaagttaggcaattccatgtgcactatcanagaagctcgtggaataagctattannggattctgaagtggatagtaatgggtcaatgccccatattaactttgcaaagtcaatgaaagagaaaactcagtcgttaacaca

SEQ ID NO: 16668 - DNA, 299 bp, Glycine max
  unsure (1)..(299): unsure at all n locations
ttctttttctgttggctgannattatcatgcagacttttctgatgatgaccgatgaacaattatggatcaacttgaaacttatgtgcttcgagtgagaagaaatgcttctttttccacttgtgaagatgttcaaagtgtggctatgaagatggttcaaactgagaaacatttggtatttccattggtttataaacttattgagctagctttgatattgccggtgtcgacagcatccgttgaaagagccttttcagcaatgaagatgatcaagtctagattgcgcaataagatcaacgat

SEQ ID NO: 16669 - DNA, 388 bp, Glycine max
  unsure (1)..(388): unsure at all n locations
gtgcctcttcatgtctggaatatgaatgtagcatatagattcaaagactcttagatgctttgctgatggcttcttcccgttccaagcttcaattggaatcttgtctcttacagacttaattggacatatgttgagtatgtaaacagcagtgtagacttgttcaatccaaaatgtgttaaggagtcccttctccttgaacatcgatctaactatttccataactgtgcgattctttctctcggacactccattntggtgaggagaatatgcgactataagttgtcgctctatgccttcatcctcacaaaatatttcaaactcgcgagaggtgtactctttgccgcgatcacttcttagtacttttatctaatttccactttgattttca

SEQ ID NO: 16670 - DNA, 292 bp, Glycine max
tttcttttagaagaagatacacacatgttttgccatgccaaaatcagcaaccttgatcataccattacgatctactagcatgcttgagccctttatatccctgtaggattggacacattagtgtcagatacttggaactagaaataataatgtatattatcatttgttacatattaacacctgtgcacgcgatctcttgcatgcatgtaggctatagcatgaagaatctgtctggtgttacatttcgcaagagatgtcttgaaagggccatatacctgatgcaaattgcgaa

SEQ ID NO: 16671 - DNA, 383 bp, Glycine max
agcttgatatctacatttgtgtgaaaagttatgagcatttgaatttctcaagagcttccattgttcaatttccagcatctcgatatattataagcctgaatcggacattcgtgtgaaaagttatgaccatttgaatatctgaagaggttccgttgttcaatttcgagcctctcgacatattatacgctcgaatcgaacatccgtgtgaaaagttatgaccatctgaatctgcaagagtttccgatggttaatttcgagcgtatcgatatattataagcctgaaacggacattcgtataaaaagttatgaccatttgaatttctcaagagcttccggtgatcaatttcgagcctctctacatattatgcgcccgaatctgacat

SEQ ID NO: 16672 - DNA, 429 bp, Glycine max
  unsure (1)..(429): unsure at all n locations
tatgagagatcccagtttggtggagagataagtccttgntttgctgatttaaagcatttgaattacttggacttgagcgccaatgaataccttggagaaggtatgtcaattccttctttccttgggacaatgacttccttgactcaccttaacctttttcatactggattctgggggaagaatcctcctcaaaatgggaatctctcaaatttggtgtatcttgacctgagttcaaatgttgccaacggaacaataccctctcagatcgggaatctctctaagcttcgatatcttgacttgagcgccaatatatttcttggagaaggcatgtcaattccttcttttctcgggacaatgacttccttgactcacctcgacctctctggtactggattcatggggaagattccatctcagatttggaatctc

SEQ ID NO: 16673 - DNA, 312 bp, Glycine max
  unsure (1)..(312): unsure at all n locations
tcttcttctgtcacttttttaaatgaaggaccagaaaacatgccaccccattgtggaaaagagattaaacatattggcagggtgcatattatgatcatggctcccattagagtgattcctctttcttttgaaaacttggatcctttgaagaaaattaactgggtcacaactgcacccacattgcctcctcctcctgtcattccagatatgacccctaatgacctgaanatatatgtgtatgctaatgcatnatngtagaattaatcacaaaagaattattggcatagaagctatgcactntgttatatatct

SEQ ID NO: 16674 - DNA, 310 bp, Glycine max
ccaaagtcctattaacaacttccgtttgcccatcggtttgtgggtgacaagtggttgaaaataacaatttaatgcccaacttgctccacaaagtcctccaaaaatggcttaggaacttaaagtccctatcactaacaatgctccttggcaaaccatggagtctcacaatctccttgaaaaacaaatcagccacatgggaagcatcatcaacttttttacatggaataaaatgagccattttagaaaacctatcaacaaccacaaaaatggaatctctaccattgcttgtttttggcagcccaaaacaaaa

SEQ ID NO: 16675 - DNA, 426 bp, Glycine max
tatgctgcaaatatttacaatagacctcctcaacctcatcttttaaatttatcacagcagagcaattatgacctctccagcaacagatacaatcctggatggaggaatcaccctaacctcagatggtccagccctcagcaacaacaacagcagcctgctccttccttccaaaatgctgctggcccaagcagaccatacattcctccaccaatccagcaacagcaacaaccccagaaacagccaacagttgaggcccctccacaaccttccctcgaagaacttgtgaggcaaatgactatgcagaacatgcagtttcagcaagagaccagagcctccattcagagcttaaccaatcagatgggacaattggctacccaattgaatcaacaacagtcccagaattctgacaagctgccttctcaagct

SEQ ID NO: 16676 - DNA, 437 bp, Glycine max
tccttaagaagattcctaaagaagctagagcttagctacacatacctctctaatagctaagctcacctccttgagatgagaagctagaacttaactacacaccctttataatagctaagctcacccccatgacaaaagaaaacatgaaaatacaaaaaaaagtccttactacaaagactactcaaaatgccccgaaatacaaggctaaaaccctatactactagaatggccaaaatacaaggcccaaacgaaggaaaaacctattctaatatttacaaagataagcgggctcatacttagcccatgggctcgaaatctaccctaaggctcatgagaaccctagggcctacccttggatctttagcccaatctacttggagtcttctacccaatgcccttgcgggataggatggcatcacaaagcatcaaaattcaat

SEQ ID NO: 16677 - DNA, 439 bp, Glycine max
  unsure (1)..(439): unsure at all n locations
tcatggaattntatgcgatgacatgggacttggaaagacacttcaagcatcagctattgtggcctctgatatagctgagcatcgaacttcaattgggaatgaggatcttctgccatctttaattatttgcccatcaactctagttgggcactgggcctttgagatagaaaagtatattgatgtttctgttatctctagtcttcaatatgttggttctgctcaagagcgaatgcttcttcgggatcatttttgcaagcataatgtcatcataacgtcatatgacgttgtccgtaaagatattgattttctatgacagctgttgtggaatcactgcatcttagatgaagggcatataatcaagaatgccaagtctaaagttacacttgcttgtaaacagttgaaagcccaacaccgcttgatattgagtggtacacctata

SEQ ID NO: 16678 - DNA, 213 bp, Glycine max
gtggatgaatcatcccaaccttacatgggcgatatcttcacaactagtagcaacaacaaccttattttcaaaatgttgctggcccaagtataccatacgtttcctcaccaatgtagctgcaacaacagcaacagccctaaaaacagtaaacagtcgaggcttctccgcaaccttcccttgagaactttgaggcaaatgatatgcaaaacatgc

SEQ ID NO: 16679 - DNA, 436 bp, Glycine max
  unsure (1)..(436): unsure at all n locations
gcttgatgcaacattnggagagattaatgaaacaacgatatgattcgctccatgatttgttggatcaaatggagaatagagatcataatgaagaagaaaggaggaggagagggaatgatggtgttcctagacaaaaccgaattgatggtattaaactcaacattcctccctttaaaggaaagaatgatccagaggcctacttggagtgggagatgaaaataaaccatgttttctcatgcaacaactatgaggaggaccaaaaggtgaagctcgccgccacggagttttccgactatgctcttgtgtggtggaacaagttacataatgagagagcaagaaatgaagagccaatggttgatacatgtgcagagatgataaggatcatgatgaagcggtatgtgccggctagttacttaagggatttgaaattcaagct

SEQ ID NO: 16680 - DNA, 312 bp, Glycine max
ggacacttttagcacttccttacatgaatacaataatcattcttcatcacgagcaaaaaatatccagcccttaaaatctttcaggccatggcatgcccattggcataggggccaaaggaaccttcatgcaccttccttagtatttgctcaacttcacttacatccacgcaccggagtaacaccatatcatggtttcttttgtatagcacgtccccattcaaaaaaaagttaactgccaacctccgtagtgtcctcttgtcattctcaaaggcctcatataggtactccctatctttgatatatctcttgata

SEQ ID NO: 16681 - DNA, 431 bp, Glycine max
  unsure (1)..(431): unsure at all n locations
tcatgtcttnttgaacttccttatcttctaacctgcaaatatatgcaagtcagtaacaattgatcccaccaaatcaaatggtcaaaaatcaacaacttgagcaagtcttactttcttccgataagtctcttgacatcaaagatggtcctttctgggttgacagctgcctgattcttggcagccttcccaatgagtctctcactgtcggtgaaagcaacccacgatggggtgatacggttaccttggtcgttggctatgatttcaacatggccattcttgtaaacaccgacacatgaataggttgttccaagatcaatgccgatgaccgtccctaacttggtggcttccttcttagcaatggaaatcgcaaatagacatcctatggagaaatttctcaatgttagttacatagttaaatttttacaacactt

SEQ ID NO: 16682 - DNA, 410 bp, Glycine max
gacacttcgaaactcaagcttctatagaagtccattcctaattgtctacaatagcattttctctcaatgatctggagacaaagaacgtggcattgacctgtggtgaaaaacaataagcagcctttgctttgctcaaagaaaagcttactaaggcacctattctagcttttgctgacttttctaaaacctttgagctagaatgtgatgcctctggagtgggagttggagctgtattggtacaaggtggacaccctattgcttatgttagagaaaaactttatagtgccaccctacactaccccacctatgataaagagctttatgccttaataagagctctacaaacttgggaacatttaccttgttccaaggaatttgtcattcataatgatcatcaatcacttagtaca

SEQ ID NO: 16683 - DNA, 357 bp, Glycine max
  unsure (1)..(357): unsure at all n locations
ggatcttttaggtttttatctttaatcttttatccctgaacgaactattcaaagttgtaattcgaactttaattatcttttaattcgctcctaaagatagatcgccaaatctgttgctaactgcacattaatctgttaaagatataacagatttatgtgtccagtattttcgggcaagatgttctggacatcgtatccgacatcgtggatcctgcagcttcaattcttcattngacattttatcttgccttgtgcattgtgcagcccaatctgattccttgacataaccgtggacatcatgtgcagcaactccagcttttcttcattggctaagtgcctatgttttaacaaaattta

SEQ ID NO: 16684 - DNA, 434 bp, Glycine max
  unsure (1)..(434): unsure at all n locations
ttatcactggcattgcacttcctgttggttccgacaaactttattctggcatcactgatgggacagttaggatatgggactgccatactggtcaatgtgctaaagtcatcaatcttggtgctgaaggtacctctttgatcagtgaggggtcatggatttttgttggtctgcaaaatgctgtcaaggtaagctcttatctggcattggtttggtttgatgtatgataatgtctaatcataagagtagtacatgcaaactgattatgtggctgtggttggtgtgaaagcttggaatatccagaccatgtcagaagttactctcgatggacccaaaggccgaatccctgccatgacttgtggcaacaatacactctnttctggcgcagaggtaactaaccatgttattaatattgcgcaatgatattcccctaaccg

SEQ ID NO: 16685 - DNA, 421 bp, Glycine max
agcttgttggttacagtgacaacaattgggctggagatgaagatgattggaaaagtaccagtggatttgtgtttttcataggaaacacaaccttcacttggatgtcaaaaaagtagccgatattcactcttttgactcgtgaggcagaatacgtagcagctacttcatgtgtttgtcatgcaatctagcataagaatttattaaaagagttgggcatgtcacaagaagagttgaccaagatctttgtggataataagttagtcattgctctagcaaggaatccagtgttctatgatcgaagcaagcatattgataccccttaccactacataagggagtgcatagcaagaaaggatgtacatgcagaatatgtgaagtctcaagaccaagaagctgacatcttcaccaagctgctcaagca

SEQ ID NO: 16686 - DNA, 446 bp, Glycine max
  unsure (1)..(446): unsure at all n locations
ttgacagaaatccgacatcgtaacattgtaaagttacatggtttttgttcacattttcaatactcatttttggtgtgtgagtttctggagatgggcgacgtcaagaagattttgaaggatgatgaacaagcaattgcgtttgattggaataaaagggtggatgttgttaaaggtgtaacaaatgctttatgctatatgcatcatgattgctcacctccaatcgttcatcgtgatatatcaagcaagaatgttcttttggattccgattatgtagctcatgtctcagacttcggaacagccaagtttcttaatccagattcatccaattggacctcctttgcaggaacctttggatatgctgctccaggttaatttcctttctctatactatttgagtaaatcatgatattntagtttgtcttcgttagccatttacaaatatatat

SEQ ID NO: 16687 - DNA, 443 bp, Glycine max
  unsure (1)..(443): unsure at all n locations
tctaagaatagccttgataactntaacataatccattgattcttccccaaaaaatatagtgtcatcagcaaattgaaggatattcactgcaaccttgttcttccccaccataaagttgtggaagcagtgtttggatattgcttccttcatcattcctgtcaaacgttcaacaaccaagtcaaacaataaaggggccaaaggatccccttgtctcaaacctctttgaggcttaaattcagtagttgggctttcattaactacgatagatatagaggctgatgtgaggcaccccttgacccaactaatccacctgtcatgaaaccccattcttctcatcatataaaaaaggaatttccaagacacatagtcatangctntttcgaaatccactttaaacaccaagcaagacctctttgacctcctaagcccctcaacaacctcat

SEQ ID NO: 16688 - DNA, 355 bp, Glycine max
  unsure (1)..(355): unsure at all n locations
tgcatcaataaagaggtcttattggttcaaatntatgttgatgatataatctttggatctactaatgaatctttgtgcaaggagttttctattgacatgccaaatgagtttgagatgtccatgatgggtgagttaaactactttcttatattacaaatcaaaccaacaaatgatgggatctttgtcaacccagcaaaatattacaaggaactcatcatgaaattcggaatgaagaactcaaaacacttggctactcctatgagcactggttgctacctttgacaagatgaatccggtcaattcgttgatgaaaagcaatatagaggtatgattggatctctactttacttatatg

SEQ ID NO: 16689 - DNA, 344 bp, Glycine max
  unsure (1)..(344): unsure at all n locations
tgagaatggagaattgtactaagcaatcacttcgcatagctccaaactcgaaggtggaggacacatgaacgaaaacacaattcatggggcttcgaaaaaggggttgagaatggagaattacactaagcaatcactacgcatagctccaaactcgaaggtggaggacacatgaacgataacgcaattcatggggctccgaaaagattgagaatggaaaattgcactacgcaatcactacgcatagcttcaaacgcgaatgtggaagacacatgaatgaaaacccaattcatggggctcccaanagattgagaatggagaattgcactaagcaatcactacgcata

SEQ ID NO: 16690 - DNA, 437 bp, Glycine max
agcttttactatcctattcaaatgttaacatgactgttaccctaaaataaaatcaccaaacaaaagattgccaaaagtatctcccaccaaccccgaagatcaaatctcatactccctccgtttcaaaatacatgtccatttttgaaaaattgcggtaaccaaggacaggctaatttgacacaaaagttcctattttacccttgtcctttattttctccattttatatttatttatcccacctcataattactcccaataccaaaattaattaaagttaatcaaattacaataccaatacatactggcaataccaatactactaaatggcattatgtttgcttcggtattgaaaagctcaatgggcatagttcggttatcaaaagtttttaaaactcaattgaaaaaacttccctccattattacatatactctaatc

SEQ ID NO: 16691 - DNA, 384 bp, Glycine max
  unsure (1)..(384): unsure at all n locations
ntaaacctctcacaaaagggaagacttttatagaagatgtatctccaatttcttagaggtgagttcaaatccttacatataaaagagtcagaatccattttccattattttttaagatttcttgttggttcacatcaaataaaaagaaatggtgagaagttagaagatgttagaattatggagaaagatactacgcccgttagatcccaaatttgagcatattattgtgacaatcaaggaaaccctagatttaaaaaccatgatgatagaacaacttcaaggatcattgcaagcttatgaagagaagcataagaagaagcaacagatcactaagccactcttcaagatgcaactgatggagaaggaagaaagtcaacgaaatga

SEQ ID NO: 16692 - DNA, 404 bp, Glycine max
  unsure (1)..(404): unsure at all n locations
agctattgnntttaattnctagagncnnganatatnacgggacttattcgaacattcgagttaaaagttattggcgnctgcatttgctcagagctttcgttttcaatgacgagtgtctcgatatgttacgggagtgatccgagttaaaagttattgtcgtttgaattttctacgagcttttgttttcaattttaagtgtcttgatatattacgggactcaatcggacatccgagttaaaatttattgtcgtttgcatttgctcagagcttatatactcaatttcaagcgtctcgatatattaagggattcaatcgaaaatccaagttcatagttattgtcgtttgaatatgctacgagctttcgttttanattatgagcgtctcgatatattacgggactcaat

SEQ ID NO: 16693 - DNA, 470 bp, Glycine max
  unsure (1)..(470): unsure at all n locations
ctattcggacctatgatactcagcttgtaggtagttctcttgattgacctatttgatatttcatttacttgntatttcacattttggtaggtttaaatattaataatgggacagtgtgtccgtcaaatttaagaatgaaattggttattcaatatagaaaaaaaaagcatgggataatgaaggtaatgggacatgaaatttttcataactcatttcattttatccattttcatacaagattaaatttgaactattaaattaagttagcaatataaacttatcttattaagtcataaaatatatatatcaaaataagaaaaaagataagactttacttacttttcagttaaattaaaatttgaattaataagaatttttttcttctaatgaattgaaggattaaaataaataaaaataataattatctatattggtatcttgaacacgcgtacccttatataatgtgtcta

SEQ ID NO: 16694 - DNA, 425 bp, Glycine max
  unsure (1)..(425): unsure at all n locations
ntggagtaaaaggcttactaaagaaggcaatagggtggcctttctgcgataagactgcacccatgtcgacaccaaacacgtttgtttccaaggaaaaagggataatgaagtccggcaagagtaaagtaggggctatagaaagcacatccttcaatccagtgaaaacttgttgcgccttagatgaccactcaaaggggtacttcataagtaacctggttaaataagctgcaatggaggcatagccacgaataaatcggtgatagaaacccgagaggcccaaaaaactgtgcaaggccttggaggaatgaggtgtgggtcactgctaaatggctnggaccttagccgacactggttcaactccttgtgcaaaaaccaggtgacccaagaactcaacttgttgctgggcaaaggtgcacttggatagt

SEQ ID NO: 16695 - DNA, 368 bp, Glycine max
tgtaatcgattacacacatactgtaatcgattaccagatgtatttttcagaaaacattctcaacagtcacatctttttatctgattcttaagtggccatcaaaggcttatatatatgtgactagagacacgaattgaacaagagttttgaagaacaaaaaggtcttatcctcttaacaagcaaaattggtttatcctcttacaaattccttggccaaaacactcgtgattcaataaggaattatttgagtgctcaaattgttcaatctatctctttctagagagatttcttcttctcttcttctttattctgaaaagggattaagagaccgagggtctcttgttgtgaaaggattctaaacacaaatg

SEQ ID NO: 16696 - DNA, 377 bp, Glycine max
  unsure (1)..(377): unsure at all n locations
tagcttcttcaaagacttgnggtccaacataggcatcatttcaagcctaatcaacgaggtaacacccccttgggtggtcctaacaattggtggggttctcaatttttttgggtatttcataatttggcttgcagtggccagaaaaattgctaagccccaagtttggaacatgtgcttgtacatcttcattggagccaattctcactgttccaccaacactggagtcattgtcaccagtgtaaagaacttccctggcacaaggagcattgtaattggcctcttgagtgggtatcttggcttgagtgcagctatcatcactcagatatactatgccttctatggaaatgattccaagnttctaattntgctcatggcat

SEQ ID NO: 16697 - DNA, 349 bp, Glycine max
acctacgatctttaatggagagggttaccactactggaatacccgaatgcaaatctttatcgaggcaatagatctaaatatctgggaagccattgaaatacggccttatatacccaccacagtataaagagtttcaatagatggtagttcatcaagtgaaagcataaccatagataaacctagagatagatggtctgaacaggatagaatacgagtacaatacaacctaaaagcctaaaacataataacatctgccctaagaatggatgaatatttcagagtttcagattgtaagagtgctaaagaaatgtgggacactcttcgattaacacatcataggaactacaga

SEQ ID NO: 16698 - DNA, 403 bp, Glycine max
  unsure (1)..(403): unsure at all n locations
agcttgtctctgtggaagaactatggtgatggtgttcaaaggcaaggtaggacaggacgcaattttcctgctgcaaggtcaccaacgccagtgacatctgagaagcttggaaatatagggactgtaaagcagcttaaaagttcaagactgggacttgagaagagtgaaaggttaaaatacttgtattgcttaagtttgacnatttgtttaggctcacatatgnnagctaatgttggtgattccatgtagcagggcaggtcgtccaccaaccaggaaactttctgatcgtaaagcatatgcacgccagaaacattcagcaattagtgcatcagcagattttcttggtactaatttctgcttctagaaaagagtaatgatctcaagttctcatgtgtataataca

SEQ ID NO: 16699 - DNA, 479 bp, Glycine max
  unsure (1)..(479): unsure at all n locations
tanagataaattaagaataataatagaatattccatcttatattctgattatatattctatcaaatacaaattgattagttagactaagaataccgatagactatcttatcattgataatatattctatcaaatacaaactgattagttaggctaacaacactgatagaatatcttatcatatattctatcagttattacttattagattgtacatattaattcttttatttaaaaatatcattgtcaaagtaggataaatatttaattatatacaattngttttattaattattaataaccttctactttatcctaataatttatacttaacagatgagtatttntctcattataactatgtactatccaatgtcttattagatttttaataacatattatccatttaatttacagatgactgtaatttgatcaatcattagtatatatatttatactatcgaccgattaagttaaag

SEQ ID NO: 16700 - DNA, 443 bp, Glycine max
  unsure (1)..(443): unsure at all n locations
ntaaggaagcaatgcattaccccacatggatcaatgcaatgcgattatctgctgaattctattgagaagaattcaacatgggaacttgttaatctgcctcttgacaagaaacccatagcactgaagtgggtttataaagtgaaggtgaaatccaaatgaggccagacttgtggcaaaagggttcttatgaaaacctggagttgactatggtgaggtctatgcacctgtggcaagaatagaaacagtgagattggtggtagcaattgcaaatatataaggttggtctatgcataaactacatgtgaagtctgctttcttaaatggacagctagatgaggaagtttatgtggaccagccacttcttgagacattgggacaagatgaaaaggtatacagattgaaaaaggaatatatggtcttaataagctccatggcttggaaca

SEQ ID NO: 16701 - DNA, 465 bp, Glycine max
  unsure (1)..(465): unsure at all n locations
tctgtgagagcacttccttgagaagctagagcttagctacacacacccttttcatatctaagctcacctccttgagaagcttccttaagaagattcctaaagaagctagagcttagttacacaaacctctctaatagctaagctcacctccttgagatgagaagctagagcttagctacacacccgctataatagctaagctcacccccatgacaaaatacatgaaaatacaaaaaatatccctactacaatgctactcataatgcctcgaaatacaaggctaaaaccctatactactagaatggcctaaatacaaggccccaatgaagganaaacctattctaatatttacaaagataagcaggctcatacttagcccatgggctcgaaatctaccctaaggctcatgagaaccctacgggccttccttggatctctggcccaatctacttggactcttctatc

SEQ ID NO: 16702 - DNA, 368 bp, Glycine max
  unsure (1)..(368): unsure at all n locations
atgtactgccttangcgatgggatgcccatactaaagcacaacacgttctttcgagcaaggagtaattcatctcacaggtcgtgaacttcttacttaggtagtaaacagcgcgctctttcttcccggattcgtcatgttgccccagcatacaccccattgactcgtccaagattgtcatgtacaaaatgagaggccttccaggtactgggggcataagcacgggaggattcattangcactctttgatccttccaaaaagcctcttgcaatcctcattccaccagtcagtttggtttttacgcaagaagttatacaacggctcacaaatggcggtgagctgcgatatgaatctggccatataattcaa

SEQ ID NO: 16703 - DNA, 373 bp, Glycine max
agcttttgcctcttcatgtctggaatatgaatgttgcatatagatccaaagaaccttaggtgctttgctgatggcttattcccgttccaagcttcaataggtgtcttgtcttttacagacttagttggacatctgttgagtatgtaaacagcacagtagactgcttcagcccacaatgtgttatgtactctcttctccttgagcatcgatctaaccatatccataattgcgcaattctttctctctgacacttcattctcgtgaagagaatatttgactataaggttggcgctcaatgccttcatcctcacaaaatctttcatactcgcgagaggtgtactctttgccgggatcacttcattaaacttttatc

SEQ ID NO: 16704 - DNA, 477 bp, Glycine max
  unsure (1)..(477): unsure at all n locations
tcaagaaaaagatggcctcagcaaattccttatttccagatagtttctctatcaatagacctccaatctttaatggagagggttaccactactggaaaacccgaatgcaaatttttatcgaggcaatagatctaaatatctgggaagccatagaaatagggccttatatacccaccacagtagaaagagtttcaatagatggtagttcatcaagtgaaagcataaccatagaaaaacctatagatagatggtctgaagaggatagaaaacgagtacaatacaacctaaaagccaaaaacataataacatctgccctaggaatggatgaatatttcagggtttcaaattgtaagagtgctaaggaaatgtgggacactcttcgattaacacatgaaggaactacagatgttaaaagatctangataaatgcactaactcatgagtatgatatatntagaatgaatgcaaatgaaaata

SEQ ID NO: 16705 - DNA, 485 bp, Glycine max
  unsure (1)..(485): unsure at all n locations
tgatattntattgtttcaatcaaagtcataaagttcatgatgaattgtatcaaatagagaaagaagtaaaagctggcaaagaaagcaacaattgatcaaatggattgaatgaatctcattgaaagaaatgaatgatgaatacatgtgtttcatattatatacaatcaactttgggcaccaatctaactactagaaaatacaactaactataactgcttctaactgtcaaaacagaaaacagttagtgcataactaattctatatgttgagagccctcccaatatgaggaatgtatgttagacatttccaacttgagctgcaaaagacaaaaagcaataggagagaaagctttggtgaatatgtcggcaagttgataggctaaagatatagatagaagattgatcaagcctgaaagcaatctcttgcacacaatgttggaagttaattttgatgtgctttgtgcgctcatgaaacacagggttgac

SEQ ID NO: 16706 - DNA, 380 bp, Glycine max
agctagagtttttctttatatatgacatgcatgatgccctttcccactgtatccacttaaatttccatatgctagaaaatcattaatagtacaaaacaccattgtgcgtaacctgaatgtctactgcacatttgcatcccacacatctaccccttcttcccacaattgtttcaagtcttcgattaatggcgtaagatacacatcaatatcattccctggctgccttggacccgcgatcatcatacacaggataatgtatttacgcaaaatgcacaaccatgggggaaggttgtaaatcatcagtaaaacaggccaggaactgtggttgctgcttaagctaccataaggattcattccatcagaagcaagagcaagcctta

SEQ ID NO: 16707 - DNA, 381 bp, Glycine max
  unsure (1)..(381): unsure at all n locations
agctngccgttatggtgtgtttcgactatgctctcgggtggcggaacaagctacaaaaggagagagcaagaaatgaatagccaatggttgatacatgggcggagatgaaaaggatcatgaggaagcggcatgtgccggctagctactcaagggatttgaaattcaagctctaataactaacccaaggcaacatgggggttgaggagtatttcaaggaaatggatgtgctcatgattcaagcgaagattgaagaagatgaggaggtaactatggctcgatttcttaatgggtcgactaatgatattcgtgatatcgttgagctgcatgagtgcgttgagatggatgatctgcttcacaaaccactccatgtagagcaacaat

SEQ ID NO: 16708 - DNA, 393 bp, Glycine max
  unsure (1)..(393): unsure at all n locations
ggtgcatccaataccctgatgaggatgtcccatatgttcttaaatctgtactgattcatttgcttccaaagtttcatggccttgcaggtgaagacccgcacaaacatttgaaagaatttcacattgtctgctccaccatgaaacccccagatgtccaagaggatcacatatttttgaaggcttttcctcattcattatagggagtggcaaaggactggctgtattaccttgctccaaggtccatcacgagctgngatgaccttaagatagtattcttagaaaaaaatttccctgcttccaggaccacaaccatcaagaaggatatctcatgtattagacaactcagtggagagagcctgtatgagtactgggagagatataagaaactatgtg

SEQ ID NO: 16709 - DNA, 365 bp, Glycine max
agctttatctttcaatttcgagcgtctcgttatattacgggactcaatcagacatccaagtaaaaagttatcatcgtttgaattggctcagagcttcaacattcaatttcgaacgactcgatatatgatgggactcaatcagacatccgagtaaaaagttattgtcctttgaaatggctcagagattccacattcaatttcgagcgtctcaatatattaccggactcaatcagacatccgaaaaaaaaattattttcgtttgcatttgctcaaaggttcaacattcaatttcgagcgtcttgatatattacgggactctatcagacttccgagtcaaaagttattgtcgtttggatatgcttcaa

SEQ ID NO: 16710 - DNA, 454 bp, Glycine max
  unsure (1)..(454): unsure at all n locations
ctgagacaattcatacgacaataactgtntactcggatctctaatttagttccgtaacatatcgagatgctcgaaattgaatgtggaatctctgagccaattcaaacgacaataagttnttactcggatgtctgattgagtcccgtaacatatcgagacgctcgaaagtgaatgttgaagctctcagccaattcaaacgacaataactttttactcggatatctgattgattaccgttatataacgagacgctcgaaattgaatgttcaacctctgagcaaattcaaacgacaataacttctttctcggatgtttgattgagtcctgtaatatatcgagacgctcgaaattaatgtttaagctctatccaattcaacgacataacttttactctatgtctgttgagtccataatatacgagacctcgacatgaatctgaactctattcattcaa

SEQ ID NO: 16711 - DNA, 373 bp, Glycine max
agcttgtattttcttttattatggaattgatccttcctaagatggagccaaacccactcaccctcattaagaactagctcttttcttcctctatcgcccttaggtgaatacacctttgtttggttctctatttggctcttaaccctttcatgctacttttatacaaactctgacataaattccccttctttatggataaaagaagtgtccactgggaggggaatgaggtcaaactgtgttaggggattgaacccatagacaacctccaaaggggactggttgggggttctttgaacccccctgctgtatgcaaattctacatgaggaatatactcatcccaagacttatggtttcctttcacaaaaaccctta

SEQ ID NO: 16712 - DNA, 458 bp, Glycine max
tcttcttttgctgttgctatctgattgtccatgtcagccagtttttcagttggttcaatgtttcctgaatcaatcaaggccataatcttctcccgggcagcatctggatctacttctatatgagcacagacaaatatctcttcgagctctgcttgcttcttgaaagcaatttccttcatcctgctggctttcagctgatcaagtctctcaacttccacttcagcctttattattaaaggaaaaaaacagttaatatcatacttggaactcgaatctgtaaacttcataagttctttagtacctacctgctcaatcagatccagagcaagggcaccaggaacagtgacttcatcaacagaagctgacatattacaggtaacatggtcaaatagtctcctttcctcgggatgagtatccattagattccaaagatcaattaactgagaagctaattcttg

SEQ ID NO: 16713 - DNA, 464 bp, Glycine max
  unsure (1)..(464): unsure at all n locations
tctttaaagcanaagataaatagcaataaataaaagaagtctaagggaagagaggtatgcaaacttgatttatactggttcggccacttctcgtgcctacatccagtcctcaagcaacccacttgagattttccattctctttgtaaaactctttttacaaagtctgaaccacacagggacaaccctttccttgtgttcaggaatcctctataacaagagacccacggtctcttaatcccttttcagaaaaaagaagaagagaagaagaaatctctcttaaaagagatagattgtacaatgaagatcaatcaaaattccttattgcatatgcaagtggttgaccaaggaatctttntgagaagataagacagttcagttcagaaaaactcttaatctttgaaaggataaaactttttgggcaatgaaaactccctttgaatttgtgtttccaagtcacctttga

SEQ ID NO: 16714 - DNA, 321 bp, Glycine max
gttgcctaaaagttactatcaagcgaagaagatactatgtccaatgggtatggagtatcaaaaaattcatgcttgcccgaatgattgcatattgaacagacatgaattagaagatatgtcaaaatgccttacgtgtgggatatcacgcgtcaaagtcaaggatgatgaggagtgtattagtgatgaatactcaacgaagggcccccctagcaaaggtgatgtggtatctgtcgaacgttccaaggtttaagcgtctttatgctaaaggatacgacgctaaagatcttacatggcatgcatatgacagaaactgcgatggaa

SEQ ID NO: 16715 - DNA, 237 bp, Glycine max
  unsure (1)..(237): unsure at all n locations
cgctgatactgtcatccagggattactaaaatatgggcctatnataaattgntccaaggaggttatgtttctacgagagctggaggaaatcttanaagtaactcaacctgcagagttgcaacgttgtatggtaccattgttccaccaaataagtcgttgtttgagcagttcacatttacaggtttgataactattactagtcttcagtagttactactgtctctcgtgatcatatat

SEQ ID NO: 16716 - DNA, 488 bp, Glycine max
  unsure (1)..(488): unsure at all n locations
ctttanattatatatataatatactttgtgttaaaagtatttagttattctaacttgacattatagtttaatatataaagtattttatatagcgtgtactgtaacgatactttaacacctaaatatatgcatgatagtattcaccatttaacacaacaaataattgatataagattaatttgatgaaaaaaaaaagaaaaagagattatacattcacatttttgtgctaacaaaaagaagctaacaaagacaataaattaataactgatattttttaattaaaaaaacactcaacaaacaaattaatagctaatatttttaattaaaaaaacactcaacaaatagtaactgatatttttcaattaaaaaaacactcaacatatagtaactgatatttttcaattaaaaaaacacttcacaaatagtgctagtagtgcatgctagatgatagaaggaaaaagtggaaaaaatgaaaaataattagcaca

SEQ ID NO: 16717 - DNA, 396 bp, Glycine max
  unsure (1)..(396): unsure at all n locations
agcttgtgcattcaataccctgatgaggatgtcccatatgttcttaagactggactgattcatttgcttccaaagtttcatggccttgcaggtgaagacccgcacaaacatttgaaagaatttcacattgtctgctccaccatgaaacccctagatgtccaagaggatcacatatttctgaaggcttttcctcattcattagagggagtggcaaaagactggctgtattaccttgctccaaagtccatcacgagctgggatgaccttaagagagtattcttggaaaanaatttccctgcttccaagaacacagccattaggaaggatatctcaggtattagacaactcaatggagagagcctgtatgagtactgggagagatttaagaaactatgt

SEQ ID NO: 16718 - DNA, 412 bp, Glycine max
  unsure (1)..(412): unsure at all n locations
agctcgnacccgggatctctaagtcacctgcagcatgctagctttcttatctcgcctatgctagntaccacatgattcgagcagttatcaatatatatttgcttatttaaaaaaatactccatttttttataagatattgcctctcataaaaaattgggcgaattaatctcttaacatagccaaccagcatgagatcatgctctcagacaaaaagatctcacttgctcaatcccagattgatatcttaagatgcattcttctcagggtacttaccagcctcagcctcacatagctcaagagctgttaaatttccctgaagaaaatctcacagttcaacacatccaacaatttttggggattgtaaattatatcagagattttatccccagatcagcccaatataccagttta

SEQ ID NO: 16719 - DNA, 473 bp, Glycine max
  unsure (1)..(473): unsure at all n locations
ntagaaggatcactatttctccgtgagagtgtcctacatgccacatagcctcctatgcctacaccaattattgttggataggtatcatcatatttatgctaagaaaatcatgcacatcagaaagaataagttaaaatagtataccaattggtacaatagcaccatctgagccaccacaaagcatcaagtcctgcaattacttacattnttaatgttttcaataaaataactatataattacactaaacttgttntaagaaataaaagattggtaaaatatgagaaatctaccatctaataagcaaatgctgaagtgagatacttacagcttcacctctaatgatatggtttgcagcattcaatatacaaaaattactagtagcacacgctgtagagattgaataaatanggcccatccacccctaaagttttcatatgataaataaataattggttagaagctatatatagac

SEQ ID NO: 16720 - DNA, 477 bp, Glycine max
  unsure (1)..(477): unsure at all n locations
tctntanagcaaaagataaatagcaataaataaaagaagtntaatggaagagaggaatgcaaacttgatttatactggttcggccacttctcgtgcctacatccagtcctcaagcaacccacttgagattttccattctctttgtaaaactctttttacaaagtctgaaccacacagggacaaccctttccttgtgttcaggaatcctctataacaagagacccacggtctcttaatcccttttcagaaaaaagaagaagagaagaagaaatctctcttacaagagatagattgtacaatgaagatcaatcaaaattccttattgcatatgcaagtggttgaccaaggaatctntttgagaagataagacagttcagttcagaaaaactcttaatcttttagaaggatanaactgtttgggcaatgaaaactccctttgaatntgtgtttccaagtcacctttgatggccattcata

SEQ ID NO: 16721 - DNA, 457 bp, Glycine max
  unsure (1)..(457): unsure at all n locations
tgtgatatctgcanaaaggttgtgtttgtcaattttgggcatgtttattatctcaaccctaaaaatntaagcaatgtcgataattntattaacactacttttcatttcactggtgcagcattaattatgggcttaacattctacagggcattcaaaatgagaacaaaaacttaaaaaaatcactgaaggtaatttaatattagatgttacaattataaacctttctccatcatattttgtggagatattttgcattactactggtatccatctagtttctttaccttgtcatgatttgaattgtggaattgtcacctgtattctttgaattgttnttccaggatgtggttactgagaatgaatttgagaaaaaacttcttgctgatgttattccgccaaccgatattgggtcacatttgatgatattggagctntagaaaatgtgaaggacaccttg

SEQ ID NO: 16722 - DNA, 468 bp, Glycine max
  unsure (1)..(468): unsure at all n locations
nggaacannatatttgaattcttggtctccttagagaatttgtaaagatgtctgctagttgatcattagaactaacgaattcagcaataacttccttagaaaggactttctcctggacaaaatgacaatcaatctcaatatgtttagttctctcatggaatactggattagaagctatatgtagggcagcctgattatctcaacatagcttcatttgttgagtatttccaaacttcaattcttaaagaagttgtttaatccaaatgagctcacatgtggctacagccatagctctatattcagcctctgcactagaccttgcaacaacattttgcttcttactcttccatgagacaagatttcctccaatagacacacaatatcctaaagtggaacgcctatcaatgcgtgatcctgcccaatctgcatcgcaaaattcaactatttgagtgtttcctttgtcttcat

SEQ ID NO: 16723 - DNA, 338 bp, Glycine max
ctcgagagcttcctatgtggaatttcgagcgtctcgatatattatacgcctgaatcgaacctcagtgttaaaagttatgaccatttgaatttctgtagagcatccgttgttcattttcgagcgtctctatatgtgatgaaccttaatcggacctccgtgtgaaaagttatgaccatttgaatttctcgagagcttccgttgttcaatttcgagcgtctcgacatattatgcgcccgaatcggacatccatgggaaaagctatgaccatttgaatttctcgagagcttccgttgttcaatttcgagcgtctcgatatattatgcgcccgaatcggacat

SEQ ID NO: 16724 - DNA, 424 bp, Glycine max
atcactcgacccgggatccttaagtcacctgcggctgcaagcttgcttttaattctgatcagaatcaattttctgatcttcaaaacctagctccggcttcctcttccccatatcaactatgcagcttgcggtcaacatgaatggccttcccaatattacagggatgtcagtatcttcagagatatccattaccacaaagtctgtcgggaagataaaatgttttactctgaccaacacatcttcaattactccatatggcctggtaatggagtgatcaactaattgtaaagtcatttgaatgagcattatttcccactcttccaatcttttgcacatggagagtgacatcaaattgatacttggacccaggtcaataaaagcttttcccactttgacttcttcaattgaacaaggaatagttaca

SEQ ID NO: 16725 - DNA, 327 bp, Glycine max
tgtaatcgattacacatatactgtaatcgattaccagaggagatttttatataatattctaaacagtcacgtctttgtctttggttcttgaatggctatgaaaggcctatatatatgtgacttgagacacgaatttgctaagagtttttgtgaacaaaaagatcttattctcttaaaaagcaaaattgttctatcctcttacaaataccttggccataacacttgtgattcaataatgaattattagagtgctcaaattgttcaatctatctctttcagaagaaatacgtcttctcttcttcttattctaaaaaggattaaaaactg

SEQ ID NO: 16726 - DNA, 411 bp, Glycine max
  unsure (1)..(411): unsure at all n locations
agaggtcttgtatatttgcatgtaattntaagttcaaaccctcatcgtaagaaaaacactaaacacttatgatataaatttaatactattattttatagtcattgtattcactatattttttattgtcatgttataaatatattattagcagcatataagctatccctatcaagaggaaggggcacacatttgagttcttatacacttagtaactatagattccttactatttggcaatgcagataacgaacgaaccccgactcttcaaataatttttaatatatgacttctactagtgcttaagttaccttcttttatttttgaatttatgttctagctctttagaagacattaaaccacaaatattttctatttttaaaaaaacaacaagtgaatttaatttatattaa

SEQ ID NO: 16727 - DNA, 471 bp, Glycine max
cgtacggttaaagtctcacgatggtcacgtgctcatgcaacaattgttattcgtggctatacgagacatcttgcgaaacaaagtcaggttagcgataactcgcttgtgctttttcttccatgctatatgtagcaaagtccttgatctagtcaagtttgatgagttggaaaatgaggccgcaattatactgtgccagttggagatgtatttccccccccgctttctttgacatcatgattcacttgattatgcatctggtcagagaaatcaaatgttgtggtcctgtttatctacggtggatgtacccagttgagcgatacatgaagatcttactagggtatacaaagaatctatatcgtccagaagcatctattgttgagaggtacattgcagaagaagccattgaattttgttcataatacttacagaatgctatacctgttgggcttcctgagtgtctgcatgatgata

SEQ ID NO: 16728 - DNA, 414 bp, Glycine max
  unsure (1)..(414): unsure at all n locations
agctttatcgttattcccaaagcttcatgtagacttgtccagaatcgcgaagtgaacctcggatccctgtctgatacaatactggaaggaattccatgcaaccttaccacttctttgatatacaactccactagcttttccattntatacttcatattcaccggaatacactgagcagatctggtaagtcgatctacatattcagccacatctttcttcctgccatgccaccaaacacttctcttcaaatcttggcacatcttagacattccacgatggaaactaagacgacttttatgcgcttcttccatgatctttactgtcaaatcatctaaagatgacacgcatatgctccccttgaatttaattataccagttgagccctctcgaactctacctccttatcccccatta

SEQ ID NO: 16729 - DNA, 393 bp, Glycine max
tctatagaaggttcattcctaatttctctacaatagcatttctctcaattagctggcgaagaaaaatgtggcatttacctgtggtgaaaaacaagagcaagcctttgctttgctcaaagaaaagcttactaaggcacctattctagctcttcctgacttttctaagacttttgagctagaatgtgatgcctctggagtgggagttggagctgtattgttacaaggtggacaccctattgcttattttagtgaaaaactatatagtgccaccctcaactaccccacctatgataaagagctttatgccttaatatgagctctccaaacttgtgaacattaccttgttgacaaggaatgtgtcattcatagtgatcatcagtcacttagcacatt

SEQ ID NO: 16730 - DNA, 223 bp, Glycine max
gacattatcattattacttcttccacggtgctggaacgtacttacatggacttgatggggcctatgcaactagaaagccttggaggaaaaaagtatgcctatgtggttgtggatgatatctctagatttacctgcgtcaactttatcagatagaactcacacacctttgaagtattcaggatgtgagtcttacacttcaaagagaataggaccgtgtcatcaa

SEQ ID NO: 16731 - DNA, 307 bp, Glycine max
tttcttcactttaggagacggccattccggtgttggagaagatcaacgacaatgcctacaagattgacttgcctagtgagtataatgtaagtgccactttcaatgtgtctgatctatctctttttgatgcagatggcggagccttggatttgaggacaaatccttttcaagaatgagggagggatgaggacataaccaatgaccatgaagcactggaatgtcccatgaccatatgcagacttatacaagcccaacgcgtcatagagacacggctggtcatttgtatcgctgccattgatgatgattg

SEQ ID NO: 16732 - DNA, 443 bp, Glycine max
  unsure (1)..(443): unsure at all n locations
tgtgtttgagtgaggtgataccttcttagcatctntgatttcctatacctctcttctcaacccgccatagtaatgagaaacaggagcatgtctcagagtaacaacatacacatcaccaaaataatatcctatagtagataaataatcatattcggatgtgcctaggtaaataacaaatgtataatgattacacctcacagaacaacatgcataaatataccagatctaaacattatgcaagttattctgacctaggttgttgtcaagagtcttggtgaactggtccaaagctggagaaaccttcaacctttgcttcagaatcctcttcgtcctctgaatttgaacattctttggccacttcatgaaccgagtcaagtctctcttcgaggcaacgcccctncgattctgaacctctttgacgcttctcaacagcagatttgaac

SEQ ID NO: 16733 - DNA, 393 bp, Glycine max
agcttaccactataggaagccatggataagagcatgaaggtaggagaagatgagtggagggagaaggagaaaaggagcacgaaattttatgcctcaattgaagtctaaaatttgaagtgtaattctctaataatcaaagttgaaaaaaagcacacacatggcatctatttatagcctaagtgtcacaaaattggaggaaaatttgaatttctattcaaatttcacttgaatttgaaattgaatttgtggagccaaaattttactaattatgattagtgaattttagctatgtttcaacccactaatccaagatcaagtccaagattcctcactaagtgtgcttaagtgtcatgtggcatctaaagcatgaaggacatgcacaaagtgtgacta

SEQ ID NO: 16734 - DNA, 396 bp, Glycine max
agcttgacccttacgagtcagtttagtcaaaggtaaagctaacttggagaaaccttctatgaatctctgcgagtatcctgccaaacccagaaaactcctaatctctaaaacagatttgggactctcccactcaagaacgacttctatcttagatggatctacagctatgcccccttgagatatcacatgccctaggaaactaactttctctaaccgaaactcacacttggacaacttagcatagagttgtcgatccctaagtgtatgcagcacaatcctcagatgttcttcatgttcctctctagtcttggagtataccaaaatatcatctatgaataccaccacaaaactatcaaggtaagggtgaaagactctattcatgtagtccataaacac

SEQ ID NO: 16735 - DNA, 414 bp, Glycine max
agcttaaacattcactttcgagcctctcgatatgttacgggactcaatcaaacatccgagaaaaaagttattgtcgtttgaatttgctcagaggttcaacattcaatttcgagcgtctcgatatattacgggactcaatcagatatccgagtaaaacgttattgtcgtttgaattggctcagaggttcaacattcattttcgagcgtctcgatatgttatgggactcaatcagacatcccagtaaaaagctattgtcgtttgaatttggtcagagattcaacattcaatctcgaacgtctcgatatattacgggactcaatcagacatccgagtaagaagttattggtcgttgaattggctcagagcttcaacattcaatttcgagcgtctcgatatatgacgggactcaatca

SEQ ID NO: 16736 - DNA, 422 bp, Glycine max
  unsure (1)..(422): unsure at all n locations
ctgagccaattcagacgacaacaactttntgctcagatatctgattgtgtccagtaatataacgagacgctcgaaattgaatgttgaagctcttagcaaattcaaacatcattaagtatttactcggatgtttgattttgtcccgtcatatatcgagacgctcgaaattgaatgttgaacctttgagccaattaaaacgacaataactttttactcggatgtctgattgagtcccgtcatatatcgagacgctcgaaattgaatgttgaagctcagagccaattcaaacgacaataactttctactcggatgtctgattgagtcccgtaatatatcgagacgctcgagattgaatggtgaacctctgagccaattcaaacgacaataactgtttactcagatgtcggatgggtccgcgtata

SEQ ID NO: 16737 - DNA, 411 bp, Glycine max
  unsure (1)..(411): unsure at all n locations
tcagaattcaatttcgagcgtctcgatgtattacgagactcaattattacactccgagtnaaaaagttatttgtcgatgtgaatttggttgagagcttcaacattgcaatttcaagcgtcttgatatattacggaactcaatcagacatccaagtaaaaagttattgtcgattgaattatgtctcagcgtcataattctatttcgagcgtctcaatagattacgggactgaatcagacatccgagcaaaacattattgtcgtttgaattatctcagaccttcagaattcaatttcgatcgtctcgatatattactggtctcaatcaaacatctgaggaaaaaagttattgtcatttgaattcgctgagagcttcaacattcaatttggagcgtttggatgtattacgggac

SEQ ID NO: 16738 - DNA, 394 bp, Glycine max
tgtcaaagctgacaatatcttcagatatgtggacaccgggaatctaatactgacttcccagtaggttcaaacgtgactcaggtgtttgttgatcaactaccgtgactaaacacccttggcatagctttggctcgcatagattttgcaccatagggtttgaacgctccccacactcaccctcgcggcactgagatccttatagtccttgagggtactctttatgttggatttgtgacttccaatcaagatggaaatcgcctcttcaccaaagtgctgaacaagggtgatgtgtttgtgttcccaattggtctgattcatttccaaatgaatatgggaaatgggaatgctgttgccattgctggccttagcagtcaaaatccaggagctatcacta

SEQ ID NO: 16739 - DNA, 398 bp, Glycine max
  unsure (1)..(398): unsure at all n locations
agcttgtagtttattcgaacgacaataacatttcactcggaagtccgattgagtcccgtaatatatcgagacgctcgaactttaaaaccgaagctcgtagcagatttgaacgacaatgacatttcactcggaagtcctattgagtcccgtaatatatcgagacgctcgaaatttagaatcgaagctcgtagaaaatacgaacaacagtaacttttcactcggaagtccgattgagtcccgtaatatatcgagacactcaaaatttaaaacccaagctctcaganacttctaacgacaataacttttcactcggaaggccgattgagtcccgtaatatatcgagacgctcgaaatttaaaaccgaagctcgtagcaaattcgaacgacaataacatttc

SEQ ID NO: 16740 - DNA, 468 bp, Glycine max
  unsure (1)..(468): unsure at all n locations
ntggttntaaatttcgagcgtctcgatatattacgggactcaatcggtcttccgagtgaaaagttattgtcgttagaattagctgcgagcttcggttttaaatttcgagcgtctcgatatattacgggactcaatcggacttccgagtgaaatgttattgtcgttcgaatttgctacgagcttcggttttaaatttcgagcgtctcgatatgttacgggactcagtcggacttccgagtgaaatgttattgtcgttagcatttgctgtgagcttcggttttaaaattcgagcgtcacgatatattacgggactcaatcagacttccgagtgaaatgttattgtcgttagcatatgctgcgagcttcggtattaatatttgagcgtcttgatatattacgaggactcatcggacttccgagtgaaatgtattgtcggtcaaattgctcgagcttcggtttaattcgagc

SEQ ID NO: 16741 - DNA, 421 bp, Glycine max
  unsure (1)..(421): unsure at all n locations
ntaatggcttagtgaggatggagaggtgcaagtaaggaagcaagtagagttggatatttccattggaaagtacaatgataaggtgctntgtgatgttgttcctatggaggccagccacttactcttgtggagaccatggcaatttgataagagggctaatcatgatggtttcaccaacaagatctctttcacgcatcaaggcaaaaagatagtgctcaaaccgttgagtccacaagaagtgtgtgaagatcaaagaanaatgagagagaaaattcttcaagaaaagagagaataagannaagagagccaaacacttgagagttcataaagtgaggacaaaaagagggaaacacaagagaggaaaaagatgagtgaaacatttgaagtgagggagaattntctagctacaaaaggagagatc

SEQ ID NO: 16742 - DNA, 397 bp, Glycine max
agcttgtccgttggatgcctacccattacccattagaaatagactagtagatagggcagcaagaccctgcctacttagcttcttagatgcatactcagggtacaaccaaatacggatgcatccacaagatgaggagaaaacaaacttcataacctagtcgtctaactattgctatcagattatgccattcggcctaaaaaaggctagctccacttaccagcacctaatggacatgatattcaaagaacaaattggaaagaaaatggaggtatatgttgacaacatggtggtaaagtctaatgatgcagaatcacacacctatgactcggaagatatatttgcaaagatctgaaagcataacatgtaactcaattcgaagaagtgtatgtttggggta

SEQ ID NO: 16743 - DNA, 475 bp, Glycine max
  unsure (1)..(475): unsure at all n locations
ntgtctttcttagtactcataattctacattaattatttttcttgatgcatgattaacaaaactttaacatgcagaattgataagaggtaaatgtcattgcaacaatactatgtggtacattcttagtatgatcacccctgcagaaccataaagattgtgaataacaagtcaacatcacttagtgccatggcaatggtaaagccaattacgccatttccttaggcctcccacaaagctcttaattctatatatatttataaaaaaataaatcaaatttaaattatcaggtaatatattctattgcattatctattattatttgcgtagccagattataaaattttaattacacatagatatattataaatcatttgagaagtttataattcatttgacaattatagaaaaattagtttccatctactttaaatcttgtaaaatcacacttaatgaatataatgattcaatttata

SEQ ID NO: 16744 - DNA, 458 bp, Glycine max
  unsure (1)..(458): unsure at all n locations
tagcattagcatgtgttgacactggatcactaatcattgtgtacgtgtttgttactttagtggatcctatcaaagaacctccgcttataactacaaacatagttctgtctgtttttgttgtgtattgtcatgtggacaaagttccatgccatgtttgagacatctaagattggcgtcttgcctttgcccagtattattttttgcaacatcttcctttcttaaccttgtcattacctcgaaattntaatatggcaacttactcttgtggaaaataatttttaagaattaatataacactttaaaattaaatttagaatattaaaaaaatataaaacatagatataattctttaggtgctattgatacttttctcctgttagaattaaaatcgtacttcagtaatccacataataaagatatacatcataaaattacatcaattatcatagtgaaactct

SEQ ID NO: 16745 - DNA, 425 bp, Glycine max
  unsure (1)..(425): unsure at all n locations
agcttttcaattaatctttggctagctacattagtgcaattacccctatcaataatcaaagagcatattttccccatgaccatgcacctagaatgaaaaatgttctccctttaagtttcatctctatccttacacacattacccattaacctcctaaccataaaaagatcaccttccaggggttgtacatcacattcattttcactctcactagaagaactagaccagctagaagaagataaactaatgatatccccattacccaacacaaccatagtccttttgctaggacattgngaggcattatgaccctttcccaaacacttanaacatttaatagaacttacttttgaagaagtaggagtagggttagaaccacaccatactacgagagaggttccctcttttaccatttttaatatccc

SEQ ID NO: 16746 - DNA, 404 bp, Glycine max
agcttgaatttgaacaacagaagctctcgagaaattcaaatggtcataacttatcacacgaaagactgattcaggcgcataatatatcgagacgctcgaaattgaacaacggaagctctcgagaaattcaaatggtcataacttttcaaacggaagtccgattctggcgcataatatatcgagaagcttgaaattgaacaacagaagctctcgagaaattcaaatggtcataacttatcacacggaagtccgattcaggcgcataatatatcgagacgctcgaaattgcacaacggaagctctcgagaaattcaaatggtcataacttttcacacgaaagtccgattcaggtgcataatatatcgagaagctcgaaattgaacaacgaaagctctcgagaaatt

SEQ ID NO: 16747 - DNA, 439 bp, Glycine max
  unsure (1)..(439): unsure at all n locations
tctggatatattatgcacctgaatcttacttccgtttgaaaatctatgaccatttgaatttctcgagagattccgttgttcaattccaaccttctcgatatactatccgccggaatcggacttccgtgtgacaagttatgaccatttgaatttctcgagagcttccgttgttcaatttcgagcgtctcgatatattatgcgcttgaatcggacttccgtgtgataagttatgaccatttgaatttctcaactgcttccgttgttcaatttcaatcttctcgatatattatgcaccttaatcggactaccgtgtgaaaagttatgaccatttgaatttctcgagagcttccgttgttcaattccgaccttctcgatatactatgcgccggaatcggacctncatgtgacaagttatgaccatttgaagttctcgagagct

SEQ ID NO: 16748 - DNA, 428 bp, Glycine max
  unsure (1)..(428): unsure at all n locations
ctcgagctcgcgcccgcgtgatactctacactgcacctgccgcattcagcttatataaatcttaanattcagatagtctaatgaaaaataaactttccacttgatatcgggtatcaagaattaaaatttaaatcacattaaaatgaaacttgagaaacaaaatatgaaagcaagaagtataaataagaaataaattgaatatttacctatatatgtgtaaatatttctgtaaaagatcaaaaatataatactttaatatatgggttaaaatatacaagaatgtatagcattggaacaattgtttaagttatttgatatgataaacatattgtttttactttctgtaaatcatgatccataacgttcatgttatgaatacccataacccagtgaaaacaatattttcatcgtattgcaagcagcgccaa

SEQ ID NO: 16749 - DNA, 383 bp, Glycine max
agcttcaatggcttagtgaggatggagaggtgcaagtaaggaagcaagtggagttggatatttccattggaaagtacaatgataaggtgctttgtgatgttgttcatatggaggccagccacttactcttggggagaccatggcaatttgataagagggctaatcatgatggtttcaccaacaagatctctttcacgcatcaaggcaaaaagatagtgctcaaaccattgagtccacaagaaatgtgtgaggatcaaagaaaaatgagagagaaaattcttcaagacaagagagaaaaagaaaaagagagccaaacacttgagagttcaaaaagtaaggacaaaaagagggaaacacaagacaggaaaaagatgagtgaaaca

SEQ ID NO: 16750 - DNA, 389 bp, Glycine max
  unsure (1)..(389): unsure at all n locations
agcttcttattttcagaagatgaagatgaatccgtggccacatcatggacttctctaaggacaatagcatcatttcttgcactgaattgttgggagttggaagcaatcttctcaatcagattcctagcctcaacaggagtcatatcaccaagagctccaccattggcagcatcaatcatactcctttccaagttgctaagtccctcatagaaatattgcagaaggagttgctcagaaatctggtggtgaggacagcttgcacacaatttcttgaatctttcccagtactcatacaagctctctccactaagttgcctgatgcctgaaatgtcttttctgatggcagtggtcctagatgcanggaagaatttctccaagaacaccctctt

SEQ ID NO: 16751 - DNA, 369 bp, Glycine max
  unsure (1)..(369): unsure at all n locations
agcttaatgtatccacaagaaaagaccattacccgcttcccttcatggatcaaatgcttgagagacttgcaaggcaatccttctactgtttcttggacagatactcaggttacaatcagattacagtagatcctcaggatcaagaaaaaacagcgtttacatgtccttttggtgtttttgcttatcaccgcatgttgtttggtttatgtaacgcccctgctactttctaaagatgtatgatggcaattnttgatggcatggtagagaaatgtatcgaagtctttatggatgatttttcggtcttcggtgcatcttttggaaattgcttagcaaatttagagaaagtgttacagcgttgtgaagaatcta

SEQ ID NO: 16752 - DNA, 321 bp, Glycine max
taagcttgaaggaaaccttgatgccttggtcaaccaagtaactcagcttgccatgaatcagaaatctacacctgttgcaagagtctgtggtctatgttcttctacagatcaccatacagatctttgtccttctttgcagcaatctggagttaatgaacaacctgaaacttatgctgcaaacatttataatagaccccctcagcagcaaaaccaacctcagcagaacaattatgatctttcaagcaacatatacgatccaggttggaggaatcatccaaatctgagatggacaagtcctccacaacaacaacagcctgtccc

SEQ ID NO: 16753 - DNA, 366 bp, Glycine max
  unsure (1)..(366): unsure at all n locations
tcaacatcagaccacttccgggtgctgtaactacttttcatggacttgatggggcctatgcaagttgaaagccttggaggaaaaaggtatgcctatgttgttgtggatgatttctccagatttacctgngtcaactttatcagagagaaatcagacacctttgaagtattcaaggagttgagtctaaggcttcaaagagaaaaagactgtgtcatcaagagaatcangagtgaccatggcagagagtttgaaaacagcaagtttactgaatactgcacatctgaaggcatcactcatgagttctctgcagccattacaccacaaacagaatggcatagntgagaaggaaaaacaggactttgcaag

SEQ ID NO: 16754 - DNA, 402 bp, Glycine max
  unsure (1)..(402): unsure at all n locations
agcttccattntcaattacgagcgtctcgatatattacgggacccaattggacatgcgagcacaaagttattgtcgtttgacttttctcagagcttttattctgaatttcgagcgtctcgatatactacgggacacaatcggacatccgagtaaaaagttattgtcgtttgattntgctcagagcttctgttctgaatttccagggtgtcgatataccacttgccaccatcggacatccgagtaaaaagttattgtcgtttgaatttgctcagagcttttgttttcacatttgagcgtctcgatatataacgagactcaatcggacatccgagtaaaaagttattatcgttagaattggctcagagcttccattntcaattacgagtgtctcgatatattac

SEQ ID NO: 16755 - DNA, 367 bp, Glycine max
  unsure (1)..(367): unsure at all n locations
tcaagcttttgtgtgggatacctaatgtgagcatagtttccaaacccttaaggaaaagttgacggccgctcccatgctagttntgcctaacccaagagaaccccttgaggtgtattgtgatgcatcaaagatgcgtttaggaggagtgttgatgcaaaatggccaaggagtggcctattcttctagacaactcaagactcatgagaggaattatcccacccttgatctggagttggctactgtagtttttgcccttaagatgtggaggcattacctgtttggctccaagtttacagtgttcaaggattataagagggaccatgacacanagatcctncacaaagaatttagtcccagacaacaagta

SEQ ID NO: 16756 - DNA, 383 bp, Glycine max
tttagcttatgaatatcagatcgcaccttcgcttctaaatgttcaagaatctcttgatccgtgggatcaaacttcactccagcaggcagtccaggtaagtcatgaattccaccaccctaaaattattcaacaccacaatatttatttaaataattttttcataaagaacgccaaaaaaaaaaatgaaaaatgaatcaaactaagacaattacatcaaaagaaaaaaaaagtactcaaaagggtaatattatctatatgatatatatcattaacaaaaaggttaataattaagaacctgatcttggcatttgatatgatgaccacacgtaggacaagttctaattaagctatcttttcgtccctccactatgatgttatgatga

SEQ ID NO: 16757 - DNA, 435 bp, Glycine max
tgcaattgccccagtaatgatcgcacttgacctgagtttagaatttgaattgatgtgtgatgccaatgattatgcagtgggcgcagttctaacacaaaggcaagacaagatattccatgccatttactatgctagcaaggtcctcaatgatgcataaatgaattatgccacaaaggagaaggagatgctagctattgcctttggcttggagaaattcaagtcatatttggtaaggtcgaaggtaataattttcaccgatcatactgctatcaaacaccttctcaccaaagtagattccaaaccatgactgattagatgggtcctgcttatacaagagtttgatatagttatcaaagacaagaagggatctgggagcgtggtggctaatcacctctcccagttgaagaacgaaagagtaactaaagaagaaccgaa

SEQ ID NO: 16758 - DNA, 379 bp, Glycine max
  unsure (1)..(379): unsure at all n locations
agctttatttttgacaactaatattgntaattgatgaccgcgatgcatgtttgtgccatatcattgacaatgtttcataatgcaaaataatttattcttttgcagcattgtgatttttcaatcacacttggatttggataggttccaattaaggcaaaaattattatatttgcttgatcaactaaaatgttctttgtacatatttttctgtgtatataatattaatttatgtatatctaatttgtaatatttctgctatttatagttattgtattttattaattatcatgtgatgtctcgggtattatttgataggattttttatcattctaatcacattggtgatgatgctaatttaactgtgattctatatttctga

SEQ ID NO: 16759 - DNA, 331 bp, Glycine max
ctcaagttttagctggacaattccgcgagcctcgatatattattcccctgaatcgcacctccgagtgaaaatgtatgacctattgattttgctaagagcttgcgagctcatattcgagcgtctcgatatattatgcccccgaatctgaccttagcgcgaaaggttatgaccatatgaactcctcgagagcttgcgttgtctaatttcgagcggctcgatatattatgcacctgaatagggtctccgagggaaacgtcttgaccatttgaatctctcagagctcgcattcatcagttttaccgcctcgaatattatgcgcctgaatccgacc

SEQ ID NO: 16760 - DNA, 429 bp, Glycine max
  unsure (1)..(429): unsure at all n locations
tttgatggtgtcgagaagaaatcacatgtntgtcattttcattttaggggagaatgtgaatgtatgtatacatgaatttgatgatgtcaaagaagaatctaacaaggctgcttcaaatgataagcatttgcttcaagaataattcaagattgcttcaacaaacaaagccttgtttcaagattcactaaagaccaagccttgccttaaaacaaagtgctttcaagacatgcaaggctctggtaatcgattaccaggaagtgtaatcgattaccagaagacagggttgagaaatagctgttgaaaaaggttttgaatctgaattttcaacatgtaatcgattaccatatgtctgtaatcgattaccagcaacgaaactttggaaattcatattcaaagtcataaccctgcanattataactgtgtaatcga

SEQ ID NO: 16761 - DNA, 353 bp, Glycine max
  unsure (1)..(353): unsure at all n locations
tagcttggcgacaatgagaggttttgagtcggagtgcaaaatcaaggtgaaagtctcgaggatgagcctggcttgctcaatggagatttgaagtgactcaaagattgtcgctaagtcgactcattggttggaggaagacttgagaagcttctacttcagtggaattagggtttgtgccaggtcaaagaagatgagacgcaggattggcaaaaggccatgcttgaaggattcgcgccttgggtgaatcatggtggttgggtcccttgccaatgaagatggcatgcacgacaaaggaggtcgaggagctaggagggggaaaagtctatggggaagaggtggtangtggcggaaat

SEQ ID NO: 16762 - DNA, 398 bp, Glycine max
  unsure (1)..(398): unsure at all n locations
tctgcttgaaggtaaactanatgccttggttaacctggtaacccaactggccgtgaataaaaaatctgcacctgtcgccagaatctgtggtctatgctcctctgtcgaccaccacacagacctttgcccttctgtgcaacaatctgaagcaattgaacaacctgaagcttatgctgcaaacatctacaacaaacctcctcaacctcaatagcaaaatcaaccacaacagaacaattatgacctctccagcaacaggtacaatcccggatggaggaatcatcccaaccttagatggtcgaatccttcacaacaacagcaacaacaaccttattttcaaaatgatgctggcctaagcagaccatacgttctttcaccaatccagcagcaacaacaacaac

SEQ ID NO: 16763 - DNA, 390 bp, Glycine max
  unsure (1)..(390): unsure at all n locations
agcttgacggagtttggcgcatcggggaacaatttcactttaaaagtgggtcccaattggattcccaattttcaacttacctatttggaagtgacatcatggccgctatgtcccagctatccattgtggattcagtcacaaaacaaacttgaatatgttggactatctaacacggngattttcgattctatttccacacagatgtgggaagcactttctcaggttttgtatttaaacctctctcgtaatcatatccatggtgagattgcgactacattaaagaatccactatctatcccaactattgatctaagctcaaatcacttgtgtggtaaattaccctatctatcaagtaatgtgcttcagttggatctttcaagcaattcattc

SEQ ID NO: 16764 - DNA, 414 bp, Glycine max
  unsure (1)..(414): unsure at all n locations
tagagagattcccgatctgagagggttctgttctgttttcaacaacataactcaggtcaagatacaccaaatttgagagattcccaatctgaggaggaatcttcccgtggattccagtatcagagaggtctaggtgagtcaaggagctcattgcacaaaggaaagaagaaattgccataccttctccaagtaaatcattgtagctcaagtcaagatatcgaagcttagagagattcccgatctgaggaggaatcttccccatgaatccagtaagagcgaggtcgaggtgagtcaaggaagtcattgtcccatggaaagaaggaattgacataccagctccaaataatatattgccgctcaagtccaagtaattcaaatgttntaaatcagccaaacaaggacttatctctccac

SEQ ID NO: 16765 - DNA, 389 bp, Glycine max
ttaagtttattaagtgttgatgattataacacatatatatctatatgaattgttaaaataaattacgaattaatagttcaaataataaaattaaattaaaggaaattaatatattaagattcaacgataaatacttttaatgcatttttagtttaattatttattaactatttttaattgaaaaaaatatagtttgatttaatatatacatgttttgtgccatgtaaatattaatattctgtgatgtgtatatttttcataaggtgtcataacatgttgcataggaattataacattgtgattgagattggatgtatgtgataaatcgagtatgtgttgaattgaagatacatgtgtataagatcttgacgcattgagttgtgagctat

SEQ ID NO: 16766 - DNA, 437 bp, Glycine max
  unsure (1)..(437): unsure at all n locations
nttaacccctttctaaatgataggctcaaaattttgataaatattccttttcaaaatggtttgaagagatatgtcttttcaaaaagctttttctgaacttcttcactggtaatcaattacaggtttctggtaatcgattgcattattatattttgaagggtcatgacttttgaatttgaatttcaagagtttcattgctggtaataaattacagacatatagtaatcaattacatgttcaaaattcaaattcaaaacccttttcaacagctatttctcaaacttcccatctagtaatcgattacactgcctggtaatcgattaccagagtcttggatgactttgaaaccctatgttttaaggcaaggcttgatcttgaagaaatcttgaagcacgactctgtttgttgaagcaatcttgtattaatcttgaagcagt

SEQ ID NO: 16767 - DNA, 426 bp, Glycine max
  unsure (1)..(426): unsure at all n locations
tcccactgatgagagtctgctcactcatgttgtcacttttctaatgattntttccccttttggattgacaaatataggttgttttttgtgtatatttcgtctgattggtttgtatcattgatttctctttgcagataaaggatggatttgctgagggcaaggatcttgttgtgtctgtcatgtctgctatgggtgaggaacagatttgcgccctgaaggatattgggccaaagaactagcttttggtgctggcagcctgttgtttctatttaagcaaagatccttttgtaagcctttatattggtttgttcaagacctggcttatggcttatagattctagtcagactagtcttaacaatggtgtttatggatgtggtcacagaaactatatcacattttttctggttttctatgctgtcctatga

SEQ ID NO: 16768 - DNA, 436 bp, Glycine max
ctataaaactcagcttacaaggctgcgagtggggttttttttatcttttcccttatgttatcaaacataaaaagggaaaaggtaatattgtagccgatgctctttctcggcgtcatgcattactttctatgcttgaaacaaaattgattggtcttgaatgtttgaaaagcatgtatgaaaatgatgaaacttttggagaaatttttaaaaattgtgaaaaattttcagaaaatggtttctttagacatgaaggctttcttttcaaagaaaacaaattgtgtgtgcctaaatgttctactagaaatttgcttgtttgtgaagcacatgaaggaggtttaatggggcattttggggtccaaaagactctagaaacattacaagaacatttttattggcctcatatgacataggatgtgcagaaattttgtgaacattg

SEQ ID NO: 16769 - DNA, 432 bp, Glycine max
taggcctagaggggatggaccttttcaggttttggatatgatcaataacaatgcctacaggttggacctcccagaagagtatggagtcagcaccacttttaacatttctaatttaattccttttgcaggtggaactaatattgaggaggaggaactaacagatttgaggtcaaatcctcttcaagggggaggggatgatgcaatcctccctaggaagggaccagtcactagagccatgagcaagaggctccaagaggattgggctagagctgttgaagaaggccctagggttctcatgaacctcagggtagatttctgagcccataggccaaggttgtgtccaattatctttgtacatattagattaagatgtcattatattttgtctttgtatttagggctccatgatgtaggtagggtaccctagaaata

SEQ ID NO: 16770 - DNA, 402 bp, Glycine max
tctgcttctattgctcttcttcatctttacttgggctatctcagaccttttatgtttgttgtctaagattttgcatacacctccttcaaagtgaagtgtgtagcttctctccatcatttgaccaatgcttagaatattttcttttaggctgggaactagtaagacatcatggatgagtcgcatacctttatctgtctccaccatgacagtgcctttgccttttgattcaaccacacttccatttcccagtcgaactttgactttgacagactcgtcaatgcttttgaaaatagtctcatccttggccatgtgattgctacatccactatccaagtaccagcttcctcccttttcttttattgagtcttgagtggcatagaacgtacattgttcttgatcatg

SEQ ID NO: 16771 - DNA, 342 bp, Glycine max
  unsure (1)..(342): unsure at all n locations
agcttcataatgattagatcattatgatgcaatcctatcccccaagggcattggatagaagactccaagaagattgggccagagatgtaggagaaggccctagggttctcaagagccttaggatagattttgggcccatgggtttagtatgagaccacttatctttgtacatattagattaaggtttcattatttttgggccttgtatttagggttccatagtgtagggaggctaccctggtaatataggattttttagcccttgtaatttatggcacctagactagtttttgtattaagggtagttntgtaattttacatgcattaagtgcactatttgat

SEQ ID NO: 16772 - DNA, 400 bp, Glycine max
agcttgtacattcaatttcgagcgttccgatatattacgggactcaatcggacatccgagtaaaaagttattgttgtatgaatccggacatagctgcaacattcaatttcgagattttcgatatattacgggactcaatcacacatccgagtaaaaagttattgtcgtttgaatttgctcagcgcttcggtattcaatttcgagcgtctcgatatattacgggactcaatctgacatccaagtaaaaagttattgacgtttgaatttgctcaaagcttcggtattcaatttcgagcatttcggtatattacgggactcagtcgaacatacgagtaaaaacttattgtcgtttgaatttgctcagagcttcaacattcaatttcgagcgttttgatatatt

SEQ ID NO: 16773 - DNA, 410 bp, Glycine max
tgtcctcggtgacgaagacaattgaataagcctctttttgcttttcacaggcgtcaacgattctcaaaatgaagggtctgtgtttggaagtggcgatgaggtggagaacaacctcggtgtcggaggtagtgttgaagatggacccgctgtcctcgaggttggttcggagggtgcggtagttgacgaggttgccgttgtgggccacgccgacggagccgaagcggtagccggcaacgaagggttgcacgtttttgagcatggattggccggcggtggagtatcggacgtggccgatggcgaggctgccggggagctggtccagcttcgactggttgaacacgtcggaaacgagaccaacgccggtgatggattggaggacgttgttgtgaaccgtaacgattccggcgcct

SEQ ID NO: 16774 - DNA, 432 bp, Glycine max
tctcaaagatgtacttaaccaggtccatcttgttatatttaccaggtggtatggctcagcatgtattgtcttagacggtgggacgcccagactaaagcacaacacgttctttcgagcagggagtagttcatttcataggccgtgaactttttactcaagtagtagacagcgcgttctctcttcccggactcgtcatgttgccccaacatacatccaatcgactcatccaaaatcatcatatacaagatgagaggccttcctggtaccaacgacataagcacgagagggttcatgagacactgtttgatccttccaaacgcctcttgacaatcctcattccaacggacggattggtttttgcgtaagagttggaataacggctcacaattagcggtgagttgtgatatgaatctggcaatataattcaaacgt

SEQ ID NO: 16775 - DNA, 424 bp, Glycine max
  unsure (1)..(424): unsure at all n locations
atgctggtgtaagaaccgtgttttcattttgtttcttatgttgngatccttgatcatcaatcatttctttctggaatagctgatgttcgtgatcggcacagggatatgcgacttgatgttgataacatgtcttatgaggtaaaatctcatttctacatctggatggaaatattaatatatctatacaaccatagtgtcagtttatcccttatatttcaagtcagtgcttcgctttagagagtttctcatgtgacattcgtgactataacaggagttgttggctctggaagagcgcattggaaatgtgagtactggattgagtgaggaaactgtattgaaacacttgaaacagagaaagcactcggctganaaagggcctcagattgatgcagaaccctgttgtgcttgtcaggtaaacctgact

SEQ ID NO: 16776 - DNA, 433 bp, Glycine max
  unsure (1)..(433): unsure at all n locations
tgagcatgtcaacatgaagcatatntcttaactgtcgttaactgatttactaaaaggactacccaagatttgttggaaaactcatcttctttgtgaagcatgttataaagggaaacaaatcaaaactacctttaaatccggagatattgtttccactaccagacctttgcaattgttacatatggacctatttggacctacaagaactttgagtctaagaggaaagaaatatggctttgtcatagttgatgactattctagatacatgttggtatagagaaaacggttataactgtctgtaatttattaaatctataaggtaattgattattgtaacaaagttaccaattagattatctaagtaatcaattaaagtgttcatccaatatatggaaaacaactcaagaacaatgtaatcaattatatgacctga

SEQ ID NO: 16777 - DNA, 400 bp, Glycine max
agctttttatgggagtcaagaaaatgaaagtgctccgaaaccattagctggaaaagaagattatgatcgggtcaactacatcgtaactatctttgggaagacccaaaagaagccatcatctgagctaaacatatggaagaaaaggtcaatattctttgatcttcgatactggtccgatcttgatgttagacattgtatagacgtgatgcatgtggagaaaaatgtctgcgatagtttaattggcactcttcttaacattaaaggctagacaaaggatggtttgaagtgtcgtcaatacttggttgagatgggtatacgagagcagttgcatccgatctcacaaggtccacgaacgtatctgcccccagcatgttagataatgtcaacaaaagagaagtga

SEQ ID NO: 16778 - DNA, 402 bp, Glycine max
  unsure (1)..(402): unsure at all n locations
tagcttctatactttatacaagaatgaagctctgataccacttgttagacgagtggcctcagatatcttatgaagggggggttgaattaagatattccaaactacttccccaattaaaatctatttcactttttattcgagttataaattcccttaataatgaacttcttaaatattgattcaaataaaacaatttgaatatgaatataaagcaataataaacaaaggagattaagggaagagaaaatgcaaactcagatttatactggttcggccacacccttgtgcctacgtccagtccccaagcaacccgctngagagttccactatcttgtaaattccttttacaagttctaaacacacaaggacaatccttcctttgtgtttagaattccattacaa

SEQ ID NO: 16779 - DNA, 428 bp, Glycine max
  unsure (1)..(428): unsure at all n locations
tctggtgggacatcttgacttgctttccaatctgactttcaccacagattctgccttcttctattttcagattgggaatgcctctaacagcacctttgtcaatgattttcttcatgcctcttaagtgcagatgtccaaatctttgatgccatatattgacttcatcttctttggagactagacatgtggaggagtaactggtttcttgaggtgtccataggtaacagttgtcctttgatctgctgcccttcattaggacttcactcttctcatttgtcaccaagcattctgactttgtgaagtttacattgagtccttcatcacacaactgactgatgctgatcaagttcgcagtcagtcccttcaccagcagtactttgttcagactangaagtccttcatggactagctntcccattccagtgatc

SEQ ID NO: 16780 - DNA, 412 bp, Glycine max
tccgcttattagtgcacaactccttctttaatttagcatatcttggaattttctttattgcatccagcagagatatgtttacctctacttttctaaatgtttctaatatctccttctctgcctcttccatttttttgttggaaattgctctttgagggaatggaagagggatatgttgcttttgtaaattagaattaccagtggaagattcacctgcatagaaattgttaggtaacttactctttaaatttttgtcatcatctttttctggagtagagtgaggttgggtaggttcatttgcggatgaggaagatgctactggttaaggtccttgacactgctttcctgacctcaatgtaatggcactcacatttttgggattctggacagattgagaaggtaatcagtcaga

SEQ ID NO: 16781 - DNA, 428 bp, Glycine max
  unsure (1)..(428): unsure at all n locations
tataagaacaaaatngcctaatcattttcttttgtatgtgaattacgacgcatcaaaaagaatcaagccaaggctattgtgcaagcaatcaatggggcaaaacacaccaaattattatgatgatggatggctcaaattctcacaaaggtaaactcatcactttcaaattgagctttcaaaactatcatgacatgtagagaagaatcaaggatttctactgtggcatttagttttggggtctagggtggggtagtgaagtgagtcataccatgatggttcaaatagattttttacttaatagattcacctccattattagagtaaaatgagacaagtgaggtattgaaatatttttcatgcaagactctaaattttggaaaaatagaagagacatctaatttattctttaatggatacaaccaacaata

SEQ ID NO: 16782 - DNA, 439 bp, Glycine max
tgtgcatccaatagcttgatgaggatgtcccttatgttcttaaaactagactgatccatttgcttccaaagtttcatggccttgcaggtgaagacccgcacaaacatctgaaagaattccatattgtctgctccaccatgaaacccccggatgtccaggaggatcacatatttttgaaggcttttcctcattctttagagcgagtggcaaaggacttgctttattaccttgctccacgatccatcacaagctgggatgacctcaaaagagtattcttagaaaaaaaatttcctgcttccaggaccacgaccatcagaaaggatatttcaggcattagaaaactcagtggagagaacttatatgaatactgggagagatttaagaagctatatgccagttgcccgcaccaccagatttctgagcagcttcttctccaata

SEQ ID NO: 16783 - DNA, 337 bp, Glycine max
cagtttttggtagacctacactagcggtgatgcactacgaggttgatcctaatgatcctgatccactcaaggatttattacggctacgtgatcaacttttgagcaagctgaaaagtaatttactaaaggctcaacaatatataaatatgcgagctgattagaaaataagagatgtgccatttaacgctggagatatgattttagttaagctacagccttacatgaaacaatcagcggctttgaggaagcatcagaagctatgcatgcgctattttggtgcgtttatagtgattgaaaaaattggtacgattgcatataaagaacaactgcctgagtc

SEQ ID NO: 16784 - DNA, 441 bp, Glycine max
  unsure (1)..(441): unsure at all n locations
ctcagctgaccagaattattgatgggtaggtgtgaatttttttgttcctgttgcggagatgatcgtacagcgggtgaaccataagcggaagtttcttttggtgaggtagccatggaaaagcatagcgtttggaatgatttcgtatatctcagaaggctattgggaaatgctggttaaaacacgaatgccaagcagatataaattttaatgaagaatgtatatgggcgtgtgacgcaacggtcgaatttgctttgcggtgaacgtgctattaatgttaagtgattcgtttgggcacgttcagattgcagtagctgctataatttctctagcagacaaatgcccatcttgcccctcagtttttcaaactgattagcatccaaagcctttgtgaaaatatctgctattngctgctcagtgtcaacatgctctagtgtgatcact

SEQ ID NO: 16785 - DNA, 394 bp, Glycine max
tttcttatgctgcaaacatttacaatagacctcctcaacctcagcagcaaaatcaaccacagcagaacaattatgacctctccagcaacagatacaaccctggatggaggaatcaccctaatctcaaatggtctaaccctcaacaacaacaacaacaacaacaacagcctgctccttccttccaaaatgttgttggcccaagcagaccatacattccttcaccaatccaacaacagcaacagccccagaaacagccaacagttaaggctcctccacaaccttccctcgaagaactcgtgaggcaaatgacgatgcataacatgcaggttcaacaagagaccagagcctacattcagagcttaaccaatcagatgggacaattagctacacaatt

SEQ ID NO: 16786 - DNA, 395 bp, Glycine max
ttgcttttcactttataaagggagagtttagtatgaattttgatgataccatctgatgtaattctaccccccaagggtattggataaaaaacttcaagaagattgagccagagatgtaagagaaggtcctaggattctcatgagccttatggtagatttcggacccatgggctaagtatgagctcacttatctttgtacatattagattaaggtttcattatttttgtgccttgtatttagagctccataatgtagatagggtaccctagagatataggaattttcaacccttgtattttaaggcacctagactagtctttgtattatgggtagttttgtaatttcacttgcattaagtgaatatttgatgtgtgtgttgggaaataaatttaat

SEQ ID NO: 16787 - DNA, 393 bp, Glycine max
ttgcttgtttagtgattttaagcttttccttcaagacatatgcactttgtccctccacttgagagttctgccatatctctttgactacctcatgaaaagatggatcttataaccaacaagtgagcattctaaatggttctggaccccaatcatagttgttatttttaaccaagatagggcaatgatccgaaacgtctctatttagaacctcctgtattaatccttgccaaacatctagccaccccttagtgcatatgactatatcaattcagcgtttagctccccatttatacaataccaagtgaatttgtggttgatcatatgaacatctaaggatttcaagttttcatataggcattgaattcctctatttcctatgtcaactatttctac

SEQ ID NO: 16788 - DNA, 377 bp, Glycine max
  unsure (1)..(377): unsure at all n locations
agctttcttggaaaatgttattgttttgaaggcaatgcttagaggctttgagatggcctctggtctgaaaatcaactatgctaagagtcaattcggaatttttggagattatgttaactggtctcaagaagctgctcactttctgaactgtagacagatggagattcccttccactacttgggcatccccatttgggtcagatcctcaaatcaggtggtatgggagcctttgatcagcanatttgaagctaaactcactanatggaaccagaaaagcttatctatggctggcagggttaatctgataaattctattttgaacgctntaccaatctatctattatccttctttaagttaccccaaagaatagctgata

SEQ ID NO: 16789 - DNA, 443 bp, Glycine max
tgcgtcacaattcattgtgacagtcaaagtgccattcacttagcaaatcaccaaatgtaccatgagaggacaaagctcatagatgtgaaactacacttcatcagatatgtgattgaatctgagaaggtgaaggtagagaaggtttcaacataagacaacccgactaatatgttcacaaagatcctctctagtgtcaagttcaagcactgcttggacttgataaattgtgaagatgcctaaagcacattggttgaagtgcagccttgaatcacaaggtacacacttgctgatttagagtcaaagtggagatttgaggtgtgtgactcagaatcacaaatgacacaagtgataatactatagagtaatgatgtcataactgttttcacttattataactgaattgggtttggcaccaaagcatagctagagtgttcatatatatt

SEQ ID NO: 16790 - DNA, 393 bp, Glycine max
agcttgtatggttaaagtctcacgattgtcacgtgctcatgcaacaattgttagtcgtggctatacgagacatcttgccaaacaaagtaaggttagcgataactcgcctgtgctttttttttccatgctatatgtagcaaagtcattgatcctgtcaagtttgatgagttggaaaatgaggccgcaattatactgtgccagttggagatgtattttccccctgctttctttgacatcatgattcacttgattgtgcatcaggtcagagaaatcaaatgttgtggtcctgtttatctacagtggatgtacccgattgagtgatacatgaagatcttaaaagggtatacaaagaatctatatcgtccagaagcatctattggtgagaggtacatt

SEQ ID NO: 16791 - DNA, 424 bp, Glycine max
  unsure (1)..(424): unsure at all n locations
tgttgtcattaaatcttacatgaattgtctcttccatagtcaaggtttntgatttgtacactctatatgccttggatgattcaaagtatccaatattccaaaatcacattttgagtcaaactttccaaggttatccttggtgctgaagatgaaacactggcatccaaatgggtgacagtcataaatgttgggcttatgtccctcccacaatacataggaagtcttttttaagattgaccttatataaattatgttctgtaaataataagcagtgattgctgcttctgcccataagtgtttcagagttaagtagtcgttaagcattgttcttgccatttcctgaagagatccatttttcctctcaacaactccattctagtgggatgttcttggagtacacaaattattataataccattctctt

SEQ ID NO: 16792 - DNA, 243 bp, Glycine max
agcttgtatgctaactggatgcattggttaacttggtaacccaactggccttgaaccaaaaatctgtacctgttgcaagggtctgtggtttgtgctcctctgctgaccaccatacagacctttgcccttccatgcaacaacttggagcaattgagcagcccgaagcttatgctgctaatatttacaatagacctcctcaacctcagcagcaaaatcaaccacagcagaaaaattatgacctct

SEQ ID NO: 16793 - DNA, 386 bp, Glycine max
  unsure (1)..(386): unsure at all n locations
ttgcttgtgcatccaataccctgatgaggatgtcccatatgttcttaaaactggactgattcatttgcttccaaagtttcatggccttgcaggtgaagacccgcacaaacatttgaaagaatttcacattgtctgctccaccatgaaacccccagatgtccaagaggatcacatatttctgaaggcttttcctcattcattagagggagtggcaaaggactggctgtattaccttgctccaaggtccatcacgagctgggatgaccttaagagagtattcttagaaaanagtttccctgcttccaggaccacagccatcaggaaggatatctcacgtattagacaactcagtggagagagcctgtatgagtactgcgagagattta

SEQ ID NO: 16794 - DNA, 392 bp, Glycine max
  unsure (1)..(392): unsure at all n locations
ttttgcaagcttggagggtatccatggatcttgaagcatttttcctttgtgtgtccatggatgttgcaatgagagcaaaacggtttatccttgcgagtaggttttcccttggcattggattgggttacaacacaagccatttcagcaggaggagcataattgggttgaacaccaacaagcctatgagtttcatcttgaagaaataatgagaaggtatcatcaatattcggagtcggtttcatcaacaatatttgacctcaagcatgggcaaaactctctttgacccccatcagaaatgacatgacaaattccnctttgatggaagcaagaagtggagcaaccctgccacaattacaactatgattggccttgagttcacccagcttagccca

SEQ ID NO: 16795 - DNA, 383 bp, Glycine max
  unsure (1)..(383): unsure at all n locations
ttgcttttatcttacaccaccaccgccgccatcatcttagaattatattttaatattattattactactttgattttcagccttgtattttggttatattattatggtatttgaacaatttactatttccttatttgcatggtatgtttggaccaatattaagtatgttatttgactatgtgaagtttataattaatctattcatggttgcttgcttcatggttttcatggttcttgcttcttgcttcatgatttggttgatattttttcatgaacattgtatgaatgtttagttatattntaatacgcactttcgctttttgttgatgccaaagggggagagaaatgggattaaatcaagaactcacatgagtaattaattt

SEQ ID NO: 16796 - DNA, 376 bp, Glycine max
tgctttcaactgaatttacaacgttctaattaatttcaaaatggtgtaatcgattacaatatattggtaatcgattaccagtgtgtttgaacgttgaaattcaaattcaattgtgaagagtcacatcctttcacaaaaatgttttgtgtaaacgattacaatgatttggtaatcgattaccagtgataagttttgaacaaaaatcaaaagatgtaactcttccaatggttttcaagtttttctaaaggttataactcttctaatggctttcttgaccagacatgaagagtttataaaagcaagtccttaacttgcatttttaagaagaacaatcattacaatcctttacaatctttgaatctctttgaacatcttc

SEQ ID NO: 16797 - DNA, 411 bp, Glycine max
tcagaaccacttcagaataaagcatttggcattcccagaccacctggtcctacaagatctgttagcatggacctctccaaggcaccactggaatcagcttcatctgttgatctttttcagttaccagcagcaccatctcaagctccaacattggatttgtttcaatcatctctttcatcggcagatccatctttcaacgagaatcaacttagtcaaacatcccatcttgcatctattgattttttttccgatttttctccgcagccttctactgtaacctcagatgggaaggcactggaattatctgtccctaaaaatgaaggatgggcaacttttgatatgcctcagagaacctcctctactgcacaagtggaaattccaaccactgtaccctcaaatgctaaatcttta

SEQ ID NO: 16798 - DNA, 384 bp, Glycine max
  unsure (1)..(384): unsure at all n locations
agcttgcagagaaaagcagcatggttgtgatctgtggtgggatcaacaacaaattagctcagttgttgcacaacatatgtaatgtctggccttgtgttggtcaaatagatcaacctccctattaatctcctataagaggaaacatcttctgctgaaataggtgaccctgagtgttgatgcttggtggtgtaatcacaaggtgtagaaactggcttagaaccaagcatgtcaacattattgagaatgtccagtgcatactttctttgatatagatttataccaatagagcttctagctacctcaaaccccagaaagtacctaaagtctcctaagtccttaattttgaaagcattgtcaagtagatntgtaattctttgaatttta

SEQ ID NO: 16799 - DNA, 420 bp, Glycine max
  unsure (1)..(420): unsure at all n locations
ntgtcctttggaaggtgtgatgttntattagggacttctgaaggtttttgaaagcttgaaaacgtagtgagtttagtctgttttcgttccatcaatgaagtatcacgcctaagatgggaagttgttgcaggagcacggttttcaccacctgaagtaccagctgcgaccatagccaatgccattgaagcaggtggagatgcaaaagcagcagcccaggctggagatatcatagcatgggcggcctgaaagaaatatcagttaacagaagtagcataacggaacagaaaataaaaatgactatgctgatacaatgaactaggacaacccattcccattagaatataaatacttttagaaacactattcattcaagtcaaattacatatttgcccacattctcttgttatttatcaagctaaa

SEQ ID NO: 16800 - DNA, 444 bp, Glycine max
tgcatgcatctgcatcccttaaaatcatgttaactgcatagattttctacatctaatatccagtcgtgtcgatttgggatgactgaccctctcgatgagtcgatctcttgctttctcataagggtgaacccttgggtactagtaccctcacctccagaggactacatgtcctcgccttcagagggccacacgccctcgccttcaaaggacttcacgtcctcaccttcagaggactacacgtcctcgccttcaaagggtcatgtacctttaacttcagaggactacacgtcctcgccatcaaagggtcatgtaccttcacctttgtagggcaacacgccctcaccttcagaggactacacgtcctcgcctttagagggccgcacaccctcgccttcagaggactacacgtcctcaccttcagaggactacacgtcctcgccttca

SEQ ID NO: 16801 - DNA, 439 bp, Glycine max
tctcttttcttgtttaatgattatattttgcttctaatccttgtatttgggtatgttcttatgacatttgaatacttagtatttcttttattattcgattagtatgattgaacatgatgattatatttacttgctcttggttgtttatggttatgagttttaaactcaattattttgatgatatatgattagtggtatgtacttttatttggctattatgaatgactttctggattatatgacattctatgaagtattatatttctagtgtgatgaatggttatgtttgattgttttctattctcgtgtatttggctatattattatggtatttgaacaatttactatttccttatttgcatggtatggttgaacaagtatgttatttgattatatggatttcatagttaataataaactaaaattcacgtagaattac

SEQ ID NO: 16802 - DNA, 391 bp, Glycine max
agcttgtgagcttaagttaaaaaaaagatgttgaagaagttgacttgactatcaagtacaagaaaagcttttggtctagtgataagcacttgattccaagtgtttcaccaataaatgacaagagtttcataagtccaatttcatgatcaagtaaaaggcttacagttttcccatttgtggtaatgatggtgacatttttgccattgatttgtgtcacctctccatcaatccatgcatcctcaggatcctcaacccaaacctgtgatccaacgatgatgttcacaggtgttccctgaaccaatcacaacaaggcaagaaaaagtgttactgttaacacatgatctgacagcaaataagtgggaaggatccaacaacaaccaacatacaacac

SEQ ID NO: 16803 - DNA, 432 bp, Glycine max
tatcacataaatagcttcactaacattaattgtgattctattttattctttattacatattatataaattaatgtgtatttaaatggtaattaaatgtttttatcaattgtaattacatggagataaaggaagccatttcaaattaaaaaatttgaaatgatatgttttgtttttaatgagtaaacaattaatgaatttgattttcacatatcttctaattattactataaatagagaaccaattcatataacttattatcatttctttgtattcatctagtcgattttgacacattgacatatgatgacaagtgtaagatcatattctaaagaaaaaattacacaaaattgtacttatatgtcaatcctggatctataaggattttttatataatgaatttaatcttttattcttaattactataatcata

SEQ ID NO: 16804 - DNA, 305 bp, Glycine max
agcttgtacttgatcttggattaatgagctgaatcatagctaacattaactaatcataattagagaaactttcgctccaaaatttgcctccaaaaattcaatttcaaattcaagtgaaatttgaatacaaattcagatttccctccaattttgtgtgacacttacgctataaatagacgccatgcgcgcgcatatgttcgactgcgatcatttgaaaattacacttcaaatttctgaccttattttaagcactcattgcgcgtcgttctattctctgccttattcaacttcttccacatctaccc

SEQ ID NO: 16805 - DNA, 442 bp, Glycine max
aagctttagaattataacataagaactgtgattattgaagaatctatccatgttgtttttgatgaaattgaccctatatggccaagaaaggatacacttgatgatattgctgatacattagacgacatacacattgatgagaaagggcatagaggcaaaggaaatggtaatgaataagactgtcatattgatgaaaataaaaaaaataaatatagatcttccaacagagtggagaacttcaagatatcatgctcttgataatatcattggtgacatctcataaggggtaacaacttgacactctctcaaagatgcgtgcgataatatgactttggattccttaattgaacctaaaaatttatatgaagccataattaatgaacactggattattgctatgcaagatcagttatatcaatttgaaagaaataaagtctgggaa

SEQ ID NO: 16806 - DNA, 385 bp, Glycine max
agctttttattaattacactcatactgtaatcgattactagaggagattgtcagaaaatattctcaacagtcacatattttcagttggttcttgaatggccatcaaaggcctatatatatgtgacttgagacacgaatttgaaaaaaagagttttcataacaaaaaggtattatcttcttaaaaagcaaaatcattttatcctctttcaagagagatatcttcttctcttcttctttattaggaaaagggattaatagactgatggtctcttgttgccaagaaatctgaacacataggaagggttggccttgtgtggtggagatcttgtagcaggctgtcacaatatagtggaactctcaatcaagttgtttggggactggacgt

SEQ ID NO: 16807 - DNA, 384 bp, Glycine max
agcttattcacatgaaacacaaggcatatttatgtctctggtgagcctaagctcttcgctctagaggacacgaagctgtgcaaggaaagcagcacatagatccaagaaaagaaactgtggaccctgcaccctttgaagatcaagcagatacttttcttcccgggttttgtaaagctgttgatgtgactgtaagaattagagaatattctggaaaagaattataactacccaataataacagaagaattagtttattgagacaatctgtcttataattggttataacactgtaaagaaacagcaatgatttacacgtgtatactgtctagtattataaacatggagggagggaagcaaaataatcagaagactatttagttatta

SEQ ID NO: 16808 - DNA, 402 bp, Glycine max
ccttctcagcccacgcattcatagtatattgatcattaatattcacacaaataacagaatctatccccttagccttaaacttatcaatattctccttgtaaggaggaacatgtttgtttgaacaaactcctgtgtatgcaccctgagagaaagccaaagcaaaaaatacattactatggaataagtctataacaaaaaaaaagtaacacatttctttcaaacaattccatttcctataccataagaagcattcattcaaccacataaaatagtaccaaattttacaaaacaagaccaacaaacaccaaagagacaccccaaaacatatcaacatatcaaaaaaaattgcaagttaaacttactgggagcccaaagatgacaactttcttgtcctgaaacatg

SEQ ID NO: 16809 - DNA, 367 bp, Glycine max
  unsure (1)..(367): unsure at all n locations
agctttatctntgtccccaaggcttcatgtagacttgtccaaaatcgcgaagtgaacctcggatccctgtcagatacaatactagaaggcattccatgcaaccttaccacttccttgatgtacaactccacgagtttctccattctatacttcatattcaccggaataaaatgagcagatttggtgagtcgatcagctatgacccacacagcatcatgcccacgactagtcttgggcaaactagatacaaaatccatagatatgctctcccatttccattcccgaatttacaatggcttcaattctcctgatggtcgctggtgctcaaccttagccttttgacatgtcaaacatcttgctacatatt

SEQ ID NO: 16810 - DNA, 394 bp, Glycine max
tcttacatagtccgtctttgcttgaccttctttatgcttaaaaacagaaacattaggcatatgcaaaagatcaagaggagttagtgggttaaaaccataaacaacttcgaaaggagaacaattagtggtgctatgaacaactctattgtaagcaaatgcaacatggggtaaacaagcttcccaagtttttaagttcttcctcaaaactgtcctaagcaaagttcccaaagtcctattaacaacttccgtttgcccatcggtttgtgggtgacaagtggttgaaaataacaatttagtgcccaacttgctccacaaagtcctccaaaaatggcttatgaacttagagtccctatcactaacaatgctccttggcaaaccatggagtctcacaatc

SEQ ID NO: 16811 - DNA, 399 bp, Glycine max
agcttgtttgacagccaatttgaggggaactgagcggttttgacgcttcattaaaaattgtcgaactgaaccacctttggcatactcagatacaatgcaccataccattggcttgcggcatgcaccaatgaaacgaactatgttagaatgctttagtgtggccaacattgtgacctcctgctggaactgttgttccatcaattgagcctttgctggatcattttcaggcctctccaagattttgattgcaacatcttcaccattgtaagtacctcggtaaagtttcccaaaagctccttgagcaaaaggctcacccatattcagtttcctgatatcaattgtccactcatcaaaattgtcaagcccttcagtcggagaactattgtccattatagcttg

SEQ ID NO: 16812 - DNA, 449 bp, Glycine max
tcaagcttggtatattgatgctgatggtgtagttcagttgaaagtactagcagcctgtttgattgacacaggcgatgaactccttgtcactgaattaatgtttaatggtgaatcaatatttgtttcccaattatagtttacatttcattatgttttgtaacctgtttttttcccttcatttcccctccaccattaggtacttttaatgaccttgaccatcatcaagttgctgcccttgcgagttgtttcataccaggagataagtcaactgagcatatacaactgagaacagagcttgcaaggcctctgctacagcttcaagatagtgcaagaaggatagctgaggtaggtgtttgttcacttaacctgaatgtatcttctgaattaaactataaatggtatcacccttttgtcacagatacaacatgaatgcaaattggatataaatg

SEQ ID NO: 16813 - DNA, 449 bp, Glycine max
  unsure (1)..(449): unsure at all n locations
ctcaagcttgaaggtgtatagcccaccatctttntatactggtaatgtgtctactatcattatcatcattttttctccgtcattgaggtgccacttgaactgctaggtctctccacctttgggcgtattcttttgaaagattcgtgccccctttttgcacatgttctgtagttgcatcctatcctaagacatcatattgacactgcttaacgaaggcaaccactangnccttccaagaatggactcgggaaggttccaagttagtgtaccaggtaacagctaccccagtaagactttcttggaaggaatgtatcagcaattcctcatcttttgcgtatgcccccatctttcgacaatacatctttagatggttcttgtggcaagtagtccccttgtactcgtcaaagtctagcaccttgaacttgggaggggtgatgatattgggtact

SEQ ID NO: 16814 - DNA, 428 bp, Glycine max
ctcctacaatagaggaaacacaaaatgaatttgaagagaattcaaattgcacctctgatggaattcaagtttccataggtgaggaaaaaacacccaattgcacgatatgtgaaaatgaagtggatggcggaaaaataaaaatatgtggccatcggttttgctccaataaatactaccatgttaggtgtctaacaattaatcagttgaagtcatatggtcattgttggtactgcccttcttgtttatgccgggttagcttaactgatcaagatgatgatcggattgttctgtgtgatggctgtgatcatgcatatcacatatattgcatgagacctccgcggacttctattccaagatggaactggttctgcagataatgtgatgctggaatacaagcaatccaccaggctaaacacgcatatgagttc

SEQ ID NO: 16815 - DNA, 418 bp, Glycine max
tgaatcggacatccgtgtgaaaagttatgaccatttgaatttctcaagagcttccgttgttcaatttcgatcctctcgacatattatgcacccgaatcggacatctgtgtgaaaagtcatgatcatttgaatttctcgagagtttccgatgtttaatttcgagcgtatcgatatattataaccctgaatcggacctcagtctgaaaagttatgaccatttgaatttgacgagagcttccgttgttcaatttcgaatatcactgtatgtgatgcgcctaaattggacattcgagttaaatgttatgaccatttgaatttctcaagagcttccgttgttcaattctgagcgtctcgatatgtgattcgcctgaatcggacatccgtgtgaaaagttatgaccatttgaatttctcaagag

SEQ ID NO: 16816 - DNA, 441 bp, Glycine max
  unsure (1)..(441): unsure at all n locations
ntgtgcgatgtctatccatcattaagcggaaaaatcaggaaaaaatggtgatttacacccgattgagactacctcattcataagcacttgtaagagaagaaaataagaaagtaaaatgagtaaaaatcctcccataagttagatgagacaacttttataagagttaagtacataagttgatccaaacagggttttaggggaacttcaaataggctcaacaaaactaaatgcaacagctcacaaaaagcaccaatgtagagataataatggaagcgcatctcaccagaacatgtagagataataatgtacaatgcacaaacaacaccaagaaacctgcaattaaaaaccatcaaaacccaattgattctaaagaaatcggataaaagttagaccatcaataaaattttaaaaaagggaagcaaaagtcaaaacttttccatt

SEQ ID NO: 16817 - DNA, 400 bp, Glycine max
agcttatgctgcaaatatttacaatagacctcctcaacctcagcagcaaaatcaaccacagcagaacaattatgacctttccagcaacagatacaaccctggatggaggaatcaccctaacctcagatggtctagccctcagcaacaacagcagcctgctccttccttccaaaatgctgctggcccaagcagaccatacattcctccaccaatccaacaacagcaacaaccccagaaacaaccaacagttgaggcccctccacaaccttccctcgaagaacttgtgaggcaaatgactatgcagaacatgcagtttcagcaagagaccagagcctccattcagagcttaaccaatcagatgggacaattggctacccaattgaatcaacaacagtcccag

SEQ ID NO: 16818 - DNA, 435 bp, Glycine max
tctggaaaattgaagttcgtttttataaccttttcatgtgaactttcaaacatattattgagctcatttacactaatttaatgtagttcaaaatttaaacacatgatttgagattttagaaatgatattaattcgtatttagtaatgaatatcatgtttcgtaactatattagctcttatatttcatatttatattttctattattcctttgaaacaatttatacttcaatgttgttctgagactcctcaaatctatttgtgctgcaatagttcaactatttcatttgaactggattggtgtagttggtatgaaattggtttacctgaattcgttacaaataaagtagaaaatttatatataaattgttggatggattttgttggacaattgtgctataagtagtacatatacatgatcaaacaaaacatgataa

SEQ ID NO: 16819 - DNA, 422 bp, Glycine max
tgtactcgaagccctctttttaaggctgaggctccacaccgccagcggatactagctgctgagtctgctatcttcaatcgactttttgtggagcgggcatacaagtatcgccctgttaaggtggtggaatttgaacttccgcggcagcagtgtgtggtttacttggatctgaagcgggaggagtgcaccaatttgttcccatctggccgagtatattcacaggcattccatttaggtggacaagggtttttcttatcagcacattgcaacatggaccaacagagctctttccattgctttggcctgtttttaggaatgcaggaaaagggctcagttagctttgccgttgactatgagtttgctgctaggtcaaggccaacagaggaatttgttagcaagtacacatgcaattatgtattcac

SEQ ID NO: 16820 - DNA, 389 bp, Glycine max
tagcttatgctttgaaaaaagtctaagtgagtctaccttgtatgtcaagaagagggatgttggaatagtcattgtttccttgtatgttgatgacttacttatgacaagaagttcaaaggagctgattgaagagttaaaaggaggaaagaaagaagcctttgaaatgactgatcttggaaaaatgttctttttccttggtatgcaggtgcaacaagatagaggtgaagtctttgtaagtcaagaaaaatatgcaaaggaaattcttagaaagttcaagatggaggaatgcaagccaattgcaacgccaatgaatcataaggagaaattcagcaatgaagatggagctgataacgttgatgaaaaactgtacaaaagcttaatatgatgtc

SEQ ID NO: 16821 - DNA, 411 bp, Glycine max
tcttagtttcaatgatgcagatgagtttgtggctacttcatgcactcctctaatgactatggcatcatttctggctctaaactgttgagagttggaaaccatattctcaactaaatttctggcttcagcaggggtcatgtctccaagggctccaccactggcagcatctatcatacttctctccatgttactgagtccttcataaaaatattcgagaagaagctgcttagaaatctagtggtgagggcaactggcgcatagttttttaaatctctcccagtattcatataggctctctccactaagatgcctaatgcctaaaatatcctttctaatggtcgtggtcctggaagtatggaaaatttttttctaagaatactctcttgaggtcatcccagctcgtgatggacc

SEQ ID NO: 16822 - DNA, 376 bp, Glycine max
  unsure (1)..(376): unsure at all n locations
agctttaaggtcaagagggctgaaggatgatacaacttgcctcgttgtagatattattccttcagatcatcccgtgttgccaacaattccaagaaagaaacgtaacgtgctaacttcccttctctttggaaagaaatctcaaaactctacaaacaaaggcaccaataagctttcttctgttggtgttgtggaggaattatttgaagagggttctgcaatgcttacagagaggtaactgggaccataactgctaaatttatatttgcatgatgtcatttgaagtttaattggtcaccatcatggtggaaagagagaaaaaatgantcctttttcccaatacatctatctttgattctntaaatttcggacttaaaat

SEQ ID NO: 16823 - DNA, 455 bp, Glycine max
  unsure (1)..(455): unsure at all n locations
gtaggcctaggatcttcttcatcaatggattcctttgcttcttggaagatgtatggcagcgtaatggagaaggaagagagagaggagacgccacttcaaggagaagatgagtctagaagaagctcaccaccataggaggccatgaataagagcttggaggaagaagaagatgaatgaagggagaggaagagaagagcacgaaattttgtgctctaaaagagctataaaatctgaagtttaattttcaaatgatcaaagttgaaaaaatgcacacacatggtctctatttatagcctaagtgtcacacaaaattggatggaaatttgaatttctattcatatttcacttgaatttgaaattaaatntgtggagccaaaatttcactaattatgattagtgaattttagctatggttcagcccactaatccaagatcaagtccaagaatctccacta

SEQ ID NO: 16824 - DNA, 402 bp, Glycine max
  unsure (1)..(402): unsure at all n locations
catgttgncttggttttaaatttcgagcgtctcgatatatgacgggacttaatcggacttccgagtaaaatgttattgtcgctcgactttgctacgagcttcggttttaaaattcgagcgtcacgatatattacgggactcaatcagacttccgagtgaaatgttattgtcgttcgaatttgctacgagcttcggttttaaaattcgagcgtctcgatatattacgggactcaataggacttcccagtgaaatggtattgtcgttcgactttgctacgagcttcggttntaaaattcgagcgtcacgatatattacgggactcaatcagacttccgagtgaaatgttattggccgtcgaatttgctacgagcttcggtttaaaattcgagcgtctcgatata

SEQ ID NO: 16825 - DNA, 365 bp, Glycine max
atatatcgacgtgctcgaaattcaaaccgaagctcctaagcaattcgaacgaccataactttgactctgaagtccgattgagtccccgcatatatcgagacgctcgaaatttaataccgaagctcggcgaaaattaaaagacaataactttgtactcggatgtccgattgagtgccgtaacatatcgagacgctcgaaatttaaaactgaagctcgagaaaattcgaacgacaataacttttcactcggaagtcagaatgagtcccgtaatatatcgaacgctccaaatttaaaaccgatgctcgcggaaattcttacacaataacttttcactcgaagtgcgattgagtcccgcaatatatcga

SEQ ID NO: 16826 - DNA, 386 bp, Glycine max
cgacactatgaaactcagctttgacgatatgttagaactgcttttgttgttacactccaactggtggagaagcatgccagaaataccgaagtatttatatgcgtcctcagggtctatatatcagtttgaaggagaagtaagcttttttcatggcactgctctttatgttttttctcttggctttgagaaaatactaagtatttgaattcttcagaggcaagatccttgaagtactgaaaaactggccagaaaagagtattcaagttattgttgcgactgatggtgagcgtatattaggacttggagatcttggttgccaagtaaaatatagtgttagtctcctatatctgcattacacacagagacattagagtaacataattttt

SEQ ID NO: 16827 - DNA, 404 bp, Glycine max
  unsure (1)..(404): unsure at all n locations
agcttgtgagctnatgntaaaaaaaagatgttgaagaagttgacttgactatcaagtacaagaaaagcttttggtctagtgataagcacttgattccaagtgtttcaccaataaatgacaagagtttcataagtccaatttcatgatcaagtaaaaggcttacagttttcccatttgtggtaatgatggtgacatttttgccattgatttgtgtcacctctccatcaatccatgcatcctcaggatcctcaacccaaacctgtgatccaacgatgatgttcacaggtgttccctgaaccaatcacaacaaggcaagaaaaagtgttactgttaacacatgatctgacagcaaaaatgtgggaaggatccaacaacaaccaacaaacagcgcagagaagactcct

SEQ ID NO: 16828 - DNA, 401 bp, Glycine max
agcttgcatcatatgctatcgacaataacatttcactcggaagtccgattgagtcccgtaatatatcgagacactcgaaatttaaaaccgaagctcgctgcagacgctaacgacaataacatttcactcggaagtccgattgagtcccgtaatatatcgagacgctcgaaatttaaaaccgaagctcgtagcaaattctaacgacaataacatttcactcggaagtccgattgagtcccgtaatatatcgagacgctcagaatttaaaaccgaagctcgcagcaaatgctaacgacaataacatttcactcggaagttcgatggagtcccgtaatatatcgagacgctcgaaattaaaaccgaagctcgcagcacatgctaacgacaataacatttcactc

SEQ ID NO: 16829 - DNA, 415 bp, Glycine max
  unsure (1)..(415): unsure at all n locations
gagcgtctcgatatgttacgggacttcttcggacttccgagtgaattgttattgtcattcgaatttgctacgagcttcggttttaaatttcgagcgtctcgatttattaggactcaatcggacttccgagtgaaaagttattggcgntcgaatttgctacgatcttcggtttgaaatttcgagcgtctcattatgttacgggacttaatcggacttccgagtgaaaagttattgtcgtttgaaattgctacgatcttcgattttaaatttcgagggtctcaatatgttacgggactcaatcggacttccgagtgacaagttattgtcgttcgaatttgctaccagcttctattntaaatttcgagcgtctcgatatattacgcgactcactcggaatttcgagtgaaaagttatt

SEQ ID NO: 16830 - DNA, 421 bp, Glycine max
  unsure (1)..(421): unsure at all n locations
agcttcattgtgatctttttctattgtagaaattgatcactcccactaatcaagtcattctcaagaaattntgcgtttcttgattcgacaaccctagtgctatgtgatggacaatagaatctataccctttggactttntagcatatccaatgaaatacccactaatagtccttgggtctagtttcttctcttgtggattataaactctcacttcagatgggaatccccaagcgcatatatgtcgcanactcggtttccaacctttgaataactagaaaggtgtctttaagacagccttggttggaacccggtttaatatatatacaaccgtctttaatgcttcaatccacaagaattgaggaagttntttattacttctcatactttntatcatgtccattaaagttcggtttcttcttt

SEQ ID NO: 16831 - DNA, 397 bp, Glycine max
tgagaaccataggccggtgtctatgggtcctttgatattatgaacaatccactttgcatccttgagaggagtactcattacagtctccatgtatcaactgatgactccagcagcatataaaacgtctagtcttgtgcacatcatatcgtaaactacccaccaaactcttgaactttgtatcatccacctttcctgcttgatcgaactttgataacttatttctgcactcaatcggtgatccaattggcttgcaagcatccatcttgaatctattgagcatctggtgtgtgacatagccctttcacacttacgagatggcaaagtggctctgtgagtgggcgatgacgatggtgagagctcttgctgaacatgttgaggtgtcttatcttcttcaagt

SEQ ID NO: 16832 - DNA, 433 bp, Glycine max
  unsure (1)..(433): unsure at all n locations
tctagcgtacccgctatnggtgctcataanatcccaaattcaaatccctcttattactagctattttgaattctttagttcctgaatgtacaaccttcaaattgttactcgttcccgtatttgttttctgcaaaaaagaaaattaatctgaaacaattcaggctgaattgttatcgttattattactcgaaccataaggaataacagctaaacaagtaatttaaaatgtaacttttaaattatgtggtatttttttaattacaattttacttcaatatctaattttgttaatctacttaggtcgttgtttaaatataaatatgaatttaaaggtgatctactgataatataaagtacttgctaatcacaaattatgatacctatcattntcaattntaacttaattntataaatattaataaatgtataataa

SEQ ID NO: 16833 - DNA, 434 bp, Glycine max
  unsure (1)..(434): unsure at all n locations
ntgtacggccttaagcaggcccccaaacaatggtttgaattactgcaatctactatcttcaagccctttgtgatgcaaactgggcatcaaatgttgatcactgaaggtgaatttcaagttttgccatatatttgggcccttatcatatatcttggtggacctgcaagatcaagtgcaaaggcaaaatatcgtagtttggcataaactactatagaattatcctggattgagaccatgtttaatgagttgtaagtttccttcaacacactcattgtattatgtgacaaccaaagtgttgttgctcttgcccactaaagttagttattgacaactgttgacacctaactcaatagattggtaacacaaaaattagtaccctaagaataaaagaatattntaatntggtatttgttcaatgaaagagtaaaatatag

SEQ ID NO: 16834 - DNA, 401 bp, Glycine max
agttttatatttcaatttcgagcgtctcaatagattacgggactcaatcagacatccgagcaaaacattattgtcgtttgaattagctcagagcttcagaattcaatttcgatcgtctcgatatattacgggtctcaatcagacatctgagtaaaaaagttattatcgttcgaatttgctgagagcttcaacattcaatttcgagcgtctcgatgttttatgggacttaatcagacatccgagtaaaaagttattgccgtttgaatatgctgagagcttcaacattcaatttcgagcatctcgatatattacgggactcaatcagacatccgagtaaaaagttatcgtcgtttgaatttggtcagagcttcaacattcaatttggagcgtatacatatatt

SEQ ID NO: 16835 - DNA, 379 bp, Glycine max
tctggaaggagatcaacttgatgttctatgcctcttgattgtggtagtccatgaggaatctccataggaaagacatttctaaattcctgcaataagggttgaacactaggagaaatagaaatagtaaactcattagaattatgagtagaaattttactgtctttgcaatactgtagattgagtggttcatgagcaggtaacattttcctcacttcactcgcctctgcaaaataattaaattttctctcatgtgtatcactcttttcctcgggtgtatcactctttttcatattccttttgggtgcctcactattatctttctcttggtctctcttttctctcattctgatttggtcatcacacacttctctaggggata

SEQ ID NO: 16836 - DNA, 417 bp, Glycine max
  unsure (1)..(417): unsure at all n locations
agcttgtattcattacttgttgagaaccataagccaaagtcgattgttcctttgatattatgaagaattcattttgcatccttgagatgagtagtcattagagtctccatgtatcaactgatgagtccagtagcatatagaatgtctagtcttgtgcacatcanatcgtaaactacccaccaaactcttgaactttgtagcatccacctttcctgcttcgtcgaactttgataacttaattntgcactcaatcggtgttccaattggcttgcaagtatccatcttgaatttattgagcatctggtgtgtgacatagccctttcacacttaggagatggcaaagtgtctttgtgagtggttgatgttgatggngtgagctcttgctgaacatgttgaggtgtcttatcttcttcaagt

SEQ ID NO: 16837 - DNA, 443 bp, Glycine max
  unsure (1)..(443): unsure at all n locations
ntagtgcatgtaatccacttatgaatagaccccatcttcctcataatataaaactagaaatcccacaaacataatcgtataccttctcaaagttaactttaagcacaaggcatgatttcttccttctcttagcatcatcaaccacctcatttgcaatggctacactatctaacatattttgctctcccataaaggcaatttgcttttcaccaataattntagggagaaccactcttagtcttcttgctaaaaccttagacaaaattttatacaagcacccgattaaggatataggcctaaagttattaaggccttgtggatcatccttttttgagatgagaatgataaacgaaggattntctcttcttggaattgctccattttcccaaaactcttgcaacatatttataaaatccaccttcaatgtagcccaacatttcttg

SEQ ID NO: 16838 - DNA, 453 bp, Glycine max
  unsure (1)..(453): unsure at all n locations
tatcattctatctctcanaaagtatgaaaggaagttcaagtgatgcaggtaattcatacccctagtagacaaatatttctatcttaccttcatgtagacatctgtatctggatcaggtgtaatatttgcttctttttctcttctgaacacctctgctagcaaatctgcagaatgtgaaataattttagttaaaacttgatttttcatatgaattttggctcgatttccaaattgcagctctgtgggctaaccataaggaggcccaactccttggactcatgctgagaaggccagggtttctctgactgtcatttctccaatatgaagatcattttgacttacaaactcattcatcccatgaccattataagtcacctttccagtgaactgatcaagaagccaaacctaattagctacaaatccaataatggaaaatatgagcacaaacatcat

SEQ ID NO: 16839 - DNA, 398 bp, Glycine max
  unsure (1)..(398): unsure at all n locations
agcttcttactagtttacggctttctggatgtagatgatgatatctatacagatggatcttatatatctatatatctatagatagatatatagatatagatatatagatatagatcatacaatgaagtaccgcacgagtgggtatataggaatccaaatctgccgaatcactcatgttatgatcttctacatcctaggtcttcccgttccttcatctggcttatgttcttcatgtagcattcagactgaatgactctatgaaattacgtcgctacttccacatggtacgggtaacgtatgagacatctctatttttcccggngggaatccttagaattaccacagcttagctntcaattcgcctctgaccatcatatgaaatgtgaataacccgtcct

SEQ ID NO: 16840 - DNA, 461 bp, Glycine max
tcaagcttgtgaatttagttttgatgcagcaagtgagggaaaacaattcttaattgatgtctcaaaaaaaaaagcagcggattcagtagcacgggctgcaataagagctcggtgtcattatgttaataaaaagtggctcggcggtatgttaacgaatcggtatactacagaaacacgacttcaaaagttcagggacttgagaatgcaacaaaagacggggagactcaatagtttttcaaaaagagatgccgctatattgaagagacatttagctcatttggaaacatatcttggcggcattaaatatatgacggggttacctgatattgaataatcgtcgatcaacaagaagaatatacggctcttcgagaatgtataactttggaaattccaacaattcgttcaatcgatacaaattgtgacccggacctcgccgatatttcaattccagctaatgatga

SEQ ID NO: 16841 - DNA, 410 bp, Glycine max
  unsure (1)..(410): unsure at all n locations
agcttgctttcattttcagtcatcaaagtcacctcccctatgccaacaatcttgcttgtgacatggttgcccatcttcaccataccaaaatcctctttttgatatggcaaaaaaaatccttcatgaggagtaacaaggaaaaatactccagagtcaattatccatatacaataatcagatgcaatattaaaataattttcattaccgataaaaaaaacattctcatcatttaatgacagagaagtagtggttccacctttattcttcttctttgggtcaattcaattagcatggatagttccagtcttctgatctttcttcaagaatctaccctcaaacttcttatgggccgactttccgcaatagtagcaactaaagcctttgnggtgagacttggatctttcttgtga

SEQ ID NO: 16842 - DNA, 425 bp, Glycine max
  unsure (1)..(425): unsure at all n locations
tgcttctacaactctatttataatatttgctgcaatctttatttcctttcccaagagtgactatagtaagttagaatgacaaatcatgcttcttaccatatccttaagagttttgtttcatctttcagctactacatccatgctaggtgaccacgacatggtgtactatgggacgatttcacattcctctaggtacctagcaaaaggccccggacgttgttcacttgaaccgtcatatctgccatagtattcaccaccacggtcatatctaacactcttgattcttttgttgagttgattttcaacttcaactntaaatgttttgaacacatccagagattgttatatttcatgtataagaaacaagtatgcatatctggagtaattgtctatgaatgatataaaatattgttgaccattccatg

SEQ ID NO: 16843 - DNA, 424 bp, Glycine max
  unsure (1)..(424): unsure at all n locations
aactgatgcattggtaacttggaacccttttgccttgaatctgaaatctgtcctggcgcagggtttgggtttgtgctcctctgctgaccaccatacagaccttngcccttccatgcagcaacctatagcaattgagcagcctgaagcttatgctgcaaatatttacaatagacctcctcaacctcagtagcaaaatcaaccacagcagaacaattatgacctctccagcaacagatacaaccctggatggaggaatcaccctaatctcagatggtccagccctcagcaacatcaacagcagcctgctccttccttccaaaatgctgctggcccaagcagaccatacattcctccaccaatccaacaacagcaacaaccccagaaacagccaacagttgaggcccctgcacaaccttccctcgaa

SEQ ID NO: 16844 - DNA, 438 bp, Glycine max
tgaaggcaaactggatgcgttggtcaacttggtaacccatctggccttgaatcagaaatctgtacctgtcgcaagggtttgtggtttgtgctcctctgctgaccaccatacagacctttgcccttccatgcagcaacctggagcaattgaccagcctgaagcttatgctgcaaatatttacaatagacctcctcaacctcagcagcaaaatcaaccacagcagagcaattatgacctttccagcaacagatacaaccctggatggaggaatcaccctaacctcagatggtccagccctcagcaacaacaacaacagcctgctccttccttccaaaatgctgctggcccaagtagaccatacattcctccaccaatccaacaacaacaacaaccccagaaacaaccaacagttgaggcccctccacaaccttccctcga

SEQ ID NO: 16845 - DNA, 393 bp, Glycine max
  unsure (1)..(393): unsure at all n locations
agcttgaggagtctgcttcaacccatagaaatccttgagtaacttgtgttgggaagtccaatattgcctgccataattcatgtggtgcaacttataaaattgttggacaacttcacttaatgttatttgattttaagatgaaatctaacatggtataaagccttacaacccatctttgtgtattgcctatttttctacattggtggagtggggatgttgaaaagtcgcacatcgtttgccttaattctgagggtgcaacttatatacttattgggaaactttacttaagactaatcgatgttatgaatcttatgatgaaacctaacaacttgcaacgaagagacttgtcggttgctacttgtttcaaagcttgggtattngtgcatacaaacc

SEQ ID NO: 16846 - DNA, 413 bp, Glycine max
agtgggagttgttggaggaagttcagatgaaccagttgtagaagattttgatctagataatttaattttggtggaacttggtgatgatgcacaatttgaggaacaccttgatgatgatggagacggtgatgaaactgatgatatccatgaaaatgatcctattagagaattagacatggttcttgacgtagctcctatgtggagcttgtaggccttggatattcttcatcaatggagtcctttgcttcttgaagatgaatgacagcagaatggagaaggaagatgattggagatgccacttcaaggagaagatgaatcaagaagaagctcaccaccataggaagccatggataagagcttgaaggttggagaaaatgagtggagggagagggagagaaagagcatgaaatttt

SEQ ID NO: 16847 - DNA, 410 bp, Glycine max
agcttattcttcaaacctattgaaacgatagatcctgaagaaaatggggggaggggggttagcattagagaatagaataacagaattactttgatttaaatcctggcaaccagaagatagcattacctgccaaattggcaattcctatgcagacatttgcaatgtctgatggcactccagcacttttaaaaacagttgaagagaaataaaacacagcatttataccagatagctgttgtaaagcaaatagggttgatccaataaaaacaactgcaaaacgaacttgtgaataaaatataacttttggaaacctaaggaaaccagtgaccagataacaacaatggcaaatacactcacaagtcacaactattccagagacaaaccaggataaatgcatacctttagaatga

SEQ ID NO: 16848 - DNA, 412 bp, Glycine max
  unsure (1)..(412): unsure at all n locations
agcttgtattcgattacacacatactgtaatcgattaccagaggagattttcagaaaatattctcagcagtcacatcttttcatttggttcttgaatggccatcaaaggcctatatatatgtgacttgagagaccttgttatcatgtgggcctttcataccgggcgtcaacttgactgggcacacttagtcggatattgcatgcataaggcattgcgattaaatggtccattgccatatccacaccttgtcactctctttcttcgccattttcaaattcttcttcattctgaaccttatgttccaatcaagagatccttttttaattggtgctgctgtgattgcctcctttggttaccgcanagagcatgatggctcttgngtcanaatgggtgctcaacccgctgatgatg

SEQ ID NO: 16849 - DNA, 335 bp, Glycine max
actagagagaattccatgctaccttactactaccttgatgtacaacatcactagcttttccattgtatacttcatattcactgcgataaaatgagcagatttggtgagtccatctactatgacccacacagtatcatgcccactactagtcttgggtaaactagatacaaaatccatagatatgctctcccatttgcattccggaatcttcaatggctgcaattctcacgatgggcgctggagctaacctaagcctttgacatgtcaacatcttgctattattcggcacatcttattcatgcctgccaccaaaactttcttaatcttggacatat

SEQ ID NO: 16850 - DNA, 346 bp, Glycine max
agcttggtttgcatcaaccttggccattctaaaatcttcctttaccttatcagtgccctctttaatgtatgcagctggttcagtaatatttgaatccatgccattgatgtttaccccaacatggtttccttcagtgtctgagtcatctttgtaaccattcattgtgtcaaactcaactgcaaagatgtggtttgactcattcccatcattggtggagttaacaaggccaagataatggccagcctcaaccccaggaaactgtgttgagggtgctatggtgaaggcaaggccaaagccaccagaaccagaacttgtggacacaattgagaaaacaaaattggtgctg

SEQ ID NO: 16851 - DNA, 414 bp, Glycine max
  unsure (1)..(414): unsure at all n locations
cacatactgtaatcgattaccagagatgnttttcagattatattctcaatattcacatctttgtacttgattcttgaatggctgtcaaaggcctatatatgtgtgacttgngacacgaatttgctaagagttcttcacaacaaaaaggtcttatcctcttaaaaagcaaatcatattatcctcttacaaattccttggccaaattacttgtgattcaataaggaattatttgagtgctcaaattgttcaatcaatctctttaaagagagatttcttcttttcttcttcttcattctgaanagggattaagagaccgagggtctcttgttgtgaaagaattctaaacacaaaggaagggttgtccttgtgtgcttagaacttgtaaaaggaatttacaagatagtggaactctca

SEQ ID NO: 16852 - DNA, 391 bp, Glycine max
  unsure (1)..(391): unsure at all n locations
agcttccttatgaatanttctaaagaagttagagcttagctacacacacatctctaatagctaagctcacctccttgagatgagaagctagagcttagctacacaccccctataatagctaagctcacccccatgacaaaaaaaagatgaaaatacaaaagaaaagtccttactacagagactactcaaaatgccccgaaatacaaggctaaaaccctatactactagaatggccaatatacaaggcccaaacgaaggataaacctattctaatatttacaaagataagcgggctcatacttagcccattggctcanaatataccctaaggctcatgagaaccctagggccttcccttggatctctagcccaatctacttggagtcttcta

SEQ ID NO: 16853 - DNA, 421 bp, Glycine max
aagtctcacattgtcatgtgctctgcattattgtagcctggttatacagaatcttgtctacaaagtctggttagcgataactcgcctgtgctttttcttccatgctatatgtagcaaagtcattgatccagtcaagcttgatgagttggaaaatgaggccgcaaatatactgtgccagttggagatgtattttccccccgctttctttgacatcatgattcacttgattgtgcatctggtcagagaaatcaaatgttgaggtcctggttatctactgtggatgtacccggttgagcgatacatgaagatcttaaaagggtatacgaagaatctatatcgttcagaagcatctattgttgagaggtacattgcagaataagccattgaattttgttcagaatacttagagaaagctaaacct

SEQ ID NO: 16854 - DNA, 419 bp, Glycine max
  unsure (1)..(419): unsure at all n locations
agctttgcttttgtttcatctatgttcactgcttttatgaggttgtatgcatattttttattctttgatggtaataagttaatcgtatatagtatgtgtctgttttggacttttggttagtaatgaattttttttggagctgagttagtggttgtttctttgaggtttgaacctgtgatctttagtaaattaatcaagcttgtcaccactaaaccaatcctagtggcttgaagtagtggttatgtagttggcgataatgtacaatcctttaaatagtttatctttctgtcatgcagtcgtgagtttacccatcgtgtgaagtctgtatctatggcaatgttcacgtcacaagaagttgatgctcttcaaaatgggggtaaccaggtacaatggtggattatctnttctatatttggaat

SEQ ID NO: 16855 - DNA, 428 bp, Glycine max
  unsure (1)..(428): unsure at all n locations
agcttctattctntatacaagaatgaagctctgataccagttgttagacaagtggcctcagatatcttaagaaggggggttgaattaagatattgcaaactatttccccaattaaaaattctatttcaatttcaatgcaagttgcaagttcccttaaaaatgaacttttaaataatgattcaaatagaacaatctgaatataaatataaatcaataataaataaacaagtttaagggaagaaaaagtgcaaactcagatttatactggttcggccacacccttgtgcctacgtccagtccccaagcaaccagcttgaaagttccactatcttgtaaaatccttttacaagttctgaacacacaaggacaatccttcctttgtgttcagatttcattacaacaagagaccctcggtctctcaatcccct

SEQ ID NO: 16856 - DNA, 442 bp, Glycine max
aagcttgaaggtaaactagatgccttggtattctggaacccatctggccatgaatcagaaatctgcacctgtcgccagactctgtgatttatgctcctctgccgaccaccacacagacctttgcccttctgtgcaacaatctgaagcaattgaacagcctgaagcttatgctgcatacatctacaatatacctcctcaaccacagcagcaaaatcagccacaatgaaacaattatgacctctccagcaacaggtacaatcccgggtggaggaatcatcccaaccttagatggtcgaatccttcacaacagtagcaacaagaaccttattttcaaaatgttgcttgtagaagcaaagcttcatgatgaatccagattgattcaaagatgttctgatgataacaaagatgaatgacaaaagctcaaggtcaatcaaagaatgag

SEQ ID NO: 16857 - DNA, 416 bp, Glycine max
  unsure (1)..(416): unsure at all n locations
agctttttattaaaatttcttccttctcctttgttttaatactacagtatatatgttattataatttgatgctgatttgtgtgcaggtaagttctcatggcctgagttggttggggtgcaaggaacggtagcggaggctacaattgagagggagaatccttcggtgaatgctattattgtgcctctaggatccgtggtcacaacggatcttcgaagtgacagggtttgggtttgggttaataaagatggaattgttaatagagttccaaaaattggataggaagtgtttacactanagcacatcaccatatatgttctaataagttatgaatatatagtaatatttaaataaggagttatttttccaattatgttctttgattgcaaaaaatattttatacttttaattatgctct

SEQ ID NO: 16858 - DNA, 405 bp, Glycine max
  unsure (1)..(405): unsure at all n locations
agcttgatatactttcaaaaggtgtagattgtgagtgcacttgacctcccacaaagcaaatgcaaagcacagcaatgtgggatcagtagccccatccttatagctaccatcatcaatcatgctctcccccaacaaagctgcaattatatataaaagcttcaacgtaagattgattttgacaatttctaagaactaaagacaaaaactgaattatgtgaacatgttaacccagacaaatcaataaacaggtggcacttacaactgaagatccttgatcttggagagcagggatttagttgctccctcaatgtgctttntaaacagcttcagtttctcttcgtcaagcttttgacaagaaactgcttcttgtcaaaagcaggttgctcctacctacaaagataatat

SEQ ID NO: 16859 - DNA, 451 bp, Glycine max
  unsure (1)..(451): unsure at all n locations
ctcttctcgtccttgtcctcttaagaatgaaacaagtttagtgttgcgattgaaaaatttttactcaatccatttctgttagtaatggaaaaagttgtgtacaatctatctatctgtttcacctttttttttacttgtatacatgtaaaattttaaatcacatcacttcaaatatgttaaattagctcattaaaaatataatttatttgtaagtaaagtccagattgattatttactcttttatccaaattttaatttgaaattcagttttaaatgaaaaaaaaggttattgtcactgactcattttataaaataattctcatccaaatttaaatttttaatttgtaaactttaatctttnttttatcagcctttanactttaatctgaatatatactatagtattttcttttcagcaagagataatatgtaggaataaatacgtcaatgt

SEQ ID NO: 16860 - DNA, 452 bp, Glycine max
  unsure (1)..(452): unsure at all n locations
tatatgatataaactcttatccttatgctttcacaagttatttttcaaaggctattggaatttattttatcatctattattcaatgtccaacacattattattaaacaaacatgaaattgtttggaaaaaccagtacttatgtagtgagtgtctttacacgtacaattaaaaaagacataactaagttacactaatgttttatattctgtttgttaacatccaaatcattttgcttgcatgtgaaagcatctccaagataaatatttgctgatgcaatcctccctaggaagggaccagtcactagagccatgagcaagaggctccaagaggattangctagagttgctgaagaatgccctaagattctcatgaacccagggtagatntctgagcccatgggccaaggttgagtccaattatctttgtacatattagactagaatgtcattat

SEQ ID NO: 16861 - DNA, 399 bp, Glycine max
agcttggtttttcttattcgatatttttaatttgcaaaattgaatgttattggagttgcactgtttatcatgcttgtcttgtacttaaaaatatttaacttctgcattttttttattccacagaacttttacatgataggaagggacaagagcaggacatattggaaagtactaaagattgaccgtcttgatccttccgagctaaatttgcgtgaagattccaccacatatacagaaagtgaatgttctgatcttttgagacggatacatgagggtaacaagtccacaggtggactaaaatctgctacaacttgttatggaattgtaggtatgtaaatccataatgtcttagctacctgcctgttgaccaattatgagttactgtctggatatactatt

SEQ ID NO: 16862 - DNA, 417 bp, Glycine max
agctttgctcgtatttgtcaagtgtatggaccacgttgtagccaaggtgctcatcgataatggttccagtttaaacgtgatgcccaagagcactttggagaaattacctttcaatgcttcccacctaaagccaagttccatggtgtttcgtgccttcaacgacacccgccgagaggttaggggagagattgacctccccgtacagataggccctcacacctgtcaagttaccttccaaataatgggcattaaccccccttacagctgcctgttggggcgcccgtggatccactcggtgggagttgttccctctacactccaccaaaagttgaaattcgtagtggaagggcatctggtcatcgtatcaggcgaggaagacatcttggtaagctgcccatcctctatgccttatgtgga

SEQ ID NO: 16863 - DNA, 433 bp, Glycine max
  unsure (1)..(433): unsure at all n locations
tatcacccgtatcagcgattgaagaaggttttaatgggtttcaggaaaatgagagtgcgtctaaaccattagctaggaaagaagtttatgatcaggttaaggacatcgtaactatctttgggaagacccaaaagaagccatcatctgagacaaacatacggaagaaaatgtcaatattcttttatcttccatattggtccgatcttgatgttagacattgtatagacatcatgcatgtggagaaaaatgtgtgtgatagtttaattgacactcttcttaacattaattgacactcttcttaacattatacgaatgttctcatttctcaggggatcattgcagcaatagtaaccacaaaaaaaaaactatgtttgctgataaaaaaatagaaatcaaacagcaattggtttgctttattntttcccatcaatca

SEQ ID NO: 16864 - DNA, 425 bp, Glycine max
tatagaatatataataaaagaaaaatgacaattgaagagtctatacatgtttcctttgatgagtctaatgccattcttccaaggaaggattttttagatgatatttcagattccttagaagatacacatattcatggaaatgactctaaagaaaaagacgaaggaagcaatgaggattctcaagataatggggctagaggaaataatgaacttccaagagaatggaaagcctcaagagatcatcccctcgacaacattattggtgatatatcaaaaggggtaacaactagacattctcttaaagaattatgcaataatatggcttttgtatctatgattgaacctacaaatataaaagaagccatagtagatgataactggataattgccatgcaagaagaactgatatcaattgaagaaataat

SEQ ID NO: 16865 - DNA, 446 bp, Glycine max
agcttgaatcttctaccctatttctgacagccagtgggtgagtccagtccaagtggttcctaagaagataggcctcacagtgatcaagaatgaaaaggatgagcttatccccacaagagtgcagaacagttggcgagtctgcattgattataggaggctgaattaggtaaccagaaaagatcattttcccttgcctttcattgatcaaatgcttgagcgcttggcaggtaagtctcattactgctttcttgatggtttttctggttatttacaaattcatattgctcttgaggatctagaaaagaccacattcacctgtccctttggcacttttgcctatatgaggatgccctttagcctatgcaatgcccctggtaccttccagcggtgtatgcttagcattttcagtgactttttagagagtcgcatagaggtggttatggatg

SEQ ID NO: 16866 - DNA, 352 bp, Glycine max
gctcattatgttattgttctttcaaagtatgaacaaacactatgattgttcatgatagagcattacagcatataatatattattacatttctgaaacgacatacaacttgtggtgttacgatgggtgcatagccaaggcgatcctttgcttttgagcaatcaaatgttctgctgcaagatatgagtcttattcttgaaggaatgagttgaggcagctccatcccatatgggcctagcaacttatatatgcactccaaccaatgtgcactgggcatgataacaaaagtggtggatctttacccttggcctataagcaacatgacttagattacaaagaaatggcattgacaat

SEQ ID NO: 16867 - DNA, 468 bp, Glycine max
  unsure (1)..(468): unsure at all n locations
ctataatactcagcttgagccaaagggaaaaagaacttagttattcaatgtactctccttaatanagtgtgttcaatgcaaagttaccactctattccatccaaccttgaggattgataaaaccattatgataagtcttcattaaaattgttcttgaatattgcttccatggtctttgaagataagtcctaaccgggttttgaaccggtctcacatctgaggcagctgtgactcaagaattgcgaattgaaattccagtgttttggtttggatcagttctgccttgtgcagcgatggtgttgactatgttgggagggtttcttgcaaggtgttgcaattctgtaacacaacaacaacaacatgctacaggagatttncatcaacttccctgccacacgcgtttgggtaacaacaaaatgataagtcaactaatagccaggagattacattacactttcacatgcacac

SEQ ID NO: 16868 - DNA, 438 bp, Glycine max
  unsure (1)..(438): unsure at all n locations
agcttcccgcctgtgtcaatggcggcacccacgttcaaaagtgaccccccccccccgtaatttgttttaaaataaaccctcttccgtaaatagttttcaaaagcatcccccttctgtaaatttgcctcggtgtgaagatagtctagtattcaagcatagatagcaccataatcattgctgagagaattctaaaaatctcggctaatattaaccaatttttatgtcaaacaaccaatctgacaattttcacaaatattaatcattttcattaatgttaaccaatattattggcaaatgaacaattgtgtgaaaaattaactggattctatacattattagatttatgatttttgttcttaaattaaaataaagactgttctcttaattatatattttttattcttatgattcanaataaataaataaaaacttaagaga

SEQ ID NO: 16869 - DNA, 311 bp, Glycine max
  unsure (1)..(311): unsure at all n locations
agctncgaatgtattattattctntaagcatgtctgtaacatggtttgtgcagtgctttgaaacttcagaatgggccatatgctntcgaagatatgataaagatgggtaggatgctggagaggagcttctttttcgagcccgaccctgcttnttcagtcgttaacatccaccacattaatggccacacaatactgatcatgagggtgacggcagctctttcagtgactgcatanangtatgtctattcttaaccatgtgtaagactaaatatcagctgatggaaaataaccactcatatggtcaattgtga

SEQ ID NO: 16870 - DNA, 477 bp, Glycine max
  unsure (1)..(477): unsure at all n locations
cgtcgatcctaagagtaataaaatcaaatcgctcacaacaacagtttgaatcncctgcttactactgcgctctgcagtggttatatttcccctttcaaaagagacaatgtcgtgtttgtactgatcactttgatcacctttgctgaaccatgagagtttaaatgaagcctgtctcgataataaagaaaataattaaaatcaatttgcttaagtaggagtaaatcagagtatatacattgcaattttagcaatagaaaagaggaatatgtctttgaagtaaaaatggtacaagatgtcttaccacagatttctaagttcaaatacatgggatcaataatacaagatgatggaaaaattaatgaagatgtcacgcaaaggatacaagcgggatggataaaatagagaaaggagtcaacggttatttgtaatcgcgaagtccctaccaatatcanggcaagtttatcgtactactatacg

SEQ ID NO: 16871 - DNA, 445 bp, Glycine max
  unsure (1)..(445): unsure at all n locations
agcttggatgctatccattatttntgtaagactatgtattgcattcgaaatattgtgtttacgtgcctttttttgtacactcaaaattctattttgaagtagactaatgtaatgtatcatgcccctaatgaactacaagactganagttgtgtgttctattagactgggatatgcgtttgaaaattgtttttgggattgctcgagggctcctttatatgcatgaagattctaggttgaggattattgatagggacttcaaaacaagcaacattctactaaaattctgattggagaactataccaaaattacctcctaaggagttgtatctaacttttgtccttantttgtatttgtcacactttacataatcataccagacaaatctcttattttgtctacatttcacattnnttgtaatgcaatgggtatatgtgtccataata

SEQ ID NO: 16872 - DNA, 391 bp, Glycine max
caggttgagttctgcttaccacccacagactgacggtcaaaccgtgcgttctattcaatccttaaaagaactcttgagagcctgtgtgttagagtagacgggtacttggaatagtttcttacccttgatagagtttacatacaacaatagttttcactccagtataggtatggcaccttacgaggcattgtatggtagaagatgtaagacacctctatgttgggtagattccagtgagagcattgccttacgacctgaggtagttcaccataccattgaaaatgtcaagttgatccaagataggatgacagcagcccaaagtatgcagaacagctactatgatcagagaagagaggatcttgaatttgctataagtgatcatgtatttctg

SEQ ID NO: 16873 - DNA, 444 bp, Glycine max
  unsure (1)..(444): unsure at all n locations
caggtagagttcttcttaccacccatagactgagagnctttcctgcgctccattcaatccttagaggacctcttgagagcctgcgtgttaaaatatgggggtagctgggatagtttcttacccttgattctacctacaacaatagctttcactccaatataggcatggcaccttacaaggagctgtatggtaagagatgtaagacacctgtatgttgggtaaataccagtgagaacattgtcttaggacctgaggtggttcagcaaatcactggaaaggtcaagctaatctaagaaagaatgagaacaacccactgtacgttgaagagctaccatgatacgagacgaatggaccttgaattctccgtaggcgaccatgtattcccgatagtcactacatccactgggttggtatggcattgaagtacacatagctcacacctag

SEQ ID NO: 16874 - DNA, 412 bp, Glycine max
ctcaactgaatttacaacattccaattgatttcaaaatggtgtattttattacaatgatatggtaatcgattaccagtgtgtttgaatgttgaaattcatattcaattgcgaagagtcacatcctttcacataagtgctgtatgtaatcgattacaatgatttggcaatcgattaccagggatgtgttttgaatacaaatcactagatgtaactcttccaatggttctcaagtctctctaaaggctataactcatctattggccttcttgacctgacttgacgagtctatataaccaagaccttaacttgcattgtacacacattgattacaatcttatatatcctttgaatctctttgaacctcctcttgaatgtcttcttatcttcctttgccaaagctttctaaagttt

SEQ ID NO: 16875 - DNA, 374 bp, Glycine max
  unsure (1)..(374): unsure at all n locations
agcttctaatgtataacaaagtgactctatnttcagggtgaatcattacgctgcttgtcctgaaatgactctgaatgatcacaacttgattgggtttggagaacacacagacccacaaatcatctctctgttaagatccaacaacacttcaggccttcagatttatcttagagatggaaactggatgtcagtcccaccagatgacagatcctttattattaacgctggtgatactcttcatgtacaacataaagcatgctattgacgcatactaatgagttcaatgaagaaattgtcattttctttctccttatgacttacgtatctctatggataagtataaaataataaatatacaaactcctcttttaagt

SEQ ID NO: 16876 - DNA, 435 bp, Glycine max
  unsure (1)..(435): unsure at all n locations
agcttttcatttaccttcacaataagggaaaaatgttattagaactaattaataaatacaaaaaagaactaaaatgacagccataagtatgtacctttgattntttcttcaaattataattatggcgaagtcaatccccctgcaaatgagcgcttcaatagattcttcatttagtttagaacaatactcatcaattaccctacccttagcactaaatgtagactctgaaactactgttgatattggaatagctagtatgtcacccgccatctttgataaaaccttgtattttaggctattgttcctccaccactctaacacactanaataagagttactagtttcaggaatataaacattctccttaagataatcctctaattctgagttcactggaggggtggcttcatttgcacgcacaatgttcattatttg

SEQ ID NO: 16877 - DNA, 392 bp, Glycine max
  unsure (1)..(392): unsure at all n locations
agcttgaaggtttactagatgcattggttaacttggtaacccagctggccttgaatcataaatcggtacctgtcgcaagagtctgtggtttatgctcctctgctgaccaccatacatacctttgcccttccatgcagcaacctggaacaattgagcagcctgaagcttatgttgcaaacatttacaatagacctcctcaacctcagcaacaaaatcaaccacagcagaacaattatgacctctccaggggaccatccgttgttgggatgcgaccctcattngaccacttcgaggtacttggcacccatcgttaggcaatttgtgaagttccatgacgtgccggaagtcgaaagaaagcattgtagcacgatccgtgaagttccgcgacatgc

SEQ ID NO: 16878 - DNA, 370 bp, Glycine max
  unsure (1)..(370): unsure at all n locations
agcttctacatatgggactgngaacactctaagggcccttgtcctaatggtataaaatatatgttcatcatggatttatgggatgtaatgaaaaaatattttttggcatttcttgatgaattacacataaatgggagactagataaagtggtcagtagatcttttattgttctgttacctgaaaaaagaaaacctaatgtctatgggggataatatatccctgatagggtgtttgtataaaatgttggcacagatgtttgctaataagttaaaatgggttattgatgatgttatttccacaacccaatctacttttatatcagggaggaaaatgctggatcgggtactcattgctattgattggttcatg

SEQ ID NO: 16879 - DNA, 432 bp, Glycine max
  unsure (1)..(432): unsure at all n locations
tcaagaatcaagatcaagatcaagattcanaattcaagattcattattcaagagaagacttaatcaagataagtatgaaaggacttttcaaaaactgagtagcacatggatttttcacaaaacatgtttaccaaagagtttttactctctggtaatcgattaccagattattgtaattgattaccaatagcaaaatggatttgaaaaagttttcaaactgaatttacaacgttccaattgatttcaaaaagttttaattgattacaatgttttggtaatcgattaccagtgcctttgaacgttgaaattcaaattcaaatgtgaagagtcacatcctttcacataaaagccttgtgtaatcgattacactgatttggtaattgattaccagtgaattgtttctgaataaatcanaatatgtaactcttcaaa

SEQ ID NO: 16880 - DNA, 449 bp, Glycine max
  unsure (1)..(449): unsure at all n locations
agcttatccattctacccattgaaacgatagatcctgaagaanatggggggaggggggttagcattatagaatagaataacagaattactttgatttaaatcctggcaaccagaagatagcattacctgccaaattggcaattcctatgcagacatttgcaatgtctgatggcactccagcacttttaaaaacagttgaagagaaataaaacacagcatttataccagatagctgttgtaaagcanatagggttgatccaataaaaacaactgctaaacgaacttgtgaataaaaaataacttttggaaacctaaggaaaccagtgaccagataacaacaatggcaaatacactcacaagtcacaactatcccagagacaaaccaggaaaaatgcatacctttagaatgacgaccatgaangcaattcgacagcttcacactatcacta

SEQ ID NO: 16881 - DNA, 408 bp, Glycine max
  unsure (1)..(408): unsure at all n locations
agctnntgcgttcgatttcttagtgcaattctccattctcaacctttttcggagccccatggattgagttttcgttcatgcgtactccaccttcgagtatggagccatgcgtagtgattgcttagttcaattctccattctcaacccctttttcgcagccccatgaattgcgatttggttcatgtgtcctccaccttcgagtctggagccatgcgtagtgattgcttagtgcaattctccattctccaccctttgtcggagcccatgaattgcgtattcgttcatgtgtcctccaccttcgagtttgaagctctgcgtagtgatttcttagtgcaattctccattctcaagctttatcggagccccatgaattgagttatcgttcatgcctcctccaccttcgagttt

SEQ ID NO: 16882 - DNA, 426 bp, Glycine max
  unsure (1)..(426): unsure at all n locations
ntacagcggatgccactctactccaaattcttgaaggatatgttttcaatgaaacataagtatattcaccaagaaaacattatagtggaaggacattgtagtcttgtgattcaaaagatccttccacccaagcataaagaccttgggagtataactatttcttgttcaattggagaagtcactatgggaaaagctcttattgacctgngagccagtataaatttaatgttgctctccatgtgtagaatgttgggagcgttagagatcatgcccactagaatgactctacaattggctgaccgctccattaccagaccatatggagtaattgcagatgtgctggtcaaagggaaacatctcatcttcccggtagacttcgtggtattggatatttgtgaatatactgacattcctgtaatattggga

SEQ ID NO: 16883 - DNA, 376 bp, Glycine max
  unsure (1)..(376): unsure at all n locations
agcttgcncacttgtcttattctatatgaagggctctgatttcttgagtagtttgtagaatggctttccctttttggtgagctttgggaagaacctggacagacatgctagcctttcattcagcttcagcttctacacttcttggatgttggttgggttgcgcatgatcagtatggtagtgcatttgttgnggttggcttcaatcccctagtgagtgatcatgaagtcgaggaacatgcctctgtctacccaaacagtacatttatcatggttgaggcacatgtcatattagtgaagtttccacaagacttcttccaggtcagtcacatgttgggctatgctccgagacatgtctatgatgtcgtgcacatatacc

SEQ ID NO: 16884 - DNA, 472 bp, Glycine max
  unsure (1)..(472): unsure at all n locations
ctcctttctgggttgatgacccagtatgggtaggtgacccagaatatgttgtangttgccttttggttattggctctggtagagccagtagaacctcttttccttttgtactggatcttcctcctctgccggaggaactagacaccataggaggcatcgggaattttctgtaaaaattcacgggtgagatagtcaggtagagagttggaagagcccttgatatattctatattaaaatcaaagacacttaaaattgcttgccatcttgcaaaaatctgttttgaggcaaggttttttacatccttctgtanaatgtctttggctgatttgcagtcaacccttactaaaaatttttgatttaataaatcagattgaaatttggaaatgcacaaaacaattgctaaaacttcttttttgacagttgaatactttaattgtgcaggattccagtgttntgaagtatatgcaatga

SEQ ID NO: 16885 - DNA, 413 bp, Glycine max
  unsure (1)..(413): unsure at all n locations
agccctatanatttttatatggcttgaaacaagcactgaggcagtggtacaagaagtttaatgagtttatcagcaactcaggattcaacagatgtgacatgaaccattgctgctatgttaagaaatatactaatagttatgttatccttatcgtgtatgttgatgacatgttgattgcaggatctagtatgacagaaattaacaggttgaagcaacagttggcagaaaactttgaaatgaaggatcttggtccagctaaacaaatccttggtatgagaattcttagaaacagatcagaaagaattttgaagttgtctcatgagaaatatatacacaaagttgcttgacaagttttaccttgaagattctaagaccaggaatacccctttgggatctcattagaagtttcaaag

SEQ ID NO: 16886 - DNA, 463 bp, Glycine max
tactgttagaacttcttcagatccaatctcatgaccaccatagacaaaaagtttccccccgctattattggcacaccaatgtagaacaataatagggagtcttctatcagctgatgataattgaagcttgacaacattgtttgacaatctttcaacttgttggtcagggggaaagtcagcagttgacaaatcccaaaacattatatcaccatctacataacccacaacaaccaccgatccatcattagatgcccaagatacagagcttatctccttatcctcctcttcatggtctaatttatcatcagaaagctgaaccctagagtcatttggataactagtcactatttttctcttcaatttgatgtccttgtggcctctaatgagaacaattcgatcttcagaagcatcccagagtaccatcaaaccattttcgtatgcaattagcagtctgcaaaatgac

SEQ ID NO: 16887 - DNA, 449 bp, Glycine max
  unsure (1)..(449): unsure at all n locations
tgccttgccccatgatatatntgagggacttatgatcactatgtttgactaattccttgngataaaggtagtgttgccatgttttcaaagcccgtactaaggcatacaactcctaatcataagttgaatagttaagggtaggaccacttagcttttcactaaaataagcaattggatggccttcttgcatcaacacagccccaatcccaacatttgaagcatcacactcaatttcaaaagaattttgaaagtttggcaacgcgagtatggtggcattagttagcttttgcttaagaacattgaaagcttcttcttgtttctctccccatttgaaaccaacattnttcttgagcacttcattgagaggtgctgccaatgtgctaaaatccttcacaaatcgtctataaaaacttgctaagccatgtgtcgcaacctacccttcggcggga

SEQ ID NO: 16888 - DNA, 446 bp, Glycine max
taagctccttcaactgcacaaggctcttaatatttgaaaagtattcttgtggaacattcacccgacgaagacactgacaaaaacttatcttcttctttttggacaaggtatggcaagctgggggcaagaaaattttcttcccatcagaccttggatgcaactatgatcatatccccatatcagctagatcttgataggtattcaagtcatccttcgtcttgccttgaatgttaaggagcgttccaatcacactgtcacaaaaaattttctccacattcataacatcaatacaatgtctaacgtctagatcagaccagtacagaagatcaaagatgatggacctcttcttccatatgcaactattacttttatccttcttttgggtctttccaaatacagtattcagggtgttgaacccgctgatatacctgctcaccagtcaacag

SEQ ID NO: 16889 - DNA, 402 bp, Glycine max
  unsure (1)..(402): unsure at all n locations
ctgagatggtatctggtcttagaanttaatttgctaagatcctattctgtgcgattggccaacctgaggaatggtgtagtcttgctgctgactacttgcattgtggccccctgcagctcccattcatatacctagggatgcctataggtgttaaccctagaaggaaggtggtgtgggagcctataatcagaaaanttgaagccaaattgaacaaatggaaccacagaagcatctctatggctggcagaattaccttaatcaatgctgtcttgacagctttgcccttgttttatatgtcttntttcagggccccttcagcagtcatcaagaggctcactactatccaaagacaatttctttggggtggaaacttggaaggaaaaaagatagcttggatctcat

SEQ ID NO: 16890 - DNA, 394 bp, Glycine max
agcttctcgatctattatgcgcctgaatcggacctccgagttaaaagttatgaccattaaaatttctcaagagcttccgttgattaattccgtgcgtctcgatatattatgtgcctgaatcggacctctgagctaaaagttatgaccatatagaatatctcgagagcttgcgttgttcaatttcatgcgtctcgatatattatttgcctgaatcggacctccgagttaaaagttatgaccatttgaatttcttgagagctctcgttgttcaatttcgagcgtctcgatatattatgttcctgaatcgaacctccgagtgactatttatgaccatctgaatagctcatcagcttccattgttcaatttggagcatctcgatatatgatgcgcctg

SEQ ID NO: 16891 - DNA, 388 bp, Glycine max
  unsure (1)..(388): unsure at all n locations
ctcaagaaattcanatggtcctaacttttaactcggaggtccgattgatgtggtttttatatcgacacgctccaaattgaacaatggaagctcttgagcaattcacatggtcataaatagtcagtcggaggtccgattcaggcgcataatttatcgagacgctcgatattgaacaacggaagctctcaagaagttcatatggtcataactattaagtcggaggtccgattcacgcacataatatatctagacgcacgaaattgaacaacggaagctctcgagaaattcaaatggtcaaaacttttaactcggaggtccgattcaggcacattatatatcgagacgctcaaaattgaacaacggaagctctcgagagattcatatggtc

SEQ ID NO: 16892 - DNA, 456 bp, Glycine max
cgtgatagatatgaatgttcaaaaccaatacaagagagagaattttattctttattttattctaatcgaccataaaaagttaaataaaaataaatgtggactttgaaactctgattatcttcgttattattatattagttaaattaaacaattttagtaaggacgtctagctagctcaatagattgatatagtatttaatttctgtggataaaaaaaatctttgtttgatactttaattttattctattctaaaagaaattatttttattaatagcttaattatataattcgtcatttaattataattaaaaattccattgagttcgtcaattattaaaacattaaaatctcttaattgtttaaaacatttccgttattattttttgtccattacagaatcaattatataattgagtcctttattaaattaatgaaattgcacatgtgatcacaca

SEQ ID NO: 16893 - DNA, 405 bp, Glycine max
  unsure (1)..(405): unsure at all n locations
agctttgagttttntcaaccattgaatcaaaattctaatgtatatgtatatatctatctatatttgtttaccaatgatcgaaattttaatttgacaacaatgattgatttggtactatatgtaaaggaagcttaatactttgtcagccgttggttataaattttaattaataattattgatttcattcaataaatatctagtatacttaaacatttattgttgaatcaaaattctaattctataacaatcattcatatggctattgtaaaaatatttgtagaaaagacatccaatattttatgcaacggaatttttttgtaaaaaagtttacacatttacaacaaacagaattttttactcccttgattgtattttactcccatcgttttataatcaatttaaaa

SEQ ID NO: 16894 - DNA, 465 bp, Glycine max
cttcttggtgggttgatgcactctatctcgtagaatggtatgatcactatcagacatattctcaatcaattcagttgcctcttcaagggttttcaattctatcttccctcctgctgaagcatctaacaactgcttggtttgtggtctcagcccatctataaacatgttcaattgaattggctcagagaatccatgtgtgggagtctttcttaacaaaccccgaaacctctccaatgcttcactcaaggactcatcagggaactggtgaaatgatgaaataacaactttcccttttgcagtctttgactcggggaagtatttcttcagaaatttctcaacaacttcctcccacgtcttcaaatttttgcctttgaatgaatggagccacttcttggcttcccctgccaaagaaaatgagaataaactgagcctgatggcatcatttggcactcctgcaatctttat

SEQ ID NO: 16895 - DNA, 445 bp, Glycine max
  unsure (1)..(445): unsure at all n locations
tgccttgccccatgatatatttgagggacttatgatcactatgtatgacaaattccttgngataaaggtagtgttgccatgttttcaaagcccgtactaaggcatacaactcctaatcataagttgaatagttaagggtaggaccacttagcttttcactaaaataagcaattggatggccttcttgcatcaacacagccccaatcccaacatttgaagcatcacactcaatttcaaaagatttttgaaagtttggcaacgcgagtatggnggcattagttagctgttgcttaagaacattgaaagcttcttcttgtttctctccccatttgaaaccaacatttttcttgagcacttcattgagaggtgctgccaatgtgctaaaatccttcacaaatcgtctataaaaacttgctaagccatgtgtcgcaacctacccttctgc

SEQ ID NO: 16896 - DNA, 434 bp, Glycine max
  unsure (1)..(434): unsure at all n locations
agctntgaaatctgaagtttaatattcaaatgatcaaagttcanaaaaaatgcacacacatgacctctatttatagcctaagtgtcacacaaaattggagggtttgaaattgaatttgtggagccaaactttggagccaaaatttcactaattatgattagtgaattttagttatggttcagcccactaatccaagatcaaatataatattctccactaagtgtgcttaggtgtcatgaggcatgaaaagcatgaaggacatgcacaaagtgtgactatatgatgtggcaatgaggtgtagtaagcaaatgctcacctgcccctctaaaatntaattggattgngcttctaccaattcaattaaatttatttccaaccacacacatcaaatatccacttagtgcatgtgaaattacataactacccctaataca

SEQ ID NO: 16897 - DNA, 470 bp, Glycine max
  unsure (1)..(470): unsure at all n locations
tgtagggttaaagtctcacgattgtcacgtgctcatgcaacaatttgtttccgtggctatacgagacatcttgccaaacaaagtcaggttcacgataacttgcctgtgctttttcttccatgctatgtgtagcaaagtgattgatccagtaatgtttgatgagttggaaaacgagaccgcaattatactatgccagttggagatgtattttccccctgctttctttgacatcatgattcacttgattgtgcatctggtcagagaaatcaaatgtcgtggtcctgtttatctacggtggatgtacccggttgagcgatacatgaagatcttaaaagagtatacaaagaatctatatcatccgaaagcatctattgttgagaggtacattgcagaagaagccattgaatnttgttcagaatacttagagacggctaaagctgttgggcttcctgagtgtcngcatgatgaca

SEQ ID NO: 16898 - DNA, 473 bp, Glycine max
  unsure (1)..(473): unsure at all n locations
tgcttanacttgtgatcattctgcacagaacgcaacctatttattattaacaatntcatatcactctcctaaacttacaacatacaaatttaagcaagaattcagataacaaattccactctcctcccttctatttaaccaactcaaaacagttcaaaatccaattgaccactaatcacaaccaatggaactcggattctcgtactatcatttccacaaagacacaaacagctaataaagtcggtattatgtaaagcttgctcgctcgcatagtacctcatcagcaagaattttagagcagttgaagcaaacacaacgcattatagttaagacggtcttcaaaaaaccaatatggaacattggcttagcaagctccaagtgcccaaaatggccagggcactcagccatactcgccgtgcaagtttcacacttcaactgtctgtcaatgggtccaagccgagggtcactcaatc

SEQ ID NO: 16899 - DNA, 375 bp, Glycine max
  unsure (1)..(375): unsure at all n locations
tagcttgagctctcacccaatcttgcaacacaatgttgggtccaaggttatcaaactcgacagtttacgtagactcgtaagagttccatagactcaactcgtagacttatacgagtccacttcatataaaaataataacaaaatatctataaataacataccaattaaacattntaacaatataataaagcagaatagtaaatcataaatttcacaatactgaaataaccaagtctagtaatgcatcactactagataataacttgcagattttatagtagtggtagagcattcccatcaaggatttgatgttattagagaatacgggtttgatgttattagaggtgagagtttttcaattcaggaacaacacac

SEQ ID NO: 16900 - DNA, 457 bp, Glycine max
cgccgccgccaactccctctccacgcagctgccagagttctgcttcgtcgtccacctcctctgcttcccggaggtccagcccagcctcgagaaacacaccgaagacgtcgatttccaaacctacgataactctcagaacttctccaactacggaacgagtcgacccggcggaaccgactcgttcagaaactacgccaccaccttctccagccgttccgacaacagtttccgccgctacagccgccgatccgccggccacgaggacagcttcgtcctctacggaggctccatcggcgacatctaccagaccttcaacacctatggcacttcctccgctggcggcgccggcgagttcaaacagtacgccaccgaatcaaacttccccgagcttgatttcaccacctactccgacagctccggcgggaggaggcagtcgttctcgagctacggcgagaac

SEQ ID NO: 16901 - DNA, 393 bp, Glycine max
  unsure (1)..(393): unsure at all n locations
agcttcttttgtttgggatgtgtgctctatcacgcaagattgtatggtcactagcagccatattcttaattaattccatggcttcttcaggggtcttcaattntatttttccccctgcagaagcatctaaaagcttcttggattgtggccttaacccgtcactaaaaatattgagttggattggttctgaaaatccatgagtaggtgtctttcttagtaacccacgaaatctttccaaagcctcactcaaggactcgtctggaaattgatgaaaggatgagatgacagcttttccttcagcagtcttggactctatgaagtatttcttcaagtatttttcaaccacttcattccaagtcttaagactgttaccttataatgaatggagccatc

SEQ ID NO: 16902 - DNA, 447 bp, Glycine max
  unsure (1)..(447): unsure at all n locations
ctcatgtcaacgatggagcaaatgctagtgctgttgggaggtttctcaattgctgatttctacccttcaatcaaagtgcttccattgctcacaggaatgaaaagtaaacttgaaagggcgcacagagagaatgacaagatcctacaaaatatggtcaaggatcacaaggaaaatgagaacaagaatggggtgacgcacgaggatattattgatattcttctcanaactcanaagagagatgacttggaaattcccttgactcacaacaacgtcaaagcactcatctgggttagtatgcaattttctttaacattactttaagattcccatgtatacaactatatacgtgcatagatatgaaatttgctgaaataataacttacactttaatatatatagagagagagggagagagagaaaattgagtagcgacttattaataaaata

SEQ ID NO: 16903 - DNA, 327 bp, Glycine max
acacctgacatcacctatgcaggaagtgtttgtgcaaaatatcaagccaatcctaagataagtcacttgaatcaagtagagagacatctgaaagatgtatatggcaccagcgactatgggattatgtactgccatcgttcagatccatcgctggtcgggaatcgtgacgctgattgcgctggacgtgcacacgacagaaaaagcacttctggagaacgttcctattggggaaccaatcctatatcatgggtcaacaagaagcagaactgtgtgtcctatctactgcagaagccgagtatattgcagcaggagacactcgacacaact

SEQ ID NO: 16904 - DNA, 374 bp, Glycine max
  unsure (1)..(374): unsure at all n locations
agcnttgatgcatcatttggagaggttaatgaaacaacgagatgatgcgctccatgagaggttggatcaaatggagaatagagatcataatgaagaagaaaggaggagaagagggaatgatggtgttcctagacaaaaccgaattgatggtattaaactcaacattcctccatttaaaggaaagaatgatccggaggcctacttggagtgggagatgaaaatagagcatgtattctcatgcaacaactgaggaggacaaaaaggtgaagcttgccgcccacggaatttccgactatgctcttgtgtggtggaacaagctacaaaaggagagagcaagaaatgaagagccaatggttgatacatggacggagatg

SEQ ID NO: 16905 - DNA, 439 bp, Glycine max
  unsure (1)..(439): unsure at all n locations
acactataaaactaagcttgagatattaaacaacaatactnttactcgttgtctgattgagtcatgtaatatttcgagacgctcgaaattgaatacggaagctctgagcaaattcaaacgacaataactttttactcggatgtctgattgaatcccataatatatcgacaagctcgaaatagaatcttgatgctctgagcaaattcaaacgacaataactttttactcggatgtctgattgagtcctgtaatatatcgagacgcttgaaattgaatacggaagctctgagcaaattcaaacgacaataactttctactcggatgtctgattgaatcccataatatatcgacacgctcgaaatagaatcttgatgctctgagcacattcaaacgaccataactttttactcggatgtccgattgagtcctgtaatatatc

SEQ ID NO: 16906 - DNA, 371 bp, Glycine max
  unsure (1)..(371): unsure at all n locations
atctgctcgtcttgctgatatttatcatgcacactnttctgatgatgacctangaacaattagggatcaacttgaaacttatgtgcttcaagtgagaagaaatgcttctttgtccacttgtgaagatgttcaaagtttggctatgaagatggttcagactgagaaacatttggtatttccattggtttataaacttattgagctagctntgatattgccggtgtcgacagcatccgttgaaagagctntttcatcaatgaagattatcaagtctaaattgcgcaataagatcaacgatgtgtggttcaatgacttgatggtatgttacaccgagcgggagatattcaagtcgcttgatgatattgatatta

SEQ ID NO: 16907 - DNA, 430 bp, Glycine max
  unsure (1)..(430): unsure at all n locations
agttttataatgtagcagttccagggaccatcgacgaacgggcgatcaatacaaaaagaatactcaatccatgggaaaggaatgaaaatcacacactntgcctcaactctgctaaagcaattggatgtacagtggtcaacattggcactcangacttcattgaaggaagggtatgtttgtaggccttctagtttccacccataaaagcagaattattgtgggcatgtacactgcagaaccacaaaatttaagatttaatttaatttataaatgaaatctggtcagatttgattatttctcgatcaaagtaattctcaatcaagttaaccccttttttaaatgattccgaatgctggtaaagtatctntatagcatgctacattnttttacagtcaaagcctntctctattctttntggcaatgctacaca

SEQ ID NO: 16908 - DNA, 429 bp, Glycine max
  unsure (1)..(429): unsure at all n locations
tgttgaagtctaaatagatggtgactagacatttngtgattcaaactccatagaaggtatatagcaactatttaattaaaaaacaacctaagaattcatttagttcatatatttcgaggagagctactggtttgtttggagtagtgcattcagatgtgtgtggaccatttatggttccttctcttggtgggaacaatattttgtttcctttgtagatgaatttagcagaatgttgtggatctttcttatcaagtccaagtcaaaaaaattttcaatctttaagaattttaagttacttgttgaaaagcaatctgaaaaaacatattaagatacttatgactgatggtggagttgagttgagtatacctttaaagagtttgaagattattgcaaaggatntggcattcaacatgaagtgatattaatatg

SEQ ID NO: 16909 - DNA, 430 bp, Glycine max
tgataaatctatatatggtttaaaacaagcctcccgtttttggtaccttaagtttcatgggataatttcttcatttggttttgatgaaaaccccatggatcaatgcatataccacaaggtcagtgggagtaaaatatgttttctttttttatatgtagatgatattttacttgtagccaatgatcaagttttgctacatgaggtgaaacaatttctctctaagaattttgaaatgaaggatatgggtgatgcatcttatgtcatcgacattaagattcatagagatagatctcgaggtattttgggtctatcacaggaaacttatattaacaaaattctagagagatttcagatgaaagattgttcaccaaatgttgctctcattgtgaagggtgataggtttaatttgaaccaatgtccaaagaatgac

SEQ ID NO: 16910 - DNA, 393 bp, Glycine max
  unsure (1)..(393): unsure at all n locations
agcttgtatggttaaagtctcacgattttcacgtgctcatgcaacaattgttagtcgtggctatacaagacatcttgccaaacaaagtcaggttagccataactcgcctgtgctttttcttccatgctatatgtagcaaagtcattgatcctgtcaagtttgatgagttggaaaatgaggccgcaattatactgtgccagttggagatgtttttccccctgctttctttgacatcatgattcacttgattgtgcatttggtctgagaaatcaaatgttgtgatcctgtttatctacggtggatgtacccggttgagcgatacatanagatcttangagggtatacaaagaatctatatcgtccagaagcatctattgttgagaggtacattac

SEQ ID NO: 16911 - DNA, 434 bp, Glycine max
tcttggatgcttactccagatacaactagattaggatttttgctccaaaggaggcgaagatgacatttatcactaaagataccaacttttgctaaagggctatgccctttcagcctaaaaaatgtagacgctacataccaatgactgatggaccgagtctttaaacaacaaataagacaaaacatcaaggtatatgtggacaacgttggcggtaagtctcgaagcatagtccaacatgtggcagatctgcaagaagtcttcaaggaactttacaagtatgacatgcgcctcaaccctgaaaaatgtactttcggggtaggcagaggcaagttcctcgacttcatgatcactcaccaagggattgaagccaaccctaacaaatgccctaccatactagagatgcacagcccgaccaacatccaagaagtctagaa

SEQ ID NO: 16912 - DNA, 359 bp, Glycine max
  unsure (1)..(359): unsure at all n locations
atctttgagcaaattcaggcgacaatatctttttactcgtatgtctgattgagtcccgtcatataacgagacgctcgaaattgaatgttgaagctctgagccaattcaaacgacaataactttttactcggatgtctgattgaatcctgtcatatatcgagacgctcgaaattgaatgttgaacctctgagcgaattcaaacgacaataactttttactcagatgtctgatatagtctcgtaatatatcgagacgctcgaaattgaatgttgaagctctgagcaaattcaaacgacaataactttntactcggatgtctgattgagtcccgtcatacatcgagacgctcaaaattgaat

SEQ ID NO: 16913 - DNA, 427 bp, Glycine max
  unsure (1)..(427): unsure at all n locations
tcaacattcaattttgagcgtctcgtaattttactgtattcaatcagacatccgagtaaaaatttattgtcgtttggattggctcagagattcaacattcaatttcgagcgtctcgatatattacgggcctcaatcagacatccgagtaaaaagttattgtcgtttgaattggttcagagcttcaacattcaatttcgagcgtctcgatatatgaccggactcaatcagacatccgagtaaaaagttattgtcgtttgaattggctcaaagcttcaacattcaattttgagcgtctcgatatattacgggactcaatcagacatccgagtaaaaagttattgtcgtttgaattggctcagagattcaacattcaatntcgagcgtctcgatatattacgggactcattcagacatccgagtaaaaag

SEQ ID NO: 16914 - DNA, 414 bp, Glycine max
  unsure (1)..(414): unsure at all n locations
tagccattgcgaattatatgcagtcgaacatatattattatgatctttatctttattctttagtataaacagaaaagatcgactttgatcagtatatgtcctatggcaatctattaaacaatttaattaattaattattcgacagaatacatatctgcaagtttcaatatatattttattcaacccaaaacttatctatatcaggaatatgagtaattatgtttcaacaccataaatatttaaagaaaaaagtaaattagttcgatatagctataactaaatcatagcagattatcaatcaagttacatgtagtagtgtatcctattgaaatgaaactatctttgagagtcttatgagctaagcacgttagaatntggaattagggtatcaggtggcccatgcattccaccact

SEQ ID NO: 16915 - DNA, 419 bp, Glycine max
  unsure (1)..(419): unsure at all n locations
agttttttcttgtttctctccccatttgaaaccaacatttttcttgagcacttcattgagaggtgctgccaatgtgctaaaatccttcacaaattgtctataaaaacttgctaagccatgaaaactcctcacctcggtcacggacttangtgtaggccattcttgaatagccctaaccttctcctcatcaacttgcactccttttgaactcacaacaaaaccaagaaacacaacatggttagtacaaaagatgcatttttcaagattggcatacaattgttcttctctaagcacagtcaagacagattntaaatgatcaatatgcaaatcaagtgaagtgttatagataagaatatcatcaaagtacaccacaacgaactttcctatgaactctctcaaatatggttcatagtctcatg

SEQ ID NO: 16916 - DNA, 431 bp, Glycine max
tccatcactgtatttggccagtttcatgattctctatattaagaagaaccgatacatccacagtgacaaaattatggtggaaggcaattgtagtgttgttgttcaacacattcttccacctaagtacaaagaacttggagttgtcatgataccgtgttccattggtaaggttgctgtaggaaaagctctcatagacttgggagctagtatcaacttaatgcctctttccatgtgctggtgacttggagagatagtgataatacatacacgcatgaccctctagttagcttattgctccatcgcaagaccatatggagtgattgaagatgttttggggaaggtgaaacaccttatattcccagctaattttgttgcgatagacatagaagaggacgctgatattcctctcattcttggtcccccattcatgt

SEQ ID NO: 16917 - DNA, 426 bp, Glycine max
  unsure (1)..(426): unsure at all n locations
tgaacctcatcgccactactagatgactccacttnctatctttctcctaaagacaacaccaagttaaaatcaatcatcacaattacttgccatcaaagctactacctttgcccataacttttccccttaggtcatagggagcatatacattaatcacctttgttggacaagaggcctcaataacttaagagggggagaaattaagtttcaaaatttcccactaactaacttttaacccttttttaaatgataggctcgaaatgcagaagaagaagcaacaatcaatttaataatgttctttaaacatgcaagacaaaattgattgcaataacataaatgagataagggaagagagaaatgcaaactcaatttatattggttcggccacttcacatgtctatgtccagtcctcaagcaacccacttg

SEQ ID NO: 16918 - DNA, 433 bp, Glycine max
tcaatacagtgacactagtgttgcaacaaaggagctgtcttagtcttttggatgggatacatatgattctttcatgcagcatgatgttcaagaactaaatcgggttctctgtgaaaaacttgaagacaaaatgaaggtatggcaagagatttggaatgtttgttcatgattcttcttgatgagtgatcataccaaatggttgttgtatgttatttttcttcaggaaactgttgttgagggaactatacaaaagttatttgaaggacaccatatgaattacattgaatgcatcaatgtagactacaaatcaactagaaaggagtcattttatggtacttccttatgcattttgaattcaattatatgtttagttcttctttgttatgtaattctaatttagtttttgcatatgcatgttagatcttcagcttga

SEQ ID NO: 16919 - DNA, 305 bp, Glycine max
  unsure (1)..(305): unsure at all n locations
agctttctgacctgagcatttgaattgagaaaaagctcattatcttcacggcagaattccccaatagcacgtacatcaacaaggttcccagagtctctaatttgaagaatgtgtatagtttgatagcgaagtgatacaattgccaataggtcatcatacaagaagacccccatattatgggttanattaacgaagtcattactgaagaccttcttgtccaagatctctccatcttccagtctaatttagtaattaatacgtgagaaatgggaacaatacataatctagagtgaacagagtatgat

SEQ ID NO: 16920 - DNA, 429 bp, Glycine max
  unsure (1)..(429): unsure at all n locations
tgtgcttcgaccaacccagcctcaatttacgtgccattgtgtaagttcttgcttaaaagtgcaaccttcaatgggaaatgtaacaacaagggtatttctataacaattgatggcactttggtggctccttcagattatagggtcaccgaaaactccggtaactggttggaattcgagcgtgtcaacggagtttcgattcacggcggggcgcttgacggccaaggcactgccttgtgggattgcaagaactccggcaaaggaaactgccccagcggagccacggtatgttaaattaattaatttaactctcatggattgaacattattcgttgacatgcacaatttcttgctcccattattattgttntgatttgatgttggaggtggagttgtggacttggtgattactgagagtttcttagtggggga

SEQ ID NO: 16921 - DNA, 420 bp, Glycine max
  unsure (1)..(420): unsure at all n locations
ntaccggtatccccattttcagaaaatggaggtgtttattcaagtcactgctatgctcgctgttggcttaatccaacctagccatagtctgttctcttctccgatactcctagttaagaagaaagacggaacctggcattaaagggcactaaaggaaatcacggttaaagattgttttcctatgccaaccattgatgaattactcgacgatttgggccaagcatcatggtttttgaagctcgatttatgccaaggatttcatcagatacgtatggtcaagacttacattcataagacagcttttcaaatgcactagggacattatgagtttaaggtcatgccctttggcctttataatgccccttctacttctcaagcaaccatgaatgatgcgctccaaccatttctgaggaaatatgt

SEQ ID NO: 16922 - DNA, 427 bp, Glycine max
ttcctttgagaatccacgaagcattatttctcttgtttaccaaagttaatgtcgctgattgaatggcagcaaaaagtgacaaaatagctgtactagagtattgacatgggtattttttgctaatctttgcttgtataatgaaccatgaagaccacaggaggcaacctagagtcagaagtatggagcctacaatccatttctctaacttggcagctggaagcgtgcttgtaattttgtttgctatgtgttgagattgtgggttgataaggggcattcctttataaaggaccaataacaaagctccaccaatgcacaccaaagttcccatgactttggctgtaccactcttgctttgcatgttcaccttctctaccctagaaaaatttcaagccaaaggatcaaaagtatttttcttgtattccacaat

SEQ ID NO: 16923 - DNA, 375 bp, Glycine max
  unsure (1)..(375): unsure at all n locations
agctttatggagattcatgcatcagggaacaatttcactttaaaagtgggtcccaattggcttcctaattttcagcttttccatttggatgtgagatcatggcagttaggtcccagctttccatcgtggattaagtcacaaaacaaacttgaatatttagacatgtctaacgcagggattattgattctattcccacacagatgtgggaagcacttcctcaggttttgtatttaaacctctctcataatcacatccatggtgagagtgggactacattaaagaatccaatatctatccccgttattgatctaagctcanatcacttgtgtggtaaataccctatctttcaagtgatgtgtctcagttagatcttt

SEQ ID NO: 16924 - DNA, 428 bp, Glycine max
tagagagattcccgatctgagagggtactgctccgtctgcaacagctctcaggtcaagatacaccaaatttgagagattcccaatctgaggaggaatcttccccatgaatccagtatgagagaggttgaggtgagtcaaggaagtcattgtcccaaggaaagaaggaattgacataccttctccaaggtattcattggcgctcaagtccaagtaattcaaatgctttaaatcagccaaacaaggacttatctctccaccaaagctccatctcctataagcttcccaatcatcattgaaaatagaatctgaagagttgaggtgaagctgaagaagatgggaagtaaggttgtggcagaggactccataccagtggcaacagttggtattattatgattccaagaccaaagcctattggaaggatctatg

SEQ ID NO: 16925 - DNA, 365 bp, Glycine max
  unsure (1)..(365): unsure at all n locations
agtcttatcttatcatttagtaaaaaaaaaaaaagttggggacagtgtgtttcttttatctgtcaactttctcccgttttctcaattaaaatgggtttaatgatgacccacgttatggaaacaaattattgttctcacatanaatttgtatccattcgcttaatcaacaacatcatcgctaaagagcttaaattggtgggcatcaagaaccaatttccttatagaagagaatgcgcccattattccaacacccgtgaagaccaccataattgaggtgttaatccaataagtgaaggatgaatttggaggcttgtatgtcatgttgtacataagcataggcagaacgaaatccaaagggatgaaac

SEQ ID NO: 16926 - DNA, 434 bp, Glycine max
  unsure (1)..(434): unsure at all n locations
ntccaagatggccaagttcaagcctaacgatgggttatttattgaaaggtgcaatacaattctgtgtatgacattcaaattttactatgttagtaggtaagattaaggattgggcagtgttgtcatggactatcgaaaagatttccaagtaacaagaagcatccgatgatgttcgatagaattcatatattgttgttgctttagaaatatatttgttatttaattccaattatattttgaccaatttcattttacgtttttaacaaaactctttataattntagtctgctataatatacgaatcattgtagagtaatatcttaaaattttaatgattaactaagatcagtgtattatgcatttcaattaatataaaaacttgtatatctcatagtatataaaaacttgcatacttcataggaaatatttgataa

SEQ ID NO: 16927 - DNA, 390 bp, Glycine max
  unsure (1)..(390): unsure at all n locations
atttttttatgtgtctagctactatataaaataacaacatctatatggttattttttaaaaagaaaaatagtgaaaataaaaatatgaatcggtgaaattaaagaaaaagtatagtaatatggagaattgagttgatgatgatgacctgcatgagcatagaaccatgcagggccgagtgcttgaatgtgcctaaagtagcgtgcggtgatggctcccattggtaacaaaatgccccacgatatggcgttaacggtgccatggatcactctcaacgtcgtgagatccgtgtgctgtggagccgacgaacccgacaatacgtcanaggtaacaatggaagacagatcggtggaagtagttggatgaatggtgggagagtagccctgaacgta

SEQ ID NO: 16928 - DNA, 268 bp, Glycine max
tatctcttcaaatcattttgaaaaggcacgaactacctatatatatgggggtctgatttccaaaagcaagagagagatattcccagagaacttcattgtcaaatgctctctcaacaacttttgggcgaacacttgccaatctattaagagttcatccaagaacttcaaatgtaatatccttcttttaaagagagaattcttcttcttcttattaaaagagattgattaatggaccgagagtctcttaagttgtaaggattcctgaaca

SEQ ID NO: 16929 - DNA, 431 bp, Glycine max
tgataaatctatatatggtttaaaacaagcctcctgtctgtggtaccttaagtttcatgggataatttcttcatttggttttgatgaaaaccccatggatcaatgcatataccacaaggtcagtgggagtaaaatatgttttctttttttatatgtagatgatattttacttgtagccaatgatcaagttttgctacatgaggtgaaacaatttctctctaagaattttgaaatgaaggatatgggtgatgcatcttatgtcatcgacattaagattcatagagatagatctcgaggtattttgggtctatcacaggaaacttatattaacaaaattctagagagatttcagatgaaagattgttcaccaaatgttgctctcattgtgaagggtgataggtttaatttgaaccaatgtccaaagaatgact

SEQ ID NO: 16930 - DNA, 430 bp, Glycine max
  unsure (1)..(430): unsure at all n locations
nttgcccaatatagctttgaaattntctcccccttgttcacaaccaagttacccttggtgagttttcactttccagaaccatggtggttatcataaccagcatcatcaagtacctgcacagagatcaaattaaagcgaacatctagagcatgtttcactcctctaagtagcaactgtattcccatgttggtttgcaaacaaacatcaccaacaccaatcaccttggacacgtcatcattacccatcttcaagactccaaaatcacctggagtgtaagatgtgaagaactccttcctgactgtaacatgcaatgtagtaccactatcaattatccacatattcttatcagatacaagattaagcgaatcagggtcatggagaataacaagatcatcactggtagcagtagtcacacagtcatcatcatgat

SEQ ID NO: 16931 - DNA, 369 bp, Glycine max
  unsure (1)..(369): unsure at all n locations
agcttcgtgcttaaatatgtatggcaaaacttcattactgttgttcaagacatagaagtgagcttgtaacaaatcttctacacttggagtgatcacctgcagtcctcttgaacccttaccacccactctgtcatcatgccgacactcangaagcccaacaactttagccttctctaagtattctgaacaaaattcaatggcttcttctgcaatgtacctctcaacaatagatgcttccggacgatatagattctttgtatacccttttaagatcttcatgtatcgctcaaccgggtacatccaccgtagataaacaggaccacaacatttgatttctcttgaccagatgcacatcaagtgaatcatgat

SEQ ID NO: 16932 - DNA, 377 bp, Glycine max
atgcttctttcactaatttataactggagaatatatttatgtttaacaaaactagttcataagttatataaaagtttactaatttttgaaaatttattacaatgacttattcaattataatagttgattaaaattgggaattgaagtagtgtaagataataaaaatggacatatatttttacataaattctagagtaaaatatgtttttagtccttaaaaaaatttacaaatttgattttagtcattaaacaatcttatttttgtccccctaatatagaaataataatgtcacaatatatactatcaagatcgaagatagagtatttccaatttagaggagcaaatacagacaaaagaatttagatgactctaaatc

SEQ ID NO: 16933 - DNA, 432 bp, Glycine max
  unsure (1)..(432): unsure at all n locations
tcgtgacgaactatttatggaaaaacttcattgtngttatttagtatatacaaatgagtttgttgcaatttctctaacatgcaaccctcgtgaaccctttcctcccactctctcatcatgctgagacttgggaagcccaaaaggttccaccttttcaatgtactttaaacaaaatttaatagcttcttttgcaatgtacctttcaacaatggatgcttcaagatggtatatattcttcgtatacccttttaagatcttcatttatcgctcaaccggacacatccatcgtaaataaataggatcacacaattgaacttcccttaccagatgaacaattaagtgaaccatgatgtccaaaaatgaaggaggaaaatacatctccagctaacataagataatagcagtctcattttccaagtcatctaactttat

SEQ ID NO: 16934 - DNA, 397 bp, Glycine max
  unsure (1)..(397): unsure at all n locations
agctttatacttgagattgaatagtttacaatctccgtccagatctagaagtcatagacaaccaacttaagaagaaaaagaggaaaaggagtattcatatggaacaagtcatggaagaaggcgaagaggtgaaccaagaatagataatcatttggggagcattaagatgacaatccctacatttcaaggcaaaaacaatcctgagttgtatttagagtgggagtgaaaggttgaacatgtgtttgattgccataattattctgaggaaaaaaagatttaactagttgttgttgaattccttgattatgctagtatttggtgggatcaacttgtgactaatangcacagaaatggtgaaaggcctattagtagatgggaggagatgaagactgtcatg

SEQ ID NO: 16935 - DNA, 397 bp, Glycine max
  unsure (1)..(397): unsure at all n locations
attttgtatctacatagagtagaagatagatcattgatccatcctccaccttgttgtgataaacacaacaatcatagagacttctcttgaatccttggctggtgataaagctatcaaacctcatgtaccattgccttggagattgtttcaaaccatacaaggacctttgcagttgacaaacatacctttcttttacttgaacttcaaacccttcacgctgtttcattagaatattttcttccaatcttccatggagaaaagcagtcttgacatcaagttgttcaagttccagatcttggtttgccactatagcaagcagaaccctgatggatgtatgcctaaccataagagaaaaaatntcgttgaaatctatntcttctttctagctgaatccctt

SEQ ID NO: 16936 - DNA, 381 bp, Glycine max
  unsure (1)..(381): unsure at all n locations
agcttgtattgtaagaaatgacaagaaactacggaatccgaaatagaatcaatgaagatcaacaaagtatgggctttagttgaagcttcaaaggatataaaaccaattggttgtaaatgagcttacaagaaaaggattggagcaaattggaaggttgaaacctacaaagctcatcttgttgccaagggatatgtcaaaagtaaggtatagattatgacaaaacttttctcccgtggcaatgctcanatcaattcggattctttttgctatagtagcatattatgatcatganatatgaaatggatatggaaaatggttttacttaatggtgagctaaaataatgtgtatatgacacaacctganggatcacaccttgtctg

SEQ ID NO: 16937 - DNA, 424 bp, Glycine max
tgtgtcacgattcactgtgacagtcaaagtgtcattttcttagaaaatcaccaaatgtaccatgagaggacaaagcacatagatgtgaaactacacttcatcatagatgtgattgaatctgagaaggtgaaggtggagaaggtttcaacaaaagaaaacctggctgatatgttcacaaagtccctctctagtgtcaagttcaagcactgcctggacttgatcaattttgaagatgcctaaagcagattggtagaagtgcagccctaaatcacaaggtagacacttgctgatttggagtcaaggtggagatttgtggtgtgtgactcaaaatcacattggctcaagtgagaaggttttaaagtggtgttgtcataactgtgttcagtcattataattgaattaggtttcacaccaatgtatagtc

SEQ ID NO: 16938 - DNA, 430 bp, Glycine max
acagcttcattaagaggcttcctctagaagcttcctcgtgacttcttcgagaagctttctcaagaggcttctttgagaagctacatccttatctatccacccctctattaactaaattaacttccttaaaaattattacggatgaaaataacgcaacaaataatcaaacatcaaacataattactaataatatatatatatatatatatatatatatatatatatatatatatcaaggtgttacaactctcccacccttttagaaatttcgtgctcaaaatttaccttactcaaacaaggatgggtgagcttctcgcatctgactttctaattcccacgtggcatcttctcctgatgcacctccccatatcaccttgaccaacggaatctctttccctcttaggtgtggtgtacgcctatcctcgatcct

SEQ ID NO: 16939 - DNA, 368 bp, Glycine max
tcttcttcgtgcttaaatatgtatggcaaaacttcattactgttgttcaagacatagaagtgagcttgtaacaaatcttctacacttggagtgatcacctgcagtcctcttgaacccttaccacccactctgtcatcatgccgacactcaggaagcccaacaactttagccttctctaagtattctgaacaaaattcaatggcttcttctgcaatgtacctctcaacaatagatgcttccggacgatatagattctttgtatacccttttaagatcttcatgtatcgctcaaccgggtacatccaccgtagataacaggaccacaacatttgatttctctgacagatgcacatcaagtgaatcatgat

SEQ ID NO: 16940 - DNA, 433 bp, Glycine max
  unsure (1)..(433): unsure at all n locations
ctgattntgtgaggaagataacggttcacttactatctatctttattacattcaaataacacatatatacatacagcaagaagaggagagagacagcttaacaagacaagacatattgttgtcttctaccataagctaagcaggaaattaggtaagataaaaaaaatagaaaatacacataattctaacactccccctcaagttggagcatataaatcgtatgcaccaagcttggagcatataaactgaatcttaggcctccttaaggacttagtcaaaatatcagctggctgatcattaaaattaatgaactcagtgacaatttctttggacagtagcttctctcggataaagtgacagtcaatctctatgtgcttggtcctcttatggaagactggatttgaagcaatgtgaatagcagcctgattatcac

SEQ ID NO: 16941 - DNA, 346 bp, Glycine max
  unsure (1)..(346): unsure at all n locations
atcttatgagagagtcaaagatcaaattgagaggaaaaataaaagttatgctaaacaagccaacaaagggagaaagaaggttgtcttcaaacccggagattgggtttgggtgcacatgagaaaagaaaggtttccggaacaaaggaaaacaaagcttcaaccaaggggagatggaccatttcaagtgcttgaaagaatcaatgacaacgcttacaaagttgagctgcccggtgagtataatgttagttccaccttcaatgtctctgatttatctctntntgatgcagaatggagaatccgattgaggacaaatccttctcaagagggagagaatgatgangacatg

SEQ ID NO: 16942 - DNA, 430 bp, Glycine max
  unsure (1)..(430): unsure at all n locations
taacaaaaggcatgcgaagagggtggaattcttatatcaattcccttatgttatcaaacataaaaagggaaaaggtaatattgtagccggtgctctttctcggcgtcatgcattactttctatgcttgaaacaaaattgattggtcttgaatgtttgaaaagcatgtatgaaaatgatgaaacttttggagaaatttttaaaaatcgtgaaaaattttcagaaaatggtttctttagacatgaaggctttcttttcaaagaaaacaaattgtgtgtgcctaaatgttctactacaaatttgcttgtttgtgaagcacatgaaggaggtttaatggggcattttggggtccaaaagactctagaaacattacaagaacattnttattggcctcatatganaaaggatgtgcagaaantttgtgaacattgc

SEQ ID NO: 16943 - DNA, 416 bp, Glycine max
  unsure (1)..(416): unsure at all n locations
gcttgtccgggaacagttatgcatgagttcatagatgtgtgctttcttgcgtccttccgaacagagtccaataagtatgacaacattaacatgagaagttctactgatacactattagaaaatatgttttctacatcggttatttatgactttcaacatcggcttttcagccgatgttgaaagtaccgacgttgatagtattatcgttaacatcggcttttgagaaaccgatgttaacgtaaaattaccaacatcggttatataaataaccgatgttgctaatatgaattacacccagacaatgtatattaatgttgaaagttaacatcggttcttactgaaaaccgatgttgttatcaagaanttttctttatataatgtctgtgtagacaaccgatgttaacgaatgtgtgact

SEQ ID NO: 16944 - DNA, 395 bp, Glycine max
agcttgaaggtaaactagatgccttggttaacctggtaacccaactggccatgaataaaaaatctgcacctgtcgccagactctgtggtttatgctcctctactgaccaccacacagacctttgcccttctatgcaacaatctgaagcaattgaacagcttgaagcttatgcttcaaacatctacaatagacctcctcaacctcagcatcaaaatcagtcacaacagaacaattatgacctctccagcaacaggtacaatcccgggtggaggaatcatcccaaccttagatggtcaaatccttcacaacaatagccttattttcagaatgctactggcccaagcagaccatacgttcctccaccaatccagcagcaacaacaacaacaacaacag

SEQ ID NO: 16945 - DNA, 422 bp, Glycine max
tcatagcttagcaagtgctcagtttcctgccaatgtaccccagaaagttgataagcacttcttcacagtgggccttggcacaactccctgccctcaaaatcaaacttgtcaaggacccaccaatgcaacaaaatttgcagcatcagtgaacaatgtctcttttatacaaccaaccactgcacttcttcaagcccacttctttggtcaatccaatggagtttactccccttactttcctattagtccattggttccatttaactatacaggcactccaccaaacaataccatggtgagcaatgggacaaaggttgtggttcttcccttcaacacaagtgtagaactagtgatgcaggacaccagcattcttggtgctgaaagtcaccctctccatttgcatggctttaacttctttgttgttg

SEQ ID NO: 16946 - DNA, 376 bp, Glycine max
agcttctacattcaattttgagcgtctcgtaatattacgggactcaatcagacatccgagtaaaaatttattgtcgtttggattggctcagagattcaacattcaatttcgagcgtctccatatattacgggactcattcagacatccgagtaaaaagctattgcagtttgaattagcttagagcttcaacaatcaatttcgagcgtctcgatatatcacgagactcaatcagacatccgagtaaaaagttattgtcgtttgaattggctcagagcttccacattcaatctcgagcgtgtcgatatattacaggcgtcaatcacacatccgagtaaaaagttattgtctgttgaatttgctcagagctttaacatt

SEQ ID NO: 16947 - DNA, 443 bp, Glycine max
  unsure (1)..(443): unsure at all n locations
ctgagccaattcaaacgacatattctttntactcggatgtctgattgagtcctgtaatataacgagacgctcgaaattgaatattgaacctctgaggaaattcaaacgacaataacttttttctcggatgtttgattgagactcgtattatatcgagacgctcgaaattgaatgttgaagctctgagctaattcaaacgacaataacgttttactcggatgtctgaatgagtcccgtaatatatcgagacgctcgaaattgaatgttgaatctctgagccaatccaaacgacaataaatttttactcggatgtctgattgaggcccgtaatatatcgagacgctcgaaattgaatgtggaagctctgagcaaattcaaacgacaataactttttactcggatgtctgattgaatcctgtcatatatcgagacgctcganattg

SEQ ID NO: 16948 - DNA, 376 bp, Glycine max
agcttgtttcctttacaattggagtcatgactaatgaacatgtacttctcacttttgtcatccaacttgtttgtatctcatttggcatgtgcacatgaccaatgcttccaaacacttttagatgtgaaatgacgggcttacttccattccatgcttcttgtggtgattatcctcatacactctttgatggagactggttagaaaggtaaactgcacaagccactgcttctgcccagaactcctttggaagtcttatgtggatcaagaggcctcaaaatacttatgaagggggggtcgaattaattattcctaaacctatactaataaagaaatcactcttctaacgcttttacttacgtttgtgagagaatattga

SEQ ID NO: 16949 - DNA, 436 bp, Glycine max
tgaatcggacctcagtgtgaaatgttatgaccattttaatttcacgagagcttccgttgttcattttcgaacgtctctatatgtgatgcgccttaatctaacatccgtgtgaaaagttatgaccatttgaatttctcaagagcttacgttgttcaattatgagcctctcgacatattatgcgcccgaatcggacatccgtttaaaaagttaagaccatttgtatttctcgaaagcttccttggttcaattccgagcatctcgacatattatttgcccgaatctgaccttcgtgtgaaaagttatgaccatttgaatttctcgagagcttccaatgtttaatttcgagcgactcgatatattataagcatgaatcggaccttagtgtaaaaagttatgaccatttgaatttctcaagagcttccgttgatcaatttt

SEQ ID NO: 16950 - DNA, 393 bp, Glycine max
agcttttaagataccgagaaagatagagctgtttgtaattttagtcctttgttctgtttgatactccataataaaatggtatattactattattattatttgttctaataaatcatttactattattattttattttatggtttgcgaaataaaaagaagataggaggtttttctagaggtgaatgatgagaccattccatgcctcttcaattaagtgtttttcattgaatctctatatttttgtcgggtcaataacatatttttgttatcagctggtgatcttattgatgatgagaattggcctccaattttcctaatcattcatcatgatattgccaataagataccgattcatgctcaaaggctgcaatatttggcctttgcaagttggt

SEQ ID NO: 16951 - DNA, 389 bp, Glycine max
agcttggcattgaacataacttttctgcacctagaacccctcaacaaaatggagttgttgaaagaaaaaataggtctttggaagaaattgctagaaccttattaaatgatactcctcttccaaaatatttttgggctgaagccgataatactgcatgctatatcatgaatagggctttaataagacccattttaaagaaaactccatatgaactattcaatggtaggaaaccaaacatctcgcatcttcatgtttttggttgcaagtgttttgtattaaacaatggaaaaagaaaacttaggaaagtttgatgctaagtaagatgaaggaattttccttggttattctttgcatagtaaagcttatagaatatataataagataacaat

SEQ ID NO: 16952 - DNA, 441 bp, Glycine max
  unsure (1)..(441): unsure at all n locations
ntggaatgaatttgttttctagcaaaacaaattattatacctatagttcataaggctaaatggaccaatctaagttttgtgcttttatttgttttttgcttagctagtctcttcttaagtaatctcccttgtttttcttgaacaataggtggcagaacgtaacaatgatcctcaattggcagacttcattgagagcgagttcttgtatgagcaggtaaaacttgcagttgaattcatagtatggttggatttcataagatataagactccttgaccattgtatgtaatacaatactctgaactctttacgtcctanaataattgttgtcttttacacggatcaagaaaataataataaataaatgaatgaaatagtaattntacacaagtaaccttacattatcattaatttatttctaaattctataattggttctcaat

SEQ ID NO: 16953 - DNA, 393 bp, Glycine max
agcttataaggtgttgtccaatcgggtgcctggatgatgggggtggtagtcaacgctcttttgaggcaatcaaaagcctctttgcatctgtcattaaagtcaaactccacctccttttgcaacaagttggacagtggaagggctacttttctaaaatcccttataaagcgcctgtagaattctgcatgaccaagaaaagatcacacctctcgcacacaagaggggtaaggcaattgtgaaataacagaaatttttgcaggatctacttcaatacccttattggaaataatgtggcctaaaactataccttgctcaaccataaaatgacatttttcaaaatttagaacaaggttagtttcaatgcatctattcaaaactttttccaaactattc

SEQ ID NO: 16954 - DNA, 382 bp, Glycine max
agctttttagtttccaagtgccaattcgtcctcttctttagtccagtcttcttctggcttcaattcatcagcgggctttccttctgtgtccagcatcttgggatgttcccagcctttgatgacagctttccaggttctgctatccagtgatttgaggaaggccaccattcttgctttccagtattcatagttgcttccatcaagaattggtggactgttcactggtcctccttctttctccatgttcatcagaatttatctccccacatctcactctgtgattgcgagtgttggctctgataccaattgaaattctgataccatgggacagatgtcgtacaggatgtcacgacatcacgcttcagaacatgcagcatatgtg

SEQ ID NO: 16955 - DNA, 445 bp, Glycine max
tgatctgctatagggttaccatcagattcggatgcattatgctgatatccccaagattgctttcagaacccaccacgtccattacgagtttaacgtattgttgtttgggttgtgcaacgcaccgtcgtccttccaagccaccatgaacctgctttttcgatcgtatctccgccacttcatcatcgtcttcttcgacgatatcctcatatacagttcttctttcgaggctcacctgagccatttggaaactgcttttcaggtgctgcttgacaatcattctgttttgaaattgtctaaatgtttctttgtgcagcctcaggtggagtaccttggacacatggtttcttgacgaggagtggaacctgtggcttctaaagtcgcagccattcatcaatggcatgttcctcattccatcaaagtcgttcgcatctttctaggcctcgca

SEQ ID NO: 16956 - DNA, 389 bp, Glycine max
agcttcttagtttcagatgatgcagatgggtttgtagctacctcatgcactcctctaatgactatggcatcatttctggcgctaaactgctaggagttggaagccatcttctctattaaatttctggcttcagcaggagtcatgtctccaagggctccatcactggtagaatctatcatacttctctccatattactgagtccttcataaaaatattggagaagaagctgttctgaaatctgatggtgggggcaactggcacatagtttcttaaatctctcccagtactcatacaggctctctccactgagttgtctaatacctgagatatatttcctaatggttgtggtcctggaagcacggataatgttttctaagaatactctctt

SEQ ID NO: 16957 - DNA, 438 bp, Glycine max
tcaagaataatgacatcatccaattatttatttcccgaagggaattctataaataggcctcctatttttaatggcgtgggttaccattattggaaaacccgcatgcaaatttttatagaggtaatagatctgaatatctgggaagcaatagaaattgggccctacattcccactatggtggcaggaaatacaaccatagaaaaacctagggaagaatcgagtgaggaagaaaagagattagttcattacaatttaaaagccaaaaatataattacatctgctttaggaatggatgagtactttagggtatcaaattgtaaaagtgcaaaagatatgtgggataccctacaattaacacatgaaggtacaacagatgtaaaaagatctaggataaatacattgactcgtgaatatgaattatttagaatgaatccaaat

SEQ ID NO: 16958 - DNA, 445 bp, Glycine max
  unsure (1)..(445): unsure at all n locations
tgcatgtccaagtttcttgtgccatacccagggatttcctttgatagataatagacatgttacatcttgatttgatagttcactaggattaatcttataaagttttcttttcctcttagcagtaaaaatttgggtcccattttcgtgttggatgacacacccacctttgctgaaggaaacatcaagtccaatctcacataattgacttatgctaagcagattgtatttaagtcctttaacaaatagtacattctcaatgggaggatagggatcaatacttatctttcctactctttctatcttccctccgaaaatgattgctccaccatgcatgagggtcagacattggaatatacatttttctcatgtcatgtgatgtgagcagccactgtccaggttccatgattggtgtgtttntgttgtggttgaatatatccgcaacaag

SEQ ID NO: 16959 - DNA, 392 bp, Glycine max
agctttattctatctgcaatgtttaacaacttaaaggaccaatgtctgattctccccactatcttctccacaagaggcaggtaatgatggacattgagtttcttgcaagacaaaggaacccccaaatatcggacaggcagagatccctcttcaaaccttgtgatcttctttataactcgaatgatgtcacaattcaagccaccacaaaacaccttacactttgttggattaatctgtagtcctgtagacttacaaaagaaactgaaagcctttagaatcatctctatagacttctcatcacctctacaaagaagaagaacatcatctgcaaagggcaaatgagtaatcctcaatcgctcacattggctgtgattattaaagttaggatctct

SEQ ID NO: 16960 - DNA, 446 bp, Glycine max
  unsure (1)..(446): unsure at all n locations
ctcagctatgctgcnacattataatagaccccctcagaagcatttccaacaacagcagaataattatgatctttcaagcaacagatacaatccaggttggaggaatcatccaaatttgagatggacaagtcctccacaacaacaacagcctgtccctaccttccagaatgttgttggtccaagcaagccatatgttcctcctccaatgcaataacagtagcagaagtcacaacaaagacaacaagcaactgaggctcctcctcaaccttccttagaagagttagtgaggcaaataaccatccaaaatatgcaatttcaataagagacaagagcctccattcagagtctgacaaattagatggagcaaatggctactcagttaaaccaagctcagttccaaaattctgacaaattgccttcacagactgtgcaaaatccgaaaaatg

SEQ ID NO: 16961 - DNA, 365 bp, Glycine max
agctttatacctatgcttctccttcttctccttgaaaagggccaggagagacacaccagaaaccttcacgaccttgaacctgactccaggaatatcacccacggcatgaccttttcgtccaaatccagctatcatgacttcattctacaaccatcaaccacataacattaggataagcatatcagcaccaacataacagcaaaataaagtaaatatgattgatgaatcacttacattctcttcaatataatttaagcaaccgtcatttggcacaaatgcagcaatcttcttccatttttgatgagttgaccctggcacattttcaatggcagagttgggctgcttacctcataccactggcatag

SEQ ID NO: 16962 - DNA, 444 bp, Glycine max
  unsure (1)..(444): unsure at all n locations
tctggtgggacatcttgatgcaatcctccctaggaagggaccaatcactagaaccatgagcaagaggctccaagaagattgggctagagctgctgaagaaggccctagggttctcatgaaccttagggtagatttctgagcccatgggccaaggttgggtccaattatctttgtacatattagactaggatgtcattatatttggtccttgtatatagggctccatattgtaggtagggtaccctagaaatataggatttttcagcccttgtattttttgggcacctagactagtttttatattaggggtagttntgtaatttcacatgcactaagtggatatttgatgtgtgtggttggaaataaatttaattgaattggtagaagcccaatccaattaaatnttagagggggaggtgagcatttgcttactacaccccattg

SEQ ID NO: 16963 - DNA, 445 bp, Glycine max
  unsure (1)..(445): unsure at all n locations
tataacatgattntgtgttncacatcccctggagcatattttgacttatcattcaacaaagacaagggaccaccaacttacagaattcaaggtcaatcttgccatctaatagggagtttattaccaatgccaggaaaacctcctaaattttctcacttgtatatctatggtacagagaataaaatccaaaatagaattggaggcttaaggtaaactataattcttataacagatactaaagtcataataataaattgattgttcttaggttatattaacttacaagtttaataatgcagatttgggaaccaacttgatccaaagattgttgccaagttaaaagatatgttttaccatcataatgtctttgctaaatctttcggaatggcaaaggaaatatttgagaagataaaatcacatgatctgaaattgcaatagatatctc

SEQ ID NO: 16964 - DNA, 437 bp, Glycine max
  unsure (1)..(437): unsure at all n locations
tcacaaaagtttatatggcttgaaacaagcaccgttgctgtgatacaaaatgtncaatgagtttatgagcaactcaggattcaaaagatgtgacatggaccattgctgctatgttaagaaatatactaatagttatgttatcattgtcgtgtatgttgatgacatgttgattgcaggatctagtatgacagatattaacaagttgaagtagcagtgggcagaaaactttgaaatgaaggatcttggtccagctaaacaaatccttggtatgagaattcttagaaacagatcagaatgaatcttaaagctatctcaagagaaatatatacacanattgcttgacaggttctaccttggagattctaagaccaggaatacccctttgggatctcatttgaagttttcaaagaagcaatctttgcagacagatgaagaaa

SEQ ID NO: 16965 - DNA, 436 bp, Glycine max
ttcactcggatgtccgatgcacgcgcatcatatatcgagttgtctcgaaattgaacaacggaagctctcgagaaattgaaatgatcataacttttcactcagatgtccgattcagacgcataatatatcgagacgctcgaaattgaactacggaagctctcgagaaatttaaatgattatgaattctcactcggatgtccaattgaggaacatcagatatcgagacgctcgaaattgaacaacggaacctctcatgaaattcagatggtcataacttttcacacggagatccgattcaagcacatcacatatggagacgttcgatattgaaccacggaagatctcgagaaattcaaatggtcataacttttcactcggatgtccgattcacgcgcatgatatatcgagacgctcaaaattgtacaacggaagctct

SEQ ID NO: 16966 - DNA, 438 bp, Glycine max
ttaatgttgtgactaacaaggtgcataacagagaatgggatttggtaaagtttacacacaacatatatgtatcttctattttaatttcagaaataacctttgattgtggagcagttatacttggctaatcaagagaaattccacaaagtggctgacaaaaattactggaaagctattggggagatcattcctcgagaggttcccaacattgagaagaaaagaagcaaagtggatcacgagaataagccatcaatcacagtcgtccaaggcccatagcctggctaacccacagatctttctaggatgaggcagatattgttgaagctgaaacatacaccaccagctcacatgattccccctcctactgcacctgctaaagacgccatagatgggaacgatggaaaagacggaatagaaacagcatctaaagccaatgga

SEQ ID NO: 16967 - DNA, 389 bp, Glycine max
agcttatgcttttctttatattgtcacacagatttcatattcttaatggctgctgttttttcagacacttcctatttttcttgatggccttgttactgcatggggcgctatcctaatttctgtgacattaattcttttgtttggtgaggtgagaaagttctgtccttatatgattttaagtataatacattcatgtcacagattaagtgcttgtgttgattgtttagaggttggaacctggaacaaaaatctggtggcacagcacccgttttgtttggttcacgttttttccatttgtgaaagacattttttgttaattagaatcaattccagttgaagtgggaaccactagcttctcattcctctaatgttatgtttggcaataaaaa

SEQ ID NO: 16968 - DNA, 444 bp, Glycine max
tccccatcttcccagcaccaaccaccaacactccagaatctgcaaatgaggaatccggtagcttcatcagtgcaagctccacagcagccgagcttacagaaactgatccagatgaaatgttagtctcggttctaacccgcttcccaaccgatatcgcctgcttgaacaaaccactgattttcttatcaaaaccaggcactccctgtccagctttcacaacctgcttcacctgagcaagaatttgaccttccccaagaacaagtgagtcaagccctgacgccacttcaaatagatgctgcgcggcgtacgcgttatacagcaaaacttggtgctcccgaagctcaggtattgaaatccactcacctaaacaaaaaacacaaccatgagttttcctttccaaacaaaaacaagaacttagcatgggtaaatcacctatttcgtcca

SEQ ID NO: 16969 - DNA, 416 bp, Glycine max
tgtcaaatggaaggataggataccctatgctttctggaatttcaacccaacagtgtctattattaggagagaactctgcaagtgcaacaccacagaaaaacatgattggaatgcaagaatatatgacatagtaaatatataatctaaaaatttacttttgttataggttaatgcattaattatctcaagattaaattaacacattttttctctctctcttttcaacaatggttgcgagagagagcaagtaattttgagaactcaaaacttgaaaatgaatgtacctttaggtaaagttttgaagcatattatatgattgtgatttttttaaataattattatagaaggggttagtttacttttttgaatctgtcacatataaacttttttagattgtacttactaaattttgaaac

SEQ ID NO: 16970 - DNA, 392 bp, Glycine max
agcttgacaggttcatgtgcaggtgcaggtgctgctgctagtggaggcacttcaatttgcttgccagacctcatggtgatggcactcacatttttcgaatttttcacagtctgtgaaggcaatttgtcagaattttaggactgagcttggttcaactgagtagccatctgccccatttgatttatcagactctgaatggaggctcttgtctcttgctaaaattgcatattctggatggttatttgcctcactagctcttctaaggaaggttgcgaaggggccttagttgcttgttgtctttgttgttgttgttgttgttgctgcattggaggaggaacatatggcttgcttggaccaacaccattctggaaagcatggcatgctgttgttgt

SEQ ID NO: 16971 - DNA, 432 bp, Glycine max
  unsure (1)..(432): unsure at all n locations
ngaaggacatgcacaaagtgtgactatatgatgtggtaatatggtgtagcaagcaaatgctcacctccccctctaaaatttaattggattgagcttctcccaattcaattaaatttattttccaacacacacatcaaatattaacttaatgcatatgaaattacaaaactacccctaatctaaaaactagtctaggtgccccaaaatacaagggctgaaaaatcatacatttgtagggtaccctacctacgttatggagccctaaataaaaggcccaaaaataatgaaaccttaatctaatatgtactaaaataagtgggctcacacttagcccatgggcctaaaatctatcctaaggttcatgagaaccctanggtcttctcttgcatctctagcccaatctacttggagtcttctatccaatgcccttgc

SEQ ID NO: 16972 - DNA, 438 bp, Glycine max
  unsure (1)..(438): unsure at all n locations
ntgagggaacccgccattnttcataatagaacactggtaatgtgtctactatcattgttatcatttctttctccgtctttgagggaaccacttgggctgccagatctctccacctttgggtgtattctttgaaagattcatgccccctttttgcacatgttctatagttgcatcctatccggagccatatcagaattgtactaatactgcctaacgaaggcaaccattaggtcctttcaagaatggactcgggaaggttccaagttagtgtaccaggtaacaactacgctagtaagacttttttggaagaaatgtatcagtagttcctcatcttttgcgtatgcccccatcttctgacaatacatctttagatggttcttgcggcaagtagtccccttttactctctggtaatcgattaccatattgttgtcatcgat

SEQ ID NO: 16973 - DNA, 433 bp, Glycine max
  unsure (1)..(433): unsure at all n locations
tagcaaagaaaaagcaattganaaagtgaaactctgtcttgtttatcgcttggaagtttatttttcaaataattgatataaaagtcaatgatagtatcattaaggcatttctcacgctgtaaaagctcaatatcgctctttttgatacaaacagcatcagggtccccctttggatacgcctttttaaatgcagcagaatcatgctccactatctggtctcccaagttaatttcatcttctgagggattgaagttgaagtagaaatcaaagaaaatgttagacttgatttttttttttttttatgagggaagaaagaaataaaatataagtaactactgtctaacataagtaacactgcacctaaagaatcttgaatctagacatcttgttataaaattacttttaaataagataatatgaatgctattttttt

SEQ ID NO: 16974 - DNA, 432 bp, Glycine max
  unsure (1)..(432): unsure at all n locations
tatgctgcanatatttacaatagacctcctcaacctcagctgcaaaatcaaccacagtagaacaattatgacctctccagcaacagatacaaccctggatggaggaatcaccctatcctcagatggtccagcccttagcaacaacaacagcagcctgctccttccttccaaaatgctgctggcccaagcagaccatacattcctccactaatccaacaacagcaacaaccccagaaacagccaacagttgaggcccctccacaaccttcccttgaagaacttgtgaggcaaatgactatgcagaacatgcagtttcagcaagagaccagagcctccattcagagcttaaccaatcagataggaccattggctacccaattgaatcaacaacaatacctgaattctgacaagctgccttctcaagctgtccaa

SEQ ID NO: 16975 - DNA, 390 bp, Glycine max
agcttctagattagtgtactaaacaaccgcggctccggccaagctatcttggaaaaagtgtattaatagtttctcatccctagagtgcgcgcccatcttgcgacaatacatcttgagatggttcttgggacaagtcgtccctttatacttgtcgaagtccggcaccttgaattttggggggataacaacatctgataccaagcaaagatccgcgaatggatattcaccaaagccttcaacagccctcaatctctcctcgaggagatcgagtttccatctttcttcgatcgtcgggggtggtccttctgtggacaagattattggttgtgctgtgaagttgggatgatgcaaagtgttgcgtgccggcccctcgacgaggatcggtgggta

SEQ ID NO: 16976 - DNA, 446 bp, Glycine max
  unsure (1)..(446): unsure at all n locations
tgaagganaactggatgcgttggtcaacttggtaacctagctggccttgaatcagaaatctgtacctgtcgcaagggtttgtggtctgtgctcctctgctgaccaccatatagacctttgcccttccatgcagcaacctggagcaattgagcagcctgaagcttatgctgcaaatatttacaatagacctcctcaacctcagcagcaaaatcaaccacagcagagcaattatgacctttccagcaacagatacaaccctggatggaggaatcaccctaacctcagatggtccagccctcagcaacaacaacagcagcctgctccttccttccaaaatgctgctggcccaagcagaccatacattcctccaccaatccaacaacaacaacaaccccagaaacaaccaacagttgaggcccctccacaaccttccctcgaagaacttg

SEQ ID NO: 16977 - DNA, 435 bp, Glycine max
  unsure (1)..(435): unsure at all n locations
tcagcccaagcctcttgaaatgcctgcattgcatttcaatgtatatacagatgcttctattacagtaccaacttggcaacttccacaaaaaataataagtataataaaaaaatacaataccaagtaccaacttaagataacaatttaattagaattatttactgtcattcaattacaagttgctatgtgtagtaaatttatcatttttttattcaaatttatcaatttttatcataattactataaaagttatatttatgatgatttctaattgattgatattataaattttttaacacttaaatgtgtgtgcatataatgtattgaatttaaaaacataatttatttgcatatttaatagcttcacaattaaaatacgttntctatacgttaaaaagatactatattaaatactaggtggtgctgagatcactg

SEQ ID NO: 16978 - DNA, 388 bp, Glycine max
agcttattctccttcaactgcacaaggctcttaatatttgaagagtatccttgtggaaccttcacccgacgaagacactgacaaaaacttatcttctccttcttggacaaagtatggcaggctgggggcaagtaaattttcttcccatcagaccttggatgcaactgtgatcgtatacccatatcagctagatcttgacgagtattcaagccatccttcatcttgccttgaatgttaaggagcgtcccaatcacactgtcacaaacatttctccacatgcatgacatcaatacaatgtctaacgtcaagatcacaccagtacggaagatcaaagataattgacctcttcttccatatgcaactctgactattatccttcttttgggtc

SEQ ID NO: 16979 - DNA, 439 bp, Glycine max
  unsure (1)..(439): unsure at all n locations
nttgttgagaaacaaagtggcaaacttataaaagtcttgataagtgacaagggaaaagaagtgagttttgagaggcagttgactgttggctatacacctcaacaaaatggtgtatctgaaaggaacaatcaaaccgtgatggagaaaggaataccaaaagaattatggcctgaggctattaatacaaccgtgtacttgttgaataggtgcccaacaaaagcagtatgaaatatgacaccatttgaagcatgaaatggaagaaagcctttagtgaaccacataaaattttttggatgtgttttgctacgctcaagttcctaaagaaaagattacaaagcttgaagaagcaagtgagagatgcatctttattggctatagttccgtgtcaaagggctatagactctacaacttgaagaccaagaaagtgatcattagccga

SEQ ID NO: 16980 - DNA, 415 bp, Glycine max
gatctggttgaaatatcttgctagaaggtgtttctattatgcttgtattccaagcattcctgacatacttcacttggcacttgaatgtgtggcaaccagtgcaccatattatccctatgtacgaagtgtggatcctgaaattgagatgcccaaacttataatgccaaagccacttacttttgctcactgttgtggctagacattcatgtcccataccattaattcctaccttaaaggatgtgttctttgacataagatcctttaaaactagtcttttcttgttgtcatacaccattagcacattatcctccattttcatcacaaatcctttctccaggaattgaccaaggcttaagagattattcttcatttcgggcacaaaaagcacaccagatatgaaagattgtttaccatc

SEQ ID NO: 16981 - DNA, 375 bp, Glycine max
tgttgcaagcttgttcaacctatcaagagtcacattctaacaacaattgttccagcttggagaattcatcaatggatggatacatggagctataagaacaattgataactgtttaatatgagttattttgataataagaatatattgaaaatatttttaaaaatatttatttaacagttattcttggcttaaatattaagatttgatatctttcttatttatgacgttgccatatgaaaaggagagattaaaagagataaagatcgaaaaaatatccaagatatcaggaaatcattactagctaaacaaatcctaaagatatcacaaatatcaataatgaagatttttaacatcacgcccaagtcactacaacaa

SEQ ID NO: 16982 - DNA, 401 bp, Glycine max
  unsure (1)..(401): unsure at all n locations
agcttgttacaagattctccttgcctggcacttcaaaaccttctggttgggtcatatagatgtcttcctctaaatccccatgcaagaatgcagttntaacatctaactgctccaagtgaagattctctgcagctactatgctcagaataactctgatggtagtcatctttacaactggagagaagatctctgtgaaatcaattccttgtttctgctgaaaccctntcaccacaagtctcgccttgtatcttcttctaccgtcagattcttcctttagcctatagacccacctattctgtaatgccttctttccttctggcaatntagttaaagaccacgtcttattcttttgaagggatgtcatctcatctttcatcgctagctcccactcaatagtgtca

SEQ ID NO: 16983 - DNA, 373 bp, Glycine max
  unsure (1)..(373): unsure at all n locations
tgaaggacatgcacaaagtatgactatatgatgtgtcaatggngtgtagcaagcaaatgctcacctccccctctaaaatttaattggattgggattctcccaattcaattaaatctattttccaacacacacatganatattcactcaattcatgtgaaattacaaaactacccctaatacaaaaactagtctaggtgccctaaaatacaagggctaaaaaaatcctacatttctagggtaccttctctatattatggagccctaaatacaaggccgaanaataatgaaaccttaatctaatatgtacaaagataagtgggctcatacttagcccatgggcccgaaatctaccctaaggctcgtgagaaccct

SEQ ID NO: 16984 - DNA, 342 bp, Glycine max
  unsure (1)..(342): unsure at all n locations
gtgagcaaattcaaacgacaataaccttnttctggatgtctgatngagncccgtaatatatcgagacgctcaaaattgaatgttgaacctctgatgcaattcaaaggacaataactttttactcggatgtctgattgagtcccgtaatatatcgagacgctcgaaaatgaatgttgaacctatgagccaattcaaacgaccataactttttactccgatgtctgattgagtcccataatatatcgagaggctcgaaattgaatggtcaacctcttagccaattcaaacgacaataacttgttactcggatgtatgattgagtcccgtaacatatcgagacgc

SEQ ID NO: 16985 - DNA, 454 bp, Glycine max
  unsure (1)..(454): unsure at all n locations
tagcccatcatcaatattgatttcaagaaacaaanaagcaagtatatatatcagtgaactgagccagaccaaggaaaaatacatcaaagaaaataaataatctagtatagctaattttataatcagataaagcatctaagacctgctgccatgtggtatcaacaagaggcagccgccgagcattgccagcatcaaaatccagtacaccataatccctcaaccgaatctacacagcaataactaaaataagaagtcttttgagaattaaatgcatggcattatctataagacacattgttcaaaatgagacaaacccaaaggaaggcacggattctttgcaaattcccaacaccaacaccaagagcagcctaccattagataaaaaagcaagcagaaattaagtgttgataacaaaaacaaattcatgcttgctctcttatatngaatatgaaac

SEQ ID NO: 16986 - DNA, 350 bp, Glycine max
  unsure (1)..(350): unsure at all n locations
agcttctactgtgaagctatcttcgtatcgagcatggccaaatatgcatgacagtcggtttgcgctttacaagttgccattgcgggttcccaaagatgaccaagaatatgctggtttatggggaagaacttttggttggcctcctggaaagccttctgaagacaagcctggaaaggctttattctttcttctgctctcttatgaggagttccagggacaacagcttctcattgcaaccaaaattttggaaggcacacactatgtgttacatcctaacggttcancaattgttacagcaaatatcaatgatccttcatcccaacccttttcctgggacactgatgcagact

SEQ ID NO: 16987 - DNA, 406 bp, Glycine max
  unsure (1)..(406): unsure at all n locations
agcttatgctccttcaattgcacaatgctcttaatatttgaagagtatccttatggaaacttcacccgatgaagacactaacaaaaatttatcttctcctttntggacaaagtatgacaagttgggggcaagtaaattttcttcccatcagaccttggatgcaactgtgatcatatccccatctcagctagatcttgatgggtattcaagccatccttcgtcttgccttgaatgttaaagagagtcccaatcacattgtcacatacattgttctccacatgcataacattaatacaatgtctaacgtctagatcaaaccagtacggaagatacaagagaatggacctcttcttccatatgcaagtcttaactttatcctttctttgggtctttccaaatacagtat

SEQ ID NO: 16988 - DNA, 357 bp, Glycine max
ggtttgcaagcttgttcttcattctctacgccgacgccactggtattcaaatgcatatctgcaatatctgcctgcttccacactttaactaatgtgtactttgataattggatttttgcattgcttgttttttccctttcattgcaggtatatccagagcacatgtgccacctctggggaaggactatatgaagggctggactggctctccaacaatatagctaacaaggtatgccttgaaaatctgcatcttttgtgttcgttgcttgacctgtgatactctgatttctggttacttttctggatcacgcctaagggacattttgtggaatgccgctatcttcttgcttgctttac

SEQ ID NO: 16989 - DNA, 455 bp, Glycine max
  unsure (1)..(455): unsure at all n locations
tccttcactcttccagcacgaccaaacaaatccaccacgctgccatatatctctatatctggtgttatattataataactggtcattaatctaaaatatctcagcccttcgtccactagaccagcatggctacaagcacttagaactgccataaacaccatcttatctggtttaatatgatgagaatcatgaaacaggccaaatacagtctaaaggcccaagtggagaaggacgaaggcccaagtggagaaggacaaagcccccgagtggagaatgatgaaggcccaagtggagaaggatgaaggcccagaggcagagacactatcaagactattaattgttgctgaaggcccaaactaatttgaaggcccaagttaaataagtttctagttataatttatttttattggaattttggcccanactgtctagaaagcccatgtctatttttatct

SEQ ID NO: 16990 - DNA, 429 bp, Glycine max
  unsure (1)..(429): unsure at all n locations
ntactcatgaccaccaatggtctatatatatgtgacttattcacgaaattactcagagattntcagaacaacaaagtgtttatcctctcaaagagcaaattcattttatcctcttaagaattccttggccaattcaattgcaattcattaaggaattatttgagtgctcaatctgtaaaatccatctctttctagagagatttgttcttcttcttcttctcattttctaagggattaagagactgtgagtctcttgttgtaaaggatctctaaacacaaaggaaggattgtccttgtgtgtttagaacttgtaaaaggaatttacaagatagtggaactctcaagcgggttgcttgnggactggacgtatgcacaagggtgtggtcgaaccagtataaaactgagtttgcattctctcttcccttaatc

SEQ ID NO: 16991 - DNA, 435 bp, Glycine max
  unsure (1)..(435): unsure at all n locations
tctagaattgcatgtaaaaaatatatggcataatttgctgtaaaggaagctttccactcaagagtgtaagtacatccattccatgttcttaggatcaacaaaatgctttaatgtgctagagctgatagtgtttagtctggaatcagaggtgcatctagaaagtcacagggaacatgtgctagagtcaccattggtcaggttctttntcttatgtgttgtaaggagaacaacaatcatcatgcacaaaaggctctttgtggtgctaagtttaagttccctagtcgtcagaagatcatagttagctggtgtcagaccctaatttcatatgggggcaatcatttgcaaacatttggattctttctagccgaattgagctgcttaacacttgattttgcaatcatttcaccttngaagtcatgattttgcacactttga

SEQ ID NO: 16992 - DNA, 395 bp, Glycine max
  unsure (1)..(395): unsure at all n locations
agctntactaatagaatcatcttgatatgactgttttggaagtcctcttacgaggctatgcttttgaagctttgagattaacctccagctagcatggtcaaacttcttattccatacncagtaatgctctttgactaaaagtaagcatgacaccttttgattggatagatcaccaagtttaatcttatagtgatttccttgtctcttagtagacaagagtaaagagttgtcctttgtttggatgatacacatatccttgttaaagttaaaggtgacattgtatccactatcatacaattgacttatgctcaacaaattatgcttcaatcctttaacaagtaaaacattattgatagaaggataataaggaatacaaaccttacctacacctatta

SEQ ID NO: 16993 - DNA, 462 bp, Glycine max
tatgctgcaaacatctacaatagacctcctcaacctcagcagcaaaatcagccacaacagaataactatgacctctccagcaacaggtacaatcccggatggaggaatcatcccaaccttatttggtcgaatccttcacaacaacagcaacaacaacaaccttactttcaaaatgctgttggcccaagcagaccatacgttcctccaccaatctagcaacaacagcaacaacagaaacaacaaacagttaaggcccctccgcaaccttcgcttgaagaacttgtgaggcaaatgactatgcaaaacatgcagtttcagcaagatatcaaagcctccattcagagcttaactaatcagatgggacagttggctacacagttaaatcaacaacagtcccagaattctgatagattaccttctcaatctgtccagaatcacaaaaatgtgagtgccattacattg

SEQ ID NO: 16994 - DNA, 417 bp, Glycine max
  unsure (1)..(417): unsure at all n locations
agcttcttatccaaggctcatcttggtggtgaagctccttcttccatggcttattccctaatggatggcgcctcctctcacctcttctcctttgtcttccgctgcatctccatggtggaaaatcactattaaaggacctcattgaagctcanagatccaacctccatagaaaccccacaagcaagcttccatcataaccactctatttcccctaccagggatatccaacttggtcactgcactccccatgtacatacacaacatacatcatcacaatgacattatcaacatcaacaacatctcatctcaatgtcattatcatcatcaacatgatcccatctcaatgtcattctcaacatcaacatcatctcatctcaatgacattatcaacatcaacatcatctgatttcaatgacg

SEQ ID NO: 16995 - DNA, 389 bp, Glycine max
  unsure (1)..(389): unsure at all n locations
tagctttcgtncctgagttntccgactatgctcttgtgtggtggaacaagctacaaaatgagagagcaagatatgaagagccaatggttgatacatggacggagatgaaaaagatcatgaggaagcggtatgtgccggctagttactcaagggacttgaaattcaagctccaaaaactaacccatagcaacaagggggttgaagagtatttcaaggaaatggatgtgctcatgattcacgctaatattgaagaagatgatgaggtaactatggctcgcattcttaatggcttgactaatgatatccatgatattgttgagctgcangagtttgttgaaatggatgatttgcttcacaagatgtccgatccactagcataatataacgag

SEQ ID NO: 16996 - DNA, 419 bp, Glycine max
  unsure (1)..(419): unsure at all n locations
ntcatagttcaattccgagcgtctcaatatattatgcgcttgaatcggacctccgagttacaagttatgaccatttgaatntctcgagagcttccgtatttcaatnttgagcgtctctatatgtgatgtgcctaaatcggacatccgagttaaaagttatgtccatttgaatttctcgagagcttccgttgttcaatttcgagcgtctctatatgtgatgcgcctaaatcggacatccaagttaaaagttatgaccatttgaatttctcgagagcttccgttgttcaatttcgagcgtctcgatatattatgcgcctgaatcggacctccgattgaaaagttatgagcatttgagttgctcaagagccttcatatggtcaattctagcgtctcgatatattatgcgcctgaatcggacc

SEQ ID NO: 16997 - DNA, 318 bp, Glycine max
  unsure (1)..(318): unsure at all n locations
agcttangctattggagggagaataaaacaatccaaaatcaatcgtacctttcaagtnacgcaaaattctttttgcggcttttagatgacgagaggtcagagcctccataaagcgacacacaatctcccaccgtattatagaatatcgggccttgtattggttagataccttaaactccccacaagactcttgaagatcatggagtctaccttctctccttcatcagactttgataacttcaagccaccttccataggtgtgttcacgggattgcactcaagcatattaaatgtcttcaacacttcttgtgtgtacct

SEQ ID NO: 16998 - DNA, 455 bp, Glycine max
  unsure (1)..(455): unsure at all n locations
tgcagagctcaataattgattggatagagaatcaaacttttatttatctgttagatgacattctgtttactcatgatcaaattaatttaattgttgaaatattttataatttacaacaataagtatcttaacattttcagacaccaaatttgatattatatattaaggttagttcaaaattgtagaaacttcagcaaaattttgaattaatattctcccatttcatgtttatccacatagtttctaactaataataagcttaataacatatgcataaatgttgaacaattaaaatgctaaaaataacatgatttatgtttttaatatcaatggctnggagttcttgatttctaacaacgaatagagaatagcactacagcaagcacactgaaggaagagtattcataaggtgcaacatcagtataaaatgggatagaagtgataaaccaccatca

SEQ ID NO: 16999 - DNA, 378 bp, Glycine max
  unsure (1)..(378): unsure at all n locations
agcttgtatgatngatggctgaggggaagcgggcgcaagatntcgtgtgtgggttggcgccgaggattaagagggttgcagagcgcgctgatgagcgagcgcgtaagatgaagaagcatcatggcgttaagttcagttggattttcaataaagaattgcttttgtgaaatttcagttaagacttaagagataagagatagaggtcaacgtgagtcaacaggtttttggctttgtgactattttgagtcttgtttgtacgtggcattntgagtacgaataatgaacaatntaacatggattgcgtgtaatggacattgttggatccatggttgttgttctggtggatacaaaaccagtaggaactttttgttgaacgtt

SEQ ID NO: 17000 - DNA, 443 bp, Glycine max
  unsure (1)..(443): unsure at all n locations
taagctccttcaactgcacaaggctcttaatatcttaagagtatccttgctgaaccttcacccgacgaagacactgacanaaacttatcttctccttcttggacaaagtatggcatgctgggggcaagtaaattttcttcccatcagaccttggatgcaactgtgatcgtatacccatatcagctagatcttgacgggtattcaagccatccttcgtcttgccttgaatgttaaggagcgtcccaatcacactgtcacaaacatttttctccacatgcataacatcaatacaatgtctaacgtcaatatcacaccagtacggaagatcaaagaaaatggatcttttcttcatatgcaactctgacttttatccttcttttgggtcttcccaaatatagtattcatgtgttgaacccgctcatataccttctcaccagtcaatg

SEQ ID NO: 17001 - DNA, 345 bp, Glycine max
  unsure (1)..(345): unsure at all n locations
agcttttacacctttaatcaagcttagttcaactgcaaccatcagaacgaaaccctattctattacccggattatcatacacaatctcaaaggttttttgttggacgttcccaaatatggttatttgactatcatctttattgtgaataaatgccaaacaagactgtttatcatcgaactcatagagtacccctggcgggtgtaagtccactgtgacgccaggaaagacgaatgacatttcaggaatnggataatgatatccagtaagatcataacacgtgtcaaatacattgtgcgaggnggcagtgggatagttggacaaacgctgctgaaatactgaacgga

SEQ ID NO: 17002 - DNA, 399 bp, Glycine max
  unsure (1)..(399): unsure at all n locations
agcttcttatccaaagctcatcttggtggtgaagctccttcttccatggcttattccctaatggatggcgcctcctctcacctcttctcctttgtcttccgctgcatctccatggtggaaaatcactattaaaggacctcattgaagctcanagatccaacctccatagaaaccccacaagcaagctttcatcataaccactctatttcccctaccagagatatccaacttggtcactgcacttcccatgtacatacacaacatacatcatcacaatgacattatcaacatcaacaacatctcatctcaatgtcattatcatcatcaacatgatcccatctcaatgtcattctcaacatcaacatcatctcatctcaatgacattatcaacatcaacat

SEQ ID NO: 17003 - DNA, 435 bp, Glycine max
  unsure (1)..(435): unsure at all n locations
tctanactntgtacaagaatgaagctctgataccacttgttagtctagtggcctcagatatcttaagaagggggggttgaattaagatattccaaacttttctcctaattaaaaatctatcttactttttacttaagttatgaattcccttaatgacaatcttcttaaatattaattcaaatgaagcaacttgaattatgaatataaagcaataataaataaaggagattaagggaagagaaaatgcaaactcagttttatactggttcggccacacccttgtgcctacgtccagtccccaagcaacccgcttgagagttccactaacttgtaaattccttttacaagttctaaacacacaangacaacccttcctttgtgtttagagattctntacaacaagagactcacagtctcttaatcccttagagaatg

SEQ ID NO: 17004 - DNA, 368 bp, Glycine max
agcttttacaagctggaatcattcatcctatctctgacagccaatgggtgagtcctgttcaagtagtcccgaagaaaaccagcctaaccgtgataaaaaattacaatgaggagttgattcctactcgggtgcagaacagttggagagtctgcatcgactatatgaggctgaaccaaggtaccaactataacgcctggcaagtaaatctcactactatttccttgatggcttatctggttatatgcaaatcactattgctcatgaggataaagaaaataccacattcacctgccccttcggcactctttcctatatgatgatgcctttcagcctgtgcaatgcccttattaccttctaactgtgcatga

SEQ ID NO: 17005 - DNA, 350 bp, Glycine max
agcttcttcatcagaccacttccagtgtgctggaactacttcacatggacttgatggggcctatgcaagttgaaagccttggaggaaagaggtatgcctatgttgctgtggatgatttctccagatttacctgggtcaactttatcagagaaaaatcagacacctttgaagtattcaaggagttgagtctaagacttctaagagaaaaagactgtgtcctcaagagaatcaggagtgaccatggcagatagtttgaaaacagcaggtttactgaattctgcacatctgaaggcatcactcatgagttctctgcagccattacaccacaacagaatggcatagttgagagg

SEQ ID NO: 17006 - DNA, 387 bp, Glycine max
tgttgcacatagttatcaaagtgcgtgatgagtgtttcatattgagcttgagttctgttgtagcctgcattgccaatgtgatctgatttcttcccgtattgattgtgaacaacgagtaatgcagatgcatggccggcgagttcggtcaaatggagcacgtaaatgcatattggagagttctttgttgggttagaggcgtcaaggaggttaatcattggtggcacatttctagggctgtggatgcacaccatgactctgaactctgtgtctgtttgagacatttgaatatctcttcttttgtaagggatgatcccctttgatgtttagtatatagctgatatcccatgtacagttataccatcattagaatgttataatcaccattga

SEQ ID NO: 17007 - DNA, 434 bp, Glycine max
  unsure (1)..(434): unsure at all n locations
ntctattctaattntgaaatccatgaaggtaccctaatgtctgaagtttatgggattaagatggtcattgaccaatccctattttttgacttaacaaaattgcctagtgaaggtgtaccttttgagggtgcactgattgatgaatggaaatttgatttctctatgcatgatgtatgccaattggtttgcaccaaccaagcggatatgaccggaaggcttcttgccggttcattggcttttgaaagtcgcatcctccattatcttatagttcgcattttgcttcctagatcttcaaaccttgcctaggtttctgaagaagacctcattgtcatgtgggcctttcataaaggtctacaaattgattgggcacatcttgttagatatcgcatgcataaggcatcgcgattgaatgccccattaccttatcctcatct

SEQ ID NO: 17008 - DNA, 456 bp, Glycine max
  unsure (1)..(456): unsure at all n locations
tcaagaaaaagatggcctcagcaaattccttatttccagattggtattctatcaatagacctccaatctttaatggagagggttaccactactggaaaacccgaatgcaaatttttatcgaggcaatagatctaaatatctgggaagccattgaaatagggccttatatacccaccacagtagaaagagtttcaatagatggtagttcatcaagtgaaagcataaccatagaaaaacctagagatagatggtctgaagaggatagaaaacgagtacaatacaacctanaagccaaaaacataataacatctgccctaggaatggatgaatatttcagagtttcaaattgcaagagtgctaaggaaatgtgggacactcttcgattaacacatgaaggaactacagatgttaaaagatctaggataaatgcactaactcatgagtatgaattattta

SEQ ID NO: 17009 - DNA, 402 bp, Glycine max
  unsure (1)..(402): unsure at all n locations
agcttcctcgtggcttctttgagaagctttctcaagaggcttctttgagaagctagatccttatctatccacacccctctattaactaaattaacttccttaaaaataattacggatgaaaataacgcaacaaatattcaaacatcaaacataattactaatagtatatagatatatatatatcagggtgttacaactctcccacccttttagaaatttcgtcctcgaaatttaccttactcaaacaaggatgggtgagcttctcacatctgactntctaattcccatgtggcatcttctcctgatgcacctccccagatcaccttgaccaacagaatctctttccctcttaagtgttttggttgcctatcctcgatcctcanatgcaatgtttcatatgtc

SEQ ID NO: 17010 - DNA, 345 bp, Glycine max
  unsure (1)..(345): unsure at all n locations
agctttactaatggatagtaagaaccataaatacctagccccaccagtaggttacaaaatatttataaagtataaaccgtacctatttaaagcctatgaagagagagagtcacacagttttcccatcacaaggtcatgttaaaactcaacatgaaaagatacattccctaagttgatttgtgctctcttttaaactgactactaaattgagagggacttttaaattactgaactattcttcaattaacattaataaaggatccttggttnctttgtagcagggtcctcttgctgctccggttcttcaacacctgacanaagcagatttaagcaagatgtactttg

SEQ ID NO: 17011 - DNA, 402 bp, Glycine max
  unsure (1)..(402): unsure at all n locations
agcttctaagcataatattgtttgacgacatcagagttcacgggtgaaggtagctcttcgccatccatgttggtaagcaccagggctcctccggagaaagccctcttcacaacaaaaggcccttcgtagttcggggcccatttccctcggtggtccttgacagcatgggacattttctttagcacaaggtctccctcatggaacttgcgcaagcgtactttcttgtcgaacgcgctcttcattctttgctggtacaagcgcccatgactcatggccgttaagcgcttaccctcaatgagggtgagctgatcgtagcgtgtttgagcccactctgattcctttaatccggattctgccaagatccttaatgacgggacttctacctcanatggtaacaccgcc

SEQ ID NO: 17012 - DNA, 390 bp, Glycine max
  unsure (1)..(390): unsure at all n locations
tataatatatcgatacgctcgaaattaaacatcgattactctcagganattcaaatagtcataacttttcacacggatgtccggttcgggcgcataatatgtcgagaagctcgaaattgaacaacggaagatcttgagaaattcaaatagtcataacttttcacacggatgtccgattcaagcttataatatatcgatacgctcgaaattaaacatcggaaactctcgcgaaattcaaatggtcataacttttcacacggatatccgattcgggctcataatatgtccagaagctcgaaattgaactacggaagttcttgagaaattcaagtggtcttaacttttcacacggatgtccgattcaggcacatcacatatcgagacgctcaa

SEQ ID NO: 17013 - DNA, 366 bp, Glycine max
agcttgtgagttacaaagtcttgaataagcaattatgtgagtatttagtattcttgaataagcaaattatgtgagtggtcactctattctaatataaataggggatcatactcttgtatttggtgtgccaaatgaaataaaatctttttcttcttccaacacagtggtatcagagcttgagttctagagtgttgagaaagaaacactttgtgagttgagagagacatactctgtgagttgagagatggcaagcaatggcttaagtatgtttcaattccctcgtcttaccaaagagaattatgataattggtgtcgtcgcatgacagccttgttaggttctcaagatgcatgggagattgtagagaa

SEQ ID NO: 17014 - DNA, 456 bp, Glycine max
  unsure (1)..(456): unsure at all n locations
atactaagcttcactcgatgtccgattcaggcgcatcatatatcgagattctcgatattgaacaacggaagctctcgagaaattgaaatgatcataacttttcactcagatttacgattcagacgcataatatatcgagacgctcgaaattgaactacggaagctctcgagaaatttaaatgatgataaattctcactcggatgtccaattgaggaacatcagatatcgtgacgctcgaaattaaacaacggaacctctcacgaaattcaaatggtcataacttttcacacggagatccgattcatgcacatcacatatggagacgtccgaaattgaaccacggaagatctcgagaaattcaaatgggcataactnttcactcggatgtncgattcacgcgcatgatatatcgagacgctcaaaattgaacaacggaagctctcgataaattaaat

SEQ ID NO: 17015 - DNA, 338 bp, Glycine max
agcttcttcattcaattttgaccgtcttgatatgtgaagggactcaatcagacatccgagaaaaaaactattgtcgtttgagttggcttaaaaccttcacattcaatttcgagcgtctcgatatgttaagggactcaatcagacatccgagtaaaagttatgggcctttgaattggctcagagcttcaacattcaatatcgagcgtctcgatatggtacgggactcaatcacacatccgagaacaaagttatcgtccgttgagttggctcagagcttcaacattcaatttcgagcgtctccgtatgttaccggacctcatcagacatcccgagaaaaa

SEQ ID NO: 17016 - DNA, 432 bp, Glycine max
  unsure (1)..(432): unsure at all n locations
ntgagccaactcanacgataataactntntactcggatgtctgattgagtcccgtaacatatcgagacgctcgaaattgaatgttgaacctctgagccaattcaaacgacaataacttttttcacggatgtctgattgagtcccgtaacatattgagacgctcgaaattgaatgttgaacctctgagcaaattcaaatgacaataactttttactcggatgtctgattgagtcccgtaacatatcgagacgctcgaaattgaatgttgaagctctgagccaatacaaacgaccataactttttactcggatgtctgattgagtcccgtaacatatcgagacgctcgaaattgaatgttgaagctctgagccaatacaaacgaccataactntttactcggatgtctgattgagtcccgtaacatatcgagac

SEQ ID NO: 17017 - DNA, 435 bp, Glycine max
tgtttcagtctcaaataaaccaatgaagtaatattatggttcaatatcatggaagtaagcacattcggtccaccatgaaactttaattgatttagagcaaataactcatgataatatcacccccacacaaatgaatcacgtacgttttctacaagctccaatgccaggtcctttgctgattcaccatcaagataatacactgacccaattaaattgctaaacttatcgacaccttccaggacaagccgaacctacataccattaggattagaaaattttcagaattgcaaaatcaatataacttatagaaacacattactcacttctcgattcaatacacgcatctcagtgaaaaatttagcatcatgtgcaaaaggatcggctgcagtttcagcaacagatgttgaaactgcaagcctttgtgcagatgtaagt

SEQ ID NO: 17018 - DNA, 411 bp, Glycine max
agcttattacttttatttcgagcgtctagatatattacaggactcaatcaaacatccgagtaaaatgttactggcgtttaaatttgcttaactctccagctttaaatttcgagcgtctcgatatatgacgggactatatcagacatccgagtaaaaagttattgtcatttgaatttgcttagagattcaacattcatcttcgagtgtctcgttatattacgggactcaattatacattcgagtacaaagttattggccgttgaattttctcagagcttcaacaatcaatttcgagcgtctcgatatattacgggactcaatcaggcatccgagtaaaaagttattgtcgtttgaattggctcagagcttcaacattcaatttcgagcgtctcgctatattacgggactata

SEQ ID NO: 17019 - DNA, 371 bp, Glycine max
  unsure (1)..(371): unsure at all n locations
ctaagctttgagcaaattcaaacaacaataactttntactcagatgtctgattgcttttccgaatatatcgagacgctcgaaattgaatgttgaagctctgagccaattcacacgacaataactttttactcggatgattgattgagtcccgtaatataacaagacgctcaaaattgaatgttgaagctatgagccaattcaaatgacaataactttttactcggatgtctgaatgagtcccgaaatatatcgagacgctcgaacgtgaatgtgaacctctgagccatttaaacgacaataactttttactcggatgtctgattgagtcccgtaatatatcgagacgctcgaaattgaatgttcgaagctt

SEQ ID NO: 17020 - DNA, 415 bp, Glycine max
  unsure (1)..(415): unsure at all n locations
tctttattttcaattacgagcgtctccatatattacgggactcaatcggacatccgaattaaaagttattgtcgttagatttttctcagagcttccgatttcaattacgagcgtttcgctatcctacgggacataatcggacatccgagtcaaaagttattggtcgttgaatttgctcagagcttcagttttcaattacgagcgtctcggtaaattacgagactcattcagacatccgaattaaaagttattgtcatttgactnttcatagagcttccgttttcaatttcgagcatctcgatatattacagggctccatcggacatccaagttaaaagttattcgtcgttgatttttctcagagcttccgttntcaattacgagcgtctcgaatcctactggaccaatcggacat

SEQ ID NO: 17021 - DNA, 421 bp, Glycine max
  unsure (1)..(421): unsure at all n locations
ttggagtttccaagtgccaattcgncttcttctttaanccattcttcttctggcttcaattcttcagtgggctttccttctgtgtccagcatcttgggatgttcccagcctttgatgacagctttccaagttctgctatccagtgatttgaggaaggccaccattcttgctttccaatattcatagttgcttccatcgagaattggtggtctgttcactggtccgccttctttctccatgttcatcaaacgtatctcctagatctcactctgtgatttcgagtgttggctctgataccaattgaaattctgataccaggggacagatgtcgtacaggatgtcacgacatcacgcttcagaacatgcagattatatgtgtccgtatgaacagattaaaccaagtaataacacaagagaattg

SEQ ID NO: 17022 - DNA, 400 bp, Glycine max
  unsure (1)..(400): unsure at all n locations
ttcttagtcttagaggggatggaccttttcaagttttggagaggatcaataacaatgcctataggttggacctcccagaagagaatggagtcagcaccacttttaacatttctgatttaattccttttgcaagtggagcttatattgaggaggaggaactaacaaatntgaggtcaaatcctcttcaaggggaaggggatgatgcaatcctccctaggaatggaccagtcactagaatcatgagcaagaggctccaagaagattgngctagaattgctgaagaaggccctanggttctcatgaacctcanggtagatttctgagcccatgggccaaagttgggtccaattatctttgtacatattagactangatgtcattatatttggccttggattta

SEQ ID NO: 17023 - DNA, 359 bp, Glycine max
tccatcaatattaaagactgcttttaggacacgttatggtttctatgagtatctagtcatgccctttggtgtgactaatgctccaggtgtgtttatagaatacatgaatagagtctttcacccttaccttgatagttttgtggtagtattcataaatgatattttggtatactccaagactagagaagaacatgaagaacacttgaggattgtgttgcataccctttgggactgacaactatatgctaagctatcccgtgtgattttggttagagaaagttagtttcctagggcatgtgatatctcaagggggcataactgtagatccctctaagatagaagtcgctcttgagtgggag

SEQ ID NO: 17024 - DNA, 396 bp, Glycine max
  unsure (1)..(396): unsure at all n locations
agctttttaattgttagttagaaccatanatacctagcctcaccagtaggttacaaaatatttataaagtataaaccgtacctatttaaagcctatgaagagagagagtcacacagttttcccatcacaaggtcatgttaaaactcaacatgaaaagatacattccctaagttgatttgtgctctcttttaaactgactactaaattgagagggacttttaaattactgaactattcttcaattaacattaataaaggatccttggttcctttgtagcagggtcctcttgctgctccggttcttcaacacctgacaaaagcagatttaagcaagatgtactnttggggtttccaagtgttggacatcaatggtgtgcagtgctttctcacacggac

SEQ ID NO: 17025 - DNA, 426 bp, Glycine max
  unsure (1)..(426): unsure at all n locations
tttcttctctcgtatgaaatgaanatcaatctctatgtgcttagtcctttcatgacaaactgggtttgaggcaatatgaagagcatcctgattatcacaatacaacttcattggcaactcttcacaaaacctcaattcctgcagaaactatttaatccacatgagctcacaagtaaccatagccatagatcgatattcagcttctgcactggaccgagcgacaactgtctgtttcttgtttttccaagaaataagatttcctccaatgaagacacaatagcctaatgtagaccttctatccatgggacaaccatcccaatcagcatcacaatatcccgatagttgtgtattacccttgtcttcatacaataaccctagaccaggagctttttaagatatctcagatacgcatgacagcattccaat

SEQ ID NO: 17026 - DNA, 409 bp, Glycine max
  unsure (1)..(409): unsure at all n locations
tgcntttgcatcnngngagaacccacatgggatcaaatgacaaagcatatcagtctgtttatcaggaacctgatgaagatgagattgtgggtgtttccctctcacggtcacttctaagtgtagctgcttcagctttgatgaccaatataacagacttangccctcttgtcttgccctattccgagcagctgcgctatggatggtcagtgatttccaggaaaatgtgggcaaggcggaacaaggaaatgtatgttccanatttcatgaaggctttngagcatttctgcatacatgctggtggtaagtcagtcgtagatgccatagaggagagtctgaagctgcacaagaaagacggtgaagcctcaaggatggcattatacagaattggcaatacttcatcttcttctgt

SEQ ID NO: 17027 - DNA, 366 bp, Glycine max
  unsure (1)..(366): unsure at all n locations
ttctttttattttacatggattatcaatgatcttttaatatatatctgtattcccttatcaatacattatnttggagtaaaatgtcaagttttacatacttgacataacagattgtcattattctagtcagctatcaatgatctattatattaatgcagctcacaacagattcctttgtttctttaatacaagcatataattctaagacagatagtttggttaatttacgtcctgctcagtcagtggtctgggatgccatggtgccttccaaaaagaggacatgtgcaggtcgtccgaaaccctcatctgttgagaagctcaccagagacctgtgcactattcttcatgaacaacagtctttattt

SEQ ID NO: 17028 - DNA, 426 bp, Glycine max
  unsure (1)..(426): unsure at all n locations
agcttctacattcaatttcgagctnttcgatatattacgggactcaatcggacatccgagtaaaaagttattgtagtttgaatttgctcagggcttcggtattccatttcgagcgtctcgatatattacgggactcaatcggacatcagagtaaaaagttattgttgtttgaatttgctcagagcttcggtattccatttcgagcatctcgatatattacgggactcaatcagacatcggagtaaaaagttattgtagtttcaatttgctcagggcttcggtattccatttcgagcgtctcgatgtattacgggactcaatcagacatccgagtaaaaagttattgtcgtttgaatttgctcagagcttctacattcaatttcgagcttttcgatatatttacgggactcatcagacattcgagta

SEQ ID NO: 17029 - DNA, 427 bp, Glycine max
  unsure (1)..(427): unsure at all n locations
ttgagaaaattcaaacgacaatatctttntactcggatgtttgattgagtcccgtaatatatcgagacgctcgaaattgaataccgaagcgctgagcaaattcaaacaacaataactttttactcggatgtctgattgagtcccgtaatatatcgaaaagctcgaatgtgaatgtagaagctcagagcaaattcaaacgacaataactttttactcggatgtctgattgagtcccgtaatataccgagatgtcgaaatggaataccgaagctctgagcaaattcaaacaataataactttttactcggatgtccgattgagtcccgtaatatatcggaacgcttgaaatngaatgttgaagctctgagcaaattcaaacgacaataaacttttactcggatgtcttgatgagtcccgtaatatatcg

SEQ ID NO: 17030 - DNA, 429 bp, Glycine max
actaagcttacaacattctcgtgcgttatctccctgagtaactgctgtatcaaatgatattcactcaaaaccaatccaaaccgccaaaccattaaataattttttttttataaaaaaaagcctcctctggctcaagcctcttcaaggtttccaaatactagaaactacagagaactaacaaaagaaaaggaaaatagataaatgaaaaaaaatggcaatttcttcagaaactcgaaattaaaaacaatctaagcgaattcgcttcgaatttcaaaattacaacttccctaggtgtaattaagcaagcagagaaaggaataccatgatttcacgtatggcggtgggagagacaccatcgccatccttggattggcttgaattttttatggcgaatggatttccgcgattggtggaagacttgatgcgagc

SEQ ID NO: 17031 - DNA, 436 bp, Glycine max
tagcaaatggacctgggtattgctcagtttcattatatcttccgtaatactcatcacctctatcatatctaataatttttatatttatgtctaattgcccttttacttcattgtagtaaatttctaaggcatccattgcctaagaaatctcgggcagtaagtagacataactgtaacgtgaataatcatcaataatggtgataaagtatcattcctttccgaaagaactaacatcaaaaggtccacaaattcaatatcacaatttcaagaagctgagtgcttcttgtagctcttttctttgtatgttttgcttgttttcccttaatacaacccacataaatatttagatccgtaaaatctagataaggaagaatttcattctttattaatatttccatcctttctctagaaatgtgacctaaacgtttatgccaca

SEQ ID NO: 17032 - DNA, 302 bp, Glycine max
agcttttccaaagaagatggtgtcatccgcaaactggagaatattcactgcgaccttgttcttccccaccataaagctgtgaaataagtttcttgacactgcttccctcatcaatcctgttaacccttcagcaaccaagacaaataataaaggggccaagggatccccttgtctcaatcctctttgaggcttaaattcatcagttgggcttccatttacaaggatagatattgaggctgatgtgaggcatcctttaacccaaccaatccacctttcatgaaaccccattcttctcatcatat

SEQ ID NO: 17033 - DNA, 410 bp, Glycine max
  unsure (1)..(410): unsure at all n locations
agcttgtatgtaaactatatgccttggttaacctggtaacccaattggccatgaataaaaaatctgcacttgtcgccatactctatggtttatgctcctctgttgaccaccacacagacctttgcccttctgtgcagcaatctaaagcaattgaacagcctgaagcttatgctgcaaacatctacaatagacctcctcaacctcagcagcaaaatcagccacaacagaacaattatgacctttccagcaacagatagaatcctgngtggaggaatcatcccaaccttagatggtcgaatccttcacaacaacagcaacaacaacaacatccttattttcagaatgttgttggccctagcagaaccatacgttctccacctatccagtagcaataacaacaacagcaacag

SEQ ID NO: 17034 - DNA, 426 bp, Glycine max
  unsure (1)..(426): unsure at all n locations
agctttataattctctatagataacaatcacccttgagcaatccctaatcatgtgaagaaatgactccttaatcgctccacacctgcaacaagaaaggttagaagataaatgtcgtttaacacgaaaagaaattgtagggaggctgccatggaaggcaagtcaaaggaagaatttgacanttttaggtaaaggaggcttccaaacacaagaccagttcactagaaaagaagaatgaatggcaggctctcggattaaccactcgaaggcatatttagttgaaaagcaccctaaactagatgggttccatataattntgtcaagcatatgaataacaagtgtggtactcatcattttgagtctaatattanttggtagagttgataaacagtgtcccaattcactgccctcaatggaatgtattatgc

SEQ ID NO: 17035 - DNA, 381 bp, Glycine max
  unsure (1)..(381): unsure at all n locations
tatcttattttccgatcgcgaccctctgttcatcagtggattctggcaggagctntttaagctcagcggcactcaccttcgtatgagttcagcctaccatccacaaagtgatggtcagactgaggttatgaatagagtaattgagcagtatttgcgcgcttttgttcaccgtcggcccggaaattggcgtaaatacttaccctggattgagctctcacacaacacttcatggaattccggcacaggttccacgccctatgagattacatttggacgataaccttcttcattaccggaatacatctcgggaacttcanaatttgatgctgtggacgaatctttatacaccgagaggaagtgttcattgcattcgtagaaatt

SEQ ID NO: 17036 - DNA, 429 bp, Glycine max
  unsure (1)..(429): unsure at all n locations
tgcttgtactttccagtgatggaatgaatccatatggcagtttaagcactcaacacagttcatggcctattttgctagtaatttaaaacttgtctccttggttgtgcatgaagcaaaaatgcatgatgttatctatgatgatatcaagcccaagacaactaggaaaggacattgatatttatctcagtcccttgattgaagacttgacaaagttgtgggacaagggggttactgtgtttgatggtatcaaaataagacatttaagttgcgtgcaatgctatttcgtaccattaatgactttccagcatacgagaatntgagtggatatagtgttaagggccatcatgcatgctctatatatgaagaagacacaagccatgtacaattgnacatggaagaaaatatatacactcggcattgcattttcta

SEQ ID NO: 17037 - DNA, 416 bp, Glycine max
acctcggtggtaaaaggtatgagcatttgaatttctcgagagcttccattttttaatttcaaacgtctcgatatattatgcgcccgaatcggacatccgtgtgaaaaattatgaccaatagaatttctcgagagcttacgttggtcattctcgagagcctctatataggatgcgcctgaatcggacatccgagttaaaagttatgactatttgaatttctcaagagcttccgttgcccaattatgagcgtctcgatatgtgattcgcatgaatcggacatccgtgtgaaaaggtatgactatttgaatttcacaagagcttccgttgctcaattttgatcggctcgatatgtgattcgcccgaatcgaacattcgtgtgaaaaggtatgaacatttgaatttctcgagagcttccg

SEQ ID NO: 17038 - DNA, 419 bp, Glycine max
  unsure (1)..(419): unsure at all n locations
agcttgtctacttccttcttcactacatcaagaatcactgggttgagtcttctctgtggctgtcttactggtttagccccatcctctanatttatctaatgcatacatgtggatgggctaataccaggaatgtccgccagggtccagcctatagccttcttatgcttcttgagaattgataaaaacttctcctcttgctcatcaacaagggaggcaaatataattactggaaaacgtttgctatcatccaagtaagcatattttanatttgatggcagaggcttcaattctggtgtgggcggttggataatggtagaaggagatggtntctcagcctgtacctcataaagacagtcagaggtatgtgtacttcctgaaacatggctagttctatcagactctacgacacctactctacg

SEQ ID NO: 17039 - DNA, 427 bp, Glycine max
  unsure (1)..(427): unsure at all n locations
agcttttctgaaacatcatctaacacatcctttatgggagaaataacattagactcatcaaaggaaacatgaatggatccttcaatagtcataantctcttattgtatattctatatgctttactatgcaaggaataaccaaggaagattccttcatccgacttggcatcaaactttcctaagtttcttttccattatttaatacaaaacatttgcaaccaaagacatgcatatgtgaaatgtttggttttctaccattgaataattcataaggagttttctttaagatgggtcttattaaagccctatttaagatgtagcatgcagtgttaacagcttcagcccanaagtattttgaaagtggagtatcatttaataaggttcttgctatttcttctaangatctattnttcctttcaacaacacc

SEQ ID NO: 17040 - DNA, 428 bp, Glycine max
  unsure (1)..(428): unsure at all n locations
taacctanatggctcccattccttccctaaaccacattctttctgaattctttagtgtctacaccttcttggcgccaaatgaacgtcttgctcattctcgtcttccaattaaattaatgtaagaactaagaagggttcttggtatactctctctaactctaacacaacacacatgatgtattagtattagtttaaatttagtgaaaattataaaataaaataaaaattcaacaaatgttaagttgaatccacagaacttatatttttaactaataataaaagaacgtgtttaaaagagcttgttggtaatattttttcatgtgtaattaaatgtaggtaattattatacaagttcatttaagacattgtgctgtttggtttagatttaatttaatatactgtgaatatcaacttgacattttattttt

SEQ ID NO: 17041 - DNA, 441 bp, Glycine max
  unsure (1)..(441): unsure at all n locations
tatcagtcaagcccatanataaatgtggcaaaatttgccatgttataaaaataaggtcgaaatgtggaattaagtctactattaatatactatttatctaaatatataaatacatagtgtttttttactttaaataggatatcaattttatatttattagattcaatcattaaaaactaatttttttaaacgggggaactttttggatataaaaatctattgttagataaaaattaattcctttaaaaaagataacgcaaatattattataaagtctatacatatatatacattagaatataccttaaaaaatttatttattntattattatctaaacaattagtatatataaatattctacaatagaagaattccaatatataaatatatagtacatagatnntaatatatgtgtgaggtaattctactttntaaatatt

SEQ ID NO: 17042 - DNA, 433 bp, Glycine max
  unsure (1)..(433): unsure at all n locations
agcttttaaagttagcattanatgtaaactaggcgaatcctaagagtgtttggatgaccacattcaaggttcccaacaaaacactcactatcctaaggaagaattgcctaaaattattacacacaaatggaattntggtaacctattggaggctcccaacacacttccattgaaaggcctttttgttacaaaacttgaaagcaatgaaggtaagtaaattgcaaattacaaaattacaaaatggtcctcaattntggtggttgttctctctttggtgattcactcaatttggagtgcttcttagtccaatagctcttaaggtggttggttcctttcttcttgactcanattcttcaaggcatggcaccaatcctccttccaattccctatatggcaacccacanacaaggaaacaaagagacaagcaataatc

SEQ ID NO: 17043 - DNA, 439 bp, Glycine max
  unsure (1)..(439): unsure at all n locations
cttgtgcattcaatatcctgatgagggtgttccatatgttcttatgactgttctaatacatttgctgcccaagtttcatggtcttgcaggtgaagatccttataagcatcttaaggagttccatattgtttgttccaccatgaaaccccctaatgtccaagaaggtcatatctttctaaaggcttttcctcattctttggagggagtggcaaaagattggctacactaccttgctcccaagtccattttcagcanggacaccttaaagggtgttcttggagaaattctttcttgcatctaggaccactaccatcagaaaagacatttcaggcattaggcaacttagtggagaaagcttatatgaatactgngtgagattcaagaaactatgtgccagttgtcctcactaccagatttctgagcagcttctccttcaata

SEQ ID NO: 17044 - DNA, 435 bp, Glycine max
  unsure (1)..(435): unsure at all n locations
ttcttgttagccaaatccacacactcgtcttcgttcagttgattaatagtcttctggtaaggtatgcagcctattggcccaacgtttcctatgacaaactttctagcatccatttggtaaagtctctgccattccaatcaaacatgccaagttacacatgacaaaaaataaaataaaataaaatacagtaaatntttgtttggattnttttttaataaacatttataaaagaaaaacccaaaagtaaactgaaataaacttcttgcctcatcaatcaaaatgaaataagttaatttataaaaatccttccacttaattttttcaaaaactgattntaacttataagagaagtttaactcgtgtatcttntttatcttagaataaggaaacaagaaggtaanataaaacaatnttttataaatngatataacttat

SEQ ID NO: 17045 - DNA, 433 bp, Glycine max
  unsure (1)..(433): unsure at all n locations
tatcttttgcaacagcattattaattntgtgagccccagtgtgattgagatcttccctcttcagataaatgtgaggtccttcaccattaggcctcttgtaatgctccgtcaacctttcagcaaaataaagaggactctcccggccaacataatcttttagaatcccagccagttctgtctgcaactcaaaatctaagaaaatttccattgtttttccttccaggaaactacatttcatggtttctgaatgtagttaacatacaaatatgagagatgtgctagtatgtangagagacaganagttattctgaatctaattgagtgaagattaacatggagttccaaattggttagttctgtatgaaactcgaaaaatanaagactaaagaaattctgaagaatgaaatgatacacattcaaacagtcacaaaat

SEQ ID NO: 17046 - DNA, 388 bp, Glycine max
tagccattgcgaattatatgcagtcgaacatatattattatgatctttatctttattctttagtataaacagaaaagatcgactttgatcagtatatgtcctatggcaatctattaaacaatttaattaattaattattcgacagaatacatatctgcaagtttcaatatatattttattcaacccaaaacttatctatatcaggaatatgagtaattatgtttcaacaccataaatatttaacaaaaaagaaattagttcgatatagctataactaaatcatagcagattatcaatcaagttacatgtagtagtgtatcctattgaaatgaaactatctttgagagtcttatgagctaagcacgttagaatttggaattagggtatc

SEQ ID NO: 17047 - DNA, 434 bp, Glycine max
  unsure (1)..(434): unsure at all n locations
tatgctgcaaacacttataatagtatctcctcaacagcaaatccaacaacaatagaataattatgacctttcaagcaatagatacaatccaggttggaggaatcatccaaatctgagatagacaagtcctccacaacaacatcagcctgtccctcctttccaaaatgctactggtccaagcaagccatatgttcctcctccaatgcaacaacaacagtagcagtcacaacaaagacaacaagcactgatgccctcctcaaccttccttagaggatttagtgaggcaaatgaccatccagaatatgcaatttcagcaagagacaagagcctccattcagagtctgacaaattagatggggcagatggctactcagttgaaccaagctcaatcccaaaattctgaccaattgccttcacanactatgcagaatccg

SEQ ID NO: 17048 - DNA, 422 bp, Glycine max
  unsure (1)..(422): unsure at all n locations
tggaggaagaaggagatgaataaagggagagggagagaagatcatgattttttgtgctctaagagagctctgaaatctgaagtttaattttcaaatgatcaaagttgaaaaaattgcacacacatgacctctatttatagcctaagtgtcacacaaaattggagggaaatttgaatttctattcaaatttcacttgaatttgtggagccaaattttggagccaaaatttcactaattatgattagtgaattttaacctggttctcccactaatccaagatgaagtccaagattctccactaagtgtgcttaggtgtcatgaggcattgtaagcatgaaggacatgcacaaagtgtgactatatgatgtggcaatggggtgtagcaagcaaattctcaccttcccctctnaaatttaattgga

SEQ ID NO: 17049 - DNA, 402 bp, Glycine max
  unsure (1)..(402): unsure at all n locations
agctttatttnttaattacgagcgtctttatatattacaggactcaatcagacatccgaattgaatgttattgtcatttcacttttcatagagcttccgttttcaatttcgagcgtctcgatatattaaagggctcaatcggacattcgagtaaaaagttattgtcgtttgatttttgtaagagcttccgttttcaattccgagcgtctcgatatcctatgggacacaatcaaacatccgattcaaaagttattgtcgtttgaatgtgctcagagcttcagttttcaactacaagcgtctcgatatattacgggactcaatcagacatctgaagttaaattattgtcatttgacttttcatagagctctcgttttccatatcgagcgtcttgatatattaat

SEQ ID NO: 17050 - DNA, 430 bp, Glycine max
  unsure (1)..(430): unsure at all n locations
ntaagaanagtcaaccgacaattacttntgacttcggatgttgattgtttcctggaanacatcgagacgctccaaattgaaaatggaacctctaagaaaagtcagacgacaataacttttaactcggatgtctgatcgagccctgtattatatgaagacgctcgaaattgaaaacagaagctctaagaanagtcaaacgagaaaaacttttgactcggatgtccgattgtgtcccgtatgatatcgagacgctcgactgaaaacggaagctctgagaaaaatcaaacgacaataacttttaactcggatgtccgattgagccctgtattatatcgagaccctcgaattcgaaacggaacctctaaaaaagtcaaacgacaataacttttaactcggatgtccgattgagctctctaatatatcgagacgc

SEQ ID NO: 17051 - DNA, 406 bp, Glycine max
agcttttattatgcatgtcatattcttaatagggctccttataaaattttgaaaaaaacctttatgagttatggagaaaaagagaaccaaatatgaaatatcttaaagtgtgggagtgtcttgcaaaggttaacatccctattaataagaaaagaaaaattggaccaaccgttgattgtgtttttgttggatattttttgcatagtactacttatagattcttggttgttaattctaaagtgttcaaaatttctaataatactattatggaatctagagatgacactttctttgaaaatgtttttcctttggaaaaaaaaaattgtctaaacccgtttgtgatacttcttattctgatttgtcatcttgtagtaattctaataaggatgttgtttttgaacctata

SEQ ID NO: 17052 - DNA, 411 bp, Glycine max
ttcttgcaagcttaaacattcaatttcgaggctctcgatatattacgggacttaatcaagcatccaagaaaaaatttattgtcgtttgaatttgctcagagattcaacattcaatttcgagcgtctcgatatattacgggactcaatcagacatccgagtaaaaagttattgtcgtttgaattggctccgagcttcaacattcaatttcgagcgtctcgatatgttacgagactcaatcagacatccgagtaaaaagctattgtcgtttgaatttgctcagagattcaacattgaattgcgagggtctcgatatcttacgggactcaatcagacatccgagtgaatagttattgtcgtttgaattggctcagagcttcaacattcaatttcgagggtctcgatatattacg

SEQ ID NO: 17053 - DNA, 410 bp, Glycine max
  unsure (1)..(410): unsure at all n locations
tgtttattggacttgtactctaacttctttaatttccacatcttgtggaactgtactcccattgatttcaccattttcaatgaatcttgcatttccagctttgaaaattctcatactatgattaggacaataaaacatataccccttttgacttttctggataaccaatgaaatatccactgattgttcatgcatccaattttctttcttgtggattataaatccttatttctgcttggcaaccctaaacatgcaagtgccttatactaggtgtctttggaactgccttactaggaaccctattcaacaaatacatggtattnttcaaggcatacatccacaaagatacaggtaaatttgaattacttaacatactcctaaccatatccattaaaattctattacgcctt

SEQ ID NO: 17054 - DNA, 394 bp, Glycine max
agtttcttacaaagcatacggctttctggatgtagatgatgatatctatacagatggatcttatatatctatatatctatagatagatatatacatatagatatatagatatagatcatacaatgaagtaccgcacgagtgggtatatacgaatccaaatctgccgaatcactcatgttatgatcttctacatcctaggtcttcccgtgccttcatctggcttatgttcttcatgtagcattcagactgaatgactctatgatatgacgtcgctacttccacatggtacgggtaacgtacgagacatctctatttttcccggggggaatccttagagtgaccacagcttagctttcaattcgcctctgaccatcaaatgaaatgtgaataaccc

SEQ ID NO: 17055 - DNA, 411 bp, Glycine max
agcttttcatcatgggctaagtttgaaattgggagggctgctgtctattggaaaaccatgaatggcctccctcctacttcagtaagtataaaagtattgagttaactcattgcttgttattcaatcaattatctttcagtaaaaaaatttacaaattttggcagggagaaaagctaaaacttttctataatccagctgcaactcaacttgtccctaatgaagaatttggaattgcttttaatggtaatttttgcaatgttacttggttgcccaaaaatgtcatttgccattgcatttgtaaggaaaaatatttggattcattataaacagacataaactgcaccaagaacaagcgatataaattacacatcgtaattcagaattagcatgtatgtttggagtcaatggaaa

SEQ ID NO: 17056 - DNA, 397 bp, Glycine max
agcttctctaaatattatgcgcctgaatcggacttccgggtgaaaagttatgaccattggaatttctcgagagcttccgatgttcaatttcgagcatctggatatattatgcacctgaatcggacttccgtgagataagttatgaccatttgaatttctcgagagcttgcgatgctcattatcgagcttctcgatatataatgcgcctgaatcggacattcgtgtgaaaagctatgaccattggaatttctcgagagcttccgatgttcaatttcgagcatctgaatatattatgtgcctgaatcggacatccgtgtgacatgctatgaccatttgaatttctcgagaccacacgttggtcaatttcgagagtctcgatatattatgcgcctgaatc

SEQ ID NO: 17057 - DNA, 414 bp, Glycine max
  unsure (1)..(414): unsure at all n locations
agcttgtttattcaaatttcaagatacaagtgaactccccaagaagtgacatggcccacttgtggttttccaatctagcttacattctgcaaagttagaatatgaaaatccaattaaactcaaggaggtacctttggggtaccttaaaccaacattggttgtgcccttaaggtacttaataatccttttgacaacatttaaatggtattccttgggattttatttatatctttcacatatgcacacacttagcatgatgtcaagttggcttgtagtcaaatataggagataaccaatcatacctctatactttgactcatctaccgatttacctttttcatccaagtcaagataaatggatgttgccattggtattgtttcttccttacactnttccatattgaaattcttaat

SEQ ID NO: 17058 - DNA, 413 bp, Glycine max
  unsure (1)..(413): unsure at all n locations
agctnttangattttcaaacgacaataactttttactcggatgtctgattaagtcccgtaatatatcgagacgctctaaattgaatgttgaagctctgaccaaattcaaacgacgataaatttttactcggatgtctgattgagtcctgtaatatatcgagactctcgaaattaaatgttgaagctctaagcaaattcaaacgacaataactttttactcggatgtctgattgagtcccgtaatacatcgagacgctcgaaatttattgttgaagctctcagcaaattcaaacgacaataacattntactcgtatgtctgattgagtcccgtaatacatcgagacgctcaaaattgaatgttgatgctctcagcaaattcaaacgacaatagacttttactcagatgtctgat

SEQ ID NO: 17059 - DNA, 413 bp, Glycine max
agcttgcatgatttacatctccccctttctcaagaaaattcttctttatatcatcaaattcttcatgatttacaagaaggtccacctgcatgaaattttttgttaggaagctttctcttttgtgcgactatgtcatcctctttctcaggtgtagaagcaagcttgacaggttcaggtgcaggtgctgctactagtggaggcacttgaatctggttgtcagacttcaaggtgatggcactcacattttttggattctgcatagtttgtgaaggcaatttgtcagaattttgggactgagcttgattcaactgagtagccatctgccccatctgatttgtcagactctaaatggaggctcttgtctcttgctgaaattgcatattctggatggtcatttgcctcactaactcttc

SEQ ID NO: 17060 - DNA, 407 bp, Glycine max
tgtttgtatgctaccgggctcatcctctcaacaattttaaagggtccatagaaacgcctcgaaagctttgactggcctgttccggccaccgtggtttgccgatatggtctcagcttgactagaacccacttatttacctgaaactcatggtccctgcgatgtccatccgcgatttccttcatgcgagcctgcgctttctgcaatttccggcgaaggaggttaaacatgtcttccctctgactgagcaaatcgtccactgttgctacagtggaggtgcctgttaagtattggggcaaacttggaggtttgcggccaaatgtaacctcgaagggtgttagcctcgtggctgagtggacagacgtgttatacgaccactctgcccacaacaggaagcgcccccacgaact

SEQ ID NO: 17061 - DNA, 411 bp, Glycine max
tgtttgttggtcaactacatgccttggttaacctggtaacccagctggccttgaatcagaaatctgtacttgttgcaagaatctgtggtttatgctcctctgccgaccaccatacagacctttgcccttctgtgcagcaatctggagcaattgaacagcctgaagcttatgctacaaacatctacaatagacctcctcaacctcaacagcaaaatcaaccacagcagaacaattatgacctctcctgcaacagatacaaccccgaatggaggaatcaccctaatctcagatggtctagccctcagccacaacaacagcaacctgctccttccttccagaatgctgctggtcgaaatagaccatacgttcctccaccagtgcaacaacaacagctaccacagcatcaacaga

SEQ ID NO: 17062 - DNA, 411 bp, Glycine max
agcttgtatgtaaactagatgccttggttaacctggtaacctaactggccatgaatcaaaaatcaacacctgtcgccagactctgtggattatgctcctctgccgaccaccacacagacctttgcccttgtgtgcagcaatctgaagcaattgaacagcctgaagcttatgctgcaaacatctacaatagacctcctccacctcagtagcaaaatcagccacaacagaacaattatgacctctctagcaacaggtacaatcccgagtggaggaatcatcccaaccttagatggtttaatccttcacaacagccgcagcagatacaacagccttattttcagaatgctgctggcccaagcagaccatacattactccaccaatgcaacaacatctacagccccagaaacaga

SEQ ID NO: 17063 - DNA, 403 bp, Glycine max
  unsure (1)..(403): unsure at all n locations
tttgcttgcaagctntgagcaaattcaaacaacaataactttttactcggatgtctgattgagtcccgtaatatatcgagacgctcgaaattgaatgttgaacctctgagccaattcaaacgacaacaactttttactcggatgtctgattgagtcccgcaatatatcgagacgctcggaattgaatgttgaagctttgagcaaattcaaacgacaataactttttactcggatgtctgattgagtcccgtaatatatcgagacgctcaaaattgaatgttgaagctctgatccaattcaaacgacaataactttttactcggataattgattgagtcccgtaatataactagacgctcgaaattgaatgttgaagctctaagccaattcaaacgacaataac

SEQ ID NO: 17064 - DNA, 410 bp, Glycine max
agcttatgcttctaaaaagctataggtaatgtaatgtaagaagcaagtgtatgatgaattacttcatgtttctaattctccttattagtgattatctaattaacaatttcatgaaattaacagcttcctgaatacattggcattttcaaagatcatgaagaaatatgataaggtgaaaattcaattacccttcacttcattttactcatttaaactttattatctgtactatcacttgacatagtaacttcataattcagatcacgtcaagagatgcagctgaagcttatatgagaatggtggacaactcccaccttggaagttctgatgaggtgagagtgctaataagaaagtctcccattgagattcattattcttttacatgtaacttctatacaccgttagtttaa

SEQ ID NO: 17065 - DNA, 411 bp, Glycine max
  unsure (1)..(411): unsure at all n locations
agcttgatataacatagtcaaggctgtttccactatatgtccgtgcttcctttctaccagaccattttggtggtgtgtatgagggcatatgagtctatgaataataccaagctctgcaagatacttagtaaaaggtctgtattcccctccccaatcagactagacagctttaataggcaaattaaattgagttttcaccatagtttgaaactgtgtaaagataggtagtgtctctgatttatttttcaacaagtacaaccaagtgaaacaagtgtgagcatcaacagaagttacatagtatttataaacagtgtaaatgagttcaaaaggagttgaatacacagtaagagagggagaggagggaagttatgagattcgccaatgcaacaatgggaacaanagtcagaactt

SEQ ID NO: 17066 - DNA, 411 bp, Glycine max
agcttgctacatatcacctatgttcaccactagggttccttcagatgggtttatatctatccactctcccttatttgatctgacttgaagccctcctatctcatgttgatataagatagtaatacaactcatatcaatgtgcatcccaagcccctcaacttgatcttctataacttctggagctgagtaatcgtttacccaacatatccaaccatgaacactccttcatacttgattcacttcttgtttgttcttttggttactttcatccgatagtcttcatgatgcaaaccatttacctttcaaaattttacctatacctcaatttttgctactgcacatggtaattggtaagcctaacaagtacatggaaaaaaggagatagaccccactggtttgcaagtaaactaa

SEQ ID NO: 17067 - DNA, 409 bp, Glycine max
  unsure (1)..(409): unsure at all n locations
agcttgtaattgaacaatggaagatcttgagaaattcaatcggtcttaacttttcactcggaagtccgattcaggcgcataatatattgagacgctctcgtgaaattcaaatggtcataacttttcactcagaggtccgattcaggcgcataatatatcgagatgcacataattgaacaacggaagctctcgagaaattcatatggtcataccttttaactcggagttctgatttaggcgcataatacattgagacgctcgaaattgaacaatggaagctctcgagattttcaaatggtcataacttttaactcggaggtccgaatcaggcgcataatatatcgagacgctcaaaattgaactacggaagctctcgagaaattcaaatggtcataactnttaactcgga

SEQ ID NO: 17068 - DNA, 408 bp, Glycine max
tgttatatcaacaactgttttaagatattgtaaattctatgcactttgtttaaactacaaaatcattgcttcaaaagttaagagatgatgggtgggagccattaaagatgtcaaaaatttttgtgttagtaatgttattgatattcttgattttaatactcaatatttaagaactcgaggtaagccccgtcataagaatgttgacacttttgtgactatggagaaccgttttagatatgacatatttacaactgccattgactttcaattacaagagctgaataataggctttgtgacctaacaatggaattaattatttttagctcagctttgagtcttaaggatgtttctaaatccttcaaagttgattatatatgaaatttagttgcataatattatcaaaggat

SEQ ID NO: 17069 - DNA, 398 bp, Glycine max
  unsure (1)..(398): unsure at all n locations
agctnttagctcaaatttctggctaacttatcttttattccactaacgacagagaaaggatttaaatgcttaattaatgtagttttaaaaggatgttgatctctccattgcgtangcaagagcaagacaacgcttaccaaacaaaaaccgctcttaatttttaaaacatataataaaatgttcccttattataataatcaaattgacttcaattagcataaaaataatagcctttagtgggacaatccatagtaacctaggaaactcagtacaaatacacattaaaaatacaaaagcccaaggatataatatgcttcaaatatttgttttccacactcaaattgccatatcacgggtgaataagtgaattcaaaccaagatctaaacaaanagctatc

SEQ ID NO: 17070 - DNA, 392 bp, Glycine max
agcttgttattgaacaatggaagatcttgagaaatgcaatcggtcttaacttttcactcggaagtgcgattcaggcgcataatatatcgagacgctctcgtgaaattcagatggtcataactgttaactcagaggcccgatctatgcgcatagtatactcagatgcacatcatggaacaacggaagctctcgagagacttatatggacgtgacctttaactcggagttctgattcaggcacataacacattgtgacgctggagatggaacaatgaatgctgtcgagactttcaaatggacataactgtggacgtggaggcatgactcgggcgatgagatatagagacgctcataatgaactacggaagctctctagaaaatgaatggcacta

SEQ ID NO: 17071 - DNA, 415 bp, Glycine max
  unsure (1)..(415): unsure at all n locations
agcttttttacatgcatgcatcattcccagtgaaaattaagtcatcaacatacaaactcacaattaaaattcttttacctcctcctgttttgacaaagagagtgtgctcatgatcgcatcgttcaaatccctccttcacaaaataggcttcaattttgctataccaagcacgtggtgcttgctttaacccatataaagctttcttaagcttgtagaccttctcttcttcaccctttcgaacataacccggtggttgttccacatacacgtcctctgtcaattctccgtgaagaaatgcgcttttgacatctagttgatacacattccatcccttttgtgctgctagagctaaaaccatccggattgtgtcccaccttgctaccggngcaaacacttcgttgtagtcaatcccttg

SEQ ID NO: 17072 - DNA, 407 bp, Glycine max
agtttgtgtcacaattcactgtgacagtcaaagtgtcattcacttatcaaatcaccaaatgtaccatgagaggacaaagcacatagatgtgaaactacacttcatcagagatgtgattgaatctgagaaggtgaaggtggagaaagtttcaacagaagaaaatccggctgatatgttcacaaagtccctctctagtgtcaagttcaagcactgcctggacttgatcaatttcgaagatgcctaaagcagtttggtagaagtgcagccctaaatcacaaggaagacacttgctgatttggagtcaaggtggagatttgtggtgtgtgactcaaaatcacaatttgcacaagtgagaaggctttaaagtggtgttgtcataaatgttatcaagtattataactgaattg

SEQ ID NO: 17073 - DNA, 404 bp, Glycine max
agcttgttattggacaacggaagctctcgagaaattcaaatggtcataacttatcacactgaggtccgattctggcggatagtatatcgagaagctcggaattgaacaacgaaagctctcgagaaattcaaatggtcataacttttcaaacggaagtccgattcaggtgcataatatatcgagaagctttaaattgaacaacggaagctcttgagaaattcaaatggtcgtaacttatcacacgggagtccgattcaggcgcataatatatcgagaagcttggaattgaacaacggcagctcttgagaaattcaaatggtcataacttatcacacggaagtctgattcatgcgcataatatatcgagacgctcgaaattgaacaacggaagctctcgagaaatt

SEQ ID NO: 17074 - DNA, 413 bp, Glycine max
agcttgtatgtcttggatcttcttcacaaatggagtaatttgcttcttgaagatcaatagcagcgtaatggagatggaagaaagatgattggagacgccacttcaaggagaagatgtgtcaagaaaaaactcaccaccataggaagtcatggataagagcttgaaggtaggagaagatgaatggaggaagagggagagaaggagcacgaaattttgtgcctcaaatgagatttcaactttgaagtgtgattctcaaattatcaaagttgaaaaaatgcacatacatgacctctatttatagcctaagtgtcacataaaattggagggaaatttgaatttctattcaaatttcacttgaatttgaaattcatgaatttgtggagccaaagtttggagccaaaatttcactaatt

SEQ ID NO: 17075 - DNA, 399 bp, Glycine max
  unsure (1)..(399): unsure at all n locations
agcttgctacttgaggagggaggannnntnngcttcttgaatatcaatancaacgtcatggatatggaagaaagatgattggagacgccacttcaaggagaagatgtgtcaagaaataactcaccaccataggaagtcgtggatatgagcttgaaggtaggagaagatgattggaggaagatggagagaaggagcacgatattttgtgcctcaaatgagatttcaaccttgaatggtgattctcaaattatcaaagttgataaaatgcacatacatgacctctatttatagcctaagtgtcacatacaattggagggaaatttgaatttctattcaaatttcacttgaatttganatgcatgaatttgtggagccacagtatggagccagaatctcact

SEQ ID NO: 17076 - DNA, 396 bp, Glycine max
agcttgttattgaacaacggaagctcttgagaaattcaaatggtcataacttgtcacacggaagtccgattcaggtgcataatatatggagacgctcgaaattggacaacgaaagctctcgagaaattcaaatggtcataacttttcaaatggatgtccgattaaggcgtatattatatcgagaagcttgaaattgaacaaaggaagctctcgagaaattcaaatggtcataacttatcacacggatgttcaattcatgcgcataatatatcgagaagcttgaaattgaacaacggaagctctcgagaaattcaaatggtcataacttttcacacggaacaccgattcaagcgcataatatatcgagactctcggaattgaacaacgaaagctctc

SEQ ID NO: 17077 - DNA, 395 bp, Glycine max
agcttgtagaatagttaaacgacaacaacttttgactcggatatccgattgtgtctcgtaagatatcgagacgctcgtaattgaaaacggaagctctgagaaaaatcatacgacaataacttttaactcggatgtctgatcgaaccctgtaatatatcaagacgctcgaaactgaaaagggaagctctaagaaaagtcaaacgacaataactttttactcggatgtcttattgagccctgtaatatatcgagacgctctaaattgaaaacgaaagctctatgataagtcatacgacaataactgttaactcggatgttcgatagagccctttaatatatcgagacgctcgaaattgaaaactggagctctaagaaaagtcaaacgacgataactt

SEQ ID NO: 17078 - DNA, 389 bp, Glycine max
agcttatgaaggttgcttaatatctccaacagaattactgcaattaatccctaatatttataattagctgacagtctgatcatgctgatatatatcaataagttaaatttgatagtgatactgttgtatatattaaactacattgagatttggcaaaagcaaaaagctattaaacaatgtcttgtgttgcattctcattcaagaaacaggtttcaacttctgtacaaaacagaaaatccttacaataaaagaaaacagcttctgttcaaatttgcctcatcttatctgtctgtgtctccattagcatgatttacaggtcattcaaatgacaggcgacagttaggaactcatccttcttacatggtattgtgagaccacccattgcgtgc

SEQ ID NO: 17079 - DNA, 394 bp, Glycine max
agcttgttttttaattatttgtatgggttggatgttgaattctggttgttcctggtgcggagatgatggtacagcgggtgaaccagaagcggaagtttcttttggtgaggaagccatggaaaaacagagcgtttggaatgatttcataaatctcagaaaactattgggaaatgctggagaaaacacgaatgcctagcagatataaatttgaatgaagaatgtagaggggcgtgtgaagcaacggtcgaatttgctttgtggtgaacgtgctattaatgttaagtgattcgtttgggcacgttcagattgcagtagctgctataattcctctagcaaacaaatgcccagcttgcccctcagtttttcaaactgatttgcatccaaagcctttgtg

SEQ ID NO: 17080 - DNA, 382 bp, Glycine max
agcttttacccatgacttcctatggtggtgagcttgttcttgactcatcttctccttgaagtggcgtctccaatcacctttcctccttctccattccgctaccattgatcttcaagaagcaaaggactccattgatgaggaagatccaaggcctacaagctctacattgagctacatcatgtggtattagagcatcttcatctaagcgatgttcttttgcttcctctatctttttgttcggtcaattgactttaattccttgttcttcatcatcttctccatgtatctgctccattgtcttatggtttggctatttttagagtagattcaacaaaataaaccgattaaatcttagataagcactcgttcttgcatttctatg

SEQ ID NO: 17081 - DNA, 280 bp, Glycine max
gcttgagtcgaaaaccgcaggcgtgaccttggctcattacctgtcatgggattttttaaggctccgctcggcttacatgaaagtctggctaggcccacgatcctatttgaaagcttgcttaaagacgtctctgataaatcaattattttaaatcctaatgaaatacttactaaaaaaagaaacttatgaaatcccttattagtaatgcacaaattctaaaataattgataaacaaaatgattatgaattctactcgtaaagcacacagtatattaaaaaa

SEQ ID NO: 17082 - DNA, 396 bp, Glycine max
  unsure (1)..(396): unsure at all n locations
agctntttcttctgattcagacaaggtcaaaggtagcttggctatccgacttttgagaaatctaattgcatttcccatgctgattgacagaggtcgacactcaataagaaatgatacataactaccaatttttgctgtcaagtctctcacaagagtcttctcaggtggaaccttgtagtctttgatggcctcttgaaatgcttgaagcattgcaatgcaacgagcattgccaccagatatatctccagttagatactgcaagcccacctgaaacaccataaaacaagatcattaagatttgggaaaaaatatttcaaaaggtctaggtcacaaaacatattgacctgacccaggtcctaatcactgatattcattaaaacaccataaattttaatt

SEQ ID NO: 17083 - DNA, 385 bp, Glycine max
agcttgtaatctattacacacatactgtaatagattaccataagacattatcagaaaatatcctcaattgtcacatcttttcatttggatcttgaatggctatcaaaggcctatatatatgtgacttgagacacgaatttgctaagagtttttcacaacaaaaaggtcttatcctcttaaaaagacaaatcgttttatcctcttacaaattccttggccacaacacttgtgattcaataaggaattatctgagtgctcaaattgatcaatctatctttttcacgagagatatcgtcttatcttcttctctattctgaaaagggattaagagaccgacggtttcttgttgtgaaataattctaaccacaatagaagaattgtcctt

SEQ ID NO: 17084 - DNA, 387 bp, Glycine max
atcttttccagatagaatgtcaaagatggacgatactttaacacaatttatgcaagtatccagcacaaaccagaagaagactgatgcatctattaaaaatctagaagttcaagtatgacaactggcaaaataactatccgaacaaggaagtggatctttctcagcaaccacacaggtcaacttaaaggaacattgtaatttaattacaacaaggttggggactatggttggtttgaaggataatgatgaaaaaagaataaaaaaagagttgaaaaagaaaacgagaaaaatgatgaagtgatgactagtgaaaaagtggaagacaaagtggtaagtgaagaagagaagaagatatcaaatgaacaaaccagtaataaaggtaaagct

SEQ ID NO: 17085 - DNA, 370 bp, Glycine max
agcttgttcttatacaaacgaccataactttttactcggatgtttgattgaggctcgtaatatatcgagacgctcgaaattgaatgttgaagctctgaaccaatataaacgacaatgaccttttactcggatgtatgattgagtcccgtaacatatcgagacactcgaaattgaatgttgaacctctgagcatattcatacgacaataaattcttactcatatgtctgattgagtcccgtaacttatcgagacgctcgatattgaacgttgaagctctgagccaatacaaacgaccataactttttactcggatgcctgattgatgctcgtaatatatcgagacgctcgaaattgaatgttgaacctctg

SEQ ID NO: 17086 - DNA, 389 bp, Glycine max
tagcttgttcacctttttcctcacatcttccttcattgatgggttgagccttctttggggctgtctgactggtctgtaatcttcttccatcattatcttgtgcatacagtaagcgtggctgattcttttgagatctgatatgtgccacctaattgcctccctgtatctcttaaggacctttaccaacctgttttctttttctgctgtgagctcactgctgatcaccacaggcttggtcttgttcttctccaagaacacatacttcaggtggttgggtaggatcttcagctttaccttggtcttctctgatggactcccgcttttcaattcttcgaaactggtccccattacagtaatattgtcttcacaatctaagtcttccaagaaag

SEQ ID NO: 17087 - DNA, 374 bp, Glycine max
  unsure (1)..(374): unsure at all n locations
tttntttttatcccatctacgcatggaagacctttcatcatattcttttcatgtaccaacttcaaagcttgagtgtggaagtgaccaaatcttcgatgccataaccatgaatcatcaattgttgctctcatggaaacgctagtactagtagtatacttgaagcttattggaaaaatactatttactttcaacattttaactttgacaatctctgtgcttttgctagttgtatcaaatactgcacgtatctcctttgaatgaacagattagtctttctccatcatttgtttaatgcctaagagattgtctttaagatctggaactaaccatacatctctgatgaatcttgtacctttctttgtctacagcatgat

SEQ ID NO: 17088 - DNA, 387 bp, Glycine max
  unsure (1)..(387): unsure at all n locations
tgctangttattttcatacgctatgagtcttaacttattcagctcattcaattgttgctacctgaagctacctacaatcctaagatcagagttcataaactatatagcccacatggctgcgtgaacaagtccaacaagcagatggaaattctttccataaactatactaaagggagacatcatagcgggagccctacagggttttatgtatgcccatattgtgtcatccaatttcaatgaccaaatctttctatatgctctcacagttttttgtaaaaccttctatagatacctattatatacctcaacttaaccaattgcttgatggtgatacaaagtaataaccttatgggtaacaccatatttagccacatggctatcagacaa

SEQ ID NO: 17089 - DNA, 391 bp, Glycine max
agcttccatgtccaagtttcttatgccagacccaatgatcttgtttgacataaagtaagcaagattttgatttgataactctcttagtctaatcttataaagatttccttttctcttagcagaataaagtaaagacacatttttgttctggatgatacattcatccttgttaaagaaaacatcatatccattgtcacataattgagttatgctcagtagattgtgtttgagccatttaaaaaataagaaattatcaataggaggatatggatgtatacctatcttacccactcttgttatttgcccttttttattccctatgaaagtgatggttccaccatgataaggagtcatacattggaacatgcacctttctcctgtcacgtgccat

SEQ ID NO: 17090 - DNA, 367 bp, Glycine max
tatcttgtatccggtgcttgatgtcagggtgatgtttcctatcccaacagtcttgctcctatcttgatttcccatttgcatcgtaccaaagtcaccgctttggtaggatgagaagaaacttccatgtggagtaacatggaaggaggcaccggaatcgacaatccaagagctatcatcacaagcaatgtttatgatattaccttcaccaacgagatataacaaatcttcttttgaaactacggcagtagtattcttcttttctttcttctttgttgggctgacttggtctggcttaacgttaccgattgtgtgatctctcttgaaggattgacattctatcttcctgtggcccatccttccacagtag

SEQ ID NO: 17091 - DNA, 398 bp, Glycine max
agcttcattctttcctcttagtaatgccttattcatcatatctacaccattaaaggatttcaccttcaaagggccacaaacatttgaatgcaccaattcaagcaactcaaattttctggagggagaatgcttcttgaaggatactctggtttgcttaccaaccatgcaacatgaacatttctccaaatttgcattcttcaatcctagaaacatatccttcttggctaaacaattcagccctttctcactaatatgactaagccttcagtgccacaaaaatgcctccatatccataacattcacattgtctctagcaaccaaagcttttgcccaatacaactttgaaagtttctcccccttggccacaattatgttacccttagtgagtttccactttc

SEQ ID NO: 17092 - DNA, 357 bp, Glycine max
agcttttagctaattcaaacgacaataatgttttgctcggatgtctgattgagacccgtaatacatcgagacgctcgatattgaatgttgaagctctcagcaaattcaaacgacaataactttttactcggatgtctgattgagtcccagaatacatcgagacgctcgaaactgaatgttgaagctctcagcctattcagacgacaataacttttttactcatatgactgatcgagtcccgcaatatatcgagatgatcgaaagtgaattctgaatctctaagctaattctaactacaataactttctgctcggatgtctgattgagttccgtaatctactgagacgctcaatattg

SEQ ID NO: 17093 - DNA, 393 bp, Glycine max
agcttttctgtgcaaggaatatccaaggaaaattccatcatctgacttagcatcaaattttcctaagttttcattaccattgtttaatacaaagcatttgcaaccaaaaacatgaagatgtgaaatattgggttttctaccattaaacagttcatatggagttttctttaaaatgggtcttattaaagacctattcatgatataacatgcagtattaacggcttcagcccaaaaatattgtggaacaggagtatcattgaataaaggtctagcaatctcttccaaagatctattattcctttcaacaactccattttgttgaggggttctaggtgcagaagaattatgttcaatgccatgcttttcacaaaatagatcaaattctttattttc

SEQ ID NO: 17094 - DNA, 241 bp, Glycine max
atcgaaaagttggctgagacttgtattttcttcacaaacggggcatgcatgatgacccttaacactgtaaccgctgagattcccacatgctggaaagtcactaatgagacagaagagcattgcactcagtgcacaggtgatacttgagaatcgcatcggtctctactacaccctgattccacagatttctcatatcgtcaaccaacggacttagatagacatctgtgatctttcctggctg

SEQ ID NO: 17095 - DNA, 387 bp, Glycine max
  unsure (1)..(387): unsure at all n locations
agctttcttcaacaaacaaagccttgattcaagatttcttcaagatcaagccttgcctcaaaacaaagggtttcaaagtcatgcaaggctctggtaatcgattaccagaagggaagtttgagaaatagctgttgaaaagggttttgaaattgaaatttgaacatgtaatcgattaccatntntttgtaatcgattaccagcaatgaaactcctgatattcaaattcaaaagtcacgacccttcaaaatataattgtgtaatcgattaccagaaacctgtaatcgattaccagtgaagaaattcatataaaacttcttgaaaagacacatctctttacaccatattgaaaaggcatgaatggcctatatatatgtgtgtgtgtgactt

SEQ ID NO: 17096 - DNA, 423 bp, Glycine max
tgtagggttaaagtctcacgattgtcacgtgctcatccaactattgttagccgtggctatacgagacatcttgccaaacaaagtcaggttcacgataactcgcctgtgctttttcttccatgctatatgtagcaaagtgattgatccagtaatgtttgatgagttggaaaatgaggccgcaattatactgtgccagctggagatgtattttccccctgctttctttgacatcatgattcacttgattgtgcatctggtcagagaaatcaaatgttgtggtcctgtttatctatggtggatgtacccggttgagcgatacatgaagatcttaatagggtatacaaagaatctatatcgtccggaagcatctattgttgagaggtacattgcagaagaagccattgaattttgttcagaatactt

SEQ ID NO: 17097 - DNA, 428 bp, Glycine max
  unsure (1)..(428): unsure at all n locations
aatggatgtaaagagtgcattnttaaatggcttgattcaagaagaagtatatctagattatcccctaggatttgaaaactcagacaagcctaatcatgtttataaactgaaaaaggctttatatggtttgaaacaagccccaagggcttggtatgagcgtctgagtaaatttattttaaataaaaaattntctagaggtaaagtggataccactctttttataaagagaaaactaaatgatattctattggttcaaatatatgttgatgatattatttttggatccactaatgagtcattatgcaaggaattctctcttgacatgcaaagcaagttcgaaatgtcaatgatgggagaattgaattactttcttgngttacaaataaagcaaactaaagaaggaatanttttcaaccaagaaaaatact

SEQ ID NO: 17098 - DNA, 448 bp, Glycine max
  unsure (1)..(448): unsure at all n locations
tanacattcaatttcgagcgtctcgatatattacgggactctatcaaacatacgagaaaaaagttattgtggtttgaatttgctctcagcttcaacattcaatttcgagcgtcgcgatatatattacgagactcaatcagacatccgagaaaaaagttattgtcgtttgaattggctcagaggttcaacattcaatttcgagcgtctcgttatattatgggactcaataagacatccgagtaaaaagttattgtcgtttgaatgtgctcagaggttcaacattcaatttcgagggtctcgatatattatgggactcaaccagacatccgagtaaaaatttattgtcgtttgaattggctcataggttcaacattcaatttcgagcgtctcgatatattacgggactcaatcaggaatccgagtnaaaagttatgtcgtttgatttggc

SEQ ID NO: 17099 - DNA, 454 bp, Glycine max
  unsure (1)..(454): unsure at all n locations
tatgctgcanatatttataatagaccccctcagtagcaaaactcaacaacagttttataattatgatctttcaagcaacaaatacaatccaggttggaggaatcatccaaatctgagatggacaagtcctccacaaaaacaacaacaacctgtccctcttttccagaatgctgctggtctaagcaagccatatgttcctcctccaatacagcagcagcaatagcaacagtcacaacaaagacaacaagcaactgaggcccctcctcaaccttccttagaagagttagttaggcaaatgaccatctagaatatgcaatttcagcaaaagataagagcctccattcagagtctgacaaattagatggggtagatggctactcagatgaaccaagctcagtcctaaaattctgacaaattgccttcgcaaactatgcagaatccgaaaaatgtgagt

SEQ ID NO: 17100 - DNA, 409 bp, Glycine max
  unsure (1)..(409): unsure at all n locations
tgcatagcagnttctactacttaagctgattacatagttgtatgaagttgttgtactcaaagtctttggatgaagcaacaactcgaagactttggagtaaaccttgatcacattcctctaaaatgtgacaacacaagtgctaccaatctaacaaataacccagtcaagcattctaggactaaacacatataaataaggcatcattttcttagagatcatgtgttaaaaggtggctgctgcattgagttcattgatagtgagcatcaactagaagaaattttcactanatcttctgctagagataagttttttattagaaatgaactatgcatgttagatgcatctagcataaaatgacattctgtttgcatagtgtgtgatgcacattgctactcatatcnatttgttt

SEQ ID NO: 17101 - DNA, 457 bp, Glycine max
  unsure (1)..(457): unsure at all n locations
nttgcaagctggaatcatttatcctatctctgatagccgatgggtgagtcccgtccaggtggttccgaagaagaccggcctcacagtgataaaaaacgagaaggaggagctaattcctactcgggtgcataacagttggagagtctgcattgattataggaggctgaaccaggttaccaaaaaggaccattttcccctgccattcattgaccagatgcttgaacgcctggcaggtaaatcccactattgtttccttgatggtttttctggttatatgcaaattactattgctcctgaggatcaggaaaagaccacattcacctgccccttcggcacttttgcctataggaggatgcctttcggcctgtgcaatgcccctggtaccttccagcggtgcatgattagtattttcagtgattnttagaanatgcatagaggtgtcatggatgatttcact

SEQ ID NO: 17102 - DNA, 405 bp, Glycine max
  unsure (1)..(405): unsure at all n locations
agcttcttatctaatgctcatcttggtggtgaagcttcttcttccaaggcttattccctaatggatggcgcatcctctctcctcttctcctttgtcttccgctgcatctccatggtggaaaatcaccattaaaggacctcattgaagctcaaagatccagcctccatagaagccccacaagcaagcttcctaaggtgttcctcctcagttttagacttggcgatcatgtcgtctatgtagacttcgatctctcggtgcatcatgtcgtggaacacagccaccatagcccattgataggttgccccgacgttcttgagcccaaaggacatcaccttatagcagaaccttccncacagggtgacgacacatggtcttttccatatcctctggtgccatctttatctg

SEQ ID NO: 17103 - DNA, 468 bp, Glycine max
  unsure (1)..(468): unsure at all n locations
ctcaagcttgctaacccatggaagctcctaatatctcccacactntntggggtgggccattcttggatggccttgattntctcagggtccacttggaccccatttctaccaactacaaaacctaagaaaactatattatctacacaaaaggtacacttctctatatttgcatagagggtgtttttcctaaggactgaaagaacttgcctgagatgtcctaagtgatcatctaggctcctactgtacactaaaatatcatcaaaataaacaactacaattctacctaggaaatcccttaagacatgatgcataagcctcataaaggtgcttggtgcattagtgagcccaaaaggcatcactagccattcatacaaaccaaacttggtcttgaaagccggtntccactcatcacccnttttcatcctgatttggtgataaccactnttaagatcaatttntgaaaagata

SEQ ID NO: 17104 - DNA, 448 bp, Glycine max
  unsure (1)..(448): unsure at all n locations
tctaaaggaggtcaacaacaggatgggtgtaaggaactatggttgattaaactttctagcaaaataacagtttttgcttggaggttaatagaagataggctaccaaccaagatgaatttacataggagacatgtgcaactgcaggatctgcgatgtcctttctgtaaagaagctgtagaggaggcatctcatttgttcttccattgcatcttcatccaaccaatttggtgggcatcgatgtcttggctgaactatcatactgcctttcctcttgggcctaaacaaaattttctacagcatatcttcactgaggtaaaaggattaaagattaagagatggagatattggtggatggcggtcacatgggctatatggaaactcagaaacagaattctgttttcgaatgcagaattngatgctaacagattgtttgatgagggctgtttct

SEQ ID NO: 17105 - DNA, 462 bp, Glycine max
  unsure (1)..(462): unsure at all n locations
tgatgataaaggtgaaaaatgtatctttcttggtgttagtgttcagtcaaatttatataaattgtataatcctaccactaaaaagatcattattagtcgtgatgttgttttttatgaagaaagattntgggaaaataacatagatgaaacaaatcaaattcttgcaaactttgatgaagagttgcagacaaggttgctagaagagcaacaaatttcagcaatcacagttgaagatgaaagacctcaacgagcaagaagaaggcatgcatggatgtctgattataaggtaacagaaattgaagatccgattacttattttgctttgttttcatattgtgaccctacaacctttgaaagtgctgtcaaagaagaanaacggagaaaagcgatggatgatgaaattgattccattaaaagaaatgatacttngggattgtgtgatcttccaaatggacataatat

SEQ ID NO: 17106 - DNA, 449 bp, Glycine max
  unsure (1)..(449): unsure at all n locations
actcaagcttatctgctcatacattgcctcttcttttgaaaaacattnctctacgagaatctcatccactatcatctagagcttggtttctgaatgacaagtgataaatgacagtcgaagcaactttataaagcatgatttgaatagaaaagtataaatgtatactaatatataatattattatagcgcattaatatatctaacttataaccatttatttatctcttttataatatactctcttctattttcatttctaacattaattttaataaatcgttctagaaaatggttaatatttaattatcgttatatcatatttaaattgttcatcttcaattcagaatataatgtatgaatttagaaatatttagttattataataaagatttaattatataaaaacaaatatcgctctgaagaagcttaattcgcatctatatcctatt

SEQ ID NO: 17107 - DNA, 439 bp, Glycine max
  unsure (1)..(439): unsure at all n locations
tgacccttacgagtcagtttagtcaaatgtttagctaactatgagaaaccttctatgaatctcangtagtatcctgctaagcccaaaaatctcctaatctcaaaaatagatttaggactctcccattcaagaacgacttctatcttagagggatctacaactatacccccttgagatatcacataccctaggaaactaactttctctaaccaaaactcacactntgacaagttagcataaagttgtcggtccctaagggtatgtagcacaatcctgaagtgttcttcatgttcctctctagtcttggagtataccaaaatatcatctatgaatactaccacaaaactatctangtaagggtgaaagactntattcatgaagtatataaacacacctggagcattagccacaccaaaaggcatgactagatactcatagt

SEQ ID NO: 17108 - DNA, 428 bp, Glycine max
  unsure (1)..(428): unsure at all n locations
tctggtgggacatcttgacttgctttccaatctgacattcttcacagattctgccttcttctattttcagattgggaatgcctctaacagcacctttgtcaataattttcttcatgcctcttaagtgcagatgtccaaatctttgatgccatattttgacttcatcttctttggagaatagacatgtggaggagtaactggtttcttgaggtgtccataggtaacagttgtcctttgatctgctgcccttcattaggacttcactcttctcatttgtcaccaagcattctgactttgtgaagtttacattgaatccttcatcacacaactgactgatgctgatcaagtttgcagtcagtcccttcaccagcagtactttgttcagactangaagtccatcatggactagctttcccattccagtgatc

SEQ ID NO: 17109 - DNA, 406 bp, Glycine max
  unsure (1)..(406): unsure at all n locations
tgtatttcagtatcttattgatcagttatgccaaatgcctgtattggccttacctgattntacaaagacttttctagtggaggtggatgcttcaggagtgggggtcggagctgttctcatacaagatcaccattccatagcctttataagtagaagcttaaatgttcagcaacaatccatgtcaacctataagaaagagttactagctgtggtgtttgttgtacaaaagtagagacattacttattacctaagcagtttgtaatcaaaactgatcacaaaagtctcaagtatattcttgaccagagactttccacagctttccaacaaaaatggttggtaaaacttatggaatttgatttcattattgaatacaagtagggaagtgagaaccaagctgctgatgca

SEQ ID NO: 17110 - DNA, 416 bp, Glycine max
agcttatttatatcgaggcgctcgaaattgaacaacggaagctcttgagaaattcaaatggtcataacttttaactcggatgtccaattcatgcgcatcacatatagagacgctgaaaaatgaacaacggaagctctccagaagttaaaatggtcataagttttcacactgatgtccgattcaggcttatattatatcgagacgctcaaaatttaacatcgaaagctctcgagaaattcaaatggtcataacttttcactcggatgtccgattgcagcgcattacatatacagactctcgaaaatgaacaacggaagctcccgagaaactcaaatggtcataactttttacactgatgtccgattcaggcctataatatatcgagagcgctcaaatataacaacggaagctcttga

SEQ ID NO: 17111 - DNA, 415 bp, Glycine max
agcttctggtgggacatcttgactagctttccaatctgacattcaccacaaattctgccttcttctattttcagatagggaatgcctctaacagcacctttgtcaatgattttcttcatgcctcttaagtgcagatgtccaaatctttgatgccatattctgacttcatcttctttggaggatagacatgtggaggagtaactggtttcttgaggtgtccataggtagcagatgtgctttgatctgctgcccttcattagaacttcactcttctcatttgtcaccaagcattctgactttgtgaagtttacattgaatccttcatcacacagctgactgatgctgatcaagtttgcagtcagtcccttcaccagcagtactttgttcagactaggaagtccatcatgagctagct

SEQ ID NO: 17112 - DNA, 396 bp, Glycine max
atcttatctgataaatgtatttgtatgcataattaatttcatgcaatatatttatgactatatattctaaaatataaattgcattggtaatatattaaaatgtagaatgtttgttttacatgtcatggaaattatttataactaaatttatactaaatttttcggcaagtttttctgaatgcatatatactaacattgtcaatcaaaaattaatctttcatcttgttaaaaagtgtaatattaaaaatatatttatagctaaaaaataactttgaaagtttgttgttgtcttacaaacaatgctcaaaagaaataaaaacgagagaatgaaaataaaatcgaaaatagtgaagggggaatattcatttgatctggaaaatattactactactatta

SEQ ID NO: 17113 - DNA, 434 bp, Glycine max
  unsure (1)..(434): unsure at all n locations
tctatagaaggttcgttcctaatttctctttctttggatcttctctcaatgagctggtgaagaagaatgtggcatttacctggggtgaaaaacaagagcaagcctttgcttttctcaaagaaaagcttactaaggcacctgttctagcttttcctgacttttctaaaacttttgagctagaatgtgatgcctctggagtgggagttggagttgtattgttacaaggtgggcaccctattgcttattttagtgaaaaacttcatagtgccacccttaactaccccacctatgataaagagctttatgccttaataagagccctccaaacttgggaacattaccttgtttccaaggaattngtcattcatagtgatcatcaatcacttaagtacattagagggcaaagcaagttaaacaagaagcatgcaaaatgg

SEQ ID NO: 17114 - DNA, 300 bp, Glycine max
tcaaacttgcaacaaaggagttgagcatgtataaagattctttcttcaacttttagaggtgactttgagcgtctgtttatggaggagtcccaatcaatttctgattatttttctcgagtattggcccgtatcaattaacttaaaagaaatggtgaagacgtttatgaagtgaaggtcatggaaaaaatacttccaactttacatccaagttttgacttcattgttaccaacattgatgaaaacaaggatgtaaagaccatgactatcgagcaacttatgggttccttacaagcatacgaa

SEQ ID NO: 17115 - DNA, 453 bp, Glycine max
  unsure (1)..(453): unsure at all n locations
tcaagaaaaagatggcctcagcaaactccttatttccagattggaattctatcaatagacctccaatctttaatggagagggttaccactactggaaaacccgaatgcaaatttttatcgaggcaatagatctaaatatctgggaagccatagaaatagggccttatatacccaccacagtagaaagagtttcaatagatggtagttcatcaagtgaaagcataaccatagaaaaacctagagatagatggtctgaagaggatagaaaacgagtacaatacaacctanaagccaaaaacataataacatctgccctaggaatggatgaatatttcagagtttcaaattgcaagagtgctaaggaaatgtgggacactcttcgattaacacatgaaggaactacagatgttaaaagatctanngataatgcactaactcatgagtatgaattat

SEQ ID NO: 17116 - DNA, 392 bp, Glycine max
  unsure (1)..(392): unsure at all n locations
agcttatagccttttcaaacgacaataactttttactcggatgtctgattgagactcgtaatataacgagatgctcgaagttgaatgtttaagctttgagccaattcaaacgacaataactttttactcggatggttgattgagtcctgtcatatatcgagacactcgaaattgaatgttgaagctctgagccaattcaaacgacaataactttttactcggatgtgtgattgagtcccgtcatatatcgagacgctcaaaattgaatgttgaagctctgagccaattcatacgacaataactntttactcggatgtctgattgagtcccgtaatataacgagacgctcgaaattgaatgttgaacctctgagcacattcaaacgataatat

SEQ ID NO: 17117 - DNA, 421 bp, Glycine max
  unsure (1)..(421): unsure at all n locations
taaacattcaacttcgagcgtctcgatatattacgagtctcattcaaacatttgagaaaaaagttattgtcgtttgaatttgctcagaggttcaacattcaattttgagcgtctcgatatatgacgggactcaatcagacatccgagtagaaagttattgtcgtttgaattagctcagagcttcaacattcaatttcgagcgtctcgatatgtgacgggactgaatcagacatccgagtacaaagttattgtcgtttgaatttgctcagaggttcaacattcaatttcgagcgtctcgttatatcacgggactcaatcagacatccgagtataaagttattgtcgtttgaatttcctcagagcttcaacattcaatnttgagcgtctcgatatatgacgggactcaatcttacatccgagt

SEQ ID NO: 17118 - DNA, 410 bp, Glycine max
atctttaacatagaaacctagttagattagtgctttgacaggtttgataacaagaacatatttgtgggtttgacaagaactatatacagctcatgactattctccaaccgagcaccacttggaagggttctacacccaatgagagtcgaggttgtgttgattgccaagcttcaacatagaaacctagttagatttttgggttactgtgtggaaggagaagaaaaaatgctagtatatgaatatatgccaaacaaaagcttggatgctaccattattttttgtaagactatttattgcatttgaaatattttgtttacgtgcctttttttgtacactcaaaattctattttgaagtagactaatgtaatgtatcatgcccctaatgaactacaagactgaaagttgtgtgt

SEQ ID NO: 17119 - DNA, 430 bp, Glycine max
  unsure (1)..(430): unsure at all n locations
tttgtttggaattcattntcaattacctcttagttctgaacgcatgataataatatgtaccaaaagcatacaaagcatgataatatgttggacagagctcttcatatttttgcttggtgtaaattaatgaaaagttggtgcgtttggttaagtgtttattaactagatttgaaattatttgattntatatatganattgatttttattanaaatgaaattaaaataaagtgtcatgtttataaatattcattntaaagtaagtttatattacaacttaatatgattctttaacttanaatgaaaattttatttagagaataaaatatggagttatagtcatcgattaanagttaataatttaaattaattcatatattagagagtgatttgaattgtatcaatattggtcagcggctganaatgaaaaca

SEQ ID NO: 17120 - DNA, 402 bp, Glycine max
agcttttactctctatgtctccattatccagcaatatcttggctcttttatttggacattgagaagcaatatgtccaactccttggcacctgaaacatttgatatcatgggatctagaagatgaattaatttccattttacctttaggtgtagcaaatgaatttttggacttagcttcatctttttgactttgtcacagatttgttgttttgccaatttgacttccacaaagaagtggaagcaaatttggaagtactattagctttgcattgcctttccacttgaatagatttgtgcaacaagtcttccatctccacataatgctacaattctaccatattagctatctctttctttatacctccaatgaatctggccatagttgcctcacagtcttcttca

SEQ ID NO: 17121 - DNA, 443 bp, Glycine max
ataagttagttataccatagtctaaatattaatatcaatttatggaaaactaatgatcaatgttacatgcacaggtataataaattataaattatgaatatattgaaatattaatcatcgtgtatgaaatatttactctaatacttattaacatttcttttcttggaagctgcgaagccactaatgatttaatttttttataggaattcacttttttaattttcataataaaaaatgattttaaataaacaagtcatttgtcaaaaatgttattataaggaaaaatttactagaaataatcaatcaaaattactcatcaatagatacttcattaaattacttaaaatataacattatagtgatcataaattaaaaggatataaagcataaatcaactactaaccaaatcctagaaacactgcatgtcccagatacaaaatgat

SEQ ID NO: 17122 - DNA, 408 bp, Glycine max
  unsure (1)..(408): unsure at all n locations
agctttaagcaaaatcaatcaacaataacattttactctcctgtccgattgtctcccgttgtatatcgagacgttcgatattcagaatagaagctctgagcaaaatctaatgacaataacttttttctcggatgtccgattgtatcccgtagtgtattgagacactcgaaattcagaatagaagctctgagcaaaatcaaatgacaataactttttactcagatgtccgaatgaatcccgtaatatatcgagacgctcgaaattcagaattgaagctctgagcaaaatctaacgacaataactttntactcagatgtccgattgtgtcccgtagtatatcgagacgcacgaaattcagaacagaagctctgagcaaaatgaaatgacaataactttttactcggatgt

SEQ ID NO: 17123 - DNA, 415 bp, Glycine max
  unsure (1)..(415): unsure at all n locations
agcttgtgcattcaatatcctaatgagggtgttccatatgctctcaaaactggactaatacatttactgcccaagtttcatgatcttgcatgtgaagatcctcataagcatcttaaggagttccatattgtttgttccaccatgaaaccccctgatgtccaggaagatcatatctttctaaaggcttttcctcattctctggagggagtggcaaaagattggctatactaccttgctcccaggtccattttcagctgggatgaacttaaaagggtgttcttggagaaatgtttccttgcatctaggaccactgccatcaaaaaagacatttcatgcatcangccacttattggagagagcttgtatgagtattgngatagattcaagaaattgtgtgcaagctgtcctcaccacc

SEQ ID NO: 17124 - DNA, 410 bp, Glycine max
  unsure (1)..(410): unsure at all n locations
tgctgtgtttttttgattntagataaaactaattgtgtgaaatttattttgtttgaaactaatttataagtgatatgattaatgtttagatattttcattatgaaacttaagagtaaaatttagtataatttttatatcaaatctaaaaactattcaaaattatttaaacccaaaatcaattatagatccaaattcaattttcaaatcttctgtatgcataaaactaaagacaagagtatatctaaaataaattctaaactcaaaataaattcttttacatcaaactaaacacatgatgattntttatttttagttttgaatttataaaatattaaacctaattctaattctgagggtgatgtttcggttttaagatattagatgttgctttaagttgaaaatagataaa

SEQ ID NO: 17125 - DNA, 393 bp, Glycine max
  unsure (1)..(393): unsure at all n locations
agcttaacatcagaccacttccagggtgctggaactacttcacatggacttgatggggcctatgcaagttgaaagccttggaggaaagaggtatgcctatgttgttgtggatgatttctccagatttacctgngtcaactttatcagagagaaatcagacacctttgaagtattcaaagagttgagtctaagacttcaaagagaaaaagactgtgtcatcaagagaattaggagtgaccatggcagagagtttgaaaacagcaagtttactgaattctgcacatctgaaggcatcactcatgagttctctgcagccattacaccacaacaaaatggcatagttgaaaggaaaaacaggactttgcaagaagctgctatggtcatgcttcatgc

SEQ ID NO: 17126 - DNA, 436 bp, Glycine max
  unsure (1)..(436): unsure at all n locations
tgtangccttggatcttgttcatcaatgtgtttccattgcttcttgaagttcactggcagcggaatggagaaggaagaaatatgattggagatgccacttcaaggagaagatgagtcaagcacaagctcactaccataggaagccatggataagagcttgaaggaggagaaaatgagtggagggagaaggagcatgaaaattctgtgcctcaaatgaggtctgaactttgaattataattctcaaatgatccaaggcctacaagctctacatggagctacatcatgtggtatcaaagcatcttcctctacgtgatgttctattgcttcctctatctttttgtttggtcaattcactttaattccttgttcttctccatgtatctcctccattgtctcgtggtttggtgatgtttagagtagattaaaaaagataac

SEQ ID NO: 17127 - DNA, 399 bp, Glycine max
  unsure (1)..(399): unsure at all n locations
agcttttgaagcactgtaggacaggtgcatgttgctgaatggaactatgttttcaattcctttgtagttctttttctatctttagtaaaatgtgatttgttctttgaatttcttcaacctttgtccaatgttcacttgattctaatttatagaatgagcaatttagatggtattattgttttgtctgataaagcagaatgttaaatgcaatttataagtatatatttatcagtaaattggcattcattcctgcaactcaatacaattaaacctattgtatctatgctaaataagaacttaaaatgaactatataaaattatttaattgcacgaatganattatattcatctaagagcttcaattatttgaattacgcagcaattntatgaacgctgttg

SEQ ID NO: 17128 - DNA, 394 bp, Glycine max
  unsure (1)..(394): unsure at all n locations
agctattcttcgtgggttgatgggttctgtctcatagaatggcatgatcactggctgacatgttctcaattaactcagttgcttcttctggggtcttcagttttatctttccccctgcagaagcatctaacaattgcttggtttatggtctcaacccatctataaacatattaaatcgaattggctcataaaacctatgggtgtgagttcttctcaataaacctctgaacctctccaatgcttcactcagagattcatcagggaactgatganatgaagagattgcagctttcccttccgcaatcttggactctgggaagtatctctttaggaacctttcaacaacttcttcccatgttttcagactgttacctttaaataagtgaagccacct

SEQ ID NO: 17129 - DNA, 390 bp, Glycine max
agcttggacaatggttgggaaatcttgctaaaatcctagataaatctcttgtaaaacttggatgtcgcagaaaagaacgtacttcccgcacagatgcgtcgtaaggaagagaagtaataacatcgatctttgccttatcgacctcaatacctctactagagactgaatgccctaagactatacctccatggaccataaaatgacatttttcaaagttaagaacaaggttagtctcagcatcggtcaagaactctacagaggttatccaaacatgcatcaaaggaagaaccataaacaatgaaatcatccataaacaccttcatacaactctataataaatcagaaaagatactcaccatgcacctttggaaggtgccaggagcgttgcat

SEQ ID NO: 17130 - DNA, 411 bp, Glycine max
agcttgatccacctgcagttggcaaaatagtggcatatgtggaaaacaattaattaatacaacttttttgtgcaatggaaatgaaaaaaataaggatgatatcttgtaaatggaaacttggggattgtttggttggaccaatttatgcagatacatatacattggaatttatttttctgaggttaatttcagtcatgacctcttggaagtaattatgtcttttgcttctttggatattttgtggttcccattcctaattcattttttaatatctgccacagggtcaaaatcagagttttgatcttcctattaagaaaaggagtgacatctgtacaataatgtatactagtggaactactggtgaccccaatggagtgttgatatcaaatgagagtattattactctcttag

SEQ ID NO: 17131 - DNA, 445 bp, Glycine max
  unsure (1)..(445): unsure at all n locations
nttatccatgacttcctatggtggtgagcttattcttggctctccttctcctttaagtggcgtctcaaatcacctttactccttctccattccactgccattgatcttcaagaagcaaaggactccatttatgaagaagatccaaggcctacaagctctacatggaactacattataaatggagaatgtgtacagattgtagggctatcaacaacataactgtgaagtataggcaccccatttctaggcttgatgatatgcttgatgagttgcatgtgcaaacatattttccaaaattgatgttaaaagtggttatcaccaaatagggattagagaaggtgatgaatggaaaaccgctttcaagaccaagtttgggttgtatgagttgctagtgaatgcctttgngctcactaatgcaccaaacaccttcatgaggctaatgaat

SEQ ID NO: 17132 - DNA, 407 bp, Glycine max
  unsure (1)..(407): unsure at all n locations
agcttgtaatcgattacacatatactgtaatcgattacctgagcagattttcagaaaatattctcaacagtcacatctttttatgtggttcttgaatggctatcaaaggcctatatatatgtgacttgagacacgaatttgcgaagagtttttcaaaacaaaaaagtcttatcctcttataaagcaaaattgttttatcctcttacaaattccttggccaaattacttgtgattcaataaggaatttttgagtgctcaaattgttcaatctatctctttcaagagagatttcttcttttcttcttcttcattctgaaaagggattaagagaccgatggtctcttgttgtgaaagacatctaaacacaaagtgatgtgaaccttacngtgcacggatcgcttgataca

SEQ ID NO: 17133 - DNA, 407 bp, Glycine max
  unsure (1)..(407): unsure at all n locations
agctntggagtttccaagtgccaattcgtcttcttccttagtccagtcttcttctggcttcaattcatcagtgggctttccttctgtgtccagcatcttgggatgttcccagcctttgatgacagctttccaggttctgctatccagtgatttgaggaaggccaccatccttgctttccagtattcatagttggttccatccagaataggtggtctgttcactggtcctccttctttctccatgttcatcagaatttatctccctagatctcactcagtgatttcgagtgttggctctgataccaattgaaattctgatactggngacagatgtcgtacaggatgtcacgacatcacgcttcagaacatgcagattgtatttgacagtgtgcacagtttaagcaagt

SEQ ID NO: 17134 - DNA, 407 bp, Glycine max
agcttctccatgcaaacttcattaaagaggtcaggttttgtacttggcttgccaatgccgtcatggtcaaaaaggccaacggcaaatggcgaatgtgcaccgactacactaatctgaacagggcataccccaaagacgtgtaccctctccccagcatcaataggttggtcgatgaagcgtacgaattccaggtgctaaccttcttggatgcctacttcggatacaactagattagaatgcatcctctagatgaggagaaaatgaaattcataactaaaaatgtcaacttttgttacaaggtcataccattcggcctagaaaatgcaagcgcgacattccaatgaccaatggaccgagtcttcatacaacagatcggacgaaatgtcatggtatatatggatgacatg

SEQ ID NO: 17135 - DNA, 379 bp, Glycine max
agcttctcaatagagttaggcaggtaactctgtaataagtcttaaactctatccctacatacattatgcaaaatatgcagttgccctccctgtagagcttgtaggccttggatcttcttcatcaatggagtcctttgcttcttgaagatcaatggtagtagaatagagaaggaggaaaggtgattggagatgccacttcaaggagaagatgagtcaagaacaagttgaccaccataagaagccatggataagagcttgaagatagaataagatgagtggagggagagggagatgatgggcacgaaatctatttctcacatgaggtctgaaatttgaagtgtaatttctcaaattatcaaagctgaataatatgcacaca

SEQ ID NO: 17136 - DNA, 398 bp, Glycine max
  unsure (1)..(398): unsure at all n locations
agcttcacagtttattnttttcaaacttgagttttggaagaccaattactaagtctttcctaactagatgatataaatgatggatgttaatgtgttcaaccctacaatgccacaaccatgaatcatcatctatcttactcaccaagcaacttagctcatgaaaagatgcatgctcaacattcagcatataaatattacctattctcttaccaatgtggacaactttaccagatatggcttcacttataagatagcaatttctgtcaaactcaatcttgaaacctttatcgcaaagttgactaatgtttagaaggttatgctttagtgcatccatatgtagcacattctttatctgagttttgtgttaattccctatatttccttccccagttattttt

SEQ ID NO: 17137 - DNA, 452 bp, Glycine max
gcttcatgatgatgaatcaagttgattcaagtagttttgatgattacaaagatgatgacaaaaagcccaagagaatgatttcaagattgactcaacaagtttcaagaatcaagagaagtttgatttcaagattcaagagaagatgaattcaagattcaagagaagaaatcaagaagacttcacaagggaagtattgaaaagatttttcaaaaaacaaacatagcacagttttttttttcaaaacagtttttctcaaaattttctaagctaccagagtttttactctctggtaatcgattactagtttcctgtaatcgattaccagtggcaaagtttgatttcaaaagttttcaactgaatttgcaatgttccaattaatttcaaaatggtgtaatcgattacaagatattggtaatcgattactagtatatctgaacattggaattcaaatt

SEQ ID NO: 17138 - DNA, 441 bp, Glycine max
  unsure (1)..(441): unsure at all n locations
ctcaagcttggatttcctttgctctggaaacctctcctttcttatgtgaacccaaacccatctctccagattggaaaataacctttttgtgccccttgtttgcttgtttaacataactctcattcttcttttcaatttgggccttgactatttcatggagctttttcacatagtccactttggcttccttccttatgcttaaaaactgaaatattagacattggtaacaaatcaagaggagttagtggattgaaaccataagcaacctcaaaaggagaacaactagtggtgctatgcacaaccctattatgagcaaattcaatgtgaggtaagcaaacttcccaatttttaagattctttntcaaaatggtccttagcaaggtacccaaagtcctattcacgacctccgtttgtccatcccgttgagggtgacaagtagta

SEQ ID NO: 17139 - DNA, 446 bp, Glycine max
  unsure (1)..(446): unsure at all n locations
tgcccagagaaggagtccacggaggaaatgcttaccaccttttaagactggaaagcggtttctaatgactcctctgcggcctccacataaggcatagaggacgggcagctcaccaagatgtcttcttcgcctgatacgatgaccagatgcccttccactacgaatttcaacttttggtggagtgtagagggaacaacccccactgagtggatccatgggcgccccaacagatagttgtagggggggttgatatccattatttggaaggtgacttgacaggtgtgagggcctatctgtactgggagatcgatctctcccctaacctctcggtgggtgccgtcgaaggcacgaaccaccattgaccttggctntaagtaggaggcattgaatggtaatttctccaaagtgctcttatgcatcacattcaaactggaaccattatcgat

SEQ ID NO: 17140 - DNA, 405 bp, Glycine max
  unsure (1)..(405): unsure at all n locations
agcttggatttcctttgctccggaaacctctcctttctcatgtgaacccaaacccaatctccaggttggaaaacaacctttttgtgccccttgtttgcttgtttagcatagctctcattcctcttttcaatttgggccttgactctttcatggagctttttcacatagtctgttttggcttgtccttccttatgcttaaaaactgaaatattacgcattggaaacaaatcaagaggagttagtggattgaaaccataaacaacctcaaaaggagaacaactagtggtgctatgcaccgccctattataagcaaattcaatgtgaggtaagcaaacttcccaattnttaagattctttttcaaaacggtccttagcatggtacccaaagtcctattcacgacctcc

SEQ ID NO: 17141 - DNA, 349 bp, Glycine max
  unsure (1)..(349): unsure at all n locations
tatatatncaatagtatttatatggtctatntatgtatatgtgntatatttgataaatgaatagtttgaggtagtataagataacaattttgtatagtttagtttgaattgttaatgttatatatgccagattatnttttgataaatgaatagttttaggtagtataagataataattctgtgtaatttattttgaattgttaatgttatatatgccagattatattttgataaatgaatagttntaggtagtataagataataattncgtatagtttagtctgaattattaatgttatatggtagatatgatatacggttatatgataaattagtgtcgcaacctacc

SEQ ID NO: 17142 - DNA, 369 bp, Glycine max
  unsure (1)..(369): unsure at all n locations
tgatgatgaaccaagcaattntgatgatgccaaaagcccatgtgattgattcaagacttcaagatcaagcatcaagaatccaatccaagattcaagagaagaaatcaagacgcaacatgtcaagacttcatataggataagtattaaaagaatttttcaaaaaccaaatagcacagttttgttttacaaaagaattttctcaaaattntctaagctaccagagtgattactctctagtaatcgattactagttatcagtaatcgattaccagtgaccggtttggttntcaaaatgttttcaaatgatttataatgttccaaaatgattntcaagtagtgtaatcgattacactgtattagtaatcaatt

SEQ ID NO: 17143 - DNA, 412 bp, Glycine max
  unsure (1)..(412): unsure at all n locations
agcttgtatcggacatctgtgtgaaaagntatgaccattggaattttttatgagcttccattnttaaatttcgagcctctcaacatattatgcgcccgaatcggacatccgtgtgaaaagtcatgatcattngaatttctcgagagtttccgatgtttaatttcgagcgtattgatatattataaccctgaatcggacctcagtgtgacaagttatgaccatttgaatttgacgagagcttccgttgttcaatttcgaatatcactatatgtgatgcgcctaaattggacatccgtgtgaaaagttatgaccatttgaatttctcaagagcttccgttgttcaattctgagcgtctcgatacgtgattngcatgaatcggacatccgtgtgaaaagttatgaccatttgaat

SEQ ID NO: 17144 - DNA, 371 bp, Glycine max
ttcgtcttcttctattgtccagtcttcttctggcttcaattcattagtgggctgtccttctgtgtccaacatcttgggatgttcccagcctttgatgacagctatccacgttctgctatccagtgattcgaagaaggccaccatccttgctttccaggattcatagatggttccatccagaatgggaggtctgtacactaggcctccttctttctccatgttcatcagaattcatctccctagatctcactcagagatttccagtgcccgctctgataccaattgaaattctgataccaatgccagatgtcccacaagatgtcacgacatcacgcttcagaacatgcagattatatttgagagtatgaaca

SEQ ID NO: 17145 - DNA, 406 bp, Glycine max
  unsure (1)..(406): unsure at all n locations
agcttttccattttttgcctgatgcctgaaatgtcttttttgatgttagtggncctagatgcacggaagaatttctccaagaacaccctcttaaggtcatcccagctgaaaatagacctgagagcaaggtagtataaccaatcttttgccactccctccagagaatgaggaaaagccttttgaaagatatgatcttcttggacatcagggggcttgatggtgaaacaaacaatatggaactccttaagatgcttataaggatcttcacctgcaagaccatgaaacttgggcagcanatgtattagtccagtcttgagaacatatggaacacccttatcaggatattgaatgcataagctntcataagtgaaatcaagtgcagccatctccctaagagtcctatcac

SEQ ID NO: 17146 - DNA, 405 bp, Glycine max
  unsure (1)..(405): unsure at all n locations
gaagctagatcttagctacacatacctctctaatatgcttatctcacctccttgagatgagaagctagagcttagctacacacccctataatagctaagctcacccccatgacaaaatacatgaaaatacaaaaaaaaagtccctactacaaagactactcaaaatgcctcanaatacaaggctaaaaccctataatacttgaatggccaaaatacaaggcctaaacgaaggaaaaaacctattctaatatttacaaagataagcgggctcatacttagcccatggactcaaaacctaccctaaggctcatgagaaccctatggccttcccttggatctctggcccaatctacttggagtcttctatccaatgcccttggagggtaggattgcatcacctatcac

SEQ ID NO: 17147 - DNA, 208 bp, Glycine max
ttcttgttgccttggatcttcttcatcaatggagtcatttgattcttgaagatcaatggcaacagaatggagaaggaggaaaggtgattggaaacgccacttcaaggagaagatgagtcaagaacaagctcaccatcataggaagtcatggataagagtttgaaggtaggagaaaatgagtggatggagagagagagggggggggggg

SEQ ID NO: 17148 - DNA, 371 bp, Glycine max
tttcttttttgttcaattatgagtgggtcgatatatgatgcgcctgaatcggacatccgagtgaaaggttatgaccatttcaatttctcgagagcttccgttgttcaatttcgagcgtctcgatatgtgatgtccctgaatcggacctccgtgtgataacttatgaccatttgaatgtctcgagagcttccgctggtcaatttcgagcatctcaatatatgatgtgcctgaatcaaacatctgagagaaaagtatgacaatctcaatttctcaagagcttccgttgttcaattccgagcgtctcgatatgtggtgtgcctgaatctgatatccgagtgataagttatgacaattttaatttctccagagct

SEQ ID NO: 17149 - DNA, 414 bp, Glycine max
  unsure (1)..(414): unsure at all n locations
ntcgagaatntaaaattgtcataacttttctctctgatgtccgattcatgcacatcagatatctagacgctcgagattgaacaatggaagctctcgagaatttaaaattgtcataacttttcactcggatgtccgattcaggaacatcagatatctagacgctcgaaattaaacaacggaacctctcgagaaattcaattggtcataactnttcactcgtatgtccgattcaggcgcataatatattgagaagctcgaaattgaacaacggaagctctcgagaaatttaaatgatcataacatttcactcggatgtccaattcaggcgcatcatatatcgagacgctcgtaattgaacaatggaagctctggagaatttaaattgtcataacttttcaatcggatgtccgattc

SEQ ID NO: 17150 - DNA, 382 bp, Glycine max
  unsure (1)..(382): unsure at all n locations
agcttgtctcctctgagttttccgactatgctcttgtgtggtggaacaagctacaaaaggagagagcaagaaatgaagagccaatggttgatacatggacggagatgaaaaagatcatgaggaagcggtatgtgccggctagttactcaaaggacttgaaattcaagctccaaaaactaacccaaggcaacaagggggttgaggagtatttcaaggaaatggatgtgctcatgattcaagcaaatattgaagaagatgaggaggtaactatggctcgatttcttaatggtttgactaatgatatccgtgatattgttgagctgcaggagtttgttgaaatggatgatntgcttcacaaagcaatccaagtggagcaacaatt

SEQ ID NO: 17151 - DNA, 404 bp, Glycine max
  unsure (1)..(404): unsure at all n locations
tactcaagcttgaatcgacatccgtgtganaaggtatgacgatttgaatatctttagatcttccgttgttcaatttcgagcttctcgacatattatgcacccgaatcggatatccttgtgaaaagttatgactatttgaattttccgagaatttccgatgtttaatttcgagcgtatcgatatattataagcttgaatcggacatccgtgtgaaaatttatgaccatttgaatttctcaagagcttccgttgttcaatttcgagcttctcgatatgtgatttgcctgaatcggacatccgcgtgaaaagttatactaattgaatttcgcaagagcttccgttgttcaattttgagcgtctcgatatgtgaattgcctgaatcggacatgcgtgtgaaaagtata

SEQ ID NO: 17152 - DNA, 355 bp, Glycine max
ttcttgttttattttaaaaccaaggccaccatcttttgtgcaatttgattgcatgttgactttggtagcatgaaacatctcatcacataagaaggaatagcttgcaccactgactttattaggccactcatcctgcttttgaaaacgtcttctccttccaacctttcagcttcttccaaactctatctctagcaaaattaaacacttgagtctttgatctccccaaaatggttggaagacccaaataatttacatgtctctccactgcctttaccccataacttatcaagttcatcaattctggtactagaacacatttggatacaagagagctaagatttctctagattgatcc

SEQ ID NO: 17153 - DNA, 426 bp, Glycine max
  unsure (1)..(426): unsure at all n locations
tatactcnctccatcccataataatagtcgtgtaagaaaataattattgtcccaaaataattgtcattntagctcttcaatataatattaattgttttttttcacttatatcccttataatattaatgatatggactacaaaaactaaaaatgaattaatgatgataaggttaattttgtaaaattattattctttttcatttgcttattagttcttcttggtctgagtaaacaaactggtatgggacgacaattataatgagatgaagggagtataaactctcatccgtggtgcatacagacacacaatttcagttcaatgcctttgtttcctctttcttaagatggtattggagcctatcctaaatctattaccgataacctaccatattatccatgcaccanacccaaaaagtactgggcgtg

SEQ ID NO: 17154 - DNA, 481 bp, Glycine max
  unsure (1)..(481): unsure at all n locations
tagaaaatntatttcacgagaacatatnagtaaatttaatatttttatgcttacatagataatataatactactatacgactattaaaggagtgtgtgtaagaaaataaataaattaatgtgcacaagagttgaacacaagatgtttttattgagggtattcaactttactagttgactntaatcgtcattgttgccttgtttagagttagatgcttatgtgaggaaatgggagatattttatttatttaatttaagataaagtctttccgttgtttactcttgaatcttgatcaatgataaagaacaaatttggaaattcgaagaanaagtaccaaaaacacctttntttcgtgtattggattatgatttaaaaaaatctggtaatataatgtaatatttaattaagaattttaggaatttttttanaaagttaacaaaatgaatttntataactntaaaaaaatctttagatattaaaa

SEQ ID NO: 17155 - DNA, 369 bp, Glycine max
  unsure (1)..(369): unsure at all n locations
attgncttatcatatgaaaattatatagtgattacattntacacatatatactataataatgagtatanttttaaaaataaagaatctaggttcatgaatcgcaaacagattcctaaagtatacttaagtaaatatatatcatatacaaaattataatctaaaatgagttgtcgtagttgtatcattaaataaatttataaatttatactacaaatcaggatcttatctatatattccaaacatgaatgaatatacactaattatattgaaaatgcaaactacaaggcattcaaagcacaaattaattcaatatttatatcacaatacaccaaaattcaaccaaaaattactgcataataatttcaata

SEQ ID NO: 17156 - DNA, 395 bp, Glycine max
catgaaaagacctatgccctttcttttaacttctccaaatggggagtctcaacagccttttgctttcccggagagtagtagagtcactctgaccttccttctcctggcacataatccttgggcttgtcagctcatcaccactcttggggagtggacctgagcaaatatcaatctttcccttgcctgagaatcctcatggataccaagctctaagttcttagagaaagcctcatagaacttggttgaatcctccttggtctctgtcattacatagaacagctcaatgcacttcttgaccaagctcttacggatgaccttcaagatcttgatctggtgcaacatttcatcttgaaatgctgagtgggagatcttcagaatcaacaataccccttgac

SEQ ID NO: 17157 - DNA, 403 bp, Glycine max
  unsure (1)..(403): unsure at all n locations
ttcngttatatttttgaagtcaaaatgcaattccaaagcagtatcatttaaaatatttaacaaaaaatattattaaatgagctaattaagatattaatataaaataataatgaaaaaatcttgctttctaattttacgacaatttaaaaaattataataagtaaaatataagtcgcatatataatttaataaactattaatttggcctttntaaatatttatttgacattgattntgcttttaatttttagtgagatggagtgagtcttttaaacattgaaaagtattaaaatctttttgtgatatggagtaagtcttttattntaattatgtaagtttgctccttacatataatagaaatggtttttctcatatattttttttatgaaatgcgagatgagtg

SEQ ID NO: 17158 - DNA, 366 bp, Glycine max
tatataacactcaagcttgtgggaagacactgatcgaatcatcatcatcaccactcttgatacagctctctctagacgcgtactttgcacgcttccttccgcacagctattcttgcactgcggtcgttggctctctatgctctcgggttgctctctcttctttacctcctacggtgcttgatatacttaaagatggtaaaggcggagttcttgcatcccgtatgggttaactacctattcgctccgtggatatcgtggattctattgcttcaatcggagccattcgtggcgccaacaacagcaacctacttggttctgtggagggtgttcacggtgccggtggtagtgctggacgtgaagatctac

SEQ ID NO: 17159 - DNA, 415 bp, Glycine max
  unsure (1)..(415): unsure at all n locations
atctnatgtatgaagagttcaaaatgagtatgatgggagaattgaagttcttccttggactttaaatcaagcaagcggacgaaggaatatgcatacatcaaaccatgtagtgaaaaaacttctgaagaagttcaaggtggacgatgcaaagcatatgaaaacccccatgcatccaaccattgtacttggactggatgatgaatcaacgaaggtggatgaaaatacatgcagaggaaatatgatatctcttttgcatctcactgcgtccagccttaacattatgttcagtgtatgtctctatgttagattccaaaaggaaccaaggaaaattcatttatatgatgttaaacgcatatttagatatttgattgaaacttctaaccttggtctttgctttaagagagaaatcgaatac

SEQ ID NO: 17160 - DNA, 469 bp, Glycine max
  unsure (1)..(469): unsure at all n locations
ctntanatgagcttcacctttctcgcgactatcatgttgtctgtctcgtgtgcttttagtttatcctanatttatcaacgattagtcaacacaaagttaccatctcaacttcaaaatattttctgctttaaaaacacatcaaaatatatgctactttagaaaatcaagatcaattatatttattttaataatatttttgtttattttcttagtatagactatatatatctttaatcagaacattatgaagtatggaggataaaattttagctntgaatctttaacacatttacatatccaaaaatatattcattattggtatcttatgtgaaatattntattaatttacaatattatactgtaactcctttaatgaaaatattntaataaaagaacatgagaccagcttattaaaaattaaaaaatggaaacttatcacacttaaccaagctagtcaaaacaaatatta

SEQ ID NO: 17161 - DNA, 417 bp, Glycine max
  unsure (1)..(417): unsure at all n locations
agcttgtatcgttcattcgtgtgaaaagttatgaccatttgaatttctcaagagcttccgttgttcaatttcgatcctctcgacatattatgcacccgaatcggacatctgtgtgaaaagtcatgatcatttgaatttctcgagagtttccgatgtttaatttcgagcgtatcgatatattataaccctgaatcggacctcagtctgaaaagttatgaccatttgaatttgacgagagcttccgttgttcaatttcgaatatcactgtatgtgatgcgcctaaattggacattcgagttaaatgttatgaccatttgaatttctcaagagcttccgttgttcaattctgagcgtctcgatatgtgattcgcctgaatcggacatnccgtgtgaaaagtataaccattngaatttctc

SEQ ID NO: 17162 - DNA, 412 bp, Glycine max
  unsure (1)..(412): unsure at all n locations
ttctntttggtgtcgagaagaaataacatgtttgtcatcatcaaaaagggggagaatgtgaatgtatgtatacatgattttgatgatgtcaaagaagaatctaacaaggctacttcaaatgataagcatttgcttcaagaataattcaagattgcttcaacaaacaaatccttgtttcaagattcactaaagaccaagccttgccttaaaacaaagtgctttcaagacatgcaaggctctggtaatcgattaccaggaagtgtaatcgattacccgaagacagggttgagaaatagctgttgaaaaaggttttgaatttgaattntcaacatgtaatcgattaccatatgtctgtaatcgattaccagcaacgaaactttggaaattcanattcaaaagtcattaacccttc

SEQ ID NO: 17163 - DNA, 451 bp, Glycine max
  unsure (1)..(451): unsure at all n locations
ctaattntaatatgatacattattgaaagttttagctnttaaatagtcattattataattattgttttatataataatgtaaaactataataaacagaacttggattataattttttacatctacagtaaattctatttgtaataattcatacacatacacaagttaatttaaaccattattgagatatggtttttatattacctaaccggcactaggttatacgagagcatcattctcccaactcattgtgcaagttaatcaatttcctggtttttaacaaagattcaatgaaaatgatccatcatgaaaaagttcatatttaaaaatgaaccaaccgtattttcacaaatgagaaatctactaaagttttgaattaaccatcaacattgtaaaaactcaaatntgatntgngctgctaggatgctcaccgaacttatattagccatcat

SEQ ID NO: 17164 - DNA, 390 bp, Glycine max
agcttggacaatggcagtgaaatcttgctaaaatcctagataaatctcttgtaaaacttggatgtcgcagaaaagaacgtacttcccgcacagatgcgtcgtaaggaagagaagtaataacatcgatctttgccttatcgacctcaatacctctactagagactgaatgccctaagactatacctccatggaccataaaatgacatttttcaaagttaagaacaaggttagtctcagcatcggtcaagaactctacagaggttatccaaacatgcatcaaaggaagaaccataaacaatgaaatcatccataaacaccttcatacaactctataataaatcagaaaagatactcaccatgcacctttggaaggtgccaggagcgttgcat

SEQ ID NO: 17165 - DNA, 399 bp, Glycine max
  unsure (1)..(399): unsure at all n locations
agcttcttatcctaggctcatcttggtggtgaagctccttcttccatggcttactccctagtggatggcgtctcctctcacttcttctcctttgtcttccgctgcatctccatggtgtaaaatcaccattgaaggacctcattgaagctcaaagatccagcctccatagaagctccacaagcaagcttccatcactgaggacatggaaaggatgatgttcgtcaccctttggggaatgttctgctacaaggtgatgtccttttggcttaagaacgctggggcaacctaccaacaggctatggtagcattattccatgatatgatgcacanaagaaatgaagtctacgtggatgacatgattaccaagtctaaacccgaggagaaacatctcatcaactt

SEQ ID NO: 17166 - DNA, 400 bp, Glycine max
  unsure (1)..(400): unsure at all n locations
tatacctgatgagaataacttaattgataatatatacgtttattttgtagataagatctggatttgattatcacataatatatgtttagaacagtaatagattttaagtgtgattaaatcttaaattttaaatgtaagattagtcttataactaccacaagaatctaaaatttgtgaagatcctttggagtcctactctatgagctgtgaactcaatggttagattacagattcattatattgcgaatattcatgttgtgtgatggtctacaactgtacctacatatgaggaaaataaattagagatntctttatctttcctactcttatgaaatagatcctttatataatatgagacacctaagtacattatcatatttttctctcatattattcccag

SEQ ID NO: 17167 - DNA, 355 bp, Glycine max
catgcaacaattgttagccgtggctatacgagacatcttgccaaacaaagtcaggttcaccataactcgcatgtgctttttcttccatgctatatgtagcaaagtgattgatccagtaatgtttgatgagttggaaaatgaggccgcaattatactgtgccagttggagatgtattttccccctgctttctttgacatcatgattcacttgattgtgcatctggtcagagaaatcaaatgttgtggtcctgtttatctacggtggatgtacccggttgagcgatacatgaagatcttaaaagggtatacaaagaatctatatcgtccggaagcatctattgttgagaggtacatt

SEQ ID NO: 17168 - DNA, 464 bp, Glycine max
  unsure (1)..(464): unsure at all n locations
ctggagaaccaagccaatcagaatgctagacgaaatatagatggttatatatgtaacaatggtggtaatgacggaccgaggcataaccgggttgagggagtaaagctcaatgttcctcccttcaaaggtagaagtgatccagatgcctacctggactgggaaatgaagactgagcacgtatttgcctgcaatgactacactgatgcgcaaaaagtcaagctagcagcagttgaattctccgactatgcccttgtttggtggcataaatactagagagaaatgttgagagaggaacggcgagaggttgatacatggactgagatgaaaagggtgatgagaaaaaggtatgtgcccactanctataacagaaccatgcgacagaaactccaagggctgtcccaagggaatttaaccatggaagaatattataaagagatggaaatggcgttagtgagggtcaacat

SEQ ID NO: 17169 - DNA, 411 bp, Glycine max
agcttagtaaagttaagcactaacaatctccccctttgggaaattttgtctaaaacatacttagacacttcctgagcaggtacgagcagttatgcaagtgggatcagcaactttcattatcagagtaatcaagcacagcggaaattctgcatgttgcaagtcgtttccaggatgtcaagacatctcacatgacatcagctttctgcttctgctccccctgtctccatgcttactgcagcatcttctaacagctactagtcttttccaggatgtcaagacatctcatgtgacatcagctgctccccctgtctccatgctcttactgttgcatcttttatcagctactagtagcttacaccagtcatcatcagcagcagcagtctccccctcaaatcatatacatacaactcc

SEQ ID NO: 17170 - DNA, 489 bp, Glycine max
  unsure (1)..(489): unsure at all n locations
tactcagcttcctcaagatccttttatctccctgttgaaatctcatntgtccattagttgngggtggtaaggtgtggaaattctgtgcacgaccccatactttntgagcaaggcatacatggatctattacaaaaatgggtgccttgatcactaacgatggctctagagactccaaacctgcaaaacatattagatctaacaaaatccacaacaaccttagcatcgttagttctggtggctntaacttccactcactttgaaacataatgaacaacaaggagaatataaacaaaaccaaaagagacagggaaaggccccataaagtctatacccaaacatcaaacacctcacagaacaacatgggttgttgaggcatttgttgtctccatgaaagtgagccgcctgctctctgacaaggctcacaagtgctacagattctccacgcatccttgaagatggtgggccaatagaaaccacagtcaagcact

SEQ ID NO: 17171 - DNA, 418 bp, Glycine max
  unsure (1)..(418): unsure at all n locations
attcagctcggacccgggatcctcttagtcacctgcagctgcagcctttttgttcttttatatcagagggactgatggtcactatgaatgacaaatctcttgagataaaggtagtgttgccatgtattcaaagcccgtactaatgcatacaactccttatcataagttgaatagttaatggtaggaccacttaactnttcactaaaataagcaattggatggcctttttgcatcaacacagccccaatcccaacatttgaagcatcacactcaatttcaaaagatttttgaatgtttggcaacgcaagtatggnggcattagctagctcttgctaagatcattgaaagctcttcttgtttctctcgccatatgaaccaacatttttttgacacttcattagaggtgctgcaatgtgct

SEQ ID NO: 17172 - DNA, 444 bp, Glycine max
tgatatttgtgccatagtaggccagatattgattatggtatgggtttggtaagcagatatatgaatgatctaaggacttctcatatggctgcagtaaagagaattttgagatatgtgaaaggcacacttgattatggcttcttattctccaaagcaaatcataatcaaggaataaggttaattggtttttctaatgcagactatagtggtgatgtagaggacagcaaaagcaccactagatatgtcttcaaattacttggatcaacaatctgcttgagttctaagaagcaagaagatgttagactttcaacttgtgagttagagtacatggctattgtctcagcagcttgtcaatcagccttgttggagtccctgttgtagaattgaatattcagcttgattcagttgttcaacttaatatggacaacaagtctgctatatgtc

SEQ ID NO: 17173 - DNA, 411 bp, Glycine max
  unsure (1)..(411): unsure at all n locations
ttcttgtatcatataaagtggatccgaggaactctcaaggacttggtcaagatgtctataagctggttgttggagttaataaatttagtactaatttctttggactgcagctttttccgaacaaaatgacaatcaatctctatatgttttgttcttttgtgaaatacaggattagaggtgatgtgaagagctgcctgattatcacaatacaactttatttgctgaacatcacanaattttaattattgaagttgtttaatccacaacaattcacaagtaacaagagccatagctctatattctgctnttgcacttgatcaagcaaaaacactctgtttcttgctttttcaagagacaatatttcctccaaaggatacaccatatccagtggtggatcgcctgtctatggga

SEQ ID NO: 17174 - DNA, 459 bp, Glycine max
  unsure (1)..(459): unsure at all n locations
ntgaaatgggctcacatgtaggggtgagttgcgagataaatctctcgatataattcaacctgcccaagaaacctcgaacctgcttctccgtgcgtggttccggcatttcaataatggccttcattttctcgggatctatcgctatccctttctgacttacgataaatcccagcaacttccccgactttaccccgaaggtacacttggttgggtttagcttcagttggtatttccgcaaccttctgaacagcttacgcagattgacgaggtgttcgtcctcagtctgagatttggcaatcatgtcatctacgtagacctctatttccttatgcatcatgtcatggaacaacgccaccatggcacgctgataggttgccccagcatttttcagcccgaatgccatcactttatatcagaacgtcccccatagggtgacgaaagtggtcttctctacatctt

SEQ ID NO: 17175 - DNA, 410 bp, Glycine max
  unsure (1)..(410): unsure at all n locations
ttcttgatggattacttgatgccttggtcaacctagtaactcagcttgacatgaatcagaaatatgcatctgcacctgttgcaagagtctgtggtctgtgttattctgtagatcaccatacagatttcatccttctttgcagcaatatggagtcaatgagcaacctgaagcttatgctgcaaacatttataatagacctcctcaacagcaaaaccaacaatggcaaaataattatgagctttcgagcaatagatacaatccaggttggaggaatcatccaaatctgagatggacaagtcctccacaacaacaacagcctgtccctcctttccagaatcctgctggtccaagcaagccatatgttcctcctccaatacagcagtagtcacaacanagacaacaagcaactg

SEQ ID NO: 17176 - DNA, 398 bp, Glycine max
ttcttgtgacatgaggccattaagtgcctctgccacaatgttataaagaagaggtgatagagggtctccttgccttagtcctttctgaggtaggaactcagctgagggactaccattcaccaaaaatgaaacagatgctgattttagacacccctcaatccattgaattcatttgctgcaaaagcccatcctacccatcatataagtgagaaactcccaagacacaaaatcatatgccttttcataatcaaccttgaagacaatgcaaggcttttggcatcttttggcctcttcaactacctcatttgtagtcaccacgctgtgtagcatatgtcttccttctataaatgctgattgcctctcatgaataataaaaggcatgaccttcttcaatctat

SEQ ID NO: 17177 - DNA, 405 bp, Glycine max
  unsure (1)..(405): unsure at all n locations
agcttcttatcctaggctcatcttggtggtgaagcttcttcttccaaggcttattccctagtggatggcgcatcctctctcctcttctcctttgtcttccgctgcatctccatggtggaaaatcaccattaaaggacctcattgaagctcaaagatccagcctccatagaagccccacaagcaagcttcctaaggtgttcctcctcagttttagacttggcgatcatgtcgtctatgtagacttcgatctctcggtgcatcatgtcgtggaacaaagccaccatagcccattgataggttgccccgacgttcttgagcccaaaggacatcaccttatagcagaaccttccccacagggtgacgacacatggtctnttccatatcctctggtgccatctttatctg

SEQ ID NO: 17178 - DNA, 482 bp, Glycine max
  unsure (1)..(482): unsure at all n locations
tgctaacccatggaagctcctaatatctcccacactntnntgggtggtctcattcttggatggccttgattntctcagggtccacttggaccccatttctaccaactacaaaacctaagaaaactatattatctacacaaaaggtacacttctctatatttgcatagagggtgtttttcctaaggactgaaagaacttgcctgagatgtcctaagtgatcatctaggctcctactgtacactaaaatatcatcaaaataaacaactacaattctacctaggaaatcccttaagacatgatgcataagcctcataaaggtgcttggtgcattagtgagcccaaaaggcatcactagccattcatacaaaccaaacttggtcttgaaagcggttntccactcatcaccctttttcatcctgatttggtgataaccacttttaagaatcaattttgaaaagatattggcaccatgcaactcatca

SEQ ID NO: 17179 - DNA, 415 bp, Glycine max
  unsure (1)..(415): unsure at all n locations
agctnttatttcaataaataagtttaaataagttggcccataatcaatataaagtaatggaaaaaaaacataatcaaacatctatttgtctttatcaagtctatttcaagtctagtattaaaattcaatatttttttttatataatgttactctgtaataatttttatatgcatttattatcaaaattaaaattcattntaaatgtattgaaatagagtaattntaattaaacatatacaatttttaattattttaaaacaatatttttaatgattntaaagatattaattntcattatgtgataatattaaagattaatctcatcgtataataaataaaacactntcatttagtataattaaaattatatattattatcattattattatcaccattaaaattataaaacactt

SEQ ID NO: 17180 - DNA, 421 bp, Glycine max
  unsure (1)..(421): unsure at all n locations
tagtagggaatctatccttcctaagatggagttctttccagtcactgtcgttaagaactagctcttttcttcctctattgcctttagttgaatacacctttgtgtggttctctatttggttcttaaccctctcatgcaacttctttacaaactctgacctagattccctttcttgatgtataaacaaagtgtccagtgggaggggaataaggtctaacgatgttagggaattgaacccatagacaacctcaaaaggggattgcttggtggttctatgagctcccctgttgtcggcaaattctacatgaggaagatactcatcccaagacttatggttgccttttagaagagcccttganagggtagataaagacctattcactacctctatttgcccatcagtttgtggatgacaagtagt

SEQ ID NO: 17181 - DNA, 421 bp, Glycine max
  unsure (1)..(421): unsure at all n locations
agctttttcagtttcataaagcttttggactaattaaattaatactttcaaaattaaagataaatatttcatatatcatcatttttatatttttattattttaaaaatgaccataatatttttatgtaaattaaactagttttctaggtttttaaccataatatatgtatttttcaaaacttccatttcaaagaaaataatatttattattttaagttcaaaactcaaagaggaaaaaatgcatgcaaacaaattcaaataataagtattggctaaaatatttttattatgaaattaaattttttaaggataaataatttcattntttgtaatatttgatattttgattnttatttgatccttanaagtaacattgtaacaataaaataatatttttcanagtttatgaaaaaataatata

SEQ ID NO: 17182 - DNA, 387 bp, Glycine max
agcttttataggtgaaatcaggtgcagccatttcccttatagtcctctcacgaggtggaggttgtgccatgttctcagaatgtgcaaaatcagaatgctcagaatcagaatgctcaaaattataatgctcaagattaggatgttcaaaatcaccaataacagaatgcacagattcaccagttatacaatgctcagaatgatcaaaaggtataaaatgatgcctaactgaaattctgatactgaggacagatgtcgtacaggatgtcacgacatcgcgcttcagaacatgcagattgtatatgacagtatgaacagattatacaagtaaataacacaagagaattgtaacccagttcggtgcaacgtcacctacatctgggggctacc

SEQ ID NO: 17183 - DNA, 464 bp, Glycine max
  unsure (1)..(464): unsure at all n locations
nttccacttccacacaaaaatgtaattctaattctatcacttgtttntactgtggaagaagaggacatggcatatcaacttgctacttcaagaaaaattatagtaacattaaaatgatatgggtcccaaaaggatcctcagtttatactaacatgcaaggacccaataaaatttgggtacctaagtcaaaaacttgattatgcaggtatctttgagaaagaagtggtacatagatagcggatgctcaaaatatatgactggagatgcatcannatttacacacatatctccaaagaaaagcgggcatgtaacatatggtgacaacaacaaaggtagaattcttggagtgggtaaaataggtacannatcttcanactccattgaanatgttctacnttgtgaaggccttaagcacagcctgcttagcgttagtcaactatgtgacanaggctatctagtatcat

SEQ ID NO: 17184 - DNA, 416 bp, Glycine max
  unsure (1)..(416): unsure at all n locations
agcttgttcattttatattctgatgagggtgttccatatgttctcaagactggactaatacatttgctgcccaagtttcatggtcttgcaggtgaagatcctcataagcatcttaaggagttccatatcgtttgttccaccatgaagccctctgatgtcctagaagatcatacctttctaaaggcttttcctcattctctggagggagtggcaaaagattggctatactaccttgctcccaggtccattttcaactgggatgaccttaagagggtgttcttggagaaattctttcctgcatctangaccactgccatcagannagacatttcaggcatcaaacaacttagtggagagagcttgtatgagtactgngaaagattcaagaaattgngtgcaagctgtcctcaccacca

SEQ ID NO: 17185 - DNA, 477 bp, Glycine max
  unsure (1)..(477): unsure at all n locations
gcttcatgatgatgaatcaagttgattcaagaagttntgatattgtcttgttgttgacaaaaaacccaaagaatgatttcgagattaaatcaagatcaaattcaagaatcaagagaagtttgatttcaagattcaagaaaagatgaattcaagttccaagagaagaaatcaagaagacttcacaatgggaagtattgaaaagattttttaaaaaacaaacatagcacaattttgtttttcaaaagagttttcacaaaattttctatgttaccagagtttttactctctagtaatcgattaccagtttcctgtaatcgattactagtggcaaagtttgatttcaaaagcttttaactgaatatacaacgttccaattgatttcaaaatggtgtaatcgattacaagatattggtaatcaattactagtgcatctgaacgttggaattcaaattcaattgtgaagagtcacatcctttc

SEQ ID NO: 17186 - DNA, 480 bp, Glycine max
  unsure (1)..(480): unsure at all n locations
nttanattgaatntacaatgttccaatttatttcaaattgttgttatcgattacaagatattgctaatcgattaccagtgcatctgaacgttggaattcaaattcaattgtgaagagtcacatcctttcataaatagctttgtgtaatcgattacaaggatttggtaatcgattaccagtgacaagttttgaacaaaaatcaaaagatgtaactcttccaatgattttcaggtttttctaaaggttataactcttccaatggttttcttgaccatacttgaagagtctataaaagcaataccttgacttacatttaaaagaagaacttacaatacttacaacctttacaaacaacttttccacatattcttttacaacctttgaatttcttcttcttcttcctttgcaaaaagctntctaaactnttctggttttccaaaccttgaaaataaaagtgtgctattcatctttttcattccc

SEQ ID NO: 17187 - DNA, 378 bp, Glycine max
  unsure (1)..(378): unsure at all n locations
tgtcctcggtgacgaanacaatagaataagccccttcgattctttcacaggcgtcatctattcgaagaatgaagggtctgtgtttggaggtggcgatgaggtggaggacaacctcggtgtcagaggtggtgttgaagatggagccgttgtcttcgaggttggttcggagggtcttatagttgacgaggttgccgttgtgggccacgccgacggagccgaagcggtaaccggcgacaaagggctggacgttattgagcatggattggccggcggtggagtagcggacgtggccgatggagaggctgccggagagctggtctagttttgattggttgaagacttctgagacgaggccaacgccggtgatggattggatga

SEQ ID NO: 17188 - DNA, 344 bp, Glycine max
  unsure (1)..(344): unsure at all n locations
ttctttttgtgatgatcttagaggaagaacataggagtaacttgagcatccaccctggtgctaccaagatgtatcaggatcttaagacaatgttttggtggccaaacatgaagagaaaggttagtgagtttgtgcatgcatgtttagtctatcagaaggctaagatagaacatcagagaccctcaggtaagctgcaacccttagagataccttagtggaagtgggacgatatctccatggatttcattgtagggatacctangacccccaaaggtgtagattctatttggtttgttgttgaaagattaatcaaatctactcactttatccccatcaatatcaag

SEQ ID NO: 17189 - DNA, 458 bp, Glycine max
  unsure (1)..(458): unsure at all n locations
tgcatagcagtttctactacttaagctgttacatagttgtagtttagttgttgtactcaaagtctttggatgaagcaacaacttgaagactttggagtaaaccttgatcacattcctctaaaatgtgacaacacaagtgctaccaatctaacaaaaaacccagtcaagcattctaggactaaacacatagaaataaggcatcattttcttagagatcatgtgttaaaaggtggctgctgcattgagttcattgatagtgagcatcaactagaagaaattntcactaaatcttttgctagagatagtttttttattagaaatgaactangcatgttagatgcatctagcataaaatgacattctgtttgcatagtgtgtgatgcacattgctactcatatcatttgttntgtttagcttgtgtcccagtttattgattcatatgcatactcattagtag

SEQ ID NO: 17190 - DNA, 387 bp, Glycine max
tttcttattattgtacgaaatggacaaacatgaaccgtgttcttgaagaagtgggtctgcctcaagaacctcatttttctcattataggacgtatagcaatggtggaaactaatgttacgtagaacggaaagcgatctcccatgtttgctcctaataaagggttgcacaaaggtgatttgctattaccttacctctttgttttaggtatgaacaaactctcccacattatcttgaaagcagtggaagcttggaaacctttttgtatgggaagaaagggccccctcatctcgcacttcatgtttgcggatgacttattattgtgtggtcaggcttctactaagcatatgaaatgtactttggacactatgcatttgtttggcgagatg

SEQ ID NO: 17191 - DNA, 443 bp, Glycine max
  unsure (1)..(443): unsure at all n locations
acactataatactcagcttgaactattggtgaggtagactagganaagagaggttggttgtttaattctactcaatatcctcaatattagaaaataaatcaataaaataagaatttaacatgtccttaatttgatgatccttctctatccattgcccttaagtatttcttaacataagaatcttatttctttttcttatgttgatagtcttgagatgctagaatctcgtgtttctgtctccatcttggatccacttggttcttgattgttgaaaccaatcaagctcctcctgcttaaggattgcatcatactcatttagacccttttccattcacaaccaanattggttggatctcccttcataaatctttttttggatctctcccaacctattaatgactctctgctttctatatctaatgcaaccaaacacctttctcttc

SEQ ID NO: 17192 - DNA, 388 bp, Glycine max
ctgcagcttttatttattagatgaagatgaatccgtggccacctcatggactcctctaaggacaatagcatcatttcttgcactgaattgttaggagttggaagccatcttctcaatcaaattcctagcctcagcaggggtcatatcaccaagagctccaccactagcagcattaatcatactcctctccatgttgctaagtccctcatagaaatattgaggaaggagttgctcagaaatctggcggtgagggcagcttgcacacaatttcttgaatctttcccagtactcatacaagctctctccactaagttgcctaatgcctgaaatgtcttttctgatggcagtggtcctagatgcagggaagaatttctccaagaacactctt

SEQ ID NO: 17193 - DNA, 448 bp, Glycine max
  unsure (1)..(448): unsure at all n locations
tgcagaatgcatggtttggcactncattacgttgtntcgttcggctccaagtggntagaaagtcttctgtttgccaattgcatttggaatggcctgttcccgaaaatacttccttctcttgagcttcctgatcatcctgatcttcttcagccgtttggggtcaacaactttcttgcttttttccaatatctctttccttccctccttataagcttgaatggttttacttctctgatcatctggtaataaagccaacttggaaaatatcttgggactcactatctcaagtttctcagtaatttccttgaatgctggaacaaggccacgccttatgaagcacccttctataagccgcatcgtatttaactcggggagactatgagcatcttttaactccagatcctagcaaaatggtgagtcatttaaccacatcctgagagagtgagcc

SEQ ID NO: 17194 - DNA, 342 bp, Glycine max
  unsure (1)..(342): unsure at all n locations
agcttattgcaatggtttgattagcatgggcagaaatgtgtcagcattaataggtaaatatgttcctcacattcctgagaaatataaggacccaagtactttctgtataccttgcattattgggaacaacaaacttgagagtgccatgctagatctaggagcatcagttagtgtcatgcctctgtccattttcaattctttatcttttggatctttgcaatctacagatgtggtgattcatttagcaaatagaagtgttgcttaccccgtangtttcatagagggtgtgttggttcgggttggtaaacttatttttcctgttaatttttatgttcttgatat

SEQ ID NO: 17195 - DNA, 364 bp, Glycine max
  unsure (1)..(364): unsure at all n locations
agcttttctcagtcgtttgtaaggatgatngggtgttagaaagcggcgatgcctactgtagactgtttttctcccatgtttcagttgtgtgtaacttgtattttcttcacagatggggcatgcatgatgacccttaacactgtaaccgctgagattcccatatgctgggaagtcattaatggtacaaaaaagcattgcacgcatttcatacgtctccttgcgaaacgcatcanatactacaaccccctcgtcccacaactttctcagatcttcaaccaacggacttagataaacatcaatgtcatttcctggctatcttgggcccgatatcatcatagacaacatcatgtattttcgcttcatg

SEQ ID NO: 17196 - DNA, 451 bp, Glycine max
  unsure (1)..(451): unsure at all n locations
actcaagcttatcttttgaaactatcccttatagacttatagtaagtttgtgtgtggtcttattctgctgacaaaaaaaatataattgtcgatgaagacgaagacaggatgcggaggactataaaacaaaacccatagtaaaggtaacgacgcaatgaggagaaaaattcttgtgcagaaaaaacacgacagctaatccaacaattatttaataataaattaagttatcaaatacactaataattaattaatgggcaaattcatatatttcattttcttgtatctcacttttatttatttattgcacaatcatatgtattactaaatccctttgttacaatttactggtattagttaattntttaatacaataaacatctttctgattnttttaatattttttaaaaattattctacttatatattntttataataattaaatcttatata

SEQ ID NO: 17197 - DNA, 288 bp, Glycine max
  unsure (1)..(288): unsure at all n locations
agcttcttggntntcgaagctagatttgcgtcaaggctttcaccaaatacgcatggcggaggacgatgttcataagacggctttctgcacgcaccagggacactacgaattcagagtgatgccgttcggcctctgcaacgcgccgtcgacgttccaggcggccatgaacgataccctcaagcctttcttgagaaaatacgtggccattttcttcgatgatattttggtgtttagctccgatttggacacgcacgtcacacaccttgaatccgttctagataccctctc

SEQ ID NO: 17198 - DNA, 440 bp, Glycine max
  unsure (1)..(440): unsure at all n locations
ntgacatcaaaatttgttttccctcttggttgttgctctattggaagacaaaaaatgattgtctacaagtacatgccctgnggtgctcttagtcaatatttgttaaattggaaagctgaagggttacaacctctggattggagtggaagacaaggctaagaattgccttggatgttactagaggtgtcaaatattctattgcatgagcaaataaaattttatccatagcaatataaaatcatctaccatttcgttgggagaagatatgcatgccaaagtatcaaactttggattggttcggcttttacgtgaagggaagaattcatgtcaaaccaaactaaaggctggaactattgtatattggcacctaagtatgttatgagggacacattgcaacaaaggtggatgtatttagtttcaatgcaatccttatgtagatg

SEQ ID NO: 17199 - DNA, 400 bp, Glycine max
  unsure (1)..(400): unsure at all n locations
tttcaagctttttatccaaggcaattcttggtggtgaagctccttcttccttggcttattccctagtggatggtgcctcccctctcctcttctcctttgccttctgctgcatctccatggtgaaaaatcaccattgaaggacctcattggagctcatagatccagcctccatagaatcttcacaagcaagcttccatcagctgtcttactggtttagcctcaccctctaaatntatccgatgcatacatgtggatgggctaataccaccaatgtccaccanggtccaacctatagccttcttatgcttcttgagaactgataacaacttctcctcttgctcatcaactagggaggcagatataattactgggaaacttttgttatcatccaagcaagcat

SEQ ID NO: 17200 - DNA, 422 bp, Glycine max
  unsure (1)..(422): unsure at all n locations
tatagganaaccattcgcattgttgccttttaatttcccttataaacccaaaactgtctcggtaaaactatgatcctggttttgttaaccgttggattttcatgaaatttggatatgttgctcgaaattcaattgggcacaccgttgggatttgcgagataatattcttggagggagaaaaaggaatctcatgaagacaatacaagtggaggtttcaatctcttctccgtctctctgacgtttgggaattctattggagcagtaggaggaataactgaaggaatctcanggaaccgctagagatgctgctatccctggctgaagacacgtgagtccgctcagaggtaagggatgagttattcacaattgggaattagtgagaacatgtgtagggatccttagagatatcaattggaatgagt

SEQ ID NO: 17201 - DNA, 382 bp, Glycine max
  unsure (1)..(382): unsure at all n locations
tgctcgcaagcttttgcattgcagngangacctatcatcaaagctggttgtggaggtccttttgagaactcgcaatgattgggaggcggctttcacttttttcttgtgggctggcaagcaaccggggtatgctcattcgattcgcgagtaccattctatgatctccatccttggcaaaatgaggaagtttgatactgcttggaacttaattgaggaaatgagaagaggtataactggtgcatctcttgtcactccccacacactgttgattatgatcaggagatactgtgctgtacatgatgtngcaagggctatcaatactatctatgcttataaacagtataactctcaagtgggctagatgaattcataaccttctttc

SEQ ID NO: 17202 - DNA, 364 bp, Glycine max
ttagcttttatactttatacaagaatgaagctctgataccacttgttagacaagtggcctcagatatcataagaaggggggttgaattaagatattccaaactacttccccaattataaatctatatcactttttattcaagttataaatgcccttaataatgaacttcttaaatattgattcacataaaacactctgaatatgactatatagcaataatatacaaaggagattaagagaagagaaagtgccaactcagatttatactggttcggccacacccttgtgcctacgtccattccccatgcaacccgcttgagagttccactatcttgtaaatgccttctacaagctctaaacacac

SEQ ID NO: 17203 - DNA, 423 bp, Glycine max
ctgacattagtgttgaatgcattatttgtaaacagtatctttgacagaaattaggtgcatatagagttacagacatcttggaattgatacatacagacatttgtgggtcatttcctacaccttcatggaatggtcaacaatattttatatcattcatagacgattactctagatatgcatacttgtttcttatacatgaaaagtcacaatctttggatgtgttcaaaacatttaaagttgaagttgaaaatcaactcaacaaaagaataaagtgtgtcagatctgaccgcggtggtgaatactatggcatatatgacggttcaggtgaccaacgtctggcgccttttgccaggtacctagaggaatatggaatcgtcccacagtacaccatgccgaggtcacctatcatgaatggtgtggctg

SEQ ID NO: 17204 - DNA, 406 bp, Glycine max
  unsure (1)..(406): unsure at all n locations
agctttgcatacattatatttaaaagaaagtagagtaattatttaatatactttctgtttagttttagattttcccttacaagttctactactaaaattgtgagacgcggccaactaaaccccgaaaagtaataaaatgataaaaagttatttttttggttagataaaaatgttctttgaaaatccaagttgttatttatttgagttcaaaattctaaatgttgtgtgacttaaataaaaatattagcatatcttgagggactaaatgacaataagtattaagtttaggaaataaactgatacagtaaggaatttcattatntacttttagggattaaattaacactatctcacacttttaggaaagaatttgnattattatttatcttanatatttaaattaata

SEQ ID NO: 17205 - DNA, 446 bp, Glycine max
  unsure (1)..(446): unsure at all n locations
aactcagcttacactgggcgggacagaaattggtagctggttatagtatatgttgagatcactggaaacacgaataatacctttcttatcattaacaggtgtgaagctcaaaggcagacctaagtcaccatcaacagctacaacatcaagtggacaatctacatcggttcttgccgaagcaaggccaccgatatcggaggaagccggaacgatgtagtaaatcgaatcagctcgaactttcttccccaatgcgtccagcactggctcggatgcaggaccagctagtgcctttgtgatcaaggcaaacacaaggaccaatgttaccaatgtcatcttcatttttatgtatctaattntgtgtttttgtaacttgtaatggatattgaagaagagggatatttatatataggatggngattgctctaatctatgtacccatgtgcacc

SEQ ID NO: 17206 - DNA, 310 bp, Glycine max
agcttctcgacatatgatgcgcccgaatcggacatccgtgtgaaaagttatgaccatttaaatttcgcgagagttttcgatgtttaatttcgagcgtatcgatatattataagcctgagtcgtacatccgtgtgaaatgttatgaccatttgaatttctcgagagcttctgttgttcaatttcgagcctctcgacatattatgcgcccgaatcggacatccgtgtgaaaagttatggccatttgaatttctcgagagcttccgatgtttaatttcgagcgtatcgatatattataagcctgaatcggaca

SEQ ID NO: 17207 - DNA, 444 bp, Glycine max
ctcacgcttatgatatattgatacgctcgaagttgatttacacaaactctcgacagattcaaatggtcataactgttcacacggatgagcgatacgagcgcataatatcgcgaggggcttgacattgaacaacggaagctcttgagaaattcaaatggtcataccttttcacaccgatatcctattctagcaaatcacatatcgagacgctcagaattgaacaacggaaggtcttgagaaatacaaatgatcttaacatttaactcgaatgtccaatttaggcgcatcacatatagtgacactcggaattgaacaacggaagctctcgagacatctagatggtcataacttctcacattgatgtgcgattcacgcttataatatattgatatgctcgaaattaaacatcggaagctctcgagatattcaaatggtcataacttt

SEQ ID NO: 17208 - DNA, 349 bp, Glycine max
  unsure (1)..(349): unsure at all n locations
tttgcaagcttttatccatttcacacgacagtaacttttttctcggatatctgattgagtcccgtaatataacgagacgctcgaaattgaatattgaagctctgaactagttcaaacgacaataactttttactcggatgtctgattgagtcccgtaatatatcgagacgctcgaaattgaatgttgaacctctgagtaaattcaaacgacaataacttttttctcagatgcttgattgagtcccgtaatatatcgagacgctcgaaattgaatgttgaagctctgatccaattcgaacgacaatacctttntactcggatgtctgattgaagtcccgtatatatcgag

SEQ ID NO: 17209 - DNA, 429 bp, Glycine max
  unsure (1)..(429): unsure at all n locations
tcaacattcaatttcgagcgtctcgatnatgacgggactttatcagacatccgagtaaaaagttattgtcgtttgaattggctcagagcttcaacattcaatttcgagggtctcgatatattgcgggactcaatcagacatccgagtaaaaagttattgtcgtttgaattggctcggagcttcaacattcaatttcgagcgtctcgatatatgacgggactcaatcagacatccgagtaaaaagttattgtcttttgaattggctcagagcttcaacattcaatttcgagggtctcgatatattacgggactcaatcagacatccgagtaaaaagttattgtcgtttgaattggctcagaggttcaacattcaatttcgagcgtctcgatatattacgggactcaatcagacatccgagtaaaacgtta

SEQ ID NO: 17210 - DNA, 420 bp, Glycine max
  unsure (1)..(420): unsure at all n locations
ctcagcttgttacctatgatgaattgcttttttagagttgnttatatcaccactaattgttctccttttgaagttgtttatggttttaacccactaactcctcttgatcttttgcctatgcctaatgtttctgtttttaaggataaagaacgtcaagcaaaggcggactatgtgaagaagcttcatgagagagtcaaagatcaaattgagaggaaaaataaaagctatgctaaacaagccaacaaagggagaaagaaggttgtcttcgaacccggagattgggtttgggtgcacatgagaaaagaaaggtttccggaacaaaggaaatcaaagcttcaaccaaggggagatggaccatntcaagtgcttgaaagaatcaatgacaatgcttacaaagttgagctgtccggtgagtataat

SEQ ID NO: 17211 - DNA, 408 bp, Glycine max
  unsure (1)..(408): unsure at all n locations
agcttcttcacaattttttaattagaaacacaatcaatatattattagttaagaaaaatcatacattttagcaaataacaacacatgtcaatgagtttattaagaaggatctcaatttgattctaacataatatatctttaaagaaaaacaaaattttttaagtttgattaaattttgaacttagaattaattttataatcgatctaaaagattaaaattataaaaatcttacaaaatttcaaaaaagaaaaataaaaaatccttattattaatatggttaaaaaattatatattaaataaaanattgaattcaccttcgttaataaatcttatatgaagttcaatcaataataaagtaatgacaacaaatgtattattagcttttaagggattttattcgatcacat

SEQ ID NO: 17212 - DNA, 341 bp, Glycine max
  unsure (1)..(341): unsure at all n locations
agcttgtctttgagatagcatgaaagacatgcgcaaagtgtgactatatgatgtggcaatagggtgtagtaagcaaatgctcacctccccctctaaaatttaattggattgggcttctaccaattcaattaaatttatttcccaacacacatatcaaatattcacttagtgcatgtgaaattacaaaactacccttaatacaaaaactagtctaggtgccctaaaatacaagagctgaaaaatcctatatttctagggtaccctacctacattatggagccctanatacaaggaccaaatataatgacatcctagtctaatatgtataaagataattggac

SEQ ID NO: 17213 - DNA, 451 bp, Glycine max
tccaagagttcggcaagcttctactattactttgattaggttacttttgtttgttgtttcattagtataataaaagcttctatattttgcatctaagatcacacaagattcctgtcggtagtctgaatgagaactttatagaacaccctttttgaattttaagtatgaatttttgtgaattcgagtaagcaagtaatgatattactgtgtaaaaaaagataatgatatatattcctctggacttaaatatatataaaaaaactaactcaatttaatgttgataatctcatgaaaaaagttaattcattttttaaagtaccatttatattaattgcataggacaaaaaaaataaggttattgaaaataaaactctaattaaataaagagtattttggggatattataattaaataggagagaattaattaaaatttacttatattttaattc

SEQ ID NO: 17214 - DNA, 458 bp, Glycine max
gactcaagcttgtacttgtacttgctattggcagattacatgcattacttcttcctttctctctcatcaacgtgagtgggcattttattctttttctataattacggggttaataagatgaaacaatagggtgatgaaacgaatagggtgtcctctcactgcttgaagcatccaatttttatttttatttttatggtagaacatattatcatatcttggaagcatcagctgtgactcggctaaaggctaccgcggtctttgagccagatgggcgccccaaatgcttgccgatgaactcaccggctaacatgagctttccgagatcaacgttggttttcaccccaagtccattcagcatgtacacaacatcttcggtagctacatttcctgaagctcccttggcataaggacagccacctagaccagcaactgaagaatcaactgcactgatccccatc

SEQ ID NO: 17215 - DNA, 445 bp, Glycine max
tactcaagctggactttgttaggcaaaatgtctcgtatgtcatgactattatttgttgcatcaagacgtgactatcatgagactttaagcttaccaacttaagatccttcaactgcacaaggctcttaatatttgaagagtatccttgtggaactttgacatgacacatacactaacaaaaactcatcttctcctttctgggcaaagtatgacaagctgaaggcaagtatattttttaccatcagaccttggatataactgcactcgtatatccatgccaactagatcttgacgagtattcaaaccatctttcatcttgccttgaatgttaaggagcgtcccaataacattatcacatacatttttctctacatgcataacatcaatacaatgtctaacatctagatcagaccagtagggaagatcaaacaaaattgaccttttc

SEQ ID NO: 17216 - DNA, 449 bp, Glycine max
tgtagacctaacattatctatgatttataagcaaaacatttctcaacaaatgataataataacttgcactatattatttttttaattatagctcaaattcaaatggttgtgattttgtatttgaagatactcttcacaaaatatattaaattgcatatataaataatggtgttgacaagaactagtaatacatcccatgaccccaccccttatctacttattccatattgacacatatgcataattaatattaagttataaacttataaaaaacaaatttttatgttggtaaaaaaatgtcaatattaacaattatctatcactaaaaaataattaaattcgactaagaaaatttaaatatttaaataaaatcaataaaagacttataatataaaatattataaaaagtataacatatttaattatatattataataatttattatctt

SEQ ID NO: 17217 - DNA, 440 bp, Glycine max
tgtgttctcccttgtagaactactaactgcagtaattgttgtagtttaactatccggtagtgatgacaatagaatcaatgccttcacctcatcatcaaatttaatctgcactgattccaactgggcaagaatagtattaaattcattaatatgatcagttacagagataccttctcccatcttgaggttgaacaactggcgcatcaagtatactttgttggctgtcgacggcttctcgtacatatctgataacgccttcattaagcctgtagtagtcttctcgtttacgatgttgaacgcgacgttcttagctaatgtcaatctgatcacgctaagagcttgtcgatccagcaagttccattcttcttgcttcatgtcgtctggcttaacccctgataagggctgatacgacttcttttgatatagataatcctctatct

SEQ ID NO: 17218 - DNA, 447 bp, Glycine max
  unsure (1)..(447): unsure at all n locations
tgagaatggaggatttccttgagggtcctctcttangcatttatggaacacagttccaaactcaaaaatggaggacacatgaatgacaacgcaattcattcatggggctccgaaaaagggtaagaatggaggatttgcttgagggtcctctcttaggcaatcatggaacacaactccatactcgaaagtggaggacccacgaacaggcctaagcaataacattcatgtggctccgaaaaaggatgagaatggaggattgcgttgagggtcctatcttatgcaatcatggaacacagctccaaacttgaaaatggaggtcacatgaatgacaacgcaattcattcacggngcttccgaaaagggtgagaatggaggattgccttgagggtcctctcttangcaatcatggaacacagctccaaactcgaaagtggaggacacatgaac

SEQ ID NO: 17219 - DNA, 438 bp, Glycine max
  unsure (1)..(438): unsure at all n locations
tgcacttcttaactntcctcaagaatttcagcctctttcctacttagactttttagctttgggagccaagttatcccttctgttctagacttcaaccacttgtgatagtcgtcgatgacgccattgttacttcccctaagctccttattttttgatgcaatcctaacccgcaagggcattggatagaagactccaagtagattgggccagagatccaagggaaggccctagggttctcatgagccttagggtagatttcgagcccatgggctaagcatgagcccgtttatctttgtaaatattagaataggtttttcattcgtttgggccttgtattttggccattctagtagtataaggttttagccttgtatttcgaggcattntgattagtctttatagtagggaattttttgtattttcatgtattttgtcatg

SEQ ID NO: 17220 - DNA, 399 bp, Glycine max
agcttgtatggtttttgtctcacgattgtcacatgctcatgcaataattgttagtcgtggctatacgagacatcttgccaaacaaagtcaggttagccataactcgcccgtgcttttccttccatgctatatgtagcaaagtcattgatcctgtcaagtttgatgagctggaaaatgaggccgcaattatactgtgccagttggagatgtattttccccctgctttctttgacattatgattcactctattgtgcatctggtcagagaaatcaaatgttgtggtcctgttcatacacataattcaaattcattaatatgtaatgcatatattggatgaaagctttgaacatggaacttatggcagttcattctatattgttgcaagtactcctacttct

SEQ ID NO: 17221 - DNA, 399 bp, Glycine max
agcttttatcaaacaggctgaagaggataatgccattcataattgatgaaagacagaccgctttcatagctggacgacagctgctacacagtgtaatcatcgctaatgaaacagtggacgaagccataaggggtcaaaagacatgcttggtgttcaaagtagattttgaaagggcttacgactctgttttgtggaactttttactatacatgctgcgaaggttagggttctacaataaatggattcagtggattgacggttgcctcaaatctgcctcggtctcggtgttggtaaatggaagccccacctcagaattcatccctcatagaggccttagacaaggtgacccactagcgcccctattattcaacattgtagatgaagccttaatgtgtctca

SEQ ID NO: 17222 - DNA, 385 bp, Glycine max
  unsure (1)..(385): unsure at all n locations
tttcttttggtatcatggtagccatcagagaagacattctatttccactcttatctgtctgcataattaatcctttcgcagaatgatataccctacacttcccatgttgaatcaaaatagtcaagcctttttcttgaagttgtcctatgctcaccagaaattgcctgagtaaatccactcacttgcataagaatgatacctttttccacaacatccattctggtgttattgccaagttttacagtttggctaaagctttcatccagttctgagaaccactccttgtttccaatcatatgattgctgcaaccggagtcaaggaaccacacttcttccattntgtcttgctccaggtcaacataagacattaataaaaaatctttca

SEQ ID NO: 17223 - DNA, 430 bp, Glycine max
  unsure (1)..(430): unsure at all n locations
tctggtgggacatcttgacttgcttttcaatctgacattttccacagattctgccttcttctattttcagattgggaatgcctctaacaacacctttgtcaatgattttcttcatgcctcttaagtgcagatgtccaaatctttgatgccatattctgacttcatcttctttggaggatagacatgtggaggagtagctggtttcttgaggtgtccataggtaacagttgtcctttgatctgctgcccttcattagaacttcactcttctcatttgtcaccaagcattctgactttgtgaagtttacattgaatccttcatcacacaactgactgatgctgatcaggtttgcagtcagtcccttcaccagcagtactttgttcagactaggaagtccatcatgaactagctntcccattccaatgatctt

SEQ ID NO: 17224 - DNA, 397 bp, Glycine max
agctttatctcaaatttctggctaacttatcttttattccactaacgacagagaaaggatttaaatgcttaattaatgtagttttaaaaggatgttgatctctccattgcgtaggcaagagcaagacaacgcttaccaaacaaaaaccgctcttaatttttaaaacatataataaaatgttcccttattataataatcaaattgacttcaattagcataaaaataatagcctttagtgggacaatccatagtaacctaggaaactcagtacaaatacacattaaaaatacaaaagcccaaggatataatatgcttcaaatatttgttttccacactcaaattgccatatcacgggtgaataagtgaattcaaaccaagatctaaacaaaaagctatc

SEQ ID NO: 17225 - DNA, 402 bp, Glycine max
  unsure (1)..(402): unsure at all n locations
agctttcttgaaacatatatgtttggtcttgttgctgacagatacaacaaactaccaattatacttctataaacagaatcatttgctaaatcaataccatcatttattgataacttttcattcacaacaattggagtgacaacaggcttgcattgctccatgcgaaacttcttcaatatctccaaagcatatttcttttgtgaaatgaagatcccatcattagactgagaaatctccatcctaagaaaatacttcatttcacccaagtcagtcatttcaaattctttttccatgtccttcttaaattggtttaaggaatcagattcatttcctataaccaacaaatcatcaacatacaaggaaacaatgagctgcatttcattnttncacttcttcacatac

SEQ ID NO: 17226 - DNA, 451 bp, Glycine max
  unsure (1)..(451): unsure at all n locations
tcaagctntgtgtgtggaacattgtaataccatatctgcaggagattttcttgctattttatgaacgggtaaacggtcagacagagaacgataattgacaagatttgagtcggtttctaccttctctctgcttttaggccactcaattgggcgtttatatccttcaggaacaggaacaaggcaggtaggaggttcttcaggacagtgtctttctcgatgttcatagtgtttagtactccggagactcctaatagctttccagttgtcaaggcatgggataaaatcaggaccagcagtgacattgcaaagcttccacttgtatccagttgcctgcttggaggattcttgagactccttttcattcttagactctgctgcctgagttgaccaagacccagtttctgtagtactttcttcgtgaagctcagactgagccccagaaggatatacc

SEQ ID NO: 17227 - DNA, 445 bp, Glycine max
  unsure (1)..(445): unsure at all n locations
catgagagagtcaaagatcaaattgagaganaaaataaatgctatgctatacaagccaacaaagggagaaagaaggttgtcttcgaacccagagattgggtttgggtgcacatgagaaaagaaaggtttcgaaacaaaggaaatcaaagcttcaaccaaggggagatggaccatttcaagtgcttgaaagaatcaatgacaatgcttacaaagttgagctgcccggtgagtataatgttagttcaaccttcaatgtctttgacttatctctttttgatgcagatggagaatccgatttgaggacgaatcattctcaagagggagagaatgatgaggacatgaccaagagcaagggcaaggatccacttggaggacctatgacaagggttagagcaaggaaagccaaggaagctcttcaacaagtgttgcccatattatttgaata

SEQ ID NO: 17228 - DNA, 401 bp, Glycine max
cgctgcaagcttctatagaaggttcgttcctaatttctctacaattgcatcacctctcaatgagctggtgaaaaagaatgtggcatttacctgtggtgaaaaacaagagcaagcctttgctttgctcaaagaaaagcttactaaggcacctgttctagctcttcctgacttttctaaaacttttgagctagaatgtgatgcctctggagtgggagttggagctgtattgtacaaggtgggcaccctattgcttattttactgaaaaacttcatagtgccacccttaactaccccacctatgataaagagctttatgccttaataagagccctccaaacttgggaacattaccttgtttccaaggaatttgtcattcatagtgatcatcaatcacttaagta

SEQ ID NO: 17229 - DNA, 425 bp, Glycine max
tatgctgcacatattaacagtagacctcctaacctcagtagcttaatcaaccacagcggagcaattatgacctttccagcaacagatacaaccctggatggaggaatcaccctaccctcagatggtccagccctcagcaacaacaacagcagcctgctccttccttccaaaatgctgctggcccaagcagaccatacattcctccaccaatccaacaacagcaacaaccccagaaacagccaacagttgaggcccctccacaaccttccctcgaagaacttgtgaggcaaatgactatgcagaacatgcagtttcagcaagagactagagcctccattcagagcttaaccaatcagatgggacaattagctactcaattgaatcaacaacagtcccagaattctgactagctggcctctcaagct

SEQ ID NO: 17230 - DNA, 433 bp, Glycine max
  unsure (1)..(433): unsure at all n locations
ntgaatgctctattcaatggagttgtcaagaatattttctatacttatcaacacatgcacagtggccaaggatgcatgggagatcctgaaaaccactcatgaaggaacctccaaagtgaagatgtccagattgcaactattggctacaaaattcgaaaatctgaagatgaaggaggaagagtgtattcatgacttccacatgaacattcttgaaattgccaatgcttgcactgccttgggagaaaggatgacagacgaaaagctggtgagaaagatcctcagatctttgcctaagagatttgacatgaaagtcactgcaatagaggaggcccaagacattcgcaacatgagagtagatgaactcattggttcccttcaaacctttgagctaggactctcggataggactgagaagaagagcaagaacctggcg

SEQ ID NO: 17231 - DNA, 439 bp, Glycine max
gactcacgctataatatttgaattacaacgtttagaaactgctggtaatttattaccatttatgtgtaatcgattgcgcagtgcagattctgaattcaaattttaatagctgttgtaaatcagttttggccactggtaatcgattacatcctctggtaatcgattaccagagagtaaatttgttgaaaaagactttttaacttaaatttcttggccaaactttttgctacttcaattggaattcccttcctatttaatataccctttctaagactctagagactgtcttgatcatccatcttgaatatatttaatttctttgtcttgaatagagctttgagacgcatgtgaaactttggcatcatcaaaacattcagcttgatcctttgtctacagtttcgtgatagaatactatataaagttagtggacaaaaactca

SEQ ID NO: 17232 - DNA, 451 bp, Glycine max
  unsure (1)..(451): unsure at all n locations
taagctctttcaactgcacaaggctcttaatatttgaagattatccttgttgaaccttcacccgacgaaaatactgacaaaaacttatcttctcctttttggacaaagtatggcaagctaggggcaagtaaattttcttcccatcagaccttggatgcaactgtgatcgtatccccatatcagctagatcttgacgggtattcaaaccatccttcgtcttgccttgaatgataaggagcgtcccaatcacactgtcacatacatttttctcgacatgcataacatcaatacaatgtctaacatctagatcagaccagtacgaaagatcaaagaaaatggtcctcttcttccatatgcaattcttacgtttatccttctttngggtctttccaaatacagtattcaggtgttgaacccactgatatacctgctcactagtcaacggtatggg

SEQ ID NO: 17233 - DNA, 386 bp, Glycine max
  unsure (1)..(386): unsure at all n locations
agctttttgtttgttcttgaccaaatctttagttaatcgtctttacgtaaagcagtctttgtattcgtttaaaatgcatgaagataaatcagtaggagaacaattggatttgtttaataaactgattcttgatcttgaaaatatcgatgtcactattgatgatgaggatcaagccttgttattgttgtgctctttgcttaagagttactctcatttcaaagagactntattgtttggaagagactctgtttctcttgatgaagtgcaagttgctctgaattcaaaggaattgaatganagaaaggaaaagaagtcttctataagtggtgaagggctgacagcaagagacaagaccttcaagaaagatagtanatttgataagaaga

SEQ ID NO: 17234 - DNA, 420 bp, Glycine max
  unsure (1)..(420): unsure at all n locations
tcaagaattatggtctcatcaaactatttgtttccttatggaaattctataaacagacctcccatctttaatggagtgggttaccactagtggaaaacccgcatgcaaatcttcatagaggcaatagatttaaatatttgggaagccatagaacaaggaccttatgttccctctataatagccggaagtgcaaccatagaaaaacctagagcagattggactgaggaagaaagaagattagtacaatataatttaaaggccaaaaatattattacatttgccttaggaatagatgaatactttagggttttaaattgtaaaagtgctaaggatatgtgggatacactacaagtaacacatgaaggcacaacagatgttaaaagatctangataaacactntaactcatgaatatgaactt

SEQ ID NO: 17235 - DNA, 421 bp, Glycine max
taaattacttctgtcagaaaagccttacaaattggaggaggatgacatgggaaatttagaagagaatcaggaatctagaataggactatataactggaattatcttgtagacaatattcaagctagtgacaaggaattattgtcgggactgcaggctctttcagcgctggagattaatgggtattggagactagtagacgagagttacatggacatgattctgggaatgcttttgaaaaatgcagtgttgaatgactggtcacttaatgctttaaatgaagatgaagttgtgagtatactggaatcagatggatttcctagggtgcttgcaaggcattgtttgcacgtatatggcaacaaagtaaatgagtgcatgcctagctttgtttggaagttggatgagaagcgagtatgcatacat

SEQ ID NO: 17236 - DNA, 397 bp, Glycine max
agcttatacattcaatttcgagcgtctcgatatattacgggactcaattagacatccgagtaaaaatttattgtcgtttgaattggctcacaggctcaacattcaatttcgagcgtctcgatatattacgggactcaatcagacatccgagtaaaaagttaatgtcgtttgaatttgctcatagcttaaacattcaatttcgagcgtctcgatatattacgggactcaatcagacatccgagtaaaaagttattgtcgtttgaattggctcataggttgaacattcaatttcgagcgtctcgatatactacgggactcaatcagacatccgagtaaaaagttattgtcgtttgaattgctcatagcttaacattcaatttcgagcgtctcgatatat

SEQ ID NO: 17237 - DNA, 425 bp, Glycine max
  unsure (1)..(425): unsure at all n locations
ttgagcaaattcaaacgacaataaccttttactcggatgtctgattgagtcccgtaatatatcgagacgctcaaaattgaatgttgaacctctgatccaattcaaacgacaataactttttactcggatgtctgattgagtcccgtaatatatcgagacggtcgaaattgaatgttcaacctatgagccaattcaaacgacaataacatttaactcgaatgtctgattgagttccataatatatcgagacgctcgaaattgaatgttcaacctctgagccaattcaaacgacaataacttattactcggatgtccgattcaataccgtaatatatcgagacgctcaaaattgaatgttgaacctctgagcaaattcaaacgacaataactntttactcggatgtcttgattgagtccgtaatata

SEQ ID NO: 17238 - DNA, 439 bp, Glycine max
tgctaaagttgagaagaccaagaatttgattcaacccaattatatgcgatagggctcaaaaatgcatcaggaataccaaaggaactgaccaaggcaagtgcgtgtggtcgaagttcagcacagagttttggcacttctttcctcactgcagaagcattctctgttgacaagtatccatatcgaagaaaggcagaatcttcatccacacatatcacagcatacaacgatctcaatagacccaagacattctacagaggagataaataaaagcaaagaaatcaataaatggatctgcttcacattttgaccctacaaggagagtgctaacaacactctttaacatgagaaattattaagtagtctgaaactattatagtccccactaactaatatatttacataaaacaaaattgagtgttattaattcttttcttgtaaa

SEQ ID NO: 17239 - DNA, 436 bp, Glycine max
  unsure (1)..(436): unsure at all n locations
ggcaattcagctcgtacccgggatccttaagtcacctgcgtttgcaactttgtggcttantgaagatgaagaggtaaaagtgactcaacaggttgaggtgtgtctcaccattgggagatataatgacaaggtgctgtgtgatgtggtcccaatggaagcgacccatgtgctgttaggaagatcgtggcagtatgataccaaggcagtgcatgatggcttcaccaacaacatctctttcaagcaagctgacaagaagattgttctcaaaccgttatctcctcaagaggtttgtgaggatcagataaaaatgagagaaaagaaaaagagtgagacacttgagaggaaaaagagtgagacacttgagaaggaaaagtgaggaaagactaagagtgatacacttgagagggaaaagagagatnatcaaaagagtgaaaca

SEQ ID NO: 17240 - DNA, 419 bp, Glycine max
tctttgagaaaacttccttgagaagctagagcttagctacattcacccctctcataactaagctcacctccttgagaagcttccttaagaagattcctaaagaagctagagcttagctacacatacctttctaatagctaagctcacctccttgagatgagaagctagaacttagctacacacccctataatagctaagctcacccccatgacaaaatacatgaaaatacaaaaaaaaaatccctactacaaagactactcaaaatgcctcgaaatacaaggctaaaaccctatactactagaatggccaaaatacaaggcccaaaggaaggaaaaatctattctaatatttacaaagataagcgggctcatacttagcccatgggctcgaaatctaccctaaggctcatgagaaccct

SEQ ID NO: 17241 - DNA, 385 bp, Glycine max
agcttggaactaagcttcttttctctaaaacttgtcatccataaactgatggacaaacagaggtagtgaataggtctctatccacccttttaagggctcttttgaaaggcaaccataagtcttgggatgagtatcttcctcatgtagaatttgcctacaataggggggttcatagaaccactaagcaatccccttttgaggttgtctatgggttcaatcctctaacacccttagacctaattcccctcccacttaacacttcttttatacataaagaaggggaatctatgtcaaagtttgtaaagaagtagcatgagagggttaggaaccaaataaagaaccagacaaaggtgtatgcaactaaaggcaatagaggaagaaatga

SEQ ID NO: 17242 - DNA, 377 bp, Glycine max
  unsure (1)..(377): unsure at all n locations
agcttgtaatcgattacacatatactgtaatcgattacctgagcagattttcagaaaatattctcaacagtcacatctttttatgtggttcttgaatggctatcaaaggcctatatatatgtgacttgagacacgaatttgcgaagagtttttcaaaacaaaaaagtcttatcctcttataaagcaaaattgttttatcctcttacaaattccttggccaaattacttgtgattcaataaggaatttttgagtgctcaaattgttcaatctatctctttcaagagagatttcttcttttcttcttcttcattctgaanagggattaagagaccgagggtctcttggtgtgaaagaattctaaacacaaagtgatgtg

SEQ ID NO: 17243 - DNA, 414 bp, Glycine max
gcttatccaaggctcatcttggcggttaagttccttcttccaaggcttattccctagtggatggcgcctcctctctcctcttctcctttgtcttccgcttcatctccatggtgaaaaatcaccatcaaaggacctcattgaagctcaaagatccagcctccatagaagccccacaagcaagcttccatcacaaattccgcaccagcatgattggagtaccgaccttaagtgttaatttgtgattaggtatccctgatgttttcaatgagtttagaaatttaggtgtcagtaatccgaaagtaggattgagtagttcatcttatttatcaatgttatcagtgctacaatactccttttcgtcattgtgtatcaatgataagacaataatctattttgtcaacaatatctttttta

SEQ ID NO: 17244 - DNA, 431 bp, Glycine max
  unsure (1)..(431): unsure at all n locations
taatacccaaaatcacatctataggaccaaggtcttttatatcaaaattactagacaagaaagacttcatatcatttatgaaatgcatattactaccaaatatcaatatgtcatccacatacaaacataaaatgatgcatccactatcatcaaattgtttcacatacacacatttatcactattattgatttgaaaacaatatgaaagaacaacttgatcaaacttttcgtgccattgctttggaggttgtttcaaaccatataaagatttaacaagtttgcaaaatttcttttctttacccggttctacaaaaccttcaggttggctcatataaatttcttcttttaaatcaccatttaaaaaaagctgtttttacatccatttgatgaattntcaaattaaaaacacaaacaagtttaattaaaactct

SEQ ID NO: 17245 - DNA, 430 bp, Glycine max
tcttattttcagcagatgaagatgaatccgtggccacatcattgacttctctaaggacaataacatcatttcttgcactgaattgttgggagttggaagccatcttctcaattagattcctagcctcagcaggagtcatatcaccaagagctccaccactggcagcatcaatcatactcctctccatgttgctaagtccctcatagaaatattgcagaaggagttgctcagaaatctggtggtgaggacagcttgcacacaatttcttgaatctttcccagtactcatacaagctctttccactaagttgcctgatgcctgaaatgtcttttctgatggcagtggtcctagatgcagggaagaatttctccaagaacacccttttaaggtcatcccaactggtaatggatctgggagcaaggtagtacaa

SEQ ID NO: 17246 - DNA, 374 bp, Glycine max
ttgcatgcaagctttgatgcaacatatggagaggttaatgaaacaacgagatgatgcgctccatgagaggctggatcaaatggagaatagagatcatactgaagaacaaaggacgagaagagggaatgatggtgttcctagacaaaaccgaattgatggtattaaactcaacattcctccatttaaaggaaagaatgatccggaggcctacttggagtgggagatgaaaatagagcatgttttctcatgccacagctatgacgaggaccagaacgtgaagcttgccgccacggagttttccgactatgctcttgtgtggcggaacaagctacaaatagagagagcaagaatgaagagccttggttgatcatgga

SEQ ID NO: 17247 - DNA, 371 bp, Glycine max
agctatagccaattcaaacgacaataactttttactcggatgtctgattgagactcgtaatataacgagatgctcgaagttaaatgtttaagctctgagccaattcaaacgacaataactttttactcggatgtctgattgagtcctgtcatatatcgagacactcgaaattgaatgttgaagctctgagccaattcaaacgacaataactttttactcggatgtgtgattgagtcccgtcatatatcgagacgctcaaaattgaatgttgaagctctgagccaattcaaacgacaataactttttactcggatgtctgattgagtcttgtaatatatcgagacgctcgaaattgaatgttgaacctctga

SEQ ID NO: 17248 - DNA, 425 bp, Glycine max
taaacattcaacttcgagcgtctcgatatatttcgattctcaatcaaacatccgagaaaaaagttattgtcgtttgaatttgctcagaggttcaacattcaattttgagcgtctcgatatatgacgggactcaatcagacatccgagtagaaagttattgtcgtttgaattagctcagagcttcaacattcaatttcgagcgtctcgatatgtgacgggactgaatcagacatccgagtacaaagttattgtcgtttgaatttgctcagaggttcaacattcaatttcgagcgtctcgttatatcacgggactcaatcagacatccgagtataaagttattgtcgtttgaattgtctcagaccttcaacattcaattttgagcgtctcgatatatgacgggactcaatcttacatccgagtaaaa

SEQ ID NO: 17249 - DNA, 427 bp, Glycine max
  unsure (1)..(427): unsure at all n locations
tctaaactttgtacaagaatgaagctctgatacctcttgttagacaagtggcctcagatatcttaagaagggggggttgaattaagatattccaaactgtttcccctaattaaaaatctatttttctttttacttaagttatgaattcccttaatgacaatcttcttaaatattaattcaaatgaagcaacttgaatatgaatataaagcaataataaataaaggagattaagggaagagaaaatgcaaactcagttttatactggttcggccacacccttgtgcctacgtccagtccccaagcaacccgcttgagagttacactaactngtaaattccttttacaagttctaaacacacaaggacaacccttcctttgtgtttagagatcttttacaacaagagactcacagtctcttaatccctt

SEQ ID NO: 17250 - DNA, 394 bp, Glycine max
tcgaggaatcccatgtattttaaccaccatgtcgactatcaaggatgccaccatatgagcagtgtgagacgttggtaacattcccagatgaatccccttcgaaaaacggtccaccaccacgagaattgtggtttttcgtgatacgccggcaggccgacaatgaaatctaacgagaggtcctcccaaggtcgatggggcaccggtaaggggcataatagtcctgcgacgcgttgtgtctggtacttagtgacctgacaatccatgcaatttgccacaaattgcttgacatcttctctgagaccggtccaagtgaagttctctgaaattcgagctaatgtctttgtgattccggcgtgaccccctgttggagtcgtgtggtattcctgaagtaatg

SEQ ID NO: 17251 - DNA, 361 bp, Glycine max
agctttggagaaatttaaatggtcattacttttcactcggacatccgattcaggcgtataatatatcgagacgctcaaaattgaacagtggaagctattgagcaattcaaatggtcataactgttcactcggatgtccgattcaggcacataatatatcgagacgcccgaaattgaacaacggaagcttttgagaaattcaaatggtcatttctttacactcggaggtccgatcaggcgcatcacatatagagacgctcgaaattgaacaacggaagctcttgagaaattcaaatgggcattacttttcacttggaggtgcgaattatgcgtataatatatcgagacgctcgaaattgata

SEQ ID NO: 17252 - DNA, 431 bp, Glycine max
tcaacctagaggagacggaccattccaagtgttggagaagatcaacgacaatgcctacaagattgacttgcctagtgagtataatgtaagtgccactttcaatgtgtctggtctatctctttttgatgcagatggaggagccttggatttgaggacaaatccttttcaagaaggagggagtgatgaggacatttgataaaatttggtgagagtttctctctgggttccttgttgaaccaattatcagacttatcaaggtaatccttgtggcgtctacccagacttatcttccttcattggaagtggcgtctacccggacttatcttccttcaccggaagtggcgtctacccagacttatcttccttcactggaagtggcgtctaccctgacttatcttccttcactggaagtggcgtcatccaaatcttcg

SEQ ID NO: 17253 - DNA, 430 bp, Glycine max
  unsure (1)..(430): unsure at all n locations
ntaacaagcaatagatacataatcaagtcatagcagttgtgtatgatatgacatttaatataaaactgattttgtgtatatgccattatgaataataactttctgaagacaatcaaacaaaaagcaactctgaatgtaaactagagaaactagagagtttaggcattaccatggaaggaagcgcatcatgatgtcaccatccccagttgcacaacatgcaccaacttcatcaatggcatatgctgaggatccagcaatgggaccatctcctactctgtaatcaatgaaaaagattcaaagaaaacctaattataaaatgcatcaatagaacatacaaaggatgattgatagatgctgcattaacaatgtgtggtgtatatctgagcatatgtacttgggaattgataaggcaatttgtgaacggctaaat

SEQ ID NO: 17254 - DNA, 403 bp, Glycine max
  unsure (1)..(403): unsure at all n locations
ntgagcaaattgaaacgacaataactttatacacggatgtcttgttgatttccgtaatatatcgagatgctcaaaattgagactagaagctctgagcaaatttaaatgacaataactttatacacagatatccggttgagtcccgtaagatatcgagacgctcaaaatttagatccgaagctctgagaaaattgaattgacaataactttatacacggatgtccggatgagtcctgtaatatatcgagacgctgcaaattgaaaacggaagctcgtaggaaattcaaacgacaataactctttactcggatgtgcgattgaatcgggtaatatatcgagacgatctaaattgagactagaagctctgagcacatggagatgacaataactttatacacggatg

SEQ ID NO: 17255 - DNA, 422 bp, Glycine max
taaaatttgatatctaacaagcttcatacttaaaactttttttatctattaaaccaacatttaatcatttccttagaattacaagtaaaaaccctaatagaaaaactctgtaacacactatattccaccaggactcaattatcgaataataattaaataatatctgcaaaataagtttaaaattataaaaataattattaacaaaaagcatctaaagttaatacaaataaaataattataattgaccaatgccagtgttctttgttttcttgtttagcaagaaaaaatgataggatgggttatttttcaggaagcatagtccaacttacgttaagccagtccctgatatatcaaattccaaatgtatgcaagaacggtcagactcgggtttgtgaagctccctttgtacagcaacattcacc

SEQ ID NO: 17256 - DNA, 384 bp, Glycine max
agcttttcttggtgggttgatgtactctatcacataggatagcatgatcactaacagacatattttcaatcaattcagtttcctcttcaggggttttcagctttatcttccctcctgctgaagcatctaacaactgcttggtttgcggtctcagcccatctataaacatgttcaattgaattggctcaaagaatccatgagtgggagtctttcttaacaaaccccgaaatctctccaatgcttcactcaatgactcatcagggaactggtggaatgatgaaataacaacattcccttctgcagtctttgactcgaggaagtatttcttcataaatttctcaacaacttcctcccatgtcttaagactgttgcctttgaatgaat

SEQ ID NO: 17257 - DNA, 389 bp, Glycine max
agcttcaagagaaagatgtcctcagcaaattccttatttccagaagggaattctatcaatagacctccaatctttaatggagagggttaccactactggaaaacccgaatgcaaattttcatcgaggcaatagatctaaatatctgggaagccatagaaatagggccttatatacccaccacagtagaaagagtttcaatagatggtagttcatcaagtgaaagcataaccatagaaaaacctagagatagatggtctgaagaggatagaaaacgagtacaatacaacttataagccaaaaacataataacatctgccctaagaatggatgagtatttcagggcttcaaattgtaagagtgctaaggaaatgtgggacactcttcgatt

SEQ ID NO: 17258 - DNA, 378 bp, Glycine max
  unsure (1)..(378): unsure at all n locations
agcttgtctctggaaactctgctggcaccgacactgcctattatgtaagttcttcctttaactttattactattatattattgtagaataataaaaatactaataacccattaatggggtttactttcttttatccctttattataaacactgtcattcaaagttaataatagaaaacatgccttttgtttgcatttgcatttgcagttatcttcaaaaggatcaacttgggatgaaatagactatgaatttcttggaaatctgagtggtgatccatacatccttcacacaaacgttttcagccaaggcaaggaggacagggaacaacaattctatctatggttngacccaactgctgatttccacacttactccatc

SEQ ID NO: 17259 - DNA, 368 bp, Glycine max
agcttgcttctacaattactagtatgggactcatgcgtatgcacgagtcgctccgctatatttttttgttttggtattaaaattgtgcctacacacgggtaagccgtgagaattgacaatataattatatttgtgtcattataacactagacaatattatgatgtataactaattgagaacaaaaatgaatatggttaaaaaaattatgattaacacatagtaaaataactattatataagaaactgttaattaacaaagtcataatgttcaagagattgtttttagcaaaaacatgcccacaaaataaagtgttaatttacaaatattaacaaaagtcagaataatattaaacttaattcattaaca

SEQ ID NO: 17260 - DNA, 416 bp, Glycine max
  unsure (1)..(416): unsure at all n locations
gcatccaataccctgatgaggatgtcccatatgttcttaagactggactgattcatttgcttgcaaagtttcatggccttgcaggtgaagacccgcacaaacatttgaaagaatttcacattgtctgctctaccatgaaacccccagatgtccaagaggatcacatatttctgaaggcttttcctcattcattacagggagtggcaaaggactggctgtattaccttgctccaaggtccatcacgagctgggatgaccttaagagagtattcttagaaaaaattttccctgcttccaggaccacagccatcaggaaggatatctcaggtattagacaactcagtggagagagcctgtatgagtactgngagagatataagaaactatgtgccagttgcccncaccatcagatttca

SEQ ID NO: 17261 - DNA, 429 bp, Glycine max
cccttatgctgcaaatatttacaatagacctcctcaacctttcagctaaatcaaccacagcagaacaattatgacctttccagcaacagatacaaccctggatggaggaatcaccctaacctcagatggtctagccctcagcaacaacagcagcctgctccttccttccaaaatgctgctggcccaagcagaccatacattcctccaccaatccaacaacagcaacaaccccagaaacagccaacagttgaggcccctccacaaccttccctcgaagaacttgtgaggcaaatgactatgcagaacatgcagtttcagcaagagaccagagcctccattcagagcttaaccaatcagatgggacaattggctacccaattgaatcaacaacagtcccagaattctgacaagctgccttctcaagctgtc

SEQ ID NO: 17262 - DNA, 402 bp, Glycine max
  unsure (1)..(402): unsure at all n locations
ntgaatgctctattcaatggagttgacagtttatcttcagactgatcaacacttgcacagtggccaaggctgcatgggagatcctgaaaaccactcatgaaggaacctctaaagtgaagatgtccagattgcaactattggccacaaaattcgaaaatctgaagatgaaggaggaagagtgtattcatgacttccacatgaacattcttgaaattgccaatgcttgcactgccttgggagaaagaatgacagatgaaaagctggtgagaaagatcctcagatccttgcctaagagatttgacatgaaagtcactgcaatagaggaggcccaagacatttgcaacatgagagtggatgaactcattggttcccttcacacctttgagctaggactctcggata

SEQ ID NO: 17263 - DNA, 410 bp, Glycine max
tagcttcgaaccaaaaaaacaacacatttctattttgtgagtgtatgaattacatactgaaaattttacaaggataaattccgaacattttgatatttataagaacaaaaaatatattttagccttgtttttattgttaaaaaaaaaaaagagagaaatgctactaacattttctttaacacactccttcatacacactttctcttatgtgttaaaatgtatttagttgaagaacaagttccacaaaatcttgaacctaccaagtgtgatggttgggattggtatgagcgcgaacatttgccttacacatttgacgtgactgtcactgcaatggaagatgcccaacacattcgcaatatgaaagtggatgaactcattgggtcccttcatacctttgagctacgactctc

SEQ ID NO: 17264 - DNA, 422 bp, Glycine max
tttggttcatatttcgacgaccaatccttcctattgtacttctttgttgaagaaattttttctgtgattctttacataaagattcataaaatactggatctccaccaacacaagcaaatggtcgataaaactccaaaatggcattttctttcgaccctattatttttttatccttatcatttaggaaagaaacgaaaatatcaggataacaaacattctctagaatttcgcttaaattcgaacccatagctgatgataaaactagaatagatattttctgtttcctactcacacgagcccatatccttgcttttctatcaatctctaattctaatctacccccccagtctgatattatggtgccagtatagaccgaaattccgctaaggtccaattctgaacggtaataaataccaaggctt

SEQ ID NO: 17265 - DNA, 377 bp, Glycine max
  unsure (1)..(377): unsure at all n locations
agcttgccgccacggagttttccgactatgctcttgtgtggtggaacaagctacaaaaggagagagcaagatatgaagagccaatggttgatacatggacggagatgaaaaagatcatgaggaagcggtatgtgccggctagttactcaagggacttgaaattcaagctccaaaaactaacccaaggcaacaagggggttgaggagtatttcaaggaaatggatgtgctcatgattcaagcaaatattgaagaagatgaggaggtaactatggctcgatttcttaatggtttgactaatgatatccgtgatattgttgagctgcangacgttgttgaaatggatgatttgcttcacaaagcaatccaagtggagcaa

SEQ ID NO: 17266 - DNA, 388 bp, Glycine max
agcttaatgtcatagttttcatggtgctagtgataacaataatgataatattagtaatgatgatagtatagtgacaataatgataagatgatcatgatataatagtgataatggtgacaaaaatagcaatagtaatagagatgatgataataatgataatagtaataatgatgacaataacgatgataatcgcgaaagtattaagtatacctttattttattttaggtttcattacttatttgatgtcactatttattattgcattcaatttggtctttacttatttaaaaaacaagtaattcattaggtcttttttgttcaaaactatttatttatttatactggtttaagttaaatcaacattattttttttataattaatgcttg

SEQ ID NO: 17267 - DNA, 421 bp, Glycine max
tcaagaattaatggcctcatcaaactacttgttcccttaggcaattcaattaataggcctcctatttttaatggagtgggttaccactattggaaaacccgcacgcaaatcttcatagaggctatagatttaaacatttgggaagccatagaaatagggctttatattcccaccatggttgctggaaatacaacaatagaaaagcctagggaagattggagtgaggaagaaagaagactagtacaatataacttaaaagccaaaaacataattacatctgccctaggaatggatgaatactttagggtatcaaactgtaaaagtgcaaaggatatgtgggataccctcaagtaacacatgaaggcacaacaaatgttaaaagatctaggataaacacacattaactcatgaatatgaacta

SEQ ID NO: 17268 - DNA, 357 bp, Glycine max
agctttgagcaaattcaaacgacaataaatttttactcagatgtccgattgtgtcctgtagtttatcgagacgctcgtgattgaaaatggaagttcgtcgcaaattcaaaagacaataaatatttacttggatgtccgcctgagtcccataatatatcgaggcactcgcaattgaaaacggaagctcgttggaaattcaaaagacaatatatttttactcggatgtgctattgagtcccattatatatcgcgacgctcataattgattacggaagctcgctggagattcaaccataataactttttactcggatgctcgattcattccttaagtatatcgagacgctcggaaatcac

SEQ ID NO: 17269 - DNA, 392 bp, Glycine max
  unsure (1)..(392): unsure at all n locations
ttgagcaaattcaaacgaaaataaattntaactcggtatgtccgattgtgtgttgtactatatcgagacgctcgtaattgaaaacggaagctcgtcgcaaattcaaacaacaataaatttttacacggatgtcggattgagtcccataatatatcgagatgctcgtaattgaaaacggaagctcattataaattcgaaccgtaataactttttactcggatgttcgattgtgtcccgaagtatatcgagacgctcaaaattctgaatagaggctcttagtaaattcaaatgacactaactntttactcggatgtccgaatgaatcccgtaatatatcgagatgctcgaaattgaaaacacaagctcgtagcaaatgcaaaccacaataacct

SEQ ID NO: 17270 - DNA, 419 bp, Glycine max
  unsure (1)..(419): unsure at all n locations
tcaacatcagaccacttccagggtgctggatctacttcacatggatttgatggggcctatgcaagttgaaagccttggaggaaagaggtatgcctatgttgttgtggatgatttctccagatttacctgngtcaactttatcagagagaaatcagaaacctttgaagtattcaaggagttgagtctaagacttcaaagagaaaaagactgtgtaatcaagagaatcaggagtgaccatggcagagaatttgaaaacagcaggttcactgaattctgcacatctgaaggcatcactcatgagttctctgcagccattacaccacaacagaatggcatagttgagaggaaaaacaggaccttgcaagaagctgctagggtcatgctccatgccaaagaacttccctataatctctgggctg

SEQ ID NO: 17271 - DNA, 404 bp, Glycine max
agcttgcattttatatgtttcgaacaaatctgataggtgaaataaatatttttttttaagttcgtatcttgctcaccaaatctactaaaaaacacactcgtccccgtacctaaataatgatgtgaaaaaatattttttgaagaataaaaaatgtataaaattagaagattttttctttcatattttaagctaaaatatatcacactaaaatatatcaacttttataatagtattaaacaataaatattaaagtgttaatactaaaatatactaacatttataatagtctcaatattaaaagcatcaaaatgtcttacatactggtttatatcggtaatccgcaagtcggtagataaagtccactaggctaaactaaaaaatttaatatagttatccagattttt

SEQ ID NO: 17272 - DNA, 407 bp, Glycine max
agcttttctactaagttgcctgatgcctgaaatgtcttttctgatggcagtggtcctagatgcagggaagattttctccaagaacaccctcttaaggtcatcccagctgaaaacggacctgtgagcaaggtagtatagccaatcttttgtcactccctccagagaatgaggaaaagcctttagaaagatatgatcttcttggacatcagggggcttcatggtggaacaaaaaatatggaactccttaagatgcttatgaggatcttcacctgcaagaccatgaaactttggcagcaaatgtattagtccagtcttgagaacatatgaaacaccctcatcaggatattgaatgcacaagctttcataagtgaaatcaggtgtagccatctccctaagagtcctcttac

SEQ ID NO: 17273 - DNA, 337 bp, Glycine max
  unsure (1)..(337): unsure at all n locations
cgtggctatacgagacatctttccaaacaaagtcaggttagcgataactcgcctgtgctttttcttccatgctatatgtagcaaagtcattgatccagtcaagtttgatgagttggaaaatgaggccgcaattatactgtgccagttggagatgtattttcaccctgctttctttgacatcatgattcacttgattgtgcatctggtcagagaaatcaaatgttgtggtcctgtntatctacggtggatgtacccggttgagcgatacatgaagatcttaanagggtatacaaagaatctatatagtctggaagcatctattgttgagaggtacatt

SEQ ID NO: 17274 - DNA, 287 bp, Glycine max
aattctagtcaacaaagcaaaaattcttgtgtttaacacttttattttacctaattgacattattattgtatacagctagacttgtgatggttttaagcttgcttttctttttgattaatgacagattactgcactggtcacaacaaacctgaacaaagtaattgatgttaattactacccagttgaaaatgcaaaacggtctaacttgcggcacagaccaattggtattggagtacagggtcttgctgatactttcatacctccttgcatggcatttgattcacca

SEQ ID NO: 17275 - DNA, 410 bp, Glycine max
agcattgattgaggattgtattgttcatccggtgtctgaaaatcccacccaaggttatcaaattcgagagtttacaaaaactcgtaagagtttcatagactcgactcgtaaactcaactcatagactcgtaagagtctacttcatataaaaataataacaaaatatctataaataacatactaattaaacatttcaaccatataataaagcaaaatagtaaatcataaagttcagaatatttaaataatcaagtctagtaataatacatgactactaaacaataacttgtaaaggttatagtagtggtagatcattctcattgagggtttgatgttattagagaacaagagtttgatattattagaggtaagaattttatatttgagaataacacgctacatgaaggtat

SEQ ID NO: 17276 - DNA, 398 bp, Glycine max
tctaaacggatctcatctagctcattttgttgcaactttctttcctctccagcctgatcaatagagaagttgcaggtctttacagcccagtaggctttgtgctctatctctacaggaagatgacatgccttgccaaagacaacccgataaggagacattcctatgggtgctttgtaggcagtcctatgcgcccaaagagcatcatctagcctggtgctccaatcctttctgttcggctgcacaatcttctcctagatcctttttatctccctgcttgaaatctcagtctgcccattggtttgggggtggtatggtgtgtgtcgcaacctaccctttggcgggcgagcgaggtgagggctcacgggtgcgtcttccataggaggaaaatgcgcggagtc

SEQ ID NO: 17277 - DNA, 388 bp, Glycine max
tggcttgcaagctttgaccatttgaatggctcaagcgcttccattgttcaatatcgagcgtctcgatctattatgcgcttgaatcggacctccgagtgaaaagttaagaccatttgaattgctcaagagcttccattaaccaatttcgagggtctcgatattttatgttcctaaatcagacctccgagttaaaagttatgtccatttgaatatctcgagagcttccgttgcttaatttcgagcgtctctatatgtgatgctcctgaatcggacctccgagtgaaaagatatgaccatttgaatatctcgagagcatccgcttttcaatttcgagcgttcctatatgtgatgcgcttggatccgacctccgagttagaagtaatgacca

SEQ ID NO: 17278 - DNA, 412 bp, Glycine max
agcttcttattttcagataatgcagttgagtttgtagctacctcatgcactcctctaatgactatagcatcatttctggcgctaaactgctgggagttggaagccatcttctcaattaaatttctggcttcagcaggagtcatgtctccaagggctccaccactggcagcatctatcatacttctctccatatttcggagtccttcataaaaatattggagaagcagctgctctgaaatctgatggtgagggcaactggcacatagttttttaaatctctcccagtattcatacaggctctctccactgagttgtctaatacctgagatatccttcctgatggttgtggtcctagaagcagggaaaaaattttctaagaatactctcttaaggtcatcccagctcgtgatgg

SEQ ID NO: 17279 - DNA, 323 bp, Glycine max
ttgcttttttcaactttctatcacctggcttcacccatgttggaaacccttctttgtaacttggttcttggtatggaaccttgttaagggccaaggtgtagctcagcaacttagtaacattgttggacatcaaagggagaacgtagtcttgaacaccaagctcatacaacccggctttgcatgtctcaaggttagtgagagctgcgctgagccatgtttgggcatcaacttgtgagagcttggtgttatgctttatggtttggctgagattgcgaatagtttgctcataaagctcaacacaatcagcccatgcaactctttac

SEQ ID NO: 17280 - DNA, 396 bp, Glycine max
  unsure (1)..(396): unsure at all n locations
tcacttggttcaggcctaatgtgtttcgtcaagagcagacttgacagattcctagtgtcagatcaatggctagtcatatggcctgacacatcccaacatgttcttcacagagattactctgaccattgcccggtaattttgaaaactaaactggttgattggggtcctaagccctttagggtgctggacttatggctcaatcaaaaaggatatcaaaagctggtgcaagagtcttggtctaaggaccagcagggtggatggnggggcattgtccttaaaaacaagctgagaaatcttaaaaataccatcaaacaatggagtaaagctaatgctgatatcaatgctaatagaatccagaagttgagacagaagcttaatgacttggaaactacagct

SEQ ID NO: 17281 - DNA, 343 bp, Glycine max
tagggattacggatactttactaagtatgatctactattatttgacaacttaatgtttagggtttaggggtatttgacaaatgacgatttttatgtagtttagcacttagggtttagttttacctgactaattcgggttaaaggttatttgacctattaaggtcacttgcctaattacggattaggtatattcgaaaaattaaggttacttgactaattatgatttatatgtgtctaactgattaaggatatgaatacatgactgagtagggtttatatgtacttgaccaactatgggtgagggttatattacctatttgtttacagatacatgactaattat

SEQ ID NO: 17282 - DNA, 427 bp, Glycine max
  unsure (1)..(427): unsure at all n locations
actcagcttaaccccttcttctcctatctcaaaatttgtgaggctattcttcaaagcaattatgataataatgtcccattcccacttgctgctcatatggttgtcctgtgttattttgcaaattaaagtattattatatttttaaaaagaataaaatgtcgagaaattagatcatattatgtatgttacaaagttacgtaagtgaatattatatgatcaatgatattggtttcaccttccatggaactcagaaactgttgtgctgaaattgaagatttgtgcaactctttaccaatcagtttctcccacatttgcacaacctctctctgggataatatgttttcaggtggccttatgtaaactgtcttgttccgtgttctngggtcatctatggttttgatagtggacatagctatatcatcttcat

SEQ ID NO: 17283 - DNA, 348 bp, Glycine max
tattgtggagttctaaacggattatacaacaacaacttggctccagatgtgggccgagtaagcatatgcaaagtggccaggaaactcttcaacttagaacaaatcgctttgcactgttgatcctaatgaaattcggttggctgtttcagcagttggaaaaatgatttcgccttcttggccattctcagtagaaatcaagatagagccaccagtctatcgatcaacttctatacttccttcatgttttgtgggctgcacatggcagttcctacttcgtacttgtttgggttggcctcgatccccctgcaggtgattcatgaaccaaggaacttaccccctccaaccctg

SEQ ID NO: 17284 - DNA, 401 bp, Glycine max
agcttctcatttgatccagcagaggagaagcatacaacctatttcactcaagtcacacccacggaactctagcacaagagacttggtcatcgtcatcttgaaagaatgctaaacatgaaaaaaatgaaatatgcaaaagaaaatttgaagaagtttcaaacggaggaatgcaaatctgttagtacacaaatgaatcaaaaggagaagttcagcaaggaagaaggcgttgataacattgatgaaggatattatgggaacttgattggatgtctaatgtatctcactacaacgagaccaaacattctattttctcaaaagaacaaaactggaatttttgtgacaatcaagtagtcattgctattgcaaacaatcccgtgtgtcatggaaagactaaacatttc

SEQ ID NO: 17285 - DNA, 383 bp, Glycine max
  unsure (1)..(383): unsure at all n locations
tcaccctcgttgtaaggcaacgacaaagggatctcatatagtttcaggcaagcttgccaagcggttctatggacccttccaagtcatagaatgcattgggctcgttgcatataagttacaattgccagaggaagttaaaatacaccccgtattccactgttccaagatgaagtcttttcgcggttcaccgaanaatatggcgggaattacctggcacaaggagttactcaacgaccaacccctcgtgtttccattagctatcttggattaccgtagagcatccaccgaggatccctgngaggtgttcatgcaatggaatggtatctcacctgatgatacctcgtgggaagactggaatcagctgtgtgaaaactaccaccttg

SEQ ID NO: 17286 - DNA, 423 bp, Glycine max
tcttccggtttcatcctctatgcaactcgcagatatcttcaccaatgttttatctccttctatttttcaacacctttgtaccaagctgggaatgatgaatatccattcccagcttgagggggggatcttaacagcatcttgttagagttagttatgatagttatttctgttgtaaccactctcgtgcttgtacatatataagccctcacgtgcatttaataagatgagttgcagttttgatcatcaagagccaagcgtagcttttcactgcaccacctgatatttttcttctcagaaacatgagtttcacgtttttcttccagcttagttcaatatttgttttcaacagtaagttagcatcaacaaatatataaaatgcttggcagagtgtacattactatactacctacgtgcttatctatt

SEQ ID NO: 17287 - DNA, 375 bp, Glycine max
  unsure (1)..(375): unsure at all n locations
gtggatcccgatagtattattgctgcagctctaatggatatgtatcaaagtatgggagatgctcttgcccagcaatacggtggctctgctgctcacaatactgtatgacattttgggggaatctaaatntatgtaatctgccgacaaatatctaactgcttatttgcatcttcttctgcagctgttgtgatatatgtaacatatattttggtgaatgacaggtgtttccagagaggcatggaaagtggaaagcaacaacacaatccagagagtttttaaaatccataaaacgatactatagcaatgcttacacagatggtgaanaacaagatgcaatanacttgtattattccttccacctcatttatctcaata

SEQ ID NO: 17288 - DNA, 394 bp, Glycine max
  unsure (1)..(394): unsure at all n locations
agctttatattgaatcttctaaaccttttcccttgataaaaacatcagggactaaattatgccaattcctctttcaaggacacattgtcatccctctgatctatatgctccaatgctcctctatccacaaaatttaccattctgtgaggcacaaaagccttaagtaaaatgagttgcttcttaattaaaactcctattcttctcgtagtgcttcttctggggaaagtactccagacttatctatacatgtggcatgacaagtaccaatgatcaatgagagtaagttattccaagattttttcaccagttgaaaaaagattaaataccacagttccaaccaaatacaacccaactgaaaccttgaaaacatcatcccaggagcctgaanatagtc

SEQ ID NO: 17289 - DNA, 398 bp, Glycine max
ctccgctataccttctagtgatcttgagcgcttttgcattttctctagaagctatcggacttgttactttccctgtatatgatgagagattgcttaagaactgttctatttgctgtgatgacaagccagtgccaattatgattaccttaaaatgttctcacacattcttgtcacattgcttgagggcctatgctgatggtaaagtacaatcttgtcaagtccctataagatgccctcaaccaggatgcaagtattgcacatctgtaactgagtgcaagtcttttcttccattcacctcctttgaatctctggagaaatccctgtctgaagcgaatatatgctgtccacatagaatttatctgccatatccaaatcgctctggtctccttgatcctcat

SEQ ID NO: 17290 - DNA, 412 bp, Glycine max
  unsure (1)..(412): unsure at all n locations
agctttataattntcatatgataataagcttcacatagaaggtaataagaggtataatatttcacaatgcaaagaatctaagaataaaacttgttaagttctttaataaagaatctcacacaaaaatatatatactaaaagaaatcatcattgaaaagaaaaatccaaaataataacttgctaatattaatttatttaagtccttccccttcctttttggtcatcatcattaactctagttcatcaagaataaattaacaattttaagaattttattctcatcaagtgatccaaattcatctcctacaatgtcctacattttagtttcctcttgatggtattgtaggaaatttcttgaaaggagacgaagattgttataaacaaatactagatcctttgtccaatgaggtgt

SEQ ID NO: 17291 - DNA, 413 bp, Glycine max
  unsure (1)..(413): unsure at all n locations
agcttgagttcatgattcanaagaaaacacctcgtaataaagccaatttagttcgacaattggtgaagttggagtataaggatggtcatagtatgattgagcacttgaataattttaaagggctcgtaaatcaattaaccaaaattgagatgaagattgatgatgagttgcaagcccttctactccttagttccttgctggaaagttgggacacactcgtggttacacttagtaactcagctccagaaggaaagctcaccatggatacagtcagtgacagccctctcggtgaagaagcaagaagaatggaacgaggtgagtctatccatcccgaggctaatgttattgagaatcggngtaggaatgagactcgtggatgtaataagagccgagatctgagttttcccaacact

SEQ ID NO: 17292 - DNA, 414 bp, Glycine max
  unsure (1)..(414): unsure at all n locations
acgtgcatttgtgtgcaatacacaatttcttgtacactacaacaaaatggtgtatcagaaatgcgtaatagaactttaatggatatggttagaagtatgttaatcaattagactttacccgtatctttgtggatgtatgccttgaaaactgtcatgtatttgttgaacagggttcctagtaaggcagttccaaagacaccttttgaactatggacaaataggatacctagtataaggcacctgcatgtttagggttgccagacagaaataaggatttataatccgcaagaaagaaaattggatgcaagaacaatcagtgaatatttcattggttatccagaanagtcaaaggggtatatgttntattgtcctaatcatagtatgagaaatgtcgaaactgaaatgcaggttcat

SEQ ID NO: 17293 - DNA, 403 bp, Glycine max
tttgctatgagcaaattcaaacgacaataaccttttactcggatgtctgattgagtcccgtaatatatcgagacgctcgaaattgaatgttgaagctcagagcaaattcaaacgacaataactattttctcgtatgtttgattgagtcccgtaatatatcgagacgctggaaattgaatgtttaagctttgagcaaattcaaacgacaataactttttactcggatgtctgattgagtccagtaatatatcgagacgctcgaaattgaatgttgaaactctgagccaattcaaacgacaataactttttactcggatgtccgatttagtgacgtaatatatctgggtcgctcgaaattgaatgttgaacctctgagccaatccacacgacaataactttttac

SEQ ID NO: 17294 - DNA, 346 bp, Glycine max
ccgcttaaacattcaatttcgagcgtttcgttatattacggttctccaatcagacatccgagtaaaaagtgattgtcgtatgaattggcttatagcttaaacattcaactttgagcgtctcgatatattacgggactcaatcagacatccgagtaaaaagttattgccgtttgaattggctcaaaggttccaaattcaatttcgagcgtctcgatatattacgggactcaatcagacatccgagtaaaaaagtattgtcgtttgaattggctcacaggttcaacattcatatttgagcgcccccatatattacggcactgaatcggacatccgagtaaaaagttat

SEQ ID NO: 17295 - DNA, 429 bp, Glycine max
tgaaggtaaactagatgccttggttaacctggtaacttatctggccatgaataaaaaatatgcacctgtcgccagactctgtggtttatgctcctctgccgaccaccacacggacctttgcccttctgtgcaacaatctgaagcaattgaacagcctgaagcttatgctgcaaacatctacaacaaacatcctcaacctcaacagcaaaatccgccacaacaaaatagttatgacctctccagcaacaggtacaatcccggatggaggaatcatcccaaccttagatggtcaaatccttcacaacagcagcagcaacaacaacaaccttattttcaaaatgttgctggcccaagcagaccatacattccaccaccaatccagcaacaacaacagcaacagccccagaaacaacaaacagttgaggcccc

SEQ ID NO: 17296 - DNA, 412 bp, Glycine max
agcatacatatatattttttgacaacatccgtcatgcctgcattaaacatgattcttcttttgtaggaattggccaaaatggtgatagttcaacaacttttcctataataatcagcgttggtgacaccagctgagcagatgtaattttctcgtgaaggtcctttagttcagcaaacacctgcatcatagcaaaataatcagctattggacctagcatccggaaaagttgaattaagaaccagctatatatagattcacacacaattgtatttatttatcagtttttaatatcaaccatgcagaagtacaaaataaaatgtctcatattcacaactacctcctataacaaaacattattaagatcactatattctattagcctcgactttagtgtcaggtacactctcttcac

SEQ ID NO: 17297 - DNA, 408 bp, Glycine max
  unsure (1)..(408): unsure at all n locations
tctgcttcttcatcgacattntttctctctcttcatcttttctttacttcatcgacacatgatatgtcttctaaagcgtaggaaggttccaaatgcgttgtggtgggcattgtgttgtgcagtatatgattgcagcgtctgccatccttttccctggacatgtaggcagagttactccacagagtgtaacttatagctttgcaacccttttgcttgacctcctcagtggcaatcatattcctccaagccatgtaagtttctttacttaataaaaagttatgcaaacaacacttattgtgttgtgtcctataatgttgtctatcttagtctaattgagttcttccttttgatcaatttcttcttctgattgttctacctanaatcaagtaagaagtacctgtcaaaaaa

SEQ ID NO: 17298 - DNA, 405 bp, Glycine max
  unsure (1)..(405): unsure at all n locations
tcttatccaaggctcatcttggtggtgaagctccttcttccaagcttattccctagtggatggcgcctcctctctcctcttctcctttgtcttccgcttcatctccatggtgaaaaatcaccatcaaaggacctcattgaagctcaaagatccagcctccatagaagccccacaagcaagcttccatcacaaattccgcaccagcatgattggagtaccgaccttaagtgttaatttgtgattaggtatccctgatgttttcaatgagtttagaaatttaggtgtcagtaatccgaaagtaggattgagtagttcatcttatttatcaatgttatcagtgctacaatactccttttcgtcattgggtatcaatgataagacnaataatnntatttgtcaacaata

SEQ ID NO: 17299 - DNA, 379 bp, Glycine max
  unsure (1)..(379): unsure at all n locations
agcttaagctccttcaactgcacaaggttcttaatatttgaagagtatccttgtggaaccttcacccgacgaagacactgacaaaaacttatcttttccttcttggacaaagcatggcaggctgggggcaagtaaattttcttcccatcagaccttggatgcaactgtgatcgtatacccatatcaactagatcttgacgggtattcaagccatccttcgtcttgccttgaatgttaaggagtgtgccaatcacactgtcacaaacattnttctccacatgcataacatcaatacaatgtctaacgtcaagatcacaccagtacggaagatcaaagaaatggatctcttctttcatatgccactctgacttttatcctt

SEQ ID NO: 17300 - DNA, 427 bp, Glycine max
tactatatttaacagctagcagacccgacatcacctatgcagtaggtgtttgtgcaagatatcaagccaatcccaagataagtcacttgaatcaagtaaagagaattctgaaatatgtaaatggcaccagtgactatgggattatgtactgtcattgttcaaattcaatgctggttgggtcttgtgatgctgattgggctggaagtgcagatgacagaaaaagcacttctggtggatgcttctatctgggcaacaatcttatttcatggttcagcaagaagcagaactgtgtgtccctatctactgcagaagccgagtatattgtagcaggaagcagctgttcacaactagtttggatgaagcagatgctcaaggagtacaatgtcgaacaagatgtcatgacattatactgtgacaacctgagtgc

SEQ ID NO: 17301 - DNA, 403 bp, Glycine max
ttcctctagctgttctgataaggtttccaaacgttagagaaggagaagagattgaagccttcattctactgcctgcatgcaatgaatatttctccctaacaagatcaattttcaaatcgcaacggtgaaaatatgcagaaatgaatttcgaaccaggtgtcccaatttcacaatgatccaacggttaatgagtctgggattatagttttactaggacaggttttgggtctctgcaagaaaagaaaaagttaagatgagaagggaatttctctcacctccaactctgattcgcaatttccatcggtgagaatacttgaatatgagctgcaaacttggtgctcaaatttcacaacaatccaacgattaacgagtccaagatcattgttttactgagacagatttg

SEQ ID NO: 17302 - DNA, 409 bp, Glycine max
  unsure (1)..(409): unsure at all n locations
tttcttccatatgataagagcttatcaaataagcatgatttagctgtttacacaaacacaccatttatgtattaaatctaacttgatagcttaagattaaaaaaaggaaaaaaaggtttgtcatgcctcaaataaaactggctttttcttttacactggcatcgtgggtgggtacacattctggtaacaaataattacaattattcctacaaaataatccagaccaccccatttgtgtgcagcactagcgctactagatggatgataaaatgggaggctttaatagatgtatgtttcttgtggattgttataagaaccaactntgttcacccaaaggttaactagttcatcacgttgatactacaacaaaatagaatacatccttttaaaaacaaaagttgttcaccac

SEQ ID NO: 17303 - DNA, 378 bp, Glycine max
  unsure (1)..(378): unsure at all n locations
tgcaccaacttctcattntatgcataatatacaagtttatattttaatttaatgtttagtaacacgactaaaatccgtagtaagatgaaaaataaattttcaatttaatacttattagcgtatatttaaaagaaagctgttagaaattagtaattattgattatttttgggacatgtaagaaagacattatgtgtgctttttttagcgagacaatgttatttggtttaatagactaataatgtaatttaacatattgaaacatcaaattataaatattctgtacaaaattaatggtatatagatgctggatgtatttattcagcataaaaaggttcctggatgtattttattttttgagactggccgtctctatcttc

SEQ ID NO: 17304 - DNA, 409 bp, Glycine max
  unsure (1)..(409): unsure at all n locations
tgcatgtaagatactgcaacttcttgctgatcacgaatatcttgcagtatttcccttggtttgtattgtggattatctcgaatgcgtgcttcaacagatcttgcaacccaacctactgatgcctgctgatgatgaaggttctgaactccctcgcaagtatgctctccgtgtagagttcttacagtaaaagttggaacaccgggacactttgctacatggacccgccatgggcacccttctttggagcattntgctataaaacgactgcgatctgacttaactatcctaagatcaaaatgcatagcaatggcaatatctttcagtgttcttcggcagggtttcacatctgcaaactcttgcccaatgactaacggctgctctgctacagtaacagtactaacagatgtgt

SEQ ID NO: 17305 - DNA, 383 bp, Glycine max
agcttgtaataatcttatatagaagtatgagattaagttcctgagtggaattttgatgcaatcctcccatggagggggcccatcaccagagtcatggttaagagactccaggaagattgggccagggatgcaagagaatgccttagggttctcatgagccttagggtagcttttgggcccatgggttaagtatgtgcccacttatctttgttcatattagattatggtttcattatttttttgggccttgatttagggcaccacagtgtagggagggtaccccataagtttagggtaccctagtaatgtaggatttttcagcccttgtattttagggctcacagactagtttttgtatcagggatagttttgtaatttcacat

SEQ ID NO: 17306 - DNA, 377 bp, Glycine max
agcttcaagagatcatcctctctacaacattattggtgatatctcaaaaggggtaacaactagacattctcttaaagatttatgcaataatatggcttttgtatctatgattgaacctaaaaatataaaagaagtcatattagatgataactggatcattgccatgcaataagaactgaaccaatttgaaagaaacaatgcgtggaaattagtagaaaaacctgaaaattatcctgtcataggaacaaaatgggcctttagaaataaattatatgaacatggtataattattagaaataaagccaggttagtagcaatagggtataatcaagaagaaggactagactatgaagaaacatatgctcctgttgcaagat

SEQ ID NO: 17307 - DNA, 283 bp, Glycine max
aatcttattgcaaccacgagattcagctcctgagaggaatgtacgtgctataactaccatggatggggcgccatcaccaaagtcatggttgacagactccaggaagatcgagccaaggatgcaagagaatgccataaggccctcatgagccatatggtatcgtatagtgcccatgggttaaacatgcgcccactgatcattgtgcatattatatcatggtaacactatttggtggagcctcgactcatggcacgacattgtatgcagggatccacataatgtt

SEQ ID NO: 17308 - DNA, 417 bp, Glycine max
ctataaaactcagcttctaaacttgtacttaatgaagctcttataccatttgttaaacaagtggcctcagatatcttaagaaggggggttgaattaagatatcacagactattccccaactaaatattctacttttaatttgatccaacaacccaaaattccctttaaaaatgaactcctaaataataatgcaaattaattcttactgaatagaaataataagcaataaacaataaaggagtttaagggaagagaaaatgcaaactcagatttatactggttcggccacacccttgtgcctacgttcagtccccaagcaacccgcttgagagttccactatcttgcaaaatccctttacaagttctgaaccacacaaggacaacccttcctttgtgttcaaatttctttacaacaag

SEQ ID NO: 17309 - DNA, 375 bp, Glycine max
  unsure (1)..(375): unsure at all n locations
agctttggtcctattcaaatagccataacttttgacatgggggtacgattgaggcccatgatatatcgagaggctcgaaattgaaaaatggaagttctcgagaaattcaaatggtcataacttttaacttggatgtccgattcacgcacataatatatcgagacacacaaaattgaaaaatggaattctcgagaaattcaaatgttcataacttttgcctcgaatgtcagatttaggcacataatatatcgagacgctcgaaattaaacaagaaagctctggtccaattcaaacggccataacttttgacatgagtgtatgattgacgcccatgatatatagagacgctcgaaatngaataatggaagttctcga

SEQ ID NO: 17310 - DNA, 402 bp, Glycine max
  unsure (1)..(402): unsure at all n locations
ngagcgtagtggaagaaaagttcttgatatagatttttcctccttctagatatatcagtgcaaagtcagatgtttccactttcaagttaaaaccagatgaacccatctgtgaagtctggaagtgattcaaatcattgttgagaaaatgtcccaatcatggttttgatgatgttacccatctaagcatattttgcaatggtctaaggcctaaaactaagatgattctggatgcagtcgctagtggaacaattatgtttgtagatgttgaacaagccacaaggataattgatgcctttgcttcaactgatcaccaatctcagcataacagacaatcgatacataaaagaggagtgttggatctcattctcaagggtctttcaatggaagtgtataaacattttg

SEQ ID NO: 17311 - DNA, 321 bp, Glycine max
agcttgccgccatggaagtttccgactatgctcttgtgtggtggaacaagctacaaaaggagagagcaagaaatgaagagccaatggttgatacatggacggagatgaaaaagatcatgaagaagcggtatgttccggctagttactcaagggacttgaaattcaagctccaaaaactaacccaaggcaacaagggggttgatgagtatttaaggaaaaggatgtgctcatgatttaagcaaatattgatgaatatgaggagggaactatggctcgacttcttaatggtctgactaatgatatccgtgatcttgttgagct

SEQ ID NO: 17312 - DNA, 310 bp, Glycine max
atttctcatgagtttccgttgttcttttcgagcgtgtagatgacgtatgtccccgaatcggacatctgtgtgaaaagttatgaccattcgatcttctcgagagcttccgttgttcaatttctagcgtctcgatatattatgtccccgaatcggacatccgtgtgaaaacgtatgaccattccattttctcgagagcttctcgtgttcaatttcgagcgtctagatgagttatgtccccgaatcgaacattcgagtgaaaacttatgaccatgcgaatctctcgagagcttgcgttgtttaatttcgagcg

SEQ ID NO: 17313 - DNA, 402 bp, Glycine max
atgaccgatcgtttacaaaatatcttttcaacgtgttattctccttgctaaggaccaatgcataggagttgggattggcttggagaagatctttatcaagatcaattgagatcagccctgcactgtggcccatcccaccaaggttgtagctctttatatctccccgcagcttgcaatgattgacaatcattgccgaaagtgatggagtatggttgaacagactacactttacaatcagaattccaatgtctttatgctttacagacggtttagctaatagtgcatcaatggcaccaaacatcacagcctcggcttcttttctaacttctttcattgaatggttgggaggaatgttgaggacatcctcatgatggtaagtgctctccccaatgtcagatctct

SEQ ID NO: 17314 - DNA, 312 bp, Glycine max
agctttgttcaggatttagaaatttccaccatgtttactcatcaccagaaaattgtagtcgtggatggtgaattgccgagtggagattctaataagagaagaattgtgagttttgtggggggtattgatctctgtgatggaagatatgacactcaattccattcacttttcagaaccctggacacagcacatcatgatgactttcatcagcctaactttggtggttcttcaataaaaaaaggtggtccaagggaaccttggcacgacatccattctcgacttgaaggccctattgcttgggatgttttgttc

SEQ ID NO: 17315 - DNA, 414 bp, Glycine max
tgaattgaacatcggattgaagaagagcgcgagtgatgtcgttgaggcaatcgatgagcaccttctcgtcgattactgtcgcattgctcatcagctggagagcacgcgaaatgctcccacctaactccgccagaaccatcttgatcttcttcccttcaacaattcaatttccaaattaaggtttggatatgcaacaccaacacggaggtttcagattcagattattggtctatctctcttccaccgccggtaaaatgagcggtgcattattgggagggaaaaaaagttaaactgtaaccactacatactaatgggccttggctcggattgagccttcatattgtaacccatgtcatgtgttgatccgtacgtaactgtattacatgaagaagcttgttatgtggtgatggaaaa

SEQ ID NO: 17316 - DNA, 426 bp, Glycine max
ctaagcttatctttttaataagtcatattttctttatgaatgtgcaaaaaatttaacttatgcttaaaaaatttaattatttatcaactttattggaccttatttgttatgtaaacacttgttgtttcatgattgttctaccaaaaacatactccaatgaccatttcttaataagaatcaatgtttaataagttttcaccatatgaacaccttgtttgagatgccattagacacaaataaataattcgtcccacatagctcatctttaataataaaaaaagtctaatgccgatatttattgttcagtgaagtgatataattaagttagttattttaatgattaatatatttcgataattcaaagaatttattgtcaattaaccaagttaataaccatcactcccgtcatgggaaaaaaaataaagt

SEQ ID NO: 17317 - DNA, 406 bp, Glycine max
tttgtttatttattaaatcatatattacatgaagttgttgggtgcaaataagtctttctaaattacaatttctattattttatatacttaataattgactgattatagtaaaaaaaacaataataattgactcataatcatacctccctagccggcttgtgtgcaatcaacaaaagctatctttcgttttatagactctataatctctttttgtctttgagagtgactctatataatttcataattgcatattaggtattaatatatttaaagaggcttgctagctagcgtacattcgtttattttataattggaatacgttagtaagttttaactaaatattatcttcaaatatattcacaatgtagctggctaatatacaccaattgaacaacaagttaatgta

SEQ ID NO: 17318 - DNA, 346 bp, Glycine max
  unsure (1)..(346): unsure at all n locations
ntgaaaaacactttttattttatatcacttggccattctctttgcttattcaattaggaattcccttcctaatattctagtgatcatcttgatgttgtgacttgtaatcttgaagtattgtcttgaattttaatcttgaaaagcccatttgcatcaattgcaacacatcatcatgatcatcatcaaaacatcaaagccaattgcatctacacatgtgtcctccaccttcgagattggagctatgtttcacgattgcctaagtgcggaccctcaaggcaatccgccattcttcctttttttatcggaaacccatgaatgttattgcctagcgctattcatgtgccct

SEQ ID NO: 17319 - DNA, 421 bp, Glycine max
tgacggactataccaagctctaggaaccagggacgtagaaagatcttatataggcttactaagggtagagagaggaagactacagatttggatcacgtaaagtgtgttaaggatgaagaaggcaaagtcttaatgcatgaaaaagatatcaaggaaaggtggaaggtgtatttccacaacttatttaatgatggatatggatatgactctagcagtctagacacaagagaagaggaccggaactataagtattatcgtcggattcagaaacaggaagtaaaggaagcgttgaaaagaatgagtaacggtaatgcggtggggccagactacatacctattgaagtgtggaaaactcttggagatataagtcttgagtggctcaccaaactctttaatgaaattatgatgtcaaaacgcatgc

SEQ ID NO: 17320 - DNA, 409 bp, Glycine max
  unsure (1)..(409): unsure at all n locations
tgcatttgtggngattggcttttattccctaatgtatgatcataaagcccaggaacttgcctttgtcgaccccaaaagttcattttttcggttgaggcacatgtcgtatttgcaaagctctttgaagacttcttctaggtctgccacgtgttgagttatgctctgaaacttgatgaccatgtcatcgacatagacctcaatgttttgtccaatctactacttgaaaatctggtccatcaatctatggtatgtagcacctgcattttttagggcaaagggcatgaccctatagcagaagttggcatcctcagtgatgaatgtcattttctcctcatttggagcgtgcatccggagtagatgtctaggaagcttagtacttcgaacctggacgctcgatcaaatagcttat

SEQ ID NO: 17321 - DNA, 327 bp, Glycine max
agctttcttttatcagagaagaggctattctcttggtccaagcccttggagcttgctttaagccatacaatgccttaagcaattagaacactctatcttccttgccttagatctccaaactacgaggttgttcaacaaaccacctcggttgccaaggtaccacttcaggtaaagctgacatttacattaatctgggtataaagaccaatctctattatgggcttgcgcaattaccaaccttatgggttcaagcctagctactggaccataacttcagaatgatccaaaccagatttttggaggacatcctttgcaactaaccttgct

SEQ ID NO: 17322 - DNA, 312 bp, Glycine max
agcaacgtttattctcagcattatttaattttttgcttcggaatggaggcttccattcaaactagtattactgatcttaatgcttgaatttactttgcagattctacttcgattatagtacaacctttgtgggagcacgaaagatttgcttccatcctgtgaactgttctttgctccttgtgactgtgctcctttatggggttatgtatccgctcattgatcggcttaaaggaaactggtctccagaccactttgaataaacttacttgatgggcttatacggatataaggtatttggttcaattgctctaa

SEQ ID NO: 17323 - DNA, 381 bp, Glycine max
agctttaccgagtgtctgaaagcctcatcaatggtagagaaccactccctatttccacacatgtgattgctacaaccggagtcgagaaaccaagtctcttcttgttgcaagttgtcagcttcgacaagagacatgagcagcatctcttcttcttcataaatctcagcatagtttgcactctccttccatcttgggcattcgtattggaagtgtcctagtttgtggcacttaaagcactccactgtggctttgtttggagactgccttcctctgcctctgcctcgaccccgaccaaagcctctacctctgcctctacctccattctgttcttcatgtgagaccttcaatgcttgctcatcccttgtgtcactaccatgagaa

SEQ ID NO: 17324 - DNA, 385 bp, Glycine max
  unsure (1)..(385): unsure at all n locations
agcttatgctgcaaacatttataatagacctcctcagtagcaaaaccaacaacaacaaaataattatgaccttttaagcaataaatacaatccaagttggaggaatcatctaaatctgagatggacaagtcctccacaacaacaacaacctatccctccttttcagaatgctgctggtccaagcaagccatatgttcctcctccaatatagcagcagcaacaatagcagccacaataaagacaacaagcagctgaggctcctcctcaaccttccttagaagagttagtgaggcaaatgaccatccagaatatgcaatttcagcaagacacaagagcctccattcagagtctgacaaattagatggngcagatggctactcagttg

SEQ ID NO: 17325 - DNA, 376 bp, Glycine max
agcttgaaggacattcacgaagtgtgactatatgatgtggcaatggggtgtagcaagaaaatgctcacctccccctctaaaatttaattgtattgggcttcttccaattcaattaaatttagttcccaacacccacatcaaatattcacttaattcatgtgaaattacaaaactacccctaatacaaaaactagtctaggtgccctaaaatacaatggctgaaaaatcgggctcatacttagcccatgggcccaaaatctaccctaaggctcatgagaaccctagggccttctcttgcatctttggcccaatcttcttggagtcttctatccaatgcccttaggggtaggattgcatcattccctcccccttgaaa

SEQ ID NO: 17326 - DNA, 399 bp, Glycine max
agcttccatcaagaagtgtggtgagtaggtgcataaaaaatgagatgatcttcttgtatggattgctaaggaagattatcaccgatgatgccaccaatctgaacaacaggatgatgaaagaaatgtgtgaggatttcaagacccaacaccacagttctatgccttacaggcccaagatgaatggggcagttgaggctgctaataagaatatcaagaagatagttcataagatgtctatgtcatacaaggaccggcacgagatgctaacctttgagtcgcatggttatcgaacttcagtgtgctcattgactggggcaacccctttctctttagtgtacgggatggaggctatgctcctgtttgaggtagaggatccttctttgagaatgctagccgaat

SEQ ID NO: 17327 - DNA, 428 bp, Glycine max
ctaagcttgttcatcttgagataataggtggtcatcctcatttgtagatgatggtgttacatacttctttggcctaacaggaactccaatatttttacagcttctaatgttatgattggtttggccacaccttccacatgtaaactcagccaatttcctctttagcttgtcctgtgacattgtcctcatctacagatctacttctatttttctttggccttcctctttggacctttttatgtggtggaacagggtgtgtatactgtgtctgggcccaatattgtggtccttggactggctcaataaaatgctggcatgtcttattataagcttctattgacagccactcatgacacatgttctcaggcttccctcctttgagagttattgttgcaatggcatgtccgcatgacatccctacatcaaag

SEQ ID NO: 17328 - DNA, 374 bp, Glycine max
  unsure (1)..(374): unsure at all n locations
agcttaacaaaatgcatgcgaagtgggtggaattcctagagcaattcccttatgttatcaaacataaaaagggaaaaggtaatattgtagccgatgctctttctcggcgtcatgcattactttctatgcttgaaacaaaattgattggtcttaaatgtttgaaaagcatgtatgaaaatgatgaaacttttggagaaatttttaaaaattgtgaaaatttttcagaaaatggtttctttagacatgaaggctttcttttcaaagaaaacaaattgtgtgtgcctaaatgttctactagaaatttgcttgtttgtgaagcacatgaaggaggtttaatggngcattttggggtccaaaagactctagaaacatta

SEQ ID NO: 17329 - DNA, 376 bp, Glycine max
aagcttctcaagcattccactcattaacaaacaagagacgatggcctacaaatgtatcatatatagcctcattagttattcatctgtagtgtcaaattataaagatttcatgtctaagaagctccttctacttcaatcaattcttagactttagtctccaaatgggatgttataacttgtacgaattccagatgagcttatcaagaatgccaagtacatagccacaccatggaaggggatcctggcagcagatgagagcacgggcaccatcgggaagcgcctagcgagcattaacgttgagaacattgaggccaaccgccaagcccttcgcgagcttctcttcaccgctacatatgccctccaatacctctctggg

SEQ ID NO: 17330 - DNA, 392 bp, Glycine max
  unsure (1)..(392): unsure at all n locations
agcttggttaggatgcttcaatggaggaaaagaatgagagagagaaagagagaggggggagcacgaaattgaaggaagaaaaagagagagaagttgaactttgagttgtgatgcaatcctccctaggaagggaccagtcactagaaccataagcaagagactccaagaagattgggctagagctgctgaagaaggccctagggttctcatgaacctcagggtagatttctgagcccatgggcctgtgtccaattatctttgtacatattagactaggatgtcattatatttggtccttgtatttagggctccatattgtaggtagggtaccctagacatataggattttttcagcccttgtattttagggcacctagactagttnttgtatt

SEQ ID NO: 17331 - DNA, 411 bp, Glycine max
  unsure (1)..(411): unsure at all n locations
ntatcgtcagtctcaaacttggcctagtctctatttttcaaaacctatcatttactttatctattgtatttttattattttataaaaagaaactctattttattgtctatcaaatgaataaataaaacattcttttattttctctcaaatcattattttaattaataaaggcatttctccttatttatttaattataaaaacctcatcattttttctaaaaactatttatttataaataataatcccttataaattagtttacaaaaaatgaaatgttacaactgagtaatccaaatgacaaaattaaggttgacaatcacgaaaatattgcgttgagtaggtgatgtacataatcattataagaaaaatatgattaaccttaatatataagataaatattaagttaattt

SEQ ID NO: 17332 - DNA, 385 bp, Glycine max
agcttcaatgccactaccttatagggattatgcctttatttatagtgtctacttgataaatcgacttccatcctcatctattcaatatgaattgacttactaaaaactatttccgaaattaccagattatagcttcttaaggatctttggttgtgcatgttttcctctattttgactatatagctcctctctcactaagacttgctcataatgactccaaagtttctcttgaagattatccaaaaaaatctattatgaccctgaagcaactatctagcaatgccattaagccttcttatcaatcttcttttttctttgaaaatattgccaaaagagttaacattccaatctttcaaagcatgttggatatgtttgaccctttgac

SEQ ID NO: 17333 - DNA, 290 bp, Glycine max
gttgtgcagagacactctatgttctcataccaaaagcttaattatacatactgctatgaatttttaaaaaaaataatattcttaataaaggatattttcatgattatgatctctaatccatttttcacacgtatgtttatggtaatgcgatcattcttgtttaactatttggatacagttaaaaatcttttatattatattaactcatatatgtattaaatattaaaatatcaataaaaatatgattactctttgattttaaaaaatatctaaaattctcatgactacca

SEQ ID NO: 17334 - DNA, 442 bp, Glycine max
  unsure (1)..(442): unsure at all n locations
tcttacaagagactaaganacttttgtctaanaattttgagacgaaagatcttggggaagactcttttgtattaggaatcaagatactaagagatcgctttcaaggtatcctaaggttatcacaagagagttatatcgataaggtcctagatagattcaacatgaaagatagtaaaccaggagataccccaatagctaaaggagataaatttagtctcaaacaatgccccaataatgaccttgaaagaatagagatgtaaaagattccttatgcatcaacagtaggaagtttaaagtatgctaaagtttgcacttgtcccgatatagcatntgtagtaggagttctgggcagatatttgagtaatcctggaatacaacattggaaagcagtaaaacgtgtgatgcgttacctaaagagaacaanaggatacatgctcacata

SEQ ID NO: 17335 - DNA, 386 bp, Glycine max
agcttggtaagatcctccttggtggggatgtgacgtgcaccgcacacactcacgagctcctcacgtgcccgtatctgccactgcggatgcatcgcgagcaggatcgtggtccacgttagcaaattcgaagtggtgtgtttgcctgcgaagaaaaaggttttgcactcttccactatgtcatccaccgttacgttcacattggaggtggtgttgttgttgttgttggaagcccaaatcatgagccccagcaaatccgttggcctttttgtttcttctttcccacacgcattctcttttcttcgtcgttcgatgatcttcaccaacgatttcttgatttccttgtccagtttccaagaatatatattcctcctcgtggggaagaatct

SEQ ID NO: 17336 - DNA, 445 bp, Glycine max
  unsure (1)..(445): unsure at all n locations
tgcttctacaccaaacctgaagcatccacctccaccataaagaattttgttaagtcaggtaaagccaaaactggagcctcagtagcttcttctttaattgttgaaaagccagttttgttgcatcagaccagataaagttatcttttttaagcatgttagttaagggtttagcaatgccaccatatcccttgacaaaccttatgtaatatccaattaaccccaggaagcctctaagttgtttcaaagtttgaggtaatggccactggtctattgtgtgcactttagctggatcagttgataccccctccttagaaatgaagtggccaaggtactctaccatagacaccccaaaatagcacttactcttcttagcagacaaggaattcgccttcatagttatcacaactttgtgtanatgtagcaaatggtcttccaatgaacaatt

SEQ ID NO: 17337 - DNA, 427 bp, Glycine max
ttttctctggctgttttgttaggattctcaagcgttatatagagaaagaaaggattattagtctcaattttattgtctccgtgcgacggatatttctctctttacaaacattatttcaaaaatcccaacggtgaagatgtgagaatttgaggaccatacgcggagtctaaatttcaggatgatccaacagttaacgaatccaagatcatagttgtactgtaataaatttacgtgtatgcgaaaaaaaaaggaattttgagagaggaaggaagacgaacgaatttatgaggaagtgagagcgtagatcaatatcaaaattgacctaatatgtttctatctatagttagagtattctaaacttattatctactctattattttatcttatcactttataaaaaaaagaactctctattactatgtcatt

SEQ ID NO: 17338 - DNA, 353 bp, Glycine max
agtttgcttttggagattgtaactatgctcttgtgtggtggaacaagctacaaaaggtgagagcatgaaatgaagagccactggttgatacatgggcggagatgaaaaggatcatgatgaagctgtatgtgccggctagatactcaagggattagaaatttaatcttcaaaaactaacccaaggcaacaagggggttgaggagtatttcaaggaaatggatgtgctcatgattcaagctaagattgaagaaaatgaggacgtaactatggctcaatttcataatggtctgactaaagatatccgtgatattgttcagtcgcatgagattgttgaaatggattatttgcttcac

SEQ ID NO: 17339 - DNA, 441 bp, Glycine max
tattgcatgagctatatcaggttgagtacatgccatagcatacattattgaacctataatgttagcatatgtgatactctccatataagtatactcttcagctctctttggggattgacttacacttagtttgaattgatcatatataggtgtcacaataggccaacttcgaatttgacattccaaacctttcaataaatttattgaggtatgtctcttgagatagatacaaaatcttcttctttctatcccttttgatttccattcccaatattctccttgttgtcccaagtccttcatttcaaattccctttctaactcagctgtgaccttggtaatttcggccttaccgttacttggtattaacatgtcatcaacatatagcagtacgattacagaggtacctttattccttttgaatagccattttcaattgactac

SEQ ID NO: 17340 - DNA, 393 bp, Glycine max
tatcttactataaataacaattaatatttattatcaaataatagtgtaaaaataatttatactatctatatatgtataaactatttgctcttaaaatttaaaacaaaagaaggaagattaaactcttgtgagagcacgggaaataaaagtatataactgagtcaaaggatgtatgcttagagacaaaggatgcatgcttagagagttattatgaaaatttaaatgtccaacataggtatattaaactaataattaatctacacattaaggaaattactatgggaaattactatggtatattggtagtgacatgaagataatatgtaataatacggtgagttattaactatttgttaaataatgattctatactaaatgttcgaaattataata

SEQ ID NO: 17341 - DNA, 378 bp, Glycine max
agcttggtgccactcttgaaacaaaacaccaaggttcgacatatcgtgttcatcatctgggaactcccaatctaaatcgagaccattgaacccgtattggcgcgccacgtggatggtggagtttatgaacacttgtcgtgtgtgtttgttgctagccatgagggagaatgcggttgagttgctaccacctcctccaattgacaagagagttttcaccggcgggtaacggtagcggagtccattgatgaattttggtatccatttttcatcaaattcggtgacactaaggtgaaaaagttgagggtcttgttggataaaggcatagtagatatgagtgaagtattttgtgtcaatggaagagggtgaaaggtcatcacc

SEQ ID NO: 17342 - DNA, 459 bp, Glycine max
  unsure (1)..(459): unsure at all n locations
tcatgatgatgaatcaagtataaatcaagtagttntgatgatgacaactagcccaaaagaatgatttcaagtttgagtcaacaagttcaagatcaagattaatttcaagattcaagaaaagacatcaagatttaagagaagatgaattcaagattcaagagaagaaatcaagaagcaacaagtcaagacttcacaagggaagtattgacaaagaatttttcaaaaaccaaacatagcacagttttgttttacaaaagagttttctcaaatttttctaagttaccagagtatttactctctggtaatcgattaccagtttactgtaatcgattactagtgataaaatttgatttcaaaaagtttttaactgaatttgcaacgttccaaaagaattttaaatggtgtaatcgattacaatatattggtaatcgattaccagtgtatctgaatgttgaattc

SEQ ID NO: 17343 - DNA, 451 bp, Glycine max
  unsure (1)..(451): unsure at all n locations
actcagcttcttacatagtccgcctttgcttgaccttctttatgtttaanaacattaacattaggcataggcgaaagatcacgacgagtctgtgggttaaaaccataaacaacttcgaaaggagaacaattagtggtgctaaaatccttcacaaatcatctataaaaacttgctaagccatgaaaactcctcacctcggtcacggacttaggtgtaggccattcttgaatagccctcaacatttcctcatcaacttgcactccttttgaactcacaacaaaaccaagaaacacaacatggttagtacaaaagatgcacttttcaagattggcatacaattgttcttctctaagcacaatcaagacagattctacatgatcaatatgcaaatcaagtgaagtgcttagataaaatatcatcaagtcacaccacacnaactttctataactct

SEQ ID NO: 17344 - DNA, 430 bp, Glycine max
  unsure (1)..(430): unsure at all n locations
tgtaatggcctccaaaattttagacaagtggcctctgtatcttaagaaggggggttgaattaagataaaaaactttccctaattaaaattttaactatgttttggattaacaatgcaccccagttgcccaatcaaatagctaggtcactcgaatgaaactagtgtccttatctttacttcccttttatttccaataaaagataagtaaagaagggcaactgtcataccctaatttcgtccagggactatcattcatggatattttgattttcgctagccgaattgagttgttcgacgcctattaccacccaagacgaaagatcattcgacgttntggtgaagaatgcgaanaatacccaaaagggagggcaaaagggtcattnntaatcctttttttgaaccctagctcgcccaggctagcctctagctc

SEQ ID NO: 17345 - DNA, 317 bp, Glycine max
tcttagtttcagatgatgcagatggttttgtaactatctcatgcactcctctaatgactatggcatcatttctggcgctaaactgctgggagttggaggccatcttctcaattaaatgtctggcttcaacaggggtcatgtctccaaaggctccaccactggcagcatctatcatacttctgtccatattactgagtccttcataaaaatattggacaagaagctgttctgaaatctgatggtgggggcaactggcacataaaatcttaaatctctcccagtactcatacaggcatctctcactgagatgtctaata

SEQ ID NO: 17346 - DNA, 385 bp, Glycine max
ttgctttctctttatgaataatgtggtatccactttacctctggagaattctttttcaagaagaaaattacttaatcgttcataccatgccctaggggcttgtttcaaaccataaagagccttttgtaatttataaacatgatttggtttattagaaatttcaaaaccagggggttgttcaacatatacctcttcttgaattaagccatttagaaaggcactcttaacatccatttgataaagtttaaagttcattatggatgcatatgccaaaagcattctaatggcttctaatcttgcaacaggagcatatgtttcttcatagtctatcatgtaaacattattgactctatgtcctacatgctttatattaatgtcatgctta

SEQ ID NO: 17347 - DNA, 389 bp, Glycine max
agcttaataaatcaatctatggcttgaagcaagcctcctgccaatggtatttgaagtttcatgatgtcgtcacttcatttggctttgaaaagaacatcatggatcaatgtatataccaaaaggtcagtgggagtaagatttttttcttgtgttatacgtggatgacattttgcttgcaactaatgataagggtttgctatatgaggtgaaataatttctctcaaagaactttgatatgaaggatatgggaaatgcattttatgtcattggcattaagatccatagggaaagatctcgaggaattttgggtttgtctcaagagacttatattaacaaatttttagagagatttaacatgaaagattgttcaccaagtgtagctcccattg

SEQ ID NO: 17348 - DNA, 389 bp, Glycine max
agcttaagcgtcttgttcaatcaccaaattcgttcttcatggtataaaaacgttcttctaattgttattatttgaaatagaagttcttatttgaagcatttcgtatgttttaattatttgttgtaggatgtcaagtgccagggctgcttcaacatgtaagtaggatctttctttttatttgttttaatgtgattataatgataatttatgtaagtgacgttaatttggttatgtgcctttttttttaatttggatgcagaacaactgtgtttagccactcccagacagttgtagtatgtggtaactgccagactgtgttgtgccaaccaacgggtggacgggcgagggtaaccgaaaggtgctcttttatgaagaatggagattgaatg

SEQ ID NO: 17349 - DNA, 451 bp, Glycine max
tgcttaagaagattgctaaagaagctagagcttatctactacatacttctctaatagctaagctcacctccttgagatgagaagctagaacttagctacacaccccctataatagctaagctcacccccatgacaaaaaacatgaaaatacacaaaaaagtccttactacaaagacaactcataatgccccgaaatacaaggctaaaaccctatactactagaatgaccaaaatacaaggcccaaacgaaggaaaaacctattctaatatttacaaagataagcgggatcatacttagcccatgggctcgaaatctaccctaaggctcatgagaaccctagggcctacccttggatctccagcccaatctacttggagtcttctacccaatgcccttgcacgataggattgcatcagatgattaggatattttatgcaaaacagggcatgc

SEQ ID NO: 17350 - DNA, 382 bp, Glycine max
tagcttcaatggctcaatgagcaatgggaaatgatagtcaatcaacaaataaagatacccttttctataagaggctattgtgataaagatttatatgatatgatccctatggaagcagggcacattttgtttggtagaccatggaaatttgacaagaaagcaatccataatggtctcaccaatgaaataaccctcacctatggaagcaaaaagttcaaacttgttccctttacaccttcacaactggccagggatcaagtacaaataaaattcaaaagggatgagcaaaagaatagaaaaagataagaagaacaacctttaatggttaaggaggagtgtaaggaggtaagtgtctactctaagagattagctaagaaggaaa

SEQ ID NO: 17351 - DNA, 440 bp, Glycine max
  unsure (1)..(440): unsure at all n locations
ttgtggcaaacttcactgcagaattcataagcttggtatgtgctaaattccctgtcaaggtacctcaaatagtggacagaaaatttttcttcactgtggggctagggactaatccttgccccanaaacacaacatgccaagggccaagtaataacaccaaatttgcagcctcagtgaacaacatttcttttgcacttccatcatctgtttccatcatgcaggcatactattctagccaggccaatggggttttcaagactgattttcctgccacccctttgaaccctttcaactacacaggaacacctccaaacaacacaatggtcaccaatgacacanagctggtggtgctcaagtttaacaccagtgtggagttggtgctgcaggacactagtattcttggagctgagagccatcccttgcatcttcatggttatgac

SEQ ID NO: 17352 - DNA, 436 bp, Glycine max
  unsure (1)..(436): unsure at all n locations
gaaattaaagatattcaacatggatgatcaagattgtttctagagtcttaggaagggtatattacataggaagggaattcctatttgaagtatcaaaaggtttggccaagaaatttaagttaaaaagctttattcaagagatttactctctggtcatcaattaccagaggatgtaatcgattaccactggccaaagatgatttacaacagctattaaaatttgaattcaaaatttgcactgtgtaatcgattacacatatatggtaatcgattaccagcagtttctgaacattgtaattcaaatgttagagcttgtaatcgattacacacatactgtgatcgattaccagaggagtttttcagagaacattctcaacagtcacatcttgttatctatttcttaaatggccatcanaggcctatatatatgtgtgac

SEQ ID NO: 17353 - DNA, 393 bp, Glycine max
agcttgttcaggaattatttgtatgggttggatgttgaattctggttgttcctggtgtggagatgatggtacatgtttgtgaaccagaagcggaagtttcttttggtgaggaagccatggaaaaacagagcgtttggaatgatttcgtaaatctcagaaaactattgggaaatgctggtgaaaacacgaatgccacgaaaatataaatttgaatgaggaatgtagagggccgtgtgaagcaacggtcgaatttgccttggttcagtagtgaacgtgctattaatgttaagtgattcgtttgggcacgttcagatatcagtagttgctacaattcctctagcagacaaatgcccagcttgcccctcagtttttcaaactgatttgcatccaaag

SEQ ID NO: 17354 - DNA, 385 bp, Glycine max
tgctttgaacatgttgcaagcaaacttgaacagcatcatgtactctcacaaagtaccattctttgcctatcaactccaccagaccggatctagacaaggtaagcagaacttctggacttggattggatattgcaatctgcaagaagaataagctcaagttggttggtggagacattgcaaacctgtggcgattatttcaagaattctaacagtagttgaaactttggtatcttattctacctgaatgtcccgtaatttgtactcctgatacaagtctttcaaagcctgaacagcactagaatctatgtaggtcacagctgcagtcatcacaagtcataaccacatgattagaagaaagtagaattatcatcattatccctttcat

SEQ ID NO: 17355 - DNA, 387 bp, Glycine max
tgcttttaggttgactagttcattgacattcagcaattgaaggagatatacatctatttcaagaaaagaaaaatcataaaagacagtgtgcattaaaaaaaatcaccttcattggctgcatcaacttgaacaaccatgcatgttctgaagaaggaagaactggcggaatcttcattttcttccagtccatgctaactaaatcagttgatgctgaataatccctgataagcacatcaatattttgtactctattcttaacattccttttcttctgagtttgatcaatcacctcctcctttgcattatttttcaatgcaatcctcttatcaagactcaatcgtttggccttcttattctggtttctaaccacattatcacaatttccat

SEQ ID NO: 17356 - DNA, 448 bp, Glycine max
  unsure (1)..(448): unsure at all n locations
ntaattganattaagttatctaattatgtaagttcttgatttaatccctattttctctccccctttggcatcaacaaaaagccaaagtgcataacacatataaaacatacataaatgactaatcatacaagacatttattgaaaaatctaaaccgatcatgaagcaaaaaacatgaaatatccaaattaaaatataaaccacataatcatataacataatttatagatgttcagttatagtaagcaaatagtaaaagaaatactaaatgttcaaatgtcataatattacagatcatttggataagtcactagcatctagcagtcctaattctcttctaatgttgaagaaggaatctttatttagtgtctatgagaagatgtctgcaagttgatttttagtatctacaaattcataacaacatcacctgttagaatatgatctctaata

SEQ ID NO: 17357 - DNA, 391 bp, Glycine max
agctttcttaagaagattcctaaaaaagctagagcttagctacacatacctttctaatagctaagctcacctccttgagatgagaagctagatcttagctacacaccccctataatggctaagctcacccccatgacaaaaaacatgaaaatacaaaaaaaattccttactacaaagactactcaaaatgccccgaaatacaaggctaaaaccctatactactagaatgaccaaaatacaaggcccagacgaaggaaaaacctattctaatatttacaaagataagcgggctcatacttagcccatgggctcgaaatctaccctaaggctcatgagaaccctagggccttcccttggatctctagcccaatctacttggagtcttctaccc

SEQ ID NO: 17358 - DNA, 424 bp, Glycine max
tgttgaaggagaatagataaggagtttatgaagaggttgtggtcacggcagtgtttgggaaggaagaactccaagacaaaatcaaaatggggataagaagaagtccttagaggaatagcgacggcagaatgcaagtcaaagatgttggcgtggtgagagagaggatattcggccttggtgaaggcggttatgtccatagcaaaacagggcttggcagttgtgaaggccgtaccgacaattccttgtccgcggaaaaggtggtgctgagagcatgcctcctggaaccccaatagctggggctgaccatcccccacaaaacacgctctgtccacaatcgacacatagttgttctcatcccttgaatgcccacaatccacacatagttgttggacgcaaggagcccatgtcagatgccaaggcacat

SEQ ID NO: 17359 - DNA, 453 bp, Glycine max
  unsure (1)..(453): unsure at all n locations
tctttgagaaaacttccttgagatgttagagcttatctacacacacccctctcatgactaagctgacctccttgagaagctctcttaagaagattcctaaagaagctagagcttagctacacacacctttctaatagctaagctcacctccttgagatgagaagctagagcttagctacacaccccctataatagctaagctcacccctatgccaaaaaaacatgaaaaaaacaaaaaaagtcgttgctacaaagactactcaaaatgccccgaaatacaaggctaaaaccctatactactagaatggccaaaatacaaggcccaaacgaaggagaaacctattctaatatttacaaagataagcgggctcatacttggtccatgggcttgaaatctaccctaaagctcatgagatccctanggccttcccttggatctttgcgccaatctac

SEQ ID NO: 17360 - DNA, 380 bp, Glycine max
agcttaataaatcaatctatggcttgaagcaagcctcctgccaatggtatttgaagtttcatgatgtcgtcacttcatttggctttgaaaagaacatcatggatcaatgtatataccaaaaggtcagtgggagtaagatttttttcttgtgttatacgtggatgacattttgcttgcaactaatgataagggtttgctatatgaggtgaaataatttctctcaaagaactttgatatgaaggatatgggaaatgcattttatgtcattggcattaagatccatagggaaagatctcgaggaattttgggtttgtctcaagagacttatattaacaaatttttagagagaattaacatgaaagatgttcaccaagtgtagc

SEQ ID NO: 17361 - DNA, 396 bp, Glycine max
tgtctatgcaagcttataatatatcgatacgctcgaaattaaacattggaaactctcgggaaattcaaatagtcataacttttcacacggatgtccgattcgggcgcataatatgtcgagaggctcgaaattgaacaacgcaagctcttgagaaattagactggtataacttttcacacggaagctctcgtgaagtccatatggtcataacttttcacactgaggtccgattgatgtttataatatatcgatacactcgaaattaaacatcggaaactctgtagaaattcaaatggtcatagcgtttcacacggatgtgcgactcgggcgcatgatatgtcgagaggctcgaaattgacaaacggaagctctcgagaaattcaaatggccataact

SEQ ID NO: 17362 - DNA, 467 bp, Glycine max
tgaatcggacatccgtgtgaaaagttatgaccatttttatttctcaagagcttccgttgttcagtttcgatcctctcgacatattatgcacccgaatcggacatctgtgtgaaaagtcatgatcatttgaatttctcgagagtttgcgatgtttaatttcgagcgtatcgatatattataaccctgaatcggacctcagtctgaaaagttatgaccatttgaatttgacgagagcttccgttgttcaatttcgaatatcactgtatgtgatgcgcctaaattggacattcgagttaaatgttatgaccatttgaatttctcaagagcttccgctgttcaattctgagcgtctcgatatgtgatttgcctgaatcggacatccgtgtgaaaagtatgtccatttgaatctctcaagtgcttccgttgatcaatttcgagcgtctcgacatattatgcgcccgaatcgg

SEQ ID NO: 17363 - DNA, 380 bp, Glycine max
agctttcaaacccatgtaatctcctaatatctcccacactttgtgggttgggccattcttggatggccttgattttctcagggtccacttggaccccatttctaccaactacaaaacctaagaaaactatattatctacacaaaaggtacacttctctatatttgcatagaaggtgtttttcctaagaacagaaagaacttgtctgagatgtactaagtgatcatctaggctcctactatacactaaaatatcatcaaaataaacaactacaaatctacctatgaaatcccttaagacatgatgcataagcctcataaaggtgcttggtgcattagtgagccctaaaagcatcactatccattcatataaaccaaacttg

SEQ ID NO: 17364 - DNA, 396 bp, Glycine max
actccgctggatgcaacatgggagagggaatttatcacgagttgatgcgctccatgaaaggcaggatcggatggataatagagaacacactgaagataacaggaggagaagagggaatgatggtgttcctaaacaaaaccgaattgatggtattaaactcaacattcctccatttaaaggaaagaatgatccggaggcctacttggagtgggagatgaaaatagagcatgttttctcatgcaacaactatgatgaggaccagaatgtgaatcttgccgccacggatttttccgactatgctcttgtgtggtggaacaagctaccaaacgagagagcaagaaatgaagagccaatggttgatacatggacggagatgataaatatcatgacgaagcg

SEQ ID NO: 17365 - DNA, 402 bp, Glycine max
tgaaggtgcgtaccctcaccattttatatagaaatctctggtaatgtgtctactattattatgatcatctctttatccgtcattggaggtgccacttgagcttgctaggtctctccacctttgggcttattatttgaaagattcgtgcccctttttgtacatgttctgtagttgtatcctatccagagccatatcagaattgtactgatattgcctaacgatggcaaacattaggtctttccaagaatggattcaggaaggttccaagttagtttaccaggtaccccagtaagactttcttggaagaaatgtatcagcagttcctcatcttttgcgtatgcccccatcttccaacaatacacctttagatggttcttggggcaagtagtccccttgtacttg

SEQ ID NO: 17366 - DNA, 418 bp, Glycine max
agctcgaatcggacatccgtgtgaaaagttatgagcatttgtttttctcaagagcttccattgttcaatttcgagcatctcgatatattataagcctgaatcggacattcgtgtgaaaagttatgaccatttgaatttctcaagaggttccgttgttcaatttcgagcctctcgacatcttatacgcccgaatcgaacatccgtgtgaaaagttatgaccatttgaatttgcaagagtttccgatgtttaatttcgagcgtatcgatatattataagcctgaaacggacattcgtataaaaagttatgaccatttgaatttctcaagagcttccgctgttcatttcgagccttcgacatattatgcgcccgaatcggacatccgtgtgaaaagatatgaccatttgaatttcgcgaga

SEQ ID NO: 17367 - DNA, 383 bp, Glycine max
  unsure (1)..(383): unsure at all n locations
atcttcaacttcaattatgagttgagcaggtaaaaaagattcgtcttcaaactcttagaggtgactctgagtgtttgtttatggaggagtccgagtcaatttatgattatttttctcgagtattggccgtagtcaatcaacttaaaagaaatggtgaagatgttgatgaggtgaaggttatggaaaaaatacttcgaactttaaatccaagttttgacttcattgttaccaacattgaagaaaacaaggatttaaagaccatgactattgagcaactcatgggttccttacaagcacacgaagaanaacaaaagagaaaaattaaacaaaaggaggctacggagcaactactacaactcaacgtanaggaagcaaactatgcc

SEQ ID NO: 17368 - DNA, 427 bp, Glycine max
  unsure (1)..(427): unsure at all n locations
agctcncaacttacttccaatgaacaaccttcttgttacattatttgaaatctttgaaggtaatttaattgtcaattacaaaagtacataaaggtcctcaattttggtggttgctctctctttgatgattcactcaatttggagtgcttcttagttcaatagcttttaaggtggttggcccctcgcttcttgattgaaattcttcaatggatgacatcaatcctcctttccaattccctatatggaaactcacaaacaagaaaacaaagagacaaacaataaccaaagaccaaaaaattaaatgaaagctaaaccaataaatttttaacaagaaaaattttcaaggattattcgacaattaaagcaatgaaaaggacatagaagcaagctaggactcaaagagaaacttagaatgactctagagtag

SEQ ID NO: 17369 - DNA, 351 bp, Glycine max
  unsure (1)..(351): unsure at all n locations
agttcntgttgtcnncaagcaaatgttggaagagggtgtaacgcctagtgctccaacttttgtgagtgttatagatgcctgtgcacaggatgcgcttatacgaagaggtaaacaggtgcatggtcaaattattaaaggtgacaaaagtggtaacttgtttaatgtgtatgtgtgtaatgctttgattgacatgtatgctaagtgtggagatatgaaatcagctgaaaatttgttcgagatggctcctatgagggatgtggtaacttggaacacattgattactgggtttgcacaaaatggccatggagaggagtcactggctgttttcacaaagatgatagaagccaaagt

SEQ ID NO: 17370 - DNA, 414 bp, Glycine max
  unsure (1)..(414): unsure at all n locations
ctaagcttgtggaagccttgagcaacaaactgttgggtttttggcaagctttgaagacccagccatcgtaaaaaaaaaaggtatgatttatcattgttttgtttgcagtagtggccatgctctaacgagtgcgtaccaaagttatcttcagttgatctaacatgttttgtctgtggagcattgattcttcaagggaatgaatggtggtggacccttgaacgtagtcaagaagggaaggttgatctcgacaatacaaagcacgaaagggctaatgttgatggccgaatggtaggaagaattgtaccaatatttgacgaggtgaaggtacttgtaccaagatcatggatgttctccaacaaaacatctcaattaaacctcanaactgcgattagtgacttcagtttggttgtctaa

SEQ ID NO: 17371 - DNA, 235 bp, Glycine max
  unsure (1)..(235): unsure at all n locations
tggcnttgaaataaaaatntgtaggtgtngcaagggtttgtggttagtgcttatntgntgagaaanatatagaactttgntnttatatgcagcaacctgcagcaattgaccagcctgaagcttactgctgccatatttacaatagacctcctcaacctcagcagcaaaatcaaccacagcagaaccattgtgacctttcccgcgacagatacaaccctggatggacgaatcaccc

SEQ ID NO: 17372 - DNA, 410 bp, Glycine max
  unsure (1)..(410): unsure at all n locations
agcaattcttagagaatcggcatgatatgcgctctaaatacaatatccgngcnattttagacgcngcatgtaacttgatggctaaggtgccaatgacaagaaataaaatgattttgctcaacattcaaaatgatgtggcacaatatctcgagatgtgctacaaggatgcatctcggctttggcatattcaatttgggcatcttaattttggaggattatagtttctctccaagatagaaatagtgagaggattgtcttgcaatagtcaccttgatcaagtgtgtgaaggatgtctacttggcaagcaatttaagaaaaacatttcaaaggagtctaactcaagagctaaaaaattgttggaacttatgcatatagatgtgtgcagttctatccagccgtagtcacatgga

SEQ ID NO: 17373 - DNA, 383 bp, Glycine max
  unsure (1)..(383): unsure at all n locations
agtttctaatgngnncataatgattgcagaagcatacttagttctcccgaaatcctcctgcaaaaactgcagcataatgtcttgtgggtctgtggttctgaagaagcttggtaaatctcaacaaaatttctttgacgccaggtaaccaatcgatggcagtctccaaatagccatttgttatatcagtcgactctgcaagcataggcatgcaataaattgagtgcatttatgaattcatgttatatggaaaatcacgttgcaacatcagttagtataatatttatagatatcgtctttaatttcatgttaagaaattgattttgaatacacggtcaattttgagttcaacaaaaaaaaaacatcaaaaaataaattactttact

SEQ ID NO: 17374 - DNA, 378 bp, Glycine max
  unsure (1)..(378): unsure at all n locations
agcttgtgggatngagtttagtttcaaaatccgtgcctcctccaaagcgaacagggtggattggaagaggaaattgtcacatggaaaaggccaccatagatctgaagcgcgatggaaaggatctgaacggtcgcgttcatcaactcccctgctgcgtcaagcacgactgtcccgcctccgtttcccactatttcaaaccctaacacaaatgtgttggggaagacgagggtttaccgttacaagaggctcattttagaggcaggttactccaaggaacaacactccctcttccgcacggttactctggtacgctatgcctctctcaacacacgcatgtcagtgaatgttatctgctcctatgtatatgtgtgtgtatgc

SEQ ID NO: 17375 - DNA, 428 bp, Glycine max
  unsure (1)..(428): unsure at all n locations
catctaagcttcaacgatgaaacaaggctcacttacagtgactgagtttttcactcgtctacgtgtaatttgggatgagattgagaactttagacccgatcccatctgttcctgtaatatcaggtgttcctgcaacgcattcaccattatcgcgcaacggaagctcgaggatagagccatgcagttcctacgaggcctgaaggaacaatatgctaatattcgttctcatgttctcctcgtggatcccatacccgctatctccaaaatattctcctatgtagctcaacaggaaaggcaactactgggtaacaccgaaccaggtattaacttcgaacccaaagatatctccattaacgctgctaagaccgtntgcgatttctgtggacgcattggtcatgtggaaagcgcgtgttataagaagcatggag

SEQ ID NO: 17376 - DNA, 375 bp, Glycine max
agcttgcacttctcaaagaagtcaacaaggagatcagcagcacggtcaccatggtaagggtcaatgtggaagccagacttgccatgcacaatgatctcagcaggaccaccattgcatgtggcgaatgttggcaacccacaagtcatggcctcaaccactgtcaaaccaaaagcctcgtatatagccggctgcacgaaagctcccttggtgtcgcagatcacacggtacagctctccgttcctcacacggttcatctgagatgaaatccatctgaattgcccgttcaacttgtaggtctcgatcaggccgtacatcttcttcatctcggccttctcttccaagtccttcgactccttcctcctgtctccggcaaca

SEQ ID NO: 17377 - DNA, 346 bp, Glycine max
  unsure (1)..(346): unsure at all n locations
aactaacgctgctctaatccccgcaaaaagacgatcattccagctctaccagcgaattcttcaaatgcaagtaaccttttcccagtgtcccccacaattaattcatagtcatataacgatgccctctcagctagaatctaagattatggaaaataccaaaagcgagttagaagttgcaagaaaccaccacaaaatcgaagtcacatttcaagcatttaagtattatatatacaagtatgtaacattaacacaccttatccagcaaaggcatgttatctttctgtgctntatgtgtatgtgagaggaaagcataagctctatctggtaatatcatctacagctgcac

SEQ ID NO: 17378 - DNA, 375 bp, Glycine max
tctagtcttcttcacatagtccgcctttgcttgaccttctttatgcttaaaaacagaaacattaggcataggcaaaagatcaagaggagttagtgggttaaaaccataaacaacttcaaaaggagaacaattagtggtgctatgaacagctctattgtaagcaaattcaacatggggtaaacaagcttcccaagtttttaagttcttcctcaaaactgtcctaagcaaagttcccaaagtcctattaacaacttccgtttgcccatcggtttgtgggtgacaagtggttgaaaataacaatttagtgcccaacttgctccacaaagtcctccaaaaatggcttaagaacttagagtccctatcactaacaatgct

SEQ ID NO: 17379 - DNA, 365 bp, Glycine max
gtctcacgattgtcatgtgctcatgcaacaattgatatccttggctttacgagacatcctgccgatacaaagacaggttaaccatatctcgcctgcgctaattgttccatgctatatgtagcacactcattgatcctgtgaagtctgatgacctgtacaatgaggccgcagccatactgggccagttggacatgatattcacccctatgctttctttgacatcatgattaactcgatagagcatctgtgcagagaaaccaaacgatgagggcctgtttatctacagaggatgtacccggtagaacgatacatgaagagcgtaaaagggtacaccattaatctatatcgactacacacatccattg

SEQ ID NO: 17380 - DNA, 384 bp, Glycine max
agctttacacgtatcatttaagtgtatggaccatatcgtagccaaggtgctcatcgataatggttccagtttaaacgtgatgcctaagagcactttggagaaattaccattcaatgcctcccacctaaagccgagttcaatggtggttcgtgccttcgacggcacccgccgagaggttaggggacagatcgacctcccagtacagataggccctcacagatgccaagttaccttccaaataatggacattaaccccccctacagctgtctgttggggtgtccgtggatccactcagtgggagttgttccctctacacaccaccaaaagttgaaattcgtagtggaagggcatctggtcatcgtatcaggcgaggaagacatctt

SEQ ID NO: 17381 - DNA, 386 bp, Glycine max
  unsure (1)..(386): unsure at all n locations
agctttgtgaagctcctgttttatctttacccgattttactcaaccatttgaagttgaatgtgatgctagtggagttggcattggggctgttttgatacaaaacaaaaggcctatagcttatttctcggagaaattgggaggagccagattgaactattgcacctatgacaaagagttctatgccattgtgagagctcttgatcattggaatcattatttgcgttctaatcactttatattgcattcagatcatgagtcattgaagtatatcaatgggcagcagaagttgagtccaaggcatgctaaatgggttgaatttcttcaatcttttaatttctcttcanaatacaaggatggtaagagtaatgtggtggctgatgcactt

SEQ ID NO: 17382 - DNA, 419 bp, Glycine max
tcgaccaaaatcaaatgataataactttttactcggttgtccgaatgaataccgtattatatcgagaggttcgaaattgacaacggaggctctgagaaaatccaaacgacaataactttttactcggatgtcagattgtgtcccatagtatatcgagatgctcgtaattgaaaccggatgctcgtagcaaattcaaacgacaataactttttactcggatgtccgaatgaatcccataatatatcgagacgctcgtaattgaaaacagaagctctgagcatattctaatgacaataactttttactcggatgtcagattgagtcccgtaatatatcgagacactcgtaattgaaaacagaagctctgagaaatatctaacgacaattactttttactcggatgtctgaatgaatcccgt

SEQ ID NO: 17383 - DNA, 376 bp, Glycine max
agcttgttatcaaagtacatgaactatgctagtagaattcattttcaggcagcaaaaagagctcttagatatgttaaaggcacaattgattttggaataagataccattatgttaaaaacttcagacttcatggttattctgatagtgattgggctggatgtgctgatgatatgagaagtacttcaggttatctttttagctttggttctggaattttctcattgtattcaaagaaacaggaagtaatagctcaatccatagcagaagcagaatatgttgttgcaactgctgcttgtaatcaagctctctagatcagaaagcttatgacagaattgcatatggaacaacaagacaatacgcaaatatttgtcgata

SEQ ID NO: 17384 - DNA, 414 bp, Glycine max
  unsure (1)..(414): unsure at all n locations
tccgcttattagtgaacaattccttctttaatttagtatatcttggaattcgctntattgcatccagcagaggtatgtttacctctacttttctaaatgtttcaaagatctctttctatgcctcttccatttttttgttggaaattgctcttggagggaatggaagagggatatgctgcttctctttagattcacctggatagaaattgttaggtaacttactctttaaatttttgtcatcatctttttctggagtagagtgaggttgggcaggttcattggtggatgaggaagatgctactggttgaggtccttgacactgctttcctgacctcaatgtaatgacactcacattnttgggattctggacagattgagaacgtaatctatcagaattctgggactgttgttgat

SEQ ID NO: 17385 - DNA, 376 bp, Glycine max
ttctgctttatatggttacaaaccaatcaacaacaatcccttgatggcaggtgatacaacagttgaagcagtagactacaccatcaggactcgagaggaaattgcaacaattttacacaagaatctcaggaaagcacaggagaggatgcagttgtatgctaacaagaataggacaaacaaagaatttgcagtgggagattgggtatatttgaagttacatccatttaaacaacagtcaatacctaactcagcgtttcacaaattagttgcacgattttatggtccttacagaattgtagagagagtggggaaggtggcatacaagctagacttaccagctcaagctcgcatacataatgtattccacatttccttg

SEQ ID NO: 17386 - DNA, 424 bp, Glycine max
  unsure (1)..(424): unsure at all n locations
ntntgaaaagacacatttcttcaaaccattttgaaaaggcacaaaggacctatatatatgtgtgtttgacttcgaaaagcaagaaagagatattctaagagaacttcattgtcaaatgctctctcaacaactcttgggcaaacacttgcaaatctattgagagttcatctaggaacatcaaattgtattatccactctaaaggagagaaatctttttgttcatctcagaaaatcaattgtaatcaatagactggttgtctcttgaattgtgagtttcctgaacacaagggaaagggattccttaggtgttcagatgttgtaaaaaggtttttacaaagttagtgaaaatctcaagtgggttgcttgaggactggacgtangcacgggaagtaaccgaaccagtataaattgagtttgcatttct

SEQ ID NO: 17387 - DNA, 427 bp, Glycine max
agctctctaatccatataaaccataccatgctcttaacatgtaatattgtcttcagccatcatttggagagctagtgcaaatctttctctatttactaaatcatctatgtaacatctgtaacaatttacggacgtataatgctgccacttaacatgacatctgatgatgaaccaatttacgtaaatgctaagcagtaccatggaatcattagacgtcggcagtcccgtgccaaagctgtacttgatcacaaattgactaaacgtcgcaaggtatgattcctcatatgggggtatcccacatattttttcactcatattaatgaacattatagtctcagcttcactggccttgaaaaaaagtaggtatgatagggtggtctggcctaactcttgtagaaagtgatagattatctctttcaagcaacgc

SEQ ID NO: 17388 - DNA, 374 bp, Glycine max
agctattttattgataggcccaccagtaattgctgcaccagctagtaaataactggcacttgaagcatcaccttcaacaaaagcattgccaggagacctaataggaaacatgagtcttaatttcattgcattttggatactaaaagtgatgtaacactaaaacatagaaacctacttgtacttttgacctccatggaccaagaacctatcccaattaccactgtgttccacagaaactccaaaacgctccatcaacttcagagtcatttcaacatatggaacagaaatcagtttatcaacaatctcaatttccacatcaccaagagctaaaggagctgccataagcaaagcagtcaagtattgactgctaactg

SEQ ID NO: 17389 - DNA, 407 bp, Glycine max
gcccttctgatccgaagaggctgacttttgcggatttcgtcgagagcttatttgacctcatcaacgtgctccatcatctcttcgaactcctgcgcctccatcagcgtccacgtagtcggaatccccttcggcggcgctcgcttcgccctcttcgactcccttgctacgcctgcgccggagccgtatccgaagtcgccgatctccgaatcgaataatgaccaatgctgcgaggaccattcctgggatgagaacgctaatccgcagaaagggtcgtcaatctcctgagataacgaatccctgactggcttcgaaacgtcgtcgattatagaggacgatcccgattacgtacccgagaggggtcctttgctgctggcgtaggcgcggacgatcattttacatggagatcg

SEQ ID NO: 17390 - DNA, 406 bp, Glycine max
tgggtctagacatgtctatagcattctcatgagctagtttatataaggagttagaaattttgtttgtctctctataaatatgagaaccttgttggattaaaataaaattggaaaataaataaagaactttaacctatatactatgtgatcaatctataaaatgataatcataacatttcaattatataatcattaagaaataagggtggacatgggttaggttgctcgggtttaaaaaatatttagatttaaccaaattaatattaatcagaaaaaaattatatagaattaaacaaacaaattatatattatagaatcatacaacataaaaaagtatattttttctaaaatggtataggcttatgttggtttgggtctccgtacctagatctgataattgaattga

SEQ ID NO: 17391 - DNA, 379 bp, Glycine max
  unsure (1)..(379): unsure at all n locations
taagagcaatntctttttttnttttatcattnnctttgtgtngatnnaatctcaacagttccatttcgtattcctgtaactttccaaatagtgtagcaagagacatgttagttaaatctcgtgactcagtaatggttgttaccttaggttgccattctctacttaaacatcttaatactttatttatgatatcttcatttggaaaaattttccctaaagatgcaagatgatttattatatgtgtaaacctcttttgcatgtcttgtatactttcatttgaattcattctaaataattcatacttatgagttaatggatttatcctagatattttcacatctgttgtgccctcatgtgttacttgtagggtatcccacat

SEQ ID NO: 17392 - DNA, 426 bp, Glycine max
  unsure (1)..(426): unsure at all n locations
ctccaaaaagaattgcaagagtcatgttagcgagatctttcgattatgcaatngtagttacctttggttgtcattgcctgcttaaacatctcaacactttgttaatgaaatcttcattatgaaatattttttctaatgatgcaagatgattaactatatgtgtaaatctcttttggatatcttgtatggtctcattttgattcattctaaacagttcatatttatgtgtgagagtatttattctagatctcttgacatcaattatgccttcatgggttacttgtagtgtatcccacatttcttttgcatttttacaatttgaaactctaaaatattcatccatgcctaatgcagaggtaattatatttttgacctttanattatattgaacccttcttctttcatcttcatcccattgttctctag

SEQ ID NO: 17393 - DNA, 398 bp, Glycine max
atgagattctttcttggcattgtatttttgcagattccagaagggattttcttgtgtcaaagaaaatatgccactgatatcttgaagaagtttgcaatgtctgagagcaaacatgtgaaaagtccaattgttccaggttttaaaattaatagagatgttgatggtgcagctgtggatgacacttatttcaagcaaattgttggaagcttaatgtatcttacaactacaaggccagatataatgtatagtgtgagcttaattagcagatataggtcaaaaccaatagagttgcatttacaagctgctaaaagaatattaaggtatttaaacggaaccactagctacgggatattctacaagaagggaggggcagaagacttgtttgctttcacggattc

SEQ ID NO: 17394 - DNA, 424 bp, Glycine max
tgtcgggttcaacttcaattaagtgctcggggcatcctatggactgtgcgaaaaggctcaggtcatcaaatactacgcatcttttaaagcacaaagcgaggatcagaacctcaaccctacgttcttttaaaagactgcgatgggaaaattacagaggacaggaatccctgggggaaaccaagaagaacacacaaaaataaaaacatgcagcgacttccttaattgccccagatctcaagcatagtatcgcttgacaacgtcagagtttacgggtgaaggtagctccttgtcatccatgttggcgagcaccagggcccctccggagaaagccctttttacaacgaaaggcccttcgtagttcgggacccactttcctttgttgtctttcagagcttgggagactttcttcagcaccaagtcccct

SEQ ID NO: 17395 - DNA, 372 bp, Glycine max
  unsure (1)..(372): unsure at all n locations
agtttcttattctcagctgatgaagatgaattcgtggctacttcatgcactcctctaatgacaatagcatcatttctggcactaaattgctgggagttggaagccatcttctcaattaaatttttggctttagcaggggtcatgtctccaagggctccaccactggcagcatctatcatacttctctccatgttactgagtccttcataaaaatattggaggagaagctgctcagaaatctggtggtgaaggcaactggcacatagtttttaaatctctcccaatattcatattggctctctccactgagttgcctaatgcctganatatcatttctaatggccgtggtcctggaagcagggaaaatttttt

SEQ ID NO: 17396 - DNA, 376 bp, Glycine max
agctttcctgttggatcaagtggcctcagaataattaagaagggggggttgaattaattattaacgtgtcttgactaattaaaaatctatcattcttaatgttactagattcaattaggcttttactactaagtcaagaaagtaaagaacagaaatagaaacttaaccaaaagtaaaagcgataattaaaagtacgcagtggaaattaaagagtgtagggaagaagaagacaaacacaagatttatactagtttgaccacaaaccgtgcctacatccagtccccaagcaacctgcggttcttgagatttctttcaaccttgtaaaatcctttacaagccaaagatccacatgggatgtaccctcccttgttgatgc

SEQ ID NO: 17397 - DNA, 426 bp, Glycine max
  unsure (1)..(426): unsure at all n locations
gcgaactatgaaactcaagctgagtctgcatgcatcttatngattgttaatgtattcctgttngttatttctacttaattctgcttaacaaaattaagtgtttgttagcatgacgaatagtagatcgagtcaaaagtcatacactaacatcatctaattacacatgtaattagttattgttgttgaagtcacttcttttatataaagtgtctgtgtctatatttttattacacaaacttcagtatttagtttttttaattttaaatgttatttgaatttctttacttttacttaatctcctattaaactccattatttttaaaattatttaaatatctaaacaaaaattagcctaaaacactaaattcttctcccagaattatcatccaaataaaactctcattattttaaaaaaaaatacccact

SEQ ID NO: 17398 - DNA, 371 bp, Glycine max
agcttcttggaagaatcctttcccactttttccttccccttggcctttgaagacaaggccttaccatccttctttttcttttggttttctagtttttcttcctcatccctcttatctttcatagttatttgatctttggctacctgtgaaggtgtttaaagatgcaaaacaaactctgttccaagatgggtgagggttatctcattagttaggccattatagattattttcctatgatattgccatggcctacctaagagaaggtgtcctgcctccataagaactacatcacaaatcacttcatccttatatgttccaatggagaacggcactttcactctgtgattgactatcatctccccttgctcatt

SEQ ID NO: 17399 - DNA, 382 bp, Glycine max
  unsure (1)..(382): unsure at all n locations
acctagcaagactcacgctggaatcatctacccgatttctgacggttattgggcgattccagaccaaatggctcctaagatgataggactgacagagaccaagaatgaagaggatgaactgatgcccacaacagagcagaacaattggcgagtatgcattgggcataggaggctgaattcagcaaccacaatagatcattttcccttgccttccatggatcaaaggctngaccgcttggcaggtcaatctcattactgctttctcgatggattttatggctgttggcaaattcatattgctcttgacgatctnagaaagaccacattcacctgtcccttaggcactattgcctatatgaggatgccctacaacctatgcaat

SEQ ID NO: 17400 - DNA, 337 bp, Glycine max
  unsure (1)..(337): unsure at all n locations
agcttgtagattctaagcaccttgtgagcatgggaacttatacggcttgactggctcaaagccaatgatcatactaccaacgacactatggatacatcgcatcaaatggcttcccataggtcttgcagtggataatgacagggtttacaagcataacctttgctaatcctatagccttctgcaatgcataatcacttggtgcactgaatacatgttctatgtcagtgccaataccaagggcagggtggtcaccaacactggggactgcatggctcaccatggtcagcatttctggagcgttttactgtatgcaagtgancttgcatgttctctcatc

SEQ ID NO: 17401 - DNA, 409 bp, Glycine max
agcttatgctgcttatatttacaatagacctcctcaaactcagcagcaaaatcaaccacaacagagcaattatgtcctctccagcaacagatacaaccctggatggaggaatcaccctaacctcagatggtccagccctaagcaacaacaacagcagcctgctccttccttccaaaatgctgttggcccaagcagaccatacattcctccaccaatccaacaacagcaacaaccccagaaacagccaacagttgaggcccctccacaaccttccctcgaagaacttgtgaggcaaatgactatgcagaacatgcagtttcagcaagagaccagagcctccattcagagcttaaccaatcagatgggacaattggctacccaattgaatcaacaacagtcccagaattct

SEQ ID NO: 17402 - DNA, 357 bp, Glycine max
agctttatgcatcattcggagaggctaacgagacaacgagatgatgcgctccatgagatgttgcatcaaatggagaatagagatcataatgaacaggaaaggaagagaaaagggaatgatggtgttcctagacaaaaccgaattgatggtattaaactcaacattcctccatttaaaggaaagaatgatccggaggcctacttggagtgggagatgaaaatagagcatgttctctcatgcaacaactatgaggaggaccaaaaggtgaagcttgccgccacggaagtttccgactatgctcttgtgtggtggaacaagctacaaaaggagagagcaagaaacgaagagccatggttg

SEQ ID NO: 17403 - DNA, 423 bp, Glycine max
  unsure (1)..(423): unsure at all n locations
tcaagaatcaagatcaagattcaagactcaagattcatttatttttatattatttaatcaagataagtatgaaaaagttttttcaaaaactgagtagcacatggatttttctcaaaacctttttaccaaagagtttttactctctggtaatcgattaccagactattgtaatcgataaccagtagcaaaatggatttgaaaaagtttttcaactaaatttacaacgttccaattgatttcaaaaagctgtaatcgattacaatgttttggtaatcgattaccagtgcctttgaaagttgaaattcaaattcaaatgtgaagagtcacatcctttcacataaaatntttgtgtaatcgattacactgatttggtaatcgattacttgtgattgtttatgattaaatcaaaagatgtaactcttc

SEQ ID NO: 17404 - DNA, 431 bp, Glycine max
taaaggagaaagaagatagaggaaactaaaattagtagtgattgttaattatcttacaagagagttggttattatagttttatataattggttgcaagaataactaacttgtaactaactaaactatctcttgtaacaaagtgatcaatctgaattaaccatgatcaaactatatctatgttaagatcccccttcaagctaggaatggatattggatattcctaacttggaatacaaaaattgaaaagaatcaggcagcatggccttagtgtatatgtctgcaagctcattagcaaaggtgataggaagtaatttcacaattcttttatgcatcttctcccgaactagatgacaatcaatcttaatatgttgtgttctctcatgaaaaacatgatatgttgctatatgaagggcagatcgattatcacaat

SEQ ID NO: 17405 - DNA, 317 bp, Glycine max
agcttgaaacacgctctttaaaggataaaagaggacaaattagaggcaaaagcggggccagaaattctcaccaattcaataaagagctcatcatttactttcttgtatgacagaggctgcatggatgcaaaatacttgatgcacacctgtcttgcttcaggcttttgagcctgcaaggccttccttgtctcttacagcaccttctgatacacttccagtgtcatctcctacaacacaggttaaatgccgtttagcaatgagtgaacaataacgaagaaaatataaaggtcaaacgtaacacactaaaagcatgatgg

SEQ ID NO: 17406 - DNA, 381 bp, Glycine max
agctttgaatggaggctctggtctcttgttgaaactgcatgttttgcatagtcatttgcctcacaagttcttcaagggaaggttgcggagaagcctcaactatttgttgtttctggggttgttgctgttgttgttgttgctgttgctgttgtgaatgatttgaccatctaaggttgggatgattcctccacccgggattgtacctatttctagagaggtcatagttgttcttttgtggctgattttgctgctgaggttgagggggtctattgtagatgtttgcagcataagcttcaagctgttcaattgcttcatattgttgacaaaaaggcaaaagtctgtgtggtggtcggcaaacgatcatataccatatagtctacc

SEQ ID NO: 17407 - DNA, 404 bp, Glycine max
  unsure (1)..(404): unsure at all n locations
agcttccatcatttcaccaacagacatgaaaacccattcaaaaaaaatgatgaaggcaagtgaattctcattattagtttcaaggttagcacaataataaatcttctctatttcacattaattgtgtgtgagcatctttattatctttatcatttttttttctctgtgaattcttaattttcaaactaaatctaacatatgccaatgtatagtttaatatataaaaggagaaactattgtaaaatataaaattcaactcttacacataaaaacaaaaaatgtgtagagatagacatatattcagaaaaaataattaataaaccanaaataacatangaaaaaaacttacaaaacatgattntgtgtaggtaaaaccaataaaataaaacttttactacctatgg

SEQ ID NO: 17408 - DNA, 434 bp, Glycine max
  unsure (1)..(434): unsure at all n locations
tatgtccaaacggctaaggtttgtcaatgtaaaaatgcttgatgtgttcattcctccagtgtangaatttgagtgcagcacaagaaacttcagttgcttgaatttcccaaaaatctcctgcacctccccaccaaatttattcctgcttaaatccaagatgaacaaatgggtcaagttcaaaagggtctctgggatatccctcgagaaagtgttgttccccaagaacaatgcatcaagaccagaaatggaaccaatttcactgggaatatctccagtaaaattgttaccagaaaggttgagaaccaacaaattcttgcagttagcaacctcctttgggggcttaccgtcaaattcattaacagaaaggtcaagtttttcaaggctacaattgattggaaaagccttggaaggaacaacccctgtgagaaaattct

SEQ ID NO: 17409 - DNA, 422 bp, Glycine max
  unsure (1)..(422): unsure at all n locations
tacgcttgtgtaacttctccttaagtaccattttgaatgcgttttgacatccatttgttgtagtggccaaattgtgaggcgcaagagcaagaatatgccacagttgtcatcttggcgaccgggcaaaagtctcatcattagccaattcatattggtgcttatttccaagcacaactaaacgagctttgtaacgatctatggatccatccgagcgcagctttatagagaacacaaacttgctacttaaaggcttaacagatgtgggacacgggactatatcccatgtttgattttcttccaatgctagaagttcagtttcaatagctntctgccaacaagcattcttcatggcctggctataagaggaagggataggaataaaggataatgaggctgtcatggaatggatatacctgtctggg

SEQ ID NO: 17410 - DNA, 394 bp, Glycine max
  unsure (1)..(394): unsure at all n locations
agcttggctgcacacaactctctaatagctaagctcacctccttgagatgaaaagcaagagcttagctacacacatcccctataatagttaagctcacccccatgccaaaatacatgaaaatataaagaagtccctaatacaaagactacttaaaatgccctgaaatagaaggctaaaaccctatactactagaatggccaaaatacaaggcccaaaagtaggaaaaacctattctaatatttacaaagaagagtggacccaaccttggcccatgggatcaaaaatctaccctgaggttcatgagaatcttanggccttctttagcagctctagcccaatccttttggagtcttctatctaatacccttggggggtaggattgcatcanagtcg

SEQ ID NO: 17411 - DNA, 387 bp, Glycine max
agcttctaaactttgtacaagaatgaagctctgataccacttgttatacaagtggcctcagatatcttaagaagggggggttgaattaagatattccaaactgtttcccctaattaaaaatctatttcacttttttactcaagttatgaattcccttaatgacaatcttcttaaatattaattcaaacaaagcaacttgaatatgaatataaagcaataataaataaaggagattaagggaagagaaaatgcaaactcagttttatactggttcgaccacacccttgtgcctacgtccagtccccaagcaacccgcttgagagttccactatcttgtaaattccttttacaagatctaaacacacaaggacaatccttcctttgtgt

SEQ ID NO: 17412 - DNA, 394 bp, Glycine max
agcttatagaatatataataaaagaacaatgacaattgaagagtctatacatgtttcctttgatgattctaatgccattcttccaaggaaggattttttagatgatatttcagattccttagaagatacacatattcatggaaatgactctaaagaaaaagatgaaggaagcaatgaagattctcaagataatggagttagggcaaataatgaacttccaagagaatggaaagcctcaagagatcatcccctcgacaacattattggtgatatatcaaaaggggtaacaactagacattctcttaaagatttatgcaataatatggcttttgtatctatgattgaacctaaaaatataaaagaagccatactagatgataactggatcattgtc

SEQ ID NO: 17413 - DNA, 386 bp, Glycine max
  unsure (1)..(386): unsure at all n locations
agcttttgcaagctggaattatttatcctatctccgatagccaatgggtgagtcccgtccaggtagtcccgaagaagaccggcctcacagtgataaaaaatgagaaggaggagctgattcctactcgggtgcagaacagttggagagtctgcattgactataggaggctgaaccaagttaccaaaaaggaccattttcccctaccattcattgaccagatgcttgagcgcctgacaggtaaatatcagtactgtttccttgatggtttttctggttatatgcaaattactattgctcctgaggatcagganaagaccacattcacctgcccctttggcacttttgcctatangaggatgcctttcggcctgtgcaatgccccttgt

SEQ ID NO: 17414 - DNA, 402 bp, Glycine max
ttccacattgaattcagcacctaatgtcatattagattgtaattgggtatcttaacatatgagatttcagatggactttaatcctaatcccatagccgaccttttcacgagatctctacttaaccctttggttaaatgatcggccaaattatgctgagttctcacaaactccactgatatcacaccatgcatgattaactcccgaaccatgttgtgtctaacacccaagtgtctagacttcccattatacacttgactatatgccttagccaaagttgcctgactatcacacctgatagacatgggaggtataggtttgggccacaatgaaatctcatagatcagatttcttagccactcagcttctttaccagctgctgctaaagctacaaattcatattc

SEQ ID NO: 17415 - DNA, 413 bp, Glycine max
agctggggctattccaagttcatttaccatacctttaagctttattgctctcttactccttcacctagggccatgtattctgcttcagttgttgaaacactaacaactgattgttgatttgctttccaactgattgttgtaccaaacaaagtaaacacatatcctgttaaggatttccttgtgtctacatttcctgcaaaatctgcatctacatatcctgtgattgctgcctcatgtgctgtcttcttgtaccttaatccagctatcaaagatccatatagataccttagtgttcacttcacaacttcccaatgcgcactgccagcatctcccatgagtctgcttattatacttacaacatgagccacgtcaggtctgctgcaaaccattccatacattatgctttacacacc

SEQ ID NO: 17416 - DNA, 366 bp, Glycine max
  unsure (1)..(366): unsure at all n locations
agcgtggaaaactctgctctngtttccngctggagcccatagatagacttcttcagtttataaacgagatgagaattggcagaagcgaaaccttctggttgctgcatatagacttcctcttgaatggtcccatttagaaaagcattgatgatgtccacttgtcgggtatcccattttctggtgactgtaatgctcatgattgtgcgaatagtggctggtttaataacaggactgaatgtctcattgtaatcaaggcctggtctttgagataacctttaagccactagtcgagctgtgtgtctgacttcagagccatcagcattgtatttcaagcaatagatccatttggagccaatagccttctta

SEQ ID NO: 17417 - DNA, 430 bp, Glycine max
taacaccatcatgagcagcatgtctgtacaaatttaagatgttcaagatctaatactgtataaacaatcatcatactttactagttacattttctcacataccgcaaggaagtatccattctcagagaaagatatggcagttactggcccagcatgtccgtcaaacctagcaacatttgcctacaaccaatggaggaaggtaagaacatagagaataacattgaatattaaaattgaactttaaacaagtataagaaaaaatgtttacctgactttttacatcccaaatcttgacaagagattctgtggtgccggttccaagaatgagaccatccggatgaaaagccgcagatgtgtacccttccgaagaacctgaagtgtcataaacctacacaactcatcattaattgtctgattcagaacttatgta

SEQ ID NO: 17418 - DNA, 399 bp, Glycine max
  unsure (1)..(399): unsure at all n locations
agcttgctgccacggagttttccgactatgctcttgtgtggtggaacaagctacaaaaggagagagcaagaaatgaagagccaatggttgatacatggacggagatgaaaaagatcatgaggaagcggtatgtgccggctagttactcaagggacttgaaattcaagctccaaaaactaacccaaggcaacaagggggttgaggagtatttcaaggaaatggatgtgctcatgattcaagcaaatattgaagaagatgaggaggtaactatggctcgatttcttaatggtttgactaatgatatccatgatattgttgagctgcaggagtttgttgaaatggatgaattgcttcacanagcaatccaagtagagcaacaattaaaaaggaaaggagtgg

SEQ ID NO: 17419 - DNA, 389 bp, Glycine max
  unsure (1)..(389): unsure at all n locations
agctttctccactatgttgcctgatgcctgaaatgtcttttctgatggcagtggtcctagatgcagggaagaatttctccatgaacaccctcttaaggtcattccagctgaaaatggacctaggagcaaggtagtatagccaatcttttgtcactccctctagagaatgaggaaaatcctttagaaagatatgatcttcctggacattagggggcttcatggtggaacaaaaaatatggaactccttaagatgcttataaggatcttcacctgcaagaccacgaaacttgngcagcaaatgtattagtccagtcttgagaacatatggaacaccctcatcaggatattgaatgcacaagctntcataagtgaaatcaagtgcatccatc

SEQ ID NO: 17420 - DNA, 402 bp, Glycine max
  unsure (1)..(402): unsure at all n locations
agcttatcacgattcaaagctgttgaagagagacttcaaaccaggacaacatgtattactttttaattcaagattgaaattatttcctggtaagttgaaatccaaatggtctgaacctttcatcatcaggaaagttcggccttatggtgcaatagagttgtatgatccacaatttcaggaccttgactgaacatggttggtgaatggccaaagattgaaactgtaccatggtggagagtttgaaaaggcaaacaccatcttaaatttgatataacccattgaggtatatgcgtcaggctaatgacgttaaaagagcgcttcctgngaggcaacccaactctgatttctttcattntgtttttcatgcattgcataagttggaatttgctntatgatcatcga

SEQ ID NO: 17421 - DNA, 408 bp, Glycine max
ttgagcaaattcaagcaaattatcactttttactcggttgtctgtttgagtcccgtaatatatcgagacgctcgaaatggaacaccgaatctctgagaaaattcaaacgacaataactttttactcggatgtcagattgagtccagaaatatgtcaagatgcttgaaattgaagaccaaagctctgagcgaattcaaacgacaataactttttactcggatgtgtgactgagtcccgtaatatatcgagacgctcggaattgattatcgaagctctgagcaaattcaaacgacaataagttattactcggatgtctgattgagtcccgtagtatatcgagacgctagaaattgaataccgaagctctgagcaaatgtcaacgataataactttttactcagatgtctg

SEQ ID NO: 17422 - DNA, 427 bp, Glycine max
  unsure (1)..(427): unsure at all n locations
tgccgccacggagttttccgactatgctcttgtgtggttgaacatgctacaaaaggagagagcaagaaatgaagagccaatggttgatacatggacggagatgaaaaagatcatgaggaagcggtatgtgccggctagttactcaagggacttgaaattcaagctccaaaaactaacccaaggcaacaagggggttgaggagtatttcaaggaaatggatgtgctcatgattcaagcaaatattgaagaagatgaggaggtaactatggctcgatttcttaatggtttgactaatgatatctgtgatagctgcangaagttgttgaaatggatgatttgcttcacaaagcaatccaagtggagcaacaattaaaaaggaagggagtggctaagaggaagtttaccaactttggttcttctagttgga

SEQ ID NO: 17423 - DNA, 377 bp, Glycine max
  unsure (1)..(377): unsure at all n locations
tgtaggttatagtgacaatgattgngctagatatgaatatgatttataaattactagtggatttatgttttcaaggggaatacaaccttcacttggatgtcaaaaaagcatttgatagtcactttttcgacctgtgaggtgaaatacatagcagctacttcatgtgtttgtcatgcagtttggcttaagaatttgttaaaagagttaggcatgtcacaagaagagccaaccaagatctttgcggacaataggtcaggcattgctctagcaaagaatccagtgttccatgatcgaagcaaacatattgatacctgttaccactacataagggagtgcatagcaagaaaggatgtacatgtagaatatgtgaagtctca

SEQ ID NO: 17424 - DNA, 361 bp, Glycine max
tttcatgcaagcttggacactttcaatatgattgtcctacgtgggaaaagaaaccaaattatgctgagatggaggataaagaggaacaagaggatgagctcttgttaataaccttcatagattgcatagaagggaagaaggatgagtggtttctagactcgggatgcggcaaccacatgagtagtaacaaggagtggttctcagaattggatgagaactttcggcacaatgtaaggctgggtaatgatactcacatagctgtgaaggggaaaggtagtgtttggatggttgtgaatgagattatacatgtaatcacacatgtatattatgttcttgaactcaagaataatttattgagtat

SEQ ID NO: 17425 - DNA, 375 bp, Glycine max
  unsure (1)..(375): unsure at all n locations
agcttgtagggttaaagtctcactattgtcacgtgctcatgcaacaattgttagccgtggctatacgagacatcttgccaaacaaagtcaggttagccataactcgcctgtgctttttcttccatgctatatgtagcaaagtcattgatcctatcaagtttgatgagctggaaaatgaggctgcaattatactgtgccagttggagatgtattttccccctgttttctttgacatcatgattcacttgattgtgcatctggtcaaagaaatcaaatattgtggtcctgtttatctacggtggatgtacccggttgagcaatacatgaagatcttanaagggtatacaaagaatttatatcgtccagaagcatcta

SEQ ID NO: 17426 - DNA, 430 bp, Glycine max
  unsure (1)..(430): unsure at all n locations
tgatattaaatntaagtaaattacttgcaattcaaaatgttaaattaaatttaattgctattatgtatcacgcagtttatatgtaatttactttttacttaatgattgcaaaataatgcaagttatatttaatttaatgtttagttaatattttgtaagagttttgtttagctgatatatacatggaactagattgcattaaagttagattttttaacagaaaaggttatttaagtattttgattttagaataaaataaaaggaaatgtaattggcccttgtgcttatttaatgtcaaaattcctaatattttttagaggcatttggggaagctttccttgaacacaaggactgttctagggactcaaaagtgaccaagtttttggtttggttgtggctggaggcttctttgttctgttctttgtgagac

SEQ ID NO: 17427 - DNA, 403 bp, Glycine max
agcttaaacattttatttcgagcgtctcgttatattacgggactcaatcagacatccgagtaaaaagttattgtcgtatgaattggcttaaagcttaaacattcaatttcgagcgtctcgatatattacgggactcaatcagacatccgagtaaaaagttattgtcgtttgaattggctcagaggttcaaaattcaatttcgaacgtctcgatatattacgggactcaatcagacatccgagtaaaaagttattgtcttttgagttggctcagaggttcaacattcaatttcgagcgtcccgatatattacgtgactgaatcggacatccgagtaaaaagttattgtcgttcgaattgggtctgaggttcaacattcaatttcgagcgtctcgatatattacg

SEQ ID NO: 17428 - DNA, 414 bp, Glycine max
  unsure (1)..(414): unsure at all n locations
tacgacaataactntttactcggatgtctgattgagttccgnnaaanatcgagacgctcaaagttgaatgtttaatctttaagccaattcatacgacaataactttttactcggatgtctgattgagtcccgtaatataacgaaacgctcgaaattgaatgtttaagctttgagccaattctaacgataataactttttactcggatgtccgattgagtctcgtaatatatcgacacgctcgaaattgaatgttgaagctctaagcctattcaaacaacaataacgttttactcggatgtccgattcagtgacgtaatatatcgagacgctcgaaattgaatgttgaacctctgagccaactcaaacgaacaataacttntactcggatgtctgattgagtcccgtattatatc

SEQ ID NO: 17429 - DNA, 403 bp, Glycine max
agcttcttcacatttccgcctttgcttgaccttctttatgcttaaaaacagaaacattatgcataggcaaaagatcaagaggagttagtgggttaaaaccataaacaacttcaaaaggagaacaattagtggtgctatgaacagctctattgtaagcaaattcaacatggggtaaacaagcttcccaagtttttaagttcttcctcaaaactgtcctaagcaaagttcccaaagtcctattaacaacttccgtttgcccatcggtttgtgggtgacaagtggttgaaaataacaatttagtgcccaacttgctccacaaagtcctccaaaaatggcttaagaacttagagtccctatcactaacaatgctccttggcaaaccatggagtctcacaatctcctt

SEQ ID NO: 17430 - DNA, 423 bp, Glycine max
  unsure (1)..(423): unsure at all n locations
cacatgagtttgacaaaccttttaccatatagtttttactctctggtaatcgattaccagattattgtaatcgattaccagtagcaaaattgttttgaaaaagttttcaaattgaatttacaacgttccaattattttcaaaaagctgtaatcgattacaatgtttgggtaatcgattaccagtgcctttgaactttgaaattcaaattcaaatgtgaagagtcacattctttcacacaaaagctttgtgtaatcgattacactaatttggtaatcgattaccagtgactgtttctgataaatcaaaagatgtaactcttcacaagggttttgactttntcaaattgngtttaagttgttctaaaagttataactcttctaaatggtcttcttgactagacatgaagagtctataaaagcaag

SEQ ID NO: 17431 - DNA, 354 bp, Glycine max
  unsure (1)..(354): unsure at all n locations
agcttagttagtagggggcctgatgaccttgctaagagcaatgggcactctgtagaactgaccgcattcacctgtccctttggcacttttgtctataggaggatgccctttggcctatgcaacgcccctggtaccttccagcggtgtatgcttagcattttcagtgattntttagagagttgcatagaggtttttatggatgattttactatttatggatcctcttttgatgcatgtttggatagtctagatagagttctcaatagatgcattgaaactaaccttgtgctaaattttgaaaaatgtcactttatggtaaaacaaggtatagtcttagggcatatcatttctagt

SEQ ID NO: 17432 - DNA, 407 bp, Glycine max
  unsure (1)..(407): unsure at all n locations
tctggtgggacatcttgacttgctgtccaatctgacattctcctcttattctgccttcttctattttcagattgngaatgcctctaacagcacctttgtcaatgattttcttcatgcctcttaagtgcagatgtccaaatctttgatgccatattttgacttcatcttctttggagaatagacatgtggaggagtaactggtttcttgaggtgtccataggtagcagttgtcctttgatctgctgcccttcattagaacttcactcttctcatttgtcactaagcattctgactttgtgaagtttacattgaatccttcatcacacagctgactgatgctgattcaagttgtagtcagtcccttcaccagcagtactttgtccagactatgaagtccatcatggact

SEQ ID NO: 17433 - DNA, 413 bp, Glycine max
tgccttgtcccttgatatatttgatggactcatggtttctatgaatgacaaattccttgggataaaggtagtgttgccatgttttcaaagcccacactaaggcaaacaactctttatcataagttgaatagttaagggtaggaccacttaacttttcactaaaataagcaattggatggccttcttgcaacaacacaaccccaatcccaacgtttgaagcatcacactcaatttcaaaagatttttgaaagtttggcaacgcaagtatgggggcattagttagcttttgcttaagaacattgaaagcttcttcttgtttctctccccatttgaaaccaacatttttcttgagcacttcatttagaggtgctgccaatgtgctaaaatccttcacaaatcgtctataaaaactt

SEQ ID NO: 17434 - DNA, 402 bp, Glycine max
ctcagcttaccatcgatgggacaatggtaccctttgactctcaacagacccagaattctgacaagctgccttctcaagctgtccaaaatcccaaaaatgtcagtgccatttcattgaggtcgggaaaacagtgtcaaggacctcaacccgtagcaccttcctcatctgcaaatgaacctgccaaacttcactctactccagaaaaaggtgatgacaaaaatttacctaacaatttctgtgcaggtgaatcttcttccacaggtaattctgatttgcagaagcagcacattccccctcttccattccctccaagagcagtttccaacaaaaaaatggaagaggcagagaaagagatcttggatacattcggaaaagtagaggtaaacatacctctgctggatg

SEQ ID NO: 17435 - DNA, 360 bp, Glycine max
tcctgcttcatgcaatctttaacaacggtggcacgcctccttcgatgatgagtttcccgtaacggtcgttgtcgcgagcaagggagacgagggaagcggctgcgtctgaacgttcgtccaaggaagcaccggagagaagaatggcgacctgttcccagatgatgcagagaatgggctcgttggcggcgatgggagggaggcccaggtactcgtcgtagcgctcgtcggcggaggcacgtgggacgctcgtagaggtcgttgctgttcctggcggcctggcggatgaggcccgccaacttcttcagtttggatttcagctccagacattcctgtcggaaattctggtcctcttccgcaagc

SEQ ID NO: 17436 - DNA, 374 bp, Glycine max
agctttgtatgctctattcaatggagttgacaagaatatcttcagactgatcaacgcatgcacagtggccaaggatgcatgggagatcctgaaaaccactcatgaaggaacctccaaagtgaagatgtccagattgcaactattggccacaaaattcgaaaatctgaagatgaaggaggaagaatgtattcatgacttccacatgaacattcttgaaattgccaatgcttgcactgccttgggagagaggatgacagatgaaaagctggtgagaaagatcctcagatccttgcctaagagatttgacatgaaagtcactgcaatagaggaggcccaagacatttgcaacatgagagtagatgaactcattggtt

SEQ ID NO: 17437 - DNA, 441 bp, Glycine max
tagaaccctagcttatgctacaaacatttataatacaccccctcagtagcttaaccaacaatagcagaataattatgatctttcaagcaacagatacaatccaggttggaggaatcatccaaatctgagataggcaagtcctccacaacaacaatagcatgtccctcctttccagaatgttgttggtccaagcaagccatatgttcctcctctaatacagcagcaacaacaacaattgtcacaacaaagacaatcggcaactgaggctcctcctcaaccttccttataagagatagtgagacaaatgaccatccagaatatgcaatttcagcaagagacaagagcctccattcaaagtctaacaaatcatatggggcagatggctactcagttgaaccaaactcaatcccaaaattatgacaaattgccttcacaaactgt

SEQ ID NO: 17438 - DNA, 282 bp, Glycine max
tgcttctgtacagactgtgatcaacacttgtgcccgctttatccttcgacagctttaagtgagtaggtgcacgtgttcttctatgactggcaatttccattccgaacttatttacgatggtctttgcattcttgctttgggagaagaacatgaaagctttccttttgttttgcttgggagccgaaaaaataagtctcttttccaacgagactcatttgaaattcatattgcatctgtggtacaaaatgtcaaaccatttctttcgacatccctccaaacaca

SEQ ID NO: 17439 - DNA, 423 bp, Glycine max
  unsure (1)..(423): unsure at all n locations
agaggtgtgttgaaaccttctttatatctttatagttatttgtgtgataatgattttgtttatatgtggagactaatatagttttttttttctttggttaaggaatgggttttagcttccagaattgcagtgcctgacaacctgggtcttcgaatgcgtgggaggaccatggtccggccagctccaccatccaacaaacgagaactatcgtgggtcggcgatgttggttttgttgttgatgcttggtggcatgatggatggtgggaaggcattgttgttcaaaaggactcggaatctaattgtcatgtttatttcccaggtatgaatgtctgctctttctatgttaattagcttatgttggtaactgttcttttggtacttagattatgagctcgnttttttatttttgattaattcctatgg

SEQ ID NO: 17440 - DNA, 321 bp, Glycine max
tgtaggatattcaaacgacaataactttgtactcctatgtccgattgaatcgggtaatatatggagacgctaaaaatagagactagatgctctgagcaaattgaaatgacaataactttatacacggatatccggttgagtaccgtaatatatcgagacgctccaatttgaaaactgaaactcttagaaaattcagacgacaataactattactcggatgccctatagagtgtcattatatatcgagggatgcttcaaattgaaaacggaagctcgtatgaaatccaaacgacgataaccttttactaggatgtctgattg

SEQ ID NO: 17441 - DNA, 374 bp, Glycine max
agcttctttttctttggccaatgctggacttgcttggcagtgatttccttggcaatttgatgctcagaaatagcaatatccaccactccttcagttggtctgcccaggtacttgttgattacagcaggggagaatctaatacattttcctctgacaaacactttctgatactcatcactctttctgtttgctatgtcagagggaatgttgacaatgaattccctgactagactttcataacaatcacccatcttggtgacagttttcagcagtccagcagccttgatgaggtccatgatctccttgcaatccaaggcatctgtgtccagttctctttctaaggcaagtctgcgttgatatacaaatctccacct

SEQ ID NO: 17442 - DNA, 371 bp, Glycine max
tgtttttaacattgtttcacttacaagtgatcatggaggtgaatttcaaaatgagtcttttgaaaagttttgtgaagaaaatggaattcaccataatttttcagccccaagaacacctcagcagaatggtgttgtggagaggaaaaatagatcccatgaagaaggaactataacttttacaattgaaacaaagttacctaagtacttttgggctgatgctatacatactatttgctacactttgaacatagtaattataagacctacactaaatcttatgaactttataaaggaagaaaacaaaatatatctcacttgagggtttttggttgcaaatgttttattttaaacaatggtaaagattctcctag

SEQ ID NO: 17443 - DNA, 424 bp, Glycine max
ttgaatgctctattcaatggagttgacaagaatatcttcagactgatcaacacatgcacagtggccaaggatgcatgggagatcctgaaaaccactcatgaaggaacctccaaagtgaagatgtccagattgcaactattggccacaaaattcgaaaatttgaagatgaaggaggaagagtgtattcatgacttccacatgaacattcttgaaattgccaatgcttgcactgccttgggagaaagaatgacagatgaaaagctggtgagaaagatcctcagatctttgcctaagagatttgacatgaaagtcactgcaatagaggaggcccaagacatttgcaacatgagagtagatgaactcattggttcccttcaaacctttgagctaggactctcggataggactgaaaagaagagcaaga

SEQ ID NO: 17444 - DNA, 408 bp, Glycine max
tggtacttctactgaagctgagtttctaccctccttctgtcctgacatagaatctctagtgcagctgaaggatgctatagggttcttgatccttcagattcagtctttgtttcttgtttgttctttttcttggatttatctctcattaaaaaaatatcaatgaaaaatatgatggattaactggttttcctttttctggtatcggagaaaagataatgattttcattggtctcattattcagtatttggatttgtacattttttattggttattatctattcattcattatattagtaaattttagttgtttttaaataacaatatttgatgccaaaataaaataaaatgattagaactcaaggtattaattaataactattatttcatttatcatttataattattt

SEQ ID NO: 17445 - DNA, 353 bp, Glycine max
tgcttatactttttattaaaataccactaatcaaattttagatgaagttgaacaacatcctgtggtaccttacagattcattatgttaattagcatatctttaaataagtgggctaatgtaaaattattcacaattatctatttgaagatgatgatacgtatatattttaaggataaaaagagaataaaatattctaagctaacaattaatattgcaacaaatactactttatgtatcattccaaaacatatgagtgattaccatactatattatttattgaattctgaaataaacttttagatagtggaacatagttaaatgctagctaaaatgactcctcagatgtagcta

SEQ ID NO: 17446 - DNA, 424 bp, Glycine max
tagccaaacattaatttaaaattcttacaagtattgcttaaattatctacgaattatggattgaaatcttgtaaattaatgaatccacttttaccaaaatttattgcttcttttcttactctaaatgtttgcataaacttttataatatttacataacctttaggtgatatattcaattattcattataatttttttatctagaggatttataacaacaactcatgtacctttatttaactaattgaactaaatttcttgacatccattaacattttttataatataaaactaatagcagtaaaaatatattatcaactattcagtaacaattataaactgccttttgtttccctaatttttgtttgtttttaaaaaaatcttataaaagcacaaatagactcagattatgttaccaaaatgat

SEQ ID NO: 17447 - DNA, 372 bp, Glycine max
tgcttgacttgtcttgttaattggtatacttaaataccaataagcataagatattatttctaaattttaaccttttgaagctctagatgctgacgagcttgacttgttaggttgtttatttatataaacaataagcgtcagaggctccatgtgaatgtgttgggatgaatgatgtgatacattaacatttttggttggaagattttcagtactaagtgacaacttggacttgccactgaaaatgtaatagaataatatgttgcaagtcatggttggtcttaaaatataaaaccagaggggtaaatttaaagcaagttaccttgactgaaaattgcctatccaggtatgcaaatctggtcatttacatgcaat

SEQ ID NO: 17448 - DNA, 402 bp, Glycine max
tgcatgcatgtgaagagaaagccagatggaaagtgtatcattcatgagtttataaaggaacataatcatgaacttgtaccagctctggcatatcattttcggattcatagaaatatgaaattagctgaaaagaataatattgatatcttgcatgctgttagtgaacgaaccagaaagatgtatgttgaaatgtctaggcaatctagcagctgtcaaaacattgggtctttcttgggtgacataaactatcagtttgacagaagccagtatttggctttggatgagggagatgcccaagttatgcttgagtattttaagcatgtacaaaaggagagtcccaacttcttctattctatagatttaaatgaagagcagcgcttaaaatatctattttggattgat

SEQ ID NO: 17449 - DNA, 372 bp, Glycine max
agcttttatctcggaggcccgattcatgcgcataatatatcgagacgctcgaaattgaacaacggaagctatcgagaaattcaaatggtcaatacttcgaactcggaggtcctattaaggcgcataatatatctagacgctcaaaattttacaatggaagctctttggctatacaaatggtcataacttttcactcgaaggtccgattaaggcgcataatatatcgagacgctcaaaattgaacaatggaagctcttgagcaattcaaatggtcataacttgtcactcggaggtccgattcaggtgcataatatatcgggacgctcgaaattgaagaatggaagctcttgagcgattcagatggtcataact

SEQ ID NO: 17450 - DNA, 409 bp, Glycine max
ttgatgtaacattaggagaggttaatgaaacaacgtgatgatgcgcttcatgagaggttggatcaaatggagaatagagaccatatgaattgctcaagagcttccattgttcaatttcgagcgtctagatatataatgcgcctcaatcggacctccgagttaaaagttatgaccatttgaaatgctcaagagcttccattgttcaatttcgagcgtcacgatatattatgcacctgaatcggacctgcgagtgacaacttatgaccatctgaattgctcaagagcttccattgttcaattttgagcgtcacgatatattatgcacctgaatcggacctgcgagtgacaacttatgaccatctgaattgctcaagagcttccattgttcaatttcgagcgtctcgatata

SEQ ID NO: 17451 - DNA, 428 bp, Glycine max
tctagaacttggtacgaaaaactaagttcattgttcttgaaaaatggttttaagtgaggaatagttgacataacactctttcgcaaaaactaagattatcaatttttattagtgcaagtatatgtagacgatatcatttttgatgctactaatgaaatgctttctgaagatttttctaagttgatgtagacgaaatttgaaatgagcatgatgggagagcttaaattctttcatcgattacaaataaaacaaacacccaaaggcttctacattcttcaaaccaagtatgtgaacgaattgctgaagaaattcaacatcgacaatgcaaaagaaatgaaaactctaatgcaccccatgacatacctcggactgaacgagtaatcaacaaaggaaagtttgtctatgtggaagcaatgattcactcacta

SEQ ID NO: 17452 - DNA, 410 bp, Glycine max
tgttaataattttctttgcctcatattttgaaggatgaaacttttctttttcaaatgtgtcatttaacaaatccaatatcatagtcattgccttgttgcttaatccacacaaaacttttatatgatataatttgattataaattcaagttttgtgtacttgcttccttcatacaatgtttgactcccatcgtttagaagctcataaaagccattatgatcttctcttggttcatcatttactatttcatcttcatttaatggttgtgatgcacctacattaaggtcatgttgcctatattgttcaaatgcgtcattgatcatcatttccattgggttttgaggttgaacaccactatctcggaaaacatcttccacttgagaagattctaatgcttgcttttcaccatga

SEQ ID NO: 17453 - DNA, 415 bp, Glycine max
tcgatctaattcttctctaaaacaacttgggaagctatattacttcttgggaattgaagtcaagtctatggctgatggctctattcttctaactgaaagaaatacataagatatcttctacagaaaactaaaatggcagaggctcaacctatatcttctcccatggtttctggatgtaagctcactaaaacaggagcagatatattctcagaccccactctgtatagatcagtggttggagcactccaatactccaccataaccagacctgagcttagttttgctgtgaacaaagtatgtcaattcatggctaatcctcttgaaacacactggatagctataaaaagaatcctcccatatctaaaaggctcgttacatcatggtcaagtacttgagctatacacgagctgagtat

SEQ ID NO: 17454 - DNA, 377 bp, Glycine max
agtttgtatggttaaagtctcacgattgtcatgtgctcatgcaacaattgttagtcgtggctatacgagacatcttgccaaacaaagtcaggttaacaataactcgcttgtgctttttcttccattctatatgtagcaaagtcattgatccagtcatgtttgatgagttggaaaatgaggccgcaattatactgtgccagttggagatgtattttccccctgctttctttgacatcatgattcacttgattgtgcacctggtcagagaaatcaaatgttgtggtcctgtttatctacggtggatgtacccggttgagcgatacatgaagatcttaaaagggtatagaaagaatctatatcgtctagaagcatttatt

SEQ ID NO: 17455 - DNA, 394 bp, Glycine max
  unsure (1)..(394): unsure at all n locations
ctatgctgatttttcttcacttgaactcctcaacctctgtagcgcaatcagcctctgctgaaccaccatgacctctccagcgcttggctcaatcccggacggcggaatcatcccctccttacatggtcgaatccttcacagcagcagcaacaacaacaacaaccttattttcaaaatgctactggcccaagcagaccatacgttcctccaccaatccagcagcaacaattgcaaccaccctataaaccagcataagatgaagctgcttcgcaaccttcccttgaagaactcgtgaggcacatgactatgccaaacatgctgtttcaacaagagaccagagcctccattcacagctnaactaatcagatcggaccaatcgctacacagctcaatc

SEQ ID NO: 17456 - DNA, 374 bp, Glycine max
agcttgtatgccttggatcttcttcatcaacggagtcctttgcttcttgaagttcaatggaagcggaatggagaaggaagaaagatgattggagatgccacttcaaggagaagatgagtcaagaacaagctcaccaccataagaagccatggataagagcttgaaggtaggagaagatgagtggagggagaaggagagaaggagcacgaaatttagttcctcaaatgaggtatgaactttgaagtgtaattctcaaatgatcaaagttcaaaaaatacacacatatggcctttatttatagcctaagtgtcacacaaaattgtagggaaatttgaatttctattcaaatttcacttgaatttgaaattgaattt

SEQ ID NO: 17457 - DNA, 362 bp, Glycine max
tgcttattccgatctttatctctctattcattacagcagagatgaacttaattgctgaatgacagtcttcacatatcctaaggatcttgacaatcctgagagtcactccatcgccagttttcatcagcccaaatgccaccgcaagcttctcactgtggtacctgacggcatactccctttcttccccttacaactcgtgcatcgcggactctggcacgggtgcatagcctgcatccttgcacctccatatcaactcatccaagaaactataaatctcattagtctcacggtgagacttgtcacccatgctaaaaagataactactattgtcaacatctatggtgctataacccacttgcttc

SEQ ID NO: 17458 - DNA, 382 bp, Glycine max
agcttcctagaatcaagatcaagattcaagactctagattcaagaatcaagagaagacttaatcaagataagtatgaaaaagttttttcaaaaaactgagtagcacatggatttttctcaaaacatgtttaccaaagagtttttactctctggtaatcgattaccatattgttgtaatcgattaccagtagcaaaatgtttttgaaaaagttttcaactgaatttacaacgttccaattgatttcaaaaagctgtaatcgattacaatgttttggtaatcgattaccagtgtgcttgaacgttgaaattcaaattcaaatgtgaagagtcacattctttcacaaaaaggctttgtgtaatcgattacactaatttggtaatt

SEQ ID NO: 17459 - DNA, 375 bp, Glycine max
ggaagcggttatccgcctgaaaagatatgaccattttaatttctcaagagcttcagatgttcaatttctagactctcgacatattatgcgcccgagtcggacattcgcgtaaaaagttatgaccatttgaatttctcgagagttttcgatgttgaattttgagcgtctcgatataccataagcctgaatctgaccttagtgtgaaaagttatgaccatttgaatttcacgagagcttgcgttggtcaatttcgagcgtcactatatgtgatgcgccaaagatggacattcgagttaaatgttatgagcatgtgaatttctcaagagctgtccgtgatcaattctgagcggctcgatatgttgatttgcctgaatc

SEQ ID NO: 17460 - DNA, 393 bp, Glycine max
tgtgttgtgtgtagtttcagttgtgctgttcttctgtccatatttggttgtctcaaacttggtaccttagttaatatttttggtgttctacttattctgttgttgataattaaattatttgttttaggtattataaaatttgtatgctatatttgttctacgtattctaagtttgtatgttattatttgtgttacatatatatggtaccttagtttgtatgttaatattatttgttttaggtattctaaattattattcaaatatatggtacgttagtttgtattaattttgtatatatattgtttaaatttttctttgcatattaatttatgttattcaaatatatattgttttatttatttaaatttgtctttgcatgcattttaatttat

SEQ ID NO: 17461 - DNA, 377 bp, Glycine max
agcttgatggtaaactagatgtcttggttaacttggcaacccaactggccatgaatcaaaaatctgcacctgtcaccagactctgtggtttatgctcctctgccgaccaccacacagacctttgcccttctgtgcaacaatctgaagcaattgaacaacctgaagcttatgttgcaaacatctacaatagacctcttcaacctcagcagcaaaatcaaccacaacagaacaattatgacctctccagcaacaggtacaatcccgggtggaggaatcatcccaaccttagatggtcgaatccttcacaacagcagcaacaacaaaaacagccttattttcagaatgctgctggcccaagcaaaccatacgttcctcca

SEQ ID NO: 17462 - DNA, 239 bp, Glycine max
agcttagcagcctttctttcagtgtaatgccccctttccacaatcctatcaaacaactcaccccctgcacagagctccataacaacatgaaccgcgacagcgtcctcgaaagcctccttgatggagatcacgttaggactcccagccaagtggtgcattatttgaatctccctccttacatactgcacatcctgatatgtcaaaagcttcctgctcgataatgacttgcgtgcatactc

SEQ ID NO: 17463 - DNA, 331 bp, Glycine max
aacgtcaatagcggacttcctctgaaaaattacaacaccatctcctgactgagccacctcaatacctaggaagacttctaatgtccctagtctttggtctgaaaatgactgaataagtgctcctttagctaaccaatcttagtagcatcattccctgtcatcactatatcatcaacatatactatcacataaacacacttctcagaggatgaatgacaataataaacagaatgatcaacctcactacgtttcaatccaaaaagtcgaacattatgactgaatttaccaaactaagcccgacgggattagcttcacccatagagagatcaac

SEQ ID NO: 17464 - DNA, 296 bp, Glycine max
  unsure (1)..(296): unsure at all n locations
attgattctcatgcagaatttgaaggccaactatcatgtcttgcagaagtattgtcatgaagtcacagtcagtgtgctttgtaatgcccatggtgagttcaggttcaggccattgtggatagtattgacccaaaatataaagtgcctcagcgcagtccatttctttgaagtaagaagggttaatgccaagagcctctgacaatagctcanagattgtaatgcccaacacccttacttttttggtatattcagccacaatatctctgcgaaagcatgattatttcatcaatgacaag

SEQ ID NO: 17465 - DNA, 420 bp, Glycine max
  unsure (1)..(420): unsure at all n locations
tgaaggagtttattgcatcagggaattatttcactttaaaagtgggtcctaattggattcctaattttcaacttacctatttggatgtgacatcatggcagataggtcccaactttccatcgtggattcaatcacaaaacaaacttcaatatattggactgtctaacacggggattttagattctattcccacttggttctgggaaccacactctcaggttttgcatttaaacctctctcataatcatatccatggtgagcttgtgactacattacaaaatccaatatctatccaaactgttgatctaagcacaaatcacttatgtggtaaattaccctatctttcaaatgatgtgtatgagttagacctttcaaccaattcattctctgaatccatgcaagaattnttatgtaacaatc

SEQ ID NO: 17466 - DNA, 422 bp, Glycine max
tatgcttttctttatattgtcacacagatttcatattcttaatggctgctgttttttcagacacttcctatttttcttgatggccttgttactgcatggggcgctatcctaatttctgtgacattaattcttttgtttggtgaggtgagaaagttctgtccttatatgattttaagtataatacattcatgtcacagattaagtgcttgtgttgtttgtttagaggttggaacctggaacaaaaatctggtggcacagcacccgttttgtttggttcacgttttttccatttgtgaaagacattttttgttaattagaatcaattccagttaaagtgggaaccagtagcttctcattcctctaatgttatgtctggcaataaaaaatgttcagatgctattatcgatcaatgtaatgaatat

SEQ ID NO: 17467 - DNA, 346 bp, Glycine max
tcgattacattgttcttgaatagttctccaatctttgggaagaacactttaatcaatcaaaatggtaataatcaattacttctttgaaataattgattacattgtatatttaattgattacaggcaggtattacgagctggtataagctagaataacattattagataatatgttctttacatcggttatttatgactttcaacatcgtgttttaaatcgatgttgaaagtaccgacgttgataggattattgttaacatcggtttcttaataactgatgttaacgaaaattaccacatcgatatataataaccgatgtgctatatgaatacaccaaaaatgttat

SEQ ID NO: 17468 - DNA, 328 bp, Glycine max
  unsure (1)..(328): unsure at all n locations
ggccaacaggtttagccttctcaatgtattctgaacaaaatttaatggcttcttctgcaacgtacctctcaacaatagatgcttctggacgatatagattctttttatacccttttaagatcttcatgtatcgctcaaccgggtacatccaccgtagataaacaggaccacaacatttgatttctctgacctgatgcacaatcaagtgaatcatgatgtcaatgaaagcaaggggaanatacatctccaactggcacagtataattggcagctcattntncaactcatcanacttcacaggatcaatgactgtgctacatatagcatg

SEQ ID NO: 17469 - DNA, 323 bp, Glycine max
gctcttggagggaatggaagagggatatgctgcttctctttagattcacctgcatataaattgttaggtaacttactctttaaattgttgtcatcatctttctctggagtacagtgaggttgggcacgttcatttgcggatgacgaagatgctactggttgaggtccttgacactgctttcctgaccttaatgtaatggcactcacatttttgagattttggacagattgagaacgtaatctatcagaaatctgggactgttgctgatctaactgtgtagccaactatcccatctattagttaagctctaatggaggctttgg

SEQ ID NO: 17470 - DNA, 419 bp, Glycine max
  unsure (1)..(419): unsure at all n locations
nttctttgtgggttgatggtgttttgtcacgtagaatggcgtgatcactggttgacattctcaattagcttagttgcttcttcttgggtctttagctttattttccctgctgcagaaacatctaacagttacttggtttgtggtctcagcccatctatgaacatattcaattggattggctctgaaatcccatgggtgggagttcttctcaataaacctctgaacctctcgaatgcttcactcagagattcatcacggaactgatgaaatgaagagattgcagctttccctttcgcagtcttggactctggaaagtatttctttagaaacttttcaacaacttcttcccaggttttcagactgttacccttaaacaagtgaagccacctcttggtctctcctaccaatgaaaatgagaa

SEQ ID NO: 17471 - DNA, 435 bp, Glycine max
  unsure (1)..(435): unsure at all n locations
taggtctatccactaggattgaaagatggatgtttcttgatttgtttgataaattaagtagtcaatcttatatatggtgtttgtaaagttggactcattaagaaaggttaatagaattatttgattacaaatagacaattatttataacttttaaagtaataataataggatttaattatcattttggtcttgaaatttgattgatttttaaaatttttaacataataaattgatactttagaataattnttattatgacaattttaaaatacaaattcaaacaattaaaaagtaaaaattaatttatttcaactaaaaatcataaaaaatgtcaatttattataccaaagataaaaaagtaatttataaaaaataagggcaaaaaaatatacaaaccccaaattcaaggacttatgtctaataataataaaaac

SEQ ID NO: 17472 - DNA, 432 bp, Glycine max
  unsure (1)..(432): unsure at all n locations
ntgaggaaattcaaacgacaataaatttttactcgtatgtctgattgagtttcgtaatatatcgagacgctcggaattgaatgttgaaggtctgagcaaattcaaacgacaataactttttactcggatgtctaatttagtcgtataatataacgagacgctcgaatttgaatgttgaagctctgagcaaattcaaacgacaataacattttactcggatgtctgattgagtcccgtaatatatcgagacactcgtaattgaatattgaagctctgagccaattcaaacgacaataactttttactcggatgtctgatatagtcccgtaatatatcgagacactcgtaattgaatattgaagctctgagccaattcaaacgacaataactttttactcggatgtctgatatagtcccgtaatatatcgagac

SEQ ID NO: 17473 - DNA, 301 bp, Glycine max
ctctgatggtagtcatctttacaactggagagaagatctttgtgaaatcaattccttgtttctgctgaaaccctttcaccacaagtctctccttgtatcttcttctaccgtcagattcttcctttagcctatagacccacctattctgaacgctttctttccttctggaaatttagttaaagaccacgttctattcttctgaagggatgtcatctcatctttcatcgctagctcccacttaatagtgtcattcccctgtgtaggctcactgaaacattctggctcaccagcatcagttaac

SEQ ID NO: 17474 - DNA, 425 bp, Glycine max
  unsure (1)..(425): unsure at all n locations
gaggctttgcatatataacttatacacactcattaatatgaccagattaattacaaagtgtttaactatcttagctgagaatgaagggggtatcttattgaccaaaaataacgtaatgcttatcttcctagctaggccctaagtccaaattctaagatggtatcaaagttatcctagatccattgctgggccatctacattgccatgctctaagccgatgccttgggcatgatgagagagttctaaacccaccttaattgcggtcactcgttacctactctagctgtggcctttttggggtctaccttaattgtagcctcaagggtggcgtttactcccacattgattacagatattccttanataaaataagcgttacaagtgcgtgaaaccctcactcttgagctaactattgtggtcgagtc

SEQ ID NO: 17475 - DNA, 283 bp, Glycine max
caataaggcttgcaaggtgcatggcattgggactgtcagactgagaatgtttgacaacagggaaatgctgctgcaagatgtgaggtatgttccagaactcaagataaaccttatctctataagcatgtttgaccttataggatacactacaaaggttgaggatgggatgatgaaggtgtccactggagcctcaatcattgctaagggaagccgaagcaatgggttgtacatcttggaaagatccacagttattggacaagcattctgttgcaagtcaaacaat

SEQ ID NO: 17476 - DNA, 370 bp, Glycine max
atgttttagacctagtaattgtcttagaatgggagctattctaagatgatttcgttgtcatagtcatcttatgtaacacccttattttttgtaaaataaattaaaacagattttatttaaaaataaatagggtttacgaaaataatgaggtttctgaattaaataaaaaggaggaataatttattaataaaaatggtttaagggaataataaattatttctagaaataaaactgttattattattaataaagtaataagtctttttaaatataataagaaatgagtatttcgtgaagttctcactataaaagaccttgcatttactacatcgccttctttttcttaatcttttctttcttcaaccttttc

SEQ ID NO: 17477 - DNA, 429 bp, Glycine max
  unsure (1)..(429): unsure at all n locations
tgacacattctggcattgtgcaccaggtgattcaaattcatgaattcaattattgcaactcagaacaatgcaacagcaaaaaggtttcccactgaggaaactgttgttgatggggaagacataattagcaagttgcatgaaagcattcttggtcacattctgtctttccttccaacaatggaatcagtccacactagtgtgttatcaaaaaggtgggttgatgcttggaaatccataactggcctacaatttaatgatactttgctttgttttgggaaaaagatgcaaaaagaacagtttgtgtgttttgtgaacatggtgtttcttcaccttgccaattcaagtatccacaatttctctctttgtttaacacgttatcagtatgattcaaccttgataagtgcatggatctcctttatctntaaaagg

SEQ ID NO: 17478 - DNA, 351 bp, Glycine max
  unsure (1)..(351): unsure at all n locations
ggagatggctaggtgtttgcttcatgaaaaagaattgccaaagagattttgggcggaagccgcaaatattgcagttttcatgcttaacagactgccaacaaaagctttgcaaaagaagacaccatttgaagcatggtatggctataaacctgagttgctcaatctgaagatatttgagtgcttgtgctttttcttacattcctcggggtaagaaggacaaactagacatgagagcagaacctggaacctttgaggctatagcttaatttcacaggcctacatgatctanttgccacatcatgacaagtattgtagcagaatatgagattctggactggatantggaactgg

SEQ ID NO: 17479 - DNA, 412 bp, Glycine max
  unsure (1)..(412): unsure at all n locations
tgtgcaccaatgcactctccatgagaccattcgtgtaaaaagtggagcctgggatgacaatggtgttttcatctacacgacattaaatcacatcaaatactgccttcccaatggagatagtgggataataaagacattggatgtccccatttacatcactaaggtttctggaaacaccatcttctgcttggatcgggatgggaagaaaagagccatagctattgattcgactgaatatatttttaaactctccttgttgaagaaaaaatatgaccatgtcatgaacatgataaagaattcgcagctttgtgggcaggctgtgattgcttatctccagcaaaaaggctttcctgaggttgccctccattntgtgaatgatgagagaatacggttcaatttggcgttggagagt

SEQ ID NO: 17480 - DNA, 338 bp, Glycine max
tcagcccatctatgaacgtattcaattggattggctctgaaaacccatgggtgggagttcttctcaataaacctctgaacctctccaatgcttcactcagagattcatcagggaactggtgaaatgaagagattgctgctttcccttccgtagtcttggactctgggaagtatttctttagaaacttttcaacaacttcttcccatgtttttagactgttacccttaaatgagtgaagccacctcttggcctctcatgccaatgagaatgagaataggctgagtcttatagcttcatctggcacaccaacaatcttaacagtgtagcatatttcaatg

SEQ ID NO: 17481 - DNA, 338 bp, Glycine max
aggtgatgacattggaatatgtgaatgtccattaatctgatgcatgactaacgagaaccacccttacaactacgtagactcataaccggagataggtttgaggtcaagatctaatctagagaattagttggtagatgtgcacaccaagcttgaacattcattccggaccctttatgtgagcatcaatattatggatcggctcctagcagttaggacaggtgcaaggttgggaatgttattggttggcatcagagtcatgctgagggcatgcaaaattgaagagatctgatcccttctgatcccttgaggtaataaagatatatatacgcgtcgatgtt

SEQ ID NO: 17482 - DNA, 365 bp, Glycine max
  unsure (1)..(365): unsure at all n locations
aacctgttccattttactgatcgttgatagacatatattataacaaataggcgacatataaataaatgaattaaatatgtttgttttaataaatgatcgaattgtattctggatctctaataaaagaatctattattttgagtcattaatatattaaaaatcttgttttgaatctctcttatcagntatgtgatgatgtgatatcatcacaacccattaataaaatttgaaaaattaatttgtaaggtgatacgtcatctgctcactaatgataaagattaaaaataatacttatattatcaaggacttcaaacaccatactaaatcattacacatgtgtaataaaataatcatttattattgac

SEQ ID NO: 17483 - DNA, 420 bp, Glycine max
tctttgagaaaacttccttgagaagcttgagcttatctacacacacccatctaaaaactaagctcacctccttgagaagcttccttgagaagctagagcttagctacacacacccctctaataactaagctcacctccttaagaagagaagctagagcttagctacacacccctataatagctaagctcacccccatgacaaggctaaaaaatcctacatttctagggtacccgacctacattatggagccctaaatacaaggctaaaaaataatgaaatcctagtctaatatgtacaaagataagtggacccaaccttggcccatgtgctcagaaatctaccctgacgttcatgagaaccctagggccttcttcagtagctctagcccaatcctcttggagccttttgctcatggctct

SEQ ID NO: 17484 - DNA, 420 bp, Glycine max
  unsure (1)..(420): unsure at all n locations
tgatcctcatcatcaatagcaacatctatattttctatatcaagaatcagtttattaaacaaatccaattgttctactactgatctatcttcaatcattttaaacgaatacaaagactgctttaggtaaagacgattaactaaagatttggtcatgtacaaaccttcaagctttaaccaaatcccagcagcagttgtttccttagagacttgcctcagcaccttgtctccgagactgaggataattgcattgtgtgccttctgcagtagtgctttcttatccccatcagccatcatcttttcaagtttggcttctccatcaagtgcttccaccaggccctgctaaacaagaatagctctcatcttcaatcgccatagcccagaatcattttgccctgtgaatnnntcaacctcatacttg

SEQ ID NO: 17485 - DNA, 416 bp, Glycine max
tcttatccaagacactttcttggtggtgaagcttcttcttccatggcttattctctagtggatggtgcctcctctcacctcttctcttttatctttcgctataactccatggctgaaaatcaccattgaaggaccttattgaagcttaaagatccaacctctatgatgcaatcctaccccgcaagggcattgggtagaagactcaaagtagattgggctagagatccaagggaaggccctagggttctcatgagccttaaggtagatttcgagcccatgggctaagtatgagcctgcttatctttgtaaatattagaataggttttcccttcgtctgggccttgtactttggccattctaatactatagggttttagccttgtatttcgaggcattttgagtagtttttgtagtaa

SEQ ID NO: 17486 - DNA, 354 bp, Glycine max
  unsure (1)..(354): unsure at all n locations
tcttctgattgagcaacctcaataccaagaaaatacttcagatatcccaaatctttggtctggaagtgactaaacaagtgttctttaagttgggcaatcttagtagtatcatttcctgttatcactatatcatcaacatatacaattagataaacatacttctcaggagatgtatgacaataaaaaacagaatgatcagcttcacttcatttcaacccannaagttgaacggtatgactaaatttaccaaaccacgctcgagggattgcttcaacccatagagagatcgatgtagcttacatacgagaatactcccnctgagcaacaaacccaggaggttggctcatataaatc

SEQ ID NO: 17487 - DNA, 379 bp, Glycine max
  unsure (1)..(379): unsure at all n locations
tcagacaatccaaataattaagagacattatttttctgtcatgagcatctttaatgttaaacattagtatatcttcgctattaaacatcattagaccaatagagttgcctaactttatttttatgagctctattatataacatctttaataaatntaacaacttttttcactttttaataatgtaactcttcatatctaacttaaaatagatctaataaattattgtagatgtttatatttttttaataaggaattattttaatattaaaaacaggttcttgcaaaagaagaatatgtgtagtctcttgtcatctanataactctaatagtanaagtggtataaaattaattgttaagttaataaagtcttaattaaga

SEQ ID NO: 17488 - DNA, 426 bp, Glycine max
  unsure (1)..(426): unsure at all n locations
gacactcagagtactcaagcttgttagtttgtcatccctttcattagttntttttttatacctaaaattgatttccagtgcctgttaatttatgcaggatttaccaagtagcaaatgtgaaatctgaatggaactgtatcaaaaccttccctgatttatctggaacaggttttatacctttttcccattgttcattattccttgagggtttgatgatttcatgtttgttcagttactaatacacaactcgaactttttcttctcagggaagaacacgtgtgtaaaatttggtccagattctaaatacatagctgtgggatcaatggaccgaaatcttcggatattcggcttgcccggtgaagatgctcctactgagtcataaaatgcctcagttgtacaagccanagtcttgctctggagtaaaca

SEQ ID NO: 17489 - DNA, 251 bp, Glycine max
atatcgagacgctcgaaattgaatgttgaagctcttagcaaattcaaacaacaataaccttttactcggatgactgattgagtcccggaatatattgagacgctcgatcatgaatgttgaagctctgagcaaattcaaacgacaataactttttactcggatgtctgattgagtccgatatatatcgatacgctcgaaattgaatgttgaacctgtgagcaaattcaaacgacaataacttatttctcgga

SEQ ID NO: 17490 - DNA, 418 bp, Glycine max
  unsure (1)..(418): unsure at all n locations
tcaacatcagaccacttccagggtgctggaactacttcacatggacttgatggggcctatgcaagttgaaagccttggaggaaagaggtatgcctatgttgttgtggatgatttctccagatttacctgggtcaactttatcagagagaaatcagacacctttgaagtattcaaagagttgagtctaagacttcaaagagaaaaagactgtgtcatcaagagaattaggagtgaccatggcagagagtttgaaaacagcaagtttactgaattctgcacatctgaaggcatcactcatgagttctctgcagccatcacaccacaacaaaatggcatagttgaaaggaaaaacaggactntgcaagaagctgctaaggtcatgcttcatgccaaagaacttctctataatctctgggct

SEQ ID NO: 17491 - DNA, 421 bp, Glycine max
  unsure (1)..(421): unsure at all n locations
tcaacattcaattntgagcgtctcgtaattntactgtactcaatcagacatccgagtaaaaatttattgtcgtttggattggctcagagattcaacattcaatttcgagcgtctcgatatattacgggcctcaatcagacatccgagtaaaaagttattgtcgtttgaattggctcagagcttcaacattcaatttcgagcgtctcgatatatgaccggactcaatcagacatccgagtaaaaagttattgtcgtttgaattggctcagagcttcaacattcaattttgagcgtctcgatatattacgggactcaatcagacatccgagtaaaaagttattgtcgtttgaattggctcagagattcaacattcaatttcgagcgtctcgatatattacgggactcantcagacatccgagt

SEQ ID NO: 17492 - DNA, 414 bp, Glycine max
  unsure (1)..(414): unsure at all n locations
tcttagtttcagatgatgcagttgagtttgtagctactctcatgcactcctctaatgactatagcatcatttatggcgctaaactgctgggagttggaagccatcttcacaattaaatttctggcttcagcaggagtcatgtctccaagggctccaccactggcagcatctatcatacttctctccatattactgagtccttcataaaaatattggagaagcaactgctctgaaatctgatggtgagggcaactggcacatagttntttaaatctctcccagtattcatacaggctctctccactgagttgtctaatacctgagatatccttcctgatggttgtggtcctggaagcagggacatttttttctaagaatactctcttcaagtcatcccaactcgtgatggacctt

SEQ ID NO: 17493 - DNA, 360 bp, Glycine max
  unsure (1)..(360): unsure at all n locations
ctgtcatcatgccgagactcaggaaggccaataggtttagccttctcaatgtattctgaacaaaattcaatggcttcttctgcaatgtacctctcaacaatagatgttgctggatgatatagattctttgtatacccttttaagatcttcatgtatcgctcaaccgggtatatcctccatagataagcaggaccataacatttgatttctctgaccagatgcacaatcaagtgaatcatgatgtcaaagaaagcaaggggaaaatacatctccaactggcacagtataattgcggcctcattntccagctcatcaaacttgacaggatcaatgactntgctacatatagcatggaagaaa

SEQ ID NO: 17494 - DNA, 386 bp, Glycine max
  unsure (1)..(386): unsure at all n locations
tttagctaattntatcgaacatatcttatataagctaataactaaaaaagttacaagctactactagtatgtttggtacacaagcttattttaataacttgtttttcataagctactttaaataacttattttcattaactgctttgaaataacttatgaaaaataagttataagctactggtttttttcttctcaattttatctattttatttgaaattttattttatcatttcattcaactaaaaatccctcatcatcttttattttctgtctggaaaaatgctcttatcttttattagtttgttgaatgtcaaactatttatgtcaataaactattacattgcttattgtaatttattattaaaatattttggtactaaacaa

SEQ ID NO: 17495 - DNA, 413 bp, Glycine max
ttagcgaattactattgttattgaaaaatatgcttcttgtagataacatgctaccgaagaatcattatgaggcaaagaagatattatgtcctattggaatggaataccaaaagatacatgcttgccataacgattgtattttgtataggcatgagtatgctgaattacgcaattgccctacatgtggggtgtcatgctacaaagtcaattccaacgattgcagtgaacatgctagctcatacaaagatcgtccatccaaagtgtgttggtatcttccagtaataccaaggtttaagcgattgtttgctaatgcagaagacgcaaaaaacctaacatggcatgctgatggcaggatcaacaatggattgctctgtcatcctgttgattctcctcaatggaaaataatagatcag

SEQ ID NO: 17496 - DNA, 269 bp, Glycine max
atcatgcgcctattgccaccgtcataaatataggtattttgagaatacatcttaaagaccaatggttaacgatggctctaatgggcggttttgcttgaataaataataatgagatcattgctttagtaaatgatgcggaaaaggatagggacattgatccacaagacgcacagcaaactcttgaatagcaaaagcttatttgaataggcggaaggcaagagacaaacaattgaagcaatctagctcttgacgagctaggacacgataga

SEQ ID NO: 17497 - DNA, 390 bp, Glycine max
  unsure (1)..(390): unsure at all n locations
taactctcaaattccncttcatcccaggctctntagtataagctttccttcattanggacaacaacctcagcaccaggtttgacaatatctgtcaatgggatcatgagactccttccgtccaatgtggtgagatccaacgttntaccagtaaaggcctcaagaaaggttatctcttggttgatcaccanatcattaccatcccttctataaagagcatgcggcttctcatctatcacaaaaatgagatctgctgggatgacaccaagctcacggntacctttctctggaaaggtaatttttgttcctttcttccagccaggttttatctcgatagtcaaaatctcctccacatccccacatttgctgaaatggaattgcatgtgtcaaat

SEQ ID NO: 17498 - DNA, 421 bp, Glycine max
  unsure (1)..(421): unsure at all n locations
gagttggagtgcacattgtattatttattgtggagagccatgaaagaagcaaagcaactagtggaaaggaatgagaggaaacaatatgtcaaagtatttgattatgcacatgaattattgaggagcaatcctggatcaacagttaagatcaacatagtgccaagcccagaaggtccaccacaatttcacaggttatatatttgtcttgctggctgtaagaaggggtttgttgctggatgtagaccattcataggtctagatggatgtttcctagagagtgcatatggaggaaacttgctctctgctgttgggcttgatggcaataaccacatctttgttattgcttatngtgntgcggacattgagaacaaagacaattggaaatgagttttaactgtgttgcataaagatcttggggatt

SEQ ID NO: 17499 - DNA, 332 bp, Glycine max
tagctttcagcaaattcaaacgacaataacttttttactcagatgtttgattgagtcccgtaatatatcgagacgatcaaaattgaattttgaggttctgagctaattcaaacgataataagtttttactaagacgtttgattgagtcccgtaatatatctagacgctcgaaattcaattctgaacctcagagcaaattgaaacgagaataaatttttactcggatgtctgattgagtcccgtaatatatcgagacgctgtaaattgaatgttgaagctctgaccaaattcaaacgacgataactttgtactctgatgtctgattgagtcct

SEQ ID NO: 17500 - DNA, 413 bp, Glycine max
  unsure (1)..(413): unsure at all n locations
tgtaaatgagctntatataccataagttcttaattatttaagggacattnggataaatactttaattaagcacttatttataagtttttatcaaaatttaagttaataattgtccccctaactattaaaataagttataaaaaatcttataaaaataacataaataacttttattagctcgaataaaccttatttatcaaaatagcttaccttatcagtataagtattaattacctctntcccatattttttaatatttaaggttattacacataaactaaanaatgatatattaaatacatcgatgtttcatacttgtactaatagtaataatgatattaattagactctaaaattctaaagtatcaattattttgaagagaagatgaaaagttagaatgtctaaaaataca

SEQ ID NO: 17501 - DNA, 411 bp, Glycine max
agcttgcactcaagattctccttgcctggcacttcaaaaccttctggttgggtcatatagatgtcttcctctaaatccccatgcaagaatgcagttataacatttaactgctcaaagtgaagattctctacagctgctatactcagaataactctgatggtagtcatctttacaactggagagaagatctttgtgaaatcaattccttgtttctgctgaaaccctttcaccacaagtctctccttgtatcttcttctaccgtcagattcttcctttagcctatagacccacctattctgtaacgctttctttccttctggaaatttagttaaagaccacgttttattcttctgaagggatgtcatctcatctttcatcgctagctcccacttaatagtgtcattcccctgt

SEQ ID NO: 17502 - DNA, 407 bp, Glycine max
  unsure (1)..(407): unsure at all n locations
agcttggattttcttttagtaaggaatctatccttcctaagatagagccaaacccaatccccctcattaaaaactagctcctttcttcctctattgcccttagttgaatacacctttgtttggttctctatgtgggtcttaaccctctcatgcaacttttttacaaactctgacctagattccccttcttcatgtataaaaagaagtgtcaagtgggaggggaatgaggtctaggggtgttaggggattgaacctatagacaacctcaaaaggggattacttagttgttctatgaacccccctgttgtangcaaattctacatgaggaagatactcatcccaagacttatggttgcctttcagaagagcccttaaaagggtggataaagacctattcactacctctg

SEQ ID NO: 17503 - DNA, 418 bp, Glycine max
cttggagagaacacaaagtggtaggcctatataagtctagtttagtgataggggaaaggagtaaacgtccaatgagtttgataaattttgcgaagaagaaggtgtcaacaggcagttgactgctggctatatacctcaacaaaaaggtgtattcgaaaataagaatcaaaccgttatggagatgactaggtccatgctttttgagaaaggaataccaaaataattcttgtccgaggctgttaatatagccttgtacctattgaatagatgcccaacaaaagtggtacggaatatgacaccatttgaagcatggagtggaagtgttgatggattggcaagtgcaccaatttgtaagaaatcgttggctacacgaatcattgaggtggggaggactataagacatgactgatgggatgga

SEQ ID NO: 17504 - DNA, 332 bp, Glycine max
ggacctaaaaactcaagctagcggtaaataggaacgcaacatctccctgcatactatagacagacagggaaatggaggctgcaaacttagtaccgcaattccttacaccaaattccacacttcgatataccagccacttgggaatgactttgtaaagcaagcaacgcttaggacaataaagagagtgactctggtggcaccatttggggcgtgctttgattcaagaaccattggcaagaccggtactggacccaatgtgccgacaattgatctgagtctcaaggggggagttcaatggagaatctatggtgccaattcaatggtcaaggttc

SEQ ID NO: 17505 - DNA, 400 bp, Glycine max
agcttccacaaccccaactatagtcctagtaagctccgctgcctgtctctcggtataatgcccacgctgaataatcctatcgaaaagctctccacctgcacatagttccatcacaacgtggacagccatggcatcctcatatgcacccttgatggatataacattaggatgcccagccaagtggtgcattatctgaatttctcttctcacatcctcgacatcatcatcggtgacgagcttcctctttgcaatagatttacaggcatactcctgtcctgttgccttctccacacacaagaatgttgtcccgaactgaccctgtccaagttttctcccaagagtgaagaactccttgaaattatctgtctctctttgcaacacagaatcaacacgaagccct

SEQ ID NO: 17506 - DNA, 411 bp, Glycine max
  unsure (1)..(411): unsure at all n locations
acagcttactaaaacaggagcagacctcnnctttattttatttttatagatcagnaggtggagctcttcaatactccactataaccagacctgaactaagttttgctgtaaacaaagtctggcaattcatggccaaccctcttgaatctcactggacagcagtgaaaacaattctcaggtatctcaaaggctctttacaccatggcctacttctcaaagctgccactcctcccattcccattaaaggcctttgtgatgcagactgggtgtctgaccctgatgatcacagatctacttcaggagctgctatttattttggtcctaatcttatatcttggtggtctaagaaacaacagattgttgcaagatcaagtactgaggctgagtatcgaagcccagcacaagccttct

SEQ ID NO: 17507 - DNA, 439 bp, Glycine max
  unsure (1)..(439): unsure at all n locations
tactcaagctttgctggtgtcgagaagatatcacatgttngncatcattataaatgggttagaatgcgaatgtatgtatacatgattttgatgatgccaaagaaaaatcaaacaaggttgcttcaaatgataagcatttgcttcaagaataattcaagagtgcttcaacaaacaaagccttgtttcaagattcactaaagaccaagccttgccttaaaacaaagtgctttcaagacatgcaaggctctggtaatcaattaccaggaagtgtaatcgattaccagaagacagggttgagaaatagctgttgaaaaaggttttgaatttgaattttcaacatgtaatcgattaccatatgtctgtaatcgattaccagcaacgaaactttggaaattcaaattcaaaagtcataaccctctcaaatataactgtgtaatcg

SEQ ID NO: 17508 - DNA, 436 bp, Glycine max
  unsure (1)..(436): unsure at all n locations
tgctaacccatggaagctcctaatatctccctcactttttgtggtgggccattcttggatggccttgattttctcaaggtccaattggaccccatttcttccagctacaaaacctaagaaaactatattatctacacaaaaggtacacttctctatatttgcatagagggtgtttttcccaaggactgaaagaacttgcctgagatgtcctaagtgatcatctaggctcctattgtacactaaaatatcatcaaaataaacaactacaaatctacctatgaaatcccttaagacatgatgcataagcctcataaaggtgcttggtgcattagtgagcccaaaaggcatctctagccattcatacaaaccaaacttggtcttgaaagcggttttccactcatcactctctntcatcttgatatggtgataaccactt

SEQ ID NO: 17509 - DNA, 390 bp, Glycine max
  unsure (1)..(390): unsure at all n locations
tcaagcttattaagtatatgtatataaatgtattaacataacattaaaatactaacataattatatatataaattatattaatgtaaaaaaaattaatatatatatatatatatatatatatatatatatatatatatatatatataacagacatataaattcagtacttttgtgcttacgagtcaaagtttttatacaagaaagtcgaagtatatatcttatttgatacaaactctnttttttttttgcagatccattgtaataatgagaaaaatttcggcatatccaaaaaaccggtcaataatatcaaaattagataaattggcccacaccggcttacaaatgggatggccaaatacattacaaaattntgctttcgccaatgatct

SEQ ID NO: 17510 - DNA, 437 bp, Glycine max
  unsure (1)..(437): unsure at all n locations
agtgaccatttgaataactcaagagcttccattgctcaattgtgtgcgtctcgaacattatgcgccttaatcggacctccgagtgaaaaggtatgaccatttgaataactcaagagcttccattgttcaatttcgagcgtctcgatatcttatgtgcctgaatctgacctccgtgtgaaaagatatgaccatttgaatttctcgagagcttccgttgttcaatttcgagcggctcgatatcttatgcgcctgaatcggacctccgagtgaaaagttatgaccatttgaataactcaagagcttccattgatcaattacgagcgtctcaatatattatgtgcctgaatcggacctgcgagtgaaaagttatgaccatatgaattgctcaagagcttccattgtccaatntcgagcgtctcgatatataatgcgcctga

SEQ ID NO: 17511 - DNA, 378 bp, Glycine max
agcttgctgccacggttttttccgactatgctcttgtgtggtggaacaagctacaaaaggagagagcaagaaatgaagagccaatggttgatacatggacagagatgaaaaagatcatgaggaagcggtatgtgccggctagttactcaagggacttgaaattcaagctccaaaaactaacccaaggcaacaagggggtaactatggctcgatttcttaatggatgtgctcatgattcaagcaaatattgaagaagatgaggaggtaactatggctcgatttcttaatggtttgactaatgatatcccgtgatattgtgagctgcaggaagttgttgaaatggatgatttgcttcacaaagcaatccaagtggagcaa

SEQ ID NO: 17512 - DNA, 439 bp, Glycine max
tctcgatatgttatgcgtctgaatcggacatgcgagttaaaattatgaccattttaatttcccgagagcttccgttgttcaatttctagcatctcgatacgctatgtgcctgaatcggacatgcgagtgaaaagttatgaccatttgaatttctcgagagcttccgttgttaaatttctagcgtctcgatacgctatgcgcctacatcgaacatgcgagtgaaaagttatgaccattttaatttctcgagagattccgatggtcaatttcgagcgtctcgatatgttatgtgcctgaatcggacatgcgcatgaaaagttatgaaccatttaatttctcgggagcatctgttgttcaatttctagcgtctcgatactctatgcgcctgaatcggacatgcgagtgaaaagtataaccatttgaatttctcgagagcttc

SEQ ID NO: 17513 - DNA, 373 bp, Glycine max
  unsure (1)..(373): unsure at all n locations
ggaccttgatctagctttataaatgcctattaatagacaaatgctgttttccgtatttatttggtttgaattcatacagggttgatcgagactgacttatttgtaatgaaatggaatttaaatttgtaattaagaacctgggtagaaagagtgaaagatagatctcactaaagtggtgagtaattntaccatcaaatttaatcattcataaaatcgatatatattaatttcatactaataatataaagaaaaatatcactcatttatgaataatcacacttaactaagaagtgtcaaaattatagcattaattcaaataaaaaaaataattaaggaatgtaagtatanattattaaattaaaaacttcatatg

SEQ ID NO: 17514 - DNA, 407 bp, Glycine max
ttctgcttgaaattgaaaacggaagctctaagaaaagtcaaacgacaataccttttaactcggatgtccgattgagccctgtaatatatcgagacgctcgaaattgaaaacggaagctctaagaaaagtcaaacgacaataaattttgactcggatgtccgattgagtctcgtaatataccaagaccctcgtaattgaaaacagaacctctgagtaaattcaaacgacaataacttttcactcggatttccgattgagtcccataggatatcgagacgctcgtaatttaaaacggaagctctgagaaaaatcaaacgacaataacttttaactcggatctctgatcgagccctttaatatatcaagacgctcgaaattgaaaaccgaagctctaagagaagtcaaac

SEQ ID NO: 17515 - DNA, 391 bp, Glycine max
gctgatctttcaacatcctccatcttttagaatttccaaagcatattttctttgcgaaatgaatatacctttcttggatcgagaaacctccatgcccaaaaaatacttcaagtcacccaaatatttaatctgaatcattaccagttatgaggatgtcatcaacatagatcaataaggcagtaaatgatttgcctttcttacatgtaaacaacgaataatctgcttttgattgaataaatccagcaccttgaatagttgtaaagaacttggcagaccattggcgagaggcttgttttaatccatataagggattgttgaggtgacacacaatgttctcccgctgtcgctgaacactaggaggaagagacatataaatttcttcagaaagatc

SEQ ID NO: 17516 - DNA, 376 bp, Glycine max
catgtgactgaactttgcccaatttatatgaaataaaataaatgcattctcaagttttgtttgctgaatgctacaagctttgcaaaacgtttttgctgctttagtctattctgcaaatactagtattgattatgtgttggagtcattatttgcctctgctaagccttctccacagtctggtggcattgctaaacaagctttgcattcgatagctcagtgtgttactattctatgccttgttgctggtgatcagaaatgttcatctacagtgaaaatgctcactgacattctcaaagatgacaacagttctaactccgtaagcttttctcttcagtgaaaatgctcatctacagtgaaaatgctcactcacattctc

SEQ ID NO: 17517 - DNA, 406 bp, Glycine max
agcttgaagtaaattcaaacgacacacaactggatctgagatttccgaatgaattccgtagtatatctagacgctcgaaattcagaacaaaagctctgagcaaattcaaacgaaaataactttttactcgtatgtccgatcgtttcccgtagtatatcgagaccctcgtaattgaaaccagaagcccgtagcaaactcaaacggcaataaattctaactcggatgtccgaatgaatcccatgatatatcgaggcgatcgtaattgaaaacagaagctatgagcaaatgcaaatgacaataactttttactcggatgtcggattgagtcccgtaatatatcgagacgctcggaattgaaaacagaagctctaagcatattctaacgacaataactttttactcggat

SEQ ID NO: 17518 - DNA, 434 bp, Glycine max
agaaactcagccgagctaagccccagagcataaaaatcttgtgttcttttgtgccaatcattacttcctgcataaaccagaccttagaaacaatagtatctttggtggtcatcaatttccaaccttgctttcctagcatgacaagattaaaaagcgtgaagatgcttgaaccccatacctccaaattctttgttcattgtcaacctctcccaatttaaccatttatacccttgctcgagtgattgttacatactaccccaccaaaaagagttcattattttttttctaattcaccctgaagagtagatggaaatagaaaaatgcttatacaataagtgggattgagtgagctactaacttaatgagaatttctttatccaccttggaaagatactcaatggaccagggatgaatacacatggaaagtctatctt

SEQ ID NO: 17519 - DNA, 408 bp, Glycine max
  unsure (1)..(408): unsure at all n locations
agcttgcctttccccttgatatattngagggactcatggtcactatgaatgacaaattccttgggataaaggtagtgttgccatgttttcaaagcccgtactaaggcatacaactccttatcataagttgaatagttaagggtaggaccacttaacttttcactaaaataagcaattggatggccttcttgcatcaacacagccccaatcccaacatttgaagcatcacacttaatttcaaaagatttttgaaagtttggcaacgaaagtatgggggcattagttagctnttgcttaagaacattgaaagcttcttcttgtttctctccccatttgaaaccaacatttttcttgagcacttcattgagaggtgctgccaatgtgctaanatccttcacaaatcgtcta

SEQ ID NO: 17520 - DNA, 408 bp, Glycine max
tttgcttcaagaaaaatggccttagcaaacttcttatttccagaaggaaattcaatcaatagacctccaatctttaatggagagggttaccactactggaaaacccgaatgaaaatttttattgaggcaatagacttaaatatttgggaagccatagaaatagggccttatatacccaccacagtagaaagaatcacaatagatgggagcacaacaagtgaaagcataacaatagaaaaacctagagatagatggtctgaagaggatggaagacgagtacaatacaatttaaaagccaaaaacataattacatctccctgtggaacggatgaatatttcagggtttcaaattgtaagagtgctaaggaaatgtgggacactctacaattaacacatgaaggaacaaaa

SEQ ID NO: 17521 - DNA, 386 bp, Glycine max
caagctttgatctcatttggagaggttaatgaaacaacgagatgatgcgctccatgagaggttggatcaaatggagaatagagatcataatgaagaagaaaggaggagaagagggaatgatggtgttcctagacaaaaccgaattgatggtattaaactcaacattcctccatttaaaggaaagaatgatccggaggcctacttggagtgggagatgaaaatagagcatgtattctcatgcaacaactgaggaggacaaaaaggtgaagcttgccgccacggaattttccgactatgctcttgtgtggtggaacaagctacaaaaggagagagcaagatatgaagagccaatggttgatacatggacggagatgaaaaagatcatg

SEQ ID NO: 17522 - DNA, 437 bp, Glycine max
  unsure (1)..(437): unsure at all n locations
ntgagaaaattcanacaacaataactntntacacggatgtctgatagagtcatgtaatatttcgagacgctcgaaattgaatacggaagctctgagcaaattcaaacgacaataactttttactcggatgtctgattgaatcccataatatatcgacaagctcgaaatagaatcttgatgctctgagcaaattcaaacgacaataactttttactcgaatgtctgattgagtcctgtaatatatcgagacgctagaaattgaatacggaagctctgagcaaattcaaatgacaataactttttactcggatgtctgattgagtcccgtaatatatcgacacgctcgaaattgaatgttgatgctctgaggaaatacaaatgacaataacttttttctcggatgtccgattgagtcccgtaatatatcgagacgctcg

SEQ ID NO: 17523 - DNA, 409 bp, Glycine max
tcatgcttaagtatgtatggaacaacttcattactgttgtttaacacatacaagagagcttatgacaaatcttctagacttggagtcattacatgcaatcctcttgaacccttaccacccactctgacatcatgctgaaacttaagaaggccaacaggtttagccttctcaatgtattctgaacaaaattcaatggcttcttctgcaatgtacctctcaacaatagatgctcctggatgatatagattattcatatacattttaaaaatcttcatgtatcgctcaactgggtacatccactgcaaataaacaagaccataacatttgatttctctgacgagatgcataatcaagtgaatcatgatgtcaaagaaggtatggggataatacatctccaactggcacagta

SEQ ID NO: 17524 - DNA, 428 bp, Glycine max
  unsure (1)..(428): unsure at all n locations
atactcaagcttcaagaattatggcctcatcaaactatttgntttcgtgtgaaattgtataaatagacctcctatctttaatggagtgggttaccactactggaaaacccgcatgcaaatctttatagaggcaatagatttaaatatttgggaagccatagaacaaggaccttatgttccctctataatagccggaagtgcaacaatagaaaaacttagagcagactggactgaggaagaaagaagattagtacaatataatttaaaggccaaaaatattattacatttgccctaggaatagatggatactttagggtttcaaattgtaaaagtgctaaggatatgtgggatacactacaagtaacacatgaaggcacaacagatgttaaaatatctaggataaacactttaactcgtgaatatgaac

SEQ ID NO: 17525 - DNA, 396 bp, Glycine max
  unsure (1)..(396): unsure at all n locations
agtttgtgaaaaccttgacacaattcatgcaagtcttcatctcaaaccataaaaccacgaaatcggcaatcaaaaatcttgaagttcaagtaggccaacttgcaaagcaacttgcggagaagtccaatgggaattttgtggctaacacagagaaaaaccacaaagagaaatctaaagtggtacttacaataagaaaaaggatggatggccttgttagtgataatttagtggaaggtgtagtaaaagatatgggtgatgcgaggaaagtgtangagagagagacatagctgagaataaagagaaacaaataagtgttgaaaatgtagaanaaaccagaaaagtggagaanaaaagaaaaacacttttaaggaaggagttgacgaggcatatcttcta

SEQ ID NO: 17526 - DNA, 290 bp, Glycine max
  unsure (1)..(290): unsure at all n locations
agctttgatcatctaccttatttctgacagccagtgggtgaatccagtccaagtggtccctaagatgacagacctcacaataattaagaatgatagggatgagcttatccccataagaatgcagaacagttggcgagtctgcattgattataggaggctgaaccaggtaaccaaaaaagatcatntttccctgcctttcattgatcaaatgcttgagcgcttggctggtaagtctcattaatgctttcttgatggcttttctggttatttacaaaatcatattgctcttg

SEQ ID NO: 17527 - DNA, 330 bp, Glycine max
tcaacatcagaccacttccagggtgctggaactactttacatggtcttgatggggcctatgcaagttgaaagccttggaggaaagaggtatgcctatgttgttgtggatgatttctccagatttacctgggtcaactttatcagagaaaaatcagacacctttgaagtattcaaggagttgagtctaagacttcaaagagaaaaagactgtgtgatcaagagaatcaggagtgaccatggcagagagtttgaaaacagcaagtttactggatactgcacatctgaggcatcactcatgagttctctgcagccattacaccacagcaaaat

SEQ ID NO: 17528 - DNA, 387 bp, Glycine max
ttgcatgccagctttgttcgaggatgcctacccattacccattaaatatagactagttgatagggccacaagaccctgcctacttagcttcttagatgcatactcaggggacaaccaaatacggatgcatccacaagatgaggagaaaacaaacttcataacctaggcgactaactattgctatcagattatgccattcggcctataaaaggctagctccacttaccagcacctattggacatgatattcaaagaacaaattggaaagaaaatggaggtatatgttgacaacatggtggtatagtctaatgatgcagaatcacacacctatgattttgaagaaatatttgcaaagatctgaagcctaacatgtaactcaattcgaag

SEQ ID NO: 17529 - DNA, 323 bp, Glycine max
actgggataaacttcttgaagggcttctttgtctgcttgcattccaagcaatttctacatttctcctgtggttattgtagttgaagaattccttgtgccaacttgtgcatttgagcaaaatctttgaaattcaagtgtccaagcctacagtgccaaagccattcttctttgttgctcacagcactaagacattcgtgctcaaatgcttgcgttccaattttgaaagttctatttctggtcaatggtgtttttatgattagatttctggttttgtcatataccagcatcatcatgtcctccatagttatcttaaagcctttttg

SEQ ID NO: 17530 - DNA, 360 bp, Glycine max
agtttgtcgtctcggagatgtccgactatgctcttgtgtggtggaagtgattatgcaagttgaagtggacgtttccattgggaaatacaatgataaggtactttgtgatgttgttcctatggaggccagtcacttacttttggggagaccatggcaatttgataaaagagccaatcatgacggttacaccaacaagatctctttcattacttttggtgttgcataaaaaatgtacaatgtaagtcggctaggtatttttgtgcgagctcaaccgacattttgtttcgagcgaaactggcatgttcccatttatattggccagtaaatcattagcccacctcggcataaaaatatttgcta

SEQ ID NO: 17531 - DNA, 386 bp, Glycine max
agcttgtttagaataacaagatcaaaatgcacaatttgctacgtgacatgggaagagaaattgttcgtcaaagttctctagaggaacctgagaagcgtagtcgattgtgggttcaccaagaagtgcttgatttgttgttagaacatactgtaagaactttctctacatattattttgaaacttttgatcatatgtgtttttatcatgatcacaaaactaaatttaaatcatcttgttctttttaagttatgctaatttttgtgggattcattgttcacaaaaataaatttgaatgattctgctcttttaatgtgatgcaatgttattagacccggatttattcagaccatgttgcttgcaaaccagtgttcgactgtctgaactac

SEQ ID NO: 17532 - DNA, 372 bp, Glycine max
tctatttttgcccttgcagaaattaatgttctatctaatcatgacagttcaccaggaaatcaggttactctttcatttgaagagtatactgctctgacgggcaaagctcgagatgcagaggaacaatctaagaagagagttgcaagttctatgcttgaagttgacgaaacaagtttgtcgaacatggacattttgaaaagggtagaagaagctacagaagaagttaaaactagcaagaaggcccttgaagaagctctagaaggggtagaagctgcgaatagagacaaagtagcagttgaagaggctctaaggaattggcgatctgagggtcaaaataagcgttcttctatacacaactctaccaagttcaaa

SEQ ID NO: 17533 - DNA, 311 bp, Glycine max
gcgcctgttatacttgcgaatctttctgaacacctattccaagactgtgatgtgtcgggtcatgctataagacttgacaggcatgtcatcaacatagacctcgatatttcatcctattttttgtttggagacccggtccatgaacctttggtacgtggcccctgtagtcttcaatccaaagggcataaccatgttacagaaattgatgtcttcaattatgaaggcaattctctcctcgtcaggagggtgcatcctgatctggttataccctgagtacgcgtctatgaaacttaacaactggaaacccgacg

SEQ ID NO: 17534 - DNA, 388 bp, Glycine max
  unsure (1)..(388): unsure at all n locations
agcttattactttattntttcggatcgtgtaatttaaaacttataattgatagcagaaaataaaatttataacttgttaaaatagaattgtttgatatatttaattattctatcagttgataaatataaaatgatataaaaatgtttatatactattgtcacataaaaatgttntttaggtaactataattttaaatatttgattcttattttttttggaaatatataatattttattaaaaataaaatatcagaaaggatattaaaatagttaaaagacctataactattaagaagagatgataaataaagtggattaaagcaagaataaaaatgaaaagaaagaataatattactaatacatgcttttaacgagttataagttaac

SEQ ID NO: 17535 - DNA, 360 bp, Glycine max
agctttacacagtttatttttctcaaacttgagttttggaagaccaattactaagtctttcctaattagatgatttaaatgattcatattaatgtgtgcagtcctacaataccacaaccatgaatcatctatcttactcaccaagcaacttagctcatgaaaaactgcatgctcaacattcagcatataaatgttacctattctcttaccaatgtggataactttatcggatatggcttcacttataagacatcaatctatgttgaattcaatcttgaaacctttatcacaaagttgactaatacttagaacggtatgctttaatccattcataattaacacatatttcatctaaggttt

SEQ ID NO: 17536 - DNA, 400 bp, Glycine max
  unsure (1)..(400): unsure at all n locations
agctttcacaacaaatttctaaatatgtttttgaacaaaatgaagtacgtaactaattaccactaatatatactgtgactacttagaaggaagggataggtcatgattagtccaacctaatctgcctaattaaactaattacacaaagcaaagcctaaattcgtaacccaattattcaagtgcagaggttctgacttccaatattaatttgaccctcaaaatggaaggattggcccaagcttattgatgcaatcctcccaaggaggggacccatcaccatagccatgactaggagactccaggaagattgggctagggatgcaagagaaggccctaaggttctcatgagccttangatagatnttgggcccatgggctaagtatgaacccacttatcttt

SEQ ID NO: 17537 - DNA, 362 bp, Glycine max
agcttttggtgggacatcttgacttgctttccaatctgacattcaccacagattctgccttcttctattttcagattgcgaatgcctctaacagcacctttgtcaatgagtttcttcatgcctcttaagtgcagatgtccaaatctttgatgccatattctgacttcatcttctttggaggatagacatgtggaggagtaactggtttcttgaggtgtccataggtagcagatgtcctttgatctgctgccctttattagaacttcacacttctcatttgtcactaagcattctgaccttgtgaagtttacattgaatccttcatcacacaactgactgatgctgatcaatttgcagtcagt

SEQ ID NO: 17538 - DNA, 380 bp, Glycine max
  unsure (1)..(380): unsure at all n locations
agctttatgcggcataattttagttgtttcttcttcctttatcttttaagatagtccatacaatcaggtctctccaatttcaagacatgttattctattaagaaattataagaactttgaatttttaaaactattcatatagacattagcaactcacattgttttaaatagaaattatgtgcgtgtttggatgaacattaatataattgattntgaatgaaattaattttataaaattgatttaaagtaatgtgatttatatttgaatgtttttaaagtatgttaggagtaaaacttaatattaaaattgtgttnttatacatatatntatgacaaatactaattacgttgnccatgatctttttatgttcacctatgtt

SEQ ID NO: 17539 - DNA, 300 bp, Glycine max
  unsure (1)..(300): unsure at all n locations
atgacacagncttatggtctttcctggattatatgctgcatacatcgggctcttggcataaatggagaaagtggatcccagcttgtcttcactcagcaaccatttctatccttattaatggcagccctacaaaagagttcaccccatctagaagcttgaggcaaggagaccccctaacccctttactctttaacatagttgggaaagcatttcaggcctaatgaaggaagcagtccggaagaatctctataccactacaggttgcgatgaaatatgagcccacaatattctgccaaatgc

SEQ ID NO: 17540 - DNA, 415 bp, Glycine max
  unsure (1)..(415): unsure at all n locations
tgggataagaaactaagaaactatgaaaaaataagacttttataatatactaaaaatatcattaatgattaaatatggtgaaataaagaaaaaaattaaaataaagtgagataaaatatttaatttgataaaatttattaacttctaaaatgatatacagatacacgtgtatttaggaatgaaaacataatatacatgttaattcataatataagaaaaagttataatattttaaaattagcataataaaaatacagacgtacacgtgtttgtatttctgctagntatatataaattaaattattaaatatanaacacattaatttttaatcaacatactctattagaataaatgatctatactggttttcaatggtaatttggtggttttgtttaaatttgttatattttctaa

SEQ ID NO: 17541 - DNA, 371 bp, Glycine max
  unsure (1)..(371): unsure at all n locations
cgccaaatgctctataggctgatgagttggtccatcttctctaagtccaatcgtatcatgagtcatcacataaataacttcagcttcacacagtgcataaatccttatggcagctctcatgtagtcagtgaaaacaaagggcatntaaattttgctgaaacagatttcttgtagcatatgcagggctttctggagtgtatgtctgaatgttgaaatttaattaaaagggtagtcaataatccagaaacaaatgatggaagtcaagttttatttatctttaaagttgaaggctatacatgcatgaagcanaaagatggatgatgagtgaagatgcaatgtacttaatatgaaatttactgtattaggaaagt

SEQ ID NO: 17542 - DNA, 384 bp, Glycine max
agcttatgagaaatccctgttttgtggagagataagtccttgtttggctgatttaaagcatttgaatcacttgaacttgagcggcaattatttccttggagcaggtatgtcaattccttctttccttgggacaatgacttccttgactcacctcgacctctctcttactggattcatggggaagattccatctcagattgggaatctctccaatttggtctatcttgacctcggaggttattctgtcgagcctatgttagctgacaatgtagaatgggtatcaagtatgtggaagcttgaatatcttcatttgagttatgcaaacctatccaaagcattacattggctacacactctccaatctcttccttctttgacccacct

SEQ ID NO: 17543 - DNA, 354 bp, Glycine max
  unsure (1)..(354): unsure at all n locations
agcttatgctgcaaacatttataatagacctgctcagctgcaaaatcaacatcagcagaataattatgacatttcaagcaacagatacaatccaggttggaggaatcatccaaatctgagatggacaagtcctccacaacaacaacaacctatccctcatttccagaatgctgctagtctaagcaagccatatgttcctcctctattacagtagcagcaacagcagcaatcacaacaaagacaacaagaaactgaggctcctcctcaaccttccttagaagagttagtgaggcaaatggccatccagaatatgcaatntcagcaagagacaagagccttcattcanagtctgac

SEQ ID NO: 17544 - DNA, 428 bp, Glycine max
  unsure (1)..(428): unsure at all n locations
acttcaacaatattacaaaattgatttttatatctttaaattgattaaaaatatcattttaaaataattaacaaatatggtttttgaatataaaaaacacacgctatttcaacaaatttaatataaatatttatttttacgataaatacatttaaaaattaattatgaaaagaatcaagtccatcttacacatattatctcaaaattgaataattatatattcatatttaacatatttacattcttttttaatttatatatttcatataagtattccatgactattactgcttagtaaaaaattaaattataataaatttcattaggttaagtatttttaatgataacataggtttaattacaattttaaataatcatcttctttgatntaatataatatatatatatatcattgatattttgacatg

SEQ ID NO: 17545 - DNA, 408 bp, Glycine max
  unsure (1)..(408): unsure at all n locations
ttgaatgctctattcaatggagttgacaagaatatcttcagactgatcaacacatgcacangggccaaggatgcatgggagatcctgaaaaccactcatgaaggaacctccaaagtgaagatgtccagattgcaactattggctacaaaattcgaaaatctgaagatgaaggaggaagagtgtattcatgacttccacatgaacattcttgaaattgccaatgcttgcactgccttgggagaaaggatgacagacgaaaagctggtgagaaagatcctcagatctttgcctaagagatttgacatgaaagtcactgcaatagaggaggcccaagacatttgcaacatgagagtagatgaactcattggttccctttcaacctttgagctaggactctcggataggact

SEQ ID NO: 17546 - DNA, 443 bp, Glycine max
  unsure (1)..(443): unsure at all n locations
tttcttagtcgtctgtaaagatgattaggtgttanttagcggcgatgcctactgtagactgtgtgtctcccatgtttaagttgtatgtaacttgtattttcttcacagatggggcatgcgtgatgacccttaacactgtaaccgctgagattcccatatgctggaaagtcattaatggtacaaaaaagcattgcacgcatttcaaacgtctccttgcgaaacgcatcatacactacaaccccctcgtcccacaactttctcaaatcttcaatcaacggacttagataaacatcaatgtcatttcctggctgtcttgggcccgatatcatcatagacaacatcatgtattttcgcttcatgcacaaccaatgagacaaattgtaaattactagtagaactggccatgaactgtgttgagtgcttaaggagccatatggattcat

SEQ ID NO: 17547 - DNA, 385 bp, Glycine max
  unsure (1)..(385): unsure at all n locations
agcttttattctagagcatcccgaaggagaaagctcacaagtcacaagtgtcttgtaagaccaaacctggaatttgcttcgagggagggagaccaagaaaaaaaaatgtttacatgtatataacatataaaaaaaggtttaatatatgatatatatttaatatttttttataaaaatatatataacaatatcaagtaaaaaacattattatctaactaattatatcatttatataaatataagaaacaaatataatatttnttcttgtaattataaaaaaagacaaacttgtatttaaatatattaattatacatttatataagagacaaatagatacaattnttatatccttaatgtattggtgaagttactaatgagataatc

SEQ ID NO: 17548 - DNA, 372 bp, Glycine max
  unsure (1)..(372): unsure at all n locations
agctatgaccattcgaatttctcaagagttgccgttgttcaatttcgagcgtgtagatgagttatgtccccgaatcggacatctgtgtgaaaagttatgaccattcgattttctcgagagcttccgttgttcaatttcgagcgtctcgatatattatgaccccgaatcggacatctgtgtgaaaacgtatgaccattcgattttctcgagagcttccgttgttcaatntcgagcgtctagatgagttatgtccccgaatcgaacattcgagtgaaaacttatgaccattcgaatttctcgagagcttccgttgttcaatttcgagcgtctcgatatattatgttcccgaatcgggcattcgagtgaaatgtt

SEQ ID NO: 17549 - DNA, 215 bp, Glycine max
ggtttcctgaacataggaaatcaaagcttcaacaatggggagatggaccatttcaagtgcttgaaagaatcaatgacaatgcttacaaagttgagctgcccggcgagtataatgttagttccaccttcaatgtctttgatttacctctctctgatggcagatgtagaatccgatgtgaagacaaatccttttcaagatggagagattgatgagga

SEQ ID NO: 17550 - DNA, 387 bp, Glycine max
  unsure (1)..(387): unsure at all n locations
ttctataatcaacgcacattctccatcctgtgtctgttctggtatgaatnagaccatttcgaacatttcttattactgccattcctcctttctttggaacaacttgaacaagactgacccatgagttgtctgagattggatagataaagcctgcctctaataacttgagcacttcttttcttacttcctccttcattataggattcaatcttctctaggttgtcgcacaggcttataatcgggcttcaaattgattttgtgcatacaatatgatggactgattcctttaagattagaaatgtgccaaccaataaccgacttacgtcatttagaatctgcactaattgatcttcttctctcttcttcaaagagttgctatttataaca

SEQ ID NO: 17551 - DNA, 385 bp, Glycine max
agcttcatgcatggatgctgagacagactcttcatcagaactttgtattggaccatctagtataatctttatcaacaactcaaacatttggacaaactcttgtgcaaatttggctagagtattctcacattctcccattccactgaaaacggcatctggatgacccaatatcatataaccacaaagaacaactctcacaggataccttgataacctaactaagctattgtttgactccctgactgaatctactttctttgcctgtcggcttctcataaaactcttggaagtagcctttttcttggggtaagcaacccatttaagaagattatcaatgttatccaagctagacaaattgttggcaggagccactgttgtagacact

SEQ ID NO: 17552 - DNA, 344 bp, Glycine max
  unsure (1)..(344): unsure at all n locations
ggacctataaatctcagcttgagttgtgaaaacttgattggatcttccatttntttgtgtagagttgcngggaaacagaattcaccaaaaaaaaagaaagaaaaaagcatagagagaaagatcaacatggtgttgaggaaagtgggtaaatatgagattggaaggaccgttggagagggaacgtttgcgaaggtaaagttcgctcataacacatacagtggcgagagtgttgtcatgatagtgctataccgtagcgccatcatcatacacaatatggtcgaccaggtatttgtttttttaagtactacatcacgtgaattcctgaaattacaagattcagttca

SEQ ID NO: 17553 - DNA, 375 bp, Glycine max
agcttggttatctccttcttcactacatcaagaatcactgggttgagtcttctctgtggctgtcttactggtttagctccatcctctaaatttattcgatgcatacatgtggatgggctaataccaggaatgtccgccagggtccagcctatagccttcttatgcttcttgagaactgacaacaacttctcgtcttgctcatcagcaagggaggcagatataatcactggaaaactcttgcaatcatccaagtaagcgtattttaaatttgatggcagaggcttcaattctggtgtggtcggctggacagtggtagaaggagatggtttctcagcctttacctcataaagaaagtcagaggtatgtgtacttcct

SEQ ID NO: 17554 - DNA, 393 bp, Glycine max
agcttttactaaagtattctctagtttagagtcctgcatcagtacaacccttattccaacaccaaaagcatcacattcaatatttcaaaagctttatcaaaatttgacaaacaaagcaaatgtgcattggtcaacttgtctttcaatatattaaaagttgtctcatgcacatcagtccacttgaacaccacattcttttttacaagttcgtttaaaggtgcagcaagtgaactaaagcttttcataaatcttctataaaaacttgctaaaccatgaaaagatcttacctcattagcattcttaggtacaggccattccttaatttcctttaccttttcttcatcaacacttattccttttgagctaatgaaataacctaagaacacaactgat

SEQ ID NO: 17555 - DNA, 351 bp, Glycine max
tttataataaacaagccgagccgaaccgagtcttacgtaagtcgaattgaagaccctcgacaagctgttcggctcatttccacccctacctgcaataacatagaagtgggtaaccccacaattttacttattccaattatcactgctcttttccccttgattttcacaccgggcctaagtaacaactcaatgcagcccttgggagcacaaggaacaaagaagggctttcttcctcttatgcaatttcaattctttagcaataacttaattttgtagattttttaaaaataaattcaatatttagtataattattactttttcacatgtcttttaagtactaattcatttca

SEQ ID NO: 17556 - DNA, 346 bp, Glycine max
  unsure (1)..(346): unsure at all n locations
tatgcatgcagcttttgggtatgactccggagaactggatgttaaacaaggagacattcttaagatgtttaagctctgtcatctcaagtggtagctcgcccgagaggttattaatgtacatatggatctgctcaaggctttgaattntccatatgccaagtggaatttctcctgtcaaatggttttcacacaatctaagatcacgcaatttactcaagtttcctaattcgcttggaattcctccttcaagttgattgtaattcaaactccactctttcagtgattcgcaattaccaatctgtggatgtattttccctgacaataggttctccggaatgaataacat

SEQ ID NO: 17557 - DNA, 350 bp, Glycine max
agctttgagacaattcattcgacaataactttgtactcggatgtctgattgagtcccgtaacatatcgagacgctcgaaattgaatgttgaagctctcagccaattcaaacgacaataactttttactcggatgtctgattgagcctcgtaatagaacgagacgctcgaaattgaatgttgaagctctgagccaattcaaacgacaacaactttttactgggatgtctgattgcgtcccgtaacatatcgagacgctcgaaattgaatgtagaagctctgagacaattcaaacgacaataaatttttactcggatgtctgattgagtctcgtaatataacgagacgctcg

SEQ ID NO: 17558 - DNA, 324 bp, Glycine max
  unsure (1)..(324): unsure at all n locations
ataatttnagcgtctcgtatattacggtttctatcagacatccaagtaaaaagtgagtatcgtttgaaatggctcagagcttccacattcaatttcgaacgactcgatatatgaagggactcaatcagacatccgaataaaaaggtattgtcctttgaaatggctcagagattccacattcaatttcgagcggctcaatatattacgggactcaatcagacatccgagaaaaaaattatttccgtttgcatttgctcaaaggttcaacaatcaatttcgagcgtcttgatatattaccggactctatcagacttccgagtaaaa

SEQ ID NO: 17559 - DNA, 394 bp, Glycine max
agctatgcttacaaactcttcatccccctcaacaaaagactctttcaaatcgcttctaccattataacaacaattccaaagaatattgttcatattctatttatttaataaaaattagggacattgatgtttagtcatgcatactcttagagtgatctctattatatatttgtagcaagaattatgatcatactttaggtgaaaaaaatggcatacatataatgtttgactttctaaagtcacaaagtatggaatataaataacataaccacaatcagatatatatacttaacacgtttagtataaaaaatttcaaacaagtacaataaaaacctcaactaacccaaacaatagaacataagtgtcagtaatgaagcgatcacccaagataaac

SEQ ID NO: 17560 - DNA, 445 bp, Glycine max
  unsure (1)..(445): unsure at all n locations
tgcaaactaagtgctcacctttagtagaggagaatttcttatgctggttcatggtaaccttttcctctagatgaccattaaggaatgtcgttttcacatccatttgatgtaactcaaaggtcaaatgagctactaatgccataattattcagaaagaatctttcttaaatacaggaaaaaaaggctctgtgtatcaattccttctctttgagtgaaccctttggccacaagtcttgccttatgtctctcaatgttgccttgtgagtctttcttgggtttaaaaacccatctacatccaatggcttttacaccactaggcaactgtacgagatcccagacttggttaaacgccataaaatcatctcatncttcatgggatatgtcaacaagttgattctttagaactcatgggcctgtgaaacgttcaggatcatttgcagctcta

SEQ ID NO: 17561 - DNA, 391 bp, Glycine max
  unsure (1)..(391): unsure at all n locations
agctttacatgatngattttggtgttagatttggtcaatttgaaggcaagatatgggaggagtgataaaattttcactgaattgcttgtgttgttgaagaagatgatccctaaagataacaagttgttgaatattcactatgaggtgaagaaaatactatgtcctattagtatggagtaccagaaaatacatgcatgccttaatgattggataccaaaaaatgagtttgcagaaatgcataagtgccctacatgtggggtatcgtgatacaaagtgaatgatgatgactacagtaatgatgtaagcacacacaataaccatccaacanaggtgtgttgctatcttccaataattccaatgcttaagtgattctttgctaatggagacaaca

SEQ ID NO: 17562 - DNA, 167 bp, Glycine max
gatattatgtcctgtgggtatggagtaccacaaaatacatgcttgccctaatgattgcatttcgtatgggaaatagttggctgaaatgcacaaatgccccatatgctgggtatcacgggacacaatgaaagatgatgaatgtaatgatgatgcaaccacatgctgta

SEQ ID NO: 17563 - DNA, 388 bp, Glycine max
agctttgatgcaacattttgaaaggttaatgaaacaatgagatgatgcgctccatgagaggttggatcaaatggagaatagagatcataatgaagaagaaaggaggagaagagggaatgatggtgttcctagacaaaatcaaattgatggtattaaactcaacattcctccctttaaaggaaagaatgatccggaggcctacttggagtgggagatgaaaatagagcatgttttctcatgcaacaactatgaggaggaccaaaaggtgaagcttgccgccatggagttttccgactatgctcttgtgtggtggaacaagctacaaaaggagagagcatgaaatgaagagccaatggttgatacatgggcggagatgaaaaggatcatg

SEQ ID NO: 17564 - DNA, 394 bp, Glycine max
agcttgtagggttaaagtttcatgattgccacgtgttgatgcaacaattgttagccgtggctatacgagacatcttgccaaagaaagtcaggttagccataactcgcttgtgctttttcttctatgccatatgtagcaaagtcgttgaccctgttaagtttgatgagctgaaaaatgaggccgcaattatactatgccagttggagatgtatttttcccctgatttctttgacatcatgattcacttgattgtgcatctggtcagagaaatcaaatgttgtagtcctatttatttgtggtggatgcacccggttgagcgatacatgaagatcttaaaacggtatacaaagaatatatatcgcccagaagcatctattgttgagaggtacaatgc

SEQ ID NO: 17565 - DNA, 327 bp, Glycine max
  unsure (1)..(327): unsure at all n locations
tataaaactcaactatgctgctatatttacatagacctcctcaacctttgctttataatcaaccacagcagaacaaatatgacctctccatccacagatacaaccctggatggaggaatcaccctaacctcagatggtccagccctcagcaacaacaacagcagtctgctccttccttccaaaatgttgctggcccaagcagaccatacattcctncaccaatccaacaacagctacaaccccacaaacagccaacagttgaggcccctccacaaccttacctcgaaaacttgtgagacaaatgactatgcagaacatgcaatttca

SEQ ID NO: 17566 - DNA, 372 bp, Glycine max
agcttatagttattggagggagaataaaacaatccaaaatcaattgtacctttcaagtaacgaagaattctttttgcgacttttagacgaggagaggtagaaacaattatgaggaagaggtagaaacaattatgaaaaagcatatgaaaggaagtatgataaatctaatgttgaatgttttaattgtcataaatatggccattactcttgggagtgtagaacaaatgttgaagagaaggtcaatcttgttgatgataaagaagaagttgaagagtcaacactactactatcacttaataatggtgagaaggaagacaaatgcttatggtatcttgacaatggagcaagcaatcacatgtgtggatgcaaaga

SEQ ID NO: 17567 - DNA, 385 bp, Glycine max
  unsure (1)..(385): unsure at all n locations
aaccttctatgaatcttcggtaatatcctgctaagtccaaaaaactcctaatctcaaaaatagacttaagactctcccacttcagaacaacttctatcttaaaagggtctacaactatacccccttgagatatcatatgccctatgaaactaactttctctaaccaaaattcacacttggacaacttaacataaagctgttggttcctaagggtatgcggcacaatccttaagtgctcttcgtgctcttcatgttcttcatgttcctctctaacctgacctanagtctatcttgctaaacacacaagctcctaccagctggtccagaaggtcatctattctangcanagggtacttattctttattcgtcaccttattcaactga

SEQ ID NO: 17568 - DNA, 378 bp, Glycine max
  unsure (1)..(378): unsure at all n locations
agcttggctattgcatatcttgccaccaagccacctaaagagtgacctacaaatgaaattttctgaacacttgggtgacgttttataactgatataacctgngaaaaaagaagaagaaaacaagtatcctttatttttctggatttgatgctacagagttgaagtcaattgaacatcttaagagccaaaagattagtatctaacaaaggctaaaattaaagtatgactaagttttagacttaggattagtctcataatcacttcaaagatcctaattacagtggttacaaaaaagaacaagttaaaagtcaaagccataacacacctcctctgctagtctatctcccattacatcaacaccatcaaatgtcaacatgg

SEQ ID NO: 17569 - DNA, 378 bp, Glycine max
  unsure (1)..(378): unsure at all n locations
agcttgcagtacaacatttcaattgttgacaagtaacttaaaaaagagaaatatgacaaccctttttctacttaaaaagaaatgacatgcatcagcaatgaaacaacgtagcaaacttacatggtaccaggccaatgtacaacagatatgttgaagtttctctgttcctcctgataaaacactgtattggagaatcacgaggaccangctattcatgcacaaaagagaaacataacataagaaacagaataccctaaagggaaaaaaagataaaagattaggcaacacaagaggtgaagaatttatcacctgcttcaatgaaatgggaaatgtgagccttncacattgttcaggagtcttaacaatctctttcgtaac

SEQ ID NO: 17570 - DNA, 424 bp, Glycine max
ctataaaactcagcttgaggtacacctggatctctgtttgttctattgtgctgattatataccgcgtttggacaacgaacaggctttgaaaatagtgcgtagcacacaacactatgaacacagggaaaggcattgtcctgaggaccctcctacttgccttgtgccaatccctaaaggttacaaaacacccatcgagtggcctagcagcagagataaggacattctttattttaatttatcggcaaatgttaattgttatggggaaaaattaaacttaccatctttcccttggttcttcttttgcactaagccaccttatagttataactcacatgtacacacacttagtcggccttttatatatttcaggctaataatttgctggccggttaaaaaacatatggaccacacgtacacacaactg

SEQ ID NO: 17571 - DNA, 433 bp, Glycine max
  unsure (1)..(433): unsure at all n locations
taatggccatggtgattgagaaggagacatacattattggaatgcaaatcatgcttccattttgctttttagacatgactcttgcttcaataacatggtttgctagtcttgtaaccaccaacctagtaccattgcataacccttgtgattgatacatgttccttaaaagcattattggggtacccacctttagttntatcttatgattaggaagaccaaatgttctcaaactattgagaaattcacttgtgaccacttcaagtgcatttcattcaaccatttttgacttgtcaattgaataagaacttagatattccctttgatcacctgaaaacaattcattaataaaaacattgtagaatcaatattaattattaaatcaattgattatttgtgagatacctggattaaagaaaaacataatcttatttga

SEQ ID NO: 17572 - DNA, 419 bp, Glycine max
ctcagctaacaatccttgtgatctattatggaatatttctatccctatcacatagcttacctcatccatatctttcacttcaaagtttctagagagaaatttcttagtctcatgaagaagaccaagatcgttagttgcaagcaagatatcatccatatacagaattagaaaataaccttactcccactgaccttcagatacatataccgataaatagtattttccttaaatctaaaggaaacaatggtatcattaaacctcaaataccattggcgggaagtttgctttaagactgtatatggatttctttagtttgcacaccatgtgttcctttcctttcactgagaaccccattggttggtccatataaacattatcttcctaatcttcatttagaaaggcagttttcacatccatct

SEQ ID NO: 17573 - DNA, 367 bp, Glycine max
  unsure (1)..(367): unsure at all n locations
taatgaaggcgttatcagatatgtactagaagccgttgatagccaacaaagtatacttgatgcgtcggttgttcaaccttaagatgggagaaggtatctctataactaatcatattaatgaatttaatactattcttgcccagttgaagtcggtgcagatcaaatttgaggatgaggtgaaggcattgattctattgtcatcactatcggatagttgggttgcaactgttactgcagttagtagttctacaagagagaacacattanagcttagtgacattcgtgacttgatcttaagtgaagatgttcgcaagagagatttangagaatcttctagtcatgtttccaatttagcattgaatactga

SEQ ID NO: 17574 - DNA, 450 bp, Glycine max
  unsure (1)..(450): unsure at all n locations
tgaaagtgtgtaaccaaccattntctcattgtataactaccggaacgtgtatactatcattgtgatcatctttttctctgtcattgaaggtgccacttgagctgtcaagtccctccacctctgggcgtattccttgaatgactcatgctcttttttacacatgttttgtagttgcgttctatccggagccgtatcataattgtactgatattgcctaacgaaggcaaccattangtccttccaagaatagactcgggaaggttccaagttagtgtcataccctaatttcgtccggggattattacttgacgacatgcaacctttgattggtccgttcaagatacttggcaccctttgttgcacaatatgtaagtcttgagacgcaccggaagtcaaaggaagcanggttatgcgatccgtgaaattccgtaatgtggcggaaaccaaaag

SEQ ID NO: 17575 - DNA, 363 bp, Glycine max
agcttccgttttcaatttggagcatctctcgataaattacaacactctgtcgggcatccgagtaaaaagttattgtcgtttgaattttctaagagtttccattttcaattttgagcgtctcgatatattacgcgactcaaccggacatccgtgtataaagttattgtcatttcaatttgctcagagcttctagtctcaattttgagcgtctcgatatattacccgattcaatcggacatccgagtaaaaagttattgttgtttgaatttgctacgagcttcccttttctacttggagcgtctcgatatattacgttactcaatcggacaaccgtgtataaatttattgacgtttgaatatgct

SEQ ID NO: 17576 - DNA, 387 bp, Glycine max
  unsure (1)..(387): unsure at all n locations
tgtagcanattcaaacgaaaataactntntactcggctgtccgattgagttcggtaatatatcgagacacttgaaattgaaaacgaaaactcgtagcaagtgcctaccgcaatcacttttaaatcgtcgcgaaataaattgacatgctccaatttgaaaaagaaagttcatagcaaattcaaacgacaataactttttacacggatgtccgattgagtcccgtaatatatcgggatgctccaaattgaaaacggaagcccctagcanattcaaacgacaataactttttactcagatgtccgacagaggttcgtaatatattgagacactgcannatgaaaacagaagctcgaatcanattcaaacgacaatatcntttttactcga

SEQ ID NO: 17577 - DNA, 376 bp, Glycine max
agctttgatgcaacatttggagaggttaatgaaacaacgagatgatgcgctccatgagaggttggatcaaatggagaatagagatcataatgaagaagaaaggaggagaagagggaatgatggtgttcctagacaaaaccgaattgatggtattaaactcaacattcctccatttaaaggaaagaatgatccggaggcctacgttgagtgggagatgaaaatagagcatgttttctcatgcaacaactatgaggaggaccagaaggtgaagcttgccgccacggagttttccgactatgctcttgtgtggtggaacaagctacaaaaggagagagcaagaaatgaagagccaatggttgatacatggacggagatg

SEQ ID NO: 17578 - DNA, 371 bp, Glycine max
  unsure (1)..(371): unsure at all n locations
agctttgagccaattcaaacgacaataactttttactcggatatctgattgagtcccgtaatataacgagacgctcgaaattgaatgttgaagctccgagccaattcaaacgacaataactttttactcggatgtctgattgagtcccgtaatatatcgagacgctcgaaattgaatgttgaatctctgaccaaattcaaacgacaatagctttttactgggatgtctgattgagtcccataacatatcgagacgctcgaaattgaatgttgaacctctgagccaattcaaacgacaataacgttttactcggatgtctgattgagtcccgtaatatatcgagacgctcganattgatgttgacctctgag

SEQ ID NO: 17579 - DNA, 392 bp, Glycine max
  unsure (1)..(392): unsure at all n locations
taaacattcactttcgagcctctcatatattacggttactcaatcaaacatccgagaaaaaagttattgtcggttgaatttgctcaaaggttcaacattcaatttcgagtgtctcgatatattacgggactcaatccgatatccgagtaaaacgttattgtcgtttgaatttgctcaaaggttcaacattcaatttcgagcgtctcgatatattacgggactcaatcagacatccgagtaaaaagttattgtcgtttgaattggctcaaaggttcaacattcaatttcgagcgtctcgatatgttacgagactcaatcagacatccgagtaaaaagctattgtcttttgaaattgctcagagattcaacantcaatttcgagggtctcgata

SEQ ID NO: 17580 - DNA, 379 bp, Glycine max
  unsure (1)..(379): unsure at all n locations
caatagacctccaatctttaatggagagggttaccactactggaaaacccgtatgcaaatttttatcgaggcaatagatctaaatatctgggaagccattgaaatagggccttatatacccaccacagtagaaagagtttcaatagatggtagttcatcaagtgaaagcataaccatagaaaaacctagagatagatggtctgaagaggatagaanacgagtacaatacaacctataagccaaaaacataataacatctgccctaggaatggatgaatatttcagagtttcaaattgcaagagtgctaaggaaatgtgggacactcttcgattaacacatgaacgaactacagatgttaaaagatctacgataaatgca

SEQ ID NO: 17581 - DNA, 335 bp, Glycine max
tcaagctgtttctcggatgctgcgatggttagtgggagtgatgctcttgcgaacattacatcgaaagtttatctgtctcccaagctttggtatttgagggttaatgtgatagaggcacacgacctgatgccaactgataagggtagataccctgaggtatctgtgaaggctatcctggggaatcaggccttgaggactagaatctctcaaagcacgagtattaatccaatgtggaatgaggatctgatgtttgtggtggccgaacagtctgaggagccgctgattttgagtgtggaggatagaagtgcgcctaacaacgatgaaatgttggggag

SEQ ID NO: 17582 - DNA, 317 bp, Glycine max
tttcatgtatgctttgcagaccaagccctccttgacgaagctacggacttttttgagatcctattgatccccctatgtgaaacattactcgatccattcgtttggggatgaaagggtgatgctacttttcctcgcacatgatagcgctggacgacatttgagagatgatcgtacacaaatgtgtacctgcatcgactaatccagagtctaggctctccacacctagacgatatgtctctctgtaagagcttaatcaccatcgttgcatgacaggcgggctaccaggtgcttccacccactatgagacatagtccact

SEQ ID NO: 17583 - DNA, 353 bp, Glycine max
  unsure (1)..(353): unsure at all n locations
ttgcattctagcttatgcattcttatcatcatgtcaacctcatcttcactcaaatctcccctcttaatatttggtattagatagttcagccatctcaatctacgactcttgcggcatctgttcaaccctatacgtataccagacgcatattaatgtttattatttattacaacttatgaggatatatgtcatagctattatatatatatatatatatatatatatatcattgcgagtcacaagcatattccagataacgaaaagagaacatatacaaatataaacacatgcatatattaatattatgggtcttgctaatcataatatctattgtataaatgatngaaaagtat

SEQ ID NO: 17584 - DNA, 392 bp, Glycine max
agcttctgtgcctgatgctgagaaagatgttccaacatcttccaccccgaatgtttctgtgcctgatgttgagaaagatgttccaacatcttccggcccaaatgctgaagccctcccttcacccagtgaagaggaatcaacagaagaagaggatcaagcctcaaaggagactcctgcaccacgggcaccagaacctgctccaggtgacctcattgacctggaagaagtagaatctgatgaagaacccattgccaacaggttggcacctggcattgcggaaagacttcaaaacagatagggaaaaacccctcttaagaggtctggaagaatcaagactatggcacagaagaagagtactccaatcactcctgccacagccagaagaagcaagg

SEQ ID NO: 17585 - DNA, 392 bp, Glycine max
  unsure (1)..(392): unsure at all n locations
caccggatagntcattctttataagtgcttaagtggaattagagtatcgtatgtataatgttngaataatactctgtgattatacttccaaatattcagaactctgcttggttatgattatcaggcaagcaaaggatgttgttaaaggcataaagaagcggattggaagtaaaaattcaaaagtccaacttcttgcactaactgtaagcaaaatagtcttgcgatacaaccttttttctctttaaactctgatgtcagtattgctctagattcttttggactcaagcatgtttgctgtaattgcatttttcaaatttcattttggcctcccaaacttcacattgttgactcgntcatttttgaatggttttgttgaatgacgacgatgttta

SEQ ID NO: 17586 - DNA, 362 bp, Glycine max
aatgtttttccattgattgggaaagctgttcccgaaattcctgaaaaatgtaaagatccaggtacattcagcataccttgtattatagggaatagtaagttcgagaatgccatgctagatttacgagcttctgttagtgttatgcctctgtctattggtaattctctatctctaggtcccttgcagtcaactgatgtgataattcatttagctaatagaagtgctgcctatcctgttggtttcatagaagatgtcttagctagagttggtgaactgatcttccctcgtgatatttatattgtgaatatggaagatggattttctcaaggatcagatcccatgattctaggcagaccctttat

SEQ ID NO: 17587 - DNA, 378 bp, Glycine max
tcaagctttttattgtttcttggatggctatttgaagtataattagatagcagtggaccctaacgaccaagaaaaaattgcttttacatgcccttttggtgtctttgcttacagaacgatgtcatttccttgccaccttttagagatgcatgctagctatttttgttgatatggtagaaaaatgcattgagtgttcgtatataatttttcagtcttcgatccctccttcaactgttgcctaaccaatttggaattggtgctatgacgatgtgtagagactaatctagtgctaaactgggagaaatgtcattttatggttcaagaaggcgatattttgggaaataagatatctcctagagggactgtagtagacttggc

SEQ ID NO: 17588 - DNA, 368 bp, Glycine max
atcttgaaggtaaaatagatgccttggttaacctggtaacccaactggccatgaataaaaaatctgcacctgtcgtcagactctgtggtttatgctcctctgccgaccaccacacagacctttgcccttttgtgcaacaatctgaaccaattgaacagcctgaagcttatgctgcaaacatctacaatagacctcctcaacctcagcagcaaaatcagccacaacagaacaattatgacctctccagcaacaggtacaatcccaagtggaggaatcatcccaaccttagatggttgaatccttcacaacaacagcaacaacaacaacaaccttattttagaatgttgctggcccagcagacatacgtt

SEQ ID NO: 17589 - DNA, 417 bp, Glycine max
  unsure (1)..(417): unsure at all n locations
tgccgccacggagtnttccgactatgctcttatgtggtgtaacaagcttcaaaaggagagagcaagaaatgaagagccaatggttgatacatggacggagatgaaaaagatcatgaagaagcggtatgtgccggctagttactcaagggacttgaaattcaagctccaaaaactaacccaaggcaacaagggggttgaggagtatttcaaggaaatggatgtgctcatgattcaagcaaatattgaagaagatgaggaagtaactatggctcgatttcttaatggtttgactaatgatatccgtgatattgttgagctgcaggagtttgttgaaatggatgatttgcttcacaaagcaatccaagtggagcaacaattaaaaaggaagggagtggctaagaggagttttaccaactt

SEQ ID NO: 17590 - DNA, 377 bp, Glycine max
agctttcttcttcaaaagctctgcaatttcagaattcaatttttgatccacttgcaacagcctgtctaatgcaagaaaagcagctgtgacccattttggaacctgttctttctccctgttaccaagactagaatcccattggtagagtagatctgaggcaatttttatgaaaccactctttgaagcagcttctcgcgcaacagcatcctcattaagaatcaatgcaagaacatgaaatagagcagcaagcatggtattatttccgttaccagaaatcaatccacattccttgatccggtcaacaataaaagtgagaacattagatctattttgaccatcattctgagagcatatcatcatgagcaagtcacggacag

SEQ ID NO: 17591 - DNA, 429 bp, Glycine max
  unsure (1)..(429): unsure at all n locations
gcagggaattggtgatttgaaagcacctggtattgttggttatggttcaaaatttttcaaaaatagctggcatatagtaaagaaagattttattgctgcagtgaatgaatttttcgagaaaggatctttattaaaggattttaatactactcttgtgactctcattcctaaatctattactgctaagactgtcaaggattacaggcctattgcagtttgctctactttttataaagtgatctaaaattttttgactaggaggctagggatagtgatacaggatattgttcatactagccaagcaacttttgtacccggtcaagtcattcacaatcatattctccttgcaactgagttgatgaaggggtataccagaaagggtgggacccctacgtgtatgatgcanatagacctccaaaaagcttatga

SEQ ID NO: 17592 - DNA, 381 bp, Glycine max
  unsure (1)..(381): unsure at all n locations
tcaagtttgtggaacatcgatagggtgtgggtatagggggacacgttgaattgcacccgccagtcatgggaacaaccgtcgctacccatcatgcggcggaggtgcttgctagtgcggagggcctgtgccatgccttgcgccattgactgaatgttatggtcgggtatggtggtgtacgccactgtgtcttggttcccctgtgactttccatgccgcattaatattcttctctttggaagcacaccaaccatatcttctcttctctttacattcattttctttcaccctcacaattctaatcttttttatccacacataaaattntgacaataaaagaatatttatacactttcctttgcgcatgatggttgattcctatat

SEQ ID NO: 17593 - DNA, 450 bp, Glycine max
  unsure (1)..(450): unsure at all n locations
atacaatacttaagcttgtgtcgcactgtctactgctgaagctaaatatatagctgcaggaagttgttgtgctcaaagtctctggatgaagcaacaacttgaagactttggagtaaaccttgatcacattcctctaaaatgtgacaacacaagtgcgatcaacctaaaaaaaaaccttgtcatgcattctaggactaaacacatagagataaggcattattttcttagaaatcatgtgttaaaaggtgattgttgtattgagttcattgatagtgagcatcaactagcagatattttcactaaacctcttgctagagataggttctttttcattagaaatgaactaggcatattagatgcatctagcatagaatgatattttgtttgcacagtgtgtgtgattgacattgctactcatataatttctttntgtttagtttgtgtcacaag

SEQ ID NO: 17594 - DNA, 386 bp, Glycine max
agctaatgcttaactatgtatgacaaaactgcattactgttgttcaagacatacaagtgagcttgtaacaaatcttctacacttggagtgatcacctgcagtcctcttgaacccttaccacccactttgtcataatgccgagactcatgaagcccaacaggtttagccttctctaagtattctgaacaaaattcaatggcttcttctgcaatgtacctctcaacaatagatgcttctagacgatatagattctttgtatacccttttaagatcttcatgtatcgctcaactgggtacatccaccgttgataaacaggaccacaacatttgatttctctgaccagatgcacaatcaagtgaatcatgatgtcaacgaaagcaggggg

SEQ ID NO: 17595 - DNA, 399 bp, Glycine max
  unsure (1)..(399): unsure at all n locations
tattatagttctttatttattgaggatcataaaaagtttaagtcatgtatgagagacataacaacttccttcttgaacaaaagttgagagaggaaatgttgataaaactcttttcattaaaaagtcctctcataacattttacttgtgcaagtttatatggatgacatcatttttggttccactaacaaatctctttgtgaagattttgtgcacaagatgtagggggagtttgaaatgttaatgatgtgggagttaaattactttcttggtctccaagtgaagctagtggaccatggaacatttctctatgaagtaaaatactacaaggaacttttcanacagtttgagatggacnatagcaaggaggctacaactcatatagctactaattgctacct

SEQ ID NO: 17596 - DNA, 379 bp, Glycine max
agcttctagattttcgatatgaaaacatgtagtttcatgttctcttcaattaacgcataatacattttactactttctagtgttgcataccaagattactcaaatatcaccttaggactcccacaaaaatttagtttaggacaataaaaaaataaacttaagcatacatgataaattgtaatataactattttgcaacaataagtcgtatgatgatagtaggatgtcatcgacatataatacaaaaataataaatttactctcattgaacttttagtacacacaatcatcaaccaaatttatctcaacaccataagagataatctagatgaatttttaataccatagacgagagacttgtttaaagcataaatgaattt

SEQ ID NO: 17597 - DNA, 388 bp, Glycine max
  unsure (1)..(388): unsure at all n locations
agcttaaaggagaagttggttttctgaactctaaactggaaaacatgacaaaatcaataaagatgctgaataaaggctcagatacgcttgatgaggtgctacagcttggaaagaatgttggaaaccagagaggacttggatttaatcctaagtctgctggcagaacaaccatgacagaatttgttcctgccaaaaacagcactggagccacgatgtcacaacatcggtctcgacatcatggaacgcagcagaaaaggagcaaaagaaagaagtggaggtgtcactactgtggcaagtatggtcacataaagcccttttgctatcatttacatggccatccacatcatggaactcanagtagcagcagtggaaggaagatgatgtgggt

SEQ ID NO: 17598 - DNA, 443 bp, Glycine max
  unsure (1)..(443): unsure at all n locations
ctatacaatactctagctntactatgcanagaataaccaaggaaaattccttcatttgacttagctttaaattttcctaagttttctttttcattgtttaatacaaaacacttgcaaccaaaaacatgaagatgcgagatgtttggtttcctaccattgaacacttcatatgaagttttctttaagatgggtcttattaaagccctattcatgatataacatgcagtattaacggcttcagcccgaaaatattttggaagaggagtatcattcaataaggttctagcaatttcttccaaagacctatttgtcctttcaataactccattttgttgaggggttcttggtgcataaaagatatgttcaatgccatgcttatcacaaaataaatcaaattctttattttcaaactcacccccatgatcactcctaatagatataat

SEQ ID NO: 17599 - DNA, 385 bp, Glycine max
agctttaaattgtagttaagactgcagacaacttctgttcatgtttgaagtttgatagaaacacagatgttagctatagtaatatgaggaaggctgcttcatgagaagatttgactgacaactatttattctatccaaaagctgtagatcttcagtacaaggatttaaggcattttcagtggcattgggaaaagggggagcctgtaattgtcagcaatgtgcttgaatgtacatctggtttaagctgggaatcgcttgacatgtggcgtgcattacgtcatgtaactaataccaagcatggccaacatttggcggagaaaacaattgattgcttagattggactgaggcttgcttaatttcccaatctttaactctattgaccat

SEQ ID NO: 17600 - DNA, 420 bp, Glycine max
  unsure (1)..(420): unsure at all n locations
tttctactttgcagggcaggacactatgntcagnanngtcgtgctcggacaaagatattattgagtaggtaccctgattggcaagcacgcgcaagggaggaagtctcacaagttgttggcaaccaaaaaccgacttttgatggactgaatcaattaaagaatgtaagtttgtattataaacttgttattgaatagcatgttcatggtatttactatgaatatttttgcaacaggttactatgattttgtatgaggttcttagattataccctccaggagttggtgttcctcgaaaagttatcaaagatgtgaaacttggaaacctatcatttcctgatggagtggagattttcatatcaacaattctggttcaccatgatagtgagctctggggtgatgatgctaaggagttcaaacctg

SEQ ID NO: 17601 - DNA, 413 bp, Glycine max
gctgaacattgactgaatctagttctttagtttttagtcaaaatatctgctggttgatcattggaactaatgaactcaatgacaatctccttggacaatagtttctcccgaatgaaatgacaatcaatctctatgtgtttagttctctcatgaaaaacaagatttgaagcaatgtgaagagcagcctgattatcacaatataacttcatttgtccaatttcacaaaatctcaactcttggagaagttgcttaacccacataagctcacatgtaaccatagccatagatcgatattcagcttctgcactggatcgagcaacaaccgtttgcttcttgctttttcaagaaataatattccctctaatgaagacataataatttgatgtggctctcctatccatgggacagtcagt

SEQ ID NO: 17602 - DNA, 375 bp, Glycine max
agcttcaacattcaattttgagcgtctcgatatatgacgagactcaatcagacatccgagtaaaaagttattttcgttttaattggctcagaggttcaacattcaatttcgagcgtctcgctatattacgggactcaatctaacatccgagtaaaaagttattgtcgtttgaattggctcagggcttcaacattcaattttgagcgtctcgatatatgacgagactcaatcagacatccgcgtaaaaagttattgtcgtttgaattggctcagaggttaaacattcaatttcgagcgtctcgatatgttacgggactcaatcagacgtccgagtaaaaagctattgtcgtttgaatttgctcagagattcaacat

SEQ ID NO: 17603 - DNA, 398 bp, Glycine max
  unsure (1)..(398): unsure at all n locations
ttgagccaattcaaacgacaataactttttactcggttatctgattgagtcccgtaatataacgagaccctcgaaattgaatgttgaagctcttagcaaattcaaacgtcaataagtatttactcggatgtctgattgtgtcccgtcatatatcgagacactcgaaattgaatgttgaagctctgagccaattcaaacgacaataaatttttacccagatgtctgattgagtcccgtaatatatcgagactctcgaaattgaatgttgaacctctgagccaattcaaacgacaataactntttactcggatgtctgattgagtcccataacatatcgagacgctcgaaattgaatgttgaatctctgagccaattctaacgacaataactttttactc

SEQ ID NO: 17604 - DNA, 385 bp, Glycine max
  unsure (1)..(385): unsure at all n locations
agcttttcgttcggcatanctatatcagccaaatctatttcaggtgtattgtttggagcacagaagctatattagacatttgcgtacaagagctgacaagcaagatgtcacagtagatatatgtccactttgggccagaggagttcgcctagttcctgatcaagatccaaacataacttgggagaatcatgtcaacaccgagtgcgacccatcgaattacgagaaagtcacacagaagaaaaaatgccctgtccctgaatgcagagagatattagtattctcagacacaattaagtgcaaggactgcacagtagagcattgtttaaagcatcggtttggacctgatcataaatgtcctggtcccatacatgtggaatcaagtttt

SEQ ID NO: 17605 - DNA, 415 bp, Glycine max
ttcttggtttcagctgctgaagatgaattcgtggctatttcatgcactcctctaatgactatagcatcatttctggcactaaactgttgggagttggaagccatcttctcaattaaatttttggcttcagcaggggtcatgtctccaagggctccaccactggcagcatctatcatacttttgtccatgttactgagtccttcataaaaatattatagaagaagctgctccgaaatctgatggtgagggcaactggcacatagttttttaaatctctcctagtattcatataggctctctccactgagttgtctaatacctgaaatatcctttttgatggttgtggtcctggaagcacggaaatgttttttctaagagtcctctcttgaggtcatcctaactcgtgatggacctt

SEQ ID NO: 17606 - DNA, 389 bp, Glycine max
agttatacaaatcacatttagccccttttcaatttaagacttctcaattttgggcactaagattgttcaatgaggataatatcgattgcgtttcattcttgtgtgcagttggtgacttgaaccatctgatctcagctacaatgtctggtgtcacttgttgattgaagttccctgttcaacttaactctgatctgcgatagcttgcagtgaaccttattcccttccctcgcctccacttcttcatggatggatatgctcctttgacatctcgtggctctcagcaatacatggccttgagtgttcctgagctgacacagcagatgtgggattcaaagaacatgatgtgtgctgctgaccctcaacatggccgctaccttactgcctcatcc

SEQ ID NO: 17607 - DNA, 328 bp, Glycine max
agcttaaacattcaatttcgagcgtctcgttatattacgggactcaatcagacatccgagtaaaaacttattgtcgtatgaattggcttaaagcttaaacattcaactttgagcgtctcgatatattacaggactcaatcctacatccgagtaaaaagttattgccgcttgaattggctcagaggttcaaaattcaattgcgagcgtctcgatatatttcgggactcaatcatacatccgagtaaaaagttattgccgtttgaattggctcataggttcaacattcaatttcgagcgtctcgatatatgtggggtctcgatccgacat

SEQ ID NO: 17608 - DNA, 397 bp, Glycine max
  unsure (1)..(397): unsure at all n locations
ttctaacgataataactttntactcggatgtccgattgagtctcgtaatatatcgacacgctcgaaattgaatgttgaagctctaagcctattcaaacaacaataacgttttactcggaagtccgattcagtgacgtaatatatcgggacgctcgaaattgaatgttgaacctctgagccaactcagacgacaataactttttactcggatgtctgattgagtcccgtattatatcgagacgctcgaaattgaatgttgaacctttgagccaattcaaacgacaataactttttactcggatgtctgattgagtcccataatatatcgagacgcttgaattgaatgttgaacctctgagccaagtcaaggagaataactttttacttggatgtccga

SEQ ID NO: 17609 - DNA, 376 bp, Glycine max
agtttgaccaggaattacttgtatgggttggatgttgaattctggttgttcctggtgcggagatgatggtacagcgggtgaaccagaagcggaagtttcttttggtgaggtagccatggaaaagcagagcgtttggaatgatttcgtaaatctcagaaggctattgggaaatgctggtataaacacgaatgccaagcagatataaatttgaatgaggaatgtagagggtcgtgtgaagcaacggtcgaattttccttggttcagtagtgaacgtgctattaatgttaagtgattcgtttgggcacgttcagattgctgtagttgctataattcctctagcacacaaatgcccagcttgcccctcatgttttcatac

SEQ ID NO: 17610 - DNA, 393 bp, Glycine max
agctctggatcaagtgtacctttggtgcaatactgtactgtcctttgtgctcttgaggagtttctataaactagaggcaattggcttgttttcttgcccttgtataatgatgaccctttgaaaacctttccattcccaagcttcacttgtgttggaaagcttatgtctgtgtagctagcagcaacagtcatgatccatggagcaacatttccagcagttgaactagaggggcctgaattgcctgctgagcaagaaacaaaaactcctttatgcgttgctccgaacgaggctatggcgatgctgtcattgtaataaggtcttgcaatgccacctaatgagagtgacaacacatcaacaccatcagcaacagctcgatcgatagcagccaatatg

SEQ ID NO: 17611 - DNA, 423 bp, Glycine max
  unsure (1)..(423): unsure at all n locations
gcttggagtctatataaacttgtgagaatttcatagattcgactcgtgaactcaacttatagactcgtaagagtctacttcatataaaattaataataaaatatttataaatgatttatcaattaaatatttcaacaatataataaagtaaaatagtaaatcataaatttcataatacttaaataatcaaatctagtaatgcatcactattaaataataacttgcatatattatagtaatggtaaatcatttccattgatgatttgatgttattagagaacaagagttttattttattaaaggtagaattttttttattcgagaacaacacaataaatgaaaatatgttgatcactaaatagacagaaaataacccanaatgacttatatttcggtttaatttttttaacttattaactcgcc

SEQ ID NO: 17612 - DNA, 376 bp, Glycine max
  unsure (1)..(376): unsure at all n locations
agctctaagcaaattcaaacgacaataactttttactcggatgtctgattgagtcccgtaatatatcaagacgctcgaaattgaatgttgaacctatgagccaattcaaacgacaataactatttaatcggatgtctgattgagtcccgtaatatatcgagacgctcgaaattgaatgttgaagctttaggcaaattcaaacgacaataactttatactcggatgtctaattgagtcccgtaatatatcgagacgctcgaaattgaatgttgaacctatgagccaattcaaacgacaataacttgttactcggatgtctgattgagtcccataatatatcgagacgctcganattgaatgttgaacctctgaacca

SEQ ID NO: 17613 - DNA, 367 bp, Glycine max
ttcctcatgtgtacccaaaccttatcacctggttcaagcacgactttctttctgcttttgttggcttgccttgcatatctcgcattttttttttcaatttgagccttcacttgctcatgctacttcttcatatactcagctttaacctgagcatccttatgcttaatcatagcaatgttcggcactatcttctaatcaagaggagtcaaatgcattgatgcatacactatctcaaatggcgaacaattaattgtgctatggacagcccgattatatcaaactcaacatgaggcaaacaagcgttccaagatttaagattttcctttaatacactcctaagaggtgtgcctaaagttctattgactac

SEQ ID NO: 17614 - DNA, 393 bp, Glycine max
tgcatgatttacatctccctctttctcaagcaaattcttcttgatatcatcaaaattcttcatgatttacattgaatgtgaatgtatgtatacatgattttgatgatgtcaaagaagaatctaacaaggctgcttcaaatgataagcatttgcttcaagaataattcaagattgcttcaacaaacaaagccttgtttcaagattcactaaagaccaagccttgccttaaaacaaagtgctttcaagacatgcaaggctctggtaatcgattaccaggaagtgtaatcgattaccagaagacagggttgagaaatagctgttgaaaaaggttttgaatttgaattttcaacatgtaatggattaccatatgtctgtaatcgattaccagcaacg

SEQ ID NO: 17615 - DNA, 393 bp, Glycine max
  unsure (1)..(393): unsure at all n locations
agcttagctacacatacctctctaatagctaagctcacctccttgagatgagaagctagagcttagctacacaccccctataatagctaagctcaccccatgagaaaaaacatgaaaataacaaaaaaaagtccttattacaaagacagctcataatgccccgaaatacaaggctaaaaccctatactactagaatggccaaaatacaaggcctagacgaaggaaaaacctattctaatatttacaaagataagcgggctcatacttagcccatgggctcgaaatctaccctaaggctcatgagaaccctanggcctttccttggatctctagcccaatctacttggagtcttctagccaatgcccttacggggtaggattgcatcaagtagc

SEQ ID NO: 17616 - DNA, 420 bp, Glycine max
tatcttcacaaacaaatcaaaatgaattttgtgatcttcaaaacctagctccagcttcctcttccccatatcaactatacagcttgcggtcaacacgaatggccttcccaatattacagggatgttagtatcttcggagatatccattaccacaaagtctgtcgggaagataaaatgttttactctgaccaaaacatcttcaattactccatatggcttggtaatggagtagtcagctaattgtaaagtcattcgagtgggcattatttccaactctcccaatcttctgcacatgtagagtgacatcaaattgatactgactcccaggtcaataagagcttttcccacattgacttctccaattgaacaaggaatagttacactctgaggattattatgcttgggtggaaggatcttcta

SEQ ID NO: 17617 - DNA, 418 bp, Glycine max
  unsure (1)..(418): unsure at all n locations
tagcccaagaggggatggacctttntgatgcaatcctatgccgcaagggcattggatagaagaccccaagtagaatgggccaaagatgcaagagaaggccctagggttcttatgagccttagggtagattttgggcccatgggctaagtacgagcccacttatctttgtaaatattagattaaggtttcattatttttgggccttgtatttagggctccataatgtaggtagggtaccctagaaatataggatttttcagcccttgtattttagggcacctagactagtttttgtattaggggtagttttgtaatttcacatgcactaagtggatatttgatgtgtgtgggtggaaataaatttaattgaattggcagaagcccaatccaattaaattttagagagggaggtgagcat

SEQ ID NO: 17618 - DNA, 384 bp, Glycine max
  unsure (1)..(384): unsure at all n locations
agcttatgctaaaaacatttataatagacctcctcagcagcaaaaccaacaacaatagaataattatgacctctcaagcaatagatacaatccaggttggaggaatcatacaaatctgagatggacaagtcctccacaacaacaacaacctatccctccatttcagaatgctgctggtccaagcaagccatatgttcctcctccaatacatcagcagcaacgacaatagtcataacaaagacaacaagcaactgaggttcctcctgaaccttccttagatgagttagtgagacaaatgaccatccagaatatgcaatttcagcaagagacaagagcctncattcagagtctgacaaatcagatggggcagatgactacttagat

SEQ ID NO: 17619 - DNA, 383 bp, Glycine max
cgagataatatgaagtttgtgattttagaacctatctccagcttactctttcccatatcaactatacagcttgcggtcaacacgaatggcctttccaatattacagggatggtaatatcttcggagatatccattaccacacagtctgtcgggaagataacatgttctactctgaccaaaacatcttcaattactccatatggcttggtaatggagtagtgcgctaattcgtaagtcattcgagtgggcattatctcctactttgagcatcttctgcacatggtgagagacatctaatagatactgactcctaaggcaataaaagctgttcccccttgacttctccatatgaacaacgagtactaagactctgaggattatta

SEQ ID NO: 17620 - DNA, 381 bp, Glycine max
agtttgcactatccagtgatggaatgaatccatatggcaatttaagcacttaacacaattcatggccaattctactagtaatttacaattttcctccttggttgtgcatgcagtgaaaatacatgatgttgtcgatgatgatatcaggcccaagacagccaggaaatgacattgatgtttatctaagtccgttgattgaaggcctgagaaagctgtgggacgagggggttttagtgtttgatgggtttcagaatgagacttttctaatgcatgcaatgcttttttgtacaattaatgactttccagcatataggaatttgagcagttacagtgttaagggtcatcatgcatgccccatctgtgaagaagacacaagctaca

SEQ ID NO: 17621 - DNA, 402 bp, Glycine max
caccttctaaactttatacaagaattaagctctgataccacttgttagacaagtggcctcagatatcttaagaaggggggattgaattaagatattccaaactacttgccctaattaaaaatctatttcactttttattcaagttatgaattcccttaatgacaatcttcttaaatattaattcaaataacacaatttgaatatgaatataaagcaataataaataaaggagattaagggaagagaaaatgcaaactcagttttatactggttcggccacacccttgtgcctacgtccagtccccaagcaacccgcttgagagttccactatcttgtaaattccttttacaagtgtctaaacacgcaaggacaatccttcctttgtgtgtagaattccttta

SEQ ID NO: 17622 - DNA, 404 bp, Glycine max
actcccgcttgtcggcgtacctgaagatgctattacgctcggccctttttcattttctttagctggggaggctgagagatggttgcattcattcaagggcaacagtggaaagacctgggatgaagttgatgacaagttcctaaaaaaatatttcccacagtctataaaaatattttgagtgaggcattacaaagatttcgtatcttgctgtggaaaactcccactcatggtttttcagagcctatacagttggacatcttcattgatgggttacgactgcagtcaaagcatatactcgacacttctgcaggaagaaaaattaagttgaaaacacctgaacaagccatgtaaaccttatcttacttgacacttattaaattgccaacaggatgcgtgctatctta

SEQ ID NO: 17623 - DNA, 368 bp, Glycine max
agtttgaggaggctagttttttggtggagagtgaattgaacatgaagatagatttgaaagagcaattttggatattggcaaggaggaatgagtcatttctaagacaaaaatctagatctagatggttagtggaaggagacaacaactcaatattcttccatggtactattaattggaggagaaggaaaaatctacataggggtctacatattgatgggatttaggaggtggatcctaagaaagtaaaatgggaggtgaagaatttctttcaaaaaatattcttggtggaggatttggatcggccaaagcttgatgggacaagattaaaacatatctctcaacaacaatatgagagtttcatcgcaaga

SEQ ID NO: 17624 - DNA, 363 bp, Glycine max
gctcttgctgcctaagtgtggaccctctagggctatttccattctcctcttttttcggagcctcatgaatgtcattgcctaacactgttcatgtgtcctccaccttcgagtctggagccccgcgaatgtcatcgcctaacactgatcgccaattctccattccccactatcattcggagccccatgaatgtcattgcctagcgctgttcatgtgtcctccaccttcaagtttggagctatgcttcatgattgcctaaatgtggaccctcaagtgcaatcctccattctccacttttttcggagccccatgaatgtcattgcctaccgctattcatgtgtcctccaccttcgagtacggagccc

SEQ ID NO: 17625 - DNA, 415 bp, Glycine max
taaacattcaattccgagcgtctcgatatattacggtactcaatcaaacatccgagaaaaaagttattgtcgtttgaatttgctcagaggttcaacgttcaatttcgagcgtctcgatatattacgggactcaatcagaaatccgagtaaaaagttattgtcgtttgaattggcacagagcttgaacattcaagttcgagcgtctcaatatatgacggaactcaatcagacatccgagtaaaacattattgtcgtttgaattggctcataggttgaacattcaatttcgagcgtctcgatatattacgggactcaattagacatccgagtaaaaagttattgtcctttgaattggatcagaggttatccattcaatttggagcgtctcgatatattacgggactcaatcagacat

SEQ ID NO: 17626 - DNA, 399 bp, Glycine max
  unsure (1)..(399): unsure at all n locations
agcttgtagtgcagctccagatttcataattggctcaccaacaggatgatagtcacagcctgcttcaaggatttgcttaccagatgacagtaaagttggaactttgtcatgacgaacctgcttctgattctcttttaactcaaaatcattagcataaggaagattagtatgtccattaaaataaccattgtttattgcggaagcgtcaagaagtgggttaaagaactgaaaaataaaaccagctgccaaacttgaacggtaagtggtttttgaggtatcatctttaggtacaatagtggctgtaaccaagatgacagcatcgtatagaatgctagcacttaaaagctntccagctaanaactcctcaacatattttgctctgattgcatgcttactccg

SEQ ID NO: 17627 - DNA, 382 bp, Glycine max
agctttgcataccccaaggatccattaggaaattacttatgaaagagagccatgagggtgggctcatgggccactttgggatagacaagacccttgtcttactcaaagaaaagttttattggccccatatgaagaaagatgtccataagcattgcactaggtgtgtggcttgtttacaagccaagtctagggtgatgcctcatgggctatacacacccttacccatcccctctgtaccttgggtagacattagtatggactttgtccttgggcttcctagaacccaaagaggtgtagactctatctttgtggtggtggataggtttagcaagatggcacacgttataccatgccataaggtggatgatgcttcccacatctc

SEQ ID NO: 17628 - DNA, 400 bp, Glycine max
tcgtcgtcctgaggatgctttttttcaaagaaacgattgcacatgtaatggtggcattcttccacattattggggatttggagtagaatcacgaggaacaacctcaaaaattcctgatccttttgctatagaacaaggtaacccaacaaaaattaaaaatggatatgaggagaaatggttgctcaacatcatggtcattgatacacgtggtgcacaagataagaaagcttgcactcaatgtagatgtgaccagatgaatctcccgaaggacttttataatgtcacaagggatatacataaccaaaaattgactacaaattataaaggaggtctattttgttgtcaggacaacttacaatgcaagcaaatagaaggttttcaaggttcaaggagaatggtt

SEQ ID NO: 17629 - DNA, 224 bp, Glycine max
caacacatgcacagtggccaaggatgcatgggagatcctgaaaaccactcatgaaggaacctccaaagtgaagatgtccagattgcaactattggccacaaaattcgaaaatctgaagatgaaggaggaagaatgtattcatgacttccacatgaacattcttgaaattgccaatgcttgcactgccttgggagaaaggatgacagatgaaaagctggtgagaa

SEQ ID NO: 17630 - DNA, 384 bp, Glycine max
agcttgacattaatatttatttcttttctggaggccatcaattgtttataatgagagtaacttacactattctatatcttctttgttggagttggtgggtcgaaactaaattaaagaataatagtggtctcaaaatatatattattatgcacaaaaaagaccaaactaaacgtgcaggtaaaggttgagtttaattatcataaagtgtttatatatagttggcctttgttggtcgattttgccagtgtcatataaactagtattaaggagctagaggcaatgggaaagagcaatgttctcgttgagggtggaactgggtatgttgggatgaaaatattgaatgcaagtttattacatggccatgaaacctatgttcttcaacgt

SEQ ID NO: 17631 - DNA, 374 bp, Glycine max
ctgaccaaaccccagcagcagttgtttccttagagacttgcctcagcaccttatctccgagactgaggataattgcactatgtgccttctacagtaatgctttcttatccccatcacccatcatcttttcaagtttggcttctccatcaagtgcttccaccaggccctgctgaacaagaagagttctcatcttcaatcgccatagcccgaaatcattttgccctgtgaatttttcaacctcatacttggctgagcccatttcttgaatcgaactcaaaattgctctatgctcaccgcaccaatttgttgtgccaagatcagattataattcacaaaagaatgagtttcttgtatgaacaagaataagcaaaatg

SEQ ID NO: 17632 - DNA, 414 bp, Glycine max
cttgagacattgtcattagtgaaaaccacgtagtcgtttcctaactgacttttaaaattaccataataatgacttttggtacatagtgatgaccaaatatttggtcgtcacttttcattgataatcttgtagaggatgcacttgaattactcattgttgtatataaatttattttaaacagaaaacgaaaaaaaatatattcaagagtttatattttttataagtaacaaaattactaaagaatatcttttatctaaaaagtatatttgaatggtaatttaactgttactgtctatttacttttcataaattatatatgataatattttccatagaagttaaagaacgactatattatcattatttaaatatttatcatagagaataaaaaatgtttcacataatttctaatga

SEQ ID NO: 17633 - DNA, 394 bp, Glycine max
tctgccttttctatttctgtgacctgaactgtatttgtcttcttctctttatccagatccttaaactgcagtgattgtctgtagtcacttgtggcagtgacgaacactacaagcaatatgcttgcaacaataccaattccatcctgtgcacccttgggccacccttccattattataccaaccaccaaagagaccaaggcacagacagcaagtatcatgagggttgtatcttgaagggattcccatacataaacccaaaatccacgggctggactttcagcgaatttattaactccataaatttcttttctctgattcaccaagtgctcagatgttgatataccatcatcaactgaggtattgagtttgtttgtgatagcatcaaccccaccat

SEQ ID NO: 17634 - DNA, 381 bp, Glycine max
atcttataatatatcgatacgctcgaaattaaacatcgaaaactctcgtgaaattcaaatggtcataacttttcacacggatgtccgattcaggcaaatcacatatcgagtcgctcaaaactgaacaacggaagctcttgagaaattcaaatggtcataacttttcacacggatgttagattaaggcgcatcacatataaagacgctcgaaaatgaacaacggtagctctcgagaaattcaaatggtcatcacttttcacactgaggtccgattcaggcttataatatattgatatgctcgaaattaaacatcggaagctctcgagatattcaaatggtcataatttttcacatggatgtccgattcgagcgcataatatg

SEQ ID NO: 17635 - DNA, 403 bp, Glycine max
tgaatcggacatccgtgtgaaaagttatgaccatttgaatttctcaagagcttccgttgttcaatttcgagcctctcgacatattatgcgcccgaatcggacatcggtgttaaaagtcatgatcatttgaatttctcgagagtttccgatgtttaatttcgagcgtattgatatattgtaaccctgaatcggacctgagtgtgacaagttatgaccatttgaatttgacgagagcttccgttgttcaatttcgaatatcactatatgtgatgcgcctaaatcggacatccgtatgaaaagttatgaccatttgaatttctcaacagctgtcgttggacaattctgagtgtctcgatatgtgatttgcctgaattggacatgcgtgtgaaaagtatgaccattt

SEQ ID NO: 17636 - DNA, 435 bp, Glycine max
  unsure (1)..(435): unsure at all n locations
tcaacgttcattntcgagcgtctcgataagtttctgtattctatcagacatccgagaaaaaaggtgttgtcgtttgaattagctcagaagttcaacattcaatttcgagcgtctcgatatgttacgggactcaatcagacatccgagtaaaaagtcattgtcgtttgtattggctcagagcttcaacattcaatttcgagcgtctcgatatattacgagcctcaatcagacatccgagtaaaaatttatggtcgtttgtattggctccgagcttcaacgttcattttcgagcgtctcgattagttacgggactcaatcagacatccgagagaaaagttattgtcggttgaattagctcagacgttcaacattcaatttcgagcgtcttgatatgttacgggacttaatcagacattcgagtaaaaagtattgtcg

SEQ ID NO: 17637 - DNA, 422 bp, Glycine max
ttcaacattcaacttcgagcgtctcgttatattttgtgtttctattagacatccgagtaaaaaggtattgttgtttgaatttgctcaaagcttcaacattcaatttcgagcgtctccatatattacgggactcaatcagacatccgagtaaaaagttattgtcgtttgaatttgctcaaagcttcaacattcaaattcgagcgtctcgttatattataggactcagtcagacatccgagtaaaaagttattgacgtttgaatttgctcagagcttcaacattcaatttcgagcgtgtcgctatattacgggactatatcagacatccgagtaaaaagttattgtcgtttgaatttgctcagagcttcaacattcaatttcgagcgtctccatatattacgggactcaatcagacatccgagt

SEQ ID NO: 17638 - DNA, 383 bp, Glycine max
tgttgacaaagctgaaaagtgtgtctttgttgttgtttgtgaaacatcaaaagcatataagttatttaatccactaacaaagaagattgtgaccagcagggatgttatttttgatgaagacaacacatgggactggaatgagcagcaacccaattcaattattgttgacaatgaagatgtaaaagaactacagctactcgtaaacattgtcttaacatctccaaatgaagctcaaatagctcctgagacagagatttcaacaccaacaaatgctggaacaacagatgcaactagacatggcaatggggcgggtcgggtacaggtattgtctccccaatcccttaccccgacgcctcgacatattcccatacccgtacccgata

SEQ ID NO: 17639 - DNA, 436 bp, Glycine max
  unsure (1)..(436): unsure at all n locations
tcataagtccatcctattatttaatcttcaggtcttctaagataattttcaaccaaattaattcacaaataccttgtgccatagttttaaactcagattcagcactagattgaaccacaacattctgttttttaactctccaaattactaagtttcctcaagaaaggtgcaatatccagtagtggatctcctattagttactgaccctgcatagtcaggcatttgtaagcttcaaggattgtattaacatttcctttatataaaattcctcttcctagtgttcccttgattgcaaaatcctataagtgccatgtaagtgaacttctcttggacaatgcataaatttgctaaccaaacttgtagtgaatgcagtatctggccttgtgtgagagtcagacaagatatntaatttcccaaccaaacattgatacatctc

SEQ ID NO: 17640 - DNA, 431 bp, Glycine max
  unsure (1)..(431): unsure at all n locations
tcggcattctagtccaagcgtctcgatatattacgagactgtatcagacatccgagtaaaaagttattgtaatttgaatttgttcagagcttcaatattcaaattcgagcgtctcgatatattacgggactcaatcagacatccgagtaaaaagttattgtcgtttgaattggatcagagcttcggtattcaatttcgagggtctcgatatattgcaggactcaatcagacatacgagtaaaaagttattgtcgtttgaatttgctcagagcttcggaattccattttgagagtctcgatatattacgggactcaatcagacatccgagtgaaaagatattgtcgtttgaatntgctcaaagcttcggaattccatttcgagcgtctcgatatattacgggacttaatcagacatccgagtaaaaagttat

SEQ ID NO: 17641 - DNA, 425 bp, Glycine max
  unsure (1)..(425): unsure at all n locations
tgacaataactntatacacggttttcttattgagtcccgtaatatatcgagacactccaaattgaaaacggaagctcttataaaattcaaacgacaataaatttttactcggatgtccgacagagggccgtattatatcgagacgcttcaaattgaaataagaagcacgtagcaaattcgaacaacaataagttttcacttggatgtccgattgagtcccgtaataaatcaagacgctcgaaattgagaacagaagctcttggcaatttcaaacgacaataactttatagtcgaatgtcctattgagtcccgtaatatatcgagatgctccanattgaanatggaagctcgtaacaaattcaaacgacaataacattatacacggatgtccgactgagtcctcgtatatatcgagacgctctaaa

SEQ ID NO: 17642 - DNA, 436 bp, Glycine max
tcctccatatattattcgcctgaatcggacttccgttttatttgttatgaccatttgaatttctcgagagcattcgttgttcaatttcgagggtgtcgatgtattatgcgcctgaaccggacttccgtgtaacaagttatgaccatatgaatttctcaagagctttcgttgttcaatttcaagcgtctagatatagtttgcgcctgaatcggacttccgtgtgacaatttatgactatttgaatttctcgagagcattcgtggttcaattgcaaccttctcgctatataacgcgcctaaatcggacttccgtttgaaaatttatgaccattcgaatttctcgagagcattcgttgttcaatttcgagcgtctcgatgtattatgcgcttgaatctgacttccgtgtgacaatttcttaccattagagtttcttgat

SEQ ID NO: 17643 - DNA, 394 bp, Glycine max
gctgaatattgcctagaggacttggttgattatgtcgttggtaaagaggcttatgatgggcctttacttcctttagcaaatggcaattttgcatctttttcagaagcatcaaaaggagtctcttatttcatttgtgatgaatttgaatataagctgatgcagccagtttctgatagagtaattgatcagaacattcctcccaatatattgaacaaactcactggtattgcgatgtcctcaaagaccaatgttattctttgtagtattcaccattttgctcagctattccctgcatttatgtcagctgactggaaatataggagtaaaagtgttctgggaccctgaatcttgtcgaaagccaacgtcatcatggtttctgctattctggcaatat

SEQ ID NO: 17644 - DNA, 423 bp, Glycine max
  unsure (1)..(423): unsure at all n locations
tgaaattgacaacggaagctctcagaaattttaatgtcataacttttcacttggaggtgcaattcatgtgcataatatatcgagacgctcaaaattgaacgaggaaagctctcgagaaattcaaatggtcataacttttcacacggaggtcagattcaggcgcataatatatcgagatgctcgaaattgaacaatggaagctcctgagaaattcaaatggtcttaacttttcactcggaggtccgattcaggcgcataatatatcgagacgctcgaaattgaacaatggaagctcttgagcaattcaaatggtcttaacttttcacatggaggtccgattcatgcgcataatatatcgagacgctcgaaattgaacaatggaagctcttgagcaattcanatggtcataacttttcacatgga

SEQ ID NO: 17645 - DNA, 370 bp, Glycine max
  unsure (1)..(370): unsure at all n locations
taaaaagcaaagtagtaagatacattgttaatgaaacgtataataaagaataatggcctcncaaacttctaatgctgatggttttctgtttggttatccaacaacatttggatccatggtttctcaatttaaagcatttttagaagacactataagcctgttgtggcttacacaggcactagcaggaaaacctgtagggttcttctctagcactagttctcaaggaggtggacaagaagagaccccatgagttatattaattattactgaattcttcaatattcatgattaaggtttccatcaattaatggttattttgtatatatccactcaacatgcgagaagtcagatcaaactattagtcactact

SEQ ID NO: 17646 - DNA, 435 bp, Glycine max
  unsure (1)..(435): unsure at all n locations
actaagctccggagtttccagtgccaatncgtcttcttctttagtccattcttcttctggcttcaattcttcagtgggctttccttctgtgtccagcatcttgggatgttcccagcctttgatgacagctttccaagttctgctatccagtgatttgaggaaggccaccattcttgctttccaatattcatagttgcttccatcgagaataggtggtctgttcactggtccgccttctttctccatgttcatcagaatttatctccctagatctcactctgtgatttcgagtgttggctctgataccaattgaaattctgataccaagggacagatgtcgtacaggatgtcacgacatcacgcttcagaacatgcagattatatgtgtgcgtatgaacagattaaacaagtgaataacacacgagaattgttacc

SEQ ID NO: 17647 - DNA, 430 bp, Glycine max
  unsure (1)..(430): unsure at all n locations
tgtgaactatctttgaattcactaaatgtatatagaaatctagtttacttcctagttttatgttcttgtgaaaatcaaaagcatatattgtgacatgcatttgactatacatgtcatattttatgtcatattttaagtggtgcagaagacgaggaataagaatggaagggagaaagatggtaacattttatgctaatgattcaaatttaacgtgagacttaatataaaatttaaattacttttagaatcaaaatgattataaatgataaaatttaggaaccaaaatataaaaaagtaattcaattcgataactaaatttaggttgtgatgtcataagtcctaaaaaataaacaataaaaaatcaactttcattntagtcatggattgtcatgtattcaaacaacatttcacataaatacgaacattaacc

SEQ ID NO: 17648 - DNA, 428 bp, Glycine max
aagaagattcccaaagaagatagagcttagctacacttacctctctaatagctaaggtcacctccttgagatgagaagctagagcttagctatacaccccctataataactaagctcacccccatgaaaaatacatgaaaatacaaaaaaaaatccctactacaaagactactcaaaatgcctcgaaatacaaggctaaaaccctatactactagaatggcgaaaatacaaggcccaaacgatggaaaaacctattctaatatttacaaagataagcgggctcatacttagcccatgggctcgaaatcaaccctaaggctcatgagaaccgtagggccttcccttggatctctgacccaatctacttggagtcttctatccaatgcccttgcgggtaggattgcatcagtgtctcccctcccctcttc

SEQ ID NO: 17649 - DNA, 430 bp, Glycine max
  unsure (1)..(430): unsure at all n locations
tctaaactntatacaagaatgaagctctggtaccacttgttggaaaagtggcctcatatatcttaagaaggaggggttgaattaagatattacaaattatttccccaattaaaaattgtatttaactttctattcaagttattaattcccttaataatgaatttcttaaatattgattcaaatagaacaatttgaatatgaatataaaacaataataaataaaggagtttaagggaagagaaagtgcaaactcatatttatactggttcggccacacccttgtgcctacgttcagtccccaagcaacccgcttgagagttccactatcttgtaaattccttttacaagttctaaacacacaaggacaatccttcctttgtgttntgaattctttcacaacaagagaccctcggtctcttaatcccttttc

SEQ ID NO: 17650 - DNA, 421 bp, Glycine max
tcattaagagacttcctcaagaggcttctttgttaatctagatccttatctacccacacccttctattaactaaattaacctccctgaaaataattacggataaaaaataacataacaaataatcaaacatcaaacataattactaataatatatagatatatatatatatgagggtgttacattggttcctaagttgtggttctttattgttggaggtttgaaaacaaaaggtaaaagaaactatggttgaaactagccaaaataaacactaaaagaggtgtgaaagataaggtaaaaaactaatcggtaaaaggaaagctatctaagcggtttgacagtggaaggtaaaggaaataagctacgaaagtaagcaagaaatgtaaactatgcgaatcctaagagtgtgtggatgaccacat

SEQ ID NO: 17651 - DNA, 441 bp, Glycine max
tctccttccttttcctataaataggggaaggagggaataacataaaggttcaacccttctggtatctgagattcacttaaaattagtgagaaaaattgtttccgttgttagtgcttagctctactgagctttaaaagattggctaagattttgttaaaacataagcacttagacaatgaaggaaagctggagttgctgcacatgatgtccaacgttatgtcaaagaataagatcgggctgcacaatgcacaaggcaagatgaaatgtcaaatgaagaattgaagctgcatgattcacgatgtcggatacaatgtccaggacatcctgcccgaaaatactggagttgctaaaagcattgaagctgcaggatccacgatgtcggatacaatgtccaggacatcctgcccgaaaatactggagttgctaaaagcattgaagctg

SEQ ID NO: 17652 - DNA, 416 bp, Glycine max
ctgatgatagaggatgcacgaacagagcttgcaatctattttggggctccggactcaatggtggaggatggatgaacgacaatcaattcgtggggctccgaataagatttgatgatggaggatgcatgaacagcgctaggcaatcaattcatggggcaccgtactcaatggttgaggatgcatgaacgacaatcaattcaaggggcttcgaataagctttgatgatagaggatgcacgaacagagtttgccaatcaattcgtggggctacggactgaatggtggaggatgcatgaacgacaatcaattcatggggctgcgaataagatggtggaggatgcacaaacaacattatgcaatcaattcgtgggtctctagactcaatggtggaggatgcatacacgacaatcaattcat

SEQ ID NO: 17653 - DNA, 433 bp, Glycine max
  unsure (1)..(433): unsure at all n locations
tgtccaaaatctcactaatattaggcaactgtatctggatggtgtaagtatctcagttgcaggacatgaatggtgcagcgctttatcgtcgatgcttgacctgcaagaaattcgcatgtccaagtgcaatctctcgggacccctggattcttccctggcaagacttgagaatctatcagtcattgttcttgatatgaactatctatcatccccagtgccagaaacatttgcccatttgaaaaatctcaccatcctacgcctttctgagtgcagattgactgggacatttccacagaagatcttcagcattgaaacattgtctgttattgacatatcactcaaccaaaatctcaatggtttctttccaaacttcccattgagcagatcacttcagaccttanaagtaagaaacacaagctnttctggagcattt

SEQ ID NO: 17654 - DNA, 430 bp, Glycine max
  unsure (1)..(430): unsure at all n locations
tctattattgttgcagtatacaaatggaagcttatatctataaaatacaaggcatccttgccttatattagcagaggacaaaacagaaaaataacagaaaaacttccatatggatttaggtcatagcccaacacatagggacctcaagcctgagaactttctctttgatactgttgaggagggtgctaaggtcaaaactactgattttgggctctccgtgttttataacccaggtttggttgctctctcgttagatttgttttttgtggaagatgccgagggagagggcttggtcgtgggttttggtggaggtggngattctgatgatgtctttgagttttccttggcggaggagctcgccgatgcagtcgcttggcagtggagccaatgccgaggaccatgccggacttgacatactcgatgaccttgt

SEQ ID NO: 17655 - DNA, 435 bp, Glycine max
  unsure (1)..(435): unsure at all n locations
tgagagatcttcttcaacaatggaataccaaatcacatccccaagtgaccaccaatattccacaggctatgtgaccaaaaagtcccctcctccacctgtggagtttcctacctcaccacaactcatatttggggaggagattcttcacttcagccaccctcagcaccctctctcaatggtggatctccctgacctgttcaattgtgtggggtgcaaagagtatggctctggaaagaggtttgtttgccagcaatgtgattttcagctgcatgacttctgtgccttggctcctcctgctctcaaggcacacccctttcactcacaacactctgtcttgttccattccaaaccaggtaaaccacgtacatacatacatatatatatattcatgagtacaattgtacaaatgtaatnttttatttaaatattatatta

SEQ ID NO: 17656 - DNA, 419 bp, Glycine max
  unsure (1)..(419): unsure at all n locations
tcaattggagtcttgtcttttacagacttagttggacatctgttgagtatgtaagcagcagtgtagactgcttcagcccaaaatgtgttaagtagtcccttctccttgagcatcgatctagctatttccataactgtgcgattctttctctcggacactccattttgttgaggagaatatgagactgtaagttgtcgctaaatgccttcatcctcacaaaatctttcaaactcgcgagaggtgtactctntgtcgtgatcacttcttagtacttttatccgttttccactttgatttttagcaagggccttgaactttntgaatactccaaagacttctgattttttcttttagaaaatatacccatgccattctagagaagtcatcaatgaagagtatgaagtacccgttgttctcat

SEQ ID NO: 17657 - DNA, 353 bp, Glycine max
agcttttgagcttttcatatggtcatagcttttcactcggatgtccgattcaggcgcataatatatcgagacgttcgaaattgaacaatggaagctcttgagcaattcaaatgatcataactttttactaagatgtccgatgcaggcacataatatatcgagacgctcgttattgaacaacggatagctctcgagaaattcaaatggtcataactttccacacggatgtcagattcaggcgcataatatatcgagacgctcgaaattgaacaacggaagctctcgagaaatataaatggacataacttttactcggatgtccgattcacgcgcattatatatttagacgctcg

SEQ ID NO: 17658 - DNA, 413 bp, Glycine max
tccattgttaaatttcgagcgtctcgatatcttatgctcctgtttctgacctccgtgtgaaaagttatgaccatttgaatttctcgagagcttccgttgttcaattttgagtgtcttgatatattatacgcctgaatcggacctccgagtgaaacattatgaccatttaaatttctcgagagcttccgttgttcaatttcgagcgtctctatatgtgatgtgcctaaatctgacctccgtgagaaaagttatgaccatttgaatttctcgagagcttccgttgttcaatttcgagcgtctcgatatcttatgcgcctgaatcagacctccgagtgagaagttatgaccatttgaatatctcaagatcttccattgttcaatttcgagcatctcgatatgttatgcgcctgaat

SEQ ID NO: 17659 - DNA, 325 bp, Glycine max
agtttgaatctgacatccgtgtgaaaagttgtgaccatgtgaatttctcaagagcttccgttgtttaattgcgatcctatcgacatattatgcacccgagtcggacatccgggggaaaagtcatgatcattcgaatttcctcaaagtttccgatggataacttcgagcgtatcgatatattattaccctggatttgacctcagtctgaaaagttatgaccatatgaatttgacgagagctgtcgatgatcaatttcgaatatcactgtatgtgatgcgcctgaattggacattcgagataaatgttatgaccatgtgaatttttc

SEQ ID NO: 17660 - DNA, 345 bp, Glycine max
agctttagttttcaattaccagcgtctcgatatattacgggagtcaatcagacatccgaattgaaagttattgtcatttgactgttcatagagcttccgttttcaattatgagcgtctcgatatcctacgagactcaatcggagatccgtgtcaaaagttattgtcgtttgaatttgctaagagcttctgttttcaattacaagcgtctcgatatattacgagactatatcggacatccgagtcaaaagttattgtcggttgacttttcttacagcttccgttttcaattttgagcgtctcgatctattacagggttcaatcggacatccgagttaaaagttatt

SEQ ID NO: 17661 - DNA, 352 bp, Glycine max
  unsure (1)..(352): unsure at all n locations
ntgagcanattcaaacgacaataactttcgaatcggttgttcttatgtgtcccataggatatcaagacgctcggaattgaaaacggaagctcttagaaaaatcaaatgacagtaacttttaactcgaatgtccgattgagccctttaatatatctagacgctcgaaatttagaacagaagctctatgataagtcaaatgacagggactttcaattctgatgtctgattgagtcccgtaatatatcgagacgctcgtaattgaaaactgaagatctgagcgaattcaaacgacaataacttgtgactcggatgttcaattgcgacccgtatgatagcgagacgctcgtaattg

SEQ ID NO: 17662 - DNA, 361 bp, Glycine max
agtttacatatattccccatgtgataatctgaacaagagagaattatgggaagcactaagccagctaagacaccaagatcctgagggattatggtgcttcttcggagattttaacagcattagacaccagtccgagagagaaggggtggctcacaggggtatggaagcaaacaacataactgattttagtgaatggctagccgacctagaggtagaagaaatacctagtgtggggagaagattcacatggtttaatccaaacgggactgcaaagagtaaactagatagaatttttgtctctcatgaatggctcaacaaatggccaggctgcacccaattcatcttggatcggaacttctcg

SEQ ID NO: 17663 - DNA, 374 bp, Glycine max
agcttgtagggttaaagtctcacgattgtcacgtgctcatgcaacaattgttagccgtggctatacgagacatctttccaaacaaagtcaggttagcgataactcgcctgtgctttttcttccatgctatatttagcaaagtcattgatccagtcatgtttgttgagttggaaaatgaggccacaattatactgtgccagttggagatgtattttccccctgctttctttgacatcatgattcacttgattgtgcatctggtcagagaaatcaaatgttgtggtcctgtttatctacagaggatgtacccggttgagcgatacatgaagatcttaaaagggtatacaaagaatctatatcgtccataagcatct

SEQ ID NO: 17664 - DNA, 365 bp, Glycine max
agcttgtccttgactcattttctccttgaagtgacgtctccaatcacctttcctccttctccattctgctgccattgatcttcaagaagcaaaggatttcattgatgaagaagatccaaggcctacaagctctacatggagctacatcatgtggtatcaagagcatcttcatctaagtgatgttcttttgcttcctctatcttttgcttggtcaattcactttaattccttgttcttcatcatattctccatgtatctcctccattatcttgtgggttggttctgatcatagtagattcaaaaatataaatcgattaaatcctagatctatacttgttcttgcatttctatggctcaaattttat

SEQ ID NO: 17665 - DNA, 363 bp, Glycine max
  unsure (1)..(363): unsure at all n locations
agcttgagatgcttaataataacattctaggactgcaacacggtacgctttttgatgagaagcttcatgataacataccatgagagggatgtttctctacacttggagcatatagaggaactgtggaagatcttgggttgcaaagagatcccttcaaggcttttcattacagggaggtacattggaggagctgatgaagttgtcggattgcatgagatggggtggcttggaaagcttttggaaggaacaccaatggactttgctgatggtccttgcaaaggttgtgcctgcatgaggttntccatttgttccaatcgtaatggtagttgcaaagagtttaccaccaatggtgacaacacgaat

SEQ ID NO: 17666 - DNA, 396 bp, Glycine max
tctattgctcttattcatctttacttgggctatctcataccttttattttttttgtctaagattttgcatacacctccttcaaagtgaagtgtgtagcctctctccatcatttggccaatgcttagaagattttcttttaggctgggaactagtaagacatcatgaatgagtcgcgtacctttatctgtctccaccatgacagtgcctttgccttttgattcaaccacacttccatttcccagtcgaactttgactttgacagactcatcaatgcttttgaaaatagtctcatccttggccatgtgattgctacatccactatccaagtaccagcttcctcccttttcttttattgagtcttgagtggcatagaacatacattgttcttgatcatg

SEQ ID NO: 17667 - DNA, 415 bp, Glycine max
tctatagaaggttcgttcctaattgctctactattgtatcacctctcaatgagatagtgaagaagaatgtggcatttacctggggtgaaaaacaagagcaagcctttgctttgctcaaagaaaagcttactaaggcacttgttctagctcttcctgacttttctaaaacttttgagctagaatgtgatgcttctggagtgggagttggagctgttttgttgcaaggtgggcaccctattgcttattttagtgaaaaacttcatggtgcgacccttaactactccacctatgataaagagctttatgccttaataagagcactcagaacttgggaacattaccttgtttccaaggaatttgtcattcatagtgatcatcaatcacttaagttcattagagtgcatagcaagttaaa

SEQ ID NO: 17668 - DNA, 354 bp, Glycine max
agcttgatttatactggttcggccacttgccgcgcctacgttcagtcctcaagcaacccacttgagattttccactctctttgtaaaactccttttacaaagtctgaaccacacagggacaacccttcccttgagttcaggaatcctctacaacaagagacccacgatctcttaatcccttttcagaaataagaagaagaaatctctcttaaaagagatagattgtacaatgaagatcaataaaaattccttattgaatatgcaagtggttgaccaaggaatctttttgagaggataaaactattgggcaatgaaaactctctttaaattcgtgtttccaagtcacctttgatg

SEQ ID NO: 17669 - DNA, 406 bp, Glycine max
tcaaaaggagccataccaatactggcttggttgctattgttgtaagtaaactcaatcaatggcagacaatccatccagctaccttgttgctctataatacacgcccgaagtagatcttccaaagtctgaatagttcgttcagtctgaccatctgtttgaggatgataagctgaactaagcttcagctttgtccccaaggcttcatgtagacttgtccaaaatcgcgaagtgaacctcggatccctgtctgatacaatactagaaggaattccatgcaaccttactacttccttgatgtacaactccactagcttctccattctatacttcatattcactggaataaaatgagcagatttggtgagtcgatctactatgacccacacagcatcgtgtccacgactag

SEQ ID NO: 17670 - DNA, 433 bp, Glycine max
gaccttagaaactaagcttacaagggctttgacatttggagtaggcatcaagattagacctagcatccactatatcatgagtcacaccagctttacaagcttacacatgcttttgcttaacaagttcaacaacgagcaaaccactggctgcactcaaattataaccaccagcaaacccatctccttgaacaccattcctaaccattgcactgaaaagattcaccgcttccacctcctaaccatgggacccataacctgaaataatcgaattccacagcacagcacacggttcaaccttactatcaaaaccactttttgcctccctcattctggcagcattggcataaccagatatcatagctgacaaagagaactcatccacattcgttacaaaactcacaatgcgagcagcacttttcaaatcaccacactt

SEQ ID NO: 17671 - DNA, 372 bp, Glycine max
agcttttgaattttatctgtttaagcgtcccatgttaatgcgagctaattctattatgccatagccatggatcattatctttgctaagacaacattgactattacctaaattttgacttaagtctatcatgtaaacattattgactctaaaccctatatgctttatattcgtatcatgtccatgttcaatgacacattgttgagaaccaaatgataccagatagccgttgtcacacacttgactaacactaagcatgttgtgcttaagacctccaactagtagatcattttcaatggaggttgaagaatttgacctatttttccaactccaagaattctaccttttgtgttgtctccatacgttacatgccc

SEQ ID NO: 17672 - DNA, 363 bp, Glycine max
agcttcaagattaagatggcctcagcaaattccttatttccagaagggaattctatcaatagacctccaatctttaatggagagggttaccactactggaaaacccgaatgcaaatttttatcgaggcaatagatctaaatatctgggaagccattgaaatagggccttatatacccaccacagtagaaagagtttcaatagatggtagttcatcaagtgaaagcataaccatagaaaaacctagagatagatggtctgaagaggatagaaaacgagtacaatacaacctaaaagccaaaaacataataacatctgccctatgaatggatgaatatttcagagtttcaaattgcaagagtgct

SEQ ID NO: 17673 - DNA, 400 bp, Glycine max
tgcgggccctcaggcaatcctgcattctccctcttttttctgagccccatgaatgttattgcctagcgctgttcatgtgtcctccaccttcaagtttggagctatgtttcatgattgcctaagtgcggaccctcaaggcgatcctccattctccccgttttttggatccccatgaatgatgtagcctagcactgctcatgtgtactgcacctttgagctagcggctatgcttcatgattgcctaagtgcagaccctcaatgcaatcctccgttctccccctttttcagagccccatgaaagttattgcctaccgctgtacatgtgtactccaccttcgaggttggaactatgatacatgattgcctaattggggaccctcaaggcgatcctccattcttc

SEQ ID NO: 17674 - DNA, 362 bp, Glycine max
agctttctccactaagttgcctgatgcctaaaatgtcttttctgatggaagtggtcctagatgcaaggaataatttctccaagaacaccctcttaaggtcatcccagctgaaaatggacctgggagcaaggtagtataaccaatcttttgccactccctctagagaatgaggaaaagcctttagaaagatatgatcttcctggacatcagggggcttcatggtggaacaaacaatatggaactccttaagatgcttatgaggatcttcacctgcaagaccatgaaacttgggcaacaaatgtattagtccagtcttaagaacatatggaacaccctcatcaggatattgaatgcacaagctt

SEQ ID NO: 17675 - DNA, 357 bp, Glycine max
agctttctccactaagtttcctgatgcctgaaatgtcttttctgatggcggtgatcctagatgcagggaagaatttctccaagaacaccctcttaaggtcatcccagctgaaaatagacctgggagcaaggtagtatagccaatcttttgccactccctccagagaatgaggaaaggcctttagaaagatatgatcttcttggacattagggggcttcatggtggaacaaacaatatggaactccttaagatgtttatgaggatcttcacctgcaagaccatgaaacttgggcaacaaatgtattagtccaatcttgagaacatatggaacaccctcatcaggatattgaatgcaca

SEQ ID NO: 17676 - DNA, 370 bp, Glycine max
agcttttgactgactataccaagctctaggaaccagggacggagaaagatctatatataggcttgctaagggtagagagaggaagactagagatttggatcaagtaaagtgtgttaaggatgaagaaggcaaagtcttagtgcatgaaaaagatatcaaggaaaggtggaaggtgtatttccacaacttatttaatgatggatatggatatgactctagcagtctagacacaagagaagaggaccggaactataagtactatcgtcggattcagaaacaggaagtaaaggaagcgttgaaaagaatgagtaatggtaaggcggtggggccagacaacatacctattgaagtgtggaaaactcttggagat

SEQ ID NO: 17677 - DNA, 415 bp, Glycine max
ccgcttttatccatggactcctatggaggcgagcttcttcatactcatcttctccttgaagtggcgtctcctctctctcttacttatacattccgctgccattcatcttccaagaagcaaaggaatccattgatgaagaggatcctatgcctacaagctccaatggagcatacatcatgtggtatcaagagcatcttcatctaggcgatgttcttttgcttcctctatctttttgttccgagaattctctttaattacctgttcttcatcttactctccatgtatatcctccattgtcttgtggtttggtgctcgttagagtagatccaaaacaaatcaaccgattaaattttacatctacacttgttcatgcatctctatggttcatacttttgaaatctactcttgaatcatg

SEQ ID NO: 17678 - DNA, 368 bp, Glycine max
agttttggcttcttgattaagctcactgatgaacttcaatggagactgccagacaagaggttctgcagatgtaagatttagcaatgatgcacaggctccatgtttgtgtttcagagcaaccatatatggtatccgcctgcataaacacaccaatcaggaattcttataatatacaatgaggaaaagatgcagggctaaacataaaagctatgaacccaatctaccaataaatggccaaatcgttaaatgaggaaagttgcaataggaaaatgccagatatgagtacaggaaagggcccatcaaaacaagggatggaattatcatatcagagattctagaataacacagataaaataatcaataaccaa

SEQ ID NO: 17679 - DNA, 370 bp, Glycine max
  unsure (1)..(370): unsure at all n locations
tgttgtcaagcttgtgcatccaataccctgatgaggatgtcccatatgctcttaaaactggactgatccatttgcttcgaaagtttcatggccttgcaggtgaagacccgcaaaaacatctaaaagaattccatattgtctgatccaccatgaaacccctagatgtccaggaggatcacatatttctgaaggattttcctcattctttagagggagtggcaaaggactggctatattaccttgctccaaggtccatcacgagctgggatgacctcaagagagtattcttagaataaattctccctgcttctangaccacaaccatcagaaaagatatttcaagaattaggcaactcagtggagagagctt

SEQ ID NO: 17680 - DNA, 407 bp, Glycine max
tgtgcgctcttggcactgccatttgtttgataaattttgaaggagacctattccggagatggattaattgatgatgacatacctgttagtaacagcatacttatagctagctgtatagaagaaaagggatgataaaggtttaaataaaaaataagaatgtagaattatattctatatataacttaatgaaataatgaattttatatgcagataaaacgtaataatggtacaacttataatattattaaatagataaaatatatagtcaaaaaattctgatatatttagacatcttaataatatcaataccttattgagatcctcaatttctctctattatctgtttttaacacatcatattaattatttatcttctctttttttagatcttttatttttttttctat

SEQ ID NO: 17681 - DNA, 370 bp, Glycine max
  unsure (1)..(370): unsure at all n locations
agcttatcaaaaggcatgcgaagtgggtggaattcctagagcaattcccttatgttatcaaacataaaaagggaaaaggtaatattgtagccgatgctctttctcggcgtcatgcattactttctatgcttgaaacaaaattgattggtcttgaatgtttgaaaagcatgtatgaaaatgatgaaacttttggagaaatttttaaaaattgtgaaaaattttcagaaaatggtttctttagacattaggctttcttttcaaagaaaacagatgagtgaataggcaatttagtccctgagattgtaaccactttgcatattagtccctgacttanattntaattcataatagtccctaactttacataagt

SEQ ID NO: 17682 - DNA, 361 bp, Glycine max
agctttaaaagtttggctaagattatgttaaaacataagcacttagacaatgaatgaaagctggagttgctgcacatgatgtccaacgttatgtcaaagaataagatcgggctgcacaatgcacaaggcaagatgaaatgtcaaatgaagaattgaagctgcaggattcacgatgtcggatacaatgtccaggacatcctgctcgaaaatactggaattgctaaaagcattgaagctgcaggatccacgatgtctgatacaatgtccaggacattctgcccgagaatactggagttgctgtactatgcaagattaaagtcaagtagtgaagctgcaggatccacgatgtcggatacgatgt

SEQ ID NO: 17683 - DNA, 410 bp, Glycine max
tcaagagatcatcctctcgacaacattattgttgatattttatatgggcaacaactagacactctcttaaagatttatgcaataatatggcttttgtatccatgattgaacctaaaaatataaaagaagccataatagatgataattggatcattgccatgcaagaagaactaaaccaatttgaaagaaacaatgtgtggaaattagtagaaaaacctgaaaattatcctgtcataggaacaaaatgggtttttagaaataaattagatgaacatggtataattattagaaataaagcaaggttagtagcaaaagggtataatcaagaagagggaatagactataaagaaacatatgctcctgttgcaagattagaagccattagaatgcttttggcatatgcatccata

SEQ ID NO: 17684 - DNA, 419 bp, Glycine max
  unsure (1)..(419): unsure at all n locations
tctaaactntatacaagaatgaagctctgataccacttgttagacaagtggcctcagatatcttaagaagggggggttgaattaagatattacaaactacttccccaattaaaattctatttcactttctattcaagttataaattcccttaataatgaacttcttaaatattgattaaaatagaaccaattgaatatgaatataaaacaatgataaataaagaagtttaagggaagagaaagtgcaaactcagatttatactggtttggccacacccttgtgcctacgtccagtccccaagcaacccgcttgaaagttccactatcttgtaaattccttttacaagttctaaacacacaaggacaatccttcctttgtgtttagaattacaacaagagaccctcggtctcttaatccc

SEQ ID NO: 17685 - DNA, 414 bp, Glycine max
cagcttctaaactttatacaaaaatgatgctctgataccacttgttggacaagtggcctcaaatatcttaagaaggggggttgaattaagatatcacaaactatttccccaattaaaattttatttcactttctattcaagttataaattcccttaaaaatgaacttcttacatattgattcaaatagagcaatttgaatatgaatataaaacaataataaataaaggagtttaagggaaaagagattgcaaactcagatttatactggttcggtcacacccttgtgcctacgtccagtccccaagcaacccgcttgagagttccactatcttgtaaaagcctattacaagatctgaaccacacaaggacaacccttcctttgtgttcagatttctttacaacaagagaccctc

SEQ ID NO: 17686 - DNA, 364 bp, Glycine max
agcttttagaaagcttcgatgtagagtgtatattgtttttcttccatgcttcagttgtacatagcttgtgtcttcttcatagatagggcatgcatgatggcccttaacactatatccactcaaattcctgtatgctggaaagtcattaatggtacaaaatagcattgcactcaacttgaatgacttatttcgatacccatcaaacataacaaccccctcgtcccacaactttttcaagccttcaatcaagggactgagataaacatcgatgccatttcctggttgtcttgggctcgatatcatcatagacaacatcatgtatttttgcttggcgaagcattccatcgcaatttctctgatttgc

SEQ ID NO: 17687 - DNA, 339 bp, Glycine max
ttttcaatcttgtggcacctttcatggacgaagaaattcagaaggcaatttttaaagctgcagcgaagttttttatgaaggaaggcaattcacataaggattgcatggattaaatggaaatcggtatgcttaccaaaagaaaagggtggcttgggcatcaaggatattgaaacattcaatctcgcactacttggaaaatggaagtggcaattaatgcaagaaaatggtgagctgtggaccagagttctgaaatcgaaatatggtggatggaggaacattgaagaaacaggaaactcagcaaagcaatctgtttcgtggatggatgtaaaacacactttt

SEQ ID NO: 17688 - DNA, 409 bp, Glycine max
tcagaattcaatttcgagcgtctcaatagattacgggactcaatcagacatccgagcaaaacgttattgtcgtttggattagctcagagcttcagaattcaatttcgatcgtctcgatatattacgggtctcaatcagacatctgaggaaaaaagttattgtcgtttgaatttgctgagagcttcaacattcaattttgagcgtctcgatgtattacgggacttaatcagacatccgagttaaaagttattgtcgtttgaatttgctgagagcttcaacattcaatttcgagcgtctcgatattttacgggactcaatcacacatccgagtaaaaagttattgtcgtttgaatttgctgagagcttcaacattcaatttcgagcgtctcgatgtattacgggactcaat

SEQ ID NO: 17689 - DNA, 323 bp, Glycine max
atgaaatagtatcttcccttcttgccacaatccttgttgactacgagcatgaagagctccaatgaatgtgatgtcattatggatgacccctagtgcttccatatcttcagagatgcaatgctgcctcaccatgaccatgcatggcgaaaccagatatcatggcattttacattgaaacatcacggtccatggccgcagcaagcaaagcatctatgtctacacacttggcatacgtgtccaccaaagaagtcttaagaataataattcccttaattccttgcttgtctatgtaagaatggatccacttacccatttcaagtgat

SEQ ID NO: 17690 - DNA, 433 bp, Glycine max
  unsure (1)..(433): unsure at all n locations
aaaactcacgctntcgagaaattcaaacggccataactgtgcactcggatttgcgatacatgcacattaaatatcgagacgctcgaaattaaacaacggaagccctcgagaaattcaaatggtcataacttttcactcggaggtccgattcaagcatataatatatcgagacgctcgaaattgaacaacggaagccctcgagaaattcaaatggtcataactattcactcggagggccgattcatgcgtataacatatcgagacgctcgaaattgaacatcggaagccctcgacaaattcaaacggtcataactattcactcagaggcccaagtcaagcgaataaaatatggggacgctcgaaattgaacaacagaagctgtcgaaaatacaaatggcatcactattccctcggaggcccgatcgagcgtata

SEQ ID NO: 17691 - DNA, 456 bp, Glycine max
tctaagaatagccttgataactctaacattatccatataagcttcccctattaagattgtatcatccgcaaactgaagcatgtttactgggaccttattctttcctaccaaaaagctgtgaaagaagtttgtagagactgcttccctcatcaaacctgataacccttcagcagccaaaacaaataaaaaaggggccaaaggatccccttgcctcagacctctttgaggcttaaactcctcagttggactaccatttacaaggatggatattgaagctgaagaaaggcagcctttaacccaaccaatccacctttcatggaaccccattctcctcaacatatagaaaataaattgccaggacacagagtcataagctttctcaaagtccactttaagcactaaacacgatttcttttgcctcctagcctcctcaacaacctcactagcaatcagaac

SEQ ID NO: 17692 - DNA, 424 bp, Glycine max
gtgttaacgagatatttgtggataagttcttgattaagcctaacaacaatgacatcaattgcctgctacaaattggagaggcgcggtggtttccaagtttgttgggttctattgattgcatgcattgggaatggaaaaattgtccagttgcatgactagactaatatcgtaaaagtgatcattgcaaacccacattaatacttgaagtcgtcgctgatcgaggccgtacccgaatcaaataaacattataaatgtagtatctatgaagtgatcctatgtcgtctcccaacgagcaatgatctactcaacgttcataacaaatagtaatagaacagtacctaattggggggggtgtatgctttcggatattaatagccatccaatttgagttagaaaataaccatttacaacatgttgttcccct

SEQ ID NO: 17693 - DNA, 440 bp, Glycine max
  unsure (1)..(440): unsure at all n locations
tgaggganaacttgatgccttggtcaacctagtaactcatctggcaatgaataaaaaatctgcacctgttgcaagagtcggaggtctatgttcttctgaagatcaccatacagatctttgtccttctttgcagcaatttggaatcaatgagcaacctgaagcttatgctgcaaacatttataatagccccctcagcagcaaaaccaacaacagcaaaataattatgatctttcaagcaataaatacaatccaggtttaagaaatcatccaaaattgagatggacaagtcctccacaacaacaacagcttgtccctcctttctagaatgctgctggtccaagcaagccatatgttcctcctccaatacagcaacaacaacagtcacaactaagacaacaagcaacggaggctcctcctcaaccttccttagaagagttagt

SEQ ID NO: 17694 - DNA, 426 bp, Glycine max
  unsure (1)..(426): unsure at all n locations
ntanaggatgttntatcagtacaaaaatatatgtgttttcactggtaattgattaccaaatattgtaatcaattactagagatacattaccagagacaaattacataaaggctttttcaaaaagaagtttctcttttgaaatttgaattttaaatgctgtaatcgattaccacttgtatgtaatcgattacctgtgatgaaatttcagaagttaacattgaaaagtcgtgacctttcaaaacataactatgtaattgattaccaagaagctgtaatcaattaccagtgagagaatttttgaaaaatattctgaaaagtcacgtgtcttcaaaagtttttgaaaagccaccaaggacctataaatacgtgacttgtctacgaaaaacattagagtntttcattagaacctaagtgacatattctctc

SEQ ID NO: 17695 - DNA, 245 bp, Glycine max
taatattcgagcgtcacgaatattacaggtttactcagacttccgagtggaaagttattgctgttcgaatctgctacgagcttctgttctaaatttcgagcgtctcgatatatcacgggactcaatcggacttgcgagtgaaatgttattgacgtatcgaatttgctacgagcttcggctttgaattactagcgtctcagtatattacgggactcaatcggacttccgagtgagatgttattgtc

SEQ ID NO: 17696 - DNA, 362 bp, Glycine max
  unsure (1)..(362): unsure at all n locations
tgaaggcacactggatgcattggttaactnggtaacccagctggccttgaatcacaaatctgtacctgtcgcaagggtttgtggattgtgctcctttgctgaccaccatacagacctttgcctttccatgcagcaacctggagcaattgagcagcctgaagcttatgctgcaaatatttacaatagacctcctcaacctcagcagcaaaatcaaccacagcagagcaattatgacctctccagcatcagatacaaccctggatggaggaatcaccctaaccttagatgcgccagccctcagcatcaacaacagcagcctgctccttcctttcaaacgcttgtgccccacgataactatacat

SEQ ID NO: 17697 - DNA, 448 bp, Glycine max
tgtccattatactcacatttctggttcctcaaattctttataaacgccttagtgacctctggtctcacatatttaggtgggtgcaagccaccctttgaccagtcaacccaagtcaaactcctattagaattcttctccggaaacattatgttaacaaatgttggcaagtagtgttcatcaacatagcatggtctcgtgcagcgctcttgaaaaattgggaagtaggttttgtctgacaccacttctaaggcaagttctctgtccatttcgaaccattgagacccttttctccattgcttgagggtgaccatatgggacatgcgagggttgtaacgtccacgtgcaactagactatcttcatcataagccatcacatagctgtgggtggagtccatcacatatgagtagattggtgagaagttgatagagggatgcatgatctgatatc

SEQ ID NO: 17698 - DNA, 422 bp, Glycine max
  unsure (1)..(422): unsure at all n locations
tgtaacctattatgactntgacgaagtgcaacgcgtattctatggccattgaatttttttccttatcttccaatgctgcccttaccgccgttagcccttggccaaaagaatttgagtatcatatttatatgtttgataattattattattgttattattttttctcttgatgcacgtaaaagagaataacctaaacttttatatatgcgcattcaaattaaaactaacatacataaatggtcaattaatggatcttacataatgactcgttttcctttgcttctttcaggagagatcatcatcaattgatatggaatcatgtgtgcctcctggatttagaattcatcccacagaagaggagctcgtggtgtattacctcaagaggaagataaactcgctaaacatcgatctagatgttattg

SEQ ID NO: 17699 - DNA, 455 bp, Glycine max
  unsure (1)..(455): unsure at all n locations
atagaatactnacgcttgcagacaagactatacgaggtatcttccttgggtatatcaatatctctaagggctaccgtgtctacaacttgcaaactaagaaactcgtcatcagtcgagatgtggaagttgatgaatatgcttcttggaattgggatgaagaaaaagtggagaagaaggttcttatacccgctcaactacctcaagaagaagctgaggaagaagacccaggtgaaccaccttcacctccaccacaacaacaagatcaagaactatcatcaccagagtctactccaagacgagtaagatctttggtggacatatatgaaacctgtaacttggccatacttgaacctggaagctttgaagaagcgtcaaagcaggaagtatgggtcaaggcaatggaagaagagatgcagatgatcgagannaacaacacatgggagttagtaaatcgt

SEQ ID NO: 17700 - DNA, 423 bp, Glycine max
atttagaaaatacaaattaactcttttatatgctaattctgttttataaaataaaattaataaatagacagcttattaatggaaaaaattgtataatatgcatgagaccttagaatcaatttttttataatcattgtacacaaaagggaaataaaattaatttgatgtataatacttttcaattctaaaataagtatcgtcctaattattttacctaaataaagaaaaattattagaaatattagaaagaaaggtccaggaaaatgatctctttattcccatgacaaaatgtgtttatatacacatattgtattacaatcgtgatcctataattaagttaggactaattacactaaatatagaaatgaacatatatggaaagaattggtcttgatagctacacaccggcagatactaaatcat

SEQ ID NO: 17701 - DNA, 351 bp, Glycine max
gaagagagaatggaagagatccctgctgttcttccatgctttataatcagcggcgaagatcccgtctccgaaggcctgaaaaatgtgacgaaactcgggtcccttgacgtacgtgtggaaattcttgctcagcatgtggtggacgttgatggggtcgcaagtgaccaaatagtccatgttggtaaaccaaggtccaatgaactcaccagtgccaccatgtcgttgcaacacctgagatgaataatcatgggcacgccataaattgaacagtaattgtggtagcatgccaatgatacggtattctgtccaaatgggttgttgcaacatcgtctcctatggaagaaatattgg

SEQ ID NO: 17702 - DNA, 442 bp, Glycine max
  unsure (1)..(442): unsure at all n locations
ttaagacattntgcaacatcattntgtacattcaacattaacattctatttcttggcattggtaccttggtgattagattgtttctcccatctctgatggaaagattgaaatctttcatgtgaatatcatagcctttttcgagtaattgtcccaaactcaaaatattgatcttcatatttgggacatagtagacatttgatatgaattcatgtcttccaactttcaaacgaattaagatctaaagcatctatagtagacatttgaaatgaattcatgtcttccaactttcaaacgaattaagagtcttataattatcaccaaatgaaacactattctaaagcatctatagtcaagtattattggtgactatggcgacgataatacattaatgtntttgtatgagtagatcgactaatgaccacgtctcataggtcatggata

SEQ ID NO: 17703 - DNA, 415 bp, Glycine max
tatctccagcatagtcaacatcacagtagcttgtgagtccaaaatctttccttcttttaaagcatagaccaaggttataagttccaataagatatctaaaaatgcatttaataacagataaaaggactttccttggttctttttgaaaccttgcacataagtaaacactaaacattatatcaggcctatacgctataaggtataacaatgatccaatcattgctatttattgggttttgtccaacttttttagattcttcgtccaaccctaagtatctagttggatgtataggtgtctccatttcttttgcattgtccacgttgaacatatttagaagttctttcatatacttggtgatgcaatcctaccccgcaggccattgggtagaagactccaagtagattggctagagat

SEQ ID NO: 17704 - DNA, 407 bp, Glycine max
  unsure (1)..(407): unsure at all n locations
tcttaagcatagggacatctagtgctaaccttttttcactcaactgtgacaatgcttgatgatgataatgcccaagccttttgtgccagatttctgtgtgattctctatgagagagaaaacagcttgctccttcttcaatggatttagagcaaaactntttcctttcattttcacctcgaagatttcttgaccagctacatctttaattaagcaatttttgttttcaaatacaactttaaatcctcgttcaattagttggctgacacttaataagttttggtcaatttctagaacgaataggacatcaacaatacatcttgtgcctgcagaacttgtgattgcaactgtcccctttcctttgactgagatataatcaccattaccaattctgactctggtgactttt

SEQ ID NO: 17705 - DNA, 437 bp, Glycine max
  unsure (1)..(437): unsure at all n locations
ctttttccatggcttcctatggtggttatctntntcttgactcatcttctccttgaagtggcatctctaatcacctttcctcctactccattctgcttccattgatcttcaagaagcaaaggactccattgatgaagaagatccaaggcctacaatctccacatggagctacatcatgtggtatcaagagcatcttcatctaggtgatgttcttttgcttcctctatctttntcttcggttaattcactttaatcttcattttcttctccatgtatctcctccattgtcttatggtttggtgttgtttatagtagattcaaaaaaataaatcgattanatcttagatctacacttgttcttgcatttctatggttcaaattntatagatcaactcttgaatcatgnttttgtgttgattttaaggtgtatctttttt

SEQ ID NO: 17706 - DNA, 432 bp, Glycine max
  unsure (1)..(432): unsure at all n locations
tctatagaaggttcgttcctaatttatctacaattgcatcacctctcaatgagctggtgaagaagaatgtggcatttaccttcggtgaaaaacaagagcaagcctttgctttgctcaaggaaaagcttattaaggcacctgttctagctctttctgacttttctaaaacttttgagctagaatgtgatgcctctggagtgggagttggagctgtattgttacaaggtgggcaccctattgcttattttagtgaaaaaattcatagttcccccctcaactaccccacctatgataaagagcgttatgccttaataagagccctccaaacttgngaacattaccttgtttccaagggaattgtcattcatagtgatcatcaatcacttaagtacattagagggcaaaacaagttaaacaaaaggcatgcaaaat

SEQ ID NO: 17707 - DNA, 388 bp, Glycine max
agcttctattttagtgtaccagataaccacgggcccagccaagctatcttggaagaagtgcagcaacaacttctcatccctggaatgcgaccctatcttgcgacaatacattttgagatggcacttaggacaagttgtccctttgtacctatcgaaaccaggtaccttgaatgatgcaatcctaccccccaagggcattggatagaatactccaagaagattgggccaaagatgcaagagaaagccctagggttctcttaagccttatggtagatttcaggcccatggactaagtatgagcccacttatctttgtacatattagattaaggcttcattaatattgggtcttgaatttatggctctataatatatgtagggtaccctat

SEQ ID NO: 17708 - DNA, 394 bp, Glycine max
  unsure (1)..(394): unsure at all n locations
agctttagctataccaagacaaattttcttccttgttggccagtctagttttgttttgtttggatccctccctgtatgtgattgggagaaggacaatcagttagttgattatatcaaatatttgattcaaatggcaagtatggctaaagtttattcatcatgaagcttaccaaaaagaatgcgagatagacaattattttccatgtactcatatatcagtattagctggttgccctccacacaacatccataaagcttaacaagattgggatgttgaagtccagatatcagtcccatctcattcacaaactcacgatttccctgtttagattttgaagaaagctgctntactgctattattgtaccatctgataataggccctgcatcatgaac

SEQ ID NO: 17709 - DNA, 322 bp, Glycine max
agcttcgtgatctctatatcagattcaccaatgtctgcgggcatatgccccatttcttgacccaaatcaaaaccctcaaagtcatcgacctctcaaacaatagcaacgaactctacggcaacctccctgcctggctcccttctctgcccaacttcttcgaaatctccttcgacgcataccgcatctccggctccttctcgaagtcgctcacaggatgatgacgctcaccgacaaccgccttaccgggaagatttcggcgaaactggcgaagctggacttgaaggttgcgtacttgtgtcataatatgctggagggtgatgct

SEQ ID NO: 17710 - DNA, 395 bp, Glycine max
tatgcttgcttaaagatgtctttgattaattaattattttaaaatctagtgaaatactaactaaaaaaaaacataaaatttcgtataagtaatgtacaaatccaaaaataattgataaacaaaatcatattgaattcaagtcgttaaagcacaaagtatatataaaaaaagagcataatattaaaaaatgtatagattaggtcttcagtcccatagcttacaaatctattttaagtccaagcctataaacgaaataaaataaaatttggacaaaataagataagatttgatgaaatataatctggataaaataaaatctaaattgaataaaatctggataagataagatttgataaaataaatattattattattattgttagttaaacagttat

SEQ ID NO: 17711 - DNA, 385 bp, Glycine max
ttgcttcgttagttattattattctttaagcatgtctgtaacatggtttgtgcagtgcttgaaacttccagaattggcccatatgctttcgaagatatgataaagatgggtaaggatgctggagaggagcttctttctcgagccggacctggctttttcagtcgttaacaatccaccacattaaatggccaacacaatacttgatcagggaggttgcacggtcagctctttcagttgactgcatcccaagtatgtctattcttcaaccatgttgtatagactaaaatattcagctgagttggaaaaataagccactcatcatggtccaattggtgtatcttaaggtgattataaagccaaatttttgtattggtgtgtgtattat

SEQ ID NO: 17712 - DNA, 392 bp, Glycine max
  unsure (1)..(392): unsure at all n locations
agctttagctataccaagacaaattttcttccttgttggccagtctagttttgttttgtttggatccctccctgtatgtgattgggagaaggacaatcagttagttgattatatcaaatatttgattcaaatggcaagtatggctaaagtttattcatcatgaagcttaccaaaaagaatgcgagatagacaattattttccatgtactcatatatcagtattagctggttgccctccacacaacatccataaagcttaacaagattgggatgttgaagtccagatatcagtcccatctcattcacaaactcacgatttccctgtntagattttgaagaaagctgctttactgctattattgtaccatctgataataggccctgcatcatga

SEQ ID NO: 17713 - DNA, 397 bp, Glycine max
agcttttgtgtgtgtaattctgagtgctgatgcacagccttcttacaaggatggggtaattgttgtagtgactggctgcttaactggaagtgacaatctgaaaaggaagtttactcagtcctttttcctagctccccaggacaaaggctactttgttttgaatgatgttttcagatatgttgatgagtataagtcagttgatattgagtctgtgcctgcaaacgatgctgctgatgaaagtgctccaacagatgcttttgtccccgagcctggtaaatctttacatctgctggttatatatgatcgtattcctgttgtttttcattttcttcctctaacattttgcttatctttgtgtaacttgtaagtgtgagttttgaaacttttactttgatta

SEQ ID NO: 17714 - DNA, 334 bp, Glycine max
tagcttcaacattcaatttcgagggtctcgatatattacgggactcaatcggacatccgagaaaaaagttattgtcatttgtatttgctcagagcatcaacattcaatttcgagcgtgtcgatatattacgggactcaatcagacatccgagtaaaaagttattgtcgtttgaatatgctcagagcttccgcattctatttcaagcgtctcgatatattacaggactcaatcagacatccgagtaaaaagttattgtcgtttgaatttgcttagagcatcaaaattctattttgagcgtgtcgatatattatgggactcaatcggacatccgag

SEQ ID NO: 17715 - DNA, 390 bp, Glycine max
ttagctttgatgcaacatatggagatgttaatgaaacaacgagatgatgcgctccatgagaggttggatcaaatggagaatagagatcataatgaagaagaaaggaggagaagagggaatgatggtgttcctagacaaaaccgaattgatggttttaaactcaacattcctccatttaaaggaaagaatgatctggaggcctacttggagtgggagatgaaaatagagcatgttttctcatgcaacaactatgatgaggaccagaaagtgaagcttgctgccacggagttttccgactatgctcttgtgtggtggtacaagcttcaaaaggagagagcatgaaatgaagagtccatggttgatacatggacggatatgaaatagatcatg

SEQ ID NO: 17716 - DNA, 385 bp, Glycine max
ttgcttatccgtagaggtgatggaccttttcaggtcttggagaggatcaataacaatgtctataggttggacctcccataagagtatgcagttagaactttataggtggagctaatactgaggagcatgaaccaacagatttgaggtcaaatcctcttcaaaggggagtgggtgatgcaatcctccctaggaagggactagtcaccaaagccatgagcaagaggctccaagaggattgggctagagctgttgtagaaggccctaggattctcatgaaccttagggtagatttctgagcccatgggccatgttgtgtccacttatctttgtacatattagattaggatttcattatttttgggccttgtatttagggctccataat

SEQ ID NO: 17717 - DNA, 345 bp, Glycine max
  unsure (1)..(345): unsure at all n locations
agcttcaacatcagaccacttccagggtgctggaactacttcacatggacttgatggggcctatgcaagttgaaagccttggaggaaagaggtatgcctatgttgttgtggatgatttctccagatttacctgggtcaactttatcagagagaaatcagacacctttgaagtattcaaagagttgagtctaagacttcaaagagaaaaagactgtgttatcaagagaatcangagtgaccatggcagagagtntgaaaacagcaagtttactgaattctgcacatctgaaggcatcactcatgagttctctgcagccattacaccacaacaaaatggcatagttg

SEQ ID NO: 17718 - DNA, 388 bp, Glycine max
agcttgcttctacactaacacttttcgaaaggggagtcatcatattaccatgttcgtgctgagtgtatcatgtgttggatcaagtggcctcagaataattaagaaaggggggttgaattaattattactagacctttactaattaaaaattacctttcttaggcttttactataatgttaagaaaataaagaacagaaatagaaacttaaccaaaagtaaaagagataattaaagtgcatagcggaaattaaaagagtagggaagaagaagacaaacacacaagagttttatactggttcgacaacaacccgtgcctacatccagtccccaagcaacctgcggtccttgagatttcttttcaaccttgtaaaatcctttacaagcaaa

SEQ ID NO: 17719 - DNA, 391 bp, Glycine max
  unsure (1)..(391): unsure at all n locations
agcttagcttatgtacctgggtgttgcccaatttcatcatatcttctgtaatactcaccacctctatcatatctaataatttttacatttatgtctaattgcctttttacttcattgtagtaaatttctaaagcatccattgcctaagatatctcgggcagtaagtagacataaccgtaatgtgaataatcatcaataatggtgataaagtatcattccttttcgaaagaactaacatcaaaagatccacaaatatcagtatgcacaatttcaagaagctgagtgcttcttgtagctcctttctttgtatgttttgcttgttttcccttaatacaacccacacaaatatttagatccatanaatctagataaggaagaaattgattcttta

SEQ ID NO: 17720 - DNA, 399 bp, Glycine max
agtttacatatattccccatgtgataatctgaacaagagagaattatgggaagcactaagccagctaagacaccaagatcctgagggattatggtgcttcttcggagattttaacagcattagacaccagtccgagagagaaggggtggctcacaggggtatggaagcaaacaacataactgattttagtgaatggctagccgacctagaggtagaagaaatacctagtgtggggagaagattcacatggtttaatccaaacgggactgcaaagagtaaactagatagattttttgtctctcatgaatggctcaacaaatggccaggctgcacccaattcatcttggatcggaacttctcggaccattgtcccatacttatgagagctaagaacattgg

SEQ ID NO: 17721 - DNA, 168 bp, Glycine max
ttgctttatcatctgaccactttcagggagctggtgctacctctcattgacttgatggggcctatgcatgttgataaccttggaggaaagatgtatgcctaggcatgtgcggatgatctttccacatttacctggggtaactttatgtcagatagatctcacaccttt

SEQ ID NO: 17722 - DNA, 357 bp, Glycine max
agcctatgcatccggaattcccggatgaggacatcatggccttgttcgaggaaaagttggacgaagatcgggacaaatggactgtatggtttgacggagcgtcaaacattctatgtcatggcgttggggcagtgttgatctctccggacaatcaatgtgtacctttcacagccaggctaggattcgactgcaccaacaacatggccgaatatgaagcatgtgccctagccgtccaggcagcaattgactccgatgtcaaactactcaaggtgtacggcgactcagcgttggtaatccatcagctgagaggagaatgggaaactagagatcccaagctgataccctacaaagcctaca

SEQ ID NO: 17723 - DNA, 392 bp, Glycine max
agcttgaattatcgttattaacacgattttttaatcaattgagttaatagatcaattatgttataaaataattaatgtcattatatataacactaaattttttaatgtatatttaatgtacatataagtttacataatatatattgtgacaattaattttgatctaataatttttttacatatataaatttttattaaacttgtaattcttatttaaaaaatatattgttaaatcgaaattaattataataaggtcaaaaacagaaatttatttactataataattataaaaaactataactaaatttattaatttttttaatcttttactaaaaattttgagtgatacagattgacaatccgtatacggattataaatctatatgtttatt

SEQ ID NO: 17724 - DNA, 394 bp, Glycine max
agcttgtatgttataatcataaagttatcatgagatgctaacaacacactcttttgaatacactctctacacttgcagaaatttattaaaaatcatgaatttttatggatctcacttcttatttaatgagtttctctccttaatttgtagtttttaacaaattttaatcaataacaaaatacgtgttaaaaagagtgtgttgctaatccttctcagattatcataatcaatttattgggtacaaacatttttgtggatcaggtgtggctggagaagcgttatgttgggtcacgtcacacatctgaatggttcaatacagcaggaagaaatgttaagacggggcttattgcaagtgtcattgtgtctcacgtaatggattcaaatagcctcatag

SEQ ID NO: 17725 - DNA, 384 bp, Glycine max
tatcttggtttaaccaaagtcccctaatgtccgtgtcatgtcggcgtccaacaaaatgttgctcgatttgatgtccctgtgaataacaacctggtcccaaccgtggtgaatgtagctaagcccctctgccacgtagacaaggatacgacggcgttgctcccaccccaaagacttctccgacttatctaaaacccacttgttgagactcccgttgggcatgtaatcataaaccaacataagctcgctcccctttctgcaccaccctctcattagaaccaagttcttgtgctgaagcctacccatgcttgaaatctcctccatgaattcccgcaaccctttgcttgaatagtggttcacgcactttaccgcaatttgcgtatgggt

SEQ ID NO: 17726 - DNA, 371 bp, Glycine max
tagcttagagagattcccgatctgagagggtactgttccgttggcaacatatctcatgtcaagatacaccaaatttgagagattcccaatctgaggaggaatcttcccacggaatccagtatgagagaggttgaggtgagtcaaggaagtcattgtcccaaggaaagaaggaattgacataccttctccaagaaatctattgccgctcaagtccaagtaattcaaatgctttaaatcagccaaacaaggacttatctctccaccaaagctccatctctggtaagcttcccaatcgaagtgatagttgccatcatataaagcagaatgtgaagtgttgaggtgaagctgaagaagatgggaagtgacgttgt

SEQ ID NO: 17727 - DNA, 395 bp, Glycine max
  unsure (1)..(395): unsure at all n locations
agcttttcctcattctctggagggagtggtgaaagatgggttgtactaccttgctcccaggtcctttaccagctgggatgacctcaagaaggtgttcttggagaaattcttccctgcatctaggaccattgccatcagaaaagacatttcaagcatcaggcaacttagtggagaaagcttgtatgagtacttggaaagattcaagaaattgtgtgcaagctgtcctcaccaccagacttctgagcaactcgttcttcaatatttctatggggacttancaacatggagaggagtatgaatgatgctgccaatggtggaactcttggtgatatgaccactgctgaggctaggaatttgattgagaagatggcttccaactcccaacaattcagtgc

SEQ ID NO: 17728 - DNA, 379 bp, Glycine max
ttgcttaagcacgagtaaattgctacatgcttaagcggtgtttaaggtgcatccttatagtgtatgcttaagaaagttatgcaaaatgcttttttttttaaaaaaatggtattccaagtgtgataaaatgaatattggttcatgatatgagtatttatatatagtatggagttaattttatgctaatatcatgcacttcacattcatatgacgattttgatgtggagattgtaaaaattcaaggagttggatgtcttactatgcttaacaaactattgatggattcataagtgtgatgaatatatgaatggttaatttatgatatgagcatttgatgaaatattgatataatgaatagataattatattgataagataa

SEQ ID NO: 17729 - DNA, 392 bp, Glycine max
agcttgataggtggaaggagatgtatagaaggagcacgaaattttgtgcctcaattgaggtttaaactttgaagtgtaattctcaaatgatcaaagtttaaaaaatgcacacacatgacctctatttatagcctaagtgtcacagaaaattggagggaaatttgaatttctatttaaatttcacttgaatttgaaatcgaatttgtggagccaaaatttcactaattatgattagtgaattttagctatgattcaacccactaatccaagatcaagtccaagattctccactaagtgtgcttaagtgtcaggaggcatgtaaagcatgaaggacatgcacaaagtgtgactatatgatgtggcaatggggtgtagcaagcaaatgctcacct

SEQ ID NO: 17730 - DNA, 408 bp, Glycine max
  unsure (1)..(408): unsure at all n locations
tgcaaaccaaatgctcaccactactagaagagaagttttcaggttgtttcatataaacctcctcctctatatcaccattaagaaaagtcattttcacatccatttgttgcaactcaaggtcaaaatgagcagctcatgccaagataatacgaagagaatatttcttagatactagacaaaaagtctctctatagtcgattccttctttctgagtaaatcccttagcaataagtcttgccttgtatctctcaaagttgcctaatgaatcccttttggtcttaaagatccatttacatccaatggcctttgccccattaggcaactctacaaggttccaaactttgttactctgcatggaattcatctcatccttcatggcattataccatanatntgacactttacaac

SEQ ID NO: 17731 - DNA, 370 bp, Glycine max
tgtttagaaactttactgttggaaacttggaaaagcaaagtaaagaccataaataataccagaccctaaagcttaatttaagaaatagattctgaaatccattcaaagaagacaaaactagaatgtgaaagtccaacaatatatatagataaaattacccatctcaactttgaaaataaattaagaaaataaaaagaggaaactagctgattttcttgctttgccacacaagtataaaaaagcacagaaacaagggtataaatatagaatatataactaaaatgtagcaatataacttacaattaaagtgattgctcttgtatcttcatccatcattatgttaccatattgtagatcattgtgacaaaaa

SEQ ID NO: 17732 - DNA, 390 bp, Glycine max
  unsure (1)..(390): unsure at all n locations
agttttattcaagacaaagaaatcaaagatattcaagatggatgatcaagacagtctctagagtcttagcaatagaatataaataggaagggaattccaattgaagtagcaaaaggtttggccaagaaatttaagttaaaaagtctttttcaagagatttactctctggtaatcgattacgacagctattaaaatttgaattcaaaatttgcattgagtaatcgattacacatatatggtaatcgattaccagcaattattgaacgttttaattcaaattttaaagcttgtaatcgattacacacatactgtaatcgattaccagagtagattttcagaaaatattctcaatagtcacatctttntatttggttcttgaatggctatcaa

SEQ ID NO: 17733 - DNA, 327 bp, Glycine max
  unsure (1)..(327): unsure at all n locations
tgtttgcaaaccattgatttggtagaagattcaaaccctagaagttgttgcatgcacacctcctcttcaagaatgccattacgaagtggtaacccataagtgatagctaaggagagaagaagtcttactattatggacttgataataggtgagaaagtctctatataatcaattctatactactgatgaaatctcttggtcactaatttggctttttactttntgaccgagccatctaggttttctttaaccttgaaaattgacttacagtcaataggaactctattatggggcaagggaacaagcaaccaagtgtcatttttaatc

SEQ ID NO: 17734 - DNA, 414 bp, Glycine max
tgaaggcaaactggatgcattggttaactcggtaatttagctggtcttgaaccataaatctgtacctgttgcaagggtttgtggcttgtgctcctctgctgaccaccatacagacctttgcccttccatgcagcaacctgtagcaattgagcagcccgaagcttatgctgcaaatatttacaatagacatcctcaacctcagcatcaaaatcaaccacagcaaaacaattatgacctctccagcaacagatacaaccctggatggaggaatcaccctaatctcagatggtctagccctcagcaacaacaacagcagcctgcttccttccttccaaaatgctgctggcccaagcagaccatacattcctccaccaatccaacaacaacaacagctccagaaacagtcaacagttg

SEQ ID NO: 17735 - DNA, 287 bp, Glycine max
atcttgccgccacggagttttccgactatgctcttgtgtggtggaacaagctacaaaaggagagagcaagaaatgaagagccaatggttgatacatggacggagatgaaaaagatcatgaggaagcggtatgtgccggctagttactcaagggacttgaaattcaagctccaaaaactaacccaaggcaacaagggggttgaggagtatttcaaggaaatggatgtgctcatgattcaagcaaatattgaagaagatgaggaggtaactatggctcgatttcttaat

SEQ ID NO: 17736 - DNA, 343 bp, Glycine max
tataatatattattacgctcgaaattttacatcagtagctctcgagaaatgcaaatggtcataacttttcacccggatgtccgattatggcgaatcacatatcgagacgctcaaaattgaacaacggaagctcttgagaaattctaatggtcataacttttaactcggatgtccgattcaggcgcattacatatcgaggcgctcgaaaaagaacaacggaagctctcgagaaattcaaatggtcataacttttcacactgatgtccgattcaggatcataatatatcaagacgctcgaaattgaacatcggaagctctcgatatagtcaattggtcatcactt

SEQ ID NO: 17737 - DNA, 391 bp, Glycine max
  unsure (1)..(391): unsure at all n locations
ntgatttcctctgttccggaaacctttcttttctcatgtgcacccaaacccaatctccgggttcgaagacaaccttctttctccctttgttggcttgtttagcatagcttttacttttcctctcaatttgatctttgactctctcatgaagcttcttcacatagtccgcctttgcttgaccttctttatgcttaaaaacagaaacattaggcaaaagatcaagaggagttagtgggttaaaaccataaacaacttcaaaaggagaacaattagtggtgctatgaacagctctattgtaagcaaattcaacatggggtaaacaagcttcccaagtttttaagttattcctcaaaactgtcctaagcaaagttcccaaagtcctattaacaac

SEQ ID NO: 17738 - DNA, 388 bp, Glycine max
agcttgaaggtaaactagatgccttggatatcttggtaacccaactggccttgaatcagaaatttgtacctgtcgcaagagtctgtggtttatgctcttctgctgaccaccatacagacttttgcccttccatgcaacaacctggagcaattgagtagcctgaagcttatgctgcaaacatttacaatagacctcctcaacctcagcagcaaaatcaatcacagctgaacaattatgacctctccagctacagatacaatcctggatggaggaatcaccctaatctcagatggtctaaccctcaacaacaacaacagcagcctgctcctttcttccaaaatgatgctggcccaagcagaccatacattcctccaccaattcaacaact

SEQ ID NO: 17739 - DNA, 432 bp, Glycine max
actcagctcaacataaccacttcgggtgctggaactactttacatggacttgatggggcctatgcaagttgaaagccttggaggaaagaggtatgcctatgttgttgtggatgatttctccagatttacctgggtcaactttatcagagagaaatcagacacctttgaagtattcaaagagttgagtctaagacttcaaagagaaaaagactgtgtcatcaagagaattatgagtgaccatggctgagagtttgaaaacagcaagtttactgaattctgcacatctgaaggcatcactcatgagttctctgcagccattacaccacaacaaaatggcatagttgaaaggaaaaacaggactttgcaagaagctgctatggtcatgcttcatgccaaagaacttacctataatctttgggctgaagccatgaa

SEQ ID NO: 17740 - DNA, 422 bp, Glycine max
  unsure (1)..(422): unsure at all n locations
tcttagtctcacctgatngaattgtggctacttcatgcactcctctaatgacaatagcatcacttctagcactaaattgctgggagtttgaagccatcttctcaattaaatttctggcttcagcaggggtcatgtctccaagggctccaccattggcagcatctatcatacttctctctatgttgctgagtccttcataaaaatattggaggagaagctgctttgaaatctggtggtgagggcaactagcatataattttttaaatctctcccagtattcatataagctttctccactgagttgtctaatgcctgaaatatcttttctgatggtcgcggtcctggaagcagggaaattgttttctaagaatactctcttgaggtcatcccagctcgtgatggaccttggagcaaggtaatat

SEQ ID NO: 17741 - DNA, 281 bp, Glycine max
agtttcccatgtttataagttcttactcaaaactgtcctaagcaaagttcccaaagtcctattaacaacttacatttgcccatcggcttgagggtgacaagaggttgaaaataacaatttagcgcccaacttgctccacacaatcctccaaacatggctgaggaactcagagcccctatcactaacaatgctccctggcaaaccatggagtctgacaatctccttgaaaaacaaatcagccacatgggaagcatcatcaatttttttacatggaataaaat

SEQ ID NO: 17742 - DNA, 337 bp, Glycine max
agcttcaacattcaatttcgagcgtctcgatatattacgagactcaatcagacatcagagaaaaacgttattgtcgtttgaatttgctcagagcttcaacattcaatttcgagcatctcgatatgttacgggactcaatcagacatccgagaaaaaagttattgtcgtttgaattagctcagaagttcaacattcaatttcgagcgtctcgatatgttacgggactcaatcatacattcgagaaaaaagttattgtcgtttgaatttgctcagaggttcaacattcaatttcgagcgtctcgatatgttaccgggcttaatcagacatccgagtaaa

SEQ ID NO: 17743 - DNA, 398 bp, Glycine max
aagcttgagccactaaacgacattaacgttttctcttatgtctgatcgagtcccgtaacatatcgagacgctcgacattgaacgttgaagctctgagccaatacaaacgaccataacttttttctcagatgtctgattgagtcccgtaacatatcgagacgctcgaaattgaatgttgaatctctgagcaaattcaaacgacattaactttttactcggatgtctgattgagccccgtaacatatcgagactctcgaaattgaatgttgaacctctgtgcaaattcaaacgacaataactttttcctcggatgtctgattgagtcccgtaacttatcgagacgctcgaaattgaacgttgaagctctgagccaatacaaacgaccattactttttact

SEQ ID NO: 17744 - DNA, 427 bp, Glycine max
aactcaagcttctctcaaatgagatgacaatcaatctctatatgctttgtcctcttatggaagactgggtttgaggcaatataaagagcaacctgattatcacaatacaacttcatttgcaactcttcacaaaaccttaattcttgaagaaattgtttgatccacatgagctcacatgtaaccatagccatagatcgatactcagcttctgcactggaccgagcgacaacagtttgtttcttgcttttccaagagattagatttcctccaatgaagacacaataacctgatgtaaatctcctatccatgggacatccaacccaatcaacatcacaatatcctgatagttgcgtactacccttggcttcatacaacaacccttgtccacgagctttcttaacatacctcagaatacgcatgacaacat

SEQ ID NO: 17745 - DNA, 430 bp, Glycine max
gacctataaaactcagcttaaccccttttaaagaaggctttaatgcttatgaagatttaacaatcaatttaataattttctttaaacgtgcaagataaaattgattgcaataaaataaataagataagggaagaaagaattgcaaactcgatttatactggttcggccacttcatgtgcctacgttcagtccttaagcaacccacttaagattttccactatctctgtaaatcatttacagactttgaacacaccttgggattccttacccttgtgttcaagattttcacactccaagagacaccccgtctcttgattacaactgagtttctgagatgaacagaaagatctctctcctttagagtggatgatacaaattgaagatcctagaggaaatttcctcttttagagatgataatacagattgaag

SEQ ID NO: 17746 - DNA, 407 bp, Glycine max
tgtgcctcgttacgtttggaatatgaatgttgcatttatatttaaagacccttaggtgctttgttgatggcttcttcctgtttcaagcttcaattggagtcttgtcttttacagacttagttggacatctattgagtatgtaaacagcagtgtagactgcttcagcccagaatgtattaagtagtcccttctccttgagcatcaatctagccatttccataactttgcgattctatctctcggacactccattttgttgaggagaatatgctactataagttgtcgctcaatgccttcatcctcacaaaatctttcagactcgcgagaggtgtactcttcgtcgcgatcacttcttagctctttgatccatttccactttgattttagcaaggccttgaacttttga

SEQ ID NO: 17747 - DNA, 352 bp, Glycine max
actaagctgctcggggatctactacgctttagaacttggtatgctgcctagcaatttacactaccacagagaatgagctattagcgatagcttttgctcttgagaaatttcgatcatatttgcttggtactcgagttattgtttatactgaccatgcagctctgaagtacctgttgaagaaggctgaatcaaaacctatattgatcaagtggatgctatggatccaaaagtttgatttggagatccgtgatcagagcggttcacaaaacctcatggctgaccacctgagtaggattgagcgtgcgcctgaagactcacccattacggatgatttttcagatgaccatttgta

SEQ ID NO: 17748 - DNA, 321 bp, Glycine max
agcttaagctccttcaactgcttatggctcttaatatttgaagaggatacttgaggaaccttcaccggacgaagacactgacaaaaacttatcttctccttcttggacaaagtatggcaggctgggggcaagtaaaatttcttacaatcagaccttggatgcagctgagatcgcatacccatatcagctagatcttgacgagtattcaagccatccttcatcttgccttgaatgttaaggagcgtcccaatcacactgtgacaatacattctccacatgcatgacactcgtacgatggctagcgccgagatcacgccagta

SEQ ID NO: 17749 - DNA, 377 bp, Glycine max
  unsure (1)..(377): unsure at all n locations
catctatcctncactccatgtagaattatcctcatcggntccccactgcaccttcaccaacgcgatctcctttcctttcaacgacttcattcttcggtcagagatcttctgaggttgtgctttataggtgaggttatccttcacctgtacctcgtccactgcaagaatatgtgatggatccgggttgtaccgtctcagttgagagacatggaacacagggtgcaaattcgataaactcggaggtaaggcgatatgataagctacaggcccaatcttcttcaaaatctgatatggacctagatacttgggtgtcaacttcctagccttgagagctcttccacactccgttatgggagaaaccttcacaaaccatgttc

SEQ ID NO: 17750 - DNA, 260 bp, Glycine max
tagactcagttcaacctaccatcctttatctgattgtttaacttaacggaccataaaatcgttggaggaccttttgagggcgtgtgtcttagagcaaaatggaagttgggagagttttcctgccattgatagagtccacttacaacaatatgtttcactctaccattggcatggctccctatgaagatttgcatggtataaggtgtaggacacctctatgttggctagatcctgcagtaaaccttaccttatgaccttga

SEQ ID NO: 17751 - DNA, 363 bp, Glycine max
agtctttcagcaataacatgatcttttcagcttctattcaagtgatcaattcttttcttccaggtcatgtacattgcagtctaaatcaagtccatatcagcatctttcatatgcaccatcaacaatttcagaacttcacacacctgttcattggaagagacaaatctgtctccaacaacaaaactgcaaatctggtctttcaattcaatccagctcctccccgagtcacttttatttttaatgcctctcctcagcttcgttgagctggcaaaatcatcccagtttccttcagcggcataaatatttgatatcaacgcataagttcctgcactatatggcttcatatccaaagctctcaaagct

SEQ ID NO: 17752 - DNA, 377 bp, Glycine max
  unsure (1)..(377): unsure at all n locations
cagcttgtanggttaaagnctcacttttgtcacgtgctcatgcaacaattgttagccatggctatacgagacatctttccaaacaaaggcaagttagccataactcggttgtgctttttcttccatgctatatgtagtaaagtcattgatcctgtcaagtttgatgagttggaaaataaggccgcaattatactgtgccagttggagatgtattttcccctgctctcttagacatcatgattcacttgattgtgcatctagtcagagaaatcaaatgttgtggttcggcttatctacggaggatgtacccggttgagcgatacatgaagatctntaaagggtatacaaagaatctttattgtctaggagcatctatt

SEQ ID NO: 17753 - DNA, 376 bp, Glycine max
tgtttcccaagtttttaagttcttcctcaaaactgtcctaagcaaagttcccaaagtcctattaacaacttccgtttgcccatcggtttgtgggtgacaagtggttgaaaataacaatttagtgcccaacttgctccacaaagtcctccaaaaatggcttaagaacttagagtccctatcactaacaatgctccttggcaaaccatggagtctcacaatctccttgaaaaacaaatcagccacatgggaagcatcatcaatttttttacatggaataaaatgagccattttagaaaacctatcaacaaccacaaaaatggaatctctaccattgcttgtttttggcagccccaaaacaaaatccatggataaatca

SEQ ID NO: 17754 - DNA, 334 bp, Glycine max
agctttttcaaagtcaagtttgaaaaccatgcaggggttatttttgaatttagcttcaactaagacctcattagctatcattacaccatggaggatatgtctgcctttgaggaaagcaatttgcctttcatcaattaagtgaggcagcacaagagccagcctattagccaggactttggacattattttgtaaacacaccctatgagagagatgggtctatagtcattaagagattgggggctattggttttggggatgagggctatgaaggatgcattacttcctttggggaatctgccattaatgaagaattcatcaaagaatatgataaaa

SEQ ID NO: 17755 - DNA, 416 bp, Glycine max
  unsure (1)..(416): unsure at all n locations
tgaaattaanaacaaaggctctaagcaaattcgaatgacaataacttttgactcggatatccgattgagtcatttaataattcgaaacgctcgaaattgaatacagaagctctaagcaaattcaaatgacaataacttttgactcagatattcgattgagtcattttataatttgagacgctcaaaattgaatgcaagagctctcaccaaattcaaatgacaataactctttactcagatgtccgattgagtcccgtaatatatcttgacactcaaaatggaaaacagaagctctgagcaaattcaagcgaaagtaacttttgactcaaatgtccgattgagtcatttaataattaaagacgctcggaattgaatatagaagctgtcacaaaattcaaatgacaataactttatac

SEQ ID NO: 17756 - DNA, 363 bp, Glycine max
  unsure (1)..(363): unsure at all n locations
tttatgcatgtttatagtcattacttgttgagaaccataagccaaagttgaatgttcctttgatatagtaaataatttgttttgtggccttgagatgagtagtggttggagtctccatgtattgactgatgagtcgagtaccatatagaatgtctggtcttgtggacgtcaaatatcacaaactacccaccaaactcttgaaatttgtagcacccatcttttttgcttcgtcaaactttgataacttcattntgcactccaccggtattccaattggcttgcatagttttgctatgaaatgaagattcaatcttcctttngctttacctcaataccaagatagtatgacattaatccaatatc

SEQ ID NO: 17757 - DNA, 418 bp, Glycine max
tccttaagaagattcctaaagaagctagagcttagctacacatacctctctaatagctaagctcacctccttgaaatgagaagctagagcttagctacacaccccctataatagctaagctcacccccatgaaaaaatacaaaaaaaaatccttactacaaagactactcaaaatgcctcgaaatataaggctaaaaccctattctactagaatggccaaaatacaatgcccaaatgaaggaaaaacctattctaatatttacaaagataatcgggctcatacttagcccatgggctcgaaatctaccctaaggctcatgagaaccctagggccttcccttggatctctggcccaatatacttggagtcttctatccaatgcccttgcgggataggattgcatcattatgtacatatt

SEQ ID NO: 17758 - DNA, 406 bp, Glycine max
ttgaaggtgcgtagtccaccattttccctagtagaattctggtaatgtgtctactatcattgtcatcgtttttttcgtcattgaggtgccacttaagctgccaggttctctccacctttgggcgtattcttttgaaagaatcgtgccctctttttgcacatgttctatagttgcatcctatccgaagacattatactgacactgcctaacgaaggcaaccactaggtcattccaagaatggactcgggaaggttccaagttagtgtaccaggtaacagctaccccagtaagactttcttggaaggaatgtatcagcaattccttatcttttgtgtatgcccccatcttccgataatgcatctttagatggttcttggggcaagtagtcctctcgtacttgtcaaag

SEQ ID NO: 17759 - DNA, 395 bp, Glycine max
  unsure (1)..(395): unsure at all n locations
ntgaataattgttgccaaaatgtgctgataaatattctatctttgtcagaaacaattgtttttggaaaaccatgaattttgacaatgttggcaatgaaaacttcagccacaaccttgttattaaactcaaacttcaaagggataaagtacccaaatttggacaatctatcaactactgtaaaaatggttgtaaatccttgtgaaggaggcaattaaacaataaagtccattgctatgtcttcccatatttgttgaggaatgggaagaggctgtaacaacccagctgacaaaacatgatcaactttagcttgttgacatatggcacattccctcacaaatttactaatatcacttctcataccattccaatanaattgagcaccaattctagctac

SEQ ID NO: 17760 - DNA, 383 bp, Glycine max
agcttgccattagttaacactgttccattataattaaccgaagtgtcaaacattttcattcaaatcttgttactattactattttaagcctcccctttgttttcattcaaatcttgttactaaaaactataaaaactacaaaaacaaaggtcaacatgtaaatactatacaactaggcaaacaattttacctctttttgttcaagtatcttatccaattctttgagctctttatccaatttttcttgaagggatgagtgttctagctcctttgtgtcttcttccatttcatctacaaacaaggtacatacatttaaaaaccatcaataattaggataaaatgccaatgcacaaagagagaaaaatgaaaattaaggagcccaa

SEQ ID NO: 17761 - DNA, 373 bp, Glycine max
agctttttataaatcactactaaaatctaaagatgatctgaagttcaaccaaagttctcagtcgccttttttcttttggccatgttcttatttacgtttaatgtttttgtagactgtgagtggaaggcgcacgccggtaacatatgtgttgcatcatttgattggagctgcagtggaatctgtaagtcagtggagaagattaaatatgtccactctaagtgtggtgaaggaaatggagcagtttggagtgctctatcttagattgtttctaaaagggagatggttttttctggttgggagaggatataattgcagctgggacaaagacaaagacagttttcagatttgagattgagcacataggtataacatg

SEQ ID NO: 17762 - DNA, 340 bp, Glycine max
tttaactgaatttgcaacgttccaattgctttttaaatggtgtaatcgattaccagtgcatctgaacgttgaaattcaaattaaattgtgaagagtcatatcttttcataaaatgctttgtgtaatcgattacatggttttggtaatcgattaccagttacacgttttgaatagaaagtcaagagatataactctttcaatggttttcagttctttctcaagggtataactcttccaatggttttcttgaccacacatgaagagtctataaaagcaagaccttgacttgcatttcaaagagacttacaactcttacaactttttgaacatctctttgaac

SEQ ID NO: 17763 - DNA, 427 bp, Glycine max
  unsure (1)..(427): unsure at all n locations
ctatacacaactcaagctttgtaacaatccaattttcaccttatagaaatgaatcttttatgtcgtctggtgtattntaagaggtttaatcattttaatatttttaataaaattgaaattataatttttttaaaataagattgtttggtatgaggaaatcaaaatgcatgcaattgaggttatgtcttgtttgatattttaagcatactaacttttgatgtgattgcgaaaaattatacatatcttcgtccttaaatataacattatattaatttggtttgtctttttttataaaagtctttctaagttgacttttgcattaatttttttacccagatatccttagttattctatagtacatgttatgtactactgaacagataaatgtataatatctcatcactactataaaaaagatcttttaca

SEQ ID NO: 17764 - DNA, 418 bp, Glycine max
actcaagcttataaactttctgcgatgaaatctaacaaataatattttttattcatttctcttattctcatctcactttgttttatgaccacaacacagacaaggagtgaggcatagtcttaaaaaattaaaataaaagatatatggtacgtaaaagttaaatagtatgcatattcggctaaaacataataataatgtagtttataatgttagtcaaggaataaaatagttcaattgtaaagacaaaaagtaggcatatggttataataagtatacatgatatttttcgctatatgttccgaatgtgaatggttaggatgatgaactaatttatataattaaggggtgtgtatcttctttttcacacaaagagatttaaattaaaattctctattatttaattaaattcctttgatat

SEQ ID NO: 17765 - DNA, 375 bp, Glycine max
agcttgccttgccccttgatatatttgagggactcatggtcactatgaatgacaaattccttgggataaaggtagtgttgccatgttttcaaagcccgtactaaggcatacaactccttatcataagttgaatagttaagggtaggaccacttaacttttcactaaaataagcaattggatggccttcttgcatcaacacagccccaatcccaacatttgaagcatcacactcaatttcaaaagatttttgaaagtttggcaacgcaagtatgggggcattagttagcttttgcttaagaacattgaaagcttcttcttgtttctctccccatttgaaaccaacatttttcttgagcacttcattgagaggtgct

SEQ ID NO: 17766 - DNA, 382 bp, Glycine max
tcttggcaatcctcattccagcgatcagtttggtttttgcgtaagagtttgaacaacggctcacaaatggcggtgagctgcgatatgaatctggcaatataattcaagcgtcccaggaaacctcggacttgcctctctgtacggagttctggcatctcaaggatagccttcaccttttcggggtctacctctatccctttctggcttacaacgaaaccaagcaatttccctgatttgaccgcaaaggtacacttagcggggttcaaccttaattgatatttcttaagcctttcgaacaacttccgctggttgacaaggtgttcttcctcggatttagatttagcaattatgtcgtccacgtagacctcgatctcttgatgca

SEQ ID NO: 17767 - DNA, 383 bp, Glycine max
agcttgccacttaccagtagaaatggagcataaagcataatgggctttgaagtttttaaattttgatgaggctctatcaggggagaaaaggaagctgcaactcttggagttggaagaaatgagactaaatgcatgagtccttcaaattgtacaaagaaaaagtgaaggcttatcatgacaagaagctgctaaagaaatacttccgatcgggtcaacaagttctattattcaactcaagattaaagctgtttctaggcaagttaaaatctaaatggtctagaccattcaccatcaaggaggtcaagccttatggagcagtggaattatttgaccctcaatcagaaacttcagatagaagctggacagtaaatggccagagattg

SEQ ID NO: 17768 - DNA, 358 bp, Glycine max
tctaaactttatacaagaatgaagctctgataccacttgttagacaagtggcctcagatatcttaagaagggggggttgaattaagatattccaaactacttccccaattaaaaatctatttcactttttattcaagttataaattaccttaataatgaacttcttaaatattgattcaaataaaacaatttgaatataaatataaagcaataataaacaaaggagattaagggaagagaaagtgcaaactcagatttatactggttcggccacacccttgtgcctacatccagtccccaagcaacccgcttgagagttccactatcttgtaaattccttttacaagttctaaacaca

SEQ ID NO: 17769 - DNA, 409 bp, Glycine max
  unsure (1)..(409): unsure at all n locations
ntctctttccctatatattccccttctccttcacctttacctccccaatctgtttctgtacctattaaccagccaaacactaaccacacctcctctgcacccactcctcgtagaactgacagaattcaaactagacccaccaaatacattgactatcaaaccagtttcacatcagccattgttaccaatcatccaggcactaaacaccctatttcttctgtgatttcctataacaagctctcttcatcttatcacagcttcattcttaatgtctctgctaattctgagcctaagtcttataatgaagcctgtaaacatgattcttgggttcaagctatgcatgatgaaatttctgctctagagaggaataatacatgggtgctcactgatttacctcaacataaaaatg

SEQ ID NO: 17770 - DNA, 371 bp, Glycine max
agcttatgctgcaaacatttacaacagacctcctcaacctcagcagcaaaatcaaccacagcagaacaattatgacctctccagcaacagatacaatcccggatggaggaatcaccctaatctcagatggtctagccctcaacaacaacaacagcagcctgctccttcctttcaaaatgatgctggcctaagcaagccatacattcctccaccaatccaacaacagcaacagccccagaaacaacaaacagttgaggctcctccgcaaccttccctcgaagaacttgtgaggcaaatgactatgcagaacatgtagtttcaacaagagaacagagcctccattcagagcttaactcgccagatgggacaat

SEQ ID NO: 17771 - DNA, 400 bp, Glycine max
  unsure (1)..(400): unsure at all n locations
cagctntttgaatcaaagattctaattatgattgatacaaatacatatttatacactaaaatctttaagtctttgcataataagaatgtgtttggatgagagaatttaaaattttgaaaaatttaaaattctaataatttcaaatacttcaactgaaattcttttattttcaaatttttgtgtttggataaaaaaattaaatttgtgagagagaaagaaaatgagtcgcgagtttgagaaagagatttcgaaaacttttatgttggaagagaagatgaatgtttgttataaaggaaatacagaaactttntagaaggaaattaaaatttcacatttttggttgttaaaattctgttttaaaattccaaaaatttaaattcttcataaaaaatatccaaat

SEQ ID NO: 17772 - DNA, 366 bp, Glycine max
agcttcaatttacaaccatattgttgaagctgttaataaagatgaaggtggtatggtttttctctatggatatggaggtacaggaaaaacatacatttggaaaacacttgcaagttcactgagagctgacaataaaattgtcataatggtagcctttagcgccatagcgtctctgctattgtcttgatgtaaaactgcatattcacaatttaaaattccagattgagtttttgaagactcaacttgcaagatccatcatggaactcaattagctgaactattaactcagacaagtctgatcatttgggatgaagcacgcatggatcacatattcagtgatgaagcacttgatcacagtcttagaga

SEQ ID NO: 17773 - DNA, 381 bp, Glycine max
agcttcaacattcatattttgagcgtctcgtaattttacgggactcaatcagacatccgagtaaaaatttattgtcgcttggattggctcatagattcaacattcaatttcgagcgtctcgatatattacgggcctcaatcagacatccgagtaaaaagttattgtcgtttgaattggctcagagcttcaacattcaatttcgagcgtctcgatatatgaccggactcaatcagacatccgagtaaaaagttattgtcgtttgaattggctcaaagcttcaacattcaattttgagcgtctcgttatattacgggactcaatcatacatccgagtaaaaaggtattgtcgtttggattggctcagagattctacattcaat

SEQ ID NO: 17774 - DNA, 402 bp, Glycine max
  unsure (1)..(402): unsure at all n locations
ttgagcaaattcaggcgacaatatctttttactcgtatgtctgattgagtcccgtcatataacgagacgctcgaaattgaatgttgaagctctgagccaattcaaacgacaataactttttactcggatgtctgattgaatcctgtcatatatcgagacgctcgaaattgaatgttgaacctctgagcgaattcaaacgacaataactttttactcagatgtctgatatagtctcgtaatatatcgagacgctcgaaattgaatgttgaagctctgagcaaattcaaacgacaantaacttttactcggatgtctgattgagtcccgtcatacatcgagacgctcaaaattgaatgttgaagctctgaggaaattctaacgacaataactttttactcggat

SEQ ID NO: 17775 - DNA, 363 bp, Glycine max
tgtcttgcaagtttgaagacaccttggagaagttcatgcaagcctcattgactaataagaagaatagtgaggcttcaattaaaaacctagaaactttggtaggccaactaccaaggcaactaatagaccattttggaggttgattttgagaaaacacctaatgaaatcctaaggagcgttggaaggctattaatacaagaagtggaaggattattgggagtggtgtcgatgataacttggctaaagacgatcaagtggatggaggcaagttgtacaagggtaagaaaaatgatagtgagagtgaagaggaatccaattaaaaagatagagtgtatagagaataagactcataatatgagggtg

SEQ ID NO: 17776 - DNA, 380 bp, Glycine max
agctttggagattttcagtgccaattcgccttcttctttcgtccagtcttcttctggcttcaattcatcagtgggctatccttctgtgtccagcatcttgggatgttcccagcctttgatgacagctttccaggttctgctatccagtgattagaggaaggccaccattcttgctttccagtattcatagttggttccatcaagaattggtggtctgttcactggtcctccttctttctccatgttcatcagattttatctccctaaatctcactctgagatttcgagcgttggctctgcatccaattgaaattctgatactggggacagatgtcgtacaggatgccacgacttcacgcttcataacactcagattgtat

SEQ ID NO: 17777 - DNA, 368 bp, Glycine max
agcttacatgggtttctagaagtccaaagcagatgacggacacctgttaatcacataggcaaccgctgtgcgcagcttccccccacatggaccttggcaggccagcactgagcaacatgcaccacactttatccaatacggacctaaacatacggtcagcacaaccattatgctgaggtgtgcgaaggactgtcaagtgccttaagatactcactttccctgcaaaacacattgaattgctctgaaacagactacaggccattgtcattgcttaaaactgataatatagcaccaagttgatttccaataagaggacgccactctctacatctttgaaaagcttctgacttatctttcaaaacatacaa

SEQ ID NO: 17778 - DNA, 380 bp, Glycine max
agcttgtatccatggcttcctatggtggtgagcttgttcttgactcatcttctccttgaagtggcatctccaatcacctttccttcttttccattccgttgtcattgatcttcaagaagcaaagggctctattgatgaagaagatccaatgcttacaagctctatatggagctacatcagtttatgagatataggttgaagttgtgtataatatttgattgatatcattttttgggggatcaaggatatcatgcatatgttacaatttagatgcaaacaaaatttgcatagactaaccacccaatttgggtgttgcaacaacattatgaactaaaagagaaaaatgtccaacaataaaaattacctttgaagtaagggtc

SEQ ID NO: 17779 - DNA, 399 bp, Glycine max
tgtcttcaacaaacaaatcaaaatctattttctgattttcattacctagctccagcttcctctcccccatatcaactatgcagcttgcggtcaacatgaatggccttcccaatattacaaggatgtcagtatcttcagagatatccattaccacaaagtctgtcgggaagataaaatgttttactctgaccaaaacatcttcaattactccatatggcctggtaatggagcagtaagctaattgtaaagtcattcgagtgggcattatttccaactcttccaatcttctgcacatggagagtggcatcaaattgatactggctcccaggccaataagagcttttcccacattgacttctccaattgaacaaggaatcgttacactcccaagatctttat

SEQ ID NO: 17780 - DNA, 315 bp, Glycine max
atcttttaccaaagggagatggaccatttcaagtgcccgaaagaatcaacgacaacgcttacaaagctgagctgccccgagagtataaagataactccaccctcaatgactcagaataatctctttttgatgcagacggagaatccgatttgaggacaaatcctcctcaagagggagagaatgacgatgacatgttcaagagcaagggcaaggatccacttgaaggacttggaggacctatgacaagggctacagcaaagaaagccaatgaagctcttcaacaagcgcttgccatactatatgaatacaagccca

SEQ ID NO: 17781 - DNA, 409 bp, Glycine max
  unsure (1)..(409): unsure at all n locations
taacagtagttagacccatatgaatcccggggcaacctcttcgaccgtttccaaatggtataactcgaaagtcacttccacgaatgtcaacattgcaattctcaaatctctttggatcaaacatcaaaggattatgccaaactttaggatctctccctattgcccatgcatttactatgatccttgattttttctttatgaaataaccatcaatagtaacatcttctcgactctcacgaggtacgagcaacggtgcaaccgggtgtaatcgtagcgtctccttcaccaccatattcaagtaagccagttnttctaagtcaatttcctccacgtgtctgttcatccccactacattntctagctcatcttgaagtctcttcatcacactttgatgcctcaagagttctga

SEQ ID NO: 17782 - DNA, 347 bp, Glycine max
tgtccttcctagataacgtagtgccacacgagcactgttcacttgggatagtccccacagtgcttctcgggtgtcctcaaatcagaaagcacagagaactgtctctggttgcacctattgcacatatacatcttggggcagaggctcctcttgtaatggatctcggcacaaatcattgacttcaaaggttggaactcggcatgcctttggttccatctacacccttgttgagggcacgaatatctctttgtcacactatcttctgcacctaaaaacaacacattactctcctttctgtgcttttcttcatgggatgcgcaaagctgcacttgttttgactcttccca

SEQ ID NO: 17783 - DNA, 362 bp, Glycine max
agcttaataagaggcatgctaagtgggtagagtttttagagcaatttccatacgtcatcaaacataaaaaggggaaagggaatgtagtggctgatgcactgtctaagagacatgctttacttgctatgcttgaaactaaactgtttggtctcgagtctttgaaagacatgtatgtgcatgatgtggactttgctgaaaattttgctgcatgtgaaaagttttctgaaaatggttactataggcataatggattcttgtttaaagcaaataaattatgtgtgcctaagtgttccattagagagttgcttgtgagtgaatcccatgaggggggttgatgggacactttgggattaaaagaccct

SEQ ID NO: 17784 - DNA, 329 bp, Glycine max
tctcgatatattatgcacctgaatcagactttcgttttataagtgatgaccatttgaatttgtggagagcttccgttgtgcaattttgagcgtctcgatatattatgcgcctgaattggacttccgtgtgattagttatgaccatttgaatttctcgagagcttacgttgttcaatatcgagcgtctcggtatataatgcgcctgaatctgacttccgtgtgacaagttatgaccatttgaatttctccagagcgtccgtttgttcatatctagcttttctatttattatgcgcctggattagactttcgtgtgatatgctatgaccat

SEQ ID NO: 17785 - DNA, 369 bp, Glycine max
  unsure (1)..(369): unsure at all n locations
tgtagaacggctggtcatgatatatgtcagggtttggtcagcgggtcggcgataatggggatgtcctacattatttccatgatacacatgcaacaatgatgattaggaaattttatgcaaaactggtcatgcatgcacccatgtggacactcaagcataaagtttttatggtcatgtgacactagggctcaagattcattntccctatttaagtcaacccagtgtttccaaaatatgctcttttatcaatttatgcattcatccgagtcccttttgtgcgttcgggaaaattttcacagtattcaccctttacgtgtatacacattctttttttcaaacaaactggttatgatagtgaaatcattttca

SEQ ID NO: 17786 - DNA, 371 bp, Glycine max
agcttttgtgttctgagaatagttacgtcacaactcgagtgatggggacatttgggttagtatgattaagctaagcattctcctatctctcttaccaaattataattagttcaagttcctgtatgattgcaatgtgtaagtggtccctaatgtttaaaggtcaaaagatattgattctctccttttttctttttctgtagttatgttgcaccagaatatgcatgcactggaatgctgactgagaagagtgatatttatagctttgggatacttatcatggagataatcaccggaagaagtcctgttgattatagtagaccgcaaggagaggttagaggccctcaccaataaaagaccatagttaacattta

SEQ ID NO: 17787 - DNA, 368 bp, Glycine max
agtttggtcaaaggtaaggttagcttagaaaaaccctctatgaacctacgacagtaacctgctaaaccaaggaaactcctaatctcaaacactaacttatgactctcccaactcatcaccacctctaccttggaaggatctactgctatccctcccctagatataacatgccctatgaagctcaccttctctagccaaaactcatactcgtacaacttagcatgtagtctgttgtgcttgagggtttgcaacacaaccctcagacgctcctcatgttcctcccttgtcttggaatacaccaagatatcatctatgaagaccactacaaaactatctagatagggatgaaagatcctattcatgtagtc

SEQ ID NO: 17788 - DNA, 368 bp, Glycine max
agctttaagcgtctttttgctaacgaagacgacgcaaaagacctaacatggcatgcaaatggaaggatttctgatggaatcgtctgtcatccggctgattgctcccagtggaagaagattgatggtttgtatccggatttcgggaatgagccaagaaatcttagacttggactagccagtgatggaatgaatccatatggaaccttaagcactcaacacaattcatggtcagttctgctagtaatttacaatttgcctccttggttgtgcatgaaacgaaaatacatgatgttgtctatgatgatatcgggtccaagacagccaggaaatgacattgatgtttatctaagttcgttgattgaagacct

SEQ ID NO: 17789 - DNA, 436 bp, Glycine max
  unsure (1)..(436): unsure at all n locations
taagccaaaactaatagtgcctgccaagtatctgagtaatcctttntattgctgcccaatgctgttcagtgggatctgacataaattgacagaccttgttggccaagaaactaatttcagttctggtgatggttgcatactgcaaagcacccacaacagatctgtatagagtgggatcagaaaaagactcataccctgatttggttaacttgcagccaccaaccattggagaggagatggaattagcttcatccatcttggttttagtcaacagatctcttgtatacttggactgagttagaataagagcacattaggctgaggtctgacttcaatacccagaaaataatccagattacctaaatcctttatagaaaactcagaattaagtntagtaaccaggatttaatgaaattaggattgttgcctgtgacag

SEQ ID NO: 17790 - DNA, 404 bp, Glycine max
  unsure (1)..(404): unsure at all n locations
gcttcgcactcgataccggagaacacatgaacattgctattcaatgacattcatggtgctgcgaacaaatgtggagtatggaggattgccttgagggtcctcacttacgcggtcgtgagactgagctcgccactcgagagtggaggacacattaacagccctagacaatagcattcatgtggctctggaaaaggaacagaatggaggattgccttgaggttcctctcttangaaatcatggaatacaactccaatactcgaatatggagaacacatgaacaggcctaagcaataacaatcatgtggctccggaaaaggacgataatggaggattgccttgacgttcctctcttacgcaatcatggaatacagatgcagactccaaaatggacgaccctgaatga

SEQ ID NO: 17791 - DNA, 367 bp, Glycine max
gtggcgttattcttaggtggaagatcaagcttgtattagtgccacaaaccgcgactgttttcacagtgaccaagaccttacaacaaggatggagcacgcttcttcatagatggcagcaagtggctccacatattgatgagaatctcttcattagagttatcattcaaccagggaatggcactgttcctggcaagagaacagtaacaacttcttacaatgctctctttcttggtggtgctaatacgcttctccaagtgatgaaccatggttttcctgagttaaggttgacaagaaaggattgagtggagactactgggatcgaatctgtgctatatattgctggctaccctgatggaacaggcccaga

SEQ ID NO: 17792 - DNA, 430 bp, Glycine max
  unsure (1)..(430): unsure at all n locations
tagtgtagttcttgaaagagtgcaccacgcacttgctcctcaatggtgtgcgcgctctgcacatcgtagtggtcggagaggaacagttctttcgcaccatggaactgtctccgaccaccaatcgactcttccggcctgtagtaccacctcacacgcaccttcacgttgttcctattatcctgctcgatcatctccacgcgcgccacgtaagggggcttcgacgtgtccgagggccgcatcagaacacagtctccagctgcaaaacccaaacattttcttaaacgatagctctcgctcttcaaaacgacatcagcatcatcatcatcatcgtgggcagccacaaaaacagggaaagggaccgtcttttaacgagacaacgcanaagggttggcgtgtgttacctcggacgatcttgttggttcctcttatg

SEQ ID NO: 17793 - DNA, 436 bp, Glycine max
tgtcggtgtacctaaagatgctattaggctcagcctgtttttattttctctatctggggaggccaagagatggctgcattcattcaagggcaatagtttaaagacctgagatgaggttgttgagaactttctaacaaaatatttcccagagtctaaaactgcaaagggaaaacttgcaatttcttcattccataagtttccccatgaatctttgagtgaggcattataaagctatagaaaactctaactcatggtttttcagagcctattcagctgaacatcttcattgatgggttacggctgtagtcaaagcagttactcgacgcttctataggaggaaaaattaagttgaagacacctgaagaagccatggacttaattgaaaatatggctgtcagtgaccatgcaattctgcatgatatagttcatattccta

SEQ ID NO: 17794 - DNA, 417 bp, Glycine max
ctttgcaagctggaatcatttatcctatctccgatgttaatgggtgagtcccgtccaggtagtcccgaagaagaccggcctcacagtgataaaaaatgagaaggaagagttgattcctactcgggtgcagaacagttggagagtctgcattgactacaggaggctgaaccaggttaccaaaaaggaccattttcccctgccattcattgatcagatgcttgaacgcctggcaggtaaatctcactactgtttccttgatggtttttctggttatatgcaaattactattgctcctgaggatcaggaaaagaccacattcacctgcccctttggcacttttgcttataggaggatgcctttcggcctgtgcaatgcccctggtaccttccagcggtgcatgattagtattttcagtga

SEQ ID NO: 17795 - DNA, 352 bp, Glycine max
atcttatgctgcaaacatttataatagacatcctcagcagcaaaacaaacaatagtagaataattatgacctttcaagcaatagatacaatccaagttggaggaatcatccaaatctgagatggacaagtcctccacaacaacaagagcctgtccctccttttcagaatgctactagtccaaccaagccatatgttcctcctccaatacagcaacagcaacaacaacagtcacaacaaagacaacaagcaactgaggctcctcctcaaccttccttacaagagttagtgaggaaaacgacaatccagaatatgcaatttcagcaagagacaagagcctccattcagagtctg

SEQ ID NO: 17796 - DNA, 432 bp, Glycine max
ttgatggtgtcgagaagaaatcacatgtttgtcattattttaagggggagaatgtgaatgtatgtatacatgattttgatgatttcaaagaacaatctaacaaggctgcttcaaatgataaacatttgcttcaagaataattcaagattgcttcaacaaacaaagccttgtttcaagattcactaaagaccaagccttgccttaaaacaaagtgctttcaagacatgcaacgctctggtaatcgattaccaggaagtgtaatcgataaccagaagacaggattgagaaatagctgttgaaaaaggtgaatttaaattttcaacatgtaatcgattgccatatgtgtgtaatcgattaccagcaacagaactttggaaattcaaattcacaagtcataacccttcaaactataactgtgtaatcgattacaca

SEQ ID NO: 17797 - DNA, 406 bp, Glycine max
tgcatacaagattcttcctgtctgacacttttaatgtttgtggccgggtcatataaatgccttcctatacatccctatgcgagaatgcagttgtaacagctaactgctccacgtgaagattgtctaccgctattatgcttagaatagccctgatggtggtcatctttacaactggagagaagatttctgcgatgtcaattacttgtttctggtgagaccctttgaccacaagattcgacttgtgtcttcttgtaccgtcagatggttactttagcctatatacccacctagttggtcatgccttctttccttctggctatttatttaaagaccacgctttattgttgatgacggatggcatgtcatctgtcatcgctagcttccactcgagaatgacattcccctg

SEQ ID NO: 17798 - DNA, 350 bp, Glycine max
agcttttcttcgtgggttggcgggttctgtctcgtagaatggcatgatcattggctgacatgttctcaattagctctgttgcttctttcggggtcttcagttttatctttccccctacagaagcatctaacagttgcttggtttgtggtctcagcctatctataaacatattcaattggattggctcggaaaacccatgagtgggagtttttcttaacaagcctctgaatctctccaatgcttcactcagagattcattacgaaactgatgaaatgaagagattgcagctttcccttctacagtcttggactctgggaagtatttctttaggaacttttcaacaacttct

SEQ ID NO: 17799 - DNA, 422 bp, Glycine max
  unsure (1)..(422): unsure at all n locations
agatgattcaacttttcttctctagggacaacaagtcgaaccagttatcaagtcccatcaacttcagcgattcgtcgtaaatccccagattccactccgcttcctctctaaagatgatcgtcacgctggcattgagaatccagcttatgaaacttgggagcaacaggatcaagtgctcctcacatggcttcaatcgactctctctacgttgattttatcacgagttctaggatgcacccactcctatgaggtttgggaatgcattcacgattatttccacaagcaaacaatagccacagctagtcaacttcgcactcaactntgtgctatgacacttgcaggcaactcaatacgtgaatttctgtcacagattcgagcaatttctgattctctagcttctgttggaagccggattatgcttc

SEQ ID NO: 17800 - DNA, 374 bp, Glycine max
  unsure (1)..(374): unsure at all n locations
cgctttcaagtcttttagtctcagaggatgcagctgagtgtgcagctacctcatgcactcctctaatgactatggcatcatttctggcactaaactgctgagagttggaagccatcttctcaattaaatttctggcttcagcaagagtcatgtctccaagggctccaccactggcagcatctatcatacttctctacatattactgagtccttcataaaaatatcggagaagctgctccgaaatctgaaggtgagggcacctggcacatagttttttaaatcgctcccagtactcatacagactctctccactgagttntctaatacttgagatacctttcctgatggctgtggtcctggaagcagggaaaaaa

SEQ ID NO: 17801 - DNA, 430 bp, Glycine max
  unsure (1)..(430): unsure at all n locations
tgtaatcgattacacacatactgtaatcgattaccttatgagattttcagaaaatattctcaacagtcacatcttttcatttggttcttgaatggtcatcaaaggcctatatatatgtgacttgagacacgaatttgctaagagtttttctgaacaacaagtgtttattctctcaaaaagcaaaatcgttttatcctcttaagaattccttggccaattcaattgcaattcattaaggaatcatttgagtgctcagattgtaaaatctatctcttcaagagagattcattcttcttctctttctaattcactaagggattaagagaccgagggtctcttgttgtaaaagaattctaaacacaaaggaaggattntccttgtgtgtttagaacttgtaaaaggaatttacaagatagtggaactctcaagc

SEQ ID NO: 17802 - DNA, 366 bp, Glycine max
agctttgctcatatttctcattctagacaaacttctcatttttacgggttagtttagttaggggtagtgctaatttagaaaatcccttaatgaatttcctataatagccagccaaccccaagaaacttcgaacttctgttggagttgtcagttgttgccactccataaccgattccactttagccgggtccatcgcaaccccgtctttagaaatcacgtgccccaggaactgcaccttctctaaccaaaatttgtatttcgacagtttggcgaacaatttcctatccctcaggatctgtaacaccatcctcaagtgcttttaatgctcctccttattcctcgagtacactaggatatcatcaatga

SEQ ID NO: 17803 - DNA, 378 bp, Glycine max
  unsure (1)..(378): unsure at all n locations
tntctttttcttcttntttttcctttctttntttttcaaactttcatttgttctaacaatcccccacttgaaatttgaaaagaagattttcgaggatttcataaaattgtgcataaacaaaggtgtcatacaacttgaacctttgcatagtgagtaagattcagattttattagagtgactcgaagtcttgaactctatctccgacatcaaaccacacacaaccttttcataggtgtattctataaagcccgtgcgttaaagaccatgcacgtctatcccggtatagtgaacgctctaganatntttgcccaaaatttcatatgaagcggcccccactttaacattcacataggtgagtctatcaagagtactcctgt

SEQ ID NO: 17804 - DNA, 372 bp, Glycine max
  unsure (1)..(372): unsure at all n locations
agcttaatatttctatatatggcttaaaacaggcctcccctcagtggtaccttaagtttcattggataatttcttcatttggttttgatgaaaatccataccacaagattagtgggagtaaaatatgatttcttgttttatatgtagatgatattttacttgcagccaatgatcggggtttgctacatgaggtgaaacaatttatctctaagaattttggcatggaggatataggtgatgcatcttacgtcattgacattaagattcatacatatagagctcgaggtattttaggtttatcacaggaaacctatattaacaaaattttagagagattntggatgaaagattgtttaccaagtgttgctccca

SEQ ID NO: 17805 - DNA, 366 bp, Glycine max
attttcctctaccacctcattaagaatcaaagtgccatgaagaatatgtctgtctttaatgaaagctgtttgtctttcatcaattaaggcaggtataacctgtctcaacctgcttgctagaagcttagctatcactttgtacatgcagcctatcaaggatattggtctataatcatttagggactgaggatggttaactttggggataagagccaagaaagaggcattgctgcctctagggaaacaaccgttgacatggaactcatccacaaatcttctgaactctggttttagcacactccagaattccttaataaaattgaaattaaaaccgtccggcccagggcacttatctccaccacaact

SEQ ID NO: 17806 - DNA, 423 bp, Glycine max
  unsure (1)..(423): unsure at all n locations
ttctttatcgttggaactccagtatctttcatttgatctttggatngattggttaaatgtgttgtctcttatttaacccttcttttattatattgttatgttagcatatttgtgcaacatcatcgttaacctatcacaacaataatttttattaaaaaattgacaatatattaatagtgaactaaaattattaaaattttaaaatgtgagagatcaaatgtaaatgtgtagtataatatttgaataatcaaaattacacaatcataaaattacaaagagttttttaaacctattatgtattcaaaattaaagaataatattaaaaaatgttataatttactatactctattatgcacttcttctattttaaaataaaatataaacgtaaaaaaaacaacataatttgatacataacgtaataa

SEQ ID NO: 17807 - DNA, 370 bp, Glycine max
agctttgcttctacagggaagacttatctttggacttcatagggggattgtcgacccttaagggcaatacagtggtgctggtcgtagtggacaggttctctaaaggaatccattagggttcgctcccttcacatcacacaacattcaatggtgctcatctttttatggagatcgtgggaaaacttcatgggatcccccacagtttagtctccggtcgagacccattattcatcagccgcttgtggcaagagttgttccgattgagtggctcgaaacttcatatgagttcagcctatcacccgcaatccgacgggcagattgaggtgatgaacacggtggttgagcaatatcttcgagcatttgtgcactc

SEQ ID NO: 17808 - DNA, 364 bp, Glycine max
gaaaacaaattgagatggtgagatcagatagaggtggggagtactatggtagatacacagaggatggacaagcaccaggttcatttgcgaaatttcttcaagaacatgggattgttgcccaatacactatgcctggttctccagatcagaatggtgtggcagaacgaagaaatcgaaccttattagacatggtgagaagcatgaagagtaatgtaaagcttcctcaatttttgtggattgatgctcttaagacggctgcatatatattaaaccgagttctaaccgaggctgtctcaaagacaccttttgagttattcaaggattgaaaaccaagtttgcgacatatacgcgtttggagatgctc

SEQ ID NO: 17809 - DNA, 374 bp, Glycine max
tttcaagtttgatgtttaaagcgagaagtacgtgtttgtgggttacgactcaagatccaagggatacaaactctataatccaaatagtagaaagatcatcataagtcgcgacgtagagttcgatgaagaagattgatgggattggagtgttcaagaagataagtatgattatcttccttattttgaagaagatgatgaaattgaacaaccaatcatagaggaacatattacaccacctgcctcaccgacaccaaggctggatgaaacatgttcaagtgagaggacaccgcgactaaggagcattgaagagatttatgaggtaaccacaaacctaaacgacattaacctctcttgtctttgtggtgattgtgagc

SEQ ID NO: 17810 - DNA, 421 bp, Glycine max
tgcaagtgtaatcgaattacttgacttatttacgcttcacaaagaataggttgccctagaatcaaaaggtaaggtcaaaagagtattctttatgaaatatatcttgatatgagtcatcgaactatagcgtattagcatcactaagaacaagaaatgacaaacaaccatactatctatgcaattaaggcaaaacaccatactacaagtgatgtagctccatgtggagcttgcaggtcttgaatcttcttcatcaatggagtcctttacttcttgaagaccatggcagtgaaatggaaaaggaagaaagatgattggagatgccacatcaaggagaagatgagtcaagaagaagctcaccaccatagtaagccatggataagagcttgaatgtaggagaagaatagtggagggagagggagag

SEQ ID NO: 17811 - DNA, 333 bp, Glycine max
tgtctggaccacaagtgatagtatttacctgtctgtctcttaaagcctcaacaaaacaaggtgtgtatctgacttcagtatcacctatccccagttggccattttcacctctgccccatgagtagacactccccccagaagtcaaaacagcaacatggtatgaaccgtttgatatcaccttaacaaactcttgtttgagatgttcttcagacatgactgctttatccgtgtcatgtggatttactagttgtgcatatttggcacttgccattgcaaaaaccttgccgatgttagagagagctacagtcgacattcttacacatgacacttgaa

SEQ ID NO: 17812 - DNA, 435 bp, Glycine max
gccacagggagaaagatgtccaaaaaatgaaatatttaattatataaaatcaactccctcttgttgtgtgtaacccttggccacaagcctagctttgtaactttggatggcgccattaacacaatgtttgatgtgataaacccacctataaccaattgaaacttagcttggggaaaatcagttagatacgaagtatgatttgcttcaagagtatgtaattcatccttcatagcttttcttaatacagtttcatacttaacagcttatgcatatgttttgggttcagaaatttttgaaatggctaaggtatatatttgagatgactaggagacaaatgatgataggacagaacagtggataaagaatataaagcagtacctgaagtagaagaaaggaacctgctgagttgagaagattgcatgtagtgaaaaatga

SEQ ID NO: 17813 - DNA, 369 bp, Glycine max
agttttttccttctcgacacgtatactctgaaccacaagagcaagagctcatgtttgatcatcacatgggtatagaatataaaaaagtattcacaaattttattatattatagtagatttcaaatttaaatttatctttttttttctttctctcttaattgtatattttgttatataatttatcgtataagtataatttctctcatgcaaaacaaaattttcttacgtacactaagtttgcggagttatataatatgatttatttaccattaaattcaatataaattgtttatcatatatacgtcagaaatatttatttattatgaatgttaatactactataatttatatatattaaaattattctta

SEQ ID NO: 17814 - DNA, 418 bp, Glycine max
  unsure (1)..(418): unsure at all n locations
nttcctctggttgttctactggggtttccaagagttatagttatatgagaagaaattgaagccttcattttgtattgtctttgtgcgattcacttttctctctccatgaataatactttgcaaatcccaatggtaaaggtgtgcgcaactgaatcttgaaccaagtatctcaatttcatgatgatcgaacggttaatgagtccgggatcatagatttactaggtaggttctgagtctctgtggaaaaagagaaatctacaatgcgaacgacatttctctaagctccaacattctttcgcaatttccaacggagaaaatgctcagaaattagtttccgaccaggtgctgagatatcacgacgatccaacgatcaaagaatctgagatcatcatttctactaaaatagatttgagcgtat

SEQ ID NO: 17815 - DNA, 354 bp, Glycine max
gctttgtattttagcctagaggcagcgaggcacttgtccattaagaatgaataaaagtaatgttccttttgctttaatccattctgaggtatggggggcatccccaaaatattctatctctggctatcgcaggttagcgatatttggtgatgagtgcactcgaatgacttggattaacttgttgaaacaaaaaaaatgacccggtacacatatttcaacaattccatacaatgattcagactcaatattcaaagaagattacgatccttcactctgataatggtggggagtttgctaatcaccaattccatgagtatttcgaaaaacaccgacttattcacgaatccacgtgtc

SEQ ID NO: 17816 - DNA, 151 bp, Glycine max
tgcatggaattccttccagtattgtatcagacaggtatccgaggttcacttcgcgattttggacaagtctacatgaagccttggggacaaagttgaagcttagttcagcttatcatcctcaaacagatggtcagactgaacgaaccattca

SEQ ID NO: 17817 - DNA, 348 bp, Glycine max
  unsure (1)..(348): unsure at all n locations
agtttgngcatcacaatactcctgattgacgatgtctccatatgttcttaaaactggactgattcatttgcttacacagttacatgggcttgcaggcgaagacccggacaaacatttgagggaatttcacattgtctgctccaccatgaaacccccagatgtcgaagaggatcacatatatctgaaggctatgactcactcattagacggagtggcggaagactggctgtattaccttgctccaaggtccatcacgagctgggatgaccgtaagagagtattgttataaaaaattttccctgcttccaggaccacatccatcaagaaggatatcttacgtattagact

SEQ ID NO: 17818 - DNA, 426 bp, Glycine max
caagctccttcaactgcacaaggctctattatttttgagtatccttgtggaaccttcacccgacgaagacactgacaaaaacttatcttctccttcttggacaaagtatggcatgctgagggcaagtaaattatcttaccatcacaccttggatgcaactgcaatcttatacccatatcagctagatcttgactggtattgaatccatcctaagctttgtcttgaatgttaaggaacattctaatcacactgtcacaaacatttttctacacatgcataacatcaatactctgtttaatgtctatatcacaccagtactgaagatcaaagaaaatggacctcttcttccatatgcatctctgacatttatgcttcttttagagcttcccaaatacagtgttcacagcgtgaacccgcatgatatac

SEQ ID NO: 17819 - DNA, 363 bp, Glycine max
atcttccttaagaagattccttaagaagctagagcttagctacacatacctctctaatagctaagctcacctccttgagatgagaagctagagcttagctacacaccccctataatagctaagctcacccccatgacaaaaaacatgaaaataacagaaaaaagtccttattacaaagacaactcaaaatgccccgaaatacaaggctaaaaccctatactactagaatggccaaaatacaaggcctagacgaaggaatagcctattttaatatttacaaagataagcgggctcatacttagcccatgggctcgaaatctaccctaaggctcatgagaaccctagggcctttccttggatctc

SEQ ID NO: 17820 - DNA, 375 bp, Glycine max
agcttgccctagttaagtttaggaaagtcattcattaaatgacagtacatttgtttcatgttttgctgttttacaaaaagagctaaaactactctgttgcacttcgtctacatatacctcaacattactatgcttaataaaatttggtgatcttagtaaaacataaagcactttctcaaatattaagatcaaataacattcagcgtatccaagagatgcagccaaaataaataatgagaacattaaaaaactgaattacctcacttaaaatgagaacccctttcttggatgcttgacacgcaacaaattcatagctgacaagattcattccatcccttacagatgtaacaagtgctacatctaaattcgatgtga

SEQ ID NO: 17821 - DNA, 423 bp, Glycine max
  unsure (1)..(423): unsure at all n locations
ntcaacatcagggttggggcagcagggacatgaatgtatccattctattccaattctctccttttgtctttttattagtattttttttaaattgaactaacattctatgctcttaagtttggcttcttttcatacttgtatataaatgtaaggtgtccctttcatacccccttttgtgttgcttggacatgcttgtgagttttttgttttccttttctctttttgataatttgattggacatgcttgtgagttttttgttttccttttctctttttgataatttgattgatgtgtgagcaatgatggttaggaggggagaagaagtgtctgaattctgagctatggcatgcatgcacgggccccttggtgtccctaccaactgcagggactcatgtggtttacttccctcaaggtcataatga

SEQ ID NO: 17822 - DNA, 360 bp, Glycine max
agtttgtaggttatagtgacgatgattgggctagaaatgaagatgatcaaaaaagtattagtggatttgtgtttttcatggggaatacgaccttcacttggatgtaaaaaagtactcgatagtcactcttttgacttgtgaggcagaatacgtagcagctacttcatgcgtttgtcctgtagtctggcttaggaatttgttaaaagagttggacatgtcacaagacgagcagaccaagacctttgtggataataagtcaaccattgctctagtaaagaacccagtgttccatgatcgaagcaaacatattgacactcgttaccactacataagatagtgcatagcaagaaaggatgtaca

SEQ ID NO: 17823 - DNA, 379 bp, Glycine max
  unsure (1)..(379): unsure at all n locations
ttaacttaattatattacacttgtttatgtatgtgtttatctcttgacttaaatataattttggtcattttattttactcaatacgtaattttggtctctctattttaaaattaaaatatttgatactcctatttttaaaaatctacaattttggtctctctattttaaaatacaaacattttgtccctatattttagaaaattcataattntgattctcatattatagaaaattcacaattttggtttaatatataatttctcctatgtttcatttcttttattttttactttgtagttaattaaatcatttcttgatgatatcttaaatgaatatgtagatttaggatttaattagaccaacacataagatataaaa

SEQ ID NO: 17824 - DNA, 371 bp, Glycine max
agcttgatccttacgagtcaacttggtcaaaggcaaggctaacttgaggaaaccttctatgaatctctagtaatatcccgctaaactgagtaaacttctaatttcatacacagatgactctcccacttaagaaaaacttcattttagaaagatctacagctatatcgccttgggatatcacatgtcctaggaaactaagtttccctaactaaaactcgcacctggaatcttagcttaaagttgtcagtccttaagggtttgcagcacaatcctcaagtgcttttcatgctcctctctagtcttggagtacaccagaatatcatctatgaattctaccacaaaattatctagataagggcgaacaatcttat

SEQ ID NO: 17825 - DNA, 423 bp, Glycine max
tcatgttgaagtatgtatggaaaaacttcattactgttgtttaacacatacaagtgagcttgtaacaaatcttcagacttggagttataacatgcagtcctcttcaacccttaccacccactctgtcgtcatggtaagacttatgaagcccaataggttttgccttttcaatgtactctgaacaaaactcaatggctttttcttcaatgtacctttcaacaatagaagcttccggacgatgtagattcttggtatacccttttaagatcttcatgtatcgctcaactgggtacatccgccgcaaataaataggaccccaacatttgatttctcagaccagatgaacaattaagtgaaccatgatgtcaaagaaagtaggaggaaaatacatctccaattggcataatgtaattgcagcctcat

SEQ ID NO: 17826 - DNA, 361 bp, Glycine max
atctttctatcaatgtgattaacaaccacaatttaattaattaattaattaacataacgaaatcagagccaggatacctaagattgatttgattcgtcgattaaatgactagattgttcaattcaaaaaggaatttactactactactactactacagaacgtatgaacttgaattgctagtacgatcctgaacgatgagaaataaatgataataagaaagaaagtaccttcggatcttgttgccctggccgacctggtacatgccccaagagaaagcgccgaatgtggtgaggaagatggcaacggcgctggggcccttgttcgggatgcgccgggcgaaccggaccggagcgaacccgc

SEQ ID NO: 17827 - DNA, 427 bp, Glycine max
tcaacattcaatatcgagcgtttcgatatattacgtgactgaaccagacatccgagtaaaaagttactgtagtttgaagttgctcggagcttcaacattcaatatcgagcgtttcgatatattacagaacagaatcggacatcagagtaaaaagttaatgtcgtttgaattatgtcagagcttcggtattccatttcgagcgtctcgatatattacgggactcagtcagacatccgagtaaaaagttactgtcgtttgaattttctcagagcttcgataatcaatttcgagtgtctcaatatattacgcgactcagtcagacaaccgagtaaaaagttattgtcgtttgaattatctcagagcttcggtattccatttcgagcgtctcgatatactacgggactcaatcagacatccgagtaaaatg

SEQ ID NO: 17828 - DNA, 360 bp, Glycine max
atgccagtaaaaagttactggtggctgaagttgctcagagcttccacattcaatatcgagcgtttcgagatatgacacaacaaaatcggacatcaaaatgaacagttaaggccatgcgaattatgtcacagcttccgtattccatttcgagcgtctcgatatattacgcgactcacacaaacatccgagtaaagacttactggcgtttgaattttctcagaacttccataatcaatttcgagtgtatcaatatattacgcgactcaggcagacaaccgagtagaaagtgattgtcgtttgaattatctcagagcttccgtattccattactagcgtctcgatatactacaggactcaatc

SEQ ID NO: 17829 - DNA, 403 bp, Glycine max
agtttgactatgttatgcaaattgtctcttatggccatgactaacaattgttgcatcaagatgtggcaatcatgagactttaagcctactaatttaagatctttcaactgcacttggctcttaatatttgaagagtatccttgtgggactttgacctgtcgtatacactgaaaaaaactgatcttctcctttctgggcaaagtatgacaagctggaggcaagtatattttttaccatcagaccttagatgtaactgcgatcgtatatccatctcagctagatcttgacaagtattcaaatcatctttcgtcttgccttgaatgttaagatgcgtcccaatgacactatcacatatatttttctccacatgcatatcattaatacaatgtctaacatctagatc

SEQ ID NO: 17830 - DNA, 233 bp, Glycine max
actcaagcttgtagaacaataaatcccaacacaccacatcactggttgtctcttaatctgtttgaaaaagagtattccttcttctcccttcttgcatcgtcaataacctcattgaccaccaaggtactatgaaaaagatacctatctttcaagaaggtgttttgcttttgatcaataactccatttaataccttcatcaacctattggcaagtaattttgccaatattttgta

SEQ ID NO: 17831 - DNA, 396 bp, Glycine max
agttttgagccaataccaacgaccataactttttactcggatgtctgattgaggctcgtaatatatcgagacgctcgaaattgaatgttgaagctctgagccaatacaaacgatactgactttttactcggatgtctgattgagtcccgtaacatatcgagacgctcgaaattgaatcttgaacttctgagctaattcaaacgacaataacgtttttctcggatgtctgactgagtcccgtaacatattgagacgctcgaaattgaatgttgaacctctgagctaattaaaacgacattaactttttactcagatgtctgattgagtcccgtaacttatcgagacgctcgaaattgaacgttgaagctctgagccaatacaaacgaccataacttt

SEQ ID NO: 17832 - DNA, 417 bp, Glycine max
caccaggtcgaggcaatatactatccccatttctgcttataaccttcatcttcattggtgtgctttcagaaacactagaagaggcagtaccatgaagtactcggtaactgtcttgattagatgaagttctaggaatggatcgagctgaaccataattacttctgtcctggtgttgagaagagttccttctgtcaaactcttttggacccttttcaacctttgtgagcacagaaatatctgatccactctcagatcctggatggcccaaaatgcctttcaattccatatagcctgttgaataattgggatcacccacaacatttggaaaggcaggcttcctgagattcaccctatctctcataaactcaagagcaaattcctcaccagtctgtatggagtaattaagtacaggtttat

SEQ ID NO: 17833 - DNA, 282 bp, Glycine max
tgttttatacccattatcacatctacaggaccaaggtccttcatatcaaaatttctagataagaaagacttcgcatcatcttcgaactacatatgatgatccagtatcggtatgtcatgcacatactaacatgacacgacgcattcattatcatcatgttgtgtcacatacacacatttatcagtgtgattgatttgaaaaccatacgagagaagaacttgatcaaattgttctgccactgctttgaagcttgattcaaactatgcatagattgaacaaatt

SEQ ID NO: 17834 - DNA, 403 bp, Glycine max
tcaagcttcctaataatgatgaacgactatcaacatagctcctatatatatatagtcttatctcatatagccctaatatcactaataactaatttttaacattctatcattcaaaagtatttctacagaaataatgaattaactttcaaatattttacgaccatattgtgaaattgtgtctaaaatctttatttcatcttctaaatcacaaaaatgataataaagttcaaaactaattgttaatcacgataagaatcacccatgagggaaaaaaaacctctataaaggtcatttacattaaaataaactcagagataatacagattattataaaagataaattctatattttaaaatcaaaaggaggtggcttaattggaatgcaaataagacacgactttac

SEQ ID NO: 17835 - DNA, 426 bp, Glycine max
tggcaagccagagtctcttcggctggctctttgcttgttcataatcagctgccggaataagtaggcaccaccattcaataccattatagagaatcaaataatatatatatcatcagaataaaattaaatattttctattgataggaattgtatataagcattaagaaatttataagacttccgcaccatacttaactaagttataagaaaacctattggatgctttttttttggtgataggaaatcggatgttgaagtttaaatgaaaaaaagtaaaactttctcatattattggttaggaacattaatggtgtaaattttaataaattacgacatacaacaacataaataataaaaaacacttgtaaaattatatcatacgctgagataatcaaattcgttgagataactaaaaaaacatagatt

SEQ ID NO: 17836 - DNA, 406 bp, Glycine max
  unsure (1)..(406): unsure at all n locations
agcttgctgcttcattgacagatttacttaaaaaagaagcattcaagtggacaccagaggcagagacaacatttgttcaattgcagaaagtcatgacttcagctccagtgttagctcttcctaatttccagctgcccttcattctggaaactaatgcttccgacactggtattggagtagtattacatcagaatggccatccaatagcatttttttccaagaaacttgcacctagagtgcaaaagatatctgactaatttagagagatgttagcaattgttgaagctatagctaagttcagacactacttgctgggacacaaatttattatcaaaactgatcaaaattagtcagatgatgatgttgatggatggaacaaccnctacagacacctgaacaacaacag

SEQ ID NO: 17837 - DNA, 411 bp, Glycine max
tgtgagaccttccgctacaatgttgaagagaaaaggtgcaaggtgatcaccttgccttagacctctcttaggagtaaactccttagatggactcccattaattaaaatggatatagttgcagtatttagacaaccatttattcatttcctccagctttcacaaaatcccatccttttaagcatgtagtcaagaaaaccccaagaaaccgagtcatatgcgttttcaaagtcggctgtgaagaccatgcaaggtttacttctagatttggcctcagctatagtctcattggcaattaaaacaccatgaagaatgtgtctccccttcataaaagctgtgtgcctttcatctataaggtgaggtaatacagcagccagcctcttggccaaaactcttgccataatttatagaca

SEQ ID NO: 17838 - DNA, 427 bp, Glycine max
tgagctcggcttgagttgaatacgtaattcttgagctcggcttgagttgaatacgtaaagcttgagttgacataggctttttttaaggctctgctcgacttacataaaagtctgacttacgagcctatttaaaagcttgcttaaagacgtcttttattaattaattattttaaaacctagtgaaatactaactaaaaaaagaaacttataaaatttcgtataaataatgtacaaatctaaaaataattgataaacaaaattatattgaattcaagtcgttaaagcacaaagtatataaaaaaaataaaaatagcataatattaaaaaatgtatggattagagatgatttacactaatatagccaaacaaaaattattattagttaaattaacaatttttaatccaatttttttaatatataattata

SEQ ID NO: 17839 - DNA, 399 bp, Glycine max
  unsure (1)..(399): unsure at all n locations
agtttttgcagcttcataaagcttttggactaattaaattaatactttcaaaattaaagataaatatttcatatatcatcatttttatatttttattattttaaaaatgaccataatatttttatgtaaattaaactagttttctaggtttttaaccataatatatgtatttttcaaaacttccatttcaaagaaaataatatttattattttaagttcaaaactcaaagaggaaaaaatgcatgcaaacaaattcaaataataagtattggctaaaatatttttattatgaaattaaattttttaaggataaataatttcattntttggaatatttgatattttgattnttatttgatccttanaagtaacattgtaacaataaaataatatttttca

SEQ ID NO: 17840 - DNA, 388 bp, Glycine max
  unsure (1)..(388): unsure at all n locations
agttttgagcaacttcaaacaacaacaactttttactcggatgtctgattgagacccgtaatatatccagacactcgaaattcaataccgaagctctgagcaaattcaaacgacaataagtttttactcgtatgttcgattgagtcccgtaatatatcgaaacgctcgaaattgaagaccgaagctctaagtaaattcaaacgacaataactttttactcggatgtctgattgagtcccgtaatatctcgagacgcgcggacttgaatgtcgaagctctgagcaaattcaaacgacaataactnttttcctcggatgtcgtattgagtcccgtaatatatcgagacactcgaaattgaatatcgaagctctgagcaaattcaaatgac

SEQ ID NO: 17841 - DNA, 408 bp, Glycine max
tcaacattcaatatcgagcgtttcgatatattactggactgaatcagacatcagagtaaaaagttattgtcgtttgaattatctcagagcttcggtattccagtccgagcgtctcgatatattacggcgctcaatcagacaaccgagtaaaaaagttattgtcgtttgaatttgctcaaggcttcggtaatcaatttcgagcgtctcaatatattacggaactcagtcagacaaccgagtaacaatttattgtagtttgaagttgctcagagcttcggcattcaagtcctagcgtctcgatatactacgggactcaatcagacatccgagcaaaaagttattgtcgtttgaatttgctcagagcttaggcattcaatatcgagcgtttcgatatattacgggactgaa

SEQ ID NO: 17842 - DNA, 406 bp, Glycine max
agtttgtaactttctcaaaactcctcaacattgccttaatgaccctcacattttgcattgatgcttcaccaaagaaaatggtatgatctgcatatcacaggatactaatttccactgagcttcttcccaccaagaggcctttaaactgattttttttagagcttctctcattagacccgttaatccctcagccacaatattgaacaggagtggggctaacagatccccttatctaagtcccttttgagggaaaaattcagctaaaggactcttattgatcaatatggagacaaaagctgatctaagacatcctttgacccaagtaatccacttagggtagaatcccatcctcctaagcatatataccagataatcctcactaactgaatcatgtgccttctcatag

SEQ ID NO: 17843 - DNA, 432 bp, Glycine max
  unsure (1)..(432): unsure at all n locations
ntgatttcctttgtttcggaaacctttcttttctcatgtgcactcaaacttaatctccgggttcgaagacaaccttctttctccctttgttggcttgtttagcatagcttttatttttcctctcaatttgatctttgactctctcatgaagcttcttcacatagtccgcctttgcttgaccttctttatgcttaaaaacagaaacattaggcataggcaaaagatcaagaggagttagtgggttaaaaccataaacaacttcaaaaggagaacaattaggggtgctatgaacagctctattgtaagcaaattcaacatggggtaaacaagcttcccaagtttttaagttcttcctcaaaactgtcctaagcaaagtttccaaagtcctattaacaacttctgtttgcccatcggtttgtgggtgacaagtgg

SEQ ID NO: 17844 - DNA, 404 bp, Glycine max
  unsure (1)..(404): unsure at all n locations
agcttcagaaacaaattcctattagccactgccttcaacttgcagaagcccactgaggtctgctgatggagttagctcatgcatttaggtaccatcaaaatatttaaaggtaacgggcaagaaaaaataatagcaactgtgtgtacattctctcaagccttctgaaatgcgcgggaagaaaccccatgcagaagcctgacaaatcccaagaaactaagctttccatctgagtgccttatccaatcctgaagtactacatgaacaggtactgatggactaagcccaagttcctgaaacgtgtcaattgtaaagagctcagtaccattatacatgtgatgaaggattatactatatgcatctgatagaaaatctcattagaggtatatctatcatgtngataaaat

SEQ ID NO: 17845 - DNA, 438 bp, Glycine max
  unsure (1)..(438): unsure at all n locations
ctcctatgcaaaaacatcaacagtgccgctgaacctgtctttgtttctctgttcattctatcacaaagacttaatcctcatgacagagaagcttaagggtaaagttcccttgaggttgttgaaggccaagtgcaaaacgtgcaagccagagataatattgaagaaatccgggagggagggagcctatgatgttggcagagttggcggagaagttctgaagtttggaagcttctcagagagtataaggaatctcccaagcctgatttttctgccctgaaagatttgcaagttttgagcttgagtcttaacaaactcactggtccagttccagcttctttgttgggtcttttgtggctcaaagttgtgaatntgaccagtaacttgtttcacgggccaatgtctgtgtttgctcattgngtcgaggtggataatgcccct

SEQ ID NO: 17846 - DNA, 397 bp, Glycine max
  unsure (1)..(397): unsure at all n locations
nttgttggtgtaaaagcaaggcgggtggagaagtattatcacgatctgctatcctcagaaagtgattctgaagttaaaactgatcagcaaagcatggagtcaactgacagtaatgggaaaacaggtgcagattttggacatatgccagaaaaatggaaaggagtcaaaagacagattgagaaggtatttgcttttgatatttcatccgtattgctcttaatactgtgatattattggtatgacactttaaacaagtttcttcttagtagtctattatcattgcttgtttgtgcaggatctgcctcgaacatttcctggtcatcctgctttggacgaggatggtagatatgctttgagacgattacttactgcatatgctcgacataacccctcagtt

SEQ ID NO: 17847 - DNA, 418 bp, Glycine max
  unsure (1)..(418): unsure at all n locations
tgactctagatcttgtcattggcccctttaactcattaagtgtttctaggtccttgtgctctttggatagccctctattagcattggtcagaatatcagccagttgatctatggcaggaacatgaacaacattgagttgtttggtgagaagtttctctcacacaaaaaataaatccagctccatatgcttggtttttgagtgaaaaacaggattatgagctaatgaaacaattctggtgttgtcacacaaaataataggagtagtgtaagctacttggagttcagaaagaagagactgaatccaagtaacttctgctgcaatacgagccatgcttctatantttgcctcaatactcgaccttgcaacaactgattgcttcttagaccaccaagagatgagtttatgtccaagaaaaat

SEQ ID NO: 17848 - DNA, 426 bp, Glycine max
  unsure (1)..(426): unsure at all n locations
taacatcgattntttgaagaactgatgttaagaaatgtgcggtggcattttcataaataagttgacttaattaacatcggttttttcaaaacccgatgttaacattgatttcttaatattggttttgaaaaattgatgttaacatcaagtagttaacatcggatattgaaacaccgatgttaactttagaaagttaacatcggtttttaaaagaaccgatgttaacattgacatgttaacattggttttgtttaagaaaccgattttgtctcattcataagttaaaaccccaaaatccattcccccccatgcgatcagttaccaaaatcctttctccctttcttcctcatcgctcacgctcgaaagacctatgtgtcctcctcactcaagctgccgctgaggttcgtgttcaggttcgcactggct

SEQ ID NO: 17849 - DNA, 315 bp, Glycine max
  unsure (1)..(315): unsure at all n locations
taagaaattgggcctggagttggagcggtgatgattttccggtgtgtcgcggcgacggtggaagttacggtggcatccacacgcggcgcacgttagcgagcgcggttcgttggggttggagaaagaggagggcatgaactcaccgcacccatcaagcgcgtggccaccaatgctggctgcatggtttttgaggcactctttgtaggcaaccgccgtagacggtggctgntgcggcggtgacacggtggtggggtggtgatggtgatggtccttgagggagccgttggtggtgaaaggttgtggtggggtatcgac

SEQ ID NO: 17850 - DNA, 387 bp, Glycine max
agcttcttagtctcggttgatgaagatgaattcatggctacttcatgcactcctctaatgacaatagcatcactcctggcactaaattgctgggagtttgaagccatcttctgaattaaatttctggcttcagcaggggtcatgtctccaagggctccaccattggcagcatctatcatacttctctccatgttactgagtccttcacaaaaatattggaggagaaactgctcagaaatttggtggtgagggcaaatagcacataattttttaaatctctcccagtattcatataggctctctcctctacgctgcctaatgcctgagatatcttttctgatgaatgtggtcctggaagcagggaacaatttttctaagaatactctc

SEQ ID NO: 17851 - DNA, 425 bp, Glycine max
  unsure (1)..(425): unsure at all n locations
tgaaagcaaactggatgcgttggtcaactnggtaacttaacttttcttgaatcagaaatctgtacctgtcgcaagggtttggggtttgtgctcctctgctgaccaccatacagacctttgcccttccatgccacaacctggagcaattgagcagcctggaacttatgctgcaaatatgtacaatagaccttctcaacctcagcagcaaaatcaaccacatgagagcaagtatgacctttccagcaacagatacaaccctggatggaggaatcaccctagccttagatggtccagccctcagcaacaacaacaacagcctgctccttccttacaaaatgctgctggcccaagcagaccatacattcctncaccaatccaacaacagcaacaacctcagaaacagccaacagttgatgcccctccac

SEQ ID NO: 17852 - DNA, 398 bp, Glycine max
  unsure (1)..(398): unsure at all n locations
agcttgtactttttggcctctagattagccaatcctgcagcacatcgtagctttgcaactgttactgcttcatgggcatctggtgcctgttctgccttgctaacatagcttgtaacatgagaaaattgacccatctcaatgctgaccagaattgcactcatacacatatgaataatgtgctttgatgtagtgcaataatcccgagtacggacataacttttaaaagcgtcccccaattgaccatgagcatagtaaaagtctccaaaatcattgaatcccatcctaatgctttccttaatcaagtttgtctgcaaaaaataaatgcgatgaacaaattgacaggataaggaatcaatgatanattacgaaaaaacaggtcttaccaaaatactcctcat

SEQ ID NO: 17853 - DNA, 433 bp, Glycine max
tatgcataatgaattagaagatgaccttctaatcagtggaaaaatgccgctgtccgacatctatcaaagatgtaatgtagcaatttatgaacttgctagctgtaaggaagcactaaaagatccaaaatggaaaattgcaatggaggaagagatgtctatgatacacaaaagaaaaacattggagctggttgaaaggcctgaagatagaaaaatcattagagttaaatggattttccgaacaaagctcaatgcagattcctcagtcaacaaacacaaagtgagacttgtggttaaagggtatgtacaaacttttggtattgattattctgatacttttgcacctgtgtccagattagatacaattcgattggtgttaatagtggcttcacaaaagggttggaaagtcttccaattagatgtcaaattagctttt

SEQ ID NO: 17854 - DNA, 419 bp, Glycine max
  unsure (1)..(419): unsure at all n locations
gaccaagtttccaacggaagcnggatttgatccttttagcttgncnctagacatggacaatgcattgatgtttgtcaagtatccaacagtggaaagaattgatccatgaagtttattaccactgagttgaagtgttctcaaattatccaagtctcctatggaagatgggattgacccaganaaatcattttttagcaatttgattattgtgagagaatgaagtcttcccaactcctcaggaatagggcctgagagaatgtttttaagatgataagttgttccaaatttgtcaagtttctaatagttgaagggattgcaccaaagagattgttggatgacacatcaagtttaacaagatttgtcaacataccaaatgttggcgggatgaaaccattacaaagattatgatccattttcaa

SEQ ID NO: 17855 - DNA, 384 bp, Glycine max
  unsure (1)..(384): unsure at all n locations
atcttntaactgaatttgcaacgttccaattgatttcaaaatggtgtaattgattacaatatattggtaatcgattaccagtgtatctgaacgttgaaattcaaaatcaattgtgaagagtcacatcctttcataaaatgctttgtgtaatcgattacatggttttggtaattgattaccagtgacaagttttgaataaaaatcaagagatgtaactctttcaatggttttcaggttcttctaaaggttataactcttctgatggttttacaaggttgaaaagacatctcaaggactgcangtcgcttggtgactggatgtatgcacggtttgttgccgaaccagtataaactctttgtgtttgtcttcttctaccctacactc

SEQ ID NO: 17856 - DNA, 416 bp, Glycine max
tctcgttatattatgcacctgaatcagacttccttttgaaaagttatgaccatttgaattcctcgagagcttccgttgttcaatttcgagcgtcttaatatattatgcacctgaatcggacttctgtgtgataagttatgaccatttgaatttctcgagagcattcgttgttcaattccaagcttctcgatatattgtgcacctgaatcggacttccgtttgaagagttatgaccttttgaatttctcgagagcttccgttgttcaatttcaagcttctcgatatattatgcaccttaatcggactttcgtgtgacaagttatgaccattttaatttctcaagagctttcgttgttcattttcgagcttctcgatatattatgcacctgaatcggacttccgtttgaaagatttga

SEQ ID NO: 17857 - DNA, 380 bp, Glycine max
  unsure (1)..(380): unsure at all n locations
cttacttactattcgctcagaactaaactatttgcgtctactttttggagctgccgcaattgctgttcaaactccacccttactttctatcttatccttcacatggatcaacaatttgactatctgcatttgcttttgaaacttcctcccttagttcagcaaactgtctgtcaagcccgggctttaactgcctaaagattctagaccgacctcccttgccagtgctttagcatctatccagatctagttggaggtcaggaaaagatccttagcttccaaaacctgtgcttcatttctcacctaacttctattcacataggaatcttacatagatagatcccttcttcatgtggtttctcttngatcatagaaaccttctg

SEQ ID NO: 17858 - DNA, 432 bp, Glycine max
  unsure (1)..(432): unsure at all n locations
tcttcacatagtctgcctttgcttgacctttntatgcttaaaaacagaaacattaggcataggcaaaagatcaagaggagttagtgggttaaaaccataaacaggagaacaattagtggtgctatgaacagctctattgtaagcaaattcaacatggggtaaataagcttcccaagtttttaagttcttcctcaaaactgtcctaagcaaagttcccaaagtcctattagcaacttttgtttgcccatcggtttgtgggtgacaagtggttgaaaataacaatttactgcccaacttgctccacaaagtcctccaaaaatggcttaggaacttagagtccctatcactaacaatgctccttggcaaaccatggagtctcacaatctccttgaaaaacaaatcagccacatgggaagcatcatcaactttttt

SEQ ID NO: 17859 - DNA, 434 bp, Glycine max
  unsure (1)..(434): unsure at all n locations
tataatatattgatacgctcgaaattaaacctcggatgctctctatgaaattcaaatggtcataactattcacacggatgttcgattatggcgaatcacatatcgagacgctaaaaattgaacagcggaagctctcgagaaattcaaatggtcataacttttaacactgagttccgattcaggattataatatatacagacgctcgaaattaaacattggaaggtctcgagaaattcaattggttatcacttttcacacggatgtccgattcgggcgtataatatgtcgacacgctcgaaattgaacaacggaagctctcgagatattcaaatggtcataactnttcacacggatctccaattcaggcgcatcgcatatcgagactctcaaaattgaatagcggaagctgttgagaaatttaaatggtcataac

SEQ ID NO: 17860 - DNA, 408 bp, Glycine max
cagctgtttaccccatgttagaattgcttacattatagctgttcatagcaccactaattgcgctccttttgaagatgattatggctttaacccactaactcctcttgatcttttgcctatgcctaatgtttctgtttttaagcataaagaaagtcaagcaaacgcggactatgtgaagaagcttcatgagagagtcaaagatcaaattgagaggaaaaataaaagctatgctaaacaagccaacaaagggagaaagaaggttgtcttcgaacccggagattgagtttgggtgcacatgagaaaagaaaggtttccggaacaaaggaaatcaaagcttcaaccaacgggagatggaccatttcaagtgcttatagaataatgacaatgttacaaagtgagctgccggtg

SEQ ID NO: 17861 - DNA, 343 bp, Glycine max
  unsure (1)..(343): unsure at all n locations
gaaaaaagcttttaatggaagttaggaaaatgaaggcccccccgaaccatcaactgggaacccaagtcatgataggggtaaagacatttgtaccgtgtttaggaagtcccacacaaagacatcatctcccaacaacatctggaagaaacggtcaatattctttgatcttccatattggtctgatctacatgtgcgtcactgtctagatgttatgcatgtggagaaaaatgtttgtgataagtcaattggtactcttcttaacattanagggaggacacatgatggtttgaaatattgtcaagacttatttgacatgggaatacgagagaagtcgcatcccata

SEQ ID NO: 17862 - DNA, 318 bp, Glycine max
tttcatgcaagtctttggacaaaattcaatactgaagaacgcgatggggtgtctgttctgagagagaactgccccaacgctagtgcaagacacgtcggtctccaccacaaagggaatgtcgaagttgggaagcgccaagacgggagccgtgaagactgcttcctttaaggtggtgaatgctctcgtagccaactccgaccaccagaattgacccttgcacagcaactgtgagagaggcgcaacaatcttagcgtaacctttaataaatcttctgtaaaaacccaccaaacgcagaaaacttcttaatgtcttcactga

SEQ ID NO: 17863 - DNA, 400 bp, Glycine max
agcttaataaaaggtatgcgatgtgggtggaattcctagagcaattcccttatgttatcaaacataaaaagggaaaaggtaatattgtagccgatgctctttctcggcgtcatgccttactttctatgcttgaaacaaaattgattggtcttgaatgtttgaaaagcatgtatgaaaatgatgaaacttttgaagaaatttttaaaaattgtgaaaatttttcagaaaatggtttctttagacatgaaggctttcttttcaaagaaaacaaattgtgtgtgcctaaatgttctactagaaatttgcttgtttgtgaagcacatgaaggaggtttaatgggacattttggggtccaaaagactctagaaacattacaagaaacattttattggtctcatat

SEQ ID NO: 17864 - DNA, 370 bp, Glycine max
  unsure (1)..(370): unsure at all n locations
agttttctcattttttgcggattgacgctcttaagacggctgcgtatatattaaaccgagtgccaatcaaggttgtctcacagacaccttttgagttattcaaaggttggaaatcaatgttgcgacatatacgcgtctggggatgcctgtctgaagtaagaatttataatccacaagagaagaaactagaccctatgactattactacgtatttcattgaatatgctgaaaggtctaaagggtataagttctattgtccatcccactacactacgattgtggaatcaaggaatgcatagtttcttgaaaataacttgatcagtgggagtgatcaatttcngaacatttcttctgaaagggatcactatga

SEQ ID NO: 17865 - DNA, 435 bp, Glycine max
tctatagaaggttagttcctaatttctctacacttgtctcacctctcaatgagctggtgaagaagaatgtgacattcacttggggtgaaagaaaagagaaagcattttctttgctcaaagaaaagctcaccaaggcacctattctagctcttcctgatttttctaaaactttcgagctagaatgtgatgcctctggagtgggtgtgagagctgtattgttgcaaggtgggcaccctattgcttattttagtgaaaaacttcatggtgccaccctcaaataccccacctattataaagagctttatgccttaataagagccctccaaacttgggaacattactgtgaataatgcaggttttgatgatgctaaaaagaaatcacttgataatgattgtcatcatcaaaaacgcggagaatgtgaatgtatgaataca

SEQ ID NO: 17866 - DNA, 425 bp, Glycine max
  unsure (1)..(425): unsure at all n locations
ntgtatggtagaaggtgtacgacacctctatgttgtctagagcctcgagaaaacctcaccttaggacctgaagtggtacaacaaaccaccaagaaggtgaagttgatccaagaaaggatgaggactgctcagagtagacaaaaaagttatcaggataagaggaggaaagatctggaattcgaggttggtgatcatgtattcttgagagtcactctgtggactgaggttggtcgagcattcaaatcccgaaaactcacacctttctttatcggtcctttccaaattcttaaaagagtcggtcctgtggcataccaaattgcattacccccatcactttctaatcttcacaatgtctntcatgtatctcaactccgtaagtatatacatgatccatctcctgacatatgaaacatttcctttgagga

SEQ ID NO: 17867 - DNA, 422 bp, Glycine max
  unsure (1)..(422): unsure at all n locations
tgccaacccatggaagctcctaatatctctcacactttttggggtgggccattcttggatggccttgattttctcaaggtccacttggaccccatttctaccaactacaaaccctaagaaaactatattatctacacaaaaagtacacttctctatatttgcatagagggtgtttttcctaaggactgaaagaacttgtccgagatgtcctaagttatcatctaggctcctactgtacactaaaatatcatcaaaataaacaactacaaatctacctatgaaatcccttaagacatgatgcataagcctcataaaggtgcttggtgcattagtgagcccaaaaggcatcactagccattcatacaaaccaaacttggtcttgaaagcggttttccactcatcacccntttcatcctgattgg

SEQ ID NO: 17868 - DNA, 409 bp, Glycine max
  unsure (1)..(409): unsure at all n locations
atgcatcagggaacaatttcactttataaagtttgtcctaannggattcctaattttcaacttacccttttggatgtgacatcatggcagataggtcccaactttccatcgtggattcagtcacaaaacaaacttctatatgttggactgtctaacacagggattttagattctattcccacttggttctgggaagcacattctcagcttttgtatttaaacctctctcataatcatatccatggtgagcttgtgactacaataaaaaatccaatatctatccaaactggtgatctaagcacaaatcacttatgtggtaaattaccctatctttcaaatgatgtgtatgacttagacctttcaaccaattcattctctgaatccatgccagattttttatgtaacaatc

SEQ ID NO: 17869 - DNA, 385 bp, Glycine max
  unsure (1)..(385): unsure at all n locations
agtttgtattgactttccactacactaattgcactaatcatcctctggctgcttatatcttgaatcaaacatgaattagaaaagaaggttaacttgcaatttaatgtagaaaccaattttgatatagagattaaattgaaattgaaagatggcaagtatagcacatcttctaaatgtaaaaactccgtaaatttgactgttctagagtgtgtggctatgacttgttgaccagtangtaggcgaactactatcggatttatttctctatatgtagtataacaagtcaatgaggaggcaatatgatctataaaactagaatccaaaatctatgttgcagcttcaggcttttgaacattacaaacaagggatagtatattacctatgc

SEQ ID NO: 17870 - DNA, 418 bp, Glycine max
  unsure (1)..(418): unsure at all n locations
tatccccaaagcgactctggcttagaaaaatgactttccatatttctcaccatatccttaaaagttcggtttcgtcgttctgccataccattcatgctaggttttcctacatagtgtattgcggaacaattccacactctttgagaaaaaatgcaaaaggtcctggacgttctcttgatccatcatatttgccattgtactcgccaccacgatcagatttgagagccttaattttctttccaagttgaagttcaactttatgcttgaaactcttaaaaagtctagggattgggacttcgcatgcatcacatacaagtaaccgtatctagagtagtcatctatgaacaagataaaatattgttgcctattccaagaaggtgtnggaaaaagatatcacatgcccgtatgtactaattct

SEQ ID NO: 17871 - DNA, 417 bp, Glycine max
  unsure (1)..(417): unsure at all n locations
gaacgcatgctgccccaanttatgaaacttgtcatacctctntcccggatcaggctcgtgcatctcaatcatttgccatgcagcgtacatagtgcaaatccatgaaaggagcaatattgtaacgccccaacccctgccacaacaaagaaacatgcatgcatgaaggccataacaatagaataatgatacagtataaacactccataataataattttattttctattcattgactatttaataagagtgtttttaggtatatacaagaaacaaactctggatacatatttattatgaagtgatgatgcatgaaaagagaagatgagaataccatcctagctctgacatggcgtatgggatacccagcacaccagctgcaacaacagcagtgacattgtgaaaagcatagtaccacca

SEQ ID NO: 17872 - DNA, 379 bp, Glycine max
agctttgaccatttgaatttctcgagagcttccgttgttcaatttcgagcgtctcgatatattatgtgcctgaatcggacatcctagtgaaaagttatgatcatttgaattgctcaagagcttccattgttcaatttcgaacgtctcgatatattatgcgcctgaatcggacatccgagtgaaaagctattaccatttgaattgctcaaaagattccattgttcaatttcgaacatctcgatatcttatgcgcctgaatcggacatccgagtgaaaagctttgaccatttgaattgctcaagagcttccattgtccaattgtgaacgtctcgatatattatgcgcctgaatcggacttccaagtgaaaagttatgacca

SEQ ID NO: 17873 - DNA, 381 bp, Glycine max
agcttctaaacggatctcatctagctcatttagttgcaactttctttcctctccagcctgatcaatagagaagttgcaggtctttacagcccagtaggctttgtgctctatctctacaggaagatgacatgccttgccaaagacaacccgataaggagacattcctatgggtgctttgtaggcagtcctatgcgcccaaagagcatcatctagcctggtgctccaatcctttctgttcggctgcacaatcttctcctagatcctttttatctccctgcttgaaatctcagtctgcccattggtttgggggtggtatggtgtgtgtcgcaacctaccctttggcgggcgagcgaggtgagggctcacgggtgcgtcttccat

SEQ ID NO: 17874 - DNA, 370 bp, Glycine max
atcttatgacatttggatgatcaagcctccgcagcacaatgatttcccttgacataaaacggacactttctggatccatattatcaaatcgaaccttcttgagtgcaacaattgtatttgtttcgagatcacgagctctataaacactgctgtaagatccttggccaatctgcatcatgataggaaagttaagtcattaagaaaaagctattgggaaggtttgaaaaatgtaatgttggtgatggagataataataataaataagaaagcaatggtggaggctgtaatgaggatttgccttatccaacttctcaaaggaatcagccctgcgaggtatccaaccaataatggcttcaccagcaactgctgt

SEQ ID NO: 17875 - DNA, 381 bp, Glycine max
atctgcttctcttttttttgtatttttttttttacttttgcatgtcttatttcaagggacattgtctctctttgctgaatttcttatttttgtgaagttgatggacatgtgaaatgtgaaaagtggattcgtgatgacaataatcgttctgaagagtggaaggcgacatggtggttaaacagattgatagggcgaaaaaagaaggtgacggtagactggccatatccttttgctgagggcaagttatttgttctcaccataagtgctggcttggaaggttaccatgttagtgtggatgggaggcatgtgacatcctttccctatcgcacggtgcatacccaaatcatatctccttctgtatgcatgcaggaatattgtatt

SEQ ID NO: 17876 - DNA, 380 bp, Glycine max
agctttgaatgcactattcaatggagttgacaagaacatcttcagactgatcaacacttgcacagtggccaaagatgcatgggagatcctgaaaatcactcatgaaggaacctccaaagtgaagatgtccagattgcaactcttggctacaaaattcgaaaatctgaagatgaatgaggaagagtgtattcatgacttccacatgaacattcttgaaattgccaatgcttgcactgccttgggagagaggataacagatgaaaagctggtgagaaagatcctcagatccttgcctaagagatttgacatgaaagtcactgcaatagaggaggcccaagacatttgcaacatgagagtagatgaactcattggttctcttc

SEQ ID NO: 17877 - DNA, 382 bp, Glycine max
  unsure (1)..(382): unsure at all n locations
agcttgaangcaagactatacgaggtatcttccttgggtatagcaatatctctaagggctaccgggtctacaacttccaaactaagaaactcgtcatcagtcgagatgttgaagttgatgaatatgcttcatggaattgggatgaagaaaaagtggagaagaacgttcttatacccgctcaactacctcaagaagaagatgaggaagaagacccaggtgaaccactttcacctccatcacaacaacaagatcaagaactatcatcaccagagtttactccaagacgaataagatctttggtggacatatatgaaacctgtaacttggccatacttgaacctggaagctntgaagaagcatcanagcaggaagtatgggtcaa

SEQ ID NO: 17878 - DNA, 369 bp, Glycine max
agcttgtagaccttctcttcttcaccctttcgaacataacccggtggttgttccacatacacgtcctctgtcaattctccgtgaagaaatgcgcttttgacatctagttgatacacattccatcccttttgtgctgctagagctaaaaccatccggattgtgtcccaccttgctaccggggcaaacacttcgttgtagtcaatcccttgttgctgagcatagcctttagctactagtcgggctttgagcttatcaacttcaccattctcatttaacttggttctaaaaacccatttcactccaatcttcttagcacctttgggcaaagttgtaagctgccaggtttaattccttttgattgcttcaatc

SEQ ID NO: 17879 - DNA, 382 bp, Glycine max
  unsure (1)..(382): unsure at all n locations
agcttgtgcctcttttcgtctggaatatgaatgtagcatatagatccaaagacccttaggtgctttgctgatggcttcttcccgttccaagcttcaattggagtcttgtcttttacagacttagttggacatctgctgagtatgtaaacagcagtgtagactgcttcagcccagaatgtgttaggtagtcccttttccttgagcatcgatctagccatctccataactgtgtgattctttctctcggacactccattttgttgaggagaatatgcgactgtaagttgtctctcaatgccttcatcctcacaaaatctttcaaactcgcgagaggtgtactctntgccacgatcgcttcttagtacttttatccgttttccac

SEQ ID NO: 17880 - DNA, 384 bp, Glycine max
agcttatcaacatctttcttggagaaagagttcttggggtcaagacatgagaagcaatcaagtataatgttacttccttcactaaagcggtgatccatctccacacatattttatcaatagcaacataaaaaatctctacacggtaatgatgaagattagtgatagtcctcccttctgctcttgaacgaccccgaactggtatttcgtcatccatatttggtaccagaatacttttagcaacacaaaatccttggacatcggcaaaaaaattattccagccactctctctcattgtgcccaaccgagctttgacaacatcaactaattccatggcattcacaatattaagatcttttctttgcaatatatttgaaagctcgttt

SEQ ID NO: 17881 - DNA, 377 bp, Glycine max
agtcttttcttgtttctctccccatttgaaaccagcatttttcttgagcacttcattgagaggtgctgccaatgtgctaaaatccttcacaaatcgtctataaaaacttgctaagccatgaaaactcctcacctcggtcacggacttaggtgtaggccattcttgaatagccctaaccttctcctcatcaacttgcactccttttgaactcacaacaaaaccaagaaacacaacatggttagtacaaaagatgcatttttcaagattggcatacaattgttcttctctaagcacagtcaaggcagattttaaatgatcaatatgcaaatcaagtgaagtgctatagataagaatatcatcaaagtacaccacaacga

SEQ ID NO: 17882 - DNA, 379 bp, Glycine max
  unsure (1)..(379): unsure at all n locations
ttgcatgcaagtcttacccaccttgctagtataaccagccttctcaatggcatccatgagtaaaacaagaccctcctgttatcttgaacattgngagcaaatcctccgtcatctccaacattacatgcatcttgtccatattttgccttgtaccccttaatacatgataaactgttctaccagaaataaccaagttaactgattgtcaccatatatagatcgctggtgagattgaaaaaatcatggaatttatgctatagataatatgcagtcaggaaaaatggaattaagattagctatcaaatcatatgtaatacctacctaagaacctaatattagcacagaaagtaatatctgaactcaccaattcacactcacc

SEQ ID NO: 17883 - DNA, 351 bp, Glycine max
atctttccctgctctctttggctgtttctataaatagtgatgtaagctccattggagcttggcggcctaggatcttcttcatcaatggattcctttgcttcttggaagaagaatggtcgtggaatggataaggaagagagagacgagatgccacttcaaggagaagatgagtgtacatgaagctcaccaccgtatgatgccctggattagagcttggatgaggaacgagatgaatgattggagaggatgataagagcacaaacctgcgtgctctaatagtactctgacaactgatggttaattgtcaaatgatcaacgttgatgaaatgcacacacatggcctctatatat

SEQ ID NO: 17884 - DNA, 372 bp, Glycine max
tgtttggcataaattcatgatccgagaatataatatagagaattgatagaatttggttgtattatatttgctcttatgcttcttatttaaaaaaatatgcgtcctttgactcttacacaccaagagtaatttattgttgatttccatattttatggttacatagatattcatattcttatcaaccaaattttagctaaataaaagtattgttttatatcttaattataaaatatataaaaacaaaatatgaccaaactttaatctaaaatagtaaattaattaaaaatataatgtatatttagtacttgtaacaaatataatatattatataaatgtataaaaataactcacttataaacgtataagtttgg

SEQ ID NO: 17885 - DNA, 384 bp, Glycine max
  unsure (1)..(384): unsure at all n locations
agcttcaaccaaggtgagatggaccatttcaagtgcttgaaagaatcaatgacaatgcttacaaagttgaactgcccggggagtataatgttagttccaccttcaatgtctctgatttatctctttttgatgcagatggagaatccgatttgaggacaaatccttctcaagagggagagaatgatgaagacatgaccaagagcaagggcaaggatccacttgaaggacttggaggacctatgacaagggctagagcaaggaaagccaaggaagctcttcaacaagtgctgtccatactatttgaatacaagcccaagtttcaaggagaaaagtccaaggttgtgagttgtatcatggcccanatggaggactaaatgacaccac

SEQ ID NO: 17886 - DNA, 370 bp, Glycine max
agcttcaacatcagtatcacttccagggtgctggaactacttcacatggacttgatggggcctatgcaagttgaaagccttggaggaaagaggtatgcctatgttgttgtggatgatttctccagattcacctgggtcaactttatcagagaaaaatcagacacctttgaagtattcaaggagttgagtctaagacttcaaagagaaaaagactgtgtgatcaagagaatcaggagtgaccatggcagagagtttgaaaacagcaagtttactgaatactgcacatctgaaggcatcactcatgagttctctgcagccattacaccacagcaaaatggcatagttgaaaggaaaaacaggactttgcaag

SEQ ID NO: 17887 - DNA, 375 bp, Glycine max
agcttcaaaggcttagacaagggactatgagtgttgaagaatatagacaaaaaatggaattactccttttaagagctggacttatggaggaggaaagaacaagcatagctaggttccttagtgggcttaatatggaagtgagggacaaggttgaactccttccatatagggacctagatgagctagtccaactttgtataagagtggagcaacaacttaaaagaaagccttcttcaaaatcttatggctctcactcttatccaaggaaggaccaagcctatggaattttaggggctgcaccttcaaaacccaaggaagataagggtaagaccatagagaaatacacccctaagactagttcccaagaaaggacta

SEQ ID NO: 17888 - DNA, 384 bp, Glycine max
  unsure (1)..(384): unsure at all n locations
agctttcttnccagcttcaaactttaatcttcatggaactcatgttggttcccctatctcttaccaaaattgcacttactcctaaaaaggaacattgttttataacaaattaaggaattttcactaaatgattttattaacaaataaatgtttaaagatgagacatagaatccattctcgattgtaagttctttttaatctaacaaataagttcataattttcaacttatcagagaattgtctaatacttaatatatataataatagtaatttcgataaagatattcatagataattatagtagtatcgtataacagtttgtaatatactttgtaagtagattntatgatagtgttttcgattaanaagtaaatttcaacaatt

SEQ ID NO: 17889 - DNA, 365 bp, Glycine max
agctttgatgcaacatttggagaggttaatgaaacaacgagatgatgcgctccatgagaggttggaatagagatcataatgaagaagaaaggaggagaatagggaatgatggtgttcctagacaaaaccgaattgatggtattaaactcaacattcctccatttaaaggaaagaatgatccggaggcctacttggagtgggagatgaaaatagaccatgttttctcatgcaacaactatgaggaggaccagaaggtgaagcttgccgccacggagttttccgactatgctcttgtgtggtggaacaagctacaaaaggagagagcaagaaatgaagagccaatggttgatacatggacggagatg

SEQ ID NO: 17890 - DNA, 426 bp, Glycine max
  unsure (1)..(426): unsure at all n locations
agtctttattcaactcaaacatggcaagaagacagtatatactaggcactgaagatttcttaaaccttatcacccgtaccgactattgaagaaagcttttaatgaaagctaggagaataaaagtgctccttgaccattagctagaaatgaagtttatgatcaggtgaaggacatcataactatctttgggaagacccaaagccatcatctaagactaacctatggaagaaaaggtcaatattttttatcttccatactggttcgatctacatgtatgtcattgtctagacgtaatgcatgtggagaaaantttttgtgatagtttaattggaacccttcttaacattaaaggcaagacaaaggatggtttgaaatgtcatcaagacctggttgacatggaaatacgagagcaattgcatttgatat

SEQ ID NO: 17891 - DNA, 323 bp, Glycine max
tacattacatatattacagcatttcagtgcactgtgaagtgtaaaacacaatttagattggatagaacagataaagggagaatgttcaattaccatagcatggcaatagctgaccccagatatgagtcgctgaaagaagaatccagcctgaatcataacaacgggttacaaactatcgcagaataagtacaaacttatagcattcaggtgtagaataagtaaacaaaataaataagaacctcatcctcggtaaaacgcccagcattgcagattattttaaagagctcttccccagatgcatattccattacaatagcaagatg

SEQ ID NO: 17892 - DNA, 414 bp, Glycine max
agtttgtttatatttgcaaccttttcgatgccagaaaacgttatcaatggaccggaaacaacatcgcgtgttactaaatacctcatgtaaggttctgcatgagcctccaaataaggaagtccttcgatcttaagtatttgatcatagacacccttgttgaagctgtcagccacggattttgagaccaataagactaacatcacaagtggaagtaacaagagatcattagagagctcaagcaatatgacacaaagagacactgtcattctcatggtgccaccaaggaaggaagcagctccaagtaaggcaaagagtcctctgtcgagatcggtaatcgtttcgaagagccggtcgaatagactgccataggcagcaccagcacgtatgaccggaatgaacagcccggatggaata

SEQ ID NO: 17893 - DNA, 445 bp, Glycine max
actattcacacaatttaacaagaaacaatgaattatcaactttgaaaattaattgcattcccatacctagatctccttctaaattccaccgaatttatatatgtttaaatgcatggaagcaaggattcaagactagctgtggatcttttattggtcttgatggttgttttttgaaaggctactatggtgatcatttgcttgcagcagcgggacaagatgcaaacaatgcattttttgtgattgcttatgcggtagtaaatgttgaagataaagataactggaagtggttcctcacattgttacatgaagaccttggagactgcaagcaatatggctgaaattttatgttagacatccaaaaagtgcaattcaattgttttgctttgatcaattcatatatagaatgttgtaattctgattgcctgcatgcatatgtgatagtttg

SEQ ID NO: 17894 - DNA, 407 bp, Glycine max
agtttcttgagagagtcaaagatcaaattgagaggaaaaataaaagctatgctaaacaagccaacaaagggagaaagaaggttgtcttcgaacccggagattgggtttgggtgcacatgagaaaagaaaggtttccggaacaaaggaaatcaaagcttcaaccaaggggagatggaccatttcaagtgcttgaaagaatcaatgacaatgcttacaaagttgagctgcccggtgagtataatgttagttccaccttcaatgtctctgatttatctctttttgatgcagatggagaatccgatttgaggacaaatccttctcaagagggagagaatgatgagggcatgaccaagagcaagggcaaggatccacttgaaggacttggaggacctattgatgaggacatg

SEQ ID NO: 17895 - DNA, 454 bp, Glycine max
  unsure (1)..(454): unsure at all n locations
tgaatcggacatccgtgtgaaaagttatgacgatttttatttctcttgagcttccggtgancaattgcgagcttctcgatatgtgatttgcctgaatcggacatccgtgtgaaaagttataccagttgaatttctcaagagcttccgttgttcagttttgagcgtctcgatatgtgatttgcctgaatcggacatccgtgtgaaaagttatgaccatttgaatttctcaagaccttccgatgatcaatttcgagcctctcgacatattatgcgaccgaatcggacatccgtgtgaaaagttatggccatttgaatttctcgagagtttacgatggttaagttcgagcgtatcgatatagtatacagctgaatcggacatccgtgtataagatttgaccattaggattcctcgagaacttccattgttcaatatcgagcttctcgacatattaag

SEQ ID NO: 17896 - DNA, 442 bp, Glycine max
tctctgtcttcatggaccaaaggtgtcattccctgcttgtttatatgaatccgttgcgacgaatgcatctctgtgaccgctataactgttacaaatcttgggctacaacgtactctccacgctctaaaactctcatcctatcccaaactgctcactatggatattagccacaacagtactagtggaactattcctcagcaaattgctaacttgtacagagacactcaattgataatgagtgctaataattctagaggtccaatccaccattacatgaggaagttggctagctcgtcaattctaaacttcgaatacactacactctctggctctattcctgaagagattgcatactaccagaacttgaagagtctattacttcaatggaatcaactttcaggtaccatacctccaacaactggaaggttgtccaaccctgtta

SEQ ID NO: 17897 - DNA, 371 bp, Glycine max
actactatagaaagacacttcaatctgtattaggcttctactggtgaaaaccgagttgaagcccgatgtagaatgtatgttgttacatcgatttaaaaaaccgatgttaacataaaaatgttaacatcggctttataaataactgatgttataaagaaagaagtacaacaaaatatgtgtatgcgtgagggacgttgacatcggttttctgctaaaaccaatgctaatatgttaatatgttatattaacatcactttttataggaaaccgatgtgaacgttcatcattcatgcacctattttgctgtaataatgtatgtataacatcgattatctataaataaccgatgttaacctatgtacattaacatc

SEQ ID NO: 17898 - DNA, 407 bp, Glycine max
ttgtttatccaatcagatgggacaattggctacccaattgaatcaacaacaatcccagaattctgacaagctaccttctcaagctgtccaaaatcccaaaaatgtcagtgccatttcattgaggtcgggaaagcaatgtaaaggacctcaacccgtagcaccttcctcatctgcaaatgaacctgccaaacttcactctattccagaaaaaggtgatgacaaaaatttacctaacaatttctgtgcaggtgaatcttcttccacaggtaattctgatttgcagaagcagcacattcccccgcttccattccctccaagagcagtttccaacagaaaaatggaagaggcagagaaagagatcttggaaacgtttagaaaagtagaggtaaacatacctctgttggatg

SEQ ID NO: 17899 - DNA, 460 bp, Glycine max
  unsure (1)..(460): unsure at all n locations
tgannattgagtgaggaaaanatgtctctcactaagcttattcattacttggtaagattacaaaatatatagagaaaagatggaagagagagacagcctactctcaggcctatctctgctaacttctcagataagcaaaatattacatcagtcatacatcaagtaaagcaagatattcaacactccccctcaagctggagcatataaatcatatgcaccaagcttggaacatatagattgaatcctaggtcctctcaaggacttagtcaaaatatctgttggctgatcattggaactaatgaactcagtgacaatctccttggacaatagtttctcccgaatgaaatgacaatcaatctctatgtgcttagttctctcatgaaaaacaggattcgaagcaatgtggagagcagcctgattatcacaatataacctcatntgcccaacttcacanaatctc

SEQ ID NO: 17900 - DNA, 474 bp, Glycine max
ctcagaacactcaagcttggaacctatgttggtgatatgctaagatggacgtgttgacttgtttactcctctaataaagagtacaacaaattttgtgtttgatgatttaggttttctctttttctttcttgttcatatgcaacgttcatttttttctcttatttgcttctattctatctcctatctctatatatttggcatgggtgtcttcgactatctcacgttccaattgagatgagagataagaatttatctaatatttgtgtcttttttatacctgtatataataatcacatttttatactataattaaataataagataaattgtataaactttagcacaatagaaatgcagacgcgagaactattactaaaaatacatatagaatttattaattttgggtaatagttaacaaaaatcaaaagagtgtagtggagatggtgacattttaaaaagttaatagcaaaagag

SEQ ID NO: 17901 - DNA, 411 bp, Glycine max
tttcttgctttgaaaacttcccttcaccctaggccttagaaactacaatggttgagtgagaatggggagctagttgtagatatacaagttttgctatgctttttcattggaaaatatgttgatgagatactgtttgatgtagtccctatggagcctagcaatctcttacgtggaaggccttggcagtatgataaggatgttgttcataatggtgtcacaaacaaatttgcatttgtacataaaaggaaaaaggttaccctcacacctatgtctccaagtgaggtttgaaaggatcaaataatatatgagagtgataagagaacaagagactaaagtgaaactttgtaacataagacaccaaactgaaacatagataaagtatcttattacacaatttgactattattacta

SEQ ID NO: 17902 - DNA, 442 bp, Glycine max
  unsure (1)..(442): unsure at all n locations
tatagttattggagggagaataaaacaatccaaaatttattgtacctttcaagtaacgaagaattctttttgcggcttttagattaggagaggtaggagcctccataaagcgacacacaactcccaccgcatatagaatatcgggccttgtattggttagataccttanactccccacaagactcttgaagatcgaggagtctaccttctctccttcatcaaactttgataacttcaagccaccttccataggtgtgttcacaggattgcaatcaagcatattaaatttcttcaacacttcttttgtgtacctttcttgtgagacaaagatacaccattctttgtttgcttcacttccattcccaagtaatatgacatgagtcccatatctgtcatatcaaattcacgagacatggactccttgaagtcttcaaacaaattt

SEQ ID NO: 17903 - DNA, 467 bp, Glycine max
  unsure (1)..(467): unsure at all n locations
tataaaactaagcttacaagcaagcttccatcacaatgattggccaacattaataatgtgaagaggatgcttgaatatatgggttaaatccttctgtgcataaaccgagtcgcacattccgcagatcaacaacaaaatctgcatgtacccgatcaaagtgctttcaggcttcaccatcagatggatggcgtaacatgcctgaagatcttctattctcatagtgccatgacatttgtcttgcagtttgtattgatgcaaatagtctttacaaccttggaattataggcaaataaaacatctcctttattagaactggttttttgttgcttgttccaacagtcttcgcacaatacctgngcttgttacanaaattgcattcaattaaagctccatcattgttataatacaacatgaagccttccacaaaacagtcaatcctcttagcctccaatcccaacttcgatact

SEQ ID NO: 17904 - DNA, 446 bp, Glycine max
  unsure (1)..(446): unsure at all n locations
ctcaagctgcctcccttttagggcattttctgccacaatctagttgcttacaatcgttacctttgcattagtaaaaccaatcgcatgctaatatgtaaaatgtaaaatataataaaagtaaagaattaaatatgtactaatggttagtcaatttctcatctcatttgtgttgacttgtggcatttaacgaatattctcttctcttattgacggacatacactcactacatgaattctaattctacttgcttatgaaggtaactctgactataataatggtttaagtaaataatatataacggaaaaattataaatgtcgtctttattaaagggtgacagtgaccaacgtacttaattatcaaaatgaaatataaataagataataatgttagatcactanggctaaacctttgtcaagatgtgaatcaatacttgccattgatcct

SEQ ID NO: 17905 - DNA, 411 bp, Glycine max
  unsure (1)..(411): unsure at all n locations
agctttgagccaattcaaacgacatattctttttactcggatgtctgattgagtcctgtaatataacgagacgctcgaaattgaatattgaacctctgaggaaattcaaacgacaataacttttttctcggatgtttgattgagactcgtattatatcgagacgctcgaaattgaatgttgaagctctgagccaattcaaacgacaataactttttactcggatgtctgattgactctcgtcacatatcgagacactcgaaattgaatgttgaagctctgagccaattcaaacgacaataactttntactcggacgtctgattcagtcctgtcatatatcgagacgctcgaaattgaatgttgatgctctgagcaaattcaaacgacaataactttntactcggatgtctg

SEQ ID NO: 17906 - DNA, 477 bp, Glycine max
  unsure (1)..(477): unsure at all n locations
ggaccttaaaactaagcttaancattcaatttgagcgtctcgtaattttacgggactcaatcagacatccgagtaaaaatttattgtcgtttggattggctcagagattcaacattcaatttcgagcgtctcgatatattacgggcctcaatcagacatccgagtaaaaagttattgtcgcttgaattggctcagagcttcaacattcaatttcgagcgtctcgatatatgaccggactcaatcagacatccgagtaaaaagttattgtcgtttgaattggctcagagcttcaacattcaattttgagcgtctcgatatattacgggactcaatcagacatccgagtaaaaagttattgtcgtttggattggctcagagattcaacattcaatttcgagcgtctcgatatattacgggactcactcagacatccgagtaaaaagttattgtcgtttgaattagctcagagcttcaac

SEQ ID NO: 17907 - DNA, 462 bp, Glycine max
  unsure (1)..(462): unsure at all n locations
tgactattactttatacattcaaccaatgagagaaatatgtctatattcatttaaagactgtggatgggttgttttaggaataagagccaagaacgaggcattgctgcctatagggaagctaccatgaatatggaattcatccacaaatctcctgaattcaggtttcaaaaccccccaaaattccttaataaaattgaaattaaagccatttggccccggacatttgtctccaccacaactccaaacaacatctttaagctcttggtctgaaaaaggggcagtcatcccctctttgcctctgatcaatcatagggaaatataccccatccagagaaggtctgaacaatttatcttcagtaaatctatggagaaagtatntgagaacttcattcttgactaaattaggctgctgaacccatacaccatcaatgaagattccctgacaagcattgaagtttctt

SEQ ID NO: 17908 - DNA, 458 bp, Glycine max
  unsure (1)..(458): unsure at all n locations
tgtagcanatntaattacagaagcaggtgcaaatcgtgtacttgcttgtgacctccattctgggcagtccatgggctattttgatattccagttgatcatgtgtatggccaggtaacggattattatgtcactagcatatagtaatagcatggaagaataaaaagcatttaatctattaaactcaaacaaacatggcttggatgtgttgtatattagtaatttgtaattgatagtccatccaataatttgttaatttattgtatttatgcatctcaagtctgaattgaaatgaagggacaaccttctggaaacatgcttattttactgtttatagttatatgatcatttaaatttacgatttctgtagtaaagaaacttcaaatctagttttctttagacgtgctaaaatcttctattgttctatttatcccagatcagtcacacatggactctaatg

SEQ ID NO: 17909 - DNA, 390 bp, Glycine max
  unsure (1)..(390): unsure at all n locations
agtttgtaattcttgatccgcagataacataggtggtaaagtttgggactggaacgagtcaccaatggctttcttgaggaaagagaaataaaatgtcagatgaattttactgtgagatggaagatccaacttataagcaacaacaccaaccttgtttaacacctggaaaggaccataaaaccaaggggagagtttttcattaatccttttagccaaggatcttctcctataaggttgcatcttcaagaacacccaatcaccgactgcatattctatgtctcggtggcatttgttggcatttgctcacatgatatcttgagacttcaacaaattttctcttagagtagccaataattcattccaagaaattnttagtttattgacttcttc

SEQ ID NO: 17910 - DNA, 450 bp, Glycine max
  unsure (1)..(450): unsure at all n locations
tcttagccaacttgcttcctcactagcagttgctagtgctatcatctcagattccatagtggactgagctaagatcatttgtttctttgacttccaagaaacagccccaccagctatgctaaatatatagccgctggttgctttggaatcatctgagagagtgttccaatctgcatcgttgtatccttcaagtacagcgggaaaccttttataatgtaatccaagatttatggttcttttaaggtacctcattaccctttcaatagcgtgccagtgctccatactaggtctactggtaaacctgcataataatcccacaacataggctatgtcgggtctagtacaatcagtggcatacctaaggctgccaatgatacttgcgtactcagtttgtcgtataccttcaccagtgttcttaaacagttntacactnggatcatatggtgtact

SEQ ID NO: 17911 - DNA, 455 bp, Glycine max
  unsure (1)..(455): unsure at all n locations
gaacttaaatctaagcttcatgtaaagatgggcgaagagggatttattactttcgaacttatacacacagatctaatggggtcgacaaaaacacctagatatagtggatgtatagatactatggcagtatatgatgattacactcgatatacttggttgtatttcctaaaagagaatagtgaagttacgcataagtcagntattttctctgacatggtggagaaagaccgtgatggaacaatcaaatgcttgacgagcgactatggatgagagttcaagtcaacagatttcacagttttttgtcctgagaaaatggatccatatgcaatttacttgtccagatacactgcaacaaaatgcagtggctgagaggaaattatctcatctaactgtagtgagcttgtcatggatacatgacaaaaatctgcctcgagagatatangcagaagcaattc

SEQ ID NO: 17912 - DNA, 413 bp, Glycine max
agtttattctaagttcaacctaccaccctcagactgatggccaaactgaacggaccatttagtcactaaaggaccttttaagagcatgtgtattagaacaaaaagggagttgggagtgttttctgttgttgatagagttcacctataacaatagttttcattctatcattggcatggctccatatgaagctttgtatggtagaaggtgtaggacacccctgtgttggctagaacctggagagaacttcaccttaggacctgaagtggtacaacaaaccactgagaaggtcaagttgatccaagagaggatgaagattgctctgagtaggcaaaagagttatcaagataagaggaggaaagacatggaattcgaggctggtgatcatgtattcttgagagtcacctcttggact

SEQ ID NO: 17913 - DNA, 437 bp, Glycine max
  unsure (1)..(437): unsure at all n locations
ntatgcaagtcagctttcaagaggcatctcggagatttcttttttttcatatcngcgcaaaatctcttgaattatgaagatgttgtccatcatctttttgttcttaatgaaagcagtttgagtttccccaataatagtctcaagcactggggctatgcggttggccagaattttagacacaatcttgtataacaaattacagcacgatatgggtctaatatgattaacctgtgaggcctgatcatgcttaggaataagcgcaataatagcatggttgagctgctttagaatttctccagttgtaaagaattcattatccgcttcaaagatatcatgaccagtgatattccaagccttcttgaagattaaaacattgaaaccatctggcccaggagctctattgttattcatcacagacataacgttccaaacctctt

SEQ ID NO: 17914 - DNA, 412 bp, Glycine max
agcttgctctacttgaaaagcctcttttgaatggtgactctaatgtaagcaacaattatgttcccattaaggctagaggaaatgaaaatttaacctggtattcaaatgttggatttttcagcattcttactttctcatggatgattcctttaataactctagggaatgagaagactttagagcatgaggatctcccacatcttgctactgatgacagtgtggatgggattttgccaacttttacaaacaaacttgagtcagagtgtggtaatgtgataacaaccctactctagtttcataacaaccctacgaaaatatgaggttactgcacacatgaacaacactacactagtgtgataacaaccctgcttacactatgcaaacaaccctgcttccagtgtatgtttgtgat

SEQ ID NO: 17915 - DNA, 454 bp, Glycine max
tctcgagaaattcaaatggtcataacttttcactcatatgtttgattcaggcgcataatatatcgagacgctcgaaattgagcaacgaaagctctcgagaaattcaaatggtcataacttttcactcggaggtccgattcacgcgcataatatatcgacacacccgaaattgaacaatagaagctctcgagaaattcaaattgtcataacgtttaacacggaggaccaattcacgcgcataatatatctagacgctcaaaattgaacaacggaagctctcgagaaattcaaatggacataacttttcactcggaggtccgattcaggcccataatatatcgagacactcgaaattgaactacggaagctctcgagaaattcacatggtcataacgtttcattcggagatccgattcaggcgcataatatatcgagacgctcgaaattgagcaac

SEQ ID NO: 17916 - DNA, 391 bp, Glycine max
agcatgctttacttgaaaagcctcttttgaatggtgactctaatgtaagcaacaattatgttcccattaaggctagaggaaatgaaaatataacctggtattcaaatgttggatttttcagcattcttactttctcatggatgattcctttaataactctagggaatgagaagactttagagcatgaggatctcccacatcttgctactgatgacagtgtggatgggattttgccaacttttacaaacaaacttgagtcagagtgtggtaatgtgataacaaccctactctagtttcataacaaccctacgaaaatatgaggttactgcacacatgaacaacactacactagtgtgataacaaccctgcttacactatgcaaacaaccctg

SEQ ID NO: 17917 - DNA, 407 bp, Glycine max
  unsure (1)..(407): unsure at all n locations
tttctttttatgcactattcaatggagttgacaagaacatcttcagactgatcaacacttgcacagtggccaaagatgcatgggagatcctgaaaatcactcatgaaggaacctccaaagtgaagatgtccagattgcaactcttggctacaaaattcgaaaatctgaagatgaacgacgaagagtgtattcatgacttacacatgaacattcttgaaattgccaatgcttgcactgccttgggagagaggataacagatgaacagctggtgagaaagatcctcagatccttgcctaagagatgtgacatgaaagtcactgcaatagaggatgcccaagacatttgcaacatgagagtagatgaactcattggttctcttcaaaccttngagctatgactctcggat

SEQ ID NO: 17918 - DNA, 370 bp, Glycine max
  unsure (1)..(370): unsure at all n locations
ntccctcgttgaacaaataccgataagtttgatagtttccatcttgggcctttgtgccacaactatcgtgaatgggagagaaatgttcatctaaagcatacaagcccctaatattatcaaatcctaaaattcgagctcctagggagcaaaataatgtgagtcttctagagagggcatcaactaccacatttgttattccctttttgtattcgataacatatggaaattgctctaggtactctacccattttgcatgcctcttgtttaactcgctttgccctctaatgtacttaagtgattgatgatcactatgaatgacatatcccttggaaacaaagtaatgttcccaagcttggaaggctattattaa

SEQ ID NO: 17919 - DNA, 417 bp, Glycine max
agctttcactctgaggcccgattcaggcgcataatatatcgagacgctcgaaattgaacaacggaagctatcgagaaattcaaatggtcaatacttcgaactcggaggtcctattaaggtgcataatatatctagacgctcaaaattttacaatggaagctctttggctatacaaatggtcataacttttcactcgaaggtccgattaaggcgcataatatatcgagacgctcaaaattgaacaatggaagctcttgagcaattcaaatggtcataacttgtcactcggaggtccgattcagctgcataatatatcgtgacgctcgaaattgaacaatggaagctcttgagcaattcaaatggtcataacttgtcactcgaaggtcggattcaggcgcataatatatcgagacactt

SEQ ID NO: 17920 - DNA, 452 bp, Glycine max
  unsure (1)..(452): unsure at all n locations
ntgatgtaacatttggagaggttaatgaaacaacgagtatgatgcgctccatgagaggttggatcaaatggagaatagagaccatatgaattgctcaagagcttccattgttcaatttcgagcgtctagatatataatgcgcctcaatcggacctccgagttaaaagttatgaccatttgaaatgctcaagagcttccattgttcaatttcgagcgtcacgatatattatgcacctgaatcggacctgcgagtgacaacttatgaccatttgaattgctcaagagcttccattgttcaattttgagcgtcacgatatattatgcacctgaatcggacctgcgagtgacaacttatgaccatttgaattgctcaagagcttccattgttcaatttcgagcgtctcgatatataatgcgcctcaatcngacctccgagttaaaagttatgacca

SEQ ID NO: 17921 - DNA, 458 bp, Glycine max
  unsure (1)..(458): unsure at all n locations
ccattcctagactngatgattngcttgatgagtttcatggtgccnatatcttttcaaaaattgatcttacaagtaggtatcaccaaatcaggatgaaaaagggtgatgagtggaaaaccgctttcaataccaagtttggtttgtatgaatggctagtgatgccttttgggctcactaatgcaccaagcacctttatgaggcttatgcatcatgtcttaagggatttcataggtagatttgtagttgtttattttgatgatattttagtgtacagtagaagcctagatgatcacttatgaaatctcagacaagttctttcagtccttaggaaaaacaccctctatgcaaatatagagaagtgtactttctgtgtagaatatatagttttcttatggtttgtagttggtagaaatggagtccaagtggaccctgagaaaatcaaggccatccaagaatgg

SEQ ID NO: 17922 - DNA, 396 bp, Glycine max
  unsure (1)..(396): unsure at all n locations
ntcagaagatgtaagttcaacatgcttttcttccatttctgttggaggatttgtgggatgctgtcttatcattttttggtatgtctaacttactggactggttctcctactgtaggtcgatctagagagaattgcaaaagatactcatggatatgttggtgctgaccttgctgccctttgcactgaagttgctcttcaatgcatcatggagaaaatggatgtcatcgatttggaagatgagagcattgatgctgaagtactaaattctatggcaatgacaaatgagcatttacatactgctctgggaacaagcaatccatctgctttacgagatactgttagtagtgtttttaattcttttaaatttaaattattatctagctggtgaggctttct

SEQ ID NO: 17923 - DNA, 455 bp, Glycine max
ggcataatgaattaatgtacataccgcataaagggcttaggaaagtctcatagcattgtggagtgaccaagctgaggccctgtggtcgacacacacggcaatgatcacgcattgaaagcttgccatgaaacacattaagccagtgctcgtgtaaggagctggaaatgtcttgcttatgtctttctgaaaaacgtaatgatataataattctcttaaagaggaaaattaaactagttaagatagattgatgcttaattacttgaattatgaaccatgctgcccaaacaagggtgctaagaattacgaccaaagggcctaggaacatgtttcctttgccagaagagctagttccttccattttctcagcatatctccagtgaatacttgattggcctaaaccaatggtttttccatggtaaaatgacaaaagcaaggctccactcacacacaatatt

SEQ ID NO: 17924 - DNA, 364 bp, Glycine max
agctttgtagccaattcaaacgacaataactttttactcgaatgtctgattgagccccgtaatatatcgagacgctagaaatggaatgttgaacctatgagcctattcaaacgacaataactttttactcggatgtctgattgagtcccataatatatcgagacgctcgaaattgaatgttgaacctctgagccaattcaaacgacaataactttttactcggatgtccgattgagtgacttaatatgtcgggacgctcgaaattgaatgttgaacctctgagcaaattcacacgacaataactttttactcggatgtctgattgagttccgacatatatcgagacgctcgaaattgaatgttg

SEQ ID NO: 17925 - DNA, 411 bp, Glycine max
cattcaatttcgagcgtttcgttatattacgggtctcaatgttatcatccgagtaaaaagttatagtcgtatgaattggctgaaagcttaaacattcaactttgagcgtctcgatatattacgggactcaatcagacatccgagtaaaaagttattggcgtgtgaagcggcttagagccttagcatacaattatgagcgtctcgatctagtacgggactgaatcagacatccgagtaaaaagttattgccgtttgaattagctcacaggtgcaacattcaatttcgagcgtctcgatatattacgggactcaatcagacatccgagtaaaaagttattgactgttgaattggctcagaggtgcaacattcaatttggagcgtctcaatgtattacgggactcaatcagaca

SEQ ID NO: 17926 - DNA, 411 bp, Glycine max
ttcttatgctgcaaatatttacaatagacctactcaacctcagcagcaaaatcaaccacagcagagcaattatgacctttccagcaacagatacaaccctggatggaggaatcaccctaacctcagatggtccagccctcagcaacaacaacagcagcctgctccttccttccaaaatgctgctggcccaagcagaccatacattcctccaccaatccaacaacagcaacaaccccagaaacagccaacagttgaggcccctccacaaccttccctcgaagaacttgtgaggcaaatgactatgcagaacatgcagtttcagtaagagaccagagcctctattcagagcttaaccaatcagatgggacaattagctactcaattgaatcaacaacagtcccagaattctga

SEQ ID NO: 17927 - DNA, 393 bp, Glycine max
  unsure (1)..(393): unsure at all n locations
ttctaatccaatcagatgggacaattggctacccaattgaatcaacaacaatcccagaattctgacaagctaccttctcaagctgtccaaaatcccaaaaatgtcagtgccatttcattgaggtcgggaaagcaatgtaaaggacctcaacccgtagcaccttcctcatctgcaaatgaacctgccaaacttcactctattccagaaaaaggtgatgacaaaaatttacctaacaatttctgtgcaggtgaatcttcttccacaggtgattctgatttgcagaagcagcacattcccccgcttccattccctccaagagcagtttccaacaaaaaaatggaagaggcagagaaagagatcttggaaacgtttagaanagtagaggtaaacata

SEQ ID NO: 17928 - DNA, 451 bp, Glycine max
  unsure (1)..(451): unsure at all n locations
tgaggcgagagttaatgaaatctctncttatggaactccttcctaagaatcctagagtcatgagatctcttcactttctcattgtaaatcttggagttctcataggcttctaagcagatcttctcaagttatagcaattgaagcttcttttccatacctgcttcatcaaatgccatgttacaacccttcactgcccaataagcaaggtgtgcagtctctaccagaaggtggcatgccttaccaaaaaccactctattgggagacatccacaaaagtgtttggtaagcagtcttgtgggcccgtagagcctactcaagtaacttgctccaattctttctattgagttgcactaccttcaacaacacttgcttgatctctctattaaaaacctccgcttgcccattagtttggggatgataagctataacaactctattcacaaccccatact

SEQ ID NO: 17929 - DNA, 404 bp, Glycine max
  unsure (1)..(404): unsure at all n locations
tgtttgttatcaattacacacatattgtaatcgattaccagaggagtttttcagaaaacattctcaatagtcacatctttttatctgatttttaagtggccatcaaaggcttatatatatgtgactagagacacgaatttgataagagttttgaagaacaaaaaggtcttatcctcttaacaagcaaaattgttttatcctcttacaaattccttggccaaaacacttgtgattcaataaggaattatttaagtgctcaaattgttcaatctatctctttcaagagagatttcttcttctcttcttctttattctgaanagggattaagagactgagggtctcttgttgtgaaaggattctaaacacaaagganagaatgtccttgtgtgtttagaacttgtaa

SEQ ID NO: 17930 - DNA, 436 bp, Glycine max
tgatttagtataataagaagcacggatataaatatcttgatgcctactattgatatatagcattgaccatacatgaaactagctaaagagaatggaaactattgataatagtacactccatagatagtcatgctgtgtaaaccactactacaagaaagcactttaaattatagtattagctagtaatttctatgattgtgttgatcatggtcgccctcacataactgtcaggtgccctcacttttaattgtgaatttcctgctgccacattaaaggttgccaatgttctgccatcacatgtatgattttctcagccaattttgccaccaattccttgacatgggttggcagccagtttcggaccctttgatggacactgaattgacaacagcagctccacccacattggtgatcaaaactaggttgaattatcagt

SEQ ID NO: 17931 - DNA, 407 bp, Glycine max
tcttcttttgtgtgggatacccaatgtgagcatagtttccagacccttaaggaaagattgacgaccgctccagtgctagttttgcctaacccgagagaaccttttgaggtgtattgtgatgcatcaaagatgggtttaggtggagtgttgatgcaaaatggccaagtggtggcctatgcttctagacaacttatgactcatgagaggaattatcccacccatgatctatagttggctgttgtagtttttgcccttaagatttggagacattatctgtttggctctaagttcgacgtgtctagtgatcataagagccttaaatacttgtttagtcagaaagagctaaacatgagacaaatgagatggttagagtatcttaaggattatgattctgagcttagctacca

SEQ ID NO: 17932 - DNA, 378 bp, Glycine max
agtttctatactttatacaagcatgaagctttcataccacttgtagacaagtggcctcacatatcttaagaaggggggttgaattaagatattgcaaactatttcccaaattaaaattctatttcactttctatgcaagatacaaattcccttataaatgaactcttaaataatgattcaaatagaacaatctaactataaatataaaacaataatatataaaagagtttaacggaagagaaaatgcaaactcggatttatactggttcggccacacccttgtgcctacgttcagtccccaagcaacttgcttgagagttccactatcttgtaaaatccttttacaagttctgaacacacaaggacaatccttccttt

SEQ ID NO: 17933 - DNA, 358 bp, Glycine max
tctattttgctgagtgctgagcataaatttatagcctttattttgatttcttttttacctcttgtactcaactgttgacagatcaaagaggacaagtattttattcacaaccacttagcatttgtggttaagtatcatactgatccagagttagatttgtcaaggattgtaggatttgaggttacaccattcaggttgtattataattcttttccacctagtttctaatatagtcttgtacttatctattaatcttatggctaataataactgtacattgaaatgattcttatgaattcagcgtaaagcatgaatatgaaagttaatggaatgagaattcccgcttaactacctgtga

SEQ ID NO: 17934 - DNA, 361 bp, Glycine max
ttgctaaggtcggatatgcgcagaagatcttcctgcgaatatcttgattacagatcgcgccagaattcttcggctttgtacatccaaagtatactttgacgtatggaggtggccaccgagtgaactatccacgagacaaccatattgttacatcgacgccacgctccatgcattctatctgttttgacaggttcaggcgcgctgtcatttatgaactctactttgttcttggctctcaatgcaatgatcatggacctgctccatgagtggtagttactcgaatgtaagactgtggaaacacggactgtggccggtttctcgctcgtatggatgcagagataactctccatgttgttgatgg

SEQ ID NO: 17935 - DNA, 358 bp, Glycine max
atttatttgcaacggcaactatgttggtgataaagttgaaaggaaaaacacatgcggcagatgtcactttattggtggtaacttagttacgtggatatgcaataaactagactcaactacattgtccactgttgaagttggatatatgacaacaacaagttgatgtactcaacttctatggataaagaatcagctcgaagactacaacatctatgatagtcaaattcccatctattgtgataataaagctgctataagtctttctaaaaatccaacattgccttctagatctaaacatatacaaattaagcatcatttcatacaacccttaaccaaagacatcacgttctcaatggga

SEQ ID NO: 17936 - DNA, 379 bp, Glycine max
agcttcttagtctcagatgatgcagctgagtttgtagctacctcatgcactcctctaatgactatagcatcatttatggcgctaaactgctgggagttagaagccatcttctcaattaaattcctggcttcagcaagagtcatgtctccaagggctccaccactggcagcatctatcatacttctctccatattactgagtccttcgtaaaaatattggagaagaagctgctctgaaatctgatggtgagggcaactggcacatagttttttaaatcgctcccagtactcctacaggctctctccactgagttgtctaatacccgagatatctttcctgatggctatggtcctagaagcagggaaaattttttctaaga

SEQ ID NO: 17937 - DNA, 426 bp, Glycine max
tgacaagaaagcagaacctggaatttttgtaggttatagctcaacttcaaaggcctacagaatctacctaccatagagcaacaaagtaatcatcagcagggatgtcaaatttctggagtcagatagttgggactggaaaaatgataagaggtccgagtttcaggaggagaatgaagatgttgatgaagaacccataagaggaaccagatcactttcagacatctgccaaaggtgtaatgttgctgtgatggagcctgagggatatgaagaagctacagctgatcagaaatggataaatgcaatgaaagaggagcttacaatgattgaaaaaaataaaacatgggagctggtggacagacctaaccacaagaaagcgattggtgtcaagtgggtttatagaaccaagctcaatccggatggttctgt

SEQ ID NO: 17938 - DNA, 373 bp, Glycine max
agtctccgttgttcaattttgagcgtctcgatatattatgcgcctgaatctgactttcgagttaaaagttatgaccatttcaatttcacgagggcttctgttgttcaattttgagagtctctatatattatgcgcctgaatctgacatccgagttaaaagttatgaccattcgaatttctcgagagcttccgttgttgaatttcgagcgtctcgatatattatgcgcctgaatcggacatccgagttaaaagttatgaccatttgaatttcttataagcttccgttgttcaatttcgagcatctcgatatattatgcgcctgaatctgactttcgagttaaaagttatgaccatttgaatttctcgagagctt

SEQ ID NO: 17939 - DNA, 407 bp, Glycine max
tataagaaattcaaatggtcataacttttaactcggatgttcgattctggcgcataatatatcgagacgctcgaaattgaacaacggaagcattagagaaattcaaatggtcataacttttaactcggaggtctgattcaggcgcataatctatcgagacgctcaaaatttaacaacggaagctcttgagcaattcaaatggtcataacttttaactcggatgtccatttcaggcacacaatatatcgagacggttgaaattgaacaacggaagctctcgagaaattcaaatggtcataacttttaactaggatgtccgattcaggcgcataatatatcgagacgctcgaaattgaacaacggaaggttatgagaaattcaaatggtcataacttttaactcggatg

SEQ ID NO: 17940 - DNA, 381 bp, Glycine max
agcttgatttgaattaccatttcaaatgagcaccaattacgcttgcacccagaagagctacaagtcaagctcaaaacacagatagcaaacctcctcaactctagagttccatcaccaaacatctcccaccattctccaggttgcataacttttctagtgtcctttgcctcttccatagacaaaaaccctctagcaaaatcaaactcaacaagttgcaaattaattttttttcctttctacaacatccttgaccaatcttctcatacacatgtgcaacccttctttcacctgagggtcatcatgtctaaaactaggtttataatgcaaatgaggattactataatacgcagttgtatgcaaaggcttgtgaagctaatgatc

SEQ ID NO: 17941 - DNA, 416 bp, Glycine max
tgaatttggagaaatcctttttgagccgagtagccttattgtagtatctcgtcatgtgtggatcttcggtttgatattcttcattcaactgacctttgacgagattggagtcactccaacactttaggaacttagctcatatttgcaatgccacctaaaagggctttggacttggcttagttgtttgtcgtctcgaacttaaacctctatgattgctctagaattacttcatttgggctttctaggatgactccagccccactcccttttgtattggatgagccatctacacagagcttccaccacttgaattacaattttgtattgcttgatagcttgattacaaattttactatgcactgagacttcattgacccccttgattcatattttagcccaaacttggacaatttgat

SEQ ID NO: 17942 - DNA, 375 bp, Glycine max
taagcttgggatgaaacaaatgcgattcatcaaaaattacatctctactgagaagaactttcttttcagatggtgaccagatcctatagcctttcactccatcaccataacccatgaacagaccctttcttgatctaggtaccagttttccttcattgacatgataataagcattgcagccaaatactcttaggtttgagtagtttgctgttttgcaattccagatttcaataggagttttaagtcctatagcagtaaagggcgttctattgatcagaaaacaagttgtattgatagcttctccccaaaaacttctgttgagaccaacattatacaatagacatcttgttcttaccaggagtgttctgttcattc

SEQ ID NO: 17943 - DNA, 376 bp, Glycine max
  unsure (1)..(376): unsure at all n locations
agttggggcatagaggtagaccctgcaaaaatagctgttatttcacaattgccttacctctcttgcgtgtgagaggttcgttcttttcttggtcatgcacggttttataggagctttaccaaggattttagcaaagtggcccttccactatccaatctgttgcaaaaggaggtggagtttgattttgatgaccggtgcaaagaggcttttgattgcctcaagcgtgcggtgactaccacccctatcattcaggcacctgattggacagccccatttgagctaatgtgcgatgcatccaattacgcattgggggctatccttgctctanagattgataagctacctcaggagatctactacgcttccagaactttgg

SEQ ID NO: 17944 - DNA, 379 bp, Glycine max
agcttcactctgctcttcttttacttccacattagttatagtctatattgttttatgtatacgtgcatgatgagctacctcaaacttctaaattatgatcaattcacacgtgcgttatatcattctgattataagcacaacctacaattccctccaaaattttgtcacaagaaagcacttgtaagtttataaatcttgcctgcccacgaggtttagattgcttctttgcccaagtatgattaggctgatatgcccgcattgctctgtctctatctctggtgccttccatggattgctggtttatgtttgcggaccccagtaacacatattcatcatccactatcattccttttgaatgaacataaatcatgaatctccg

SEQ ID NO: 17945 - DNA, 371 bp, Glycine max
agctttggacaaggtactttaccaagaatgtgaaagtgggaataatagcaacaatgtgttgagttggaatcatagggtaaacattgctgttggtttggcttctgtgttgagttatttgcaccaagagtgtgagcaaagggtgattcacagggacattaagactggtaacatattgctagatgggagcatgaacccaaggttgggtgattttggtttggcaaagcttatggatcatgacaagagtcctgtttcaacactaactgcagggacaatggggtacttagctcctgagtatcttcagtgtggaatggcaaatgagaagactgatgtgttcagctatggtgtggtggttcttgaggtggcttgtggaa

SEQ ID NO: 17946 - DNA, 417 bp, Glycine max
tcgcaaatgtacttggttgttgcccagtttcatcatatcttccgtaatacttatcacctctatcatatctaataattttcacatttatgtctaattgtcattttacttcattgtagtaaatttctaaggaatccatttcctaagaaatctcgggcaataaatagacataaccgtaacgtgaataatcatcaataatggtgataaagtatcattcctttttgaaagaactaacaccaaaaggtccacaaatatcagtatgcacaatttcaagaagttgagtgcttcttgtagctcttttctttgtatgttttgcttgtttttcccttaatacaacccacacaaatatttagatccgtaaaatctagataaggaagaatttcattctttattaatctttccatcctttctctaaaaatg

SEQ ID NO: 17947 - DNA, 424 bp, Glycine max
  unsure (1)..(424): unsure at all n locations
tcaacctaggggagacggaccattccaagtgttggattatagatcaacgacaatgcctacaagattgacttgcctaatgagtataatgtaagtgccacttccaatgtgtctgatttatctcttattgatgcagatggaggagccttggatttgaggacaaatccttttcaagaaggagggagtgatgaggacacaactaagggcaaggaccatgaagcacttgaaggcccatgaccagaggcatacttaaaaaggcccaacacagtgatgaggacacaactaagggcaaggaccatgaagcagttgaagggcccatgaccagaggcagacttaaacaggcccaacacatcatagagataaggctggtcattngtatagctgccattgatgatgaatgaaggcccatgtttccataatttttatt

SEQ ID NO: 17948 - DNA, 378 bp, Glycine max
agcttttagtggtatttgactaattatggtttattgtacttgacttattagggtttagtgttacatgaccaattagggtttagggttatttgaaaagatagggttgcttgactaattgggtttaggggtatttgacaaataagggtttagggttacttgacgaatttggatttaggggtatttgactaatgaggatttatatgtagttgagttaattagggtttagtgttacttggccaattagggtttaggggtatttgacaaattagggttacttgactaataagggtttatgggtatttgaaaattaaggtttagggttacttgacaatttggggtttaggtgtatgtgactaattaagatttataggtacttga

SEQ ID NO: 17949 - DNA, 367 bp, Glycine max
  unsure (1)..(367): unsure at all n locations
agcttcccttttcaattacgagcgtctcgatatactacgggacacaagcggacattttagtcaaaagttattgtcttttgaatttgctcagagcttttgttttcaattacgagcgtctcgatatattacgggactcaatcggacatccgagttaaaagttattgtcgtttgaatttgctcagagcttctgttttcaatttcgagcgtctcgacatattatgggactcaatcagacatccgtgtaaaaagttatcgtcgtttgatttttctaatagcttctgttctgaatttcgagcgtctcgatatattacgggactcaattggacatccgagtaaaaagttattgtcgnttgatttttctcagagc

SEQ ID NO: 17950 - DNA, 375 bp, Glycine max
tcaagcttgagcacctttttcctcacttcttccttcattgatgggttgagccttctctagggttgtatgattggtctatagtctccttccatcattttcttgtgcatgtagttggcagggctgattcctttaagatctaatatgtgccacccaattgcttccatgtgtcccttgaggacctttaccaacctattctcttcctctgctgttagctcactgtgatcaccacaggcttggtctcgctctcctccaagaacacatacttcaggtggttgggtaggatcttcaactccaccttggtcttctcggatggactcccactttttaattcttcaaagctggtcccccttgcaggaatgttatcttcatgatcta

SEQ ID NO: 17951 - DNA, 376 bp, Glycine max
cgcatgcttttttcaacctataggtgatggaccattccaagtgttggagaagatcaacgacaatgcctacaacattgacttgcctattgagactaatgtaaacgccactttcaatgagtgtaatctatctgtttccgatgcagacggaggagccttggatttgaggacaaatccttttcaagaatgagggagtgatgaggacacaactaacgacaaggaccatgaagcacatgaagggcccatgaccatacgcaaacttaaacaggccgaacacgtcataaagacaaggctgggcatttgtatcgctgccattgatgatgattgaaggcccaagtggagacctatgaatgcccacatgcagaagcgctactaagac

SEQ ID NO: 17952 - DNA, 415 bp, Glycine max
tgaagatgtatagcccaccatcttttcatactgtgttatgtgtctactatgattggcatcatgtgatcttcgtcattgaggtgccacttgaactgccaagtctctccacctttgggcgtattcttttaaaagattcgtgcccccattttttgcacatgttcaataattgcatcctatccgaagccattatactaacactgcctaacgaaggcaaccattaggtccttccaagcatgggctcgggaaggttccaagttagtgtacctggtaacagctacccccagtaagactttcttggaaggaatgtatcagcaatttctcatcttttgcgtatgcccccatcttccgacaatacatctttagatggttctcggggcaagtagtccccttgtacttgtcaaagtctagcaccttg

SEQ ID NO: 17953 - DNA, 351 bp, Glycine max
tatttttgaatggaagctctggtctcttgctgaaactgcatgttctgcatagtcatttgcctcacaagttcttcgagggaaggttgtggaggggcctcaactgttagctgtttctggggttgttgctgttgttggattggtggaggaatgtatggtctgcttgggccagcaacattttggaaagaacgagcaggctgctgtagctgttgttgctgagggctggaccatctgaggttatggtgattactccatccaaggttgtatctgttgctggagaggtcataattgctctgctgcggatgattttgctgctgaggttgacgaggtctattgtaaatgtttgcagcataa

SEQ ID NO: 17954 - DNA, 369 bp, Glycine max
agttttgagaaagtaagcttcaaatgatctttgaatagaaatagattcctcagcctttgctaatgcttcttcacgatggccagtgtcatacagtatccatccttcatagacaagcctttcatgatcagaagtagaataatttctagccagccgcaaactacgcattgcagactttggacaattcaacctacaagattcaggaaaatcaacacccataatagtcaagctctggcattaaaatgaaaccaggactaagacacacccaaccagtttttcgaagtacttatcagtttccattcattctgaaagcagagaagatacaataactgaaaatcacctccaggactaacacttatgaaactatgcata

SEQ ID NO: 17955 - DNA, 413 bp, Glycine max
gcttgagccattaatcgacaataacttttactttgtgtctgattgagtcccgtcatatatcgagacgctcgaaattgaatattgaagctctgagcaaattcaggcgacatattctttttactcggatgtctgattgagtcctgtaatataacgagacgctcgaaattgaatgttgaacttctgagcaatttcaaacgacaataacttttttctcggatgtttgattgagactcgtaatatatcgagacgctcgaagttgaatgtttatgctttgagccaattcaaaccacaataactctatgctcggatgtctgattgactcccgcgatttaacgcgacgctcaaaattgaatgttcaagctctgagttaattcaaacgacaataacgttctactcggatgtctgattgagtc

SEQ ID NO: 17956 - DNA, 412 bp, Glycine max
actagctggacttcctgtgttgtgaaccttcttttcatctgtcccaaacccaatcacctggttcaagcacgactctctttctgcttttgttggcttgccttgcatagctcgcatttttcttttcaatttgaaccttcacttgctcatgcaacttcttcacatactcagctttagcctgagcatccttatgcttaaacatagcaatgttacgcatatgcaacatatcaagaggagtcaaaggattaaatccatacactatctcaaatggtgaacaattagctgtgctatggacagcccgattataagcaaactcaacatgatgcaaacaggcttcccaagatttatagatttttctttataacagtcctaagcagtgtgccttaagtcctattgactacctctacttgaccat

SEQ ID NO: 17957 - DNA, 379 bp, Glycine max
agcttgtacttgcctcttatcccttctatttgttggcaatttttcacactcctatgtctcaacaatagaatttcatatctaccatcatcatccaccctcttttcttagaaaaaacaacaaccttattgattgaaaacacatttattgagactcttattaggcatgtaatcatcaaccaacaaaagctcgttcctttttctacaatactattggatttggaccaagtttttttgttgtaacctctccatgatcgatatctccaccatgaattgttgtaacacttgcttctaatcgtggttcgcacatttcacagtaatttgagtgttattcagtaatgtgcttctacactctcacaaaccctccagaacctgacaacatc

SEQ ID NO: 17958 - DNA, 415 bp, Glycine max
tgaaagacatgcacaaagtgtgactatatgatgtggttattggtgtagtaagcaaatgctcacctccccctctaaaatttaattggattaggcttctaccaattcaattaaatttatttcccaacacacacatcaaatattcacttagtgcatgtgaaattacaaaactacccctaatacaaaaactagtctaggtgccctaaaatacaagggctgaaaaatcctatatttctagggtaccctacctacgttatggagccctaaatacaaggaccagatataatgacatcctaatctaatatgtacaaagataattggacccaaccttggcccatgggctcataaatctaccctgaggttcatgagaaccctacgaccttcttcaacagctctagcccaatcctcttagtgcctc

SEQ ID NO: 17959 - DNA, 416 bp, Glycine max
tctggtgggacatcttgacttgctttccaatctgactttttccacagattctgccttcttctattttcagattgggaatgcctctaacagcacttttgtcaaggattttcttcatgcctcttaagtgcagatgtccaaacctttgatgccatattctgacttcatcttctttggaggatagacatttggaggagtagctggtttcttggggtgtccataggtaacaattgtcctttgatctgctgcccttcattagaacttcactcttctcatttgtcaccaagcattctgactttgtgaagtttacattgaatccttcatcacacagctgactgatgctgatcaagtttgcagtcagtcccttcaccagcagtactttgttcagactatgaagtccatcatgaactagctttccc

SEQ ID NO: 17960 - DNA, 368 bp, Glycine max
ttgtttgttgcaattcttctagacttagagtgataacatgcagtcctcttgatcccttatctctcactgtctcgatatgccgagactccgaaaccacaacaagttttatcttttccatgtactcgaaacaaaactcagtagcttgtttcgcaatgtacttttcaacaataaatgcttgaggacggtgtagattctttgtatacccttttaagatcttcatgtatcgctcaaccgggtacatccaccgcaaataaatgggaccacaacatttaatttccctcaccaaatgaacaattaagtgaaccgtgatgtcgaaaaatgaaggaggaaaatacatctccaactgacacaagataatagtagtctca

SEQ ID NO: 17961 - DNA, 404 bp, Glycine max
tgtatgactaccatggtatcaaaattgaactctattttaccagaaacactctcatcaggaatgtgatgaagctggaatgcaaagttcaccactaatgcttcatctggactgcagttcagcattgatgtggtgacaatggaagtccttgatgccactgctcgaagtttgagtcaagttcagcatttataatttcattgatgtcttaaaaggtaacctgtggatgtgcagctggagttgctgcagcatttagagagctccagtttgtggtgtattgtttgctttggaagaggttacatcttaattggtatggatttttatttcttgatcaaagattctgtttgcttagaagcatgtgcagtaaagatagtggtgtctgtacttaaattttgttgcttgtgctcttg

SEQ ID NO: 17962 - DNA, 404 bp, Glycine max
tgctaacccatggaacctcctaatatctcccacactttgtggggtgggccattcttggatggccttgaatttctcagggtccacttggaccccatttctaccaactactaaacctaagaaaactatattatctacacaaaaggtacacttctctatatttgcatatagggtgttcgtcctaaagactgaaagaacttgtctgaaatgtcctaagtgatcatctaggctcctactatacactaaaatatcatcaaaataaacaactacaaatgtacctatgaaatcctttaagacatgatgcataagcctcatatacgtgcttggtgcattagtgaacccaaaacgcatcactagccattcataccaactaaacttgggattgaaagcactttttcactcatcac

SEQ ID NO: 17963 - DNA, 413 bp, Glycine max
tgaaggcaaaccggatgcattggttaacttggtaacctagctggccttgaatcagaaatttgtacctgtcgcaagggtttgtggtttgtgctcctctgctgaccaccatacagacctttgcccttccatgcagcaacctggagcaattgagcagcctgaagcttatgctgcaaatatttacaatagacctcctcaacctcaacagcaaaatcaaccacagcagagcaattatgacctctccagcaacagatacaaccctggatggaggaatcaccctaacctcagatggtccagccctcagcaacaacaacagcagcctgctccttccatccaaaatgctgctggcccaagcagaccatacattcctccaccaatccaacaacagcaacaaccccagaaacagccaacagttg

SEQ ID NO: 17964 - DNA, 379 bp, Glycine max
agcttatttagcgaccgtatttaactaatttgtgaccgattgttgtggtcactaaatgatgttcttttccttgcagtgaatgccaacaatatccttgagttttttttggcatggagaaatgcaatcttgaaacctccatggaaattctgagtttcactatttaattctttcttttagcattaggagcgaggctttgagtatgagccttgaaataggcaacaaattggtccttaagtaggcataacttctttgacacctgcatggttgcgaaagtcttggctccatctgaagagcttaggaaatttctcacatgtgaacaattgcagcccatttatatcttgaattataggtatgaatacaacaacaatatccacataac

SEQ ID NO: 17965 - DNA, 418 bp, Glycine max
  unsure (1)..(418): unsure at all n locations
cgcttncatctggaaaggtctgccaattaggtgtcttttcaactatatgatcactaacagaaagaaaccactctatctctcgtcgccacattgctttcttctctgaacgcaggggctctaatctccaaagttggccaaagagggtagctgcaaattcagcaaagaaatgaacaacaacaatcaaagtcaagaatagcaaatgaataaaattcaccacaccaattaataaaaaataaaaacacagtaactgcttcaagtgtgcattttgcataccacatagattggttatggcatttgagatagccaaggctgtagcgaccccatttccacaacctgacatatcttctccaagtaacaattttgcaaacctctccttcatcatctcaatctctacaagtgagaatgaaaatcaaatctc

SEQ ID NO: 17966 - DNA, 371 bp, Glycine max
agctttatgccttaataagagccctccaaacttgggaacattaccttgtttccaaggaatttgtcattcatagtgatcatcaatcacttaagtacattagagggcaaagcaagttaaacaagaggcatgcaaaatgggtagagtacctagagcaatttccatatgttatcaaatacaaaaagggaaaaacaaatgtggtagctgatgccctctctaggagacagacattgttttgctccctaggagctcaaattttaggatttgataatattagggacttgtatgctttagatgaacatttctctcccatttatgagagttgtgggaaaaaggcccaagatggattctatttggctgaggggtatttgttc

SEQ ID NO: 17967 - DNA, 424 bp, Glycine max
ctcagcttctataaaaggttcgttcctaatttctctacaattgcatcacctctcaatgagctggtgaagaagaatgtggcatttacctggggtgaaaaacaagagcaagcctttgctttgctccaagaaaagcttactaaggcacctgttctagctcttcctgatttttctaaaacttttgataatattagggacttgtatgctttagatgaacatttctctcccatttacgaaagttgtgggaaaaaggcccaaaatggattctatttggctaaggggtatttgttcaaagagggaaagctttgcataccccaaggatccattaggaaattacttgttaaagatagccatgagggtgggctcatgggccactttgggatagacaagacgctcgtcttactcaaagaaaagttttattggcccc

SEQ ID NO: 17968 - DNA, 379 bp, Glycine max
tttgtcttattaaatctatatatggcttaaaacaagcctcccgtcagtggtaccttaagcatcatggacaatttcttcatttggttttgacgaaaaccccatggatcaatgcatataccacaaagtcagtgggagtaaaatatgttgtcttgttttatatgtatatgatattttacttgcagccaatgattgaagtttgctagatgaggtgaaacaatttctctctaagaattttgacatgaaggatatgggtgatgtatcttatgtcatcgacattaagattcatagagatagaccttgaggtattttaggtctatcacaagaaacctatattaacataatttcaaagagaatccagatgagagattgttcaccaagc

SEQ ID NO: 17969 - DNA, 381 bp, Glycine max
gtgtttgtctgcttgaaggtaaactagatgccttggttaacctggtaacccaactggccatgaataaaaaatctgcacctgtcgctagactctgtggtttatgctcctctaccgaccaccacacagacctttgctcttctgtgcaataatctgaagcaattgaacaacctgaagcttatgctgcaaacatctacaatagacatcctcaacctcagcagcaaaatcagccacaacagaacaattatgacctctccagcaacaggtacaatcccgggtggaggaatcatcccaaccttagatggtcgaatccttcacaacagcagcaacaacaacaacaaccttattttcagaatgctgctggctcaagaagaccatacgttc

SEQ ID NO: 17970 - DNA, 381 bp, Glycine max
  unsure (1)..(381): unsure at all n locations
agctttgggattattcacatgagttaacaagaagcaatgaatgatcaattgtgaaaatgaattgcatcccatacctagatcttctccataattccaccgaatttatatgtgtatagatgcatgcaagcaaggagtggtcttgatggttgttttctgaaaaggtactacggcggtcatttacttgcagcagtgggacaatatgaaaacaatgcattttttgtgattgcatatgcaatagtaaatgttgaagataaagacaattggaagtggttcctcacattgttacatgaagacattggagactacgaacaatatggctggaatttcatgtcagacatccaaaaggtgcaattcaattgtcttgctttgagtaattntgac

SEQ ID NO: 17971 - DNA, 419 bp, Glycine max
tctataaattagaattttagtgtaatgaataagattatatattgatacataaaaaaattctatttctattactctaataagttgactttaaagatgtttacctttaattgttaattctcttcaggaatttagacgtatcaaggggaacataaactcaatgagggaacatgcagagcttttgagttctgtcagggatgatattactgactttaaggtgaatcatgagtttgatttgaattaaattacaaagctattttctcatagctgtactagacttaccttcttctggcagacatcaggcagtatgtcaccaaggatgcagttactacgtgagagagctgccatccatggaagtatatctcatgtaagtatttataatatgaaatatgatgaatttgtattcttctacttgaaattct

SEQ ID NO: 17972 - DNA, 417 bp, Glycine max
tcacacaatggttcatcacttttctgatggaagctcaatatatttgtcttagcctggtttcttttttcctcttggaagaaacagtctaaaaacttgtttccaatgtcactccaagtgataaggctctgagatggatgagtattgagtcacttcaaggcattatctcctatgacggaaaaatggaaaaccatcatatagagattctcctcttcagtttgggtcacccctgttgtaccacattgatcataaaatgtggccagatggttgtatgggtcttcattagctaagctaggaaatgcatgttgggcaaggaaagtgattaggcctaactttagcctttgttgtgtggttgttgctccttggtctagcaatgttgaagtatactcgtgaaccattatcagtgtcatggtccgcaag

SEQ ID NO: 17973 - DNA, 375 bp, Glycine max
  unsure (1)..(375): unsure at all n locations
tctttgctntgcttatacacataggaggaagaattctatcattcataataatcttatccgatttaaataaaattatgtataagaaaatatacttgtgatgtacaattaaaaaaatcaaatttgagcaatatttatttttcttgatcaaaagtcaaaactattcatttcttgacgattccattgaggttgtaatgagtagaaaggcaataggcagaagatgccattcaatcaatatagtaaggatatctattggtttacatggtgcaagtagacatatataatatggattgaaatttttagagcattgaaatcaaatcaatttacttataatatataaaaacatatttcaattttaatgcatcaaaccttatagat

SEQ ID NO: 17974 - DNA, 365 bp, Glycine max
  unsure (1)..(365): unsure at all n locations
agtcttgattgagttgatgcatcacgtatcaatttcactttaaaagcgggtcctaattggattcctaattttcaacttacctatatggatgtgacatcatggcatataagtcccaactttccatcgtggattcagtcacaaaacaaacttcaatatgttggactgtctaacacggggattttagattctattcccacttggttctgggaaccacactctcaggttttgtatttaaacctctctcataatcatatccatggtgagcatgtgactacattacaaaatccaatatctatccaaactgttgatctaagcacaaatcacttatgtggtagattaccctatcttcanatgatgtgatgact

SEQ ID NO: 17975 - DNA, 425 bp, Glycine max
tgtaagatttgcaagatcatcttccttgacaactctttgaattagattgccgtcaatatgaagagataacaatttagagagtgatcgaagactttcaaatggatttccaatgaatttattcatagagagatcgagatatcttaatgatgaaagttttccaaatgatctaggaagagcaccaccaattgagttgttggaaaaaagtaacgtgtcaatatttttaaatgccccaatatgatctgtcagattgcctgaaagtcgtgaactctgaactgcaagtgttgtgagtccatgggaaatacaacgagcaagaatttctaaaagttcattaacctgttggttgagtttgagatatgataaatctatcacccttaagttgcagagagtacccaaagaagttggaatcgttccttcaagatgattac

SEQ ID NO: 17976 - DNA, 418 bp, Glycine max
  unsure (1)..(418): unsure at all n locations
tgcagagaanactaaaagaagaagaatgaaaagaatgccaaattatcaatgaatgaaagttagcttacaatgattaaatattacagtttatatagttagttacaagattaactaacttgtagttagttacaagagtaactaacttgtaactaactaactttaactcactctaactaactaagctaattctaactctagttacatgataacttatgctaatagcccccttcaagctaggaatgaatgttagacgtgcctagcttggaatacaaaaattgaaaaacaccaggcagcagagctttagtgtaaatatctgcaagctgatttgcagaggaaataggaagcaatttcacaagcctagtcatcaccttctcttgaactatatggcagtcaatttcaatgtgttntgttctctcat

SEQ ID NO: 17977 - DNA, 382 bp, Glycine max
  unsure (1)..(382): unsure at all n locations
agcttatgctattccaagttcattaatcatacctttaagccagattgcttccttcactccttcagctaaggccatgtattctgcttcaggtgttgaaagagcaacaattgattattgatttgctttccaactaattgttgtaccacacaaagtaaacacatatcctcttaaggacttcattgtgtctacatttcctgcanaatctgcatctacatagcttgtgattgctgcctcgtgtgctgtcttcttgtaccttaaaccagctttcaaagatccatgtagataccttagtgtccacttcacagcttcctagtgtgcgctgccaggatctcccatgaatctgcttataatacttatagcatgagctaagtcaggtctactg

SEQ ID NO: 17978 - DNA, 364 bp, Glycine max
  unsure (1)..(364): unsure at all n locations
agcttatngatctcaaacaattgctgaaaggctggagcagagatactgtaggtgacttgtgctttaaggttaagcagctgtagcaaaagttgaatgaattggaagattccatgtctcaccaaccttctgaccagcaagtccttcagttgaagaatattcaggctgagctatgggaaaaggctaagttgcaggaatcctttgttaggcagaaatctaaatggattaaggagggagatagcaatagctcctatttccataaaattatcaatttcagtaggagaagaaacaccttgagggggctgatgatggatggtacttgngtagaataccctgatttgattaacgatgaagttctacagcattt

SEQ ID NO: 17979 - DNA, 398 bp, Glycine max
tcaagtttaaacattcaacttcgagcgtctcgatatattacgagtctcaatcaaacatccgagaaaaaagttattgtcttttgaatttgctcagacgttcaacattcaatttcgatcgtctcgttatattacaggactcaatcagacattcgagtaaaaagttattgtcgtttgaattggcttagagcttcaacattcaatttcgagcgtctcgatatatgatgggactcaatcagacatccgtgtaaaaagttattggtcgttgaattggctcagagcttcaacattcaatttcgagcgtctcgatatatgacaggactcaatcagacatccgagtaaaacgttattgtcgtttgaatttcctcagagcttcaacattcaattttgagcgtctcgta

SEQ ID NO: 17980 - DNA, 402 bp, Glycine max
  unsure (1)..(402): unsure at all n locations
ntgagccaattgaaacaacaataacattttattgtttgtctgattgaggcccgnagtatatcgaaacgctcgaaattgaatgctgaagctctgagccgattcaaacgacaatatctttttacacggatgtctgattgaggcctgtaatatatcgagacgctcgaaattgaatgttgaacctttgagcgaattcaaacgacaataactttttactcggatgtctgattgagtcatgtcatatatcgagacgctcgaaattgaatgttgaagctctgagccaattcaaacgacaataacgttttactcagatgtctcattgagtcctgaaatttaatgagacgctcgaaattgaatgttgaacctctgatctaattcatacgacaatatacttttacacggatg

SEQ ID NO: 17981 - DNA, 423 bp, Glycine max
tcacaggcaagcttccatcagttcttcacttaaactcttgcatgagtcatgacttgtataggagacatgtttttttcttttcatttctttcattatttttcttctttcgtcttctcttatattctctctttcatcttgacttatttcttccacttttttctctttttcttttctctcttgtttttttttcacaatttaagggatcttaaatcatttaatctcctatacaaggggtacttaggagtagaaccctcaccattaacactagatgaagaatgaagactcatgttggttcctaagtcgtggttccatcttgttgggggtttgaaaacaaaaggtaaaagaaactatcattgaaaatagccaaaataaacactacaagaggtgtgaaagataaggtaaaaactaattggtaaaaaacac

SEQ ID NO: 17982 - DNA, 395 bp, Glycine max
tctagcttgaatgtaggagaagattatatgaggagaatgagagatagaacacgaagttttgtgcctcaaaagaggtctaaacattgaagtgtaattctcaaataataaaagttgaaaaaatgcacacacatggcctctatttatagcctaagtgtcacaaacaattggagggaaatatgaatttctattcaaatttcacttgaatttgaaattgaatttgtggagccaaattctggagccaaaatttcagtaattattattagtgaattctagttatggttcagcccactaatccaagatcaagtccaagattctgcactaagtgtgcttaggtgtcatgaggcatgtaaagcatgaaggacatgcacaaagtgtgactatatgatgtggcaatg

SEQ ID NO: 17983 - DNA, 376 bp, Glycine max
ttagttttcatgcacatggaatttatctacaaatcttctgaagtcaatttttagcactccccaaaattctttaatgaaattgaagttgaatccatcaggtccaggacatttgtccccaccacaactccacactgcttctttgatcttatgatccgagaaaggagcaatcaattcctccctctgcctttggttaattgaagagaattgtactccatcaagggtgggtctgaaaagctgttgttcagtgaatctgttgagaaaaaaaattcacagcttcattcttaacttcattgaggttctaaatccttacaccatgaatgagaatcctttgaagaccatataatgtctcttggaattataagttatggaataagct

SEQ ID NO: 17984 - DNA, 392 bp, Glycine max
  unsure (1)..(392): unsure at all n locations
agcttgttatccgagtagactactccgagaatggtggcattgactaccccagttgaaatgttgacactgttacctaatgcattcacattcagcggaagccttgcagggtctttaccagccactgtctgcacagggttgcttaaggaatcgaagtttgagctcgacacaaactctggcaatatgtggaactgcactaattcgattttctggccttcgtttaaggagttgaggaagcctgctttgaggttggaaaaggcagaatcatctggtgcaaggatggttatgccgccactcttggctgttatgagctgtgagttgatgttgttcatgatttctgtggttntgaggaggcggattangactgagaacattnnttgccttttcaggattct

SEQ ID NO: 17985 - DNA, 311 bp, Glycine max
agcttgataacaagtgaaaatgtctgtataatttgtgccatactgctgatgaaaacccttagccaccaacttggctttgtacttgttaacaatgccatcagagttttctttcacctaaaacacccacttgcaaccaatggaagttttgttaggaggtataggaactagactccatgttttgttttaaatcaaggcatcatattcagtttgcatagcagccaaccaagtagggtcagccaaggcttgcttggtggatttaggttctaaatgggtcagaataagggtaacgtgaatcttgtgttgaacaatac

SEQ ID NO: 17986 - DNA, 393 bp, Glycine max
  unsure (1)..(393): unsure at all n locations
attcttgatgtagagaagttatggattataccattctttttatagaatgatctaaactcagcatttttaaacttagttccatggttgctccgaatagaagagatgtaaaaacctttttcattttggactattttatagaatatttcaaagaccttaaaagactcattcttatgagcaaggaagtatacccaggtatatcttgaatagtcatcaattatgacaaagccatacttttttcctcctagactcaatgttctagttagtccaaatagatccatgtgcaatagatgtataggtctggaagtggaaacaacatctttagatttaaaagaggttntgatttggttgccttgctgacatgcttcacagagaatatgagttttccaacagatc

SEQ ID NO: 17987 - DNA, 320 bp, Glycine max
  unsure (1)..(320): unsure at all n locations
tcaagtcttcttgagaagattcctaaagaagctagagcttagctacacacaccgccctaagaactaagctgacctccgtgagatgagaagctcaagcttacaaaagaagtgcctacaacgaagactactcagaatgccctgaaatacaaggctaaaatcctatactactagaatggccaaaacacaaggcccaaaagaaggaaaaacctattctgatatttacaaaaaagagtggatccaaccttgacccatgggctcaaaaatctaccttaaagttcatgagaaccctanggcattctttagtagctctagcccaatcc

SEQ ID NO: 17988 - DNA, 418 bp, Glycine max
  unsure (1)..(418): unsure at all n locations
ctcgacccgggatcctcttagtcacctgcagcattttatcttctagaataatggcctctttctaacttcttattcccagaaggaaattcaatacataggcctcctatttttaatggagaaggttaccactactggaaaacccgaatgcaaattgttattgaggcaatagacttaaacatttgggaagccatataagttagaccttatgtacccaccatggtggctggaaatacaacaatagagaaacctatacaagagtggtatgaacatgacagaagattagtgcagtacaatttataggctaaaaacatcattacttctgccctangaatggatggatatcttacggtttcaaattgtagagtgctaaaatatgtgggacactctacaagttacacatgacggaacaactgatgtc

SEQ ID NO: 17989 - DNA, 419 bp, Glycine max
tcaagaaaaagatggcctcagcaaattccttatttctctgaaggttaattctatcaatagacctccaatctttaatggagagggttaccactactggaaaacccgaatgcaaatttttatcgaggcaatagatctaaatatctgggaagccatagaaatagggccttatatacccaacacagtagaaagagtttcaatagatggtagttcatcatgtgaaagcataaccatagaaaaacctagagatagatggtctgaagagggtagaaaacgagtacaatacaacttaaaagccaaaaacataataacatctgccctaggaatggatgaatatttcaaggtttcaaattgtaagagtgctaatgaaatgtgggacactcttcgataacacatgaaggaactacagatgttaaaagatc

SEQ ID NO: 17990 - DNA, 339 bp, Glycine max
agcttgtgcctcttcacgtctggaatatgaatagcatatagatccaaagacccttaggtgctttgctgatggcttcttcccgttccaagcttcaataggagtcttgtcttttacagacttagttggacatctgttgagtatgttaacagcaatgtagactacttcagcccaaaatgtgttaggtagtcccttctccttgagcatcgatctagccatttccataactgtgcgaatttttctctcagacactccattttgttgatgagaatatgcgactgtaagttttcgctcaatgccttcatcctcacaaaaactttcaaacttgcgagaggtgtactc

SEQ ID NO: 17991 - DNA, 394 bp, Glycine max
ctataacactcagcttaacatctaccacttccaggtgctggaactacttttcatttacctgtcttggcccatgcaagttgaaagccttggtggattaaagcatgcctatgttgttgaggatgatttctccatatttacctgggtcaactttttcagagagacatcagacaccttagaagtattcacagagttgagtctatcacttcaaagagataaagactgagtgatcaatagaattacgagtgaccatggctgagagtttgaaaacagcaagtttactagattctgcacatctgagggcatcactcatgagttttctgcagtcattacaccactacaaaacggcataattgtaaggatatacacgactttgcaagatgctgctatggtcatg

SEQ ID NO: 17992 - DNA, 422 bp, Glycine max
  unsure (1)..(422): unsure at all n locations
tcttagttntagctgatgaaaatgaattcctggcttcttcattcactcctctaatgacaatagcatcatttttggcgctacattgctgggagttggaagccatcatctcaattaaattcctggcttcaacaggggtcatgtctccaaaggctccaccactggcaacatcaatcatacttctccccatgttactgagtccttcataaaaatattggagaagaagctgctcagaaatctggtggtgagggcaactgacgcgtagttntttaaatctctcccaatattcatataggctctctccactgagttgcctaatgcctggaatatcctctttgatggtcgtggtcctggaagcagggaaaatgttttctaaagaatactctcttgaggtcatcctggctcgtgatggaccttggagcaag

SEQ ID NO: 17993 - DNA, 421 bp, Glycine max
tataggaagtgaaagaattagcatgggcagaaatgtttccgctttgattggtaaatctgttccccaaatccctgaataatgtaaagatccaagtacattaagcataccttgtattataggaaacagtaagtttgacaatgccatgctagatttatgagcttctgttagtgttatgcctcagtctatttttaattctctatctcttggtcctttgcagtcaactgatgtggtaattcatttagctaatagaagtgttgcctatcctgctggtttcatagaggatgtcttagttagagttggtgaactgattttccttgttgatttttatatattgaatatggaggagggattctctcaaggatcagttcccatcattctaggcagaccttttatgaaaactgctagaactaagatagatgta

SEQ ID NO: 17994 - DNA, 409 bp, Glycine max
taatatatcgagacgatcaaaattgaacatcggattctctcgtgaaattaaaatggtcataagttttaactcggatgtccgattcaggagcttcacatatcgagatgcacgaaattgaacaatggaagctctagagaaattctaatggtcataaattttcacacggaggtcctattcaggcgcttaatatatccagacgctcgaaattgaacaatggaagctctcgagatattcaaatggtcataacttttcactcggatgtccgattcaggtgtatcacatatccagacgcttggaattgattagcggaagctctagagaaattcaaatggtcataactgttcacacggaggtcctattcaagcgcttaatatatcgagacgctcgaaattgaacaacggaagctctc

SEQ ID NO: 17995 - DNA, 420 bp, Glycine max
gcttaatggcttaatgaggatggagaggagcacgtaatgtagcctttggtgttggatattaccattggagggtacaatgattaagtcctatgtgatgttgatgctatggaggccagccacttactcttggggagaccatggccttttgataagagggctagtcatgatggtttcaccagaaagatctctttcgcgtctcatggcttaaagatcgtgctcaaactattgagtccccaagaagtgtgcgaggatcatagaaaattgagagagaaaattcttctcgagaagaccgataatggaaaagagagtcaaacacttgagagttcatatagtgaggacacaaagagggaaacacatgagagaatattgatgagtgaaacacttgaagtgagggagaatttctagttacaaaaggagagc

SEQ ID NO: 17996 - DNA, 404 bp, Glycine max
ctcacaaaatatatatagtgtatgctgtatgttagtttaaataccttacatgtgcgtgtatgtggacaaaataaacacttcacaaaatatatatatgtatgtttaggtagaaagataccttaaatatgcatgtatgtaaacaaaaaaatacttcacaaaacatatatatgtatgtttaggtggcaagataccttggatatgcatgtatatagcaaaaatacctcacaaaaatatgcacatgtatatgtagcataatacctcatgaaaaaataagaataaaacaacaggcgcgataaagatataaacagatgataatgattataaaaaagaaggagaaaaaagaaaaaataagttgtcaagctgaaaaaccaacatgcgtttgaaaagagatgaacttcaacttt

SEQ ID NO: 17997 - DNA, 357 bp, Glycine max
  unsure (1)..(357): unsure at all n locations
agctttgttattctcctgttttagctntacccgattttactcaaccatttgaagttgaatgtgatgctagtggagttggcattggggctgttttgatacaaaacaaaaggcctatagcttatttctcggagaaattgggaggagccagattgaactattgcacctatgacaaagagttctatgccattgtgagagctcttgatcattggaatcattatttgcgttctaatcactttatattgcattcagatcatgagtcattgaagtatatcaatgggcagcagaagttgagtccaaggcatgctaaatgggttgaatttcttcaatcttttaatttctctttcaaatacaaggatg

SEQ ID NO: 17998 - DNA, 423 bp, Glycine max
ctgagcaaattcaaacgacaataacctttttactctttatgtcggattgagtcccgatatatatccagacgctcgaaattgaatgttgaagctctgagcaaattcaaacgacaataacctttttactcagatgtcggatagagtcccgtaatatattgagacgctcgaaatggaataccgaagctctgagcaaattcaaacgacaataactttttactcggatgttcgattgagtcccgtaatatatcgaaacgctcgaaattgaatgttgaagctctgagcaaattcaaacgacaataaatttttactcggatgtccgattgagtctcgtaatatatcgagaagctcgaaatggaaaaccaaagctctgagcaaattcaaacgacaataactgtttactcggatgtctgattgagccccata

SEQ ID NO: 17999 - DNA, 415 bp, Glycine max
tactcaagcttcatgagagagtcaaagatcaaattgagaggaaaattataatctatgcttaacaagccaacaaagggagaatgatggttgtcttcgaacccggagattgggtttgggtgcacatgagaaaagaaaggtttccggaacaaaggaaatcaaagcttcaaccaaggggagatggaccatttcaagtgcttgaaagaatcaatgacaatgcttacaaagttgagctgcccggtgagtataatgttagttccaccttcaatgtctctgatttatctctttttgatgcagatggagaatccgatttgaggacaaatccttctcaagagggagagaatgatgaggacatgaccaagagcaagggcaaggatccacttgaaggacttggaggacctattgatgacgacatgac

SEQ ID NO: 18000 - DNA, 291 bp, Glycine max
agtctgtagccaactggatgcattggttaacttggtaacccagctggccttgaatcaaaaatctgtacctgtcacaagggtttgtggtttgtgctcctctgctgaccaccatacagacctttgcccttccatgtagcaacctggagcaattgagcagcctgaagcttatgctgcagatatttacaatatacctcctcaacctcagcagcaaaatcaaccacagcagatcaattatgacctttccagcaatagataccaccctgcatggaggaatcaccctaacctcacatg

SEQ ID NO: 18001 - DNA, 379 bp, Glycine max
  unsure (1)..(379): unsure at all n locations
agttttctattattcattgtgacaatacaagtactgtatcccttactcataatccagttcttcatgctcgcactaaacacatggagttagacctattttttgttcgtgaaaacattttaaacaagttgctcttagtgatttatgtgcttgccaccggtcaatatgttgaaattattaccaaatctttatctcttaccaactttgaagctttcaggtttaagctcacactgtgtgatccctcaaattcttgtcagtctcacccactgatggctccccactgcagttactttttgtgcatttatgtcttaagggaaatttcaatggggggttntatcaccgganagcgcaccaagttgtcaagtatttaaaattaaaacgg

SEQ ID NO: 18002 - DNA, 336 bp, Glycine max
  unsure (1)..(336): unsure at all n locations
agctntgctattccatgctcaattgtgaatctttttgtaggtaaaacactactggatttgggagcaagcattaatcttatgccaatttcaatgcttactaaagttggagatgtggagattaagccaacaaggatgacactttaactgacagatcaatcaaagttccatatggagtaatggaagatgtgctagtgaaggtggataaattcatattcttggttgactntgtaatcatggatatggaagaacatgttgaagttccttttattcttggaagactattcatgatgacaactctagcattgattgatgtaaacaatggcaagctcaaaatac

SEQ ID NO: 18003 - DNA, 422 bp, Glycine max
  unsure (1)..(422): unsure at all n locations
tggatttcctttagtagggaatctatccttcctaagatggagccaaatccagtcaccgtcattaagaactagctcttttcatcctctattgcctttagttgaatacacctttgtttggttctctatttggttcttaaccctctcatgcaacttctttacaaactctgacctagattctcattctttatgtataaaagaagtgtccagtgggaggggaatgaggtctaacggtgttaggggattgaatccatagacaacctcaaaaggggattgcttggtggttctatgaacccccctgttgtaggcaaattctacatgaggaagatattcatcccaagacttatggttgcctttcagaagagcccttanaagggtggataaagatctattcactacctctgtttgcccatcagtttgtggat

SEQ ID NO: 18004 - DNA, 393 bp, Glycine max
  unsure (1)..(393): unsure at all n locations
agctttacttaaggtttgttcctaatttctctacacttgcctcacctctcaatgagctggtgaagaagaatgtgtcattcacttggggtgaaagacaagagcaactcanagaaaagctcactgaggcccctgttctagctcttcttgacttttctaaaacttgagctagaatctgatgcttctcgagtgggtgtaggagctgtattgttgcaaggtgagcaccctattgcttattttagtgaaaaaattcatggtgccatcctcaactatcccacctatgataaagagctntatgccttaataagaagccctcaaacnttgggaacataccttgtttccaaggaatttgcattcatagtggatatgaatcacttaagtacattagaagggtaa

SEQ ID NO: 18005 - DNA, 386 bp, Glycine max
agcttccattgttcaatttcgagcgtctcgatatcttatgcgcctgaatctgacctccgtgtgaaaagttatgaccatttgaatttctcgagagcttccgttgttcaattttgagtgtcttgatatattatacgcctgaatcggacctccgagtgaaacattatgaccatttaaatttctcgagagcttgcgctgttcaatttcgagcgtctctatatgtgatgtgcctaaatctgacctccgtgagagaagttatgaccattttaatttctcgagagcttccgttgttcactatcgagcgtttcaatatattatgcgcctgaatctgacctccgtgtgaaaagttatgaccatatgatttctcgagagcttccgtggtcaatttg

SEQ ID NO: 18006 - DNA, 423 bp, Glycine max
  unsure (1)..(423): unsure at all n locations
nttcactcggatgtccgattcaggcgcataagatatctagatgttcgaaattgaacaatggaatcgtttgagcaattcaaatggtcaaagcttttcactcggatgtccgattcaggcgcataatatatcgagacgttcgaaattgaacaatggaagctcttgagcaattcaaatgatcataacttttcactaggatgtccgattcaggcgcataagatatcgagatgttcgaaattgaacaacggaatcttttgagcaattcaaatggtcaaagcttttcactcggatgtccgattcaggcgcataatatatcgagacgctcgaaattgaacaatggaagctcttgagcaattcaaatgatcataacttttaactcggatgtccgattcaggcgcataatatatcgagacattcgaaattgaa

SEQ ID NO: 18007 - DNA, 413 bp, Glycine max
taactaatcagatgggacaattggctactcttttatatcaacaacagtcccagaattctaacagattaccttctcaatctgtctagaatctcaaaaatgtgagtgccattacattgaggtcgggaaagcagtgtcaaggacctcaaccagtagcatcttcctcatccgcaaatgaacctgcccaacctcactctactccagaaaaagatgatgacaaaaatttaaagagtaagttacctaacaatttctatgcaggtgaatcttccactagtaattctgatttacagaagcagcatatccctcttccattccctccaagagaaatttccaacaaaaaaaatggaagaggcagagaaggagatattggaaacatttagaaaagtagaggtaaacatacctctgctggatgcaat

SEQ ID NO: 18008 - DNA, 144 bp, Glycine max
  unsure (1)..(144): unsure at all n locations
agcaagtttatgttctgctttatncggancgccaggaggctattgaggatgtttgcatcaatgttcatcaaagatattaggctaaaattgccttttttggttgcgtctctgtcccgctatggtatcacgatgatgttagcctca

SEQ ID NO: 18009 - DNA, 339 bp, Glycine max
  unsure (1)..(339): unsure at all n locations
cattcaaccttccaagaaaaagtaatggccgttggaatttcctctgaccttcaacattcaattccgagcgtctggatatattacgggactcaatcagacatccgagtaaaaagttattgtcctttgaattggatcagaggttcaacattcaatttcgagcgtctcgatatatttcnggactcaatcagacatccgagtaaaaagttattgtcgtttcaattggctcagaggttcaacattcaatnttgagcgtcccgatatattacgtcactgaatcggacatccgagtaanaagtattggcgtttgaattgctcaaagcttaacatttcaattcgagc

SEQ ID NO: 18010 - DNA, 308 bp, Glycine max
aaaagatagttggaggtctgctgcatacttattcaagtacctaaattatgcaagggaatcgttctttgtttaaaacttaaattattaaaaataattataaatgcctctttacatgaaccctctttataatctgtttagatgggctaacttatagcatagcgggtctgttttttacctggtgtattttgaaatattataaattcacaggaagttacaaagatggttcagagtgttcctgtgtaccccttacccagttttcccaatggtccatctacatattatactatatgtcaaaccagaaattgaat

SEQ ID NO: 18011 - DNA, 316 bp, Glycine max
  unsure (1)..(316): unsure at all n locations
agctntatgtgaagatttgtgaaagtgtaacctgttcaatgacatttgaaatattcatagtgtctctagtagagaaaacagtcaaaagtcacttctttattatttgcttactttcccaaccaaatgttcaggcccagttctccatcccccacactcttatatgagaacctgactttacgttttcacatataatggtatgtagttcttgcatgaatcanataatccatctaattcaccagtctcataatctagtttatgacatatcaccagagactaaggactggtgtctgtaaactgtganagggccaagttgatg

SEQ ID NO: 18012 - DNA, 195 bp, Glycine max
catggatcttacttgctggctctgagggggtggatccactgagctagaacattggctccctggcttcacccccttttctgggagtgaatgagtctgtctcgctggcattccaggagccactatggtatgaaaaacaaaaactcctgtagctagttcggtgtctgaccaaatggctgcccaagttttgcttgaaac

SEQ ID NO: 18013 - DNA, 376 bp, Glycine max
  unsure (1)..(376): unsure at all n locations
agcttgcatgcaaattatcttaatataaaaacatgcanacattgaaccatagaggtaaaagtttcctatgaaggaaactaanaaacactgattaaagaaattgtagataacacaaacaaatggaaaaacacctcatgcacatggattggaaggaacattcattaaaatgaacatacttgcccaagaaatctacagattcaatgcaattcctatcanaatatcaatgtcatttttcatangaatagaanaagcaatcctaanattcatatagaaccaaaaaagagaccanatagcccaagcagtcctaagcaaaaagaacanagctggagtcatcacattacctgactntaaattatgctacaagactatagtaatc

SEQ ID NO: 18014 - DNA, 380 bp, Glycine max
  unsure (1)..(380): unsure at all n locations
agctngttattgcaggcactgngccggtttgttttttaacctgttttacctctacatttacactatcagcataatatactataaataaatatatgctgattaatatattttcaatggtacaatttaaactaaatattatttttaaaaccacactctctctagctntgttactaagagcaaagcaagtcacatacagtaaggtttagtcttattgtaaaagaaaaatttcagacaacataaatttaacagaatttacgtggaaaaaaaagaaagattcatgaatcacacattacacagaatctgaaaagattcagagagctctgctttgccacatgggcagtgagtatttatagacagaacatgggagtaagtatagaaat

SEQ ID NO: 18015 - DNA, 255 bp, Glycine max
agtttctttgcccattgcctcaaggacattgttttcacttgtccctagcacgtgcctatccatatttatggatgagtggattatcactagacaaagacaaattatctttaaatctgaagctataaaatgtttatgtttgttgatttatattgcccagctgttctcccagcagggtggttagcagggtgacataaaaataaaacagcatccaccctttctatgccaaatgtaagaaaagaattaaaatgatgttcc

SEQ ID NO: 18016 - DNA, 283 bp, Glycine max
  unsure (1)..(283): unsure at all n locations
gaaaaaaaaatagaaatgaaagacagtccgggaaaatctcaaggttttaggtagaattatctgatatgtgtggtatttatattttttcccttataaaatctatanaaaattatactaaaaaataatccattaaaatctgtatgaattttaatgaaagatagttataaaaaatcttaattgaatatcatcaaattttattgatattaaaaaataattctaaatatcttgattgaatactataagatttttttatcttatttaaaagttntgattgaatatcaca

SEQ ID NO: 18017 - DNA, 358 bp, Glycine max
  unsure (1)..(358): unsure at all n locations
cctcaagaagaaaggaattcacccagtgcatacaagtatctgcaggcacanataaatccttggctgagctcaagagacttttaaaaggtctaatctgagattccttatgaaaaaaattccagcatagccagttagagaaagagagcctatatggccaataattattcttgctgcactttatgtaaataattaggcatagtataataaagcaagcttattttgcaaataaattggtcttgtctttagtaaaaataaactggagagagacaaattatggttcataacagctacagcacacctgttattagattccaacctcatccattgttcttgagcttctgctgatgaccccatattt

SEQ ID NO: 18018 - DNA, 452 bp, Glycine max
  unsure (1)..(452): unsure at all n locations
agcttactatcatggtggaaggtgaagggggagaggacaagtcacatagtgaaagcaagagcaagagaganagtgtggtcggcagaggtgccacacactnttaagtaaccatatctcatgagaactcactatcaganagacaacaccaagccatggatcattcaccccatgatcaaaacacctcccactaggccccaccttcaatgctggggattacaattcaacacgagatttgggtggtgacaaatatccaaactgtatcagcagactaatacaatagtacattatgatcaaatagggtttatctcaagatgtaaatntgggttaaccatttgaaactaatcgtgtaattcaccaaaattacagcatanaaaagaaaaatcatatgagtatctcacaagatgcagaaacaggatttgacaaaattcaatacccattcatgataaataact

SEQ ID NO: 18019 - DNA, 307 bp, Glycine max
  unsure (1)..(307): unsure at all n locations
agttnnatttanactccacaccccgcaccctcttctgctctgcttcctgtgggaggaaccttacaaatnccaaatcatgtcagccaacgtatttaaagtactgaaaacatattttangaataaaatctgaagaaaaatgcgtttcctatgcctgngtcacatcagtttgggaaaaaatctgatgcaagaagataaaatgccagctccagtagcagaaaccaactaccacatcaaagtttgtcatctgccttttggttgaaagcatggcangcaagcggatctatagtgcagcccgctgatcatttta

SEQ ID NO: 18020 - DNA, 412 bp, Glycine max
  unsure (1)..(412): unsure at all n locations
agctttttgtctttttttatccagangctaatatgaatgattcccaaacttgtgcacattgaaatcaccaacaggtctttcaaaaaatactgatgtgggttgaagacattgtgatttaattgttattgggtatgacttgagcattagtattttaaaaatcttgtagatgatttaattttagccataaatgtatcccatagtttgtttatcccataatttctgattcttcccacatcaagaatcaggtgacatcactgaagattgtacaagtattaagttgataattagacaatataaaaaagcattatttcaatatatttaacattgtaatgaaatggagatttttgaaatataaanattactaaagcttactcatgaagaaataaataacctgaatagccctatatctaat

SEQ ID NO: 18021 - DNA, 235 bp, Glycine max
ctgcaattgacctaattggtgtttttcattcattagctcttcctgaaacaaggatttctgcttctcccatgattgaaacttcatttgggtcttcttttccctccttgagacctcttgacagcttgtggctgactcagccgcttgtaacttagcaacctccatctctttcctcagtgcagcattttccacctcaagtttccggacatcagcattggttctttctacctgtgcactc

SEQ ID NO: 18022 - DNA, 376 bp, Glycine max
  unsure (1)..(376): unsure at all n locations
agctnttctaanaaaaaataattaataattaaatctctgaagtggatatattcttcctanatcaatggcacattgtctntgttaactntgttgttgttatttccttttaatagtacgtttgctgtttgaacactcggtctaacttcagttcattcaaaaacagttcattttgaaaggaacaataaggaacaaacgaaatacacacatgatatggattggctgtatccccaccaaatctcaacttgaattctatctaccagaattcccacatattgtgggagggaacccaggggaggtaattgaatcatggnggctgatctttcccatgctattcttctgatagcgaataagtctcacaagatctgatgggtttatc

SEQ ID NO: 18023 - DNA, 422 bp, Glycine max
agcttcttagtttatatgatgcagatggagccatcttctcaattaatattttggcttcagcaggagtcatgtctccaagggctccaccactagcagcatctatcatacttctctccatattactgagtccttcataaaaatattggagaagaagttgttctgaaatctgatggtgggggcaactggcacatagtttcttaaatctctcccgagactcatacaggctctctccactgagttgtctaatacctgagatatccttcctgatggctgtggtcctggaaacaaggaataatatctctaagaatactctcttaaagtcatcccacctcgtgatggaccttggagcaagtaatacaccagtcctttgccactcctctaatgaatgacgaaaaccttcagaaaattggacctcttgacat

SEQ ID NO: 18024 - DNA, 298 bp, Glycine max
  unsure (1)..(298): unsure at all n locations
agctncttatctcaagctcatcttgagggagaagctgctccttccatggcttattccttactaccaagactactcagaatgccccgaaatacaaggctaaaaccctatactactggaatgaccaaaatacaaggcccagacgaaggaaatacctattctaatatttacaaagataagcgggctcatacttatcccatgggctcgaaatctaccctaacgctcatgagaaccctagggccttaccttggatctctaacccaatctacgtggtgtctttctcccaatgcccttgcggggt

SEQ ID NO: 18025 - DNA, 409 bp, Glycine max
agcaaggtttttttgtattggcaagaaactatggaatggcagagttgaattaataaagatcaacaaagtatgaactttagttgaagcttcaaaggatataaaaccaattggttgtatatgggtttacaagacaataattggagcttattggaaggttgaaacctacaaaactcgccttattgccaagggatattgtcaaaaggaaggtatagattatgacataacttttgtcccatggcgatactcaaatcaatttggatgcttcttgctatattagcatactatgatcatgaaatatgatatggatgtggaaaatggctttccttaatggtgagctataataacatgtgtgtatgacaaaacttgatggatcacatcctagtcttatcataataaagtctacaagttt

SEQ ID NO: 18026 - DNA, 413 bp, Glycine max
  unsure (1)..(413): unsure at all n locations
agcttttgcttttaatatcttatnnngnaatttaacaaaaattgcttccctatcaattagcatctcatccactgctgccactgatgaagatcccattagatattggggaatactgggcggatttctgccaaaggttacttcgaagggtgaaactccaattgttaagtggactgatgtgttgtagaaccatttgacccacataaaanattttccccaagttgcaggtttatggtgaacgaacgcccgcaagtattattcgacaactctgttgatgaccttgatttgtccatctgattgagggtgataggcagaactcatttgcaatttcgttccacgcaatcgaaagagctcttgccaaaacttactcacaaataatgggtctctatcagacacgagacttcgaggcataccat

SEQ ID NO: 18027 - DNA, 413 bp, Glycine max
  unsure (1)..(413): unsure at all n locations
ttgcttanactttgtttagcctaccatcctcagactgatggccaaactgaacggaccattcagtcgttggaggaccttttaaaagcatgtgtcttatagtagaagggaagttgggagagttttcttccattgatagagttcacttataataacagttttcactctaccattggcatggctccctatgaagctttgtatggtagaaggtgtaagacacccctatgttggtcaaagcccggagaaggcctcaccttatgaccagaagtggtacaacaaaccactgagaaagttaagttaattcatgataggatgagaacggctcagagtatgcaagaaagttatcatgataagaggaggaaagatttggaattcgaggttggtgatcatgtattcttaagagtcactccgtggac

SEQ ID NO: 18028 - DNA, 409 bp, Glycine max
agctagcatgccttttgaaccctattcaaatggcacaaaccttcaataaggcaaatataaatccccaaatcagccctatacccggagctcaccaaatccttcaacaaatcaaaagccaatccaaccttaccctcagccacaaacgcctcaaccagcgctccatatatcaccctatccaccaaacaacccttccccttcatctccctgaacaactcatacccctcctgaaccctccccccttttgccagccccacaatcatggtagcatatgccttcacatccggcaccacccgggccctcttcatctactcccaaaccctcagacacgcatgcagattacctgcaggcaccagaatcttcaccagcgccgtgtatgcagacacatccagcttacacaacctctccctta

SEQ ID NO: 18029 - DNA, 286 bp, Glycine max
  unsure (1)..(286): unsure at all n locations
tcgttaagcaccgtaaataaacttccaagcatcggttgacaanctttcgtctgtacgtcagtttggggatgatatgctgaactgaacttaggttgtgtacctattgctttaaaaatggctttccagaagttgcttacaaacaaacggtcacgatctgaaacaatggaagatggaaatccatgcaatcttacaatatcctgtagaaaaactgcagctacttcggtagcggtgaagggatgtcctaatggtatgaagtgggcatattcagtgagtcgatcaaccacca

SEQ ID NO: 18030 - DNA, 351 bp, Glycine max
  unsure (1)..(351): unsure at all n locations
tctgctntgagtttattcaaacgacaataactgtntactcggatgtctgattgagtcccgtaatatatcgagacgctcgaactggaataccgaagctctgagataattcaaacgacaatgacttcttactctgatgtctgattcggtcccgtaatatattgaaacgctcgatattgaaagttgaagctctgagcaacttctaactacaataactctttactcggatgtgtgattcagtccagtaatatatcgagacgctcgatattgaatgttgaagctatgagcagattcaaacgacaataactttttactcggatggctgaatgagacccgtaaatatcaagacgctcg

SEQ ID NO: 18031 - DNA, 398 bp, Glycine max
  unsure (1)..(398): unsure at all n locations
agcttccttgttattattcctatataagctagagcttagctacacacacgcctctaatagctaagctcacctccttgagatgagaagctagaacttaactacacacacnccctataatagctaaactcaccccccatgcncaaaaataccatgaaagataacaaaaagaagtccctactacaaaagactactcaaaatggccttgaaatacatggctaanaccctatactactagaatggcctttatacaaggcccanaagaaggaaaaacctattctaatatttacaaagatgagtggactcaaccttgacccatgggctcagaaatctaccttgaggtttatgagaaccctatggccttgtttggtagctctagcccaatcctcttggagtcttct

SEQ ID NO: 18032 - DNA, 428 bp, Glycine max
agctttatctttgtcctcaggcttcatgtagacttgtccaaaatcgcgaagtgaacctcggatccctgtcagatacaatactagaaggaattccatgcaaccttactactttcttgatgtacaactccactagcttctccattctatacttcatattcaccggaataaaatgagcagatttggtgagtcgatctactatgacccacacagcatcatgtccacgactagtcttaggtaaactagatacaaaatccatagatatgctctcccatttccattccgggatttccaatggcttcaattctcccgatggtcgctggtgctcaaccttagccttttgacatgtcaaacatcttgctacatattcagctacatctttcttcatgccatgccaccaaaaacttctcttcaaatcttggtacatctta

SEQ ID NO: 18033 - DNA, 411 bp, Glycine max
  unsure (1)..(411): unsure at all n locations
agctttatattctaatatatnnctttacttgagattcacagtgcagatcaattaacattataccaattataattatttagttataagcttttatgtaacatttcacaatttgttctttataaaggattgtgatttttaatacaagttactttaattattcaacgttctacgtaaattatatatagcctctccaagcctaacacaacaatatttgagctcattttgaatttgaaataataacttaagacttattaattgaatgaaattggaattatattttcaattatacaatgatttgattttactattttctggctatgactattagtaaaaataaacttgatattctgatctcttaactggacctaacgttttaagacttctaatactagtaaagcttttcttaaacaa

SEQ ID NO: 18034 - DNA, 319 bp, Glycine max
gaggagcaccaactaatgatgctgatgaggcagcccctgacccagaagacgagtgattcttacaatactgcacactattctcatacatcctttccaacacatagtgccccaaattcccatttgcctccaataaattctcattgcacagaaactcactcgcacaaaccttctccactttcccatagaagtcatgcaagaagacatgagtcttatggttcccaccctttttgctcctggcgagaacaccaacggtgaatatcgctgacattctgccaggagcatctggccagtccccgcgtgtgccgtcaaccaatatgac

SEQ ID NO: 18035 - DNA, 431 bp, Glycine max
agcatggaacttgttttttgaattatgggtcctcttaaggactgagtcaatatatttgttgactgatcattagaaccaatgaacttagtgacaatctccttggacaaaagcttctctcgaataaaatggcaatcaatctctatgtgcttaatcctttcatgaaagactgggtttgaggcaatatgaagagcagcctgattatcacaatacaacttcatttgcaactcttcacaatacctcaattcttgtagaaattgtttaatccacgagttcacaagtaaccatagccatagatcgatatttagcttctgcactggaccaagcgacaagtgtctgtttcttgcttttccaagagataagaattcctccaatgatgacacataagcctgatgtagacctcctatccatgggacagccaggccaatcatcat

SEQ ID NO: 18036 - DNA, 386 bp, Glycine max
  unsure (1)..(386): unsure at all n locations
agctttgagtttattaaacgtcactaactntntactcggatgtcgaattgagtcacgtaatatgtccagacgctcgcaatagaataccgaagctctgagcaaattcaatcgacaataaatttttactcggatgtcggattgagtcacgtaatatatcgagaagctcgaaattgaataccgaagctctgagcaaattcaaacgacaataactttttactcggatgtgcgattgagtcctgtaatatgtagagacactcggaattgaataccgaagctatgagcaaattcaatcgacaataactttctactcggatgtcggattgagtcacgtaatatgtcgagacgctctatatagaataccgaagctctgagcacattcaaacgac

SEQ ID NO: 18037 - DNA, 406 bp, Glycine max
  unsure (1)..(406): unsure at all n locations
tttaattagatggggtttgttaatgtttatcttaacactatgttgtctaagcttacataatatgtctgaagtttagtacatatgcttgtactacaatttcaagatcctaagatgttgagnttttaattaaaccatgtgtggcaggaaatgaatgttctgagagattggcatactatggtatgagtacaaacctggtgaactatcttctggagcgtttcaaccagggaaatgcaaccgctgcaaataatgtcacaacctggtcaggcacatgctacatcacaccattgatnggagcctttctagctgattcatacttgtgaagatactggacaatctccagtttctcaattgtctattagtattgtagtttagagatnntttttttcttgtttgttgagtccccatg

SEQ ID NO: 18038 - DNA, 395 bp, Glycine max
atcttgagaagacaacgggggaggtgctcttaagagggtatgcttccgaagctatgagattaaccttaagcttgcaggaccaagcttcttatgccatacccagtgatgctctttgatcgagagtaggcacaacacttttttatcttgacaaatcaccaagtgtaatgtcatacagatttccttgtctcttagttgaaaaaagtgaagagttatccttgttatggatgatacacatatccttgttaaaggcgacattgtatccacaatcacataattgacttatgcttagcatattatgcttcaaccctttaagaagcaaaacattatctataggaggataggaaggaatacatactttacctacgccagttatcatacctttctgatccatctga

SEQ ID NO: 18039 - DNA, 416 bp, Glycine max
  unsure (1)..(416): unsure at all n locations
agcttttcatcttaccacttccagggtgctggaactacttcacatggatttgatggggcctatgcaagttgaaagccttggaggaaagaggtatgcctatgttgttgtggatgatttctccagatttacctgngtaaactttatcagagagaaatcagaaacctttgaagtattcaaagagttgagtctaagacttcaaagagagaaagactgtgtcatcaagagaatcaggagtgaccatggcagagaatttgaaaacagcaggttcactgaattctgcacatctgaaggcatcactcatgagttctctgcagccattacaccacaacagaatgggatagttgagaggaanaacaggaccttgcaagaggctgctcgggtcatgcttcatgccaaagaacttccctataatctct

SEQ ID NO: 18040 - DNA, 346 bp, Glycine max
attgtgtaccgtagtatatcgagatgctcgtaattgaaaacagaagctctaagcagattcaaacgacaataactattgactcggatgtccgaatgtgtcctgtattatatcgagatgctcgaaattgaaaactgaagctctgagagaaatcatatgacgataactttttactcggatgtccgattgaatcccgtaatatatcgagacactcgtaattgaaaatggaagctctgagcaaattcaaacgacaatagcttttgactcggatgtccgattgagtcccgttatatatcgagacgctcgtaattgaaaacagaagctctgagcaatatcaaacgacaataac

SEQ ID NO: 18041 - DNA, 422 bp, Glycine max
  unsure (1)..(422): unsure at all n locations
agctctanatggatcttatttgnnatncaaatggggggttggcttttaacaaaattcttattgcatatttctaagtttattttatttagtaaatatgtgtttattctaaaaataaagatgaattgagagtaaaagatagaattttgatgaatgaaatgattaaaaaattgagacagtgatcacttattgaaaatataattattaaagatttgaattgattaagtgctagatataaactagtcttaaataaaattataattctccatgtaaatgagttgaacaaaattataatctctgtaaatatattttaatgtcaaacctaccaaaatttaaactaaccgctcaataaatgtaaattttaaacttaaattaatttatttaattaaaaaataagtttaactacatatttaataaattaaatt

SEQ ID NO: 18042 - DNA, 431 bp, Glycine max
  unsure (1)..(431): unsure at all n locations
agcttgtgnattctccttcttcactacatgaagaatcaccgggttgagtcttctatgtgggtgtcttactagcttagccccatcttctaaatttattcgatgcatacatatggatgggctaataccaggaatgtccgccagggtccaacctatatccttcttatgcttcttgagaatagataatagcttctcttcttgctcatcagcaatggaggcagatataattactggaaaacttttgctatcatccaagtaagcatattttaaatttgatgacagaggcttcaattctggtgtgggcggctggatagtggtagaaagggatggtttctcagcctgtacctcataaagaaagtcagaggtatgtgtacttcctgaaacatggttagttctatctgactctataaaatcaatctcaagaggtaaaacat

SEQ ID NO: 18043 - DNA, 359 bp, Glycine max
  unsure (1)..(359): unsure at all n locations
agcttgtangttcttgtttcttcttcatcaatggaggggttggcttctcgaagatcaatgttagcggaatggagaaggaagaaacgtgattggagacaccactccaaggacaagatgagtcaagaacaaactcaccaccataggaagccatggataagagcttacagttaggagaagatgagtgaagggagaaagagagaacgagcacgaaattttatgcctcacatgaggtctgaactttgaagtctaatttcaaatgatcagagttgaataatttcacacacaaggcctctatttatagcttcaatgtcacacaagattggagagaaatatgaatctctattcaaatttcactcgaa

SEQ ID NO: 18044 - DNA, 423 bp, Glycine max
  unsure (1)..(423): unsure at all n locations
agcttgtcatttgttcttatagtgacaatttctttacatggagctacatgaacctgctgctcgatctagcacgaggagaactcatttgcagcatacacaatcacttagtattatggtagttntagaaaggagtggccgccactgtggttgcggttgcgcactaattcgaatatgtttagcggaagttaacggtggtggaataagttagtcgaacgttccaattggaaggagcaacattccatgcaataatagtctccctggtggtgtatgaagtgattctgacagaaagagcttggccacccagagttgcaaatgcttgataagaagccccccagttgtggctcatgctaatccatccacttctgcttnctttcacagacatgcttgatatgtctcctccaccttccacgttcttcacgtata

SEQ ID NO: 18045 - DNA, 410 bp, Glycine max
  unsure (1)..(410): unsure at all n locations
atctttcttcatcattccaaacttgtcatcattaggcttaggcagcatctccgtaacaaatttatattttataatacatgttacccaacagagaaatagaaggaaaagagaaaaatattagacatacattatgtaatactgttgaaaaaatttcaatcccgattagctaaaaataatgttaaaattaagtatatacaaagtagggtattctttttcctattagtaacttcttgaaattaagttaaataatggtatcacagtctatataagagagggaacaaactcttccttaataaataaatcaaatgtaaactcatattttaataaatatagttttcagacacaatctctattagtaattagaatttattgaaaattataaacatgtgtaatgtttattactntaatct

SEQ ID NO: 18046 - DNA, 382 bp, Glycine max
ggattatcagatgtttgtaatcgattaccagtaacggcacttcagaaaatactttaaaaagtcatgacccttcaaaatataactgtgtaatcgattaccagaaacctgttatcgattaccggtgataaaatttcaaaaatactttttgagagacacatgtcttcaaactattttgaaaaggcacgatgggcctatatatgtgtgtgtgtgtgtgtctgactttaaaaagcaagagagagatattctatgagaactcaattggcaaatgctctctcaacaactcttgggcaaacacttacaaatctattgagaattcttctaagatctttaatgtgtatcatctactctaaaagagagaaatctttctgttcatcttgaactc

SEQ ID NO: 18047 - DNA, 439 bp, Glycine max
  unsure (1)..(439): unsure at all n locations
agccttggagttttttagttccaatncgncttcttctttagtccagtcttcttctggcttcaattcttcagtgggctttccttctgtgtccagcatcttgggatgttcccagcctttgatgacagctttccaaggtctgctatccaatgatttgaggaaggccaccattcttgctttccaatattcatagttgcttccatcgagaattggtggtctgttcactggtccgccttctttctccatgttcatcagaaatttatctcctagatctcactctgtgatttcgagtgttggctctgataccaattgatattctgataccagnggacagatgtcgtacatgatgtcacgacatcacgcttcagaacatgcagattatatgtgtccgtatgaacagattaaacaagttaataacacaggagaattgttacccagttcg

SEQ ID NO: 18048 - DNA, 371 bp, Glycine max
  unsure (1)..(371): unsure at all n locations
agcttgtgttctattatatataggacatgcatgatgtcctttgacactatatccacttaaattgccatatgctaganagtcattaatagtacaaaacaccattgagtgtaacctgaatgtctcttgcagatgctcatcccacacatcaaccttgtctttccataattttctcaagtcttcaatcaacggagtaagatacacatcaatatcattccctgactgccttggactcgctatcatcatacataggataatgtatnttcacttcatgcacaacgaaggagggaggttgtaaatcatcagcaaaacaggccatgaactgtggtttgtgcttaagtttccaaaatgattcattttgtttgaagcaagag

SEQ ID NO: 18049 - DNA, 373 bp, Glycine max
  unsure (1)..(373): unsure at all n locations
acatgcacaaagtgtgactatatgatgtggcaatgtttgtgtattannagcaaatgctcacctctccctctaaanatgtgaattggatagagcttctaccaacttcacattaaatttatttccaaccatacacatcaaatattcacttagtgcgtgtgaaattacaaaactacccctaatacaaaaactagtcttggtgccctaaaatacaaggactgaaaaatcccatatttctagggtaccctacctacattatggagccctaaatacaaagaccaaaattaatgaaaccttaatctaatatgtacaaagataagtgggctcatacttagcccttgggcccgaaatctatcctaaagctcatgagaaccct

SEQ ID NO: 18050 - DNA, 461 bp, Glycine max
  unsure (1)..(461): unsure at all n locations
agatactcagctagcatcctgaagacaacttctatgatatatagacttgttgtttatgagtacatggctaatggttcattggataaatggatattcaacaagaacaaagaggaatttcagttggattgggatacaaggtataacatagcacttggaatagcaaaaggacttgcttatctacatgaagattgtgactcaaacattattcattgtgacattaaaccagaaaacgtgctcctagatgataatttcagggttaaggtttctaattttggtttggctaagctcatgaaacgtgaacaaagacatgttttcacaacacttagaggcactagagggtatcttgcacctgagtggatcacaaactgtgccatatcagagaanaatgatgtttatagctatggtatggtgttgctagagatcattggggggaggaaaaactatgatcctagtgaaacttc

SEQ ID NO: 18051 - DNA, 342 bp, Glycine max
agcttctcgatatattatgcacctgaattggacttccgtgtgacaagttatgaccattttaattcttcgagagcattcggtgttcaatttcgagcgtctcgatatattatccatctgaatcggacttccgtgtgataagatatgaccatatgaatttctcgagagcttccgctgttcaatttcaagcttctcgatatattatgcacctgaatcagactctccgttgaaaagttatgaccatttgaatatctcgacagattccgatgttcaatttcgagcgtctcggtatattatgcgtcagaatcggactttcgggtgacgagttcgaccatatgaatttct

SEQ ID NO: 18052 - DNA, 405 bp, Glycine max
  unsure (1)..(405): unsure at all n locations
tgcttatagtatatataataaaagaactatgactattgaagaatctattcatgtttcctttgataagtctaatgctatttctctgagaaaggatattttagatgatgttgcataatctttagattaaatgcatattcatagacaagattctaaaggaaaagggaaaggaagcaatgaagatcctccagaagaagccaaatcaaatgatgaacttccaaaagaatggaaagcttcaaaagatcatccccttgacaacattattggtgatatctcanaagggataacaactagacattctcttaaagatntatgcaataatatggattntgtgtctatgattgaacctaaaaatataaatgaagccataatagatgatcattggataattgctatgcaagaagaact

SEQ ID NO: 18053 - DNA, 302 bp, Glycine max
  unsure (1)..(302): unsure at all n locations
agaatgtgcttagagcttctattctcaatacgagcgtctcgctatattacgggtctccatcggacatccgtggaaaagattattgacgcttgaatttgcaacgagcttacaatttcaatgtcgagcgtctcgatatattacgggactcaatcggacatccgagtaaaaaattattgtcgtctgatttgctacgagcttccgttttcatttggagcgcctcaatatattacgggactctattggacattcgagtaanaagttattggccgttgaatatgctcagaagctcattctcaatttcg

SEQ ID NO: 18054 - DNA, 430 bp, Glycine max
  unsure (1)..(430): unsure at all n locations
caagcttggagtttcctagtgccaattcgtcttcttctttagtccagtcttcttctggcttcaattcttcagtgggctttccttctgtgtccagcatcttgggatgttcccagcctttgatgacagctttccaggttctgctatccagtgatttgaggaaggccaccattcttgctttccaatattcatagntgcttccattcgagaatggtggtctgttcactggtccgccttctttctccatgttcatcagaatntatctccctagatctcactctgtgatttcgagtgttggctctgataccaattgaaattctgataccaagggacagatgtcgtaccggatgtcacgacatcacgcttcagaacatgcagattgtatgtgtccgtntgaaccagtataacaagtaaataacacaagagaattggt

SEQ ID NO: 18055 - DNA, 319 bp, Glycine max
taagtcaatatcttttatctgtcttattcatgcacatgcctatattctgatcaatgaatcatcttaggtactataacataactattctgtatacggctctttgtattgctaatgctatatatgctacatcatattttgataaataaatacttttaggtagtataagatcatagtttgaatcgtaatgttatatggacattagatttacgttatatgataaattacgaatacttttacatactctaaggtttaattttatatggtacattaagaatatctttaattttgatatgatacataagcctacttgaaatttcct

SEQ ID NO: 18056 - DNA, 342 bp, Glycine max
agcttcaacattgtatttcgagcgtctcgatatattacgggcctcaatcagacatccgagtaaaaagttattgttgtttgaatttgctcagagcttcaacattcaattccgagcgtctcgatatatgacgggactcaatcagacatccgagtaaaaagtcgttgtcgtttgaattggctcagagcttcaacattcaatttcgagcgtctcgatatgtgacgagagtcaatcagacatccaagtaaaaagttattgtcgtttgaatgggctcagagcttcaacattcaatttcgagcatctcgatatgtgacggggctgaatcagacattcgagtaaaaagtt

SEQ ID NO: 18057 - DNA, 428 bp, Glycine max
  unsure (1)..(428): unsure at all n locations
gagccaattcanatgacaatgactntntactcggatgtctgattgatgcccgtaatatatcgagacgctcgaaattgaatgtggaagctctgagccatttcaaacgacaataactttttactcggatgtctaattgacgcccgtaatatatcgacacgctcgaaattgaatgttgaagctctgaggaaattcaaacgacaataactttttactcggatgtctgattgagtcctgtcatatatcgagacgcttgaaattgaatgtggaagctctgagccaattcaaacgacaataactttttactcgaatgtctgattgagtcctgtaatataacgagacgctcgaaattgaatgttgaacctctgagcaaattcaaacgaacaataacttttactcggatgtttgattgagactcataatatatcgag

SEQ ID NO: 18058 - DNA, 430 bp, Glycine max
  unsure (1)..(430): unsure at all n locations
naagctacatatttgtctgttggaagaaagccatggatgctgagagtacagctcttgaagtaaataaaacttggactgctgaggatcttccatgtggaaaggttccaattagttgcaaatgggtatataaaatcaagtatcatgccaatggcacaaatagaaatgtacaacgccaggcttgtggccaaaggttacactcagatggagggtgtatactactttgacactttttcccctatagccaagatgactacagttcgtgtgttactaactgtcgctgctgataagagtcggcatcttgacaacttgatgtcacaatgctgtcttgcatggaacttgaatatgaagttatatgctcttctcctggtatgatcttctactcttcagtatcgaattaacattccttattgggtgaccaactaccgtcatg

SEQ ID NO: 18059 - DNA, 317 bp, Glycine max
  unsure (1)..(317): unsure at all n locations
agcttttaatgatctttgtcatgcagccgatgagagaaataggcctgtagtcatttaacgattgaggatgatttgatttanggatcagggccatgaacgaagcattgctgcctctatgaaagcttccatggcagtggaactcatccacaaatctcctgaatttacgtctcagaatcttccaaaaagccttaataaagttgaaattaataccatcgggacctcggcatctatcaccaccacaactccaaacagcatctttaatctctcgatcagataaaggcgcaatgagtccctctctctgattctgatcaatggag

SEQ ID NO: 18060 - DNA, 282 bp, Glycine max
agcttttgattaatttatatggtcataaatagtcactcggaggtccgattcatgcacataatttatcgagacgctctaaattgaacaacggaagctctcagaaaatttaaatgctcataacttttaactcggaggtccgattcacgcggatgatatatcgagacgctccaatttgaacaatggaagcttttgaacaattcaaatggtcatatattgtcactcggaggcccgaaactagcgcataatatctcgagacgctcaaagagaacaaacggaagctct

SEQ ID NO: 18061 - DNA, 427 bp, Glycine max
  unsure (1)..(427): unsure at all n locations
tcgtgaccagcgatgtttcggttatgtgcacgaaggagagatagaagacagtgaatggngatgacattnggtgggccttggcaacactaagctttgatgactatgctgaaccaatgagaaggtacttgcatagatataaagaggttgaggtagaccataataataaggtcaatcttcaagatagagagaataatagtcctgaagagaacgacgatgaagtatttcaattgagtaatagaggggttaaggtttgatgaccaattattatgcttagtgtgaagtagtaattaattaaggcttgtttanggttgacattacttttcttgtatacttttcttgtctaaattgaattgattgagcctgcctagaacaagaattcttggtttgctttctttctttctcttcttcttctntatacttatatact

SEQ ID NO: 18062 - DNA, 299 bp, Glycine max
  unsure (1)..(299): unsure at all n locations
gaagatgatgaatgggaaacacgggggccgaacaataaatctgctgttaccaagactcaaagctttcttccatcagaattaagtggtatttttggaggacaacttagaagtttggtgagagcctaaggtacaaaacaactctataatatattagtgaagggattctttttgttttaaatgtcaacttcattaagatnttgggaaaattcaattggaccagctgttgcttcctgctgatattccttcaaagaaaaaatgaacatgtacataaatgatgtattatataaaacaaacattat

SEQ ID NO: 18063 - DNA, 298 bp, Glycine max
  unsure (1)..(298): unsure at all n locations
agcttcttgattgntatgtgtggaccctcaagtgcaatcctccgttctccacttatttcggaaccccatgaatgtcattgcctagcgctattcatgtgtcctccaccttcgagtctggagccccacgaatgtcattgcctagcactgttcgctaattctccattcttcacttttattcggagccccatgaatgtcattgcctagcgctgttcatgtgtcctccaccttcaagtttggagctatgcttcattattgcctaagtgtggaccctctagtgcaatcctccattcttcacttt

SEQ ID NO: 18064 - DNA, 440 bp, Glycine max
  unsure (1)..(440): unsure at all n locations
tgatcttgtaggccactgcccctgatgtcagctccattggttcttgtttacctaggatcttctccatcaatggattcctttgctttttggaagatgaatgacaacgtaatggagaagcaagagagagaggagacgccacttcaaggaaaagtgagtctagaagaagctcaccaccataagaggccatggataagagcttagaggaagaaggagatgaatgaagggagaggaagagaagagcacgaaattttgtgctctaaaagagctctgaaatctgaagtttaatattcaaatgatcaaagttgaaaaaaatgcacacacatgacctctatttatagcctaagtgtcacacaaaattggagggaaatttgatntcaattcaaattcacttgaatttgaattgaantgtggagccaactttggaccaaatttactaatat

SEQ ID NO: 18065 - DNA, 333 bp, Glycine max
  unsure (1)..(333): unsure at all n locations
agcttttactttttatntcgagctttncgatatatgacgggactcaatcggacatccgagtaacaagttattgtagtttgaattagctcacggcttcggtattccatttcgagcgtctcgatatattactggactcaatcggacatcagagtaaaaagttattggcgtttgaatttgctcagagcttcgagattccatttcgagcatctcgatatatgacgggactcaatcagacatccgagtnaaaagttaatgtagttcaaatttgctcagggcttcggaattccattccagagcgtctcgatgtcttacgggactcaatcagacatccga

SEQ ID NO: 18066 - DNA, 281 bp, Glycine max
ttgagcaaatgcacacgacaataactctttactatgatgtttgattgagtcctgcaatatatcgggacgctcgaaatggaataccgaagctctgaacaaatttaagcgacgataaccgttttactcggatgtctgattgggacccgtaatatatcaagatgctagaaatcgaatagggaagcgttgatcaaattcaaacagacaaggactttttactcggatgtgcaattgagactcgcaaatattcgagacgctcgaaatggaatattgaacctctgagc

SEQ ID NO: 18067 - DNA, 442 bp, Glycine max
  unsure (1)..(442): unsure at all n locations
ttcttatgcttatttcagcctatcgcccttagactaatggctagattgaacggaccattcagtcgctggaggaccgtttgagggcatgtgtcttagaacaaaagaggagttgggagagttaaagactactcaaagtaggcagaaaaactatcaggctgctcaagaataactgagaaggtcaagttaatccaagaaaggctaaagactgctcaaagtaggcagaatagctatcaggacaagaggaggaaagacctgaaatttgagattggtgatcatgtattcttgagagtcattccattgattgggttggtcaaacattgaaatcccaaanactcatacctcagtttatcaacccttttcanattctcaaatgagtcagtcctacggcataccaaaatgcattacctctgtctctttacaatcttgacaatatctatcatgt

SEQ ID NO: 18068 - DNA, 319 bp, Glycine max
ttattttatatccaatatatcctctaaattattatattaaaaatttatatattattaatcaaagagatttgaacattaatcaaataagttaatttaaaatatagaattgtctttaatggaataaataagaacaaaattgatttaaacgaaaaacttatctcaaatacgtgaatgttattattgaaactttaaatattatttaatatttgaaaataattttatcaattaatggttaaacatgattcgagaatgtaatatgtacttattatacttcattcttataagtggtgattacatgatttaaaatatgaggttatcc

SEQ ID NO: 18069 - DNA, 289 bp, Glycine max
tgtagggttaaagtcttacgattttcacgtgctcatgcaactattgtgagccggggctatatgagacatggtgccaaacaaagtcaggttaacgataactcgcctgtgctttttcttccatgctatatgtagcaaagtcattgatctagtcatgtttgatgagttggaaaatgaggccgcaattatactgtgccagacggagatgtagtctccccctgcgttctatgacatcatgattcacttgattgcgcatctggacagagaatcacatgttgtggtcctgtttatc

SEQ ID NO: 18070 - DNA, 373 bp, Glycine max
tgcattcatgaacctaacaaacaatacttatgcatatcttcagtcctgctccaatgaataaatcgttataagtaaaacatgtatgtttattctaactcaccccatcttggagcttgtcctctacagcagtggcaccaaaaagaattaggttcttctcaatcttatctgatacttcctcaatcattatatcctgatcagcactgactacattcttggccctagagaatttactatcaaactccttgtattcttctgcatcaagttcacgataggccagtataaaggttctcagacccgcatcagcatactcatgcacatgctccatggttttctcttcaaactccctcctattcttggcaagcctttcaaacat

SEQ ID NO: 18071 - DNA, 420 bp, Glycine max
  unsure (1)..(420): unsure at all n locations
ttctntactatgcaaggaataaccaaggaaaattccttcatctgacttagcatcaaactttcctaagttttcttttccattgtttaatacaaaacactcgcaaccaaaaacatgaagatgcgagatgtttggtttcctaacattgaacagttcatatggagttttctttaaaatgggtcttattaaagccctattcatgatatagcatgcagtattaacggcttcagcccaaaaatattntggaagaagagtatcatttaataaagttctagcaatntctttcaaagaactatntttcctttcaacaactccattntgttgaggggttctaggtgcagaaaagttatgttcagtgtcatgcttatcacanaataaatcaaattatttattttcaaaatcaccccatgatcanctctaata

SEQ ID NO: 18072 - DNA, 347 bp, Glycine max
  unsure (1)..(347): unsure at all n locations
tctttacttgtatgccgancaagcgctaatatatggagaccttgatattgaataacacaactctcgagaaattcaatggcataacttttcacacggatgtccgattctggcgcataatatgtcgagacgctcgaaattgaacaacggaagctctcgagacattctaatggtcataacttttcactcggaggatccgatcaggcgcataatatatcgagacgctcgaaattgacgaacggaagctcccgagaaattcaaatggtcataactgttaactcagaggtccgattcaagcgcataatatatcgagacgctcgatattgacatctgatgctctctagaaattc

SEQ ID NO: 18073 - DNA, 370 bp, Glycine max
cccaccatattttcatagtataacactggtaatgtgtctattattattgtgatcatctctttctcctcatggaacgtaccacttgagctgccaagtctctccacctttgggcgtattctttgaaagataagtgcccctttatgcacatgttctataagtgcatactatccggagccatattaaaattatgctgatactgcctaacataggaaaccattagatccttccatgaatggactcaggaaggatccaagttagtgtaccatgtaacaactaccccagtaatactttcttggaagatatgtatcaatagatcctcatctttttcgtatgcccgcgtctttcgacaatacatctttagatggttctt

SEQ ID NO: 18074 - DNA, 457 bp, Glycine max
  unsure (1)..(457): unsure at all n locations
taagctntgagcatattctaacgacaataactgtataatcggatgtccttattttgtccctgattatatcaaactgctccaaattgaagatggaagctcagtacaaatttaaacgagaataactttttactcaaatgtgcgattgagtcacgtaatatatcgagacgctctatattgaaaacggatgctcatatcatatgtgaaccgtgataacttttaactcggatgagcgattgagtcctgcgatatattgagacgctcaatattgaacacagaggctctgcgcagatgctaacaacaatatctttttactcagatgtccgattgagtacttgaatatgttgagacgctcgaaatagaaaacaaacgctcctagaaaattcaaacgaataacgttttactcacatgttcgactgattcccgtatatatcagacgctctaaattgaaacgaagctc

SEQ ID NO: 18075 - DNA, 427 bp, Glycine max
  unsure (1)..(427): unsure at all n locations
agcttatcttcactttgtacatgcagcctatcaaggatattggtctataatcatttanggactgaggatggttaactttggggataagagccaagacagaggcattgctgcctctatggaaacaaccgttgacatggaactcatccacaaatcttctgaactctggttttagcacactccagaattccttaataaaattgaaattaaaaccgtccggcccatggcacttatcttcaccacaactccacactgcttgcttaagctcctggtctgagaaaggtaaaattaaaccctccctctgcctttgatcaagagaatggaattgaactccatcaatggtaggcctacagggattctgctcaaataatctgttgagaaagatagtcacagcgcctatcttcacctcctctggttgctggacccacag

SEQ ID NO: 18076 - DNA, 391 bp, Glycine max
agcttatatgatattcaaatggtcataacttttgactcggatgttcgattcaagcgcataatatatcaagacgctcgaaattgaacaacggaagcattaaagaaatccatatggtcataacttttcacacggaggtcagattcatgcgcataatatatagagacgctaataattgaacaacggaagccttcgtgatatgcaaattggcataacttttaactcggatgtcagattcaggcgcataatatatcgagacgctcgaaattgaacaacggaagctctctagaaatataaatggtcatatctattaactcggatgtgtgattcaggcgcataatctatagagacctctaaattaacaatggagctcttggcaatcaaatgtcataac

SEQ ID NO: 18077 - DNA, 339 bp, Glycine max
aataactttaactcagaagctttatcaaatgcaaacggcaataacattttactcgaatgttctatttagtcacgtaatgcatcaaaatgctcgaaattgataacagaagctcggtgcgaattcaaacgacaattagtttttactcggatgtccgaatgagtcccttcatatatcgagacgctcgaaattgaagacagaagctagtactaaattccaacgacaatcatattttactcagatgtccgatggagtactctaatatatctagactcttgagattgtcaccgaagctctgagcaaattcatacgaacaatactgtattttcgaatgtccaatgg

SEQ ID NO: 18078 - DNA, 363 bp, Glycine max
atcttctatactttatacaagaatgaagctctgataccacttgttagacaagtggcctcagatatattaagaagggggggttgaattaagatatcccaaactattttcccaattaaaaaattatttcactttcttttcaagttatagattcccttaacaatgaacttcttaaatattaattcaaatcaaacaatttgaatatgaatgtaaagcgataataaacaaaggagattaagggaagagaaagtgcaaactcagatttatactggttcggccacacccttgtgcctacgtccagtccccaagcaacccgctggagagttccactatcttgtaaattccttttacaagttctaaacacac

SEQ ID NO: 18079 - DNA, 387 bp, Glycine max
tctgtcttagtctgagttcagcctaccatcctcagactgatggccaaactgaacggaccattcagtcgttggaggaccttttaaaagcatgtgtcttagagtagaagggaagttgggagagttttcttccattgatagagttcacttataataacagttatcactctaccattggcatggctccctatgaagctttgtatggtagaaggtgtaggacacccctatgttggtcaaagcccggagaatgcctcaccttatgaccagaagtggtacaacaaaccactgagaaagttaagttaattcacgaaaggatgagaacggctcagagtacgcaggatagttatcatgataagaggaggaatgatttggaatcgaagttggtgatca

SEQ ID NO: 18080 - DNA, 328 bp, Glycine max
  unsure (1)..(328): unsure at all n locations
agccagtctangttcatacactgatccgttcaatnggcataccgaggaagaattatctgacttgtaacctttgggaaattccatataaacttcttcaaacaaatctccattctaaaaggcattattaacatctaattggagaatgcaccaatttctagtagcatcaacacaaagtaaaactctcacagttgtaagcttggccactggagaaaaagtgatgtatctccatgtggaacttgtaagccttgaatcttctttatcaatggagtcctttacttcttgaatatcaatggccgcggaatggagaacgaagaaagatgattggaga

SEQ ID NO: 18081 - DNA, 466 bp, Glycine max
  unsure (1)..(466): unsure at all n locations
actaagcttattaaagttatatggcttgaaacaagcaccgaggcagcgtcactatatgtntaatgagtntatgagcaagtcaggattcaacagatgtgacatggaccattgttgctacgttaagatatatactaatagctatgttatccttgtcgtgtatgttgatgacatgttgatcgcaggatctagtatggcagaaattaacaggttgaagcaacagttggcagaaaacttttggtatgagaattcttagaaacatatcagaaggaattatgaagctgcctcatgagaaatatatacacaagttacttgacaggttataccttgaagattctaagactangaatacccctttgggatctcattttgaagtttcaaagaagcaatctttgtagacagatgaagaaaaatgctacatggtaagagtaccatatgcatcatcagtcgacagtttgatgtccgttat

SEQ ID NO: 18082 - DNA, 425 bp, Glycine max
  unsure (1)..(425): unsure at all n locations
gttggaacaaacaggttgtatnacaaatttgtatcttatatgtatatcatnngnggaaattaaaacaacatcaatttcagccccatttacatgtttcgatccatcgaaatataatatccaaggtttaattcatatatagcattccaatattttgatgttcgaatgatcaaccaagagatctacctataacttaggctctaatagcttttaatggcacaaaagtaagggaaaatccagataatgcaagggtccatttccctattctattgtgcaaaatagattaagacaacatanatttaataacattgttatgagagagtacttgaacattgaaagattctatataatacttnaagttagtacaagaataatacaagtgtaagcacagttnntttattgcactatatctaatnttgacatcatta

SEQ ID NO: 18083 - DNA, 414 bp, Glycine max
ctgtagtctttggacacctcagagaccttgaagtttctgttgtggtatccagtgaagacattttcacggtgtgaccatgctgtgccaggatggtatgctatgaatgcatcagtgacatcctggccagcacggtctgagattggaacatcaccaccagggtgctccttgacccaatctgagacattgtacaccttacctcgaattgagatccataaatctccctccttggtgtgacccttcagctcctctgaggttatgtacttcttctccttctcaacaacctccattgcttgtgttaaccaaaaacaacacaaatcactgaaatcatacacaatgagaactacaataagaagatatatagaatatagacagattgatcgatacgaacaataatggcgtatctgggtcttctgc

SEQ ID NO: 18084 - DNA, 337 bp, Glycine max
atctatttctcttgaacaaatacccctcagccgaatagaatccatcttaggccttcttcctacaactctcgtaaatgggagagaaatgttcatctatagcatacaagtccctaatgtcatcaaatcctataattagagctcctacagagcaataaaatgtgtgtctcttagagagggcatcaactaccacatatcgtttcccctttttgtatttgataacatatggaaattgctttaagtactctacccattttgcatgccttttgtttaacttgctttgccctctaatgtacttaagtgattgatgatcactatgaatgacaaattccttggaaac

SEQ ID NO: 18085 - DNA, 386 bp, Glycine max
tttatcttatttctcaattggtgacccaagagaacattttttttatctaaccacccatctattggtgagattaaaaatgtagttttcattatgagtagctctagttcccctatccctgatggtttcagaggccacttctaccacaggtactaggaaattatctcaaaggttgtctataattctgtccttcaactttattcataagaattggcttctccttggatttaaatcaaacattttttgcctttattcctaaatttccataagacgatagaatagaaaacttcagacccactgctctgggtaattcccaatctaagattatctctaaaatcgtcacaagtagattggcctaaattactcctaagctgatgtttaataaccaa

SEQ ID NO: 18086 - DNA, 419 bp, Glycine max
agcttcttttatttaagatttttctttaaaacagtcctaagcagtgtgcctaaagtcctattgactacctcagtttgaccatcagtttgtgggtgacaagtagtagaaaacaacaatttagtaccaatcttaccccacaaggtcctccaaaagtgactaatgaattttgcatccctatcactgacaatgctcctcggtaatccatgaagccgcactatttctttgaaaaacaaatcagccacatgacaagcgtcatccactttcttgcaagggatgaagtgtgccatcttatataacctgtcaacaacaacaaacacagaatcctttccattcttggttttgggcagccccaaaacaaagtccatagatatgtcagtccaaggatattcaggaacaggcaaaggagtatacaatccatg

SEQ ID NO: 18087 - DNA, 449 bp, Glycine max
atagaatactaagcttcaagaataatggcctcagcatacttcttattcccatattgttattcaattattaggcctcctatttttaatggagaaggttaccactactggaaaacccgaatgcaaatttttattgaggcaatagacttaaacatttgggaagccatagaagttagaccttatgtacccaccatggtggctggaaatacaacaatagagaaacctatacaagagtggtatgaagatgaaagaagattattgcagtaccaattataggctaaaaacatcattacttctgccctaggaatggatggatattttagggtttcaaattgtaagagtgctaagaatatgtgggacactctacaagttacacatgaaggaacaactgatgtcaaacgatctaggataaatactttaactcatgagtatgaactattatgatgagaaca

SEQ ID NO: 18088 - DNA, 395 bp, Glycine max
agcttagtctctttacatattgtgaacaagacatctaaggctctggtaatcgattactaggcagtgtaatcgattaccataagacaattttgaaaaatagctgtctaacaggattatgaatttgaattatgaccctgtaatcaattgatgtttgttatcgattaccagcaacagaactcttgaaattcaaattcaaaagtcatgacccttcataatataaccgtgttatcgattaccagaaacctgtaatcgattactagtgaaataatcagaacaagctttatgaatagacacatctcttctaaccatcttgaaaaggcacaaagggcctatatgtatgtgtgtctggtttcataaagcaagagagagatattccaagagaacttcattgtcaa

SEQ ID NO: 18089 - DNA, 447 bp, Glycine max
aagcttacatacattatcttcaaagatcggaattcaactaatttcctccgatgcttctaactctgaaaatatctatgtttgacactaaggataaagttatatactaataatgataatatgtgtctcttttatctccaacaagttatccaaataaataattccttttgtttggaaggaagattgatagatacaaaatgttaacatataataccatgtcataagaaaaaagagatggattacaataatcaacattctttttcaagtgtttgtcttagaataatgatattcatcatattcactctctggatacaataatttttatctcatatttactctctttaatgttctctatctcttttaccacataacatattatatctataaattttgttctttattatatttatttctctctatccctatctttcatccaccattgaccctaat

SEQ ID NO: 18090 - DNA, 420 bp, Glycine max
agctttgcttattattaagatgataaaaaatttcgatgagggtggaaaagttcaaagcaagatacaatggcacattcagtgactgaggcagagtatatagcgacaagttaagccgctgaagaagttgattggatgaacagttcatctctgaacttggtgagctaccttcaataggaggaccgattccactattgtgtgacaatatggagctatcgtttaagcaaataaccaagattacaccataagaccaaacatattttatgaacgtatcacttgattagagagatcattgaacgtggggacatttagattgaaaaggtggatataaaagagaatgcaacatatccattcaccaaggcactttgcataaaagaatttatcaagcacaaggtggaagttatgatgaagtcatgagtaatt

SEQ ID NO: 18091 - DNA, 366 bp, Glycine max
  unsure (1)..(366): unsure at all n locations
agcttgtgttctatgtctcaaaacccacattagaagtaagacttataccatattcacccgacaactcaattttgtagacattatcattgttcttgaccagtacttgaaaaggaccatctccttttggcataagtcttgtgaagggaaccgtttctttcctaaaatgcacccatacctagtcacctggttcaaatgttactttttttcttactttgtgttcatactatcgatacacttctatttttnttctctcaatttgggcattgactttctcatgcaacttcttgacatatgctgctttaaccttgccagacttatctttaaatcgagaaatgttacgtaaagaccacaaatacaaaggagtca

SEQ ID NO: 18092 - DNA, 436 bp, Glycine max
  unsure (1)..(436): unsure at all n locations
tatcctaaaaaaacaggacatccttactttatatattcagtttacaaaacagaaaaaataacanaataaactgtcatatggattntagtcacagcccaacgattcactaccttgaactaacatccatataagacacaaactgcaccctctgaacacacatgatcttaaccctaacaatctacattgagcaagcttaagcagtgatcaaacttgctctttggaactggctttgtaaacatattagcaggattgtgcagagtgataatcttatgaactttgattcttctttctgaccgaatgaagtgatatctaacatctatatgcttggttctatcatgatgaacctaatccttggccaagcatatagcactaaggctgtcacagtagatgttagcatattcttgattaatttcgagatcatctatcagacctctca

SEQ ID NO: 18093 - DNA, 429 bp, Glycine max
taagaggaccctcggtgtggtagccgtaaacctcatatgccttattcaaaaggtgcttgaagagagggtgacaaagatacgaaattgggatcacaaatctttgagacccaactccaccagcttcttctgtctcttcttccacttgaacagcgagccaacccttcttcaccttcatcttctttcttgcctactgagagatagagcaaagcaaaggaaccgtattattatagctgctgagtcacaatggtaggtaatgtggtttctttcttttatatagaaaagatatatatatatatattaaatggggttataaatttgtaataaaaataaataaaagggataataacttgatgctgtgtgtgttgtgtacgtgattcggaatcaaaatagtggggaaggcaagggacagtgccgtcccattccgtaact

SEQ ID NO: 18094 - DNA, 436 bp, Glycine max
tgtgattcttctcgccctgtataagaggttagctttcgtttcaattaatttatcattcacgtgatcaagatgttagaattaatgtcttatgtgagagacatgtgggactaataaataaataattaataattaaggactaaattgtaattgggttaattatgagaagtggttataaaaggggttaatatccactaacgtgaaataaagttcttttcctgacagaaaaatgttctctctcaccatagttatcacgaacggagagaggcaaaaaagaaaggtctaaggaagtgaaatcttatttatctcatctttcaaggaaatctaagtacatcggagaaaagtcttcctatgaagaaaggtacacattattatctatttgtttattgattatttgtgagaatcataggtttcaagatcttgttatttcctataatta

SEQ ID NO: 18095 - DNA, 426 bp, Glycine max
tttgacggactataccaagctctatgtaacttgggtctgagaaagatctatatataggcttgctaagggtagagagaggaagactagagatttggatcaagtaaagtgtgttaaggatgaagaaggcaaagtcttagtgcatgaaaaagatatcaaggaaaggtggaaggcgtatttccacaacttatttaatgatggatatggatatgactctagcagtctagacacatgagaagaggaccggaactataagtactatcgtcggattcagaaacaggaagtaaaggaagcgttgaaaagaatgagtaatggtaaggcggtggggccagacaacatacctattgaagtgtggaaaactcttggagatagaggtcttgagtggctcaccgaactctttaacgaaattatgaggtcaaaacgcatgcc

SEQ ID NO: 18096 - DNA, 380 bp, Glycine max
tggatacgggtctgtgagtaatcgcttagctcacataatgatacgcaacctattcgtaatactggggttcatattagactgaaaaataagggatgacacacaaaggacagcattgacagctgctcacactgattcatttacaatgaggatgaagtatctgttttgttcgacgaaagtatttagaacttcataaaaaatgccttttgaaaataagtagcatgcacctttcaaatcaacttgaaatcagaacaagtcacacaaatgggagcttttacctcaagaaatttgaagtcaggtttaatggtacaacagatgccttcttgtgtcaataaagaacgaattacaagtgaaaacctttctgggattcgaatgggataatc

SEQ ID NO: 18097 - DNA, 433 bp, Glycine max
tcctttctatacccgcttcagcaaatgtcattttatttcccttcaccacccaatagacatgatgctcaatctccattggaagatgacatgccttaccaaaaaccaccttatagggagacatccccaaaggtgttcggtaagcggtcatgtgggctcatagagcatcctcatgtagcttgctccaatccttcctattgggttgcattaccttctacaacacttgcttgatctctttattaaaaacctttgattgcccattagttcaaggataataagctgtagcaactctatccacaacctcatacttctggagcaaggatgccaatgacctgttacagaagtggctcccctggtcactgataatggctctagacacaccaaacctactaaaaatgttagatctcacaaaatccacaacaagtttagaatcatt

SEQ ID NO: 18098 - DNA, 390 bp, Glycine max
gcttgaggtccctatgcatgaccccaagcgagtgacacgcttcaacaacctcaacaatcgtctttatcaacctcgccgcctgtctctcgctgtagtgtcccttctgcacgatcctgtcaaacaactccccaccctcacacaactccatgacgaggtgcaccgccgaggaatcctcgtacgtcccttcgatgcggacaacgtgcgcgtgctccgacaagtggtgcattatctgaatctcccgccacacgtcctcgtagtcctccttgcacagcagcttccgcttgggaattgacttgcacgcgaatttccccccggacgcgcggcgcgtgcactcgaaggtagtcccgaattgaccctgccccaacttccgccccacctcgtacacctcac

SEQ ID NO: 18099 - DNA, 430 bp, Glycine max
tctaaactttatacaagaatgaagctctgttaccatttgttggacaagtggcctcagatatcttaagaagggggggttgaattaagatattacaaattatttccccaattaaaaattctatttaactttctattcaagttataaattcccttaataatgaatttcttaaatattgattcaaatagaaaaatttgaatatgaatataagacaataataaataaaggagtttaagggaagagaaagtgcaaactcagatttatactggttcggccacacccttgtgcctacgtccagtccccaagcaacccgcttgagagttccactatcttgtaaattccttttacaagttctaaacacacaaggacaatctttcctttgtgtttagaattctttcacaacaagagaccctcggtctcttaatcccttttc

SEQ ID NO: 18100 - DNA, 376 bp, Glycine max
tactcaagctttgcataccccaaggatccattaggaaattacttgttaattatagtctgagggtgggctcatgggccactttgggatagacaagacccttgccttactcaaagaaaagctttattggccccatatgaagaaagatgtccataagcagtgcactaggcgtgtggcttgtttacaagccaagtctagggtgatgtctcatgggctatacacacccttacccatcccatctgcaccttgggtagacattattatggactttgtccttgggcttcctagaacccacagaggtgtaaactctatctttgtggtggcggataggtctagcaagatggcacactctataccatgccacgaggtggatgatgct

SEQ ID NO: 18101 - DNA, 431 bp, Glycine max
  unsure (1)..(431): unsure at all n locations
tcacaaaagtttatatggcttgaaacaagttccgttttagtggtacaagaagtttaatgagttaatgagcaactcgggattcaaaagatgtgacatggaccattgctgctatgttaagaaatatactaatagttatgttatctttgtcgtgtatgttgatgacatgttgattgtaggatctagtatggcagaaattaacaagttgaagcagcagttggcagaaaactttgaaatgaaggatcttggtccagctaaacaaatccttggtatgagaattcttagaaacagatcagaaggaatcttgaagctgtctcaggagaaatatatacacaaatggcttgacaggttttaccttggagattctaagaccaggaatacccctttgggatctcattngatgttttcaaagaagcaatctttgcatacagatg

SEQ ID NO: 18102 - DNA, 422 bp, Glycine max
  unsure (1)..(422): unsure at all n locations
ntgaaaaatacctgtgcttccgtaaactttatttttttatgtgatgcaagcccagccaaatcatgctccatgtattcgaaaacaaggtataagctgcaagacatccttgatgtaacaaggccttccagttttatgacatttggatgatcaagcctacgtagaatgtgaatttcccttgccatgaagcgaacactctctggctcaagattatcaaacctgacttttttcaaagcaacaattttattttgctcaagatcacgagccctataaacattactataagttccctgtccaatctgaaaaataaggaggaaaatcttaccattcaaggaaaactaaaacaggctgaagacaatatcatcatttaattgcaatccaagacaaaaaaaaacaaaaaggatatctataaatctagaaactac

SEQ ID NO: 18103 - DNA, 426 bp, Glycine max
  unsure (1)..(426): unsure at all n locations
ntgacaagacagtacacactgctgtcttctacaacattataaaatatggaaatctactctaaagatacatctaataatacccataattataacactccccctcaagctggagcatataaattatatgcaccaagcttggaacatataaactgaattctaggcccccttaaggatttagtcaaaatatctgctggctgatcattggaattaatgaattcagtgacaatctctttagacagtagcttctcccgaataaagtgacagtcaatctctgtgtgcttggttctctcatggaagactggatttgaagcaatatgaagagcagcctgattatcacaatacagcttcatttgcatcactttgcagaatttcaactcttcaagaatttgtttgacccacataagttcacatgtaactacagccata

SEQ ID NO: 18104 - DNA, 421 bp, Glycine max
tgtagggttaaagtctcacgattgtcacatgctcatgcaactattgttagccgtggctatacgacacatcttgccaaacaaagttaggttcacgataactcgcctgtgctttttcttctatgctatatgtagcaaagtgattgatatagtaatgtttgatgagttggaaaatgaggccgcaattatattgtgccagttggagatgtattttccccctgctttctttgacatcatgattcacttgattgtgcatctggtcagagaaatcaaatgctgtggtcctgtttatctatggtggatgtacccggttgagcgatacatgaagatcttaaaagggtatacaaagaatctatatcgtccagaagcatctattgttgagaggtacattgcagaagaaagccattgaatttgttcagaatac

SEQ ID NO: 18105 - DNA, 421 bp, Glycine max
tggatttacttttagtagggaatctatctttcctatgatggagaaaagaagttttgttcctagcttagcccataaggttttccagaagtggctaaggaacttagcatctctatctgacacaatggtcctaggcaaaccatggaatctcacaacttccctaagaaagagttttgagatgtgggaagcatcatccaccttgtggcatggtataaagtgtgccatcttgctaaacctatccaccaccacaaagatagagtctacacctctttgggttctaggaagcccaaggacaaagtccatactaatgtctacccaaggtgcaaaggggatgggtaagggtgtgtatagcccatgaggcatcaccctagacttggcttgtaaacaagccacacacctagtgcaatgcttatggacatctttc

SEQ ID NO: 18106 - DNA, 371 bp, Glycine max
  unsure (1)..(371): unsure at all n locations
ttcttctcgatatattatgcgcctgaatcagacttccgtttcaaaagttatgaacatatgaatttctccactgtattccgtgtgacaagtgatgaccattttaatttctcgatagcattcgttgttcaatttcgagcgtctcgatatattatgcgcttgaatcggacttccgtgtgacaagttatgaccatttgaatttctcgagggcttccgtttttcaatttcaagcttcgagatatattatgcgcctgaatcatacttccgtttcaaaagctatggccatatgaatttctcgagagcaattcgtgctcaatttcgagcgtctcgatatattctgcgcgttaatcggactttcgtgtgacaagntatga

SEQ ID NO: 18107 - DNA, 418 bp, Glycine max
tctcgatatattatgcgcctgattcagagtttcgttttaaaaggtatgaccattggaatttctcgagagcttccgatgttctatttcgagcgtctcgatatattatgcacctgaatcggacttccgtgtgacatgttatgaccattttagtttctcgagagtttctgttgttcaatttcaagcttctcgatatattatgtggctgaatcggacttccgtgtgacaagttatgaccatttgaatttctcgggagctttggatgttcaatttcgagcgtctcgatatattatgcccctgaatcggactttcgtgtgacaagttatgaccatttgaattcttcgagagcattcgttggtcaatttcgagcatctccatatattatgcgcccgaatcggacttccgtgtgacatgttatgac

SEQ ID NO: 18108 - DNA, 390 bp, Glycine max
agctattgagcaattgaaatgtgtcataacttttcacttggaggtccgattcatgcgcataatatatcgagacgctcgaaattgaacaacggaagctctcgagaaattcaaatggtcataacttttcaattgggggtcagattcaggcgcataatatatcgagaagcttgaaattgaacaacggaagctctcgtgaaattcaaatggtcataacttttaactcggaggtccaattcaggcgcataatatatcgagacgctagaaattgaacaatggaagctcttgagcaattgaaatggtcataacttttcactcagatgtccgattcaggcgcataatacatcgagacgctcgaaactgaacaatggaagctcttaagcaattcaaatg

SEQ ID NO: 18109 - DNA, 435 bp, Glycine max
tactcaagcttcatgcgagagtcaaagatcaaattgagaggaaaattattatctattctaaacaagccaacaaaggaagaaagaaggttgtcttcgaacccggagatcgggtttgggtgcacatgagaaaagaaaggtttccggaacagaggaaatcaaagcttcaaccaaggggagatggaccatttcaagtgcttgaaagaatcaataacaatgcttacaaagttgagctgcccggtgagtataatgttagttccaccttcaatgtctctgatttatctctttttgatgcagatggagaattcgatttgaggacaaatccttctcaagagggagagaatgatgaggacatgttcaagagcaagggcaaggatccacttgaaggacttggaggacctatgacaagggctagagcaaggaaagccaaggaagctc

SEQ ID NO: 18110 - DNA, 372 bp, Glycine max
agtcttttgtaccgtgcacgtggccgcatgaactgcaagaaagaaattatagcaccagcaaattacaagacttgccaatttctaaaagcttcaatgtagtgtttcattcttctgccttgtttaccaataacacaaattaaaatcactaagtaaccatgtgcacctgataatcagataatgcaccatatgatggattacaggaatcaccccaacgcccgtgtgggtattgatcccatcctattgtccttgatatgtagctctctggacgatttgccctatgatagttgcatatagaacgtaagaaatccttcagacagatacttcctttctatattttggaacacgacataccaattgcaaagaacataccaa

SEQ ID NO: 18111 - DNA, 404 bp, Glycine max
  unsure (1)..(404): unsure at all n locations
actcagctgtcggagggaatccatggccccggttaatttggtgnccatgacctccacggtgggctccttctcgggatccagcgtgcacacgaagatgtcaagccccggcagcttctcatccctcggcagcttctccgtcatgacgctccgcgacaccggccgccaccggaaggcttggctgaagaaccagagcaccgagagaagaagctccgctacggtcatcagaagccatggcgctgttggaggttccagtaacaagtgagttatgcggtagtaacacagcgacaacactgccactaagtggatcagcatgtgaagtctgctcagtgccaaccatgattgaacccgttcaacgcggtacgtgaacattggctatcttatgttctcctcgaatttctatatat

SEQ ID NO: 18112 - DNA, 379 bp, Glycine max
agtttatgctgcaaacatttataatagaccccttcagcagcaaaatcaacaacaacagaataataatgatctttcaagcaacagatgcaatccaggttggaggaatcatccaaatatgagatgggcaagtaagtcatatgttcctcctccaatgcagcaataacaaagacaacaagcaactgaggcacctcctcaaccttccttagaagagttagtgaggcaaatgacaatccagaatatgcaatttcaacaagagacaagagctccattcagagtacgacaaatcaaatggggcatatggctactcagttgaaccaagctcagtcctaaaattctgacaaattgccttcacagactgtgcagaatccgaaaaatgtga

SEQ ID NO: 18113 - DNA, 345 bp, Glycine max
agcttgtaatcgattactagaggagaatttcataaaataattttcaagagtcacatctgttcaaatgattttttaatagccatcaaaagtctatttatatatgacttagaacacaaatttgcttagagtttttcagaacaaaaaggtcttattctctcaaaagcaaaatcatcttatcctcttagaaattccttggccaatacgcttgcaattcaataagaaattattagagcgctcaattgttcaatctatctctttcaagagatatttcttcttctcttcatcttatttcaaaaaagggattaagagaccgagggtctcttgttgtaaagcaatatgaacaca

SEQ ID NO: 18114 - DNA, 382 bp, Glycine max
  unsure (1)..(382): unsure at all n locations
agtttgttccacttcacgtctataatatgaatgtagcatatagatccaaagacccttacgtgctttgctgatggcttcttaccgttccaagcttcaattggggtcttgtcttttatagacttagttggacatctgttgagtatgtaaatagcagtgtagactgtttcatcccataatgtgttaagtagtcccttctccttgagcatcgatctagccatttccataactgtgcgattctttctctcggacactccattgtgttgaggagaatatgcgactgtaagttgtcactcaatgccttcatcctcacaaaatctttcaaactcgcgagaggtgtactctntgccgtgatcacttcttagtacttttatccgttttccac

SEQ ID NO: 18115 - DNA, 334 bp, Glycine max
taataagaggcatgctaagtgggtagagtttttagtgcaatttccatatgtcatcaaacataaaaaggggaaagggaatgtagtggctgatgcactgtctaggagacatgctttacttgctatgcttgaaactaaactgtttggtctcgagtctttgaaagacatgtatgtgcatgatgtggactttgctgaaatttttgctgcatgtgaaaagttttctgaaaatggttactataggcataatggattcttgtttaaagcaaataaattgtgtgtgcctaagtgttccattagagagttgcttgtgagtgaatcacatgagggggggttgatg

SEQ ID NO: 18116 - DNA, 273 bp, Glycine max
  unsure (1)..(273): unsure at all n locations
ttttcacaatatttaccaacaacatgagaatcatagtatgggttggttntgagaaaatgctcaggatttgtggtgcttgcaataatgattttaacccaggcattatgtacatgtacatcttggattccttcacttacaagatgctccaagaattgagtancaagcggagacgattcctatgcataanaaattaaatgagaaataaacatggcaatgatagtggagatgaaagctagagagaaaactagcacacctcttctcacattcttcaac

SEQ ID NO: 18117 - DNA, 356 bp, Glycine max
  unsure (1)..(356): unsure at all n locations
agttttttctcttgcctcctatggnggagagcttcttctagactcatcttctccttgaagtggcgtctcctctctctcttcctttctccattccgctgccattcatcttccaagaagcaaaggaatccattgatgaagaagatcctaggcctacaagctccaatggagcttgcatcacattattaccaaagcattaggaaggcatcaatttcagatattgcttggcaagctgggcattcgtaatcctcatgcaccaccttgagggggggggggtaataccgtatattccaatggtcgtattcaaggcataatcatctggatcgttctgcatgggttaactaatatgttattccctt

SEQ ID NO: 18118 - DNA, 385 bp, Glycine max
  unsure (1)..(385): unsure at all n locations
atcttatttcgttgtntgctaatggagacgacgcaatagaccttacatggcatgcaaatgggagaaactgcgatggaatgctccgtcatctggctgattcctcgcagtggaagaagattgatcgtttgtatccggatatcagcaaagaggaaagaaatcttatgcttggagtagctagtgatggaatgaatccatatggcagtttaagcatgcaacacagttcatggccagttntgctagtaatttacaatttgcctccctggttgtgcataaagcgaaaatacatgatgttgtctatgatgatatcaggcccaagacaaccatgaaatgacattgatgtttatctaactccgttgattgaagacttgactaagttatgggagat

SEQ ID NO: 18119 - DNA, 385 bp, Glycine max
  unsure (1)..(385): unsure at all n locations
tgctttcntttcctctctttttcatgtgctatttctaccctgtcattcattaagctttgtaattgatcctcaacctcatgccttaactttgaaaaaacctccatttctgaatcaatagcagctcgctccttagtcaatgcaaggttatcttcttctctctcagctcttaacctttccaactcaagtcttgcctcctcagccattctttcaacagcactgatcttttccctctctatgaaaagctcctgctcaaaacttgcattgatatccttctctacttgagctactaaagcactatgcgcagcaacagcattttcagcaacagattctgcttcaatgcgtgcaagctcttcactaactatttcagaagcatctccagtagcta

SEQ ID NO: 18120 - DNA, 424 bp, Glycine max
  unsure (1)..(424): unsure at all n locations
tgcattanggctgctggtcttctcgctctcttctcctacgctctttagcacagacaacatgttcttccggaaggaccgcacaagtggccaacccaccacctgcgtcctacacatttcaactcatcaatatcactttatatattatgatcaattaatacgcatcatgaacatatatggtaatcatataacgaagttaaaataagttaattgattatatatagaagaacgtacgttctaggtgactttgaagtattagctgattagttatcagagacaattatataattgggggtggctgagagccatataagcttgcataaaaataaagattaattaaacacgtaaaagactttgtttctaatttatgctaatccaaggccaccctcctttatatatctttaaaatgactcattgttatattact

SEQ ID NO: 18121 - DNA, 395 bp, Glycine max
tctgctttattacagctttgatactctcccttgaggttgcaccctcaggccagtccaatctaccccttctaacatacttctcagcatgtcggctaaacatttgcatgacacaatacatacttatttatcatattttaaggatcaatcaattgagattaagttcgcatggtatgtcacttactcgactctcttcaacatgggctgtggtaatggaccaagtaccctttccatcatggcaagatgctccaaattttcgtgagtctgaaacaaagctccgccctgtaatataaattcacaaattatggaatagaatctaagagatggataaatactgtttttatacaggatttgagagagccaaacataccgtgcataactcaaccaagatacatccc

SEQ ID NO: 18122 - DNA, 328 bp, Glycine max
  unsure (1)..(328): unsure at all n locations
taagcttaagaaatctctntatggacttaaacatgcaccgatgcaatggtatggtagacttagaaacttccttcttgaacaaaaatttgagagaggaaaagttgataaaacacatttcattaaaaagttctctcataacattttactcatgtaagtttatatggatgacatcatttttggttctactaatcgatctctttgtgaagattttgtacacaagatgcaggaggagtttgaaatgccaataatggggggggggattaaattactttcttggtctctatgtgaagaaaaattgaccatgaacatttttctatcaaacaaagta

SEQ ID NO: 18123 - DNA, 379 bp, Glycine max
  unsure (1)..(379): unsure at all n locations
agcttgctcnctggagttttccgactatgctcttgtatggtggaacaagctacaaaatgagagagcatgaaatgaagagccaatggttgatacatggacggagatgaaaaagatcatgaggaagcgatatgtgccggctagttactcaagggacttgaaattcaagctccaaaaacaaacccaaggaaacaagggggttgaggagtatttcaaggaaatggatgtgctcatgattcaagcaaagattgaagaagatgaggaggtaactatggctcgatttcttaatggtttgactaatgatatccgngatattgttgagctaccggagtttgttgaaatggatgatttgcttcacaaagcaattcaagtagagcaacaa

SEQ ID NO: 18124 - DNA, 429 bp, Glycine max
  unsure (1)..(429): unsure at all n locations
agcccaccatcttttcatagtagatttctggtaatgtgtctactatcattggcatttttttttccgtcattgaggtttcacttgagctgccaggtctctccacctttgggcgtattcttttgaaagattcgtgccccctttttgcacatgttttgtagttgcatcctatccgaagccattatactaacactgcctaacgaaggcaaccactaggtccttccaagaatggactcgggaaggttccaagttagtgtaccangtaacaactaccccagtaagactttcttggaaggaatgtatcagcaattcctcatcttttgcgtatgcccncatcttttgataatacatctntagatggttcttggggcaagtagtccccttgtacttgtcaaagtctaccaccttgaaacttgggtggggtgatgatat

SEQ ID NO: 18125 - DNA, 355 bp, Glycine max
  unsure (1)..(355): unsure at all n locations
gacctataaaactcagcttcacatcagacccttcttgtgtctggactactttcatggacttgatggggcctatgccagttgaaagccttggaggaaagaggtatgcctatgttgttgtggatgatttctccagatctacctgggtcaactttatcagagagaaaacagacacctttgaagtattcaaagagttgagtctaagacttcaaaggagaaaaagactgtgtcatcaagagaattatgagtgaccatggcagagagnttgaaaacagcaagtttactgaattctgcacatctgaaggcatcactcatgagttctctacagccatcacaccacaacaaaatggcatagttg

SEQ ID NO: 18126 - DNA, 398 bp, Glycine max
  unsure (1)..(398): unsure at all n locations
tcaattggagtcttgtcttttacagacttagttggacatctgttgagtatgtaaacagcagtgtagactgcttcagcccataatgtgttaggtagtcccttctccttgagcatcgatctagccatctccataactgtgcgattctttctctcggacactccattttgttgaggagaatatgcgactgtaagttgtctctcaacgccttcatcctaacaaaatctttcaaactcgtgaaaggtgtactctttgccgcgatcacttcatagaacttttatccgttttccactttgattntcagcaagggccttgaacttttngaatactccanagacttctgattcttcttttagaaaatatacccatgtcattctagagaagtcgtcaatgaagagtat

SEQ ID NO: 18127 - DNA, 347 bp, Glycine max
  unsure (1)..(347): unsure at all n locations
tgtggccgaacaagtataaatctgagtttgcattttctcttcccttaaactcctttattggttattggttattgcttattatttctatttaataaagttaatttgcattattatttaggagtacatttttaaaaggaatcttgggttattgggataaaatcaaaataaaattttttgattaggaaaagattgtgatatcttaattcaaccccccttcttaagatatctgaggccacttgtccaacagagagtcttttgcgcttagagcacaggcgcgcttagcgagagactatgtcacgctcagtgagataactcaattagcactatntttaaaaatgcacaacctg

SEQ ID NO: 18128 - DNA, 394 bp, Glycine max
agctaattatttatagctggaggagataaggttgaatgtttatgaattgtccaagctgtacaagcaaaaggtgaaagcttaccatgacaagaagctattgaagaagaatttccaaccaggccaggaagtcttacttttcaattcaagactcaatctatttccagtcaagttgaagtccaagtggtctggacctttcaccatcaaagaggtgaagccttatggagcagtggagttgatggatcctcaatcaaatactcctaagagaagttgggtagtgaacagtcaaaggttaaaactgtatcatggtggcagcattgaaaggttaaccaccatcttgcacttgcaagacccctatagggtgacatatgtcaagctagtgacggtaaagaagcgc

SEQ ID NO: 18129 - DNA, 396 bp, Glycine max
  unsure (1)..(396): unsure at all n locations
gaagtgaaggcacgctatgatggaactggggctgncacatcctggctttttccagtctgcatggagattntcaacaacaacatgggcaatgctcccaaccaaaataaagacaatgaaacgcgaagatggcgcaaacataaccgagcaagacctcttgcagataccaagaggagcctgcaccatggaaggtctcagatttatggttatatgcttcttaatttaattattaaactcttaataaatatcttaagtcacttgagccttttttcaatttaattagtatttttttattaaaacattgtcactagtatgtgattaacctatctctttgttattgatacaagattaagctattcttatctcaagttattttattaactatgctcttattggaca

SEQ ID NO: 18130 - DNA, 374 bp, Glycine max
  unsure (1)..(374): unsure at all n locations
tctttcttncatttgtactgncttcatgtgattcctttttctccctctacgattattatctcgcacatcccaatggtgaaagtgtgcgaaattgagtctcgaacaatgtatcaaaatttcggaaaaatccaacggttaacgaatccggaatcatagttttaccgagacagctttgagtttctgcgaaaaaagaaaaagtcacgatgcgaacaatagttctctcatctccaacatcttttcgtaattcccaacggtgagaatgctcggaattgagttgtgaaccattttcttaaatntcacgacgaaccaacgatgaatgagtccgagatcgntcattttctgaaacagatttgatggtctgcatgataaagcga

SEQ ID NO: 18131 - DNA, 392 bp, Glycine max
  unsure (1)..(392): unsure at all n locations
tgcttcaagaataatggcctcagcaaacttcttatttccagaaggaaattcaatcaatagacctctaatctttaatggagagggttaccactactggaaaacctgaatgcaaatttttattgaggcgaagccatagaaatagggccttatatacccactacagtagaaagaaccacaatagatggaagcacaacaagtggaagcacaacaatagaaaaacctagagatagatggtctaaagaggataaaagacgagtacaatataatttaaaagccaaaaacataattacatctgccctgngaatggatgaatatttcagggtttcaaattgtaagagtgctaaggaaatgtgggacactttacaagtaacacatgaacgcacaacagatgt

SEQ ID NO: 18132 - DNA, 371 bp, Glycine max
tagcttgtgcctcttcacgtctgaaatatgaatgtagaatatagatccaaagacccttaggtgctttgctgatggcttcttcccattccaagcttcaattggagtcttatcttttacagacttaattggacatctgttgagtatgtaaacagcagtgtagactgcttcagcccagaatgtgttaagtagtcccttttccttgagcatcgatctagccatttccataactatgcgattctttctctcggataatccattttgttgagaagaatatgcgactgtaagttatcgctcaatgccttcatcctcacaaaatctttcaaacttgcgagaggtgtactctttgtcgcgatcacttcttagtactttta

SEQ ID NO: 18133 - DNA, 431 bp, Glycine max
  unsure (1)..(431): unsure at all n locations
cttatgcctggatttgatcctgaaattattcaagtggctcagatggtccttataaatccccggaatattgactatcatactggagtttttgcaaccaaggtaacaacatcttgtaatttcttgatataattttaattggctactatgacatgctacacagtcctcatgtttgttgtatagatcacgcctgcaagggatggaaaacctgtcttgattgaacttattgatgcgaaaaccaaggagccgaaagacacgctggaggtaacttaatctttttcagaaagcttttagggttatatctctttgntattatcaattggaaacatttctcccatgagagaanggagaaaattattatgtgtcggtagaacttagaatatctatacnaagtatattgtattatatcttagaatgtttatactatcttaatg

SEQ ID NO: 18134 - DNA, 390 bp, Glycine max
  unsure (1)..(390): unsure at all n locations
tttgctcatctagatctgagtggaaattctcttcttggagaaatcccctctgaagtatggaagcttacagccttacgatatctagatctaagttataatgtggctattcatggagagatcccttatcactttaaaaatctctcacaactgcaatatctttgtcttagaggacttaatctttccggaccaatacctttccgggttgggaatcttcctatcttgcatactcttagacttgaaggcaatnttgatcttaaaattaacgatgcaaagtggctatcttctctctctttnttaacaactcttgacctgacatcattgcataatcttggctcctctcgttactggcaacaaatgatcggtgagcttataacacacttgagagagttg

SEQ ID NO: 18135 - DNA, 300 bp, Glycine max
cacatacatgcgccaacgaaccaaatagcacacaaaaagagtacaaggcgggctaaacgggacttacaggaaacgcattatagaccatgtgatgctcaatatcaagcaagctcccagtctccagacacgaaagtctgtgaactggaaagctagttttcaaaaactgttccaatcgatgcgcatcgatgttgtatctatagcctccgtctccgctaaaaccaatcagaaccacgttcacttccagcggaacttgaaacggaacctacacgaaccacagacacatgcattcacacatcaatt

SEQ ID NO: 18136 - DNA, 396 bp, Glycine max
  unsure (1)..(396): unsure at all n locations
agcttcttatccaaggcaattcttggtggtgaagctccttcttccttggcttattccctagtggatggtgcctcctctctccttttctcctttgccttccgctgcatctccatggtgtaaaatcaccattgaagaacctcattgaagctcaaagatccagcctccatagaagctccacaagcaagcttccatcacaccctttgtgcatgtccttcatgttttacatgcctcatgacacctaaacacacttagtagagaatcttgaatttgatcttggattagtgggctgaaccatagctganattcactaatcataattagtgaaatgttggctccacaaattcaagttcaaattcaagtgaaatttgaatagaaaatcaaaattccctccaattt

SEQ ID NO: 18137 - DNA, 394 bp, Glycine max
agctccacgcatgtaagtacaatctcatcaggtgcaagactatcacagatgtcttgtcttgtaataaataaatcagctagaactgaagctgcatattcttgggtttcctcatttgatgaattgaggacttgaactagagatctcaagcctttattagctgcagaacccttttcaaggagatcattctgcgaagccatagtaagaacatgacctaaaactcggattatgtgggtttttgagcttggagaatgccctatgagcaatgctaatagctgattaattgtggcagaatcagctactcggacaagctttgtgagtgccattgcagaagcttcctgtcctcttggtccaccactcttaagaagccacaaaaatgctgggatggctccagcac

SEQ ID NO: 18138 - DNA, 383 bp, Glycine max
ttacttctggtgggacatcttgacttgctttccaatctgacattcaccacagattctgccttcttctattttcagattgggaatgcctctaacagcacctttgtcaatgattttcttcatgcctcttaagtgcagatgtccaaatctttgatgccatattctgacttcatcttctctggagaatagacatgtggaggagtaactggtttcttgaggtgtccataggtaacagttgtcctttgatctactgcccttcatcagaacttcactcttctcatttgtcaccaagcattctgactttgtgaagtttacattgaatccttcatcacacagctgactgatgctgatcaagtttgcagtcagtcccttcaccagcagtactt

SEQ ID NO: 18139 - DNA, 348 bp, Glycine max
  unsure (1)..(348): unsure at all n locations
tatgttgcaaacatttaaattatacctcctcagctgtctaaccaacaacaacagaataattatgacctttcaagcaacagatacaatccaggttggaggaatcatccaaatctgagatggacaagttctccacaacaacaacaacctgtccctccttttccagaatgttgctggtccaagcaagccatatgttcctcctccaatgcagcaacaacagcagcagtcacaacaaagacaacaaggaactgaggctcctcctcaaccttccttagaagagttagtgaggcanatgaccatccagaatatgcaatntcagcaagagacaagagcctncattcagagtctgac

SEQ ID NO: 18140 - DNA, 336 bp, Glycine max
  unsure (1)..(336): unsure at all n locations
agtttgttttgtttaatccgcacgaangacacgtgctcatgcaacaattggtaaccgatgctataccagacatatttccaaacaaagtcaggttcacgataactcacctgcgctcttgcttccatgctatatgatacacagtgattgatccaataatattcgatgagtcggaaaatgatgccgcaattatactgtgccagcaggagatgtatcatccccctgttatcgttgacatcatgattcacttgaatgagcatctggtctgagaaatcaaatgttgtggtcctgattatctacggtggaagtacccggctgaacgatacatgaagatctcaa

SEQ ID NO: 18141 - DNA, 323 bp, Glycine max
tatattattggcctgaatcagacatccgaatcaatagttatggctgtttatttatgccatgtgcttccatgttcaattgtgaacatctcgatatattatgcgcctgaatcgggcatctgagtgaaaagttatgtcatatgagttagccgagagcttcgctggtcgatttcaagcgtctcgacatattattggcctgaatcggacattcgaggcaaaagttatggcgggttaaactttccatgcgcttccatggttaattttgagcatctcgatatattatgcacctgaatcggacatctgagagaaaagttatgccatatgag

SEQ ID NO: 18142 - DNA, 389 bp, Glycine max
  unsure (1)..(389): unsure at all n locations
tagtttgtgtctaagnngcaatctgctattccgatgatagtgaccacgcctgagaaaagggataccattacacgcaagagcagggacatatcattgaccatggtggtaaagctcttaattattgatgaagtccatctactcaatgatgatagaggtcctgtgatagaggctctagtttccatgaccctacggcaggtaacgcatatgtcttatttcctctgtgtttttacatgtacaaatttagttaggagattcgcttaaatttattatattctcttttggatatatgaataatcagacattggcttatgacagctaacctgatatctatcttacttgttccacatataaagcgagctttcttattgatcgattttgcgttggcactt

SEQ ID NO: 18143 - DNA, 338 bp, Glycine max
  unsure (1)..(338): unsure at all n locations
agctttgttaacaagaatttcatcaacgagtcaagacatgaaaaaagcctgacgagtaaatctttgtttagaagtacaaatgtgggatgagtttaccagtgttagctatgttatgactctaaataattaagttttgttagtttattgtacttttttggttcatttattgtaataaaaaatctaaattactttaaattagatcggtttgaattaaataataactaattagataataaaatataaaatccaatcaataacataagacttgaataatntttattgtctaataacgataataagatttcaacttaagatttatttaaattgctcactatatt

SEQ ID NO: 18144 - DNA, 343 bp, Glycine max
  unsure (1)..(343): unsure at all n locations
agtttctggtgggacatcttgacttgctttccaatctgacattcaccacagattctgccttcttctattttcagattgggaatgcctctaacagcactttcgtcaaagattttcttcatgcctcttaagtgcagatgtccaaacctttgatgccatattctgacttcatcttctttggaggatagacatgtagaggagtagctggtttcttggggtgtccatatgtaacaattgtcctttgatctgctgcccttcattagaacttcactcttcttatttgtcaccaaacattctgactnntgtgaagttacattgaatccttcatcacacagctgactgatgc

SEQ ID NO: 18145 - DNA, 417 bp, Glycine max
  unsure (1)..(417): unsure at all n locations
tgtttcaattcanatgacaattacctttactttatatcntgatgagtcccgtaatataacgagacgctcgaaattgaatgttgaagctctgagccaattcagacgacaataactttttactgggatgtctgattgagtcccataacatatcgagacgctcgaaattgaatgttgaacctctgagccaattcaaacgacaataaagttttactcggatatctgattgagtcccgtaatataacgagacgctcgaaattgaatgttgaacctctgagcaaattcaaaagacaataactctntactcggatgtttgattgagtcctgtcatatatcgagacgctcgaaattgatgttgaaactctgcccanatcaaacgacaatagacttttactccgatgtctgattgagtcccgtaca

SEQ ID NO: 18146 - DNA, 388 bp, Glycine max
agcttgtttcctatggaagctcctaatatctcccacactttttggggtgggccattcttggatggccttgattttctcagggttcacttggaccccatttctaccaactacaaaacctaagaaaactatattatctacacaaaaggtacacttctctatatttgcatagagggtgtttttcctaaggactgaaagaacttgtctgagatgtcctaagtgaaaatctaggctcctactatacactaaaatatcatcaaaataaacaactacaaatctacctatgaaatcccttaagacatgatgcataagcctcataaaggtgcttggtgcattagtgagcccaaaaggcatcactagccattcatacaaaccaaacttggtcttgaaa

SEQ ID NO: 18147 - DNA, 443 bp, Glycine max
  unsure (1)..(443): unsure at all n locations
gcttatctcacactntctatgttaatattaattcatttgtgtctattcctcactctcagacacccccttattgtgtgtcattatggcatggccaacttgccactgtcttttcattttccccccttcttgttttgttatgttacttttcagattgtcttttctgttaatcataattttaggagtgtcagatgttactcttgtttgattggattttatagttttttttaatcattcattcagttaacgaagaaaaataaattattttagattaatttatatgcttaaatatatgtttttatcttttgttttacattcttattaatttatgaataaattaataaatttggatttgtatctgataatattttttatttataattagttgaaatntanaccaacattattatattatgataaaataaatataaagtctctgatttaat

SEQ ID NO: 18148 - DNA, 398 bp, Glycine max
agtttactctgcaaacatttataatagacctcctcagtagcaaacccaacaacaacagaataattatgacctttcaagcaacagatacaatccaggttggagaaatcatccaaatatgagatggacaagtcctccacaacaacaacagcctgtccctcctttccagaatgttgctagtccaagcaagccatatgttcctcctccaatacagcagcagtcacaacaaagacaaaaagcaactgaggctcctcctcaaccttccttagaagagttagtgcggcaaatgaccatccagaatatgcaattttagcaagagacaaaagcctccatttagagtctgacaaatcagatggggcagatggctgctcagttaaaccaagcacaatcccaaaattctg

SEQ ID NO: 18149 - DNA, 378 bp, Glycine max
tgtagggttaaagtctcattattatcacgtgctcatgcaacaattgttattcgtggctatacgagacattttgccaaacaaagtcaggttagcgataactcacctgtgctttttcttccatgctatatgtagcaaagtcattgatccagtcaagtttgatgagttggaaaatgaggccgcaattatactgtgcgagttggagatgtattttccccccgctttctttgacatcatgattcacttgattgtgcatttggtcagagaaattaaatgctgtggtcctgtttatctacggtggatgtacccggttgagcgatacatgaagatcttaaaagggtatacaaagaatctatatcgtccagaagcatctattgttga

SEQ ID NO: 18150 - DNA, 380 bp, Glycine max
agctttatctaaattgagagttgtcaagcaatcaattttaaaataaagacatttaatccttatatttttaaaaacatttaactttattttcttattttaaaatagaaacatttaatcgtttagctttgtaaaattcacaattctaacctttttatcaaatttaaaaaaagttgattaataagaaattaactttaagtgattcaaaattatattatttatttaatctacatcatagttaatattaatatcttaaatgttaccctttcagtttcacataaagatcaaattcaccaattttacatgtgagactaaatgtctttattttaaaataaaaaaaaaattaaaatgatatatttcaaaagaaaactaaatatttttat

SEQ ID NO: 18151 - DNA, 375 bp, Glycine max
  unsure (1)..(375): unsure at all n locations
agtttnattatatcgagatgctcgaaattaaacatcggaagctctcgagaaattcaattggtcataatttatcacacggatgtccgattcgggtgcataatatgtcgagacgctcgaaattgaacaacggaggctctcgagaaattcaaatggctataacctttcacacagatgttcgattcaggagcatcacatatagagacgtacgaacaacggatgcactcgagaaattcaaatggtcataacttttcacaccgagttccgattcatgcttataatatattgatacgttttgaaataaacatcggaagctcacgagaaattcaaatggtcataactcttcacacggatgtccgattatggagaatcacatat

SEQ ID NO: 18152 - DNA, 407 bp, Glycine max
  unsure (1)..(407): unsure at all n locations
gcttcatgagagagtcaaagatcaaatngagaggaaaaattttagctatgctaaataatccaacaaagggagaaagaacgttgtcttcgaacccggaaattgggtttgggtgcacatgacaaaaganaggtttccggaacaaaggaaatcaaagcttcaaccaaggggagatggaccatttcaagtgcttgaaagaatcaatgacaatgcttacaaagttgagctgcccggtgagtataatgttagttccaccttcaatgtctctgatttatctcttnttgatgcagatggagaatccgatttgaggacaaatccttctcaagagggagagaatgatgaggacatgaccaagagcaagggcaaggatccacttgaaggacttggaggacctattgatgangacatga

SEQ ID NO: 18153 - DNA, 396 bp, Glycine max
  unsure (1)..(396): unsure at all n locations
agttttgcttttctaatttagnagatccatgaaggtaccctaatgtctgaagtttatgggattaagatggtcattgaccaatccctattttatgacttaacaaaattgcctagtgaaggtgtaccttttgagggtgcactgattgatgaatggaaatttgatttctctgtgcatgatgcccgccggttggtttgcaccaaccaagcggatatgaccggaagacttctttccgtttcattggcttttgagagccgcatcttccattaccttattgctcgcatcttactccctagatcttcaaaccttgcttaagtttctgaagaagatctcattgtcatgtgggcctttcataaaggtttacaaattgattgtgcacaccttgttagatatcgcatg

SEQ ID NO: 18154 - DNA, 434 bp, Glycine max
  unsure (1)..(434): unsure at all n locations
tttgtggctaactccgactactgaaattgaccctttccaacaactggtttagaggcgccacaatcttagcataccctntaataaatcgtctataaaagcctaccaacccgaggaagcttctcaatgcttttactgattgaggtagaggccactcctgaatagcgtataacttttctggcactggttcaactccgttgccggagacgacatgccccaggtactccagttgggactgggcaaaagtgcatttggtacgtttcaaagagaacttccctganagcaagagtttgaacgcgctntcgaggtgacccanatgatccgccatttgtttgctatataccagcacatcaccgaagatgacgatgatgaacctgcgcagaaagggttgaaagagctgattcatagttgctttgaaggtagatgggtcgttacac

SEQ ID NO: 18155 - DNA, 361 bp, Glycine max
agcttttggagtttggggaagaatgccttactaaaatatacaatgaggtgggaattttgcatcaaaatagctcccatggttgtgccagaagcatcagattccaagacaaatgggatggtgaaatctgatatcgctaagacaaatgggaattttgcatcaaaatagctcccatggttgtgcctccgccattagtgacttgagtttgtcaaaggtgacctgagaggtaggattccaaaggaactgatcctctcgcaagagcactatcaatggtgcggctacggtggcgtaacctcgaacaaacttctggtaaaaacctgtaaggcccaaaaatccttgcaactatgatggagatgatggggat

SEQ ID NO: 18156 - DNA, 429 bp, Glycine max
  unsure (1)..(429): unsure at all n locations
taacagatgtgttacatcgctntgcaggcacatgttacatttcaccaaaagaccacccatagaatgagttataatatttatcttcttccctcctgcagcattataaattgattctaactttgcagctaaccgatccattgtttccttcaacctaaatgaaataaacagagcaattgtaaaaaaaaatatctttcatttggttaaatactttttagagaacttatccttaggattgtgggaaatcataccaccaagcaatagccaaaagatacactggagagacatcaatcagattaaattcatttgcacaattacatcaatcagctgatagcttcctcagaaaacttatcatttcataataataacaacaaactatgaaaatactctgcataatntttacaaaatcaattcattattaaaaaaaatata

SEQ ID NO: 18157 - DNA, 416 bp, Glycine max
  unsure (1)..(416): unsure at all n locations
tncctctaaatntaaaatatgcaacaaacattgctattaaggtacaaatggattattcatggctatcgcatcaaagatttggccacttcaacacacatgccttgaagttgttacatgagaagaacatgatgagagatcttcaaagcataaaggagaacattgaagtgtgtgaaggatgtctccttagtaagcaacaccgatttcctttctcaacaagcggagcatggagagcgaaagatctattggagctgatacatacggacgtttgtggaccaatgaggacgccatcacatgagaacaacagatacttcatactctttatcgatgacttctcttgaatgacatgggtatattttctaaaagaaaaataagaagtctttggagtattcaaaatttcagggccttgctgaaatcaa

SEQ ID NO: 18158 - DNA, 435 bp, Glycine max
  unsure (1)..(435): unsure at all n locations
atggcctcagcaaattccttatttctataaagaaattctatctacagacctccattctttaatggagagggttaccactactggaaaacccgaatgcaaatttttatcgaggcaatagatctaaatatctgggaagccataaaaataaggccttatatacccaccacagtagaaagagtttcaatagatggtagttcatcaagtgaaagcataaccatagaaaaacctagagatagatggtctgaagaggatagaanacgagtacaatacaacctanaagccaaaaacataataacatctgccctaggaatggatgaatatttcagagtttcaaattgtaagagtgctaaggaaatgtgggacactcttcgattaacacatgaaggaactacagatgttaaaagatctaggataaatgcactaactcatgagtat

SEQ ID NO: 18159 - DNA, 354 bp, Glycine max
tatgtttgaccaggaattatttggatgggttggatgttgagttcaagttgttcctggtgtggagatgatgggacagatggtgaaccagaagctgcagtttcttttgatgaggtagccatggaaaagcacatcgtttggaatgatttcgtaaatctcagaaaactattgggaaatgctgatgaaaacacgaatgtcaagcagatatatatttgaatgaggaatgtagagggccgtgtgaagcaacggtcgaattttccttggttcagtagtgaacgtgctattaatgctaagtgattcgtttgggcacgttcatattgctcgaattgctataattcctctatcacacaaatgccc

SEQ ID NO: 18160 - DNA, 412 bp, Glycine max
  unsure (1)..(412): unsure at all n locations
tgattagctgccgtagcagcaacaatatattctgcttcacatgttgacaaagcatctacactttgcttctttgagcaccaagagattggtgttgttcaaaatttgaaaacatacccagtagtgcttttcctatcatccttatcaccacaccaatctgaatcactataaccaataacttctccttctatattcttctgactgtaaggatataaaatgccaagatccaatgttcctttcacataccttagaatcctctttgctgctaggaagtgaggtgtctttggtttctccataaacctgcttatcaacccaacacaataagcaatgtcaagcctggtgttacatatgtacctcagtgagcctacaacttgcttgtacaaggtangatcaacttctttctcatccncatcta

SEQ ID NO: 18161 - DNA, 380 bp, Glycine max
agtttctattctcaatttcgagtgtctcgatatattacgggactcaatcggacatccgagtaaaaacttattgtcgtttgaatttgcttagagcatatattctcaatttcgagtgtctcgatgtattacgtgactcaatcgaacatccgagtaaaatgttattgcagtttgcatttgcaacaagcttctgatttcaatttggatcgtctcgatctatgatgggactcaatcggacatccgagttaaaagttattgcggtttgcatttgctacgagcttccgctttcaactacgagcgtcttgatatattactggactcaatcgaacatcagaataaaaagttattgttgttagaatttttttcagagcctctgttttcca

SEQ ID NO: 18162 - DNA, 390 bp, Glycine max
  unsure (1)..(390): unsure at all n locations
tcaaccaaagggagatggaccatttcaagtgcttgttagaatcaataacaatgcttacaaagttgagctgcccggtgagtataatgttagttccaccttcaatgtctctgatttatctctttttgatgcagatggagaattcgatttgaggacaaatccttctcaagagggagagaatgatgaggacatgttcaagagcaagggcaaggatccacttgaaggacttggaggacctatgacaagggctagagcaaggaaagccaaggaagctctccaacaagtgctgtccatactatttgaatacaagcccaagtttcaaggagaanagtccaaggttgtgagttgtatcatggcccanatggaggaggactaaatgacaccactttgtct

SEQ ID NO: 18163 - DNA, 394 bp, Glycine max
  unsure (1)..(394): unsure at all n locations
agcttctacattcaattttgagcgtctcgtaatattacgggactcaatcagacatccgagtaaaaatttattgtcgtttggattggctcagagattcaacattcaatttcgagcgtctccatatattacgggactcattcagacatccgagtaaaaagttattgtagtttgaattagcttagagcttcaacaatcaatttcgagcgtctcgttatatcacgagactcaatcagacatccgagtaaaaagttattgttgtttgaattggctcagagcttccacattcaattttgagcgtctcaatatattacgggcctcaatcagacatccgagtaaaaagttattgtcgtttgaattggctcagagcttcancattcaatttcgagcgtctcga

SEQ ID NO: 18164 - DNA, 414 bp, Glycine max
  unsure (1)..(414): unsure at all n locations
ntgagcaaattcaggcgacaatatctttttactcgcatttctgattgtttcccgacatataacgagacgctcgaaattgaatgtcgaagctctgagccaattcaggcgacaatatctttttactcggatgtctgattgaggcccgtaatatatcgagacgctcgaaattgaatgttgaagctctgagccaattcaaacgacaataactttttactcggatgtctgattgaatcctgtcgtatatcgagacgctcgaaattgaatgttgaacctctgagcgaattcaaacgacaataactttgtactcagatgtctgatatgggctcgtaatatatcgagacgctcgaaattgaatgttgaagctctgagcgaattcaaacgacgataacttgttactcggatgtctgattgagt

SEQ ID NO: 18165 - DNA, 301 bp, Glycine max
ggcttcttctaacacgctccacactttgtagggtgggccattctcggatggacttgaattcctcataggccacctgagccccatttttaccacactctaaaccctgagaaaactatattatctactcaaaaggcacatttgtctatattagcatagacggtatttatgctaaggactgaaagaacttgcctgagatgtactaagtgatcatctaggctactactatacactcgaacatgatgaaagtgaaaaactacatatctacctatgaaagaccttatgacatgacgcatagccctca

SEQ ID NO: 18166 - DNA, 299 bp, Glycine max
  unsure (1)..(299): unsure at all n locations
ttggaactttgagcttgttttgctacttttaaaagttggatccaagcctagctctagaccctgtggcatggatgctgccggctacaacaatatgctggctatgctttgggagaatgcgatgctgacccaagccgagaccttgatcgaagaactctgctctaaatctttgagccccgatgtgcccactcataggaccttgattgaagtctacttgagaatggacaggatcgatgatgctctcangattttccacagaatggttgattctaggctcagggtggttgctacctttggtaaca

SEQ ID NO: 18167 - DNA, 369 bp, Glycine max
tttagcttaagctcctacaactgcacaaggctcttaatgtttgaagagtatccttgaggaaccttcacccgactaagacactgacaaaaacttatcttctcctttttggacaaggtatggcaagctaggggcaagtaaattttcttcccattaaaccttggatgcaactgtgatcgtatgcccatatcaactagatcttgacaggtattgaagccatgcttcatcttgccttgaatgttaaggagagtaccaatcacactatcacaaacatttgtctccacatgcataacatcaatacaatgtctaacatcgagatcagatcagttcgaaagatcaaagataatggacctattcttccatatgcaactc

SEQ ID NO: 18168 - DNA, 406 bp, Glycine max
agcttgctaacttatggaagctcctaatatctcccacactttttagggtgggccattcttggatggccttgattttctcagagtccacttgaaccccatttttaccaactataaaccctaagaaaactatattatctacacaaaaggtacatttctctatatttgcatagagggtatttttcctaaggactgaaagaacttgcctgagatgtcctaagtgatcatctaggctcctactatacactaaaatatcattaaaataaaaaactacaaatctacctatgaaatcccttaagacatgatgcataagcctcacaaaggtgcttggtgcattagtgagcccaaaaggcatcactagcaattcatacaaaccaaacttggtcttgaaagcagttatccattcatc

SEQ ID NO: 18169 - DNA, 422 bp, Glycine max
gaatggaggctctggtctcttgttgaaactgcatgttttgcatagtcttttgccttatcaagttcttcaagggaaggttccggaggagcctcaactatttgttgtttctggggctgttgctgcttctgttgttgttgttgtagctggattggtggaggaacatctggtctgcttgggccagcagcattatgaaaataaggctattgttgttgctgctgttgtgaaggactcaaccatctaaggttgggatgattcctccacccgggattgtacttgtcgttggagaggtcataattgttctgctgtggttgattctgctgctgaggttgaggaggtctattgtagatgtttgcagcataagctttaggctgttcaattgctccagattgctgcacaaaagggcaaaggtctgtatggtggtc

SEQ ID NO: 18170 - DNA, 267 bp, Glycine max
acgtgcacatgcaacaattgatagtccgggctatacgagacatcttgccaaacaaagtcaagttcgccataactcacctgtgctttttcttccatgctatatgtaacaaaggcattgatcctgtcaagcttgacgagttggaaaaagacgccgcgattatattgtgccagacggagatgtatttcccccccgctttctatgacatcatgattcacttgattgtgcatctggtcagagaaatcaaatgatgctgcctgttcatctatt

SEQ ID NO: 18171 - DNA, 408 bp, Glycine max
agcttgccttgctccttgatatatttgagggactcatggtcactatgaatgacaaattccttgggataaaggtagtgttgccatgttttcaaagcccgtactaaggcatacaactccttatcataagttgaatagttaagggtaggaccacttaacttttcactaaaataagcaattggatggccttcttgcatcaacacagccccaatcccaacatttgaagcatcacactgaatttcaaaatatttttgaaagtttggcaacgcaagtatggggcattagttagcttttgcttaagaacattgaaagcttcttcttgtttctctccccatttgaaaccagcatttttcttgagcacttcattgagaggtgctgccaatgtgctaaaatccttcacaaatcgtctat

SEQ ID NO: 18172 - DNA, 417 bp, Glycine max
  unsure (1)..(417): unsure at all n locations
attcaaacgatgataactnnttactcggatgtctgatngagttccgcaatatatcgagacgctcgaaattgaatgttgaagctctgaccaaattcaaacgatgataactttttactcggatgtctgattgagtcccgtaatatatcgagacgctcgaaattgaatgttgaagctctcagcaaattcaaacgataataaatttttactcggatgtctgattaagtcccgtaatacatcgagacgctcgaaattgaatgttgaagctctcagcaaattcaaacgacaataatttttttagtcagatgtctgattgagacccgtaatatatcgagacgatcgaaattgaattctgaagctctgagctaattcaaacgacaataacgttntgctcggatgtctgattgagtcctgtaatct

SEQ ID NO: 18173 - DNA, 397 bp, Glycine max
tcaagcttgttggttgtcctcattactagaagaattatgagtagtcagcaattgaccttgctaaaattccagtctctcatggtcgctctaagcatattgaaattaagtttcatttcctaagagattagataaccaaaggaaaaatcaagttggttcactctaagacagaaaatcagttggcagatatcttcacaaaagccttgaagatagacagatttaaggagctgagaatcatgatgaatattctagagctttaggttattgtctgttgttggaatattgcattttgaatcatgggggtgttagaaataattcataaatgtaattacgggttaatgaaattatggattggtaagtacatataaataagtactcttatattgtaagaatagagtgt

SEQ ID NO: 18174 - DNA, 425 bp, Glycine max
gcaacatcagaccacttccagggtgctggaactacttttttggatttgttggggcctatgcaagttgaaagccttggaggaaagaggtatgcctatgttgttgtggatgatttctccagatttacctgagtaaactttatcagagagaaatcagaaacctttgaagtattcaaagagttgagtctaagacttcaaagagagaaagactgtgtcatcaagagaatcaggagtgaccatggcagagaatttgaaaacagcaggttcactgaattctgcacatctgaaggcatcactcatgagttctctgcagccattacacctcaacagaatgggatagttgagaggaaaaacaggaccttgcaagaggctgctcgggtcatgcttcatgccaaagaacttccctataatctctgggctgaagccat

SEQ ID NO: 18175 - DNA, 448 bp, Glycine max
  unsure (1)..(448): unsure at all n locations
tactcaagcttgaccctgctctgctgcggagtgggagaatggatatgtatatcttcatgtgttactgttcctttcccgcgctgaagattctgctgaagaattacttggggtgtgaagagtgtgagcttgaggagtccattttgaagcggctggaggaggttgtcgacgtggcccggatgactccggcggatataagcgaggttttgatcaagaacagacgcaagagagagaatgcggtggaggagttgttggagactntgaagctgagagcggagatgaatgaaaaaaatggagttctgagggtgaataatggggttgaagaggaggaagagcaagagaagagggctttagacagtgagagtcctaagcatgagtcagagattgaggacaattgcaaggaggaggaggaagaagaagagaagacaagtagtatatagtgacgaatgat

SEQ ID NO: 18176 - DNA, 402 bp, Glycine max
  unsure (1)..(402): unsure at all n locations
agcttgcttaatttggatttcttngagcgagaagttgaccttggaagtacttgtcaatgcgactgtaccatgctctcagtgcttgatttagtccataaaaagccttctttagcttgagaactttgtcttcttctaatttcacctttaatcccaacggttgttcgatgtacacttcttccacgaggactccattcacgaaggtagacttcacgtccatttgatgaattctccactagtgttgagttgcaagagagattattactacgatggtctccaggcgagcgaccagagcaaacacctcaacataattgataattgtgaaatttgagttaatttgatagtcaattatggctaagaatgattggaatttctttactttatcgtttatttaataaaataata

SEQ ID NO: 18177 - DNA, 437 bp, Glycine max
  unsure (1)..(437): unsure at all n locations
tactcacgcttgtaagagcttggtcacttcctttntcaccacatctagtatgacggngtttagtcgtttctgtggctacctcactggcttagctgcatcctctaaaagtatcctatgcatgcaggtagatgggctaataccaggaatgtctgctaaagtccatccaatggccttcttgtgcttcttgagcaccggcaacaacttctcctcttgctcaacatcaagggaagcagagatgatcactggaaatttgatgcaatcctaccccgcaagggcattggatagaagactccaagtagattgggccagagatccaagggaaggccctagggttctcatgagccttaaggtagattntgagcccatgggctaagtatgagcccgcttatctttgtaattattagaataggttttttccttcgtttaggccttgtatt

SEQ ID NO: 18178 - DNA, 392 bp, Glycine max
tcaagtgtttttaatgcatgtgaaattacaaaactacccataatacaaaaaactagtcaaagtgcccttaaatacaagggctaaaaaatcctacattactaaggtatccttcctacactatggagcactaaatacaagaccctaaaataatgaaattctaatctaatatgtacaaagataagtgggctcatacttagcccatgggcccaaaatctaccctaaggctcatgagaaccctatggccttctcttgcatctctggcacaatcttcttggagtcttctatccaatgcccttggggggataggattgcatcactaggggaaatctcaaatcaaaaagtgtcatgcttactatctatcaaagaaatcatatggtatggcatacaaatct

SEQ ID NO: 18179 - DNA, 384 bp, Glycine max
agcttgtatggttaaagtctcacgattgtcatgtgctcatgcaacaattgttagccatggctatacgagacatcttgccaaacaaagtcaggttagcgataactcgcctgtgttttttcttccatgctatatgtagcaaagtcattgatccagtcatgtttgatgagttggaaaatgaggcggcaattatattgtgccaattggagatgtattttccccctgctttctttgacataatgattcacttgattgtgcatctggtcagagaaatcaaatgttgtggtcctgtttatctacggtggatgtacccggttgagcgatacatgaagatcttaaaagggtatatcgtccagaagcatctattgttgagaggtacattgcaga

SEQ ID NO: 18180 - DNA, 378 bp, Glycine max
  unsure (1)..(378): unsure at all n locations
ntgcataccccaaggatcctttaagaaattacttgtgttatagagccatgagggtgggctcatgggccactttggaatagacaagacccttgtcttactcaaagaaaagttttattggccccatatgaagaaagatgtccataagcattgcactaggtgtgtggcttgtttacaagccaagtctagggtgatgcctcatgggctatacacacccttacccatcccatctgcaccttgggtagacattagtatggactttgtccttgggcttcctagaacccaaagaggtgtagactctatctttgtggtggtggataggtttagcaagatggcacactttatatccatgccacaggtggatgatgcttcccacatctc

SEQ ID NO: 18181 - DNA, 395 bp, Glycine max
tcaaccaagtggagatggttcatttcaagtgcttgaattattcaatgacaatgcttacaaagttgagctgcccggtgagtataatgttagttccaccttcaatgtctctgatttatctctttttgatgcagatggagaatccgatttgaggacaaatccttctcaagagggagagaatgatgaggacatgaccaagagcaagggcaaggatccagttgaaggacttggaggacctatgacaagggcaagagcaaggaaagccaaggaagctcttcaacaagtgctggccatactatttgaatacaagcccaagtttcaaggacaaaagtccaaggttgtgagttgtatcatggcccaaatggaggaggactaaatgacaccactttgtttcaatt

SEQ ID NO: 18182 - DNA, 346 bp, Glycine max
cttctcgatatatacgtaccagattcggacatccgagagttatgacctgaataatcgaattacaccagagcttccattgctcaatttggagagactagatgagttatgtacgcgaatctgacatccgcgtgaaaagacaggaccattgcgctttcacgagagcttgcgatgttcaagggcgagcgtctagatgagtcatgcacgcgactcgggcattcgtgggaaaagccatgaccattcaactatatcgacagctgccgttgtgcaaacgcgagcatctcgatatattatgttccccacttcagaggtccgagtgaaaagcaatgaccattctaaagatcgagag

SEQ ID NO: 18183 - DNA, 423 bp, Glycine max
tgaaagaatgcagacaatctggggttgtctgtagagaattactttgttgctatgagattaccttctctatgctcttcctatgtttataaatgaatcaagcagcctcaagatgtcaagaagtaaatgtggttgactgagaattacataaacaggttgggcttggttgccttgtatgttgttttgagcttcctagttgggggcctaaccttcttgaacaccaaagggaacttgatcttggagttgtggaactgcttggtgctctcccttttgcaaagtttagctgggatggtggcagttttgatgatctggatgcatggagacctgactctatgacgagatgccatttcgttgtacatgtgttcaacagcgccgtttagagtagtatcgcgatattccttgtacatgttgtgataaccagttcgg

SEQ ID NO: 18184 - DNA, 410 bp, Glycine max
tcatgcttaactatgtatggcaaaacttcattactgttgttcaagacatacaagtgagcttgtaacaaatcttctacactcggagtgatcacctgcagtcctctagaactataatcacccactctgtcatcataccgagacttacgaagcccaacaggtttagccttctctaagtattctgaacaaaattcaatggcttcttctgcaatgtacctctcaacaataaatgcttctagacgatatagattctttctatacccttttaagatcttcatgtatcgctcaaccgggtacatccaccgtagataaacaggaccacaacatttgatttctctgaccaggtgcacaatcaagtgaatcatgatgtcaaagaaagcacggggaaaatacatcttcaactggcacagtat

SEQ ID NO: 18185 - DNA, 386 bp, Glycine max
  unsure (1)..(386): unsure at all n locations
tcagctttatggctgttgacctaatccatacattttttaatattatgctctttttattctcttttgatatactttgtgctntaacgacttgaattcaatatgattttgtttatcaattatttttggatttgtacattacttatacgaaattttataagtttctttttttagttagtatttcactaggttttaaaataattaattaatcaaagacgtctttaagcaagctnttaaatatgctcgtgggccaagccagacttttatgtaagccgagccgagtctttaaaaaaagcctatgataggtaatgagccaagctcaagccttacgtattcaactcaagctgagctcaagcttagtaaagcttggtttggcttgctcatttcac

SEQ ID NO: 18186 - DNA, 388 bp, Glycine max
  unsure (1)..(388): unsure at all n locations
agcttgtgcactcaatatcctgatgagagtgttccatatgttctcaagactgaactaatacatttgctgcccaagattcatggtcttgcaggtgaagatcctcataagcatcttaaggagttccatattgtttgttccaccatgaagccccctgatgtccaagaagatcatatctttcttaaaggtttttcctcattctctggagggagtggcaaaagattggctctactaccttgctcccagatccattttcagttgggatgaccttaagagggtgttcttggagaaattcttccctgcatctatgaccactaccatcaganaagacatttcatgcatcangcaacttagtggagaaagcttgtatgagtactgggaaagattcaag

SEQ ID NO: 18187 - DNA, 381 bp, Glycine max
tctagcttataatattttattacgctcgaaattaaacaacggaaactctcgcgaagttcaaatagtcgtaactattcacacggatgtgcggttcgggcgcttaatatgtccagaggctcgaaattgagcaacgggagctcttgagaaactcaactgggataacttttcacacagatgcgccattgcccgcgatcacatatctagacgctcacaattgaacaacggaagctgcttgaaaagaaaatggtcataacgtttcacaccgatggccgatcaaggcataatatgtcataatctccatattccacaacatagatatctataagaaatggtctaattttcaacggatgtcgattaagcttatatatatgatacgctcga

SEQ ID NO: 18188 - DNA, 422 bp, Glycine max
  unsure (1)..(422): unsure at all n locations
tctaaactntgtacaagaatgaagctctgataccacttgttagacttgtggcctcagatatcttaagaagggggggttgaattaagatattccaaacttttctcctaattaaaaatctatcttactttttacttaagttatgaattcccttaatgacaatcttcttaaatattaattcaaatgaagcaacttgaattatgaatataaagcaataataaataaaggagattaagggaagagaaaatgcaaactcagttttatactggttcggccacacccttgtgcctacgtccagtccccaagcaacccgcttgagagttccactaacttgtaaattccttttacaagttctaaacacacaaggacaacccttcctttgtgttagagatttttaaacaagagactcacagctcttatccctt

SEQ ID NO: 18189 - DNA, 358 bp, Glycine max
tagaacaatggaagctgtcgagaaattcaatgtgtctatcttctttaacggatgttagactcggacacataatatatcgagacgctagaaattgaacgattgaactctctcgagaaattcaattggtcataacgtttcacacggatgtccgattcgggcgcattatatatcgtgacgttcgaaattgaacaatggaacctcttgagatatttaaatggtcataactgttcacacgaatgtccgattcacggacttaatatatcgagacgttcgaaattcaagaacggaagctttcgtgaaattcatatggaaataacttttcacatggatgatctagtcacgcggatcatatattgtg

SEQ ID NO: 18190 - DNA, 428 bp, Glycine max
  unsure (1)..(428): unsure at all n locations
gacctataaaactcagcttattggacaaaggcaaactctattgnnggatatgatggagaagcagnacttcttggacctgaaatgctacaacagattaacgaacaagtgaagttgattcgagagaagataaaagcatctcaggataggcagaagagctattatgatagaaggagaaagccactagattttcaggaaggagaacatgtgtttttgaagggttctcccgtaaccagagtcggaagagctctcaaggctaggaagttgacacccaagtatctaggcccgtatcagattttgaagaagattgggcttgtagcttatcatatcgccttacctccgagtttatcgaatttgcatcctgtgtttcatgtctctcaactgaggcggtacaacccagatccatcacatatacttacagtggacgccac

SEQ ID NO: 18191 - DNA, 371 bp, Glycine max
tatactccctttcgggtcacttagccccgaaaacattatgtattttgtgttgtattgcaaatcaccaagtagtgatcttggttgatgggagcagtacccacaacttcatacagaaacacttagtccaccaattgggcctaccaacacaaaccacaccttctctcaacgtcatggtgggtaacgggcatcacctggattgtcgccatgtctgtccagcacttgcagttcatattcaggacattgtcttcaatattgacctacatgtcctgctcctgtgtggtactcacatcgtattaagtgttcaatggttcaaatctctttggccggtgctaacggattataacgacttatccatgaagttctctcgcaac

SEQ ID NO: 18192 - DNA, 325 bp, Glycine max
tataaaactcagctttagtctaatttgaattctcgaatattatccgatgttatcggacatccaagtaaaaagatattggcatttgaatttcctatgagcttccgttttcaatttggagcatctcgatatattacaggactgaaccggacatccgtgtataaagttattggcatttcaattttctcagagcttccgatctaaattttgagcatctcgatatattacgggactcaatcagacatccgagtcaaaagttattgtcgttggaatttgatacgagcttacgcattcaatatggagcgtctctcgataaattatgacactc

SEQ ID NO: 18193 - DNA, 403 bp, Glycine max
  unsure (1)..(403): unsure at all n locations
agctttttgtttctactattccaataatttcctagtggccttatggaatctaaaataagtcttactatgacattggtgcaatggatttttatggtcatataaaaaacataacaaagatcaagaaaggaaatccaaaaaacatgtagaaactagcttgagccgcctttggtcaaagctgtagaaaatgcagaaactatgttgctcatcccttctggtggattactagtgagcctaaactagaaaagctggcctcatatgatgtttccataatatgtcttgtaattttggcttttgttatctttagttcttgttgtgtttaatgaagaaatattatgcatgaataacttctaggatggatattntatggattgcaccaatgttaagctttttgtttctactattc

SEQ ID NO: 18194 - DNA, 426 bp, Glycine max
actcagcttaacaccgaaatttagttaggctacttggtttctgtttttaaggaagatttagttgcttgtctatgaatatgttcctaataaaagccttgattgcttcatatttggtaagtttgaatatctgcgaaattagattgttagtatatgtctattaatttagttttggttcaagacacaccgagtactaatattggtttaacattcatatggttgtggtgtgtatgtatagatccaataaagaaaacacaattgaattggcaaaggcggtacaaaatcattgaaggtattgctcgaggcattctctacctccacgaggattctcgattacgaattatacatagagacctcaaagcaagtaacattctcttggacgaagagatgcatcctaagatatcagattttgggatcgcaagattggtc

SEQ ID NO: 18195 - DNA, 406 bp, Glycine max
tcaagaaaaagatggccttatcaaactccttattccttttggaattctatcaatagacctccaatctttaatggagagggttaccattactggaaaacccgaatgcaaatttttattgaggcaatagacctaaatatttgggaagccatagaaatagggccttatatacccaccacagtagaaagaattacaatagatggcagttcatcaagtgaaagtataactatagaaaaacctacagatagatggtctgaagaggatagaacacgagtacaatacaatttaaaagccaaaaacataataacatctgccctgcgaatggatgaatatttcatggattcaaattgtaagagtgctaacgatatgtgtgacactcttcggttaacacatgaaggaaactacaatg

SEQ ID NO: 18196 - DNA, 396 bp, Glycine max
ttcttggcattggagttgctttaaatcctagactttttcgaagcatcttaatctcagcttcttgggtctcctataaaaaaggtgaaaggttggtgtgattaaatggcaatatctgcaatttacatttcatcctacatatcaaatattatcaccttggtttttgcttgcaggttactctcctccacttccttagcatgaatcttttcctcaagcttagtgtagaactggccaccaaaataacatttttttaaaactgagtttatccaaaagaaaccctcatgtaacacaaaaggcagaagcaagtaataattatttacctcttttcttctctcagctcgctcatcacacttgaaactgaatccatattttggaagtgctcccaccctgcgaggtttg

SEQ ID NO: 18197 - DNA, 393 bp, Glycine max
agcttgtcatttaccagtaggaatggaacgcaaggcatactacgctaaaaaatttctgaattttgattgagttctgtctggagagaagaggaagttgcaactgttggagctccaagagatgaggcttaatgcttatgacacgatgttgtacaagcggattgtgaaggcctatcatgacatgaagttgttgcgaaagaacttccaatcaggccagcaagtcttgctctttaattcatgactcaagctatttccaggtcatctgatgtccttatgggctagacctctcactatctaagaggtatagccctatggagcagtggaattgatggatcctcagttacatcatctaaagagaacttgggtggtgaatggtcacagattgaaactgtatca

SEQ ID NO: 18198 - DNA, 392 bp, Glycine max
tgttttattggatcttatattcaagtggtcctctagtggagatggagttttagtaagtttctctgattttatggttatgagcttgctaatgcccttctattatccagtaatgttgctgttttacaatgcatgtggcagttggttgattacatggtttttatttttcaggaacgtgcggctggtgcattggctaatttggcagctgatgacaagtgtagtacagaggttgcactatcaggaggtgtacatgctctagtgatgcttgctcgtaactgcaaatttgagggagtgcaagagcaagtagcattactttttattatttgggtaccatccagttcagttgctaaaatctttgaagctgttttatttggtagatgatacctgccaattga

SEQ ID NO: 18199 - DNA, 404 bp, Glycine max
agctttttcaaattcaaacgacaataccttttgactcggatgtcggattgagtcacgtaatatctcgagacactcggaattgaataccgaagttatgagcaaattcaatcgacaataaatttttactcggatgtcggattgagtcacgtaatatatcgagacgctcgaaattgaataccgaagctctgagcaaattcaaacgacaataactttttactcggatgtccgattgagtcccgtaatatatcgagacgctcgaaattgaataccgaagctctgagcaaattgaaacgacaataaatttttacacggatgtcggattgagtcacgtaatatgtcgagacgctcgaaatagaataccgaagctctgagcaaattcaaacgacaatacctattgactcgga

SEQ ID NO: 18200 - DNA, 392 bp, Glycine max
agctttgcctcaaaacaaagtctttccaagacatccaaggctgtggtaatcgattaccaagcagtgtaatcgattaccagaagacaatattgaaaaaacaacttttaagaagggttttgaaatttgaatttaaaagttgtaatcgattaccattgatgtgtaatcgattaccaacaacgaaactcttgaaattcaatttgaaaagtcataacccttcaaaatataactgtgtaatcaattaccagaaacctataatcgattaccagtgaagaattttagaaaaagctttttgaaaagacacatctcttcaaaccattttgaaaaggcacgaatgcccaatatatatgtgtgtctgacttcagaaggcaagagagagatattctaagcgaact

SEQ ID NO: 18201 - DNA, 390 bp, Glycine max
tctatctttgtgcactaagcccaaaaacttctctggaatttcatcttttggagttgggtgatgcaatcctccctaggaagggaccactcactagagccatgagcaagaggctccaagaggattgggctagagctgctgaagaagaccctatggttctcatgaacctcagggtagatttctgagcccatgggccaaggctgggtccaattatctttgtacatattagactaggatgtcattatatttggtccttgtatttagggctccataatgtatgtagggtaccctagaaatatacgatttttcagcccttgtattttagggcacctacactagtttttatattaagcgtagctgtgtaatttcacatgcactaagtgaatatttgat

SEQ ID NO: 18202 - DNA, 404 bp, Glycine max
  unsure (1)..(404): unsure at all n locations
agctttgtccaactcanacgacaataacgtttttctcggatgtctgattgagtcccgtaacatatcgagacgctcgacattgaacgttgaagctctgagccaatacaaacgaccataacttttttctcagatgtctgattgagtcccgtaacatatcgagacgctcgaaattgaatgttgaatctctgagaaaattcaaacgacattaaatttttactcgaatgtctgattgagccccgtaacatatcgagacactcgaaattgaatgttgaacctctgtgcaaattcaaacgacaataacttttttctcggatgtctgattgagtcccgtaacatatcgagacgctcgaaattgaacgttgaagctctgagccaatacaaacgaccataactttntactcgga

SEQ ID NO: 18203 - DNA, 399 bp, Glycine max
  unsure (1)..(399): unsure at all n locations
agcttgtgaagctcctgttttagctttacccgattntactcaaccatttgaagttgaatgtgatgctagtggagttggcattggggctgttttgatacaaaacaaaaggcctatagcttatttctcggagaaattgggaggagccagattgaactattgcacctatgacaaagagttctatgccattgtgagagctcttgatcattggaatcattatttgcgttctaatcactttatattgcattcagatcatgagtcattgaagtatatcaatgggcagcagaagttgagtccaaggcatgctaaatgggttgaatttcttcaatcttttaatttctcttcaaaatacaaggatggtaagagtaatgtggtggctgatgcactctcaaggaggtatgc

SEQ ID NO: 18204 - DNA, 393 bp, Glycine max
agcttactttattaagttctctaaaagtgactgaggaacttggtgtctcaataaaaaacaatgcttcttggcagtccatggagatgcaccacttccttgaaaaataggtcaacaacatggcaagcatcatcaatcttcttgcaaggtataaaatgcgccctctttgaaaacctgtaatccacaacaaaaatggaatccttgtcatttcttgtatgtgggaatcctaaaacaaagcccatagacaaatctatccaaggacaatcaggaataggcaaaggagaataaagtccatgatgcttgatgttagacttagagttcttacaaacaatgaaattctcaaaatttttttttacatcatgtttcatatgaagccaaaagaaatgctcatgcagc

SEQ ID NO: 18205 - DNA, 393 bp, Glycine max
agcttgttatctcaacctatcacataatattcttgaaggggagctgaacttgactggattgataggcttgcgcacattagacttgtcaaataacagattttatggggatattgggttgaatttcccttccatttgtgccaatttagtcgttgcgaatgtctcaggtaataaattgactggtgtgattgaaaactgctttgatcaatgtctcaagttgcagtacttggatttgagcaccaacaatctgagtggaagcatatggatgaagttttcgaggctcaaagagttttctgttgcggagaaccatctaaatgggactattcctttggaagcttttcctttgaattgtagccttcaagaactagacctttcacaaaatggatttgctggtga

SEQ ID NO: 18206 - DNA, 392 bp, Glycine max
tttcttatttactctgaaagcaaggctgtgatgatggcatgggagaatccgttgatggaggctcatgctaaggcggtttgttccggtggtggccacgtactcaatattgggtttggtatggggctcgaggattcggccattcagcgatatgcacctgcttcacacaccattgttgaggctcatcctgaggtttatgaacgcatgcttcgctccggttggggccacaatgaaaatgtcaagattgattttggacgatggcaagatgttctgcctgagcttgaaacatatgatggtaattgctattcgtctaatctttatcttcataaacgtcaatgcttgattgcatcattacacatactattacaatcgattggatattcttctctgaaaaa

SEQ ID NO: 18207 - DNA, 393 bp, Glycine max
ctatctgtgatttggagcggtataaggctcgtcttgttgtcaatggcaggtcttaataggtgggtatcgactatgacgagactttcagtccagtggtaaaaccagctactatttgtgtggtactaagcattgtcgtgtcaaagaattggaccattcatcaacttaatgtaaagaatgcttttctctataggcacctttctgaaaccgtctacatgcatcagcctcctggatttcgtgatcgaaatcatccggatcatgtctgtcttctaaagaaatccctatatggccttaaacaagccccaagagcatggtaccaacggtttgcatcttttctctccaccatcggatttgttaatagcaagaccgaccactctctgtttatctatactcatg

SEQ ID NO: 18208 - DNA, 388 bp, Glycine max
agctttgtgtgtgattcacgaaagatgatggagaattggactaatgatggaatgtgctacaacatttaatatattagttggggatggatgggtgccaattcatctaaattgatcctaatccaaagatacttgcatgtgctatatgaacgaggtttcatcttatgaattgcatgcgaagcttttgccacgtacagtgtgaaataacattctgtattctgtcctcacgtatataacaaggctacatattgtgaacaccctcgaagcatttgagactaactcttatagagaaaaaaaaatggctgatacacgtggatgagatgcagtgagaccattggtgatatgtgataacaagtgtggctgcacacttacatgcactggtggattcact

SEQ ID NO: 18209 - DNA, 327 bp, Glycine max
agctttctttgttcaatttcgagcgtctggatatattatccgcatgaatcgaatttccgcgtgacaaggtttgaccatttgaatctctagagagctatcgctgtctcaatttcaagcgtgtcaatatagtatgcgcctagtttggacttttgggtgacaagttatgaccattagaatcttccgagagcattcgatgctcaattgcgagcgtttacgcgtattatgcgcactgaatcgactttcccgtgacaagtattgaccattcctattggtagagagcatctggatttctagatagaacgtctggatgtgtgatgcgccagaatc

SEQ ID NO: 18210 - DNA, 391 bp, Glycine max
tgcttgctaacccatggaagctcctaatatctcccacactttttggggtgggccattcttggatggccttgattttctcaaggtccacttggaccccatttctaccaactacaaaacctaagaaaactatattatctacacaaaaggtacacttctctatatttgcatagagggtgtttttcctaaggactgaaagaacttgtctgagatgtcctaagtgatcatctaggctcctactatacactaaaatatcatcaaaataaacaactacaaatctacctatgaaatcccttaagacatgatgcataagcctcataaaggtgcttggtgcattagtgagcccaaaaggcatcactagccattcatacaaaccaaacttggtcttgaaagc

SEQ ID NO: 18211 - DNA, 400 bp, Glycine max
agcttctgatttcaatgtcgagcctcacgatatactacgagacaaaatcggacatccgagtaaaaagttatgaaattctgataccaggggacagatgtcgtaccggatgtcacgacatcacgcttcagaacatgcagattatatgtgtccgtatgaacagattaaacaagtaaataacacaagagaattgtttacccagttcggtgcaacctcacctacatctgggggcttccaagccagggaggaaatccactctcaatagtgttagttcaaggtctaacagcccctgtttacaaccttctcacctaaccactacccgtgcgatctctacctaagagccactcttagatatgagaacctctgctcactccctctcactcacactcccgtgtttacaatc

SEQ ID NO: 18212 - DNA, 397 bp, Glycine max
agctttttagtaaattcaaatggtcataagttttcacacgaatgttcgattcggggacataactcatctagacgcctgaaattgaacaacggaagctctcgagaaattcgaatgctcataagttttcacacggatgtccgattcggggacataatatatcgagatgctcgaaattgaacaacggaagctctcgagaaattcgaatggtcaccacatttcactcggatgcccgattcgggaacataatatatcgagacgctcgaaattgaacaacggaagctctcgagaaattcgaatggtcataagttttcactcgaatgttcgattcggtgacataactcatctagacgctcgaaattgaacaacagaagctctcgagaaattcgaatggtcatac

SEQ ID NO: 18213 - DNA, 388 bp, Glycine max
tgcttcttcttcaatgaaaccgtttaaaaaggcactcttaacatccttttgaaaaagcttaatgtttttgtgagcaacaaaggctaaaatgattcttataacttcaagtctagcaacatgaacaaaggtttcagagaaatctataactttttgttgattatatcctcaagctactaacctagctttgttgcatactacttttccttgttcatccaacttgtttctgaagattcatcttgttccaatggtgctcttagtttctggcattggaacaaatgtccagacatcatttttgttaaactgattcagtttttcttccattgagattatttagtcattatctatcaaagctttgtctataagtttaggtttgatttcaaacacatgg

SEQ ID NO: 18214 - DNA, 393 bp, Glycine max
ttctatatccacaaacataatccaatatccagaagactttgatagggaagttagaatcctcgggaaagcaaggcacccaaatctaatagcattgaaaggatactattggactcctcaactacaacttttagtaactgagtttgcaccaaatggtagcttgcaagccaagctacatgaaaggcttccttcaagtcctcctctttcttgggctataaggttcaaaatcttgcttggaacagcaaaggggcttgctcatttgcaccactctttccgtccaccgatcatccactacaacatatagccaagtaacattttgcttgacgaaaattacaacgccaagatctcagattttgggttggctcggcttctgacaaagctggaccggcatgtgat

SEQ ID NO: 18215 - DNA, 386 bp, Glycine max
tagcttggacaacaaaatttgacaactaatagaattatataaataagaaataaaaatgtaggataaaatcaaatttatattctttacttatattcttcttcctatttatttatgctaaattgcattgaaagtgaaatatatacaatattataattataataagaattcagaaaatataatttggtggagtaaaactgtagagtatttaattttaaataataaatttattaatgcacaaaaaagaaaaacatgttggcttttaacaattgtgcaactctttttatgttaggtttataattgtaatttttagagcacaatcttaattatgatttataaatatttctggaatattaatattcagggtatcaaaaaagaaagatatgttc

SEQ ID NO: 18216 - DNA, 361 bp, Glycine max
agcttgaccaggaattatttgttgggttggatgttgaattctggttgttcctgctgcggagatgatggtacagagggtgaaccatgagctgaagcttcttttggtgaggtagccatggaaaagcatagcgtttggaatgattccgtaaatttctgagagctgctggggaatgcagaaaacgagattaacacgaaaatataagtttgaatgatgaatgtacagggacgtgtgaagcaacggtcgaatctgctttggttcagtatgtgaacgtgctattaatgttaagtgattcctttgggcacgttcagatatcagtatttgctacaattgctctagcagacaaattgcccatttgcccctc

SEQ ID NO: 18217 - DNA, 432 bp, Glycine max
  unsure (1)..(432): unsure at all n locations
tagctacacacacccctctaataactaagctcaccttcttgagaatcttccttaanaagattcctaaagaagctagagcttagctacacacacctctctaatagctaagctcacctccttaagatgagaagctagaactgtgctacacaccccctataatggctaagctcacccccatgacaaaatacatgaaaatacaaaaaaagtccctactacaaagactactcaaaatgcctcgaaatacaaggctaaaatcctatactactagaatggccaaaatacaaggcctaaacgaaggaaaaaacctattctaatatttacaaagataagcgggctcatacttagcccatgggctcaaaatctaccctaaggctcatgagaaccctagggccttcccttggatctctggcccaatctacttggagtcttcta

SEQ ID NO: 18218 - DNA, 386 bp, Glycine max
agcttgataatacatttttcaaaatcaaaagttattttatatcctttatcacacaattgactaatacttaatagactatgctttaaaccttctacaagtaacacattttcaatgggagtagaggaactcgtacctattttgctgactccaatgattttgcctttgttgttgtcaccatatgtaacatgtccacttttcttgggggaaatggttgtgaatttggatacatctcctgtcatatgtacggaagatgaagacgtacacacgatttatactggttcggccacaaaccgtgcctacattcagtccccaagcaacctgcgagtcttgagatgtctatcaaccttggaaaatcctttacaagccatagatccacaagggatgta

SEQ ID NO: 18219 - DNA, 404 bp, Glycine max
  unsure (1)..(404): unsure at all n locations
tatgtgcgactctgatgatgaatcagaagccgtttatgctcggtatatgcngtgccgcanagataatgttgagactagcacttggctagaaggaatttacaaaatgaaagaaaaatgggctagttgctatatgatagatgcttatagtataagaatgccaagtactcatcttagtgaaagtttcaatgctagtgtgaaagattatgtcagatcaagctcgcatataatgcacattttcaaacattatgagcgagctgtggatggcaagcaatacaatgaattagatgctgaatacaatagcaggaaaaaacttcatcggctaatgatagaacactcaccattattaaagcaggttacgcaactttacactccaataatgttaaattccgttcagaatgaatatg

SEQ ID NO: 18220 - DNA, 314 bp, Glycine max
agcttgaatcggacatccgtgtgaaaagttatgaccatttgaatttctcaagagcttccgttgttcaatttcgaacctctcgacatattatgcacccgaatcggacatctgtgtgaaaagtcatgatcatttgaatttctcgagagctttcgatgtttaatttcgagcgtatcgatatattataaccctgaatcggacctcagtgtgaaaagttatgaccatttgaatgtgacgagagctttcgttgatcaatttcgagtatcactcgatgtgacgcgccttaatcggacattcgagtgtaatgttatgaccat

SEQ ID NO: 18221 - DNA, 385 bp, Glycine max
agcttcaagaataatgtgcctcagcaaacttcttattcccagaaggaaattcaatagatatgcctcttatttttaatggagagggttaccactactggaaaacctgaatgcaaattttcattgaggcaatagacttaaacatttgggaagccatagaagttagaccttatgtacccaccttggtggctggaaatacaacaatagagaaacctagaaaagagtggtctgaagaagaaagaagattagtgcagtacaatttaaaggctaaaaatatcattacttctgccctaggaatggatgaatattttagggtgtcaaattgtaagagtgctaaggatataagggacactctacaagttacacataatggaacaactgatgtcaa

SEQ ID NO: 18222 - DNA, 380 bp, Glycine max
attttccttagagaggtttggtgctccgtgtaggaagagatggttttgagaagagagaaagaaaaaataaattcacgaggatgaataatcgaaaaagctatttatatctaaggtattcacaacctattatttactctattgatttattgctattatttaatacaaacattatattttattccctattcaataaataaataaaatattttttgtattttctcgaaccattattctaattaataatttttttatctatttaattataaaatctcattatcttttcaaatctctatttattttcgaataacaatcattgttaaatcagtttataagaaaaatgaaatgttacacatgtaaatgccaatatcaatataactatg

SEQ ID NO: 18223 - DNA, 334 bp, Glycine max
tctacattcaattccgagctttgcgatatattactgtattcaattggacatccgagtcacaagttattgtagtttgaatctgctcagggctgcgggattccatttcgagcgtctcgatatattacgggactcaatcggacatcagagttaaaagttattgatgctagaatttgctcagagcttgggtattccatttccagcctctcgatatatgacgggactcaatcacacatccgactgaaaagttattgacccctcaatatgctcagaggttcggcatgccattctgagcgtctcgaggtattacaggactcaatcttacctccgagtaaaa

SEQ ID NO: 18224 - DNA, 372 bp, Glycine max
atctttcttaagaagatttctaaagaagctagagcttagctacacatacctctctaatagctaagctcacctccttgagatgagaagctagagcttagctacacaccccctataatagctaagctcacccccatgacaaaaaacatgaaaataacaaaaaaagtccttattacaaagactactcaaaatgccccgaaatacaaggttaaaaccctatacgactagaatggccaaaatacaaggcccagacgaaggaaaaacctattctaatatttacaaagataagcgggctcatacttagcccatgggctcgaaatctaccctaaggctcatgagaaccctagggccttcccttggatctctagcccaatc

SEQ ID NO: 18225 - DNA, 319 bp, Glycine max
actcaagctggaccccacggaagctgctaatatttcccacacttttggaggcgggccaatcctggatggccaagaattactcatggtccacctgtaccgcatttataccaactaccaaacctaagaaaactataatatctacacacaatgtacacttacctatatatgcacatatggcgttattcctaatgactgagagaactagactgagatagcctaagggaacatgaaggctcctactgtacactgaaatatcctctagacaacctactgcggatctagttatgagatcccataagacatgatgcataagcctcat

SEQ ID NO: 18226 - DNA, 361 bp, Glycine max
agcttcaacatcagactccttccagggtgctggaactacttcacatggacttgatggggcctatgcaagttgaaagccttggaggaaagaggtatgcctatgttgttgtggatgatttctccagatttacctgggtcaactttatcagagagaaatcagacacctttgaagtattcaaagagttgagtctaagacttcaaagagaaaaagactgtgtcatcaagagaattaggagtgaccatggcagagagtttgaaaacagcaagtttactgaattctgcacatctgaaggcatcactcatgagttctctgcagccattacaccacaacaaaatggcatagttgaaaggaaaaacaggac

SEQ ID NO: 18227 - DNA, 407 bp, Glycine max
  unsure (1)..(407): unsure at all n locations
tgtgtcgcactggctactgcggaagttaaacatatttctgcagttagctgangagctcaaagactctggatgaagcatcaacttgaagactttggagtaaaccttgatcacattcctctaaaatgtgacaacacaagtgcgatcaacctacaaaaaaaccttgtcatgcattctaggactaaacacatagagataaggcattattttcttagaaatcatgtgttaaaaggtgattgttgtattgagttcattgatagtgagcatcaactagcagatattgtcactatacctcttgctagagataggttctttttcattagaaatgaactaagcatattagatgcatctagcatagaatgatattctgtttgcacagtgtgtgtgattgacattgctactcatataat

SEQ ID NO: 18228 - DNA, 429 bp, Glycine max
ctccacaacacctataaagtagggttgccaagccaacaatcattcagtctatatggtcctgggccctaatcttataatgaactttacaagatgatcggacaatggttgaaaaagttcctatccaataccacaagcaagctccctttccatgtgtcaacccattcccttgaagtcaaacgtctatctaatacactcatggtcttaccatttggatgaaaccatgtgaattttctccccacaaatggaatatctaccatattcatatccaagataaattcattaaactctctattatgccccccatgaggatgtgtattatcactttttctttgatgcataccacatacactattaaaatctccaatagggcaccaatgatcaatgctactcccactccttctacctatgagttcctaccacattcttctt

SEQ ID NO: 18229 - DNA, 376 bp, Glycine max
  unsure (1)..(376): unsure at all n locations
agcttctttntgttggcagttaaggaactagtgaagcatagacaaccaaatactcttaaagaactaatatcatagggggttccatagagtttctcatagggagttttgttaccaagaaaagtagtaggtatgcagttaacaagaataccaaagtgaattaaagcataagaccaacaaatgaaaggtaaattagattgaaacaacaaggatctagtaacattaagcaagtgttgatgctttctttctacaattccattttgttgaggtgtttcaacgcaggaagtttggtgtataattccaatttcatcatagaattgtcttagaatgaattctgatccattgtctgatctaatcattttcacctttatatcaaact

SEQ ID NO: 18230 - DNA, 438 bp, Glycine max
  unsure (1)..(438): unsure at all n locations
ctagcatcaatgacagaccatttttaataaatgagtgatttgctcnaattcatgcttttatactatcatgtatatacccccaaaattattagagtgtggcaacaatgtctttgatagtacaaagtcaacaatatagataatatgtaaataaatatgttgtctacaaaaatcaatgctacgaagacatgtgtaaatgactcttgagaacatcacatataaatagagatattctaacatatttttatttatttatttaagtgtaaataaaggagaaaagaaataaataagataaaaatattatttttggtccgtctacacacaaaaacaaaaaaaattcccataatttattactaagaaagacatgtaggttgngattattattctttcttctattttaaaaattaaataattctgtaaaaatataaacattaaataatt

SEQ ID NO: 18231 - DNA, 363 bp, Glycine max
agcttgccatgaattggttcatgtgtactagtaaagaggctggcataatcctgtcataaaacacaaccataaactaaaataagcatatgtgatcagtgtcaaaataaaatgcaaccatttacaaaaccaatcaagaaaataagaatagattattacagctaaccaatcaacaagcctttcaagtagccatgcttgagattgcttgtccacataaaatatttcaattaactcccacgcagctttcaaagatgtaggctcttcacctctctatattatgtgtaatgtgttaaaaagcaagtgattaacttctcggtatcataattcccacaaagcagatctcagctcagctaaacacggtaaaac

SEQ ID NO: 18232 - DNA, 370 bp, Glycine max
  unsure (1)..(370): unsure at all n locations
gcgattcactcgtcccgggatcttagagtcactgtatgctgcaagcttctacattcaatttcgagcgtctcgatatgttaccggacccaatgagacatcccagtaaaaagttattgtcgtttgaattggctgaaatctttaacaattaatttccagcgtctcgatatgttacggtacttcatcagacattcgagtaaaaagttattgtcgtttgaattaactcagagcttcaacattcaatntcgagcgtctcgatatattacgagcctcaatcagacatccgagtaaaaagttattgtcgtttgaactagctcagagattcaacattgaatttcgagcctctcgatatattacgagactcaatcagaca

SEQ ID NO: 18233 - DNA, 416 bp, Glycine max
  unsure (1)..(416): unsure at all n locations
ctcagcttgagccattcnacaacataacttttactcattgtctgattgagtcccgtaacatatcgagacgctcgagattgaatgttgaacttttgagctaattcaaacgacaataacatttttctcggatgtctggttgagtcccgtagcatatcgagacgctcgaaattgaatgttgaacctcttagctaattcaaacgacaataacttttttcacggatgtctgatagagtcccgtaacatatcgagacgctcgaaattgaatgttgaagctctgagccaattcaaacaacaataacttttttctcggatgtctgattgagtcccgtaacatattgagacgctcgaaattgaatgttgaaactctgagccaattcacacaacaataactttgtactcggatgtctgattgagtc

SEQ ID NO: 18234 - DNA, 410 bp, Glycine max
tgttcaccccatgtcgaatgcgcttttttagagcttttcatagtaccactaattgttctccttatgaagatgagcatgggtttaacccactaactcctcttgacctttcgcctaatgctgctgtttataaccataaagaacgtcaagcaaaggcggactatgagaaaaagcttcatgagagagtcacagatcaaattgagaggaaaagtaacagctatgctaaacaagccaacaaagggagaaagatggttgtcttctaacccggagattgcgcacgggtgcacatgagataagaaacgtttcctgaacagaggaaatcaaagcttcaaccaaggcgagatggaccatttcaagtgctcgacagaatcaatgacaatgcttacaaaattgagctgcccggtgagtataat

SEQ ID NO: 18235 - DNA, 348 bp, Glycine max
  unsure (1)..(348): unsure at all n locations
atctttaactcggatgtccgattcaggcgcataatatatcgagacacttgatattgaataacagaagctctcgagaaattcgaatggtcataacttttcacacggatgtccgattcgggcgcataatatgtcgagacgctcgaaattgaacaacggaagctctcgagaaatcctaatggccataacttttcactcggaggaccgattcatgcgcataatatatctagacgctcgaaattgaaaaacggaagctcccgagaaattcaaatggtcataanctttaactcagaggtccgattcatgcgcataatatatcgagacgctcgaatatgaacactcgaagctctc

SEQ ID NO: 18236 - DNA, 416 bp, Glycine max
actcagctgtagcaaatgcaactgtatacgttttactctttgttcgattgagtcacgtaatacatcgaaacgctcgaaattgaaaacagaagctctgtgcaaattcaaacgacaatacattttaactcggatgtccgattgagtcccgtaatatatcaagacactcgaaattgagaataaaagctctgaacaaattcaaacgacaataactttttactcggatgtgcgattgagtccagtaatatatctagacactcgaaattgagaatagaagagctgagcaaattcaaacgacaataactttttactcggatgtccgatggagtcccgagcgtctcgatatattatgcgcctaagttggacatccgagtgagaagtcatgacaattataattgctcgaaagcttacattgttca

SEQ ID NO: 18237 - DNA, 368 bp, Glycine max
agcttttaaatattattatgttttacgtaattatttttttagtcccgaaaaaaactattgttattaatccctcaatttgtggcgatttgtcaagtcaaaaatattttttaatggaatttctctaaagataattagttggctatttaaaatagtcgtaatatgtaaaagattacgataattctatatcaattatgtatttttcttctttaaaccaatagatatgtaaaaaatgattatcaaaccattcgagtcaaatattttagtggattagaatcgctaaaaatcatttttaaaaaaatttatgataatggtgatggttaaaaatcattataaatcgtgaaactataaataaattatataaagagaga

SEQ ID NO: 18238 - DNA, 430 bp, Glycine max
  unsure (1)..(430): unsure at all n locations
tcacaaaagtttatatgacttganacaagcaccgagtcagtnggactagaagnntaatgagtttatgagcaactcaggattcagaagatgtgacatggaccattgctgctatgttaagaaatatactaatagttatgttattcttgtcgagtatgttaatgacatgtcgattgcaggatctagtatggcaaaaattaacaagttgaagcagcagttggcagaaaactttgaaatgaaggatcttggtccagctaaacaaatccttggtatgagaattcttanaaatagataagaaggaatcttgaagccgtctcaggagatatatatacacaaattgcttgacaggttttaccttggagattctaagaccaggaatgccctttcgggatctcatttgaagtttcaaagaagcaatctatgcagacagatg

SEQ ID NO: 18239 - DNA, 427 bp, Glycine max
  unsure (1)..(427): unsure at all n locations
tactccacaatgttctccanaaatgtttttggaacttggtatccctatcacttattatgctcatgcacagtccatagagtgtcaccacctccttgtaaaataagtcagcgacatggaaagcatcatcaacctttttgcaaggtataaaatgagtcatttttgaaaacttgtcaataaccacaaaaacaaaatctttgccactctttgttctaggcaatcccaaaacaaagttcatagatatgtcaatccaaggaaaattaggaacaagcaaaggatgatataaattaagtggcttcacttttgattnttcctttttacaaacaatgcattgttcatagtatttatgcacatcacgtttcatatggggataataaaatgctcatgcaatgtttcttaagtcttttgcatgccaaaatgccccatcaaa

SEQ ID NO: 18240 - DNA, 285 bp, Glycine max
acccagtccccctcattaagaactagctcctttcttcctctattgcccttagttaaatacacctttgcttggatctctatttgggtcttaaccctctcatgcaacttctttacaaactctgacctagattccccttctttatgtataaaagaagtgtcaagagggatgggaatgaggtctaccggtgttaagggattgaacccatagacaacctcaaaaggggattgcttggtggttctatgaacccctctattgtaggcaaattctacatgaggaagatactca

SEQ ID NO: 18241 - DNA, 364 bp, Glycine max
tttgcaagtttgttcattccgaagagaaaaaaaatagagttgtcataggataaaaatgaattctttatagttggagtaaaacgggaattgaataaattaaatgattaattattgttttttcttgtaagaattaatgtctcatgtgataggcatatgacttatgtagagaataataagtaaataattaacgattaagggctaaattgtaattgggcttaatatgagaagtatctagagctaactgctacttgatgggagtagtgattataaatgggggataatacccactaacgttaaataaggtccccttcctgactagaaagtgtgctctctcacctatagtcattacgaacggagagagaca

SEQ ID NO: 18242 - DNA, 385 bp, Glycine max
  unsure (1)..(385): unsure at all n locations
tttcaagttttaacctttaaacaaactaactaatatataatttcaaattttaatgataaaaatctaatacaacaacaattaaactaatataggttatattgttactcatttaatatgaaaatatattagatataaaatgtttttcaaactaactaaataaaagagtggatgcatgtgtaggttaatagcctataactaaaacctttataacataacatttgtttttctcgagaaaacatctcacttgttttaaggtgttgctacgtgtaccaatcatattacttgtgcacccagcacaaaaaatttaatttcgaaaatgctcttattngctttttcttccctttaagtttcnttttttacaataacacagtcattctttcatttt

SEQ ID NO: 18243 - DNA, 416 bp, Glycine max
tagtgacaaaaatcctctaataccaaaatccatggtttgtgaaacattggtcggatgaagaacaacatcttatggactccccttggccattcgttgtttagggaatggatattctcggaaatttacccatggctccaatgcaaaggaaattcctgctagtggcagatgattatttcacaaaatgggtcgaggtcgaaccattagcaaacataacaacctatgccatccaaaaattcttttggaagaatatcattacacgctttagaatttcaaacacattggtaaaaaaaatggtttacaattcacagaatgaatgctcaatgagttcttaagcagcctcgaaatcaaacattgggtgacgtttgtagaacacccccaaaccaattatcaatctaaagcagccaacaagataattc

SEQ ID NO: 18244 - DNA, 365 bp, Glycine max
agtttggaaactctttggcaagatacatccagattttcccattgacccgcggaatgtgcgacttggtttatgcatagatggatttatatacaatcattatcttcaccttatttggcttggtcaatcattgttaccccatacaatcttcctccagaaatgtgtatgactaaaccttatatgtgtatcaagactaaaccttatatattcaaagttcaatgagcaatttaggaaacatggatttgaacatgatgcatctatggtgagaaattcaattctagcaaatccaccaaaccgtttagtcaaatttctacttaagagccatcaaactttaatcaggagagaaaaatatagagagagactttatt

SEQ ID NO: 18245 - DNA, 386 bp, Glycine max
  unsure (1)..(386): unsure at all n locations
agcttttcctttattgttctactagagattccaagtgttagagaaaagaagaagggattggagcctcaatttcactgtctttgtgtgagggtaatttctctctctatagacattatttgcaaatcccaactgtgagaatgtgaggaaataagttctgaagttgatgtcccaatttcagaacaatcgaacggttaacgagtctgggatcataattntactgggataggtttgggtgtatgcgggaaaaagagagggttatggaagataaagaagggagaatgaatttgaaagacaggaagagcatagagacacatcgtaattgtgaaaactaacctaatatgtatctatttatagctaggatacttttagcctattacttactctat

SEQ ID NO: 18246 - DNA, 383 bp, Glycine max
agtttgagaatggagaattgcacaaagcaatcactacgcatggctccaaagtcgaaggtttaaaacacatgaacgaaaacgcaattcatggggctccgaaaaaggggttacaatggagaattgcactaatcaatcactacgcatggctccaaactcgaaggtggaggacacatgaacgaaaacgcaattcatggggctccgaaaaaggggttgagaatggagaattgcactaagcaatcactacgcatggctccaaactcgaaggtggaggacgcatgaacgaaaactcaattcatggggctccgaaaaagggtgagaatggagaattgcactaagaaatcactacgcaaagtttcaaactcgaaggtggaggacacatgaac

SEQ ID NO: 18247 - DNA, 384 bp, Glycine max
  unsure (1)..(384): unsure at all n locations
accttcggcttgcaagtttgtaggcgtnggatcttcttcatcaatggagtcatttgcttcttgaagatcatggcagcggaatagagaaggaagaaagatgattggagaccccactctaggagatgatgagtcaagaagaagctcaccaccacaggaagccatggataagagcttgaaggaaggcgaatatgagtggagggagagggagagaatgggcacgatattttatgcctcanatgaggtctgaactttgaagtgtaattctcaaatgatcaaagttcaaaaaatgcacacacatggcctctatttatagcctaagtgtcacacataattggagagaaatttgaatttctattcaaattcactcgaatttgaaattgaatt

SEQ ID NO: 18248 - DNA, 392 bp, Glycine max
  unsure (1)..(392): unsure at all n locations
agtttaagctctcttaactgcataaggctcttaatatttgaagagtatccttgtggaaccttcacccgacgaagacactgacaaaaagttatcttctcctttttggacaaagtatgaaagctaggggcaagtaaattttcttcccatcagaccttggatgcaactgtgatcgtatccccatctcaactagatcttgacgggtattcaagccatccttcgtcttgccctanatgttaaggagcgtcccaatcacactgtcacatacatttttctcgacatgcataacattaatacaatgtctaacgtctagatcagaccagtatggaagataaaagaaaatgaacctctttcttcatatgcaagtcttacttttattcttcttttgggtcttt

SEQ ID NO: 18249 - DNA, 386 bp, Glycine max
  unsure (1)..(386): unsure at all n locations
agtttaagcttttntaactgcataaggctcttaatatttgaagagtatccttgtggaaccttcacccgacgaagacactgacaaaaagttatcttctcctttttggacaaagtatgacagctaggggcaagntaaatttcttcccatcagaccttggatgcaactgtgatcgtatccccatctcaactagatcttgacgggtattcaagccatccttcgtcttgccctaaatgttaaggagcgtcccaatcacactgtcacatacattnttctcgacatgcataacattaatacaatgtctaacgtctagatcagaccagtatggaagataaaagaaaatgaacctcttcnttcatatgcaagtcttaactttattcttcttttgg

SEQ ID NO: 18250 - DNA, 438 bp, Glycine max
  unsure (1)..(438): unsure at all n locations
tgtagaagcaaaaggccagctatggttttcaaggtgtattttgaaaaggcctatgactcagtctcatgggcttttttggattatatgctacaaagaatgggtttttgtcccaaatggagacactggatttctgcctgtcttaattcagcaagcatttctaaaagatgtccaggtttaattctctgatttgacgctagtcaacaaattgtttctgacaagtcatcaagctaccaagcttgtaaggattctaccgaaatcattgtgattgaaaggaaaagataatagaaagtaaatatgatgctaggataacaaatggttgtcattntgagatgattaatacactggcttagtacttcaatttattctttagaaccaataaggagactgagtatttaaagtaaaaatatagaggacttccatantttggaaacatgaatg

SEQ ID NO: 18251 - DNA, 429 bp, Glycine max
tatgctgcatacatttataatagaccccctcttctttaaaaccaacaacagcagaataatgatgatctttcaagcaacagatacaatccaggttggataaatcatccaaatctgagatgggtaagtcctccacaacaacaacagcctgtccctcccttccagaatgttgctggtccaagcaagccatatgttcctcctccaatatagcagcaacaacaacaaagacaacaagcaactgaggctcctcctcaaccttccttagaagagttagtgagtcaaatgaccatccagaatatgaaatttcagtaagagacaagagcctccattcagagtctgacaaatcagataaggcagaatgctactcagttgaaccaagctcagtccaaaattcttacacattgccttcacatactgtgtagaatctgaaaa

SEQ ID NO: 18252 - DNA, 374 bp, Glycine max
  unsure (1)..(374): unsure at all n locations
agtttctgagttgtttttggattgnacatttcaatacttggtaaaatgtgataatgggctttaataaatcatttgggagtgatatttaattattgtaaattattggccgagtggtctacctagagggagatcccaataattctagtgatgatttgtggaattaacttgctgtatgatgccattcaattgtgaacatgagttgataattgtgaaattgggtccagagggattgaccctgatgtaagctccattggagcttgtaggcctaagatcttcctcatcaatggattcctttgcttcttggaagatgaatggcagcggaatggagaaggaagagagagaggagatgccactttaaggagaagatgagtcta

SEQ ID NO: 18253 - DNA, 437 bp, Glycine max
  unsure (1)..(437): unsure at all n locations
nttaactgaatttgcaatgttccaattgttttttaattggtgtaatcgattacaatatattggtaatcgattaccagtgtatctaaacgttgaaattcaaattcaattgtgaagagtcacatcttttcataaaatgctttgtgtaatcgattacatggttttggtaatcgattgccagtgacaagttttgaataaaaatcaagagatgtaactcttccaatgcttttctcaggattttctcaaggttataactcttccagtgattttcttgaccagacatgaagagtctataaaagcaagaccttgatttgcattntaataacttcttcataactttntgaacgtctttntgaacttcttcttcttcttcttcctttgccaaaagctttctaaagtttttggtttctaaaccttgttctttcacagaaaacaaaagt

SEQ ID NO: 18254 - DNA, 365 bp, Glycine max
agtttgccatgaatcgtgccatgtgtactagtaaagaggctggcataatcctgtcataaaacacaaccataaactaaaataagcatatgtgatcagtgtcaaaataaaaccaaccatttacaaaaccaattaagaaaataagaatagattattacagctaaccaatcaacaagcctttcaggtaaccatgcttgacattgcttgtccacataaaatatttcaattaactcccacgcagctttcaaagatgtaggctcttcacctctctatattatgtgtaatgcgttaaaaagcaaatgattaacttctcggtatcataattcccacaagcagatctcagctcagctaaacacgtgaaacaaatt

SEQ ID NO: 18255 - DNA, 422 bp, Glycine max
gtgcagaagaaaatgagaaatttaacaaacattgtgttgttatgtttttcatttttaattgtaatgttagttttagggggaatgtattttaggtaaaatgtgtaatagcagcttttgatattgtaattgttgttttgctgaagaatttgtagtaggaagtagcttttgtagtgtaatagcagcttttgttgctactgtcaattgttgttttgctgaagaatttgtaataggaagtagcttttgtagtgtaatagcagcttttgttgctactgtcaattacccatttcaattaaatataatttgttggtgaaatttgttgctgaaatttgcagtgtattaaatataatttaataaaagatagagaattatgtaataagacgcagctcataatgtatgttgggatggattgtactactccaact

SEQ ID NO: 18256 - DNA, 375 bp, Glycine max
  unsure (1)..(375): unsure at all n locations
agttttacatatttccaactaaaatgggtctgtcttgcaataagattgtacttgtttgatgatccagatcatatgatggcaatgaagatgatcaaccaagcactgtgaggaaggggaaaataaagtctttcacttcttattgtggtggacttccatctcctgaagctgctaacaatccattagcatataaattcaggtacttcttggaatgtctttgtcaaactcaagagtaaggataccgaattatgtatttaattagacatgatttataaaacatttgaatatcttagtgtaagtttccaaaacccaatgcttttgaactctctgctntgtagtattttcatctggctaaccattcaactatagtatgtcaca

SEQ ID NO: 18257 - DNA, 349 bp, Glycine max
  unsure (1)..(349): unsure at all n locations
taataatctatggcttgaaacaagcctcccttctatgnatctaaagtttcatgatgtcatcacttcatttgactttgaagagaacatcatggatcaatgtatataccaaaaggtcagtgagagtaagatttgctttctgtgttaaacgtggatgacattttgcttgcaactaatgataagggtttgctatatgaggtgaaacaatttctctcgaagaactttgatatgaatgatatgggagaggcatctcatgtaattggcattaagatccatagggcaagatctcgaggcattttgggtttgtctcaagagacttatattaacaaagtttcacagagatttacatgaa

SEQ ID NO: 18258 - DNA, 402 bp, Glycine max
ttcacacttccatgtcgaataggcaataaaccttcgcttgatattgatcctcctaatgagactatgcagctccttcttgttttgaggtggcctcacttccaacattgctttagctttatttttatctgtcttgattcttctttgatggaaaaggaaacccaaaaagtttccagttgatactccaaaagcacatttctcaagattcatttctaagtttatgaaacctcatccttaaaagagaatcttccaaatcaccaagtgtttttcaaaattggatgacttaacaaccacatcatcaatgtaaacctccatcaatttgctaatcaattcatggaaaataacattcctagcccattgataggtagctcctaaattcttcaaaccgaatgacattaccaatca

SEQ ID NO: 18259 - DNA, 379 bp, Glycine max
  unsure (1)..(379): unsure at all n locations
agtttttgagttattcaaatggtcataacttttcactcggaggtccgattcaggcgcataatatatcgagacgctcgaaattgaacaatggaagctcttgagcaattcaaatggtttaactttttactcagatgtcctattcaggcaaataatatatcgagacgctcaaaattgaacaacagaagctctcgagaaattcaaatggtcataacttttaactcggaggtctgattgaggcgcattatatatcaagacgctcgaaattgaacaatggaagctcttgagcaattcaaatggtcataacttttcactcggaggtcctattaaggcgcataatatatcgagacgctcganattgagcaatggaagctcttgagca

SEQ ID NO: 18260 - DNA, 410 bp, Glycine max
tccattgttcaatttcgagggtctcgatatattatgtgttttaatgagacctccgagtgaaaagttatgaccatttgaattgctcaagagcttccattgttcaatttcgagcgtctcgatatattatgcgcctcaatcggacctccgagtcaaaagttatgaccatttgaatttctcgagagcttccgttattcaatttcgagcgtctcgatatattatgcgcctgaatcggacctccgagataaaagttatgaccatttgaattgctcaagagcttccattgctcaatatcgagcatctcgatatattatgcgcctgaatcggacctccgagtgaaaagttatgactatttgaattgcttaagagcttccattgttcaatttcgagcgtctcgatatattatgcgtttg

SEQ ID NO: 18261 - DNA, 439 bp, Glycine max
  unsure (1)..(439): unsure at all n locations
tcaacatcagaccacttccagggtgctggaactacttcacatggacttgatggggcctatgcaagttgaaagccttggaggaaagaggtatgcctatgttgttgtggatgatttctccagatttacctgngtcaactttatcagagagaaatcagacacctttgaagtattcaaagagttgagtctaagacttcaaagagaaaaagactgtgtcatcaagagaattaggagtgaccatggcagagagtttgaaaacggcaagtttactgaattctgcacatctgaaggcatcactcatgagttctctgcagccatcacaccacaacanaatggcatagttgaaaggaaaaacaggactttgcaagaagctgccagggtcatgcttcatgccnaagaacttccctataatctctgggctgaagccatgaacacagcatgc

SEQ ID NO: 18262 - DNA, 425 bp, Glycine max
  unsure (1)..(425): unsure at all n locations
gtgngatcatttcaaatatcgtaatcttcttatccttcaaccttggatgcttttaagggattttgatgagatcatttatcctactgagcaatgtgggggcttctttcctaatgctagagctaatgtctttggtagcatgattgatgtgtgtttcttgtttgatgtttactccatcagtagttttttcacttggtaaaaaaggtgtagaaataatgttatcatctcccgtatgttggataaatgcttgactagtgatacttggaagaatatgtttcctaatgcttatgtggaggttctttgcaggatgcattcaaatcataatcctctattcttgagatgtgatcgtcaagagaatagaggtgtcaaaccttttatattcgaagcaacgtgaaccactcacccacaatacaagattgtggttgcta

SEQ ID NO: 18263 - DNA, 444 bp, Glycine max
  unsure (1)..(444): unsure at all n locations
ntcaatgctcttaagcaaaagttaaccaatgcccccatacttgctttgccaaatttttcaaaatcttttgaaattgaatgtgatgcttcaaatgttgggattggggctgtattgttacaagaaggtcatctaattgcttattttagtcaaaaattaagtggtcctacccttaactattctacttatgataaggagttgtatgccttagtgagagcgttgaaaacatgacaacgctatctttatcctaaggagtttgtgatccatagtgaccatgagtccctaaaatacttaaaaggacaagctaagctaaacaaaaggcatgccaaatgggtgaaatttcttgagcaatttccttatgttattaaacataaaaagggaaaaggaaatattgttgcggatgccttgtcaaggagacactttntgctntctatgcttgaaacaaaa

SEQ ID NO: 18264 - DNA, 423 bp, Glycine max
  unsure (1)..(423): unsure at all n locations
tactaaggcacctgttctagctcttcctgactnttcttaattnttgagctanaatgtgatgcctctggagtgggagttggagctgtattgttacaaggtgggcaccctattgcttattttagtgaaaaacttcatagtgccaccctcaattatcccacctatgataaagagctttatcccataataagagccctccaaacttgggaacattaccttgtttccaaggaatctgtcattcatagtgatcatcaatcactaaagtacattagagggcaaagcaagttaaacaagaggcatgcaaaatgggtagagagccatgagggtgggctcatgggccactntgggatagacaagacccttgttttactcanagaaaaagtttattggccccatatgaagaaagatgtccataagcattgcact

SEQ ID NO: 18265 - DNA, 384 bp, Glycine max
agtttgactagttggttttatttggggtgatttttgggtctggattttaagaaaggtttatgttatgttttatttttatttaattgattgtggagatcttaaatcttgggataagaaggcttatgttgtgttttgttttgttttaatcgattgtggagatcttgaatatggagaaaagatggatttatgttgtgtttttattttgttttaattgaatgtggagatcttgaatatggagaacttgaatttgagatatcattcatgtttctatctttttaacttcaattaattttgacatgttttaaactgccaaaaaattgtaatttgattttctgaatgaatactagagggtttaaaaactactgaaattgtaatttccgaatg

SEQ ID NO: 18266 - DNA, 371 bp, Glycine max
agcttccaagatgcactgtaccttaacaagctccaagttaaaggcgaggtttatgatccttctgtgaagggcccactggtcaccctcgaggcccacaaagccctgtccaaagagcaactcgactgacgggtgaacggaactttcacatactccccgcgcgtgttcatgagcacctccttaatcatgtccggttcggttaccgccaaccgcggcgtcgaaccgaaccagtacaagaaagttttcccatacgcgcgagaccaccggacgtagaatggagccacgcgtcccatgatgtcgtggtggaacggaggaggggatgcacttgcctctgacttggcttctgcgtagagccgtcggatctctgatgtatt

SEQ ID NO: 18267 - DNA, 406 bp, Glycine max
cagtagatgaagatgaatccgtggccttctttggactcctctaaggacaatagcatcatttcttgcactgaattgttgggagttggaagtcatcttctcaatcaaattccaccactggcagtatcaatcatactcctctccatgttgctaagtccctcatagaaatattgaagaaggagttgctcagaaatctggtggtgaggatagcttgcacacaatttcttgaatctttcccagtactcatacaagctctctccactaagttgcctgatgcctgaaatgtcttttctgatggcagtggtcctagatgcagggaagaatttctccaagaacaccctcttaaggtcatcccagctgataatggacctgcgagcaaggtagtagagcccaatttttgccactccct

SEQ ID NO: 18268 - DNA, 433 bp, Glycine max
  unsure (1)..(433): unsure at all n locations
ttcaaaattgatagtggcctgtcacttgatatttttatatgcgaatgggacatccttctttgaagattactaaattggtttcaaataatagtagtaggaataatgactatggaaataaggcatgtgatgtttgccaaagggctaagcaaactcgagatagctttcctttaagcaataataatgcagcagatgtgtttgagttagttcattgtgacatgtaggggccttataaaactccatcttcatgtggtgcttattattttttaactatagtggatgattattctcgagcaatttggattttcttgttgttagataaaagggaagcacctcgtgctttgntgaatttaattgcattagtagacaaacaatatgaaaaggagggtaatatgattcgaagtgataatggaaccgaattacatgtttgcgaact

SEQ ID NO: 18269 - DNA, 381 bp, Glycine max
agtttgccgccacggagttttccgactatgctcttgtgtggtggaacaagctacaaaaggagagagcaagaaatgaagagccaatggttgatacatggacggagataaaaagatcatgaggaagcggtatgtgccggctagttactcaagggacttgaaattcaagctccaaaaactaacccaaggcaacaagggggttgaggagtatttcaaggaaatggatgtgctcatgattcaagcaaatattgaagaagatgaggaggtaactatggctcgatttcttaatggtttgactaatgatatccgtgatattgttgagctgcaggagtttgttgaaatggattatttgcttcacaaagcaatccaagtggagcaacaatt

SEQ ID NO: 18270 - DNA, 389 bp, Glycine max
  unsure (1)..(389): unsure at all n locations
tcgtgtgaatgtccacgctctntcccttaatacttgtattactacgctcccatatttctctgtatacatatattctcaatttaatgtatgtgtcatgtgtgtatacacgctatgctctagctatctagtcaaatgtaattgtatccatgaccatatatacacattaaaaagaagataaaacatatttttttctcgtatattttcgttcaaacttaatgttaatttttgtattaaataggtgaaatgtaagagactaaatacacttgattgttttaataaagtatagagattaattagaagtacaaggattaaaaatataatttatctttatgacaaacaactgaaaatcaatatgagatttaaattaattaattatatattatttcatg

SEQ ID NO: 18271 - DNA, 425 bp, Glycine max
actcagcttatagtgatccctttcagaagaaatgttctttattgatcactcctactgatcaagtcattttcaagaaactttgcattccttgattccacaatcctagtgttgtgggatggacaatagaacctataccctttagacctttcagcatatccaatgaaatacccagtaatattcttagggtctagtttcttctcttgtggattataaattcttacttcagacagacatccccaaatgcgtatatgtcgcaaacttggtttccaacccttgaatagctcaaaaggtgtctttgagacaatcttggttggaactcggtttaatatatacgcaaccgtcttaagagcatcaatccaaaaaaattgaggaagctttacattactccttatgcttctcaccatgtctaataagggtcgatttct

SEQ ID NO: 18272 - DNA, 294 bp, Glycine max
  unsure (1)..(294): unsure at all n locations
cattatcttcatcatgaatgaaagcaatgcatcattcattgtgatttaaagtcatgcaatgtccttcttgatgatgacatgactgctcatgtgagcaattttggcatagcaagacttatctcaatcatcaatgcctaccacttctaagcaaacaattacaattggaataaaggggactgttggctatgctcctccgggtatgttctaaaatctaaactggtgaatgaatcagnntttctttgaatcccctatttttttataaacactttatatttactaaatacaaagtattga

SEQ ID NO: 18273 - DNA, 441 bp, Glycine max
  unsure (1)..(441): unsure at all n locations
gtcgtgatattgaaatggtcataacccttcacacgtatgtttgatttatgcgcattatatatagagacgctcgaaattgatcaccggaagctctcgacaaattgactgggacataacttatcacaccgaggtccgatacatgaacatcccatatcgatacgctcgatattgaacaaccgaagctgtcgtgaaccggaaatggtcataacccttcacacggatgtacgattcatgcgcatcagatatggagatgcctgatactgaacaacggaggctctcgagacactaacattgtcataactttccactcggatgtgctattctagcacattacatatggagacgctcgaaattgaagcacggaagcgtatcgagaaattgaaatggtcataacttttcactcggatgtccgattcangcacatcatatattgagatgccc

SEQ ID NO: 18274 - DNA, 315 bp, Glycine max
  unsure (1)..(315): unsure at all n locations
agttttgaattgngtgtcgntgtcagtgacaatggcgtatgggaggccgtacctgcatatgaggtgcttccaagtgaatttttccacctcgttggtcgtaatttcaccattggtctttcttctatccacttagtaaaatagttgatggcaactagtaagtacttgacagctcctagagcctttggcagtggtcccagtatgttctttccccacctgnggaagggtaaagtggagctaagactgtgaaggttgtcaggaggagtgtgtggcacgtctgcaaactcttgacatcgtctgcatctcctagtaaagtcg

SEQ ID NO: 18275 - DNA, 382 bp, Glycine max
  unsure (1)..(382): unsure at all n locations
tccttaagaagattcgtaaagaagctagagcttagctacacatacctctctaatagctaagctcacctccttgagatgagaagctagagcttagctacacaccccctataatagctaagctcacccccatgacaaaaaacatgaaaataaaaaaaaagtccttattacaaagacaactcaaaatgccccgaaatacaaggctaaaaccctatactactagaatggccaaaatacaaggccttgacgaaggaaaaacctattctaatatttacaaagataagcgggctcatacttagcccatgggctcgaaatctaccctaaggctcatgagaatcctanggtctttccttggatctctagcccaatctacttgagtcttcta

SEQ ID NO: 18276 - DNA, 360 bp, Glycine max
ggatgtgtacgattgtaacaattgttcttgaaatgcgccatactgtgttgcttttatagactctacatgtctggtcaagaacaccatattaagagttacaacctttagaaaaacttgaaaaccattggaagaggtacatctttggatgttaattcaaaacttatcactggtaatcgactaccaaatcattgttgatagtgcttatctctactgagtttataaaagattggctaaagttttgttaaaacataggcacttagactatgaatgaaagctggagttgcttgtcatgatgtgcaacgttatgtctaaaaataagatcgggctgcacaatgcacactgcattacgaaatgtcaaat

SEQ ID NO: 18277 - DNA, 370 bp, Glycine max
agcttttgacggactataccttgctctaggaaccagggacggagaaagatctatatataggcttgctaagggtagagagaggaagactagagatttggatcaagtaaagtgtgttaaggatgaagaaggcaaagtcttagtgcatgaaaaagatatcaaggaaaggtggaaggcgtatttccacaacttatttaatgatggatatggatatgactctagcagtctagacacaagagaagaggaccggaactataagtactatcgtcggattcagaaacaggaagtaaaggaagcgttgaaaagaatgagtaatggtaaggcggtggggccagacaacatacctattgaagtgtggaaaactcttggagat

SEQ ID NO: 18278 - DNA, 435 bp, Glycine max
  unsure (1)..(435): unsure at all n locations
cagcttctgttgttcaatttcgagcgtctggatatattatgtctcaaattcttacatccgtgtgaaaagttatgaccattagaatttctcgagagcttccgttgttcaatttcaagagtctagatgagttatgtacgcgaatcgaacatctgtgtgaaaagttatgaccattcaaatatcttgagtgcttccgttgtgcaatttcgagcatcttgatatattatgtcccaaatttggacattcgtgtgaaaagttatgaccattcgaatttctcgagagcttccattgttgaatttcgagagtctagatgagttatgtacgcgaatcgaacatccgtgtgaaaagctatgaccattcaaatatcttgagtgcttacgttgtgcaatttcgagcgtctcgatatattatgtgccanattgcgacatccgtgtgaaa

SEQ ID NO: 18279 - DNA, 394 bp, Glycine max
tgtgcatccaataccctgatatgatgttttcatatgtttttaaaaccggactgattcatttgcttccaaagtttcatggccttgcaggtgaagacccgcacaaacattcgaaagaatttcacattgtctgctccaccatgaaacccccagatgtccaagaggatcacatatttctgaaggcttttcctcattcattagagggagtggccaaggactggctgtattaccttgctccaaggtccatcacgagctgggatgaccttaagagagtattcttagagaaatttttccctgcttccaggaccacagccatcaagaaggatatctcatgtattagacaactcagtggagagagcctgtatgagtactgggagagatttaagaaactatgtgc

SEQ ID NO: 18280 - DNA, 391 bp, Glycine max
  unsure (1)..(391): unsure at all n locations
agctttgtatgtgttcaagcatatagcaaatcctatctatatatctgcaaaatcattntcaggatctgataacttcttatcagacgttagttcatcattgaatttaacatggatggattcttctacaactaaagttcttgtactaaaaacttatatgctttagatgtattagataaaccaagaaaaatccctttgtccactttggaatcaaacttagcaagttgatctttagtgttcatgataaagcactcacatccaaatggatgagagtatgaaatattgggtcttcttcctctctatggatcatacggagacttttttatcaatggtctgatcaatattctattctaaacatagcaagttgtatttactacttctgctcaaagtactt

SEQ ID NO: 18281 - DNA, 428 bp, Glycine max
tcatgagaaagtaaaagatcaaattgagaggaaaaatatttgttatgttaaacaagccaacgaagggagaaagaaagttgtcttcgaacccggagattgggtttgggtgcacatgagaaaagaaaggttttcggaacaaaggaaatcaaagcttcaaccaaggggagatggaccatttcaagtgcttgaaataatcaatgacaataattacaaagttgagctacccggtgagtataatgttagttccaccttcaatgtatctgacttatctctttttgatgcaaatggagaatccgatttgaggacaaatccttctcaagagggagagaatgatgaggacatgaccaagagcaagggcaaggatccacttgaaggacttggaggacctatgacaaggtctagagcaaggaaagcaaaggaagctcttc

SEQ ID NO: 18282 - DNA, 415 bp, Glycine max
  unsure (1)..(415): unsure at all n locations
tcaagaattatggcctcattttactacctgtttcccgatggaaatnctataaatagacctcccatctttaatggagtgggttatcactactggaaaacccgcatgcaaatctttatagaggcaatagatttaaatatttgggaagccatagaacaaggaccttatgttccctctataatagctgcaagtgcaacaatagaaaaacctagagcagattggactgaggaagaaagaagattagtacaatataatttaaaggccaaaaatattattacatctgccttaggaatagatgaatactttagggtttcaaattgtaaaagtgctaaggatatgtgggatacactacaagtaacacatgaaggcacaacagatgttaaaagatctatgataaacactttaactcgtgaatatg

SEQ ID NO: 18283 - DNA, 408 bp, Glycine max
gtgatggtgtcgagaagtattcacatgtttgtcatcatcttaaagggggagaatgtgaatgtatgtatacatgattttgatgatgtcaaaagaaaaatcaaacaaagttgcttcaaaagataagcatggcttcaagattaatacaagattgcttcaacaaacaaagtcttgcttaaagattaactcaagatcaagccttgccttaaaacaaagtgctttcaagacattcaaggctctggtaatcgattaccaggcagtgtaatcgattaccagaagacagggttgagaaatagctgttgaaaagggttttggaattgaattttcaagatgtaatcgattaccatatgtctgtaatcgattaccagcaacgaaactcctgagattcacattcaaaagtcatgacccttc

SEQ ID NO: 18284 - DNA, 428 bp, Glycine max
tccttcaattctggaatcaattgccatttcagttgagatatagccatcataattgatttggaaagagagtcagcaactacattctcttttcctggcttgtactcaattgtgaaatcataacccgtcaacttatgtatctagttctgttgctcaagagtgtgcacaacttgattatttagtgatctgaggctcttttgatcagtcctaatggtaaatttgtgaccaagtaggtagtgtctaaatttagctatggttgtcgtaatagcaaagaattcccttgcatatgctaatttttttttgcattctcgcattcaatttttttgaaaaataagcaataggatggtgcatttggctcataatagcagctagaccaattccagaagcatccgtttctaaggtgaatgggtgtgaaaattatggtaaagcca

SEQ ID NO: 18285 - DNA, 376 bp, Glycine max
agcttgtattgatttggtctgatgagggatcgaggcttagtaatttaggctacaacatataacacatgagaaattgattagagaaatatattgagacacacaatttcgtgctccttctctccctctccctccactcatcttctccttccttcaagctcttatccatggcttcctatggtggtgagcttcttcttgactcatcttctgcttgaagtggcatctccaatcatatttctttcttctgtattccactgccattaaactaccagaagccaaagactccattgatgaaaaagatccaggcctacaagctccacatggaagttacatcatgctggatcaagagcatcttcggctaagtgatggtcttttgctt

SEQ ID NO: 18286 - DNA, 391 bp, Glycine max
  unsure (1)..(391): unsure at all n locations
agcttttaacgtatattgagaaaggattttctactttaaagaaaatagtgatttgtgggatcttttagttaaggtatgtgactttttttacaaaactgatatcaaataaaaaattatataagtttttctaaaaatggtaataaaaaattaaaaactataaaatttaaaaggataaagtgattgctcattaaagaatttggtctagacagcagaatgacatgattgctcattaaagaatttggaaacagaaatatcattccttccccttagaatttttaatttatcattaaaaaataaataaagatagactcttggaataaagtaattntttcagataaaaaaattactaatgactntacaagaatttaaccaactactaatatgaaattct

SEQ ID NO: 18287 - DNA, 334 bp, Glycine max
agcttttgtccctgagaaactggttcccagaagacaacagggagtgaagattgctgaaaaccctagccttgcaacaagttctagggaagtagacaaggagatggacaagaaaatccgcagtatcgtgagtagcattttgaaagacgcctctgttcctgatgctggtgaagatgttccaacatcttccaccccgaatgtttctgtgccggatgttgagaaagatgttccaacatcttccgggccaaatgctgaagtactctcttcccccagcaaagagagatcaacagaggaagatgatcaagcgacaaaggagacccctgcaccaagggcacca

SEQ ID NO: 18288 - DNA, 417 bp, Glycine max
tcaacatcagaccacttccagggtgctggtactacttttctggacttgatggggcctatgcaagttgaaagccttggaggaaagaggtatgcctatgttgttgtggatgatttctccagatttacctgggtcaactttatcagagagaaatcagacacctttgaatattcaaagagttgagtctaagacttcaaagagaaaaagactgtgtcatcaagagaattaggagtgaccatggcagagagtttgaaaacagcaagtttactgaattctgcacatctgaaggcattactcatgagttctctgcagccatcacaccacaacaaaatggcatagttgaaaggaaaaataggactttgcaagaagctgctagggtcatgcttcatgccaaagaacttccctataatctctgggctg

SEQ ID NO: 18289 - DNA, 432 bp, Glycine max
cttctcttcatcctttgccatatggaaaatagacatttttttatcacctctaaaggttctaggagcagtaaaatacttactagttgttatcaactacttcaacaagtggattgaaacaagaccactgcgggaaattatggccaatgaggtggagaaattcacccggaaacatctcatttgtaggtacgacctaccatgcgccattgtcatggacaacaacactcaattcaaagctcagacttacaaagaattcctgacatgactacgcatcaagcaccaagtcatctctttcgaacatactcagaccaacggtcagacaagggcagctaacagagtcatcctcaggttcctgtgtactacactcaacaagtctaagtgtctatagaaagataagttcttcagtatactctgggcgtaccattgttcacccaa

SEQ ID NO: 18290 - DNA, 429 bp, Glycine max
taagctctttcaactgcacaaggctcttaatatttgaatagtatccttgtggaaccttcacccgacgaagacactaacaaaaacttatcttctccttcttggacaaagtatggcaggctgggggcaagtaaattttcttcccatcagaccttgtatgcaactgtgatcgtatacccatatcagctagatcttgacgggtattcaagccatccttcgtcttgccttgaatgttaaggagcgtcccaatgactctatcacagacatttttctccacatgcataacatcaatacaatgtctaacgtcaagatcacaccaatacggaagatcaaagaaaatggacctcttcttccatatgcaactttgacttttatccttcttttgggtcttcccaaatacagtattcaggtgttcaacccgctaatatacct

SEQ ID NO: 18291 - DNA, 394 bp, Glycine max
agcttgtcttcatttggtattttattcacccagtcttgtggctctacacaagggtgtctgcaaccttctaaaatagtatctccttcatcctattaaaatcaaaatgacaatgttaaatgctattcgtaaaaagatccctccaaccaaaacaagggataaacagagaaggaaggtaaatgcgagaagaaaagaatgtagtaattgtgaaaacaacaaattaagtaccaatgaagtgatgtcaggccttgtgtagggagtaggacaactagaagccaaatcagcaaatctcaactatagattcctatccatgtacattctttaaaaaaaattcatggttagtggggctctactaaatgttgtcatgacaagagtatattcattagacatcaaaatg

SEQ ID NO: 18292 - DNA, 420 bp, Glycine max
  unsure (1)..(420): unsure at all n locations
ntntgactcctgagtatttggaacttgctttatctctttttctttagcatcatcaaaataatcttggaagtcattgcttccacaaaatgaccaagaagtggcctatgcttctagacaactcaagactcatgagaggaattatcccactcatgacctggagttagctgttgtagtttttgcccttaagatgtggaggcattacctgtttggctccaagattgaggtgtttagtgatcataagagccttaagtacttgtttagtcagaaagagttgaacatgcgtcaaaggagatggtttgagtttcttaaagattatgattttgagcttagctgccatcccggcaaagccaatgtagtggctgatgccttgagtaggaaatctctacatatatctgccttgatgattagagagatggatct

SEQ ID NO: 18293 - DNA, 265 bp, Glycine max
tctagctttactatgcaaagaatatccaaggaaaattccttcatctgacttagcatcaaactttcctaagttttcttttccattgtttaatacaaaacacttgcaaccaaaaacatgaagatgcgagatgtttggtttcctaccattgaatagttcatatgaagttttctttaaaatgggtcttattaaagccctattcatgatatagcatgcagtattaatggcttcagcccaaaaatattttggaagaggagtatcatttaat

SEQ ID NO: 18294 - DNA, 357 bp, Glycine max
agctttttagttttcaagtgccaattcgtcctcttctttagtccagtcttcttctggcttcaattcatcagtgggctttccttctgtgtccagcatcttgggatgttcccagcctttgatgacagctttccaggttctgctatccagtgatttgaggaaggccaccattcttgctttccagtattcatagttgcttccatcaagaattggtggtctgttcactggtcctccttctttctccatgttcatcagaatttatctccccagatctcactctgtgatttcgagtgttggctctgataccaattgaaattctgataccaggggacagatgtcgtacaggatgtcacgacatca

SEQ ID NO: 18295 - DNA, 412 bp, Glycine max
  unsure (1)..(412): unsure at all n locations
ntatatacaaattaaaaaattattaaatagccacaagtctagaaaaatataattacatttgattaatttatctttttattttattgatattatctcttcttttactttatagagatgtcaaaaaactaaataaattaaaagtggacaactaataataattagtgtctttttcaattgagaagggtcaaaatacactttccaataactaactatctatcaatctctatgtgtgttaattttattaatcaaatagctgaattaaaagtttttattaaataaatgaggtttataattacttcgttaaaaaatttcatctaatgtaaaatgtatttcttaaaaatataagtaaaagttgattatagaactacatatatacaaatattaaatttatttaaaatttaatatatcgatt

SEQ ID NO: 18296 - DNA, 337 bp, Glycine max
  unsure (1)..(337): unsure at all n locations
agcttttatccaactgtaaaacttggcaataacactagaatggctgttgtgggaaaatgtatcattcgaatgcaagtgaatggatttactcaggcaatttctggtgtctattatgttcctgaacttaagagtaatttattgagcatagggaaacttcaagaaaaaggcttgactattttgattcaacatgggaagtgtagggtatatcattntgcaaaaggattaattatgcagacagatatgagtggaaatataatgttttctttgttggctaccatgataccaaaagctttctcatgtttccaaattgtatcagaaaatgaatctcatctttggc

SEQ ID NO: 18297 - DNA, 425 bp, Glycine max
  unsure (1)..(425): unsure at all n locations
nttactctctggtaatcgattaccagaggatgtaattgtttaccagtggccaaatacgttttataacagctataaaaatttgaattcgaaattttaaaagctgtaatcgattacacaattgtggtaatcgattaccagcagttagtaaacgttttaattcaaattttaaaagctgtaatcgattacacaatttctgtaatcgattaccagacaggaatttcagaaaaataatttcaagagtcacaacttttcaaaggctttactcatgaccaccaatggtctatatatatgtgacttaaacacgaaattgctcagagattttcagaacaacaaagtgtttatcctctcaaaaagcaatttcattttatcctcttaaagaattccttggccaattcaattgcaattcattaaggaattaattgagt

SEQ ID NO: 18298 - DNA, 422 bp, Glycine max
  unsure (1)..(422): unsure at all n locations
ntggtaccttgtactgtacatataagactttgattcttatttaaagtttaaaataatgatttccaatatgaaggaatttagtaccgttagttattatgattattcttagtatttttttgtttcaaaataattatcatccttcattattttatataaaaaatattgcataaataaaatagaataataattttacaaaattaaacttatatcattattaatatataaagaatataaataaaagaagtaattaatgttacattacaaattaaaatattaaaatgataattattttaagataattaagatattaaaatgataattatattaaagttgagctaaaacagttattttcattttttttctcaacataaatatgtttaacatagataattttttacttttaaggttttagagcatcctcg

SEQ ID NO: 18299 - DNA, 347 bp, Glycine max
  unsure (1)..(347): unsure at all n locations
agcttatcaccactctccttcataccactggccacaccaccaacaacttcagcttcgtgaatctcacttgcgactcccaatttggcgtcatctcgatcctcttccccgcaccgtactctccctctaatgccaccatcctcttcttcataaagaagcgtgatggcactagaaaaccactgagcgccactacgctgaactttctcctcatcggtagggacacatcgttggtggcgctaagctggttcttctgactcttcatgaaccaccccatcgtggaagaaaagatcctcgcagagctaacgttggtgcttacttncactcatggcggcgaccgacgacactggatg

SEQ ID NO: 18300 - DNA, 426 bp, Glycine max
tgttaacccatggaagctcctaatatctcctacactttcggggtgttccattcttggatggcgttgattttctcagggtccacttggaccccatttctacaaactacaaaccctaagaaaactatattatctacacaaagggtacaattctctatattttcatagagggtgtttttcctaaggactgaaagaacttgcctgagatgtcctaagtgatcatctaggctcctactgtacactaaaatatcatcaaaataaacaactacaaatatacttatgaaatcccttaagacatgatgcataagcctcataaaggtgctcggtgcattagtgagcccaacaggcattactagccattcatacaaaccaaacttggtcttgaaagcggttattcactcatcaccctctttcatcctgattaggtga

SEQ ID NO: 18301 - DNA, 342 bp, Glycine max
tgacaaacaaagctaatcgaagcaagtaatatataaaatctattattttcacaaaatcaatagtgcaaaaggcatttgaaatggtaatatcttttaatattttatattcattttcttataagttatataataataactcattttttattttgtgattgcttttatatgatatatgaaaggttggcgaaatttataaaggcatcatgcattgcattatattatttaatttgctctttactatatttaattttaacagacaaaagatccaatatctagtgaatgatcagatgctgcggaagtttggaaggccacacacacgagatctaatggaacctgtgcatt

SEQ ID NO: 18302 - DNA, 423 bp, Glycine max
taaaagtatcactttgtttatcaaatttatttaatgtgtatgtcaaccttcctgtaaaaacatgctccctcactccaagaatgcttggagggcgaaggccatgattcgcatggaactcctccagaagattcctcattttcattgcttcttcaagataattgtcctttcaaaatttaaaaaatatatatcagattaaattacataaattttctttccccattcattcattcactcacatacatacagttgagggcagaggaagagggatttctctacaaaaggctggtgaaccacatattaatccaaggtcaataagtatgcaacagtccaaatgacatgtaaaagtgaaattcaaggatttggaagaactgaacaagtacaacaggataaaaatctcactaatgccatgaccgcaacaggatt

SEQ ID NO: 18303 - DNA, 428 bp, Glycine max
  unsure (1)..(428): unsure at all n locations
tgcaatgaanattaacataacaatgtatttataaagtttcgacaaattaatacaaaaatgataaataattcttaatataaaattgacatcattttggtccaagttaaatgcattttggtagttattatatgaggcaaggcttatgttttcatcttcctaacatgtaaaattaacatcattttttaacattccttttgataaaattgtatatagtcattgttgtacaaattatttgcatttatgtttcaaatttgtacttaggcatggatcgtaagattacaaatctattctttcatactcgaaacgttctttcaatagtgcaccttaaacttaaactggagtgataataattaaaaatttcattattatttgcaaactcagatctatgtctaaaattaggaaggtggtaacgtttacatatgtaagga

SEQ ID NO: 18304 - DNA, 380 bp, Glycine max
agtactctcattttttatcaagtctgcacgattgtgatcaagatcaaaagctcgccaaaattcaggccagttacatagaagtcgaccagatcctacaggggtgttctccacaacaacttgggcgggagcaggaatgcctgcattctgcaaaccaactgcattgctgtcaggatcaactgaatttgaaaattcagatcctggagcttcatttgagtttgttgataccgcaatagctgaatccacaaaagttgaatgcccattttgaacttctcctgtagaagatccattgttcaaattttcactagtgtgaacaactgatgattgaatatttgaagcctgtccagaacctgggtccataacagttttatgatagctgtctg

SEQ ID NO: 18305 - DNA, 385 bp, Glycine max
tcaagcttttttaataagatggcctcagcaaattccttatttccagataggaattctatcaatagacctccaatctttaatggagagggttaccactactggaaaacccgaatgcaaatttttatcgaggcaatagatctaaatatctgggaagccatagaaatagggccttatatacccaccacagtagaaagagtttcaatagatggtagttcatcaagtgaaagcataaccatagaaaaacctagagataaatggtctgaagaggatagaaaacgagtacaatacaacttataagccaaaaacataataacatatgccctacgaatggatgaatatttcacggtttcaaattgtaagagtgctaaggaaatgtgggacactc

SEQ ID NO: 18306 - DNA, 412 bp, Glycine max
tttcaagagacctactctttttgactgttttcaagagttggtcttcttggttgaacactgaacacaagggaccaatgttccttgggttcattgcaagaagcaggatttgcttcttggttgatcattagacgcaaaagaccaatgtcttttgggttcattgcaagaagtgggtataatttcttgggtgttatcactggacacaagggaccaactttccttggggttcattgcaagaagtgggaataacttcttggttgaaatcactgaacacaaaggagggaagtcctttgtggttcattgcttgcaaaggattttacaaggttagtggaaatctcaagcgaattgcttgaggactggacgtatgcacgggttgtggtcgaactagtataaatccggatatgcattctctctt

SEQ ID NO: 18307 - DNA, 366 bp, Glycine max
agcttggtagttttttaggctttgagtcttaacttatccagctcattcaattgttgctacctgttgctacctacaagcctaagatcaaagtttagaaactatagagcccacatggctttgtgaacaagttcaacaagcaaatggaaattcttcccataaactagactaaagggagacatcacagtgggagtcttaaaggtttttttgtatgcccagagtgtgtcatccaatttcaatgaccaattctttctagatgctctcacagttttctgtaagaccttctttagttacctattagatacctcaacttaaccaattgcttgagggtgataaagagtaataaccttatgggtaacaccatattta

SEQ ID NO: 18308 - DNA, 427 bp, Glycine max
atgcagcccaatccttcctttaagtaggtacggcgctttctagtactttcttgatctccctagtctaaactccaacttttccatttgtttacggatgataaggtgatgctactttgtgtcaaacatcatagtgttgaaagacctttgagaattgagcaatacaaaagtgtgtaccttcatcactaatcaagagtctaggcaatcaaaacctaacaaaaatgtttctctttaagatattaatcatcatctttacatcattggttggactagaaatttcttccacccactttaagacatagtgcactactaccaagatatatctgttgccacgtgaggatggtaagggaccaaaaaaatcaattccctaacaatcaaacacttctacctcctgcatgttctgtaatggcatttcatgtcgtctagatat

SEQ ID NO: 18309 - DNA, 293 bp, Glycine max
ttgcatgttagcttctgatccaacccagcacggtttcgatgcccgaacctgctggatcggagtccgaagcaagaagccgatgcaactgcatgatggagttaaccgccacggcttcgttcggattcacctgcagcatccacggcttcacgtcttcaaggcgccacgccgccacgccacgaaatgcaaacctaacattcacggaccgcgccagctcagcgagcctgagcccaatttcgcggagcgtgtcgcggttgtcggacgagggaagcccaattcccgtgagcctcaacagc

SEQ ID NO: 18310 - DNA, 407 bp, Glycine max
  unsure (1)..(407): unsure at all n locations
tattctatgggatttaccaagcacacaattatcacatttttcaagtttatctagtttatcaccacctagcatattttgtttctcaagttcatgcaatcctctttcactaacatgacctaatctcaaatgccaaagttttgttttatcaatcaatgtattactagttaccgatgcatttccaacaatcgtggaaccttcaagaataagcaagccattacttttattcttgtcacccttggcaatgattaaagatccatttgaaatcttaagaacaccatttaaaattctagttgaatatcctagatcatcacacatgtttatgaaaataagatttcttttgagttctggaatgtaccttacattnttcagtagatactctctattatcaaacatcttcaatctcacag

SEQ ID NO: 18311 - DNA, 381 bp, Glycine max
  unsure (1)..(381): unsure at all n locations
agctttattaattagatggcctcagcaaattccttatttccagaagggaattctatcaatagacctccaatctttaatggagagggttaccactactggaaaacccgaatgcaaatttttattgaggcaatagatctaaatatctgggaagccatagaaatagggccttatatacccaccatagtagaaagagtttcaatagatggtagttcatcaagtgaaagcataaccatagaaaaacctatagatagatggtctgaagaggatagaanacgagtacaatacaacttaaaagccaaaaacataataacatctgccctgggaatggatgaatatttcanggtatcaaatcgtaagagtgctaangagatgtgggacact

SEQ ID NO: 18312 - DNA, 444 bp, Glycine max
  unsure (1)..(444): unsure at all n locations
acttagagtccaagaatgttgtttatctttcccatcatagacatcgggagattctatctacatacaacttgaaaattccttacacaaagtttcattagtagaactaaatataatattatcaacatatatttgaacaattaacaactcattggttactttcttaataaacaatgtttaatcaacttggtctctagtgaaagattgctcaagtagaaaactgctcaatctatcaaaccatgaccttggttcttctttcaaaccatactttttcagtctatagacatggttaggatgctagtagtccacanaacctggtggatgatctacataaacttcttcttcaatgagaccattaaagaagatacacttcacatccacctgagtaagtctaacatccatgatacatgcacatgcaagcagcaatcttatgtgatgtagctcatg

SEQ ID NO: 18313 - DNA, 463 bp, Glycine max
tcgctctttgtgggagtcattatcaaaactgaagcctttcttatttgcacatgtggagcaattaaaccttggcgcaatcttgaacaaatggagtatgctatgcagttcttgatggggttgaacgaatccttctctactattagaggtcaaattttatccatggatcccttttcctcagtaactaatgttctttccttagttcaagaagaaaagcaaaaggaagttggtgcttcctcctctgctagtgaagtttcacatgcttttgccttgaagccttcttctgctgcacgcaatcatcctaccaatcgcttcaaaggatcttccaagaatcgccccttgtgtgctcattgcggtatgctggatcatactcaggatcgttgcttcaagttgcatggctatcctccaaattataagaggactagttgttcctcacaagtcaagatacattcttcatcttctgaat

SEQ ID NO: 18314 - DNA, 467 bp, Glycine max
  unsure (1)..(467): unsure at all n locations
tagtctgtgatgggaaaatcaatggtcaatattccatctcattcataagntgttatgcattaacatataatatcgattcatcgttatggattatatatgattacttatttcacatatacttaattatagagagggagagattaaatggatacctttgagtggtatgagacccttatcaaaaagagaacggtagtgcaaaatagacattaaggcacaagcactgaccggtgaaaatagagcaataggaagtgaaagttcttcagcagcttgtatagtaaaaagcatggaacaatcagacaccaagcaagtaactggaggtacaaagccagcagtggaagaatcctgaagacgagcaagaagatcgcgaaagggtacgagcatcttctctctcactganttagcaagagacactgcgtcttcagtgacatcaccatcaccatatgtggggggaagactatctggtatgg

SEQ ID NO: 18315 - DNA, 457 bp, Glycine max
tatcttgattgaatgtagcagcaaacttgacgatatttctaatttttcatttctgcaaaggactcatccagctttgacattatagtgtttgtcttattgccattaaatcttacaggaatgtccttttccataatcaaggttttagagttatacactctatatgccttggataattgagagtatccaagtaagattccataatcacatttggagtcaaactcttcaaagttatccttggtgttcaaaatgaaacgttgacatccaaatgggtggaaataagaaatattaggcttacgttcctttcacaattaatagggagtcttctttaagattgacctaatatagactctgttatgtaaaaaacaaacagtgtgatcgaggccgtacccgaatcatataaacatgataatgcagtaactaggaagtgatcctatgtcgtttcccaacgagcagtgac

SEQ ID NO: 18316 - DNA, 470 bp, Glycine max
  unsure (1)..(470): unsure at all n locations
ttcactcggatgtccgattcangcgcataatatatcttatatgttttataattgaacaatggaagctcttgagcaattcaaatggtcataacttttcactaagatgtccgattcaggcacataatatatcgagacgttcgaaattaaacaatggaagctcttgagcaattccaatgatcataacttttctctaggatgtccgattcaggcgcataatatatcgagacgttcgaaattgaacaatgaaagatcttgagcaattcaaatggtcataacttttcactcggatgtccgattcaggcgcataatatatcgagacgttcgaaattcaacaatggaagctgtcgagaaattcaaatgatcataacttttcactaggatgtccgattcaggcacataatatatctagacgttcgaaattgaacaacggaagctcttgagcaattcacatgatcataacttttcacttg

SEQ ID NO: 18317 - DNA, 386 bp, Glycine max
  unsure (1)..(386): unsure at all n locations
acctgtgcagcaaagtcaaactgcttctacagaaactaaaagccttggagaattctatgccagctcaaccttctgaacaacaagtcaaggagctcaagaaaacccaagctgacctttgggaaaaagctactatgcatgagtctattgtgaggcaaaaatcaagatgcagatggatcaaagagggggacagcaacacagcctattttcatagagttattaatttgaggaggaggagaaatgctttgagggggatgcagataggtgacacctgngtggaaaatcctaacattatcaaggctgaaaacctgcaccattttcacaacacggtcaatgacactcactcgagctgacctaacctggatggggttgcatttaaaactctgact

SEQ ID NO: 18318 - DNA, 424 bp, Glycine max
  unsure (1)..(424): unsure at all n locations
tgagaattggattgacctgtgctaagttgccaaatatttacagagttaggcacagtattattacaatcaacagaagaaacagtatttatacaagctggagaagacacagcagagcagaactgaagattgggaaactggtacaagccatcagatccaacatctccttgaagaaggattcttttggaatcctgatatttaacaaagcaacgattagcatgaaactcaaagaaaacatgattatctttggcaaatttgcttacactaattagattcttagtgatttgaggaacaagaagcatgtttttaagaataagttggccattaggactgaaaggagaaacaaaattggaattaccaggggctgagatattcagaccttgtccgttaccaatnttgatctgatctggaccctcaaatggacaag

SEQ ID NO: 18319 - DNA, 188 bp, Glycine max
ggggccatgacatgctaattgacccaaaggagggtattgtaccgatgacgttgatcatgtacgttctatcattagtacactccaccacatagttactcccaataccaaaattatttaatgttaaccagatgacccaaccaatacatactggcaataccatgactactatgtggcatgataatagcttc

SEQ ID NO: 18320 - DNA, 431 bp, Glycine max
tgtaacatgactgcttttcttatatataatcaccaaacaaaagattgccataagtatctcccaccaaccccgaagatcaaatctcatactccctccgtttcaaaatacatgtccatttttgaaaaattgcggtaaccaaggacaggctaatttgacacaaaagttcctattttaccctagtcctttatgttctccattatatatttatttatcccacctcataattactcccaataccaaaattaattaaagttaatcaaattacaataccaatacatactggcaataccaatactactaaatggcactatttttgcttcggtattgaaaagctcaattggcatagttcggttatcatagtttgttaaaactcaattgaaataacttccctccattattaattatactctaatcttacaatgttgtggaca

SEQ ID NO: 18321 - DNA, 326 bp, Glycine max
tacatagaagaccgactgaaccatgagatccacttcaaccacacgctaactttcctgatctatccagcaacagatacgaccctgcatggaggatttactttactctattatggcacactcctcaagctcatcatccacagcctgcttcgtccgtgcagcatgctgttggtcggctcataccatacatgtactgcagccttccatctgctattacacctcgccatacgaccaatatccgaggcgactactcaaccttgcctgacctaactggagctgaaaaagactatgcacatcatgccttccaacgagagacccatcctgcattc

SEQ ID NO: 18322 - DNA, 440 bp, Glycine max
tcgagactgaagagcgtgcgagtctttatctgtgggagggagaagagaacaatccaaaatcaattgtacccttcaagtagcgaagaattctgtttgcggctgttagatgaggagaggtaggagcctccgtaaagcgacacacaacttccaccgcatatagaatatcgggccttgtattggttagataccttaaactccccacaagactcttgaagaccatggagtctaccttctctccttcatcaaactttgataacttcaagccaccttccataggtgtgttcacgggattgcaatcaagcatactaaatttcttcaacacttcttttgtgtagcttccttgtgagacaaagataccattctccatttgcttcacttccattcccaagttatatgacatgagtcccatatctatcatatcaaattcacgagacatggac

SEQ ID NO: 18323 - DNA, 444 bp, Glycine max
  unsure (1)..(444): unsure at all n locations
catgcgaagtgggtggaattcctagagttattcccttatgttatcaaacataaaaagggaaaaggtaatattgtagccgatgctctttctcggtgtcatgcattactttctatgcttgaaacaaaattgattggtcttgaatgtttgaaaagcatgtatgaaaatgatgaaacttttggagaaatttttaaaaattgtgaaattttttcagaaaatggtttctttagacatgaaggctttcttttcaaagaaaacaaattgtgtgtgcctaaatgttctactagaaatttgcttgtttgtgaagcacatgaaggagggtttaatggtgcatttgnggtccaaaagactctagaaacattacaagaaacattttattggcctcatatgacaaaggatgtgcagaaattttgtgaacattgcattgtatgtaaaaaggcaaagtct

SEQ ID NO: 18324 - DNA, 462 bp, Glycine max
  unsure (1)..(462): unsure at all n locations
tataanaagtataataaattaaaaaaaataaaatnaatacttatattaatactatgtttgcatcaaatattcaaatgaacatttagatgtaatgataaaagggtgtgcatcttatttcaaggatcatagttctactcctaatttcttcttaaagcattcttttaagtaaggcttattaacatatgattaaataatattttagggaatttaatggtttaattcatattcaaatattttcataaccattaattaattattaatttcgacatttattttaacaaagaaattattatttttgaatattttaatttgaaaaaatattctttggaaatattattttatttacgtactcaagtttgtttgaaatatatgattaggtaatattattctatcgctattgacataatttacagaanatgttacaataaaaaagtgtgtgaggaatatatgaaatttgtttaa

SEQ ID NO: 18325 - DNA, 398 bp, Glycine max
  unsure (1)..(398): unsure at all n locations
gtacttcgggcgtgtattatagagcaacacggtagctggatggattgtttgccattgattgagtttacttacaacaatagctaccaagccagtattggtatggctccttttgaagctttatatggacgaaagtgcaaaactcctatttgttggtacgatgatggagaagcagtacttcttggaccggaaatgctacaacagattaacgaacaagtgaagttgattcgagagaagataaaagcatctcaggataggtagaagagctattatgatagaaggaggaaaccactagattttcaggaaggagaacatgtngttttgaaggtttcttccgtaaccggngtcggaagagctctcaaggctangaagttgacacccaagtatctaggtccgtatca

SEQ ID NO: 18326 - DNA, 460 bp, Glycine max
taataaaatttagttttgatgagaaattgattattgttaatgtaaaattatttccttaaacaatctatataaaacaagtcatgtcccatttttttaactatttatagaatctatcaccacctccaaactaccataaacataaaaactagggttaccttttgtgagtagagaggtgtgtctattgtataaaacaatttaattcaaacagttcaaagttattatcagagtcaaccaaagaaaattttctatgactcttatctaaactatcatcaaatacaagaaaagatgttttacgttatgacatttttcataattaaaagattaaaagttgtcaccacatatatatagtgacaaactttggattgatcacttatcatcactaatatgcaagtcactgttgtattagtgatgaatattttagatgtcataaaaatatatattgtgatggaaatgttgtcac

SEQ ID NO: 18327 - DNA, 467 bp, Glycine max
  unsure (1)..(467): unsure at all n locations
tctgccctattntcctataaatagggggagaagtgaatttgtttaaatgttcagctctcctggtaattcgagatcacttgaaattagtgaaaaaaattgtttccgtgaagaaaatccaagccgaggcatttccataacgtttccgtagcgtttccgtgggtaatttcacgaagattttcaaccgttctttgacgttcttcgttcgttcttcgtcgttcttcggtcttcaaccggtaagttcccgaaatcgaacttttcaattcattctatgtaccattagtggtcctcatttgttatccatggcctcctatggtggtgagcttcttctagactcatcttctccttgaagtggcgtctcctctctctcttccttctccattccgctgccattcatcttccaagaagcaaaggaatccattgatgaagaagatcctaggcctacaagctccaatggagcttacaacacg

SEQ ID NO: 18328 - DNA, 465 bp, Glycine max
  unsure (1)..(465): unsure at all n locations
tagtaaagctaagcactaacaatctcccnctttgtcatattttgtctaaaacatacttagacacttcctgagcaggtacgagcagttatgcaagtgggatcagcaacttccattatcagagtaatcaagcacagcggaatctgtagtctagacaagttgcaagtcgtttccaggatgtcaagacatctcacatgacatctgctttctgcttctgctccccctgtctccatgcttactgcaacatcttctatcagctactagtcttctccaggatgtcaagacgtctcctgtgacatcagctatctgctccccctgtctccatgctcttactgcagcatcttctaatancttccatcagtcatcatcagcagcagcagtctccccctcanaatcgtatacatacaactccncctcanaatcatgaatcatgcatacatcgtatcctactgccatacatcatacata

SEQ ID NO: 18329 - DNA, 455 bp, Glycine max
  unsure (1)..(455): unsure at all n locations
agaacatgatgcccaaaagcacgtcggttatattaccttntaatgcttcccatctaaggccaagttccatggtggaccgtgccttcgacggcacccgccgggaggtgaggggggagatcgacctcccagtacagatagggcctcacacctgccaggttacattccaagtgatggatatcaagccgacctacaactatcttttggggcgtccatggatccactcagtgggataatacagccaattacgctctgctttccttcatggacgggttctttggctacaatcagataaagatggcgccagaggatatggaaaagaccaccttcgtcaccctgtgggggatgttctgctataaagtgatgtcgtttgggctcaagaacgccggggcaacctatcagcgggctatgatggctgagntccacgacatgatgcaccgagaaatcgaagtctatgt

SEQ ID NO: 18330 - DNA, 435 bp, Glycine max
  unsure (1)..(435): unsure at all n locations
ntaagagcaattcctttctttnncttattattctcattatgttgatncaancncattagttccatttcatgttcctgtaactttccaaataaagtagcaagagacatgttagatagatctcatgattcaataatggttgttaccttgggttgtcattccctacttaagcatctcaaaactttattgataagatcttcatttgaaaatatttttcctaaagatgcaagatgattaattatgtgtgtgaatctcttttgcatgtcctgtttgctttcatttggattcattctaaataattcatattcatgagttaatgtatttatcctagatctttttacatttgttgtaccttcatgtgttacttgtcgggtatcccacatatcttgtacacttttacaatgtgataccctaaagtgcttattcattcctaaaaca

SEQ ID NO: 18331 - DNA, 399 bp, Glycine max
  unsure (1)..(399): unsure at all n locations
agtttaaggaggagtatggttagtaacacataattttacatattttgattggtgggaggggttcgaattggtctctatattaacagttctgtattttcttgtaggaattgagccctggacttttactcagaagttaggagatgctgttttcattccagctggttgtcctcaccaagtcagaaatctgaaggtaaagtgaacatacctggtgaatttgtttcatatttattgtaggcacaatatattgttttcttagaagtgtaggcataatagtatctttggctactacctgaaattaagcctatgtccttcattagcaaagcaagcctttgtagaaagtgaaaactgttgattcatctanaagtttcagttcacttgtgtattntttaacacatttga

SEQ ID NO: 18332 - DNA, 429 bp, Glycine max
  unsure (1)..(429): unsure at all n locations
tgcactgcccanagaggacaactcttcataatacgtttgaaccaccattgatgtcccttatgatgtcgttcagtatctcaaaaaagcctacgatgatttggaagaacccttgacctgttttctcaaatcttccaaagttgattggcatttctatgacccatatatgttacagttaccaaaaaggttcaaagagaaaaccaaatggtgtggaatagtaagccccggttgggcaccatagttgaaggtattgagccacaaggcagttggtggggttttgactcactctggttggacctctgtggtggaggttgtttagaatgaaaaacctctagttttgttaatgtttcttgcagaccacggattgaactccagggtgttggaagtgaagaagatggggtattcaattcctaaggatgaacaagatggatc

SEQ ID NO: 18333 - DNA, 400 bp, Glycine max
  unsure (1)..(400): unsure at all n locations
agcttgtttgcacgaatttaatttaataacttactttttacaaattattttaagtatcttgtgaaaataagttacttaaaataaattatatgttataagttttttttcaatttcattgttcactaatctatttgaaacttcattttcttcttttacttaattttaaaaaaaaattattatttcaacattcttacaaacactttgaattaatcttttatgtcatttgatatttatcacttaacttatcaattaatcttactaaatacttttaattaaataagttagtttataaacttctagctattcaactcctaagttatagcttataataggggtgttcgtgagccagttccggaccagttttgaccaaatttangatctaacctaatcacaattgatc

SEQ ID NO: 18334 - DNA, 441 bp, Glycine max
  unsure (1)..(441): unsure at all n locations
tgaaggtgcgtaccccaccattntttcatagcaaattattgattatgtgtttactatcatagctatcatttctttctccgtcattgagggaaccacttgggctgccaaatccctccacctttgggcgtattctttgaaagatccatgccccctcttgcatatgctctgtagttgcatcctatccggagccatatcagaattgtactaatactgcctaacgaagtcaaccattacgtccttccaagaatggactcgggaaggttccaagttaatgtaccaggtaacagctaccccagtaagactttcttggaagaaatgtatcaccagttcctcatcttttgtgtatgcccacatcttccgacaatacatctttagatggttcttggggcaagtagctcccttgtacttatcaaagtctggcaccttgaacttgtgatgggt

SEQ ID NO: 18335 - DNA, 443 bp, Glycine max
  unsure (1)..(443): unsure at all n locations
ntaagagcaattcctttctttntcttatcattctccttatgtatattcaatctcattagttccatttcatgttcctgtaactttccaaataaagtagcaagagacatgttagatagatctcatgattcaataatggttgttaccttgggttgtcattccctacttaagcatctcaaaactttattgataagatcttcatttgaaaatatttttcctaaagatgcaagatgattaattatgtgtgtgaatctcttttgcatgtcctgtttgctttcattaggattcattctaaataattcatattcatgagttaatgtatttatcctagatctttctacatttgttgtaccttcatgtgctacttgtcgggtatcccacatatcttttacacttttacaatttgataccctacagtgcttattcattcctaaaacagatgtaat

SEQ ID NO: 18336 - DNA, 406 bp, Glycine max
agcttcaacattcaacttcgagcttctcgttatattataggactcaattagacatccgagtaaaaagttattgtcgtttgaatttgctcagagcttcaacattcaatttcgagcgtctccatatattacgggactcaatcagacatccgagtaaaacgttattgttgtttgaatttgctcaaagcttcaacattcaatttcgagcgtctagatatattacaggactcaatcaaacatccgagtaaaatgttactgtcgtttaaatttgcttagctctccagctttaaatttcgagcgtctcgatatatgacgggactatatcagacatccgagtaaaaagttattgtcatttgaatttgcttagagattcaacattcatcttcgagtgtctcgttatattacggga

SEQ ID NO: 18337 - DNA, 451 bp, Glycine max
  unsure (1)..(451): unsure at all n locations
ctcaagctntgagcaaattcaaacaacaataactttntactcagatgtctttttgcgttccgtaatatatcgagacgctcgaaattgaatgttgaagctctgagccaattcacacgacaataactttttactcggatgattgattgagtcccgtaatataacaagacgctcaaaattgaatgttgaagctatgagccaattcaaatgacaataactttttactcggatgtctgattgagtcccgaaatatatcgagacgctcgaaattgaatgttgaacctctgagccaattcaaacgacaataactttttactcggatgtctgattgagtcccgtaatatatcgagacgctcgaaattgaatgttgaagctttaggcaaattcaaacgacaataactntttactcggatgtctgattgagtcccgtaatatatcaagacgctcgaaattg

SEQ ID NO: 18338 - DNA, 444 bp, Glycine max
tatagctctagcagccaggttgtaaagatgatatctcttcctcttgcattaattgtcactcaagatgctagccagtggatccctcctgagattggtcaagttgatgtcagttgtgatgcttcagttccttaattggggagtctcacaacttatggtggggtgcttcatgattatacatgaaattttctgtgtggactcaaatccaatattggagattcatctgtgctgaatgtacaattgttgactattctaatgaatcttgcctatgaaattctatttccttttaggaatggatcatggaatagtgggaaaagaactattacattacttctattgtaggggctaataatgggagctctatcatggtgatgtcaaaaggtttgttttataaaagtgaactacttttggaatctgatctttattgctgagatattacttttatac

SEQ ID NO: 18339 - DNA, 442 bp, Glycine max
  unsure (1)..(442): unsure at all n locations
tctaatagtatatcaaaagagagaaatgttagcaactttctcttttaacactttnttgaacacactttctagtttctactatgaaatttattgaaaatcacaaaatttttgcaggtcttacttctcatttaatgattctctctcctgattttatggtttccaatagatttcaaccaatagtgaagtgttacaaagattaacctaacctttcttgctttctcagcatacatcaagaagaggattatgtacacaagctgaaaggctgctccaatagaattaacagttgtcaccaagagattatcaggtgatataaggagtgtgccataccacaagcagatcatgcagttcaagagagaataaatatatggcaacccggagaacatatctgttgacccatttcggatgattctcctaaatgtcggtctacaaatcaaaacagaac

SEQ ID NO: 18340 - DNA, 248 bp, Glycine max
agcttgtgattataaaggcaaattttcactgtgattttttctctctgtttcttcttctggccatgaaacttctctttgtcacttgttgaatgagccccacttaaaaagtttgaattttgaggagaattatctttctgggtgtttttcacgagagcaagatcttgaagttcttggggtttatgtggaatcctctgtcttgggttatggacgctgctgctataatggcaattgcacttgcccttggaggg

SEQ ID NO: 18341 - DNA, 436 bp, Glycine max
  unsure (1)..(436): unsure at all n locations
cttgcctgaagcatatcgcaaaaatgggagaaaattacatatatttttgcaaccatttaaggagaaattaaacaatgcacatatatatacctgatgacatgtgtattgaactcagcggtaactttcatggggttcggcttgtaagcttgttttgcggcttctcttgcttcttttaatcgcctatgccagacatgatcgaagtgacctatgttagcgttaagggtagggaatatagcaagacaaattacgtaaaagaatagcaaactgaacttgctagtttccatgactattgtttctttctcttgaagatctttaatcgtgtgcgccttatgttgtttattgtgtgcttttcaacctatatatntatttattttggcattttaagttctcctcccgtactttgcgctagacccacatataaatggcactacgatac

SEQ ID NO: 18342 - DNA, 463 bp, Glycine max
  unsure (1)..(463): unsure at all n locations
acactatggaaaactcccgcttgccttgccccttgatatattngagggacttatggatactatgaatgacaaattccttgggataaaggtattgttgccatgttttcaaagcccgtactaaggcatacaactccttatcataagttgaatagttaagggtaggaccacttaacttttcactaaaataagcaattggatggccttcttgcatcaacacagccccaatcccaacatttgaagcatcacactcaatttcaaaagatttttgaaagtttggcaacgcaagtatgggggcattagttagcttttgcttaagaacattgaaagcttcttcttgtttctctccccatttgaaaccaacatttttcttgagcacttcattgagaggtgctgccaatgtgctaaaatccttcacaaatcgtctataaaaacttgctaagccatgaaaactcctcacctcggg

SEQ ID NO: 18343 - DNA, 379 bp, Glycine max
agcttgtcttcaacaaataaatcataatcaaatttgtgatcttcaaagcccaactccagcttctttctccccatatccactatgcagctcgcagttagcatgaatggccttcccaatattacaggaatgtcattatcttcacagatatccattaccacagagtctgcctgttttactctgaccagcacatcttcaattactccatatggtctggaaatggagcggtcaacaagttgtaaagtcatcctagtgagcatgatctcctactctcccaaccttttgcacatggagagtggcatatagctaatactggctcccatgtcaataagagcctttccacagtgacttcttcaattgaataaggaatggttacactccc

SEQ ID NO: 18344 - DNA, 378 bp, Glycine max
agttctggtgggacatcttgacttgctttccaatctgacattcaccacagattctgccttcttctattttcagattgggaatgcctctaacagcacctttgtcaatgattttcttcatgcctcttaagtgcagatgtccaaatctttgatgccatattttgacttcatcttctttggagaatagacatgtggaggagtaactggtttcttgaggtgtccataggtaacagttgtcctttgacctgctgcccttcattagaacttcactcttctcatttgtcaccaagcattctgactttgtgaagtttacattatatccttcatcacacagctgactgatgctgatcaagtctgcagtcagtccttcacagcagtact

SEQ ID NO: 18345 - DNA, 437 bp, Glycine max
  unsure (1)..(437): unsure at all n locations
ttgaagtactacgaagcagcaaatgaagaggacctcttctaatctcatgctncatcaaattagtctcagcttcaaatttggatacatgtgtgcaaacagagccattgcacaagctatgagagacgaagacataattcatataattgacttccatattgatgaaggaagccagtggctcacttagattcaggattttgtagctaggtctagggggccactccacatccggattacggctattggtgattcaacatcatctgatgcaatgcagatggtgggaaataagttatcaaaacttgctgaggaatttaaggtgctctntgaatttgatgttgtagctatctttgcttgtgatgttcagctacaaaaccttcgagttcaatctcgggtggctctggctgtgatatttgcattcatgctacatcagatgccggatg

SEQ ID NO: 18346 - DNA, 401 bp, Glycine max
agcttcttcataaacgtgacatttttgcacaatacacaatgtccggtacaccacaaccaaatggtgtatcagaaaggcacaatagaactttaatggatatgattaggagtatgttaatcaattagactatatccgtatctttgtggatgtatgccttgaaaactgtcatgtatttgttgaataaggttcctagtaaggcagttccaaagacatcttttgaactgtggacaaataggacacctagtataaggcacttgcatgtttggggttgtcaggcacaaataaagatctataatccgcacgaaagaaaattggatgcaagaacaatcagtggatatttcattggttatcaagaaaagtcaaaggagtatatgttttattgtcctaaccatagtatgaga

SEQ ID NO: 18347 - DNA, 450 bp, Glycine max
  unsure (1)..(450): unsure at all n locations
cgcttagcatcagaccacttccagggtactggaactacttcacatggacttgatggggcctatgcaagttgaaagccttggaggaaagaggtatgcctatgttgttgcggatgatttctccagatttacctgggtcaactttatcagagagaaatcagacacctttgaagtattcaaagagttgagtctaagacttcaaagagaaaaagactgtgtcatcaagagaattaggagtgatcatggcagagagtttgaaaacagcaggtttactgaattctgcacatctgaaggcatcactcatgagttctctgcagccattacaccacaacaaaatggcatagttgaaaggaaaaacacgaccttgcaagaggctgctanggtcatgcttcatgccaaagaacttccctataatctctgggctgaagccatgaacacagcatgctacatcca

SEQ ID NO: 18348 - DNA, 395 bp, Glycine max
agcttctaaactttattttagaatgaagctctgataccacttgttagacaagtggcctcagatatcttaagaaggggggggttgaattaagatatcccaaattactttccacaattaaaaatttatttcactttcttttcaagttatagattcccttaacaatgaacttcttaaatattaattcaaataaaacaatttgaatatgaatgtaaagcaataataaacaaaggaggttaagggaagagaaagtgcaaactcagatttatattggttcggccacacccttgtgcctacgtccagtccccaagcaatccgcttgagagttctactatcttgtaaattccttttacaagttctaaacacacaaggacaatccttcctttgtgtttagaatt

SEQ ID NO: 18349 - DNA, 356 bp, Glycine max
agcttataatatatcgaggcgctcgaaattgaacaacggaagctcttgagaaattcaaatggtcataacttttaactcggatgtccaattcatgcgcatcacatatagagacgctaaaaaatgaacaacggaagctctccagaagttaaaatggtattaagttttcacactgaggtccgattcaggcttataatatatcggggcgctcgacattgaacaacggaagctcttgagagattcaaatagtcataacgtttaactctgatgtacgattcatgcgcattacatatatagacgctaaaaaatgatcaacagaagctcttaagaaatataaatggtcacaagttttgacactg

SEQ ID NO: 18350 - DNA, 375 bp, Glycine max
  unsure (1)..(375): unsure at all n locations
agtttattaattnttgtaattaggtttttagtttgaagttattttaataatgcttaattatttacaagcctttgttcatgggtggacagaccttacaaataattacccgattcccttctagttttatgaagttagaatgaaattttaatctgtagtttaagtttaagtttaagttagtagataaataaaactgggtaattttgaatatattctatagataaattaaaatacatgtgaagaaaaatttaaataaataatttttttttctacaactaacaaataaataattaaataaaatatggactaacaaattatttataatacaaacaaatattgaaaaaattatttacacaatatatatacaataataataat

SEQ ID NO: 18351 - DNA, 355 bp, Glycine max
gtgtaatcgattacacacatacttacaactttcacatttagagagccgcagaaaacattctcaacagccacatctttttattcggttcttgaatggccatcaaaggcatatatatatgtgacttgagacacgaatttgataagagattttcaaaacaaaaaggtcttatcctcttatatagcaaaatacctttatcctcttacatattccttggccaaaactcttttgattcaataaggaattatctgagtgctcacatcgctcaatctatctctttatacagagatttcttcttctcttcttcattctgaaaagggattatagagaccgatggtctcttgttgtgaaaggattc

SEQ ID NO: 18352 - DNA, 433 bp, Glycine max
  unsure (1)..(433): unsure at all n locations
ttgaagaganagcacccagttatgatctttttgtgttctttgaaaaagcctatgacactgtatcctggtccttcttggattatatgctatctaagttaggtttctgtactaaatggagacaatggattgctgcctgtctccaatcagcatccttttccatcttagttaatggtagccctactaaagaatttgtccctactcgtggtttgagacaaggggaccccttagcgccattgcttttcaatatagtgggggagggtctcactggtttgatgagagaggccattctgaaaaatctctatcgcagctaccatgtggggaatcataaggagcctattaatatccttcaatatgctgatgatactgtttctattgcggaagcttcttgggagaatgtccttgccatgaaggcaatgcttaaaggttttgagat

SEQ ID NO: 18353 - DNA, 382 bp, Glycine max
cttctggcttcaattcttcagtgggctttccttctgtgtccagcatcttgggatgttcccagcctttgatgacagctttccaggttctgctatccagtgatttgaggaaggccaccattcttgctttccaatattcatagttgcttccatcgagaattggtggtctgttcactggtccgccttctttctccatgttcatcagaatttatctccctagatctcactctgtgatttcgagtgttggctctgataccaattgaaattctgataccaggggacagatgtcgtacaggatgtcacgacatcacgcttcagaacatgcagattatatgtgtccgtatgaacagattacacaagtaaataacacaagagaattgttacc

SEQ ID NO: 18354 - DNA, 448 bp, Glycine max
tcaagcttgcactgcccaaagtggacaaccttccagaaaacgttgaagctttcattgttgtcccttatgatggcgttcagtatctcaaaaaagcctacgatgatttggaagaacccttgacctgttttctcaaatcttccaaagttgattggcatttctatgacccatatatgttacagttaccaaaaaggttcaaagagaaaaccaaatggtgtggaatagtaagccccggttgggcaccatagttgaaggtattgagccacaaggcagttggtggggttttgactcactctggttggacctctgtggtggaggttgtttagaatgaaaaacctctagttttgttaatgtttcttgcagaccacggattgaactcgagggtgttggaagtgaagaagatggggtattcaattcctaaggatgaacaagatggatcattcacgagtga

SEQ ID NO: 18355 - DNA, 444 bp, Glycine max
tgaaggagaactagatgcattggttaacttggtaacctagcatgccttgtatcagaaatttgtacctgtcgcaagagtctgtggtttgtgctcctctgcagaccaccatacagacctttgcccttccatgtagcaacctggagcaaatgagcagcccgaagcttatgttgcaaacatttacaatagacctcctcaacctcagcagcaaaatcaaccacaacagaacaattatgacctcttcagcaacagatacaaccctggatggaggaatcaccctaatctcagatggtctagccctcagcaacaacaacagcagcctgctccttccttcaaaaatgttgttggcccaagcataccatacatttctccaccaatccaacaacagcaacagccctagaaacagccaacagttgaggctcctccacaaccttccctcgaagaact

SEQ ID NO: 18356 - DNA, 385 bp, Glycine max
agttttgcataccccattgatccattaggaaattacttatgaaagagagccatgagggtgggctcatgggccactttgggatagacaagacccttgtcttactcaaagaaaagttttattggccccatatgaagaaagatgtccataagcattgcactatgtgtgtggcttgtttacaagccaagtctagggtgatgcctcatgggctatacacacctttacccatcccatctgcaccttgtgtagacattagtatggactctgtccttgggcttcctagatcccaaagaggtgtagactctatctttgtggtggtggataggttctgcatgatggcacactctatactatgccataccgtggatgatgcttccacatctcaaac

SEQ ID NO: 18357 - DNA, 399 bp, Glycine max
agcttcttagtttcagatgatgcagatgagcttgtagctacctcatgcactcctctaatgaccatggcatcatttatggcgctaaattgctgggagttggaagccatcttctcaatcaagtttctggcttcagcaggagtcatgtctccacgggctccactactagcagcatctatcatacttctctccatattactgagtccttcataaaaatattggagaagaagctgctccgaaatctgatggtgagggcaattggcacatagctttttaaatctctcccagtattcatataggctttctccactgagttgactaatacctgagatatccttcctgatggtcgtagacctagaagcacggaaatatttctctaagaatactctcttaaggtcatcc

SEQ ID NO: 18358 - DNA, 438 bp, Glycine max
  unsure (1)..(438): unsure at all n locations
tctcagccaacttgcttcctcactagcagttgctagtgctatcatctcatattccatagtggactgagctaagatagtctgcttctttgacttccaagaaacagccccaccagctatgctaaatatatagccgctggttgctttggaatcatctgaaagggtgttccaatctgcatcgttgtatccttcaagtataacaagaaaccttttataatgtaatccaaggtttatggttcttttaaggtacctcattaccctttcaatagcgtgccagtgctccatactangtctactggtaaacctgcataataatcccacaacataggctatgtcgggtctagtacaatcagtggcatacctaaggctgccaatgatacttgcatactcagtttgtcgtatacattcaccagtgttcttaaaccaatttacacttggatc

SEQ ID NO: 18359 - DNA, 437 bp, Glycine max
  unsure (1)..(437): unsure at all n locations
ttgacctanatttgaacaaaaggaaatcgttaagttatttattgtcaagantagatggtgatgataaagatgaagaagaagcggaaaggttattattaatgtacgttccggtgagggaaatcaaagtaaagggtccaaaaacaacgaaagtagaagtgtcaggaagagtttggcagagagtggcttccaagatagacccagatgcacattgcactgtgatgctaacttgacaatggcgcgcaaattggaccacggcctcaataacatcagaatttttcgggacttgaatgaagatgggtttcaaggcaagatcgctatcttggttaataacgaggggtatttttggcttgttcttggatccaaggggcctaccacaacctttgtttgaggatggtggcatttggtgagaggaagatccaatataattatgaacagtg

SEQ ID NO: 18360 - DNA, 339 bp, Glycine max
agtttgaatcggacctcagtgtgaaaagttatgaccatttgaatttctcgagagcttccgtggttcaattccgagcatctcgacatattatgtgcccgaatctgaccttcgtgtgaaaagttatgaccatttgaatttctcgagagcttccgatgtgtaatttcgagcgactcaatatattgtaagcctgaatcggagctcagtgtgaaaagttatgaccatctgtattgctcgaatgcttccttggttcattttcgagcatctcgacatattatgtgcccgaatttgaccttcgtgtgaacagctatgaccatttgaattctcgagagcttccgttgt

SEQ ID NO: 18361 - DNA, 354 bp, Glycine max
  unsure (1)..(354): unsure at all n locations
agctnattgatttaaataaagcctagaaaaataggaataattaaggaaatcaaagctaattaatgaaagctaattgaggaaagaatgactaattgaggaaattagagctaattaaggaaaacaaattaattgaggaaagaatggttatttgatgaaaatatggctaattaaggaaaaaagattaattaacgaaaacaagttaattaaggaaagaagaataattgagaaaaaacatgattaattaaggaactaaagacagacttagtgcaagaagcccactaatctgcacctataaaagaagaagagataagaacgaaaagaccaaaaatttctaccgaatacaattcttatata

SEQ ID NO: 18362 - DNA, 401 bp, Glycine max
agtctttgcttagaaaaatgcagaaaccaaaaaatacccctggttttcatacagccgttgtccatcgaggtactgaacaaaaccatcaatgagatatggaccaacataagaagccaaagtgtttaacaatacaagaaaagctgtgataagaatctccttccatgctgaaattattaacgatttcaccaacttcagtgtggtgacactattaattccaccacaatcagcctcaactttctctctgaaagttggaaaagcaccaattacactatctctgctgtctagttgaggaacatcctcaaggtccagggtcttcttattaccaacggctataagaggacccacccaagagaaggtaagaatgctcaaaattccagcatatgagaaaggcgtaactgagt

SEQ ID NO: 18363 - DNA, 423 bp, Glycine max
  unsure (1)..(423): unsure at all n locations
atgatatatgtgagggactcaggatcactagtaattataaattccttgcgataaaggcagtgtggccttgttatcaaagcccgtacttaggcatacaactcctaatcataagttgaatatgtaaaggtatgaccacttagctgttcactaatataagcaattggatggccttcttgcatcaacacagcctcaatcccaacatttgaagcatcacactcaatttcaaaagatttttgaaagtttggcaacgctagtatggaggcattagttagcttttgcttaagaacattgtaagctgctacttgtttctctccccatatgaaaccaacattttccttgagcacttcattgagaggtgctgncaatgtgcttaaatcctcacaaatcgctataaaacttgcttaccatgtgtcgaactacctt

SEQ ID NO: 18364 - DNA, 318 bp, Glycine max
acgaggccaaaagctatcggtcgtcttagcctacaagcattccatgtccatgaagatggtgacaatatgtatgaacgatggatcgaccgatctaagaattttctccataaatcttaccttatcaagccgtgtacccatctctctagctgactggagattgctcagactctccagaaatagtgagagaagaactctctttatctcatatgcagggctgcgcactccactgttaaagggtgaagatgcaccttctcgacttgtgttgtgccacaggtcgacatagcattcagaacagcgcgtgtctaatctacgcagact

SEQ ID NO: 18365 - DNA, 385 bp, Glycine max
  unsure (1)..(385): unsure at all n locations
tcgattacacacatactgtaatcgattaccagaggagaatttcatanaatattctcaacagtcacatcgtttcgtttgggttcttgattgaccatcaaaggcctatatatatgtgacttgagacacaattttttaaagagttttcaaaacaacaagtgttaatctctcaaaaagcaaaatcgtttatcctcttaagaattccttgccaattcaatgcaattcataaggaatcattgagtgctcagattgtaaactatctcttcaagagagatcattcttcttctcntctgatcactaaggataagaaccgaggtctttgtgtaaaaattctacacanagaagattgtcttgggttaaactgtaaagaattacaagatagtgaact

SEQ ID NO: 18366 - DNA, 403 bp, Glycine max
agctttatttccaaaatcacatctacaggaccaaggtccttcatatcaaaattattagactagaaaaacttcacatcatttatggaatgtatattactaccaaatatcaatatgttatccacatacaaacataaaatggcacatccattatcatcaaattgtttcactacacacatttatcactattattaatttgaaaataatacgaaagaataacttgatcaaacttttcatgtcattgctttggagcttgttttaagtcatataaagatttaacaaccaagaatctataagtagtactaagcaaagaatatccaacaaaaacataattaacagtttatggtccaatttttgcttttcttattaatagggaatgttaaccttgctagacacccccacactt

SEQ ID NO: 18367 - DNA, 454 bp, Glycine max
  unsure (1)..(454): unsure at all n locations
gcttaaatctagttttaattataaattactacaagaaaattatgttatatattattttactgcaaactaagaaataaaaaaattactttaaagtaaaaatctacttctaattaaagattacttaaaaaaaattatcatataaattattttactggaaactacaaaataaactataaatctaatttaattataaaattaataaaaactatacattcaaactgctataaataattacttacataaaattataacaaaaatgtattatcaattacaattattttgattgttatataatttttttcatatttaccaacttttttcaggactcaattnttttttatttaaataaatatcatgacatattccttttcttttatacacacaaacaagggatataaaatataaaattcatttaattaaaaaattattaacaactataaattcaaactggtct

SEQ ID NO: 18368 - DNA, 397 bp, Glycine max
  unsure (1)..(397): unsure at all n locations
gtcttatgaattctttcaaattaataagagaattgtatgttatcacatctggttcacatcctgcatctttcatttcctcaaacacagtgactgctccagttaacatccctacctttccatacccataaatgagaggattataggtgacaatgtctggcctaagacccagagctttcatttcttcaaataaactcctggcagtttctatgcccccttctctggccagacagcctatcactatattatacgtaaaaactgagggcgaaaggccagccacaaccatgtccttgaaaaggcttaatgccaattcccctttgcttgattttgaaagcctgtgaagaagatcattacaagacctcacttttggcagaaccatgaactngttcttcttccaaaa

SEQ ID NO: 18369 - DNA, 120 bp, Glycine max
ctagttcactacttctagtagttcaagatatgcttctagaggatttctgttgccaaaaagttactctcaggccaagaagatactatgtccgatgggtatggagtattataagattcatgc

SEQ ID NO: 18370 - DNA, 394 bp, Glycine max
  unsure (1)..(394): unsure at all n locations
agcttgtangtatatagagatgaatgaagggagagagagagaagagcatgaaattttgtgctctaaaagagctctgaaatctgaagttaatattcaaatgatcaaagttgaaaaaaaatgcacacacatgacctctatttatagcctaagtgtcacacaaaattggagggaaatttgaatttcaattcaaatttcactttaatttgaaattgaatttgtggagccaaactttggagccaaaatttcactaattatgattagtgaattttagttatggttcagcctactaatccaagatcaattccaagattctccacttagtgtgcttacgtgtaatgaggcatgtaaagcatgaacgacatgcacatagtgtgactatatgatgtggcaatgg

SEQ ID NO: 18371 - DNA, 451 bp, Glycine max
  unsure (1)..(451): unsure at all n locations
tcttctgctcaacagtatatagccgttcatggctcctttccattctattaccctccaatgccttatgtgccaaatgctggaatccaagccaccattgctccttcagctccttctcaagccaacatagctactgctagttcagcaccttcaaacagatggaatccggattctagtgcatcccaccatgtcaccaatgtttctcaaaatatacagcaattaacaccttttgaagggtcagaccagataacacttggtaatggacagctccttgacattaactccacaggtctaacttcatttcaatctcctttaaaccctacgtttcctctaattcttagcaatttgctatatgttccttcaattactaaaattcttattagtgtgagttagttttgtaaggataatctagttaattntgaatttcatcctaccttctgttaggtgaaatcat

SEQ ID NO: 18372 - DNA, 393 bp, Glycine max
agctttgtatattgggtgaagcacgctaagatgtcggtgtgttgctatgacgaatggctccatcgccgcatgagtatttaacctatgaagaaatcaaaagtaattaatatacacttgagagagagggattagagattgaatttatctatatatgttgatatatagcaatgaaaatgaaaatgaaaatttataccaatggctcatgagttgatggtagcaagagtcatttacgatgacataagctttggctagtagccaaattgtgctctcaacaccttccttagcaggtaagacgacttgactgacggcagctgacagatccccagcagaatgtggcaaacttaattcgatggccactggctttaaagttccatcttctctcaataaaaggat

SEQ ID NO: 18373 - DNA, 399 bp, Glycine max
agttttctaatggtatgcctaccccttcacctaataatatttgcaaactgaaacgctctttatatggattaaaacaggcaccaagagtatggtttgaaaagtttcgctcgacactacttgtttttgaattcactcaaagtcaggatgatacctctcttttcctacacaggactcctaaaggcatcatggagcttcttgtttatgtggatgacattgtggtcactggctcagatcaagatgctgtttctagaacaaaaaatcacctgcattcaacctttcagatgaaagacttaggccatctcacttatttcttgggtttagaggcgcattataatcaccaaggcatttctctatgtcaacacaagcatattcaaaactgggtccactagctggactccc

SEQ ID NO: 18374 - DNA, 443 bp, Glycine max
tatggtgtcgctcatgttcttggtttccctcacctacatgtgtttatactctaaagctggtttccacgtccacatcatcaagcacgtgcagccacgctcctttcatcatcaaccacctcttcccttcctcaaacgtaacggagtggccgtcttcatcccaaacttcccgcaccggaaaggggaaacggccggtgcgccagaaaacggagctccgccacctggtgttcggaatcgcggcgtcatcgaagctatgggagcacagaaagaactacataaagacttggtacaagaaggacaagatgaggggagtggtgtggctggacgatcgcgtgaagacgaacccaaaggaagggttgccaccaacgaaggtgtccaccgacacctcgaatttcgtatacaccaacaagctggggcaccgctccgcgattcgaatctcccgcatc

SEQ ID NO: 18375 - DNA, 405 bp, Glycine max
agcttgagaaactcaattagcataaatagataatataagagaatataatcacaattatcataccattaaaaatataattaagcctaatgataagaatttgattttgtattgtcaaggtaaaatttatacgatcaatctataaaaaaacattttaaatatataacggtgtacgtatgtttaaatcacaacattgttaatgtatcataattaaattcaaattatgatttcaaagagtatatgttattgatattcttttaggtttgggtggataagaaacatgaggaaaggaagaaagcattatggaggtggccaatgggttgttaaactagttagggtaaatagtcacttttatctttaaatgaatataaaatttagtttttgatagtgtaaaaagtgcgataaata

SEQ ID NO: 18376 - DNA, 435 bp, Glycine max
  unsure (1)..(435): unsure at all n locations
tatccagaagaacttctaggagaagaaaaaaatgaaatgatcttttctataagtgaaaattatcttatgtacaagaataattgtagaaattctctcatctttagagaaactagatgacaagtttctaccaacttagggggagccctagcagatataaaaaaaagttggaaagttaaattatctcacaatgataataacatacatttcctttcatgttaatgctgtcagtcaatttctcaatgcaccatgtgatagtcattggtatgtagttgttcagatcctgagatgcatcaaaggattacctggcaaagggcttattgatatgaacaaggctaacatcattgtacatacaaatgcaaattgggaaagagatgctagtgatagaatatccacgataggctattgtgttcttattggtggngacttgatattgag

SEQ ID NO: 18377 - DNA, 404 bp, Glycine max
  unsure (1)..(404): unsure at all n locations
agcttatctatcactttgtacatgcagcctatcaaggatattggtctataatcatttagggactgaggatggttaactttggggataagagccaagaaagaggcattgctgcctctagggaaacaaccgttgacatggaactcatccacaaatcttctgaactctggttttagcacactccagaattccttaataaaattgaaattaaaaccgtccggcccagggcacttatctccaccacaactccacactgcttccttaagctcctggtctgagaaaggtaaaattaaaccctccctctgcctttgatcaagagaagggaattgaactccatcaagggtaggcctagagggattctgctcagaanatctgttgagaaagaagttcacagcgcctatcttcac

SEQ ID NO: 18378 - DNA, 399 bp, Glycine max
agcttgcttcttctgaatatcaaatgcattttgggaaaaagaaatagacaaattaggattggttagaagagcactaactgaaattaaattgaatttgaatttaggaatgtaggcaacattatgcaagagtaaggtattggttaagcaaactgaactaatggcaatgataggtataacatcattgttaggcagagtgacagttttatcagaaacaagttggtaagaccgaaaatgatgaagggaacaagaaatatgaatgctggcaccagaatctaaaagccaacaatcatgaagaaaattagaagtggatgtagaaaggatcataccactggcagaagaacaccttgagggatgaaacattggagcatgacttctaaaagattatcaattggtatattg

SEQ ID NO: 18379 - DNA, 391 bp, Glycine max
agcttgtactcttgttattggccgtgacgaagagattagaagggttgtgaggattctatcacggaggactaagaacaacccggttctcattggagaaccgggtgtgggaaaaactgcggttgtggaagggttggcacagaggatagtaagaggggatgttccaagcaaccttgctgatgtgaggcttattgcgttggatatgggggcgttggtcgcgggtgccaagtatagaggcgagtttgaggagcggttaaaggctgttttgaaggaagtggaggaggctgaggggaaggtgatactcttcattgatgagattcatttggtccttggtgctggtagaactgaaggctccatggatgctgctaatctattcaaacctatgcttgctcgc

SEQ ID NO: 18380 - DNA, 406 bp, Glycine max
agctttccttcctcattatcatccttgttaccttgctcaatttttcaacaagtcacgcacaagacgaccctttttacctttaccaatattgctcaagcaacagaaccactgccaacacctccttccaaataaacctcagaaccctcctctcttccctttcatctcacgccaccggcgacacccaattctacaacacaacattcaccggaaccaacccctccgacacaatctacgccatgttcatgtgtaggggcgacgtcccttctcagctttgtcaagcatgcgtcataaacgccactcaaagactctcctcagaatgctccttgtccaaagaatcggtgttttggtacgacgagtgcatggtttggtattccaccaacccgatcttcaccaccgtggccacaac

SEQ ID NO: 18381 - DNA, 442 bp, Glycine max
  unsure (1)..(442): unsure at all n locations
tcaagaacagctccctcttcanagcctaagtaaatatgttagcttcttgatcttttctcttatagtgtactagatcagtagttccatccttgcaaagatctcttaaaaaataaacttcacatcaatatgcttgcttcttccatgtagaattggatttcttgacaatttaatggttgaactatagtcatagaaaattgtagtagctttaatttgcttgaactacaactcctcaagaatttttctcaaccatatttggcttggcaaggtgacaattggttgctttttagatgaccacaaaacgacacctgttccaagcataaagacagaaccaaaagtgctctttctatcatctagatcacctacataatcgttgtcagttccccaaggtttcatgttccttgaaaatagtgaagaattctcttggcagccaacaaatgcaact

SEQ ID NO: 18382 - DNA, 287 bp, Glycine max
catccttgcacacatctcttaaaaaataaactccacatcaatatgcttgcttcttccatggagaatcggatctcttgacaatctaatggctgaactatattcatagaaaattgtagtagctttaatttgcttgaactacaactcctcatgaatttttctcaaccatatttggcttggcaaggtgactattggttgctttctagatgaccacaaaacgacacctgttccaagcattaagacagaaccaatagtgctctttctatcatctagaccacctacataatcgt

SEQ ID NO: 18383 - DNA, 377 bp, Glycine max
ccaagccaatcataatgctagacaaaatatagatgttattataggtaacaatggcggtaatgacggaccgaggcagaaccgggttaagggagtaaagctcaatgttcctcccttcaaaggcagaagtgatccagatgcctacctggactgggaaattaatattgagcacgtatttgcctgcaatgactacactgatgtgcataaagtcaagctaacagcagctgaattctccgactatgcccttgtttggtggcataaataccatagagaaatgttgagagaggaacgaccagaggtagatacatggactgagatgacaagggtgatgagaaaaaggtatgtgcccactagctataacaaaaccatgcgacagaaac

SEQ ID NO: 18384 - DNA, 397 bp, Glycine max
tcttctttagtttaggtcccatgaatgtttatttcttggctattccacttctcacaaaggctacaagtgtctctcacctaatggaaaactgtatgtttccaaagatgttgtctttaatgagcttaaatatccttacaatgatgtttttccatccttatccaactctgtcactccatctaagagtaactttttaccaactgctcatattcccattgtttcaccttctcctaatgaacccagtcttccctctcaaactgctgaaactaatcctccttctataaatgctgaccctcctattgccctaaatgctgaatgcaccaattcccaaaatgtcacactatcttcttcctctttgactgctgaaccaacttctgtaaatgatgaacactctaacact

SEQ ID NO: 18385 - DNA, 377 bp, Glycine max
ttgtcttttaggattaaagtctcacgattgtcacatgttgatgcaacaattgttagtcgtggatatacaagacatcttgccaaacaaagtcaggttagccataactcgcctgtgctttttcttccatgccatatgtagcaaagtcattgatcctgtcaagtttgatgagctggaaaatgaggctgcaattatactgtgccaatcgaagatgtattttccccctgctttctttgacatcatgattcacttgattgtgcatctgtcagagaaattaaatgtcgtggtcttgtttatttgcactggatgtacccggttgagcgatacatgaagatcttaaaagggtatacaaatgaatttatatcatccataagcattta

SEQ ID NO: 18386 - DNA, 394 bp, Glycine max
  unsure (1)..(394): unsure at all n locations
agcttattctatctgntaaatacaaggcatccttgccttatatagggagaggacaaaacaaaaaaaataacagaataaccttccatatggatttaggtcacagcccaataattcaccaccttgaactaacatccatataggacacaaactgctccctccaagcacacatgaacttaaccccaacaatcaacattgagcaagcttaagcggtgatcaaacttgctctttggaacaagctttatgaacatatcagcaggattgtgtagagtgctaatcttatgaactttgattcttctttctaaccgaatgaagtgatatctaacatctatatgcttggttctatcatgatgaacttgatccttggccaagcatatagcactaaggctgtcacagt

SEQ ID NO: 18387 - DNA, 405 bp, Glycine max
  unsure (1)..(405): unsure at all n locations
agcttctanactttgtacaagaatgaagctctgataccacttgttagacaagtggcctcagatatcttaagaagggggggttgaattaagatattccaaactgtttcccctaattaaaaatctatttctctttttactcaagttatgaattcccttaaagacaatcttcttaaatattaattcaaacgaagcaacttgaatgtgaatataaagcaataataaataaaagagattaagggaagagaaaatgcaaactcagttttatactggttcggccacacccttgtgcctacgtccagtcctcaagcaacccgcttgagagttccactaacttgtaaattccttttacaagttctaaacacacaatgacaatccttcctttgtgtttagagatcctttacaaca

SEQ ID NO: 18388 - DNA, 394 bp, Glycine max
agcttgtatggttaacgtctcacgattgacacgtgctcatgcaacaattgttaggcgtggctatacgagacatctttccaaacaaagtcggggcagccatcgctaccctatgtgacttctttcatgcgatatgtaccatagtcctggatcctgtcaagctcgatgagctataaaatgaggccgcaataatacagtgctagtaggagacgtattgtccccctgctttctttgacatcatgattcacttgattgtgcatctagtcagagaaatcaaatgatgtggacctgtacatctgctgcggatgtacccgtgagaacgatacatgaagatcttagaaggatatacacagaatctatatcgttcagaaggcattaatgatgagaggtacattgc

SEQ ID NO: 18389 - DNA, 395 bp, Glycine max
agctttaaaagattggctaagattttgttaaaacataagcacttagacaatgaaggaaagctggagttgctgcacatgatgtccaacggtatgtcaaggaataagatcgggctgcacaatgcacaaggcaagataaaatgtcaaatgaagaattgaagttgcaggatccacgatgtcggatacaatgtcctgacatcctgcccgaaaatactggagttgctgtacaatgcaagataaaagacaagtgcagaagtgaagctgcaggatccacgatgtcggatacaatgtcctgacatcctgcccgagaatactggaattgctgtacaatgcaagataaaagtcaagtgcagaagtgaagctgcaggatccacgatgtcggacacgatgtcctgaca

SEQ ID NO: 18390 - DNA, 401 bp, Glycine max
agctttatttttatgtgcttaagatgtgtatcaacagcatcatcatcgtcattctcaagaaccttctttataccaacagtaggttgggcatctcctaagtttgtaattttcaagccctttgaactgcatgagcaaaccaaaaaaaattgtttatataactataaaaattagttgtatgtaaaatttggcaatggaccaacatttacctgataaattcatacaaattgtggtactcatttctctgaatattacgaaagagatgttcttgttcagattttagtctgaagagaaggtcaaaataatgcatattggaaccaccaccagcatgccactcaaattccacatagtcaatctgataagaaaggaaaaaaaacaattaagatctccacggtgtaaatatc

SEQ ID NO: 18391 - DNA, 449 bp, Glycine max
  unsure (1)..(449): unsure at all n locations
actcaagcttgaaggcgtgtagtccaccatctnttcatagtagaatactggttatgttctactatcattatcatctttctccgtcattgaggtgccactngagctgccaggtctctccacctttgggcgtattctttgaaagatctgtgccccnttttgcacatgttctgttgttgcatcctatccggaaccatatcaaaatggtactgatactgcctaatgaaggcaacctttatgtccttccaagagtggactcgagaaggttccaggtcagtgtaccaagtaacagctaccccagtaagattttcttggaaggaatgtatcagcagttcctcatcttttgcgcatgcccncatcttccaataatacatctttagatggttcttgggcaagtagtccccttgtacttgtcaaagtccagcaccttgaacttgggaggggtgatgata

SEQ ID NO: 18392 - DNA, 404 bp, Glycine max
  unsure (1)..(404): unsure at all n locations
agcttgttcataaacgtgcatttatgtgcaatacacaattcccggtacaccacaacaaaatggtgtatcagaaaggcgtaatagaactttaatggatatgtttaggagtatgttagtcaattagactttacccgtatctttgtggatgtatgccttgaaaactgccatgtatttgttgaacagggttcctagtaaggcagttccaaagacatcttttgaactgtggacaaataggacacctagtataaggcacctgcatgtttggggttgtcaggcagaaataagaatttacaatccgcaagataaataattggatgcaagaacaatcaatgaatatttcattggttatccagaatagtcaaaggggtatantgtttattggtctaatcatagtatgagaattg

SEQ ID NO: 18393 - DNA, 386 bp, Glycine max
agcttaatgaaattttgttgggtatatcggaggacaaatacatgagattgcaagagggagttaagcaagtgcaaagacattttgtggtgaataatcccccaaagaggtatgatgtattccatatgattattcattccatatggctaaggaggttgaatgtgcgtgtgaaataagtcatcaactctattatgttctctctctattcatacttttgctaatggttttaaagtttaattgtttgaccttcaatattttgatacttaaaagataatagattcgagtataattttatcttatatgactaataatttttaatcaagagtcatctcttttgtgacttaaaataaatataacaataagagagatgactctacgaaatatgaata

SEQ ID NO: 18394 - DNA, 390 bp, Glycine max
  unsure (1)..(390): unsure at all n locations
tgtacggttaaagtctcacgattgtcatgtgctcatgcaactattgttagccgtggctatacgagacatcttgccaaacaaagtcaggttcacgataactcgcctgtgctttttcttccatgctatatgtagcaaagtgattgatccagtaatgtttgatgagttggaaaatgaggccgcaattatactgtgccagttagagatgtattttccccctgctttctttgacatcatgattcacttgattgtgcatctggtcagagaaatcaaatgttgtggtcctgtttatctacggtggatgtacccggttgagcgatacatgaagatcttaaaagggtatacaaagaatctatatcgtccggaagcatctatngttgagaggtacattgc

SEQ ID NO: 18395 - DNA, 458 bp, Glycine max
  unsure (1)..(458): unsure at all n locations
agcttcatccaactcaagcatggaaagaagacagtatataccagtcattcgtatatttctaaaagctnttcacccttatcgatgattgaaaaaagcttttaatggaagtcaggagaatgaatgccccccggatgcattaaccggaaaccaagttcatgatcgcgtaaaggacattgtaactgtgtttggcaagtcccagaagaagacatcatctcccaacatgtggaagaagcgcttaatattctttgatcttccatactggtctgatctatatgtgcgccactgtctagatgttatgcatgtggagaaaaatgtgtgtgaatatttaattggtactcttcttaacattaaaaggaagacaaaagatggtttgaaatgtcgtcaagacttggttgacatgggaatacgagagcagtngcatcccatatcacaaagtctgcgaacatatttacccctat

SEQ ID NO: 18396 - DNA, 401 bp, Glycine max
agctttttattcaatttcgagcgtctcaatatattacgggactcaatcagacatccgagtaaaaagttatcttcgtttgaattagctctgaggttcagaattcaatttcgagcgtctagatatattacgggactcaatcagacatccgagcaaaaagttattgtcgtttgaattagctcagaacttcataattcaatttcgatcgtctcaatatatttcgggactcaatcagacatctgagtaaaaaagttattgtcgtttgaatttgctgagagcttcaacattcaatttcaagcgtctcgatctattacgggactcaatcagacattcgagtaaaaagttattgtcgtttgaattcgctgagagcttcaacattcaatttagagcgtctcgatatatta

SEQ ID NO: 18397 - DNA, 272 bp, Glycine max
tatatatgtaggactgatgatcgctgtgattgacatattcctcgggataaaggtagtgttgccatgttttcaaagcctgtactaaggcatacaactccttatcataagttgaatagttaagggtaggaccacttaacttttcactaaaataagcaattggatggccttcttgcatcaacacagccccaatcccaacattggaagcatcacactcaatttcaaaagatttttgaaagtttggcaacacaagtatggggcattaagtaaccttt

SEQ ID NO: 18398 - DNA, 393 bp, Glycine max
agcttgttattgaacaagggaagctctcgagaaactcaaatgatcataacttatcacacagatgttcgattcaggcgcataatattccgagacgctcgaaattgaacaacgaatgttgttgagaaattcaaatggtcagaacttgtcacacggatgtccgattaaggcgcataatatatcaagatgctcgaaactgaacaacgaatgctcttgagaaattcaaatggtcataacttgtcacacggatgactgattcaggcgcattatatatggagacgcttgaaattgaacaacgaatgctctcgagaaattcataaggtcataacttgtcacacggaggttcgattcaagtgcataatatatcgagacgctcgaaattgaacaacgaatgct

SEQ ID NO: 18399 - DNA, 316 bp, Glycine max
  unsure (1)..(316): unsure at all n locations
agcttctgttgttcaatttcgagtgtcttgatatattatgcgcctgaatctgacctccgtgtgaaaacttatgaccatttgaatttctcgagagcttccgttgttcaattttgagtgtctcgatatattatacgcctgaatcggacctccgagtgaaacgttatgaccatttgaatttctcgagagattccgttgttcaatttcaagcgtctcgataactcatgcgcctgaatcagaactctgtgtgaacacttatgaccattttgaattctcgagagcttcnncgtgtcaatttcgagcgtcttcatatattatg

SEQ ID NO: 18400 - DNA, 263 bp, Glycine max
agcttctctatatattatgcgcctgaatctgatcttcgtgtgaaaagctatgaccatttgaatttctcgagagcttccgttgttcaatttcgagcgtctcgatattttatgcgcctgaatcgggcattcgagtgaaaagttatgaccatttgaatttctcgagagcttccgctgatccattaccagggtctcgattattatgtgccgaaattggaatcccattaaatgtatgacatttgaatatttgaagcttcgttgtaaat

SEQ ID NO: 18401 - DNA, 323 bp, Glycine max
agctttatgttacatataaaaacgagtctatattacctattctattatgtataaccaaaaaatattatccgcctaacatttaatactttatttatctgtaaattacattcaatttatttgcatcaacgatttttacatgcatgctatccacgaatatgatgcttgttccattggaactctcaacatatattttacattacaatcgatggaatttaattcagctaattgaaccacgacatataacatattactaacttctaatatctgattttattcttacatgtaaaaaacatatttcatatgatattacattgattcaaatg

SEQ ID NO: 18402 - DNA, 304 bp, Glycine max
tcagcttattatgcatctactgctttaaacaaaagagtgctccactacgcaacttttggtttcaacttatagttggctacgtcttatgtaaactcaacccatgtatgttttggagcattccagttaataaaaaatgtttctatacatatgtctgttgtttaaaaaaattattaagaaaagagtatgaccatagttatcaactgacatacagaaaaaaaaatggttcattggtggatcaattctataatcttataatattataataagcgagtatttaaaataggactaaaccttagcgtatgat

SEQ ID NO: 18403 - DNA, 349 bp, Glycine max
  unsure (1)..(349): unsure at all n locations
agcttattgtcgnttgaatttgatcaaagcttctgtattcaattttgagcctctctatttataaaggcactcaattatacatttgagtaaaaagttattgtcatttgaattttctagggtcttatgtttttaatttcaagcatctcgatatattacgggactcagtcggacatccaagtaaaaagatatggccatttgaatttccttggatcatacagttttaatttcaggcgtttcaatattttacgggactcaatcagacatccgagtaacaaattattgccgtttgaatttactgggagcttncattttntaattcgagcgtctcagtatatgacgggattcaatc

SEQ ID NO: 18404 - DNA, 357 bp, Glycine max
  unsure (1)..(357): unsure at all n locations
agcttatgaccattcgaattttcgagagcttccgttgttcaatttcgagcgtctcgatatattatgtccccgaatcggacatttgtgtgaaaacttatgaccattcgaatttctcgagagctatcgttgttcaatttcgagtgtctggatgagttatgtccccgaatcggacattcgtgtggaaagatatgaccattcaaatttgtccagagggtccgttgatcaatttcgtgcgtctcnatatattatgtccccaaatcgaacatccatgtgaaatgttatgatcattcgaatttttcgagagcttccgttgtgcaattccgagcgtttagatgagctatgtccccgaatcgacat

SEQ ID NO: 18405 - DNA, 324 bp, Glycine max
  unsure (1)..(324): unsure at all n locations
agcttggtttccaacgctctgttcaagctctcccaaaatctagaggtaaatctaggatctctatcagatactatgctagattgcacaccatgtaacctgacaacctcacttatatacaaagtggtcaacttttccatggaaaatctgatattaatgggaatgaagtgagcaaacttagtcaatctatcaacaataacccatataaaatctaaacctctcagggttctaggtagtcctaccacaaaatccatggaaatgctgtcccacttncactatggtatctctaacgcttgtaacttacctgaaagtctctgatgttctatc

SEQ ID NO: 18406 - DNA, 186 bp, Glycine max
gaaagagtgatacgatcatgatgccacacaacatactagccttgaacctcatgcgcctatcctgaggtggctaaagagcgaacaagctcacactgatcgcccttcgctcactgtgcgctttctgaatggcaaacggtgcctgacgcctgctttaatgaatacgcctatgcgaagctcttgcagccg

SEQ ID NO: 18407 - DNA, 436 bp, Glycine max
tcgatggagaacaaccttaggatgcagagggaacactttcagagatgtataaattgtgcaagcaaaataggtcacgtctaatataatttaaattgtaagttcaacatcggttttcaataaaaataaacaaaaaccaatgttaacaacttgatgttaacgttaacatctattttattaaacaaaccgatggtaacgaactaaggttaacatcggttttatgaaaacccgatgttaactaattaatgttaacatcggttattccaaaaccgatgttaaagtcacttcattaacatcggatttcttctaacatgatgttaacgtatacacattattcacaattatgccaccgcgttatcttaacatcggattctaaaaaaccgatgtttataaagtctcattatttatcatcttgccaccgtgattctgcaacatagat

SEQ ID NO: 18408 - DNA, 445 bp, Glycine max
actcaagcttatgctgcaaacatttataatagaccacctcagcagtaaaacctttctcaactaaataattatgacctttcaagcaatagatacaatccaggctggaggaatcatccaaatctgagatggacaagtcctccataacaacaacagcctgcccctccttttcagaatgttaatggtccaagcaagccatatgttcctcctgcaatgcagcaacaacagcaacagtcacaacaaagacaaccagcaactgaggctcctcctcaaccttccttagaagagttagtgaggcaaatgatcatccagaatatgcaatttcagcaagagacaagagcctccattcatagtttgacaaatcagatggggcagatggctactcagatgaatcaagctcagtcccaaaattctgacaaattgacttcacaaactgtgcagaatccta

SEQ ID NO: 18409 - DNA, 320 bp, Glycine max
  unsure (1)..(320): unsure at all n locations
gcgatgtgttttatcttatgnggctcgcatatagcatatcctcagcatataacaccacgaatgagcacttactcccactcaacttgtggtatacaccatcatcacctgcttttgcctcacaatcatatgacggaacgacctgacgaaacctgtaataccattgatgggaatctcgtctctgacaatacatgaatccatctaggctgcacaccctacactttgagtcacctgtaacacagctctatggatgcatcacatcaattgtgtgtacaatgtcaccatttataaacgtacacctaactacaatctagcagttccta

SEQ ID NO: 18410 - DNA, 410 bp, Glycine max
agtatgatagatacgctggatcagacctaagctcttcctcagaagcaatcccattcacatccttcgttcctcgaaactctgaaaaggcagcaggagcaccaccaccaccaccaccagcaaacaaccctcctacggcactcaaagaaccgtccacagttggaggcgccgatccactcctaaaaatattaagctctcgctcacgatcatcagcctcttgtctgcgttgctcacgaagtaacatccctatctccttctccaattcatcaccaaaagaaccctcgttactcccaagcataggtcttcttcccaattcagacaacatttttcaaaatctcaatttgatcaccacccacaaatcatcaacctcatatagcagaaactgatcactacccaccaccagaaatcaaacc

SEQ ID NO: 18411 - DNA, 433 bp, Glycine max
  unsure (1)..(433): unsure at all n locations
tgcatacgttttcccaatttagtttgngaatcatctttctctacctagntaattctctcttttcataatcctcatatcccctgagttgttacagggattagagcacatatcctcaatgatctcgatggcatcaatagggggttttaacatgaggttacccttacaagcaacatctaaacttgtcctattgtgtgaggacactctaccatagaatatatggatcagtatctattgagtaatgtcatggtgtggacaacttctggtaatttctctacgagccaaaaaccttgtttgcgacattccccctgttatagaaggtataaaaataataaataatggaattctttgtaagagctacaaaactgacaactctattagaaagtagaatcttgcaacctttctcaagcgctctcttgttctctatgtacaaagt

SEQ ID NO: 18412 - DNA, 376 bp, Glycine max
  unsure (1)..(376): unsure at all n locations
tgttttatatatttatattatgnaactttttgcaattttaaatcaattattaattctagttatatgacttatacttaatgatgcattgtatcattaattattttttatttgataaatgatatatacttaatgattaacactgaatattattaatcattcttcaagaatatacatacacattcataatctctagctcttctgtgtatttgatctttaaagctcacaaaaaatctttctttaatgtaattgacatgacatggacttgatttcggcttatatatatataagttaatttggagacacgacgattgtcttctgtttaatcatcaaatttagttcttaccaccaacattttttaatgacttgagttgatata

SEQ ID NO: 18413 - DNA, 362 bp, Glycine max
tcgagtaaaataaaagattaaatggtcttaatctattacaattttttaaatgataaactaaaaaaagttgacacattaaaattaataagggaaaagttaatcctgatacttttcttgtattaacaaaaaaaaatttgacactaaaataaatgagattagtaactatgcacagtaaaaaattcaatcacaaatattttttaaaataattattctaaactattaacatccgtttagtagagtaaacataaatgaaaaataaataaattaagatgaaaatttagaattaaagtatacaataaaagtatgaatccccatatcatgtatattctcttaattttcatcttcttttattttcaaacgaa

SEQ ID NO: 18414 - DNA, 434 bp, Glycine max
tgtgcattcaatatcctgatgagggtgttccatatgttctcaagattggactatatacatttgctgcccaagtttcatggtcttgcaggtgaagatcctcataagcatcttaacgagttccatattgtttgttccaccatgaagccccctaatgtccaagaagatcatatctttctaaatgcttttcctcattctctggagggagtggcaaaagattggctatactaccttgctcccaggtccattttcagctaggatgaccttaagagggtgttcttggagaaattcttccctgcctctaggaccactgccattagaaaagacatttcaggcatcaggcaacttagtggagagagcttgtatgagtactgggaaagattcaagatattgtgtgcaagatgtcctcaccaccagatttctgagcaactccttct

SEQ ID NO: 18415 - DNA, 405 bp, Glycine max
  unsure (1)..(405): unsure at all n locations
agctnggtgnattagnngnaacgancttcaagagtgcatccagtctcaagggtcacgacgaagctcgattagtagtcatactaaagagcagattgaggatattttaaattcaaagcagagattaaagggggaaaagaatatgcccaaggaagatctacatattaagcaggctgcagcgctggttgtcaaacttgaaggaaattctctgttctcatctggaagtattgctggagctgcatcaaaatactctgaagctttggcattgtgtcctatgagatcaaggaaggagagagttgttctatacagtaatcgtgctcaatgccaccttttgctgcaacaacctttggctgccataagtgatgctacccgtgcactatgtctccataaacctgtcaatcgtcatgc

SEQ ID NO: 18416 - DNA, 400 bp, Glycine max
  unsure (1)..(400): unsure at all n locations
taagtttaagatttcttacatctttcccgaaatctggatacaaacgattaatcttcttccactggaaggaatcagccagatggtggagtattccatcccaatttatcccatgtgcatgccatgtaagttatgttgcataatctgcattagcaaacaaacgcctaaaccttggaatgatcagaagatactattacacctttgctagggggcctttctttgtgctttcatcactgctgaactcatcatcatccttcactttgtaccatgataccccacacctgnggcatttatggagttcttcaaactcatgtctgtgcaatatgcaatcattatagtattcatgtatnttttatactccatacccattagacacaatatcttcttcgcctgataataactt

SEQ ID NO: 18417 - DNA, 379 bp, Glycine max
atatcattatgaatcacgtcccaatatgttgaagaaaataggttgaaatctgtttgggctaggagccttgtgagatttcatgctcatgagagcatgcttgatttcctcctttgtgactggggcagtgagggcttccttagcttcttggctaaacataagaacattacgaatatgaatgacaacctcaaaggagttgtggggaaggcaaaagagattctagaagtaggattaagcctctgccttcaagatgtttgcatccgagcaccaggtgccatcatcgagctttagattgtgaataatgttacgatgcctacgcacaatagtttgagtgtgaaaaaacttagtgttgcggtagcccgatctgatccagtcctcacac

SEQ ID NO: 18418 - DNA, 332 bp, Glycine max
atcttcttatgatgcaaatgagtttgtagctacctcatgcactcctctaatgactatagcatcatttctggcgctaaactgctgggagttggaagccatctcctcaattaaatttctggcttcagcaggagtcatgtctccaagggctccaccactagcagcatctatcatactcctctccatattactgagtccttcataaaaatattggagaagaagttgctccgaaatcggatggtgagggcaactggcacatagttttttaaatctctcccagtattcatataggctccctccactgagttgtataatacctgagatatccttcctga

SEQ ID NO: 18419 - DNA, 399 bp, Glycine max
tcagtcttacacctctcattcttattactttttcaatattgaaaaagtcataacaatgaaaaatgaaaaggtcgtcttattcaaaaccccaaccaattatgaaatcccctatctcccacttcacacctcggaacgcaccgttcttatagagagaggcgctttcacatcttcttaggctggggagaggaaatgttcccattttttaggatactccggggaacagatatccagtggagatgacggggtggggcctgtagctcagaggattagagcacgtggctacgaaccacggtgtcgggggttcgaatccctcctcgcccacaaccggccaaaaaagggaaggatctttccctctgtgggtaggacaatcatgatcgggctagcggacccaaagctatg

SEQ ID NO: 18420 - DNA, 407 bp, Glycine max
  unsure (1)..(407): unsure at all n locations
agcttgctcactgttgcatgctccanatatcttgtgcatattggcgaacttctgaggctcttttggagggaaatatggggagaaaatgcaatccatcatgcattttcttaagaacttgcaggcatcacaaggagagttagagtagctagatgaggccatgatctttactgcaattataccaactatgaatcaagcacgtacaataaaacaatttactctcaaatgttggaataagtgcttacgatagattataggaacaattgactaatgctcacagaaacatattgatcttctttaatatttatataagcaataaggaaataattcattatagagagtacaaattgaatggtactctaattcatgagtacaacgtttaagataacattaaaatcaaaatacattac

SEQ ID NO: 18421 - DNA, 416 bp, Glycine max
cggaaaagctctgtcagcttcttcattccttgaaattgatccttgtctagtaaggcgggtagaggagcagctaaggacgcgtaccccttaatgaaacgacgacagaaccccgataatcccaagaaccctcgtagggcacacgtattccgaggagtaggccattgttgcaccgcggttaccttcgccggaactggttccaccctttttttcgataccaagtggcccagatattccacttgctgagttgcgaaagagcacattgataacttcatgacaaagctatggtcagctaagacttgcaatatctttcgcaggtgctcaaggtggtcggagaaggtctgactataaatcaaaatatcgtcgaagaagacgattacgaatttatgcatatacggtcccaaggtctgattcatagt

SEQ ID NO: 18422 - DNA, 406 bp, Glycine max
atttcgttttaatgtggctctggaccaatatacaaggtgataaagaatactggtatcctgaacttcttctattttcctttaaaactttctaaatatagcagaagattatttttcacggaacattgatagatgggaaagtgatagctgtgaaaaggctttcaaagaagtccaaacaagggctggatgagttaaaaaatgaggtggcactgattgccaaacttcagcaccgtaatcttgtaaagcttcttggctgctgcattgaacgagaagaaaatatgttaatttatgaatacatgcccaacctcagctgggactggctttcttttggttggaccccttacgattttattctaaacatcttagataatcagcatattgcgtatttgtagcttatacacttacagcg

SEQ ID NO: 18423 - DNA, 405 bp, Glycine max
agtctttgtattctggaatcatttatcctatcttcgacagccaatgggtgagtcccgtccaggtagtcactaagaaaaccggcctcactgtcataaaaaattagaaggaagagctgattcctactcgggtgcagaacatttagagagtctgaattgactataggaggctgaaccaggttaccaaaaaggaccattttccactgccattcattgaccggatgcttgaatgcttggcaggattatataggcgctttataagagattttagcagagtagcccttccactatctaacttgttgcaaaaggagatggagtttgactttaatgataaatgcaaagaggaactgactaccacccctatcattcaggcacctgattggacagccccatttgagctaatgtgcg

SEQ ID NO: 18424 - DNA, 392 bp, Glycine max
tcactagcttttgctagttctatcatctcaaaatacatagtggactgagctaagatagtctgtttctttgacttccaagaaacagccccaccaggtatgctaaatatatagctgctggttgctttggaatcatctgaaagagtgttccaatctgcatcgatgtatccttcaagtacagcgggaaaccttttataatgtaatccaagatttatggttcttataaggtacctcattaccctttcaatagcgtgtcagtgctccatactaggtctactggtaaacctgcataataatcccacaacataagctatgtcgggtctagtacaatcagtggcatacctaaggctgccaatgatacttgcttactcagtttgccgtataccttcaccagt

SEQ ID NO: 18425 - DNA, 391 bp, Glycine max
gttatgcaagaagcgtcttctaggcattctccaaatatcaaataatattagatagtacctgagccaaatagccccccaatgctgggccaatgatcaaacctatgccccaagctgcgctgacctaaaatcaaatctcactttcgattattattatggaaatgtagttctaaaatctactactataacagaggtggtgatgcttacagttgagagtcctataccttggtgttcttgtcgaaaaagttcataggcataggcctgttaaatagaggagttaggcacacagaagcttaaatggaagcgtgaaagcgatcgaacagttatatattcaattgtgcacacacattcaagacttgtattctgaaacatgagagtgctaactttgatacct

SEQ ID NO: 18426 - DNA, 398 bp, Glycine max
  unsure (1)..(398): unsure at all n locations
agtttccatgtttaattacgagcgtgtcgatatactacgggacacaatcagacatccgagtccaaagctattgtcgtttgacttttcttagagctatcgttttcgatttcgagcgtctcgatatattatagggctcaatcggacatccgagttaaaagatattgccgcttgactattcttagagattccgttatcaatttcgagagtctcgatatattacagggctcaatcgaacatccgagttaaaagttattgtcgttagatttttctcagagcttccgttttcaattacgagcgtctcgatatcctacgcgacacaatcggacatccgagtganaagttattgtcgtgtgactcttcttatagctgccgctttcaatctcgagcgtctcgatatt

SEQ ID NO: 18427 - DNA, 376 bp, Glycine max
  unsure (1)..(376): unsure at all n locations
tgcttgagcaaattcaaacgactataacttttgattcttatgtccgattgtgtcccgtattatatcgagatgctcgtaattgaaaatagaagctctgagccaattcaaacgacaataacttttgactcagatgtccgattgtgtcccgtagtatatcgagacgctcgaaattgaaaactgaagctctgagaaaaatctaacgacaataactttttactcggatgtccgactatgtcccgaaatacatggagacgctcgtaattgagaactgaagctgtgagcgaattccaacgacaataactttagactcggatgtccgatngagtcccgaaatatatctagacgctcgtaattgaaaacagaagctctgagaaaa

SEQ ID NO: 18428 - DNA, 436 bp, Glycine max
  unsure (1)..(436): unsure at all n locations
nttatgtgggatacccaatgtaagcatagtttccagttcattattgtaaaattgacaaccgctctagtgttagttttgcctaacccgagagaaccctttgaggtgtattgtgatgcatcaaagatgggtttaggaggagtgttaatgcaaagtgaccaagtagtggcctatgcttctagacaactcaagactcatgagaagaattatcccacccatgatctggagttggctgttgtgatttttgcccttaatatgtggaggcattacctgtttggctccaagttttatgtgtttagtgatcataagagcatgaagtacttgtttagttagaaagagccgaacatgcgtcaaaggaaatggttagagtttcgtaaggattatgactttgagcttagctaccatcccggcaaagccaatgtattggttgatgccttaa

SEQ ID NO: 18429 - DNA, 421 bp, Glycine max
  unsure (1)..(421): unsure at all n locations
atcttgagataagggtctatcattgaacctttgactatttatccatcttccttggggcttgactcaatggttcctttgaatcctttgtaccatggatccattggcaccattgtctccccactcaataaacgcctaacattggcaatgatttcccttggattataattgggaatgtaagaactgcagtctatcccaattcgttgactaccattgacaagaaccaatggtattactggtatgtacctgtaaggccagacaacaaaaattatgtttaagggacacatgcaaatgcagtagaaaagacaaacagactctatcaactgaaaaactgtgtntgaataccatacacaaacaagggctaaattgtagatgtttcactctcaaccgcaccatcaaagatactgacaaaaacatgttgatg

SEQ ID NO: 18430 - DNA, 396 bp, Glycine max
atcttgaaggtaaactagatgccttggttaacctggtaacccaactggccatgaataaaaaatatgcacctgtcgccagactctgtggtttatgctcctctgccgaccaccacacggacctttgcccttctgtgcaacaatctgaagcaattgaacagcctgaagcttatgctgcaaacatctacaacaaacatcctcaacctcaacagcaaaatccgccacaacaaaatagttatgacctctccagcaacaggtacaatcccggatggaggaatcatcccaaccttagatggtcaaatccttcacaacagcagcagcaacaacaacaaccttattttaaaatgttgctggcccaagcagaccatacattccaccaccaatccagcaacaacaaca

SEQ ID NO: 18431 - DNA, 416 bp, Glycine max
tcttagtctcagatgatgcaggtgagtttgtagctactctcatgctctcctctaaagactatagcataatttctggcgctaaactgctgagagctggaagccatcttgtcaatcgaatttccggcatcagcaggagtcatgtttccaagggctccaccactggcatcatatatcatacttctgtccatattactgagtgcttcataaaaatattagagaacaagctgctccgaaatcagatggtgagggcaactggcacatagttgtttaaatctctcccagtactcatacaagctctctccactgatgtgactaatacctgagatatcctttctgatggctgcgcgcctagaagcagggacatctttttctaagaatactctcttaaggtcatcccagctcgtgatggaccatgg

SEQ ID NO: 18432 - DNA, 398 bp, Glycine max
agctttgttggtgcgtagctcaccatcttttcatagtagaataccggtaatgtgtctactatcattatcatcatttttttttctccgtcattgaggtgccacttgagctgccaggtctctccacctttgggcgtattcttttgaaagattcgtgccacctttttgcacatgttctgtagttgcatcctatccgaagacattatactgacactgcctaacgaaggcaatcactaggtccttccaagaattgactcgggaaggttccaagttagtgtgccaagtaacagctaccccagtaagactttcttggaaggaatgtatcagcaattcctcatcttttgcgtatgcctccatcttccgataatacatctttagatggttcttggggcaagtagtcc

SEQ ID NO: 18433 - DNA, 404 bp, Glycine max
tttagcttggatttccttttagtagggaatctatccttcctaagatggagccaaacccagtcaccctcattaagaactagctcttttcttcctctattgcctttagttgaatacacctttgtttggttctctatttggttcttaaccctctcatgcatcttctttacaaattctgacctagattccccttctttatgtataaaagaagtgtccagtgggaggggaatgaggtctaacggtgttaggggattaaacccatagacaacctcaaaaggggactgcttggtggttctatgaaccccactgttgtaggcaaattctacatgaggaagatactcatcccaagacttatggctgcctttcagaagagcccttataagggtggataaagacctattcactac

SEQ ID NO: 18434 - DNA, 369 bp, Glycine max
ttagcttgtggtgcaaaagattacatctatacaaaggaattttttatggggcagcctccaagactccaccaagattccctgggtgaggtgggacatagtctgcctactaagagtaaaggtgggttagggatcaaagatttgattaaattcaatgaggctttgcttgctaaatgggggtgggagttggaaaataatcagaatcagttgtgggccagaattctattgtctagatatggtggttggagggatttgatttctgatatgaactgcagtttagactctccttggtggaaagacctcaaggatatcttcaagcagcagcatagcaacacaatttgcaatcacctgaagtggaagctgggatcggga

SEQ ID NO: 18435 - DNA, 403 bp, Glycine max
tgcatttattgtttgcccttaagatgtggaggcattacctatttggctccaagtttgaggtgtttagtgatcataatagccttagtacttgtttggtcagaaagagttgaacatgcatcaaaggagatggttagagtttcttgaggattatgattttgagctaagctaccatcccaacaaagccaatgtagtggctaaccccttaagtaggaaatccctacatatatatgccttgatggttagagaattggatctcctaaaacaatttacagactttatccttgtgtgtgaggttacccctaacaatgcgagactaggagctttgaggattactagtgagttgttaggagagatcagatatggccaaaaggctgatccttttctgaagactaagatagaagct

SEQ ID NO: 18436 - DNA, 389 bp, Glycine max
  unsure (1)..(389): unsure at all n locations
agttttccacattgaattcagcacctaatgtcatattagatgggaattgggtatcttaacataagagatttcagatggactttaatcctaatcccacagccgaccttttcacgagatctctacttaaccctttggttaaatgatcggccaaattatgctgagttctcacagccctacatccccaaattttgagataactcaaatttggtgtctttttgtgccaaagttcatatggcgtaaccttattccttttgttaggaattcggttcaacaagtaacaggctgccaacatagcctcaccccanaatccttcacttgaacctgaataggataacatgaaattcaccatttctttcaaggttctattcttcctttcggctacaccattc

SEQ ID NO: 18437 - DNA, 423 bp, Glycine max
  unsure (1)..(423): unsure at all n locations
tcacaaaagtgtgtatggcttgaaacattcaccgatgcagtggttcaagaagtttaatgagtttatgagcaactcaggattcaaaagatgtgacatggaccattgctgctatgttaaaaaatatactaatagttatgttatccttgttgtgtatgttgatgacatgttgattgcaggatctagtatggcagaaattaacaggttgaagcagcagttggcagaaaactttgaaatgaaggatcttggtccagctaaacaaatccttggtatgagaattctcagaaacatatcagaaggaattttgaagctgtctcaggagaaatatatacacaagttgcttgacaggttttaccttggagattctaagaccaggaatacccctttgggatctcatttgaagttntcaaagaagcaatctttgca

SEQ ID NO: 18438 - DNA, 394 bp, Glycine max
  unsure (1)..(394): unsure at all n locations
tgtcttaagaaaacccattccccaacctcaaaatgcctgtcagccctctttctgtcagcttggttcttcatcctattctgcgctcatcgcaactgatacttcaactgtgaaattgcttcatctctgtcttgtaattccctcctaaccgcttccacgtgaacctcccctggtaaaaacctacggagcatcggtggtttgcgaacatagacaacttcaaacggggtcattccagatgacacatgaaaattggtattatactaatattcagcccaagatagccaaaggacccaaattttgggttggtcagctagaaaacatctaananatgtttctaatcaccacttatgtttgcccatccatttgaggatgatatgctgtgttcatcttcagagct

SEQ ID NO: 18439 - DNA, 395 bp, Glycine max
  unsure (1)..(395): unsure at all n locations
agcttaaccaatatgtaaagcgataattaaaagtacacatcagaaattaaagagtgtagggaagaagaagacaaaaacaatatttatactggttcggccacaaaccgtgcctacatctagtccccaagcaacttgcggttcttgagatttctttcaaccttgtaaaatcctttacaagccaaagatccacaagggatgtactctcccttgttctctttgaataaccaagtggatgtaccctccacttgaactgatccacaagagatgtaccctctcttgttctcagtataacaatccccaagtagatgtaccctctacttgtaccacanaggatgtaccctccaatgtgttgggacaaagaattctcaggcggttagtcctttgaatctttgtaa

SEQ ID NO: 18440 - DNA, 402 bp, Glycine max
agcttatatacatctgcaacgtgaattctgttacaactgaaaagataactaactaattcagccaactaactaactatttctgttaaagctgtttatactgctaagagcccccctcaagctgggaatggatattcatcattcccagcttgttacaaaggggctgaaaggtggctggtggtaaagctttggtgaatatgtccgcgagttgcatggaagatgagaccggaaggagctttacgagacccgcaatgactttgtggcggataatatggcaatcgatctcgatatgcttagtgcgttcatggaaaacgggatttgttgctatctgaattgcagattggttgtcacaatataaggtggctggctgaataaatgctacaccaatgtcttggagaatatacg

SEQ ID NO: 18441 - DNA, 396 bp, Glycine max
agcttgtatcctccattgaagctcatcctagcaaagcagttcaagttgtattgaagtcctttttggctaaaatttacatgaggcagaagtagagtcaacttatggcgaggaccaaaattgttgaccatgcaatagaaactagagttctgatttctatctagtatctagagcagtatcatgttctgtggcttgcaattttttaaaaattgatgttcttatttgacaatcctttatttgatgcagaaaatccattatttgataatgatctttcctcattttttttctcatttctactactattctttatatccataataatcaggtgctttttcatcaggtttattaataacttgaaccctttccttctttgttttcatttataatgcatctaatcta

SEQ ID NO: 18442 - DNA, 412 bp, Glycine max
  unsure (1)..(412): unsure at all n locations
tctttgagaaaacttccttgagaagctagagcttatctacacacttcccctctcataactaagctcacctccttgaaaagcttccttaagaagattcctaaagaagctagaacttagctacacatacctctctaatggctaagctcacctccttgagatgagaagctagagcttagctacacaccccctataatagctaagctcacccccatgacaaaatacatgaaaatacaaaacaaaatccctactgcacagactactcaaaatgcctcaaaatacaaggctaaaaccctatactactagaatggccaaaatacaaggcccaaacgaaggagaaacctattctaatatttacaaagataagcggcttcatacttagcccatgggctcanaatctaccctaaggctcatg

SEQ ID NO: 18443 - DNA, 338 bp, Glycine max
tgtttcaacctagaggagacggaccattccaagtgttggagaagatcaacgacaatgcctacaagattgacttgcctagtgagtataatgtaagtgccactttcaatgtgtctgatctatctctttttgatgcagatggaggagccttggatttgaggacaaatccttttcaagaaggagggagtgatgaggacataaccaagggcaaggaccatgaagcacttgaaggtcccatgaccagaggcagacttaaacaagcccaacacgtcatagagacaaggctggtcatttgtatagctgccattgatgatgattgaaggcccaagtggagaaagatg

SEQ ID NO: 18444 - DNA, 406 bp, Glycine max
  unsure (1)..(406): unsure at all n locations
agcttgtatggtagcntaaggctatattcagaaggaaaaagtagactataatgaaatattctttttagtagtttgacacacctccacacgtgtttggctagccctagtggcaactcttgacatggagttaaagcaattcagtgccaaaactgtctttctccatggaagacaagaggaatacattatgatgttatgatttgaaggttttgaggtggaagcaaaggaaaattttgtctttagattgaagaggtctctntatgggatgaagcaatcaccaaagcaatggtgcaagagatttgatgagttcattatctcgcatgggtacattagaagtctttatgactcatgtgtttatcatagcaaggtggaggatggttcccacatatatctattactctctatggat

SEQ ID NO: 18445 - DNA, 423 bp, Glycine max
tatgctgcaaatatttacaatagacctcctcaaccttatcagcataatcaaccacagtagaacaattatgacctttccagcaacagatacaaccctggatggaggaatcaccctaacctcagatggtccagccctcagcaacaacagcagcctgctccttccttccaaaatgctgctggcccaagcagaccatacattcctccaccaatccaacaacagcaacaaccccagaaacagccaacagttgaggcccctccacaaccttccctcgaagaacttgtgaggcaaatgactatgcagaacatgcagtttcagcaagagaccagagcctccattcagagcttaaccaatcagatgggacaattagctactcaattgaatcaacaacagtcccagaattctgacaagctgccttctcaagct

SEQ ID NO: 18446 - DNA, 399 bp, Glycine max
  unsure (1)..(399): unsure at all n locations
cagcttgtgttgcaataagtggtggtattcatacaaagatgggtttgagcttaaatgtcattactagggggaattctacttttatgatgcttgagaagtgcccttgtatatcgatgtgctttttgtagtctggaatttgatgataggagctattcaagttgtcttattaatgaagaatgggagagaggacaaaatatgtgtgattttttgcgtccttttttttaaatcacagagttgatatctggttcctcttatccaacgtctaatttgtaattcatgcaagtgtggaaaattgaatgtntattgcttcaaaatttgagtaataaggatgagttgattagaacaatggaaattgatatgaaaacaaagtttgataaatattggagtgattatagcaat

SEQ ID NO: 18447 - DNA, 408 bp, Glycine max
  unsure (1)..(408): unsure at all n locations
agctttcaccccacccaccattaactcaccacatggcacacctcaacatcctgccttaccttctcccgaacctgtccatgtttcatcttcttctcaatcacttgcaatggaatcactctctcggtcttctacgccaactatatctcaacattccatggtcactcgtggaaaagctggaatattcaaaccatagaaattattctctgtgagcaagcatccaatttttccagttgaagaaccaactagtgtatccaaagcactacaatgtcatcaatggaagcaagccatgtcagaagaatttaccgatctcatgaataatggtacatggtctctagtccncagtcaaccacattntaatgtcattggaaacaaatgggtgtttcgttttaaaagaaatccaaatggatc

SEQ ID NO: 18448 - DNA, 419 bp, Glycine max
tgcctaattaacctgaaatttataggaaatgattattaaacacacaaaatagaattactaagtatttgttacctatctttaactaaaagaacttatagcactacaaaataaccattaaatgaaggagtttaatacaatttacataagttttatacacaaaagttagttgtattcatcgactaacacacacacacacaatgtaagtgaaaatcactattacaccattaagtagcttcttactggatcattttatcccaaaatccaccattggatagaaatgtcttgtcatagacatcatgtgtataaagtgttccattaatccaaacttttgtggtactttattaatatacaattaaatattaagattaacatagtatattagaatcattttattacttttattgttcaatttatatgag

SEQ ID NO: 18449 - DNA, 378 bp, Glycine max
tacaatggttgtatactagcacaaaaatgtgccattttaatcataatgctcattgattttcattttgatttctttgtgtgtgtttatatcctccattacaatgaattgttctactaaagtttttttttttttttttcatttgcaagcaagaatacatatgccttttataatttgctcgattatattttttgtgaccaaaacataggctaccatgcaagggttgcaaggtccccaaccttggagattgctactcttattgaagggacaatgtattttatacagaagacatggagatgtattggagccattcaaatatgccggctatcccatgttgctgagtgctgttactgtggacaaggatgacaacaattttctttc

SEQ ID NO: 18450 - DNA, 388 bp, Glycine max
  unsure (1)..(388): unsure at all n locations
tatctcagaggacactgacctgaccttttttagngttctatgngatattctaattgctcttgtaaattgatatcttcatacctgcaaattaatatccacttataatagagcaatgatggatatataatgaagtactcatacatgtaggtaactgtaatttgaaattatttaaacgttctttatcatatataaagtaattctaatttattttttgtataaatatatatttcaattgttatgttatggtttacttcttaaaaaaaaatattttaataaatatctacgtacattcgtgaatatacatgaatagntgtactaatactagggaatgaccaaggattactatttactacccatttatatacaccgtcacatcttagtaaaaata

SEQ ID NO: 18451 - DNA, 381 bp, Glycine max
  unsure (1)..(381): unsure at all n locations
agcttattttttcttgttggaaggaccaagttaaaaaccttttgaacatttnttccagcttgctgatctatctcctctggtttccttcccttctcttttggtttaatctcagccacccctgactcttcactntcagataaggtagctgaagttaaagaatcaccttttaatttaatttgctgaggagaattgccagccaaacgtctgacaaatcccaacccaagatcattatcagtcacatcagatacagaatctaaagcaggggagtcatcattacttgatacaatgggcacaaaattggttcttctggcagtacgggagctctttngtggcctctgccagtggacaacaggtggggaagatgatcgtgcggatgccaca

SEQ ID NO: 18452 - DNA, 418 bp, Glycine max
agcttcctattttattaagttcttcctcaaaactgtcctaagcaaagttcccaaagtcctattaacaacttccgtttgcccatcggtttgtgggtgacaagtggttgaaaataacaatttagtgcccaacttgctccacaaagtcctccaaaaatggcttatgaacttagagtccctatcactaacaatgctccttggcaaaccatggagtctcacaatctccttgaaaaacaaatcagccacatgggaagcatcatcaatttttttacatggaataaaatgagccatcttagataacctatcaacaaccacaaaaatggaatctctaccattgcttgttgttggcagccccaaaacaaaatccatggataaatcattccaaggatactccggaattgcaatggatatacaatcatga

SEQ ID NO: 18453 - DNA, 400 bp, Glycine max
agcttgaattggacctcagtgtgaaaagttatgaccatttgaatttctcgggagcttccgttgttcattttcgagcgtctgtatatgtgatgcgcctgaatcggacatccgagtgaaaagttatgaccatttgaatttctcgagagctttcgatgtttaattttgagcgtctcgatataatataagcctgaatcggacatcagtgtgaaaacttatgaccattttaacttctggagagcttccgttgttcattttttagcgtctctatatgtgatgcgcatgagttggacatccgagttaaaagttatgaccatttgaatttctcaagagctatgcgtgttcaatttcgagcgcctcgatatattataagcttgaatcggacctgagtgtgaaaagtatg

SEQ ID NO: 18454 - DNA, 422 bp, Glycine max
  unsure (1)..(422): unsure at all n locations
agcttgacatgttctgtttcaagtgttgctactggtgtagggacttcaatttgcttgccagacctcaaggtgatggcactcacatttttcagattctgcaccgtttgtgaaggcaatttgtcagaatattgggactgagcttggttcaactgagtagccttctgccgtatctgatttgtcggactctgaatggaggctcttgtctcttgctgaaatttcatattctggatggtcatttgcctcactaactcctctatggaaggttgagaaggggcctcagatgcttgttgtctttgttgttgctactgcattggaggaggaacatatggccttcttggaccaacaacattctggaagggagggataggctcgtgntctactgatgttgttgtggaggattttcccatctcacatttggatga

SEQ ID NO: 18455 - DNA, 427 bp, Glycine max
  unsure (1)..(427): unsure at all n locations
agctntctcttttgtgcaactatctcatcctctttttcaggtgtagaatgaagcttgacaggttcaggtgcaggtgctgctactgatggaggcacttcaaattgtttgtcggacctcaagatgatggcactcacatttttcggattctgcacagtttgtgaaggcaatttgtcagaattttgggactgagcttggttcaactgagtatccatctgccccatctgattntttagactctgaataaagactctggtctcttgctgaaattgcatattttggatggtcatttgcctcactacacttctaaggaaagttgaggaggggccttagttgcttggtgtctttgttggtgttgctattggtgctgcattggaggaggaacatatggcttgctntgaccagcaacattctgganaggagggacatg

SEQ ID NO: 18456 - DNA, 457 bp, Glycine max
  unsure (1)..(457): unsure at all n locations
actcgtccgggatcttaagtcaccgctgctgcagctatccatgctttttggccgtcgttgcattggatattttctcaaatgtatcttcatccaccgattgataaatgagaaagagagctttcttgtctctctttcttgactccttcaacgtctcatttacaccttggcttagcgaggcttcatcttgctcctcgaagccattctctacgatatcccacacatcttgagctcctagtagcgccttcatcttgatactccaattatcatagttgttctttgagagcatcgacatttggaaaggaaaacctccattcgccatcttttgaggatcttgaagctctgataccactttgctggatataaggctctttatgtttacgacaaatgtttacgaatattggagactntgaatagacatttgataggaacgagaattctttatggagaagagaacttt

SEQ ID NO: 18457 - DNA, 388 bp, Glycine max
  unsure (1)..(388): unsure at all n locations
agcgtgtttatttttatatgtagaggcattacctattagggtactagtttgaggagcctagtgatcatgagagcctgaatactttgttggtcagaaagaagttaacatgcctcacacgagatggtttgagtgtactgaggattatgatcgtgaactaagctaccatcccttcaatgccattgtagcggctaaccccttaagtaagagatccctacatatatatgccttgatggttagagaattggatctcctatagcagtttagagactntatccatgtgtgtgatgtacccctaacaatgcgagactaagagctctgaagattactactgagtagttaggagatatcagatacggccaataagctgatccttttctgaagactaaca

SEQ ID NO: 18458 - DNA, 419 bp, Glycine max
  unsure (1)..(419): unsure at all n locations
agctttgcttctactttttatacccactaaacgtcaaacaagattcccttcatgacaaaaaaatgttctctctaatctctagtcatcacaaatgtagagagacccacataatagttaagggagtgaaatcttatttctctcatcttccaaaacattaaagtacatctgagagaagcttcactatgactcattatttatatatttattatttatgacaatcataggtttcaagatccggttgattttctatcattgatcatctaagaaactcttanaatttttacatgtgatatcggaacatagattatcaacattatgattctctaataatgatttattctttctcaattatgaatgaatcctaattatcaaatgtaaaaatcttattttcttctgcggctatgtatgatatgttatta

SEQ ID NO: 18459 - DNA, 414 bp, Glycine max
  unsure (1)..(414): unsure at all n locations
agcttgttgttaattcaaacaggaataactttgtactcggatgtctcattatgtcccgtaatatatcgagatgcttgaaattgaaaacggaagctcgtagcatatgcaaaacacaataactttttactcggatgtccgattgtgtctcgtagtatatcgagacgctcgttattaaaaacataacctcgtagcagattcaaacgaaaataactatttactcgaatgtttgattgtgtcccatagtatatcgagacgctcgtaattgaaaacagaagctcttagaagattttaacgacaataactgtttactcggatgtccgattgtgacccgtaatatatcgagacgctggaaattgaggacataagctcttaagaaattctatagacaacgactntatactcggatgtacgatt

SEQ ID NO: 18460 - DNA, 432 bp, Glycine max
agcttaccaatatatattcaaatgaagtttatgtttctttgtgttctatatgtgtgccctaagcatttaaatttattgacctggaggatatgatcacttcatcatgtgttgattagcatatcaatagtttgcatatggtcactgacaatgctttattccaataactaaaatgaagaataacttcatatgacttgtcctgccagtattgttgatgttgagatcaagcctgtggaaggtgaactttctaaatcactgttggaaaacaacaaatgctatttactggactgtggtgctgaggtgtttgtctgggttggtcgtgtgacacaagttgaagaacgaaaatcagcctgccaagccgttgaggtaaggccattgtagaatctataatctaattcatttccatttgtttgttaaattggattcattaattct

SEQ ID NO: 18461 - DNA, 432 bp, Glycine max
  unsure (1)..(432): unsure at all n locations
agctntgacctcatttctattattctctattcttgggtcattgtatacaagttgggcaagcgtggtcttacccaacccgtccatgcccacgatagaaagtactgacagcttgttatcagtgttagaagtgagccagttaatgataatttctttatcaccctctctgccacaaatatcactttcaaccactgaagatgttgattgtggcactttaccaccagatcctgatccaactacaagatcactaggctttttcaaacctagattatccatccggcttgcaagtacaggtttgagattcagattgaggttgaacttggagtctggagtgttgtatttcatccaagacatcttctacgtcaagcatggcaactntgagcttaataagccagtctctcacttgcatatttccaaactgtttttgttcagcat

SEQ ID NO: 18462 - DNA, 428 bp, Glycine max
  unsure (1)..(428): unsure at all n locations
agcttattgtgtaaattgttcttatttcttaccacatagatacaaggcatgggtggagtatggattangagtgtcaaactaatgaattggataatttttttgaattgaaatggatagccaatccatttatgatccattaataatgtattgcaaaaatctaatttatccataacttatttcatagaaaaaggtccatccattatattttatttttttcaaaacaatatttttctaaaacaaagtgtaatatttgtacaaattcttacactgaaataccatagaatccaatatttatctcataaagacctatgtccaagtaatgaacttggaactacttgattcactggattgcaaaatatgttggatggttcattatctatccaataacaaatggtaatccaattcaactaatgtanttaagtttattt

SEQ ID NO: 18463 - DNA, 442 bp, Glycine max
  unsure (1)..(442): unsure at all n locations
tgtagggttaaagtctcatgattgtcacgtgctcatgttacaattgttagccgnggctatacgagacatcttgccaaacaaagtcaggttagcgataactcgcctgtgctttttattccatgctatatgtagcaaagtcattgatcctgtcaagtttgatgagttggaaaatgaggccgcaattatactgtgccagatggagatgtattttccccctgctttctttgacatcatgattcacttgattgtgcatctggtcagagaaatcaaatgttgtggtcctgtttatctactgtggatgtacccggctgagcgatacatgaagatcttaaaagggtatacaaagaatctatatcatccagaagcatctattgttgagaggtacattgcagaagaagccattgcaatttgttcataatacttatagaatgctaaacctgtt

SEQ ID NO: 18464 - DNA, 392 bp, Glycine max
  unsure (1)..(392): unsure at all n locations
gcttctcttggtaagaatgtgggctctatttcgtagttttgcatggncactagcagccatgttctttattaattccatagctccttctggggtcttcaatttgatctttctccctgcagaagcatcaagaagctgcttggactgcggtctcaacccatcaataaaaatgttgagttgtatcagatctgaaaatccatgagtaggtgtctttctcaataagcctctaaatctttccaatgcctcacttaaagattcatctggaaattcatggaaggatgaaatggcagctttcccttcagctgtcttagactctgggaagtacttcttcaagaatttctcaactacttcatcccaagtcttgaggctatcttctttaaacgaatgaaaccacc

SEQ ID NO: 18465 - DNA, 426 bp, Glycine max
  unsure (1)..(426): unsure at all n locations
tgtagggttaaagtctcacgattgtcacgtgtagtattttataattgncagncgaggctatacgagacatcttgccaaacaaagtcaggttagccataactcgcctgtgctttttcttccatgccatatgtagcaaagttgttgatcctgtcaagtttgatgaacttgaaaatgaggccgcaattatactgagccagttggagatgtattttccccctgctttctttgacatcatgattcacttgattgtgcatctggtcagagaaatcaaatgttgcggtcctgtttatttgcggtggacgtacctggttgagcaatacatgaagatcttaaaagggtatacaaagaatctatatcatccagaagcatctattggtgagaggtacattacagaagaangccattgaatttgtttggaatatattg

SEQ ID NO: 18466 - DNA, 351 bp, Glycine max
  unsure (1)..(351): unsure at all n locations
cttctgaagaacctccagatggacatcatacattctgcttacttcatncnagatatgcagctcaaagccacattaactgcgcaatgtcttggaactacaaacaccttaagggcattgctaaagacaggtaagtcgcattacttgtaccattgtaagttcaatattcactacttctcttttgtctattccatggttgaccaaaaaaatattgcaaaatttcaggttgattacatattaggtgcaaacccattaagaatgtcttacatggtaggctatggtccttactttcccaagagagttcaccacagaggatcttccttgccttcaatagaagctcatccacaaaccata

SEQ ID NO: 18467 - DNA, 393 bp, Glycine max
agcttgtggttttctcgcgtgtcattagtcaactctgatttttattgaataaaacattattttgggcattagatcaaagtatctgtcgttcttaaatatttttaaactaaacaaattatacaataagttttttattttgtacagaacaagaagtggctaaaaatattattatttttttactaaaagaagttgttaaagtaatagaaatcaagttattatcattcagatgttaaaaaaaaatcttcaaattaaactcttgggaacatttggttgagttgagctgaatttttttcttatttgaaaattatgatttcagaagaatttgattattgaaaattatgattcatgtataaatatatttgattagttctaacataattattggaaattaaa

SEQ ID NO: 18468 - DNA, 419 bp, Glycine max
  unsure (1)..(419): unsure at all n locations
acactgtgctccgcccaattcgncaagcaattcatcattggtctgaatggggaagcggtccttgatggtgagtgagttcaacgcacgataatctacatagaagcgccacgttccgtcgtgcttcttgaccaagaggaccggagaagagaacgggctgttactangttgtatcagccctttctgaagcatggtctcgacttgctgctcaatttcctgcttttgaaaatgtgggtatcgatacggacggacattcaccggagtagcttgaggtaaaaggtgaatatgatggtctgttgtgcgttccggtggtaaggtttgcggttgtcggataaggatattatatctggtgagcaaagcttgaatggatgggtccacgggttcagatgaagtcgaatgttctttcgagaggactgtgatat

SEQ ID NO: 18469 - DNA, 396 bp, Glycine max
  unsure (1)..(396): unsure at all n locations
tagccctagaggggatggaccttntcaggttttggttatgatcaataacaatgcctataggttggacctcctagaagagtatggagtcagcaccacttttaacatttctgatttaattccttttgcaggtggagctgatattgaggaggaggaactaacagatttgaggtcaaatccttttcaaggggaagggtatgatgcaatcctccctaggaagggaccagtcactagagccatgagcaagaggctccaagaggattgggctagagttgctgaagaaggccctanggttctcatgaacctcagggtagatttttgagtccatgggccaagtttgggtccaattctctttgtacatattagactangatgtcattatatntgatccttgtattt

SEQ ID NO: 18470 - DNA, 437 bp, Glycine max
  unsure (1)..(437): unsure at all n locations
tctanactttgtacaagaatgaagctctgataccacttgttagacaagtggcctcagatatcttaagaagggggggttgaattaagatattccaaactgtttcccctaattaaaaatctatttctctttttactcaagttatgaattcccttaaagacaatcttcttaaatattaattcaaacgaagcaacttgaatgtgaatataaagcaataataaataaaagagattaagggaagagaaaatgcaaactcagttttatactggttcggccacacccttgtgcctacgtccagtcctcaagcaacccgcttgagagttccactaacttgtaaattccttttacaagttctaaacacacaaggacaatccttcctttgtgtttagagatcctttacaacaagagactcacagtctcttaatccctttagagaatga

SEQ ID NO: 18471 - DNA, 417 bp, Glycine max
actgtcaatttcagcgtctcgaatagttcggttttattcagacatccgagtaaaaagttatcgtcgtttgaatttggtcggagcttcaacattcaatttacagcgtctcgatatatgacgggactcaatcagacatccgagtaaaaacttattctcgcttcaatttgctctgagagttcagaattgaatttcgagcgtctagatatattacgggactcaatcaaacgtctgagtaaaaagttattatcgtttgaattagctcggaacctcaaaattcaattttgagcgtctcgatatattacgggactcaatcacacatctgagtgaaaaagttattgtcgtttgaatttgctgaaagcttcaactttcaatttcaagcgtctcgatatattacaggactcactcagacatccgagt

SEQ ID NO: 18472 - DNA, 432 bp, Glycine max
  unsure (1)..(432): unsure at all n locations
tggaatgggaagaagccatcaacaaagcacctaagggtctttggatctatatgctacattcatattctagacgtgaagaggcacaagcttgaagacaagactatacgaggtatcttccttgggtatagcaatatctctaagggctaccgtgtctacaacttgcaaactaagaaactcatcatcggtcgagatgttgaagttgatgggtacgctntttggaattgggatgaagaaaaagtggagaagaacgttcttatacctgctcgactatctcaagaagaagctgaggaagaagatccaggtgaaccaccttcacctctaccataacaacaagatcaagaactagcatcaccagagtttactccaagacgagtaagatctttggtggacatgtatgaaacctgtaactnggtcatacttgaacctggaagc

SEQ ID NO: 18473 - DNA, 436 bp, Glycine max
  unsure (1)..(436): unsure at all n locations
tctcttggaagttcatcattggattggacttctactgtatgatcttcattgnttcctttatcatttccttttgaatcttgttcatcaatattcatatgttctaaagaatctgcaatatcatctagcatattctttcttgacaagatagcattagattcatcacaggtaacatgaatggattcctcgatattcatagttcttttattatataccctatatgctttgctttgtaatgaatatccaagaaaaatgccttcatcagattttgcatcaaattttcctagattatctttaccattattgagcacaaagcatttgcaaccaaaaacatgtagatgagaaatattaggttttctaccattatataactcatatggngttttctttanaatgggtcttattaaggccctattcatgatgtaacatgcagtattga

SEQ ID NO: 18474 - DNA, 382 bp, Glycine max
tctagctttgtatggtagaaggggtagaacacccgtatgttgggtagagcccggagaaggcctcaccttatgaccagaaatggtacagcaaaccactgagaaagttaagttaattcataaaaggataagaactgctcatagtaggcagaaaagttatcatgataagaggaggaaagatctggaattcgaggttggtgatcatgtattcttgagagtcactacatggactggggttggtcgagcattgagatcccgaaaactcacacctcactttaaatgtcctttacaagtcttaagaggactgtgcctgtggcataccaaagttgactacccccatctctttctaatattcacaatgtcgttgatgtgtctgaacttcgta

SEQ ID NO: 18475 - DNA, 386 bp, Glycine max
  unsure (1)..(386): unsure at all n locations
agcntttggcggcaaagggtaagctatcaagcctcaagcatgttgatgttggtgcttatgaacattgtatccttggaaagcagaaaaaggtcagtttctcaagggtagggaagactctgaaagctgaaaagctagaattggtgcacacagatgtttgggggccagccccagtgaaatctgttggaaactcacgctattatgtcacctttatcgacgactctaccagaaaggtatgggtttattttcttaaaaataaatctgatgtgttctctgtgtttaaaaggtggaaaacagaagttgaaaatcagacaggtctaaaggttaaaagtctgaaatctgacaatggtggggagtatgatagtcatgagtttaaagacttctgttca

SEQ ID NO: 18476 - DNA, 389 bp, Glycine max
taagcttatgctactgcatttgaataagtacatttataagtttatttgcttaaaatcaaatgaaatgtatgggattatctcgcttgaggtttcctttattgtaactcatcactttgtataatgctagcaatttcataaaggtcaaaatgcttgtggttgaccataacttcttattgcagggcactatgttcccgatgttattgtggctgcattaattggaattgtaactggttggtgcacaggccctctaatgcccatatgtgggcattggttagccaggtcatccatcttgcaatttctgctacatcttagtgtgtttgctttggcattatcatctcagttctttccttacactatgtctgcgcctaagaggattgtttttcagcata

SEQ ID NO: 18477 - DNA, 379 bp, Glycine max
  unsure (1)..(379): unsure at all n locations
nntgggctgaggacctatataacagttccaatgtttttgtttanggagttttttttcggagaggagaataattctaggattttagaatttcagtttttattactgttcatgcacactgttcacgtagaataaaattcattttttgcaaatcatctctaatccatacattttttaatattatgctctttttattttcttttgatatactttgtgctttaacgacttgaattcaatatgattttgtttatcaattatttttggatttgtacattacttatacgaaattttataagtttctttttttagttagtatttcactaggttttaaaataattaattaatcaaagacgtctntaaatagacttttaaataggctcgt

SEQ ID NO: 18478 - DNA, 386 bp, Glycine max
cgcttatgaagatacaataatactttttgcccaagcatgaagcccttcttaattatcatgctatcatggaacttcttggtctttacttagaagaacttggcattctcatacgcttctatgcggatctcatctaactcactcaagtgctactatctctcctcaacagcttgatccatcgagaagatgcaggtcttcactgcccagtatgctttgagctcaatctacactggaagatgacatgcctttccatagacaacgcgataaggagacattcctatgggcgctttgtatgcaatcctatatgcccaaagagcatcagccatcctagtgcgtcaatctttactgcttggctgcacaatcatctctaggcttctcttgatctccct

SEQ ID NO: 18479 - DNA, 397 bp, Glycine max
  unsure (1)..(397): unsure at all n locations
ctgcagcttttagncattcttgtagnagcnccaacgacatggattctaaatctttggtttcctcgactgccataacaatgtgctcaaatttaggatctaacgagcatagtatcttccccatgattcttacatgctctaaattctcaccatgtctttatacttgaggtgaaacaacgataattcttgaaaggaactgggaaatggacgtcaactctttcatatgtaatgatatagactctgctatgagcacatgcacagaaacgctctttagttgacattggttatcccagcctaccattttacggtggcgcgaacaggccaatatgatgacgtcgaagcgttagtctccaagggagaaaactagcagagtcaccaccaacgtgtatttgacgaaaac

SEQ ID NO: 18480 - DNA, 374 bp, Glycine max
  unsure (1)..(374): unsure at all n locations
aggcacctgctgagncattttaatttttacggctngacnggctcaaagacaatgatcatactaccagtgacacgatggataatcgcataaaagggcttcccagaggtcttgcaatggataaagacagggttaagaagcaaaacctctgcaaatcctatagccttctgcaatgcagaagcacttggtgcagtgaatagagtttttatgtcagtgccaataccaagggcagggtggtcaccaacactggggacagcatggctcaccatggtcagcatttcgggtgcgttctcactgtatgcaatgaccttgcatgttttctcatctaaggccaacaagcacccaagaagctgaatcatcttgcctttctgcatgtg

SEQ ID NO: 18481 - DNA, 358 bp, Glycine max
aggaatccgaggacctctttagatttggttatgaagaccgcaaataggctgttggagttaataaattcaccactgatttctttggaatacagcttttcctgaacaaaatggcaatcaatctctacatgcttagttctcatgacatacaagattagacgcgatgtgaagagctgcctgactatcagaatacaacttcatctgtggaacatcaaaaaattgtaattcttgaagttgtttaatccacacgaatacacaagtaacaagagccatagctctatattctgcttatgcacttgatccagcaacaacactctgttgcttgcttttccaatagacaatattcccaaagaggatacac

SEQ ID NO: 18482 - DNA, 441 bp, Glycine max
acctctcacaaaggagaagacaaagtaaataatgtgtgtctccaaactcttaagaggtgagtttgaatccttacatatgaaagagtcggagtccatttctgattatttttcaagaattcccgtagtttcaaatcaactagaaagaaatggtgagaagttaaaagatgtaagaattatggagaagatactatgctcgttagatcccaaatttgtgcacattgttgtgacaatcaaggaaaccaaagatttagaaactatgatgatagaaaaacttcaaggatcactgcaagcttatgaggagaagcataagaagaagcaaaagatcactgagaaaatcttcaagatgcaactaaaggagaacgaagatagtcgaggaaatgagagaagtcaacgaggtggaggtcgcggctgaagataggtacgacgtggaaacagtggacg

SEQ ID NO: 18483 - DNA, 385 bp, Glycine max
ttaagctttttaatattattttcgggcgctcgagcgaaacccattcttaccccaagcttttaataatatggccgcgatctgtcattacgtgcgactatctccactatagaaagaaaaaggagaagaacaagcaaatccacacatactattgtgataaatactagaaattatggctttctacatatacatatatacgtcattacaacgatacttatcaactgtagcaaagaatgaaacttcttagaagtcataatatgaagaaatcaatatgtctagatacccccttttctatggacaaaagagctaattgataaaggaagcatcgtactgatccattaacgcgcgtttgaaccgatacgataagaactgcttacttatctcatga

SEQ ID NO: 18484 - DNA, 391 bp, Glycine max
tcaagcttatgctgcaaacaattacaatagacctcttcaacctcaacagcaaaatcaaccacagcagaataattatgacctctccagcaacagatacaatcccggatggaagaatcaccttaatctcagatggtctagccctcaacaacaacaacagcagcctgctccttccttccaaaatgttgctggcccaagcagaccatacattcctccaccaatccaacaacatcaacagccccagaaacagcaaaaagttgaggctcctctgcaaccttccctcaaagaacttgtgaggcaaatgactatgcaaaacatgcagtttcaacaagagaccagagcctccattcagagcttaactaaccagaatgggaaaatggctacacaattaaat

SEQ ID NO: 18485 - DNA, 340 bp, Glycine max
agccttttgagaacggccagagaccagaccacttaggtactccaccaagcattccatattgcacgacgtgggactaaggcataccataacaccccagtccctatcactagctgacgactgcccaaactttttgagctatatataagccatatctcctatcgatgtgggactaaaccaccacacgtgcggttgcaattgaggcaaccgccacagaggccacaactaaggtgggctagggatgatagcaatgaacgctgatgtgcaacactctccctcgtgcacagagataccagcatggagagaggcacatgcaggaggcccaacaacagatctaggataa

SEQ ID NO: 18486 - DNA, 425 bp, Glycine max
  unsure (1)..(425): unsure at all n locations
tctaactntatacaggaatgaagctctgataccacttattggtttagtgacctcagatatcttaagaaggggggattgaattaagatatcacaaactattccccaattaaaaattctacttttaacttaacccaacaatccaagattccttttaaacaagaactcctagataataatgcaaattaatcttactaaataaaaaataataagcaataaacagtaaaggagtttaagggaagagaaaatgcaaactcagatttatactggttcggccacacccttgtgcctacgtccagtccccaagcaacccgcttgagagttccactatcttgcaaaatccatttacaagatctgaaccacacaaggacaacctttcttttgtttcagatttctttcaacaagaggccctcggtctcttaatccct

SEQ ID NO: 18487 - DNA, 338 bp, Glycine max
agcttttaaactttgtacaataataaagctactgaatagaagtggcctcagaaatcttaaagctctgataccacttgttggacaagtggcctcagaaatcttaagaaagagggggttgaattaagattttacaaactattcctgaattaaaatttctatatagattttgacccaagtcctaagattccttttaaaatgaatttctaaataataattcaaattaaacttactgaatagaaataataagcaacaataaataaaagagtttgagggaagagagaatgcaaacacagttttatactggtttggcaaagtccattgcttacgtccagtcccca

SEQ ID NO: 18488 - DNA, 410 bp, Glycine max
  unsure (1)..(410): unsure at all n locations
ntaggaatgacttggattatatccttggtgttctgcatttggtataatccatgcttcaatttagccaaaccaatcatcttcaaggacttcatttcctatatttggcaatgagaattggaaaaagtgagagagtattttagtgaagacaaaagcttggagattgaaataagattgaatttgaagtttggaacataaagaacatcatgtataatgaaatgtggcgataactgcacatttcctgaaatatgagcaaaaacaatggaaccattgggtaagtggatacgcacaggttgtattttggaaaagcttacaaaattatcaaaggaacatgtaatgtggtctgtggccccagagtcaataatccagggggtgcaattagaaaaacaatgtgcagtgtgtgcattagacaa

SEQ ID NO: 18489 - DNA, 357 bp, Glycine max
  unsure (1)..(357): unsure at all n locations
tggcatccaaaaccattgtggaagcaatatgttgagcttcagccattttggttttctgtagaaggtctcttatgtatttactttgagttagaagaatagagccatcaattagagtcttgacttcaaatcccaaaaaatagtccagcttcccaagttgtttaagtgaaaaattagaatgaagtttgataataaattgttggactaagttgatagaactaccagtgattataatatcatcaacatacaccaaaagataaatgatatgagaggtatctttgaaaacaaagagagatgggtcacacttgcttgcagaanaaccaagatgcaagagagtagattntagcctgtcaaaccact

SEQ ID NO: 18490 - DNA, 388 bp, Glycine max
actcagcttctatagaaggtcgtcctattttctactttgcttacctctcaatgagctggtgaagaagaatgtggcatttacctgaggtgaaaaacaagagcaagcctttgctttgctcaaagaaaagcttactaaggcacctgttctagctcttcctgacttttctaaaacttttgagctaaaatgtgatgcctctggagtgggagttggagctgtattgttacaacgtgggcaccctattgcttattttagtgaaaaacttcatagtgccaccctcaactaccccacctatgataaagagctttatgccttaataagagccctccaaacttgtgaacattaccttgtttccaaggaatttgtcattcatagtgatcatcagtcactt

SEQ ID NO: 18491 - DNA, 306 bp, Glycine max
ctcactatatggcgaatcgagctcgcacccggtgacccgtctagacgacacctgaggacatgcggctacgagagctcgattgcgccctatagagagccgtacgtcaacacactgatcgctgttttactgcttaaagactgatacaatcataacttcacacaacatactagccttacacatcatgcgtatttcctcagctgcctaattagcgaacatgctcacactaatcgcccttcgctaactgtgcgcattctaaatggcaaacctctcctgacacctgatttaatgattacgcctacgcgaacc

SEQ ID NO: 18492 - DNA, 236 bp, Glycine max
cgtgctctattgcgccatatagagagccggacgtcatcacggtggtcgctgttttactgcggaaagagtgatacgatcatgacgccacacaacatactagccttgcacctcatgcgtctttcctgaggtgcctaatgagcgaacatgctcacatcgatcgcccttcgctcactgtgcgctttctgaatggcaaacgctgcctgacgcctgctttaatgattacgcctacgcgaagc

SEQ ID NO: 18493 - DNA, 420 bp, Glycine max
  unsure (1)..(420): unsure at all n locations
tgtagaagcaaaaagccagttatggttntcaaggtggatttttatattgttctacgactcagtctcatggggtttcttggactacatgctgcaaagaatgagattctgtcccaaatggagacactggatttcaacctgcctcaattcagcaaccatctccattcttgttaatggcagccctacaaaggagtttgctcctactagaggcttgaggcaaggggatcctttagcccccttacttttcaatatagttggagaaggcatcacaggattgatgagggaagcagttcagaaaaacttatacaaaagttacatggttgggaagacaaaggaacccattaatattttacaatatgcagatgacacagtctttgtgggtgaagctgtttgggagaatgtcttagtttgatagctatgctc

SEQ ID NO: 18494 - DNA, 422 bp, Glycine max
  unsure (1)..(422): unsure at all n locations
ntaaaagaatggctaagattttgttaaaacataagctcttatacaatgaaggaaagctggagttgctgcacatgatgtccaacgttatgtcaaagaataagatcgggctgcacaatgcacaacgcatgataaagtgtcaaatgaagaattgaagctgcaggattcacgatgtcggatacaatgtccaggacatcctgcccgaaaatactggagttgctgaaagcattgaagctgcatgatccacgatgtcggacacgatgtcctgacatccggcccgaaaatactggacatataaatctgttatatctttaacagattattgtgcagttagcaagagatgagatgatctatctttaggaacgaattanaagataattaaagctcgtattacaaactacaagagtcgttcagggatgaaagat

SEQ ID NO: 18495 - DNA, 390 bp, Glycine max
  unsure (1)..(390): unsure at all n locations
tccttgagaatcttctttgagaagcttccttgagaaactagagcttagctacacatacacctctaatagctaagctcacctccttgagatgagaagctagagcttagctacacacacccctctaatagccaagctcacccccatgccaaaatatatgaaaatacaaaaaattccctactacaaagactactcaaaatgccctaaaatacaaggctaaaaccctatactactagaatgaccaaaatacaaggctcaaaagaaggaaaacctattctaatatttacaaagacaagtggacccaaccttggcccatgggctcagaaactaccctgaggttcatgagaatcttagggccttcttcagcagctctaacctacntcctttggagcc

SEQ ID NO: 18496 - DNA, 424 bp, Glycine max
tggctaaggctagactgcaatattcagcctctgtactggaccttgcaacaacagactgtttctttgaccaccaagaaactaaatttgagccaaaaatgatggctgcaccagaagttgaccttctgttgtcatcatcacagtaagcattaactgtaaagggaggtccagtagaaggagggagaatcttccaaccaaagttgatggtaccagctagatacctgagaattcgttttactgctgcccaatgctgctcagttggatctgacatgtactggcagactttgttaacagtgaaactgatttcaggtcgagtgatggttgcatactgcaaggctcccacaataaacctgtctagagtggggtcaggcaaaggctcataccctgacttagttaacttgaagcctcaaccattggagaagaaata

SEQ ID NO: 18497 - DNA, 422 bp, Glycine max
tcatccaacttaagcatggaaagaaggcattatattctcatacacataagatttctaaaaacttttcacccttatcgacgattgtaaaaagcttttaatggaagtcatgaaaatgaaggcccctcagaagcattaactggaaaccaagttcatgatcgcgtaaaggaaattgtaaccgtgtttggcaagtcccagaagaagacatcatctcccaacaacatgtggaagaaatgctcaatatttttgatcttccatactggtctgatctatatgtgcactgtctagatgttatgcatgtggagaaaaatgtgtgtgatagtttaattggtactcttcttaacattaaagggaagacaaaggatggtttgaaatttcgtcaagacttggttgacatgggaatacgagacagttgcatcccatat

SEQ ID NO: 18498 - DNA, 412 bp, Glycine max
  unsure (1)..(412): unsure at all n locations
tgaatcatgtgaaaataaatcaatcattctgtatatgtatcacaaattatatatattgataagaattacaaattaaaatcagcaaactcttaatttcgtttaattaatatgtgaaaacatttatgagctaagcttaacgtgaattaatctttttttaatccatataaattgaacacaataccataaatttataacattcatatattctactcaatcaactgaactaaaaccactgataactaattttaataaaatgatcatttatttttaccaatttcacagaaaaacttttgactaagaaaatttaacttaattggttgagcatgtgtgaattgctatanactactagttatgaacataaatatgtttataataacttatgcatgtgtgtccaatgtatctctgtataaac

SEQ ID NO: 18499 - DNA, 415 bp, Glycine max
tgcatgggtgcgctccgtctggcccgtgcttatacctgatgagagaagatcatcaagtttgagggctgttaccatggccatgctgatccttttcttgttaaggcaggtagtggagttgccaccttaggacttcctgattctcccggtgtccccaaagctgccacttttgaaacccttacagccccctacaatgacaccgaggccattgagaaactcttcgaggccaacaaaggagaaattgccgcagttttcctcgaacctgttgttggaaacgctggtttcattgttcctaagcctgattttcatagtttcttgcgcaagatcaccaaggagaacaatacccttcttgtgtttgatgaagtcatgactggatttcgctcgtcatatggaggtgctcaagatattttggcataac

SEQ ID NO: 18500 - DNA, 415 bp, Glycine max
tgaaggtaaaccagatgtctaggttaacctggtaacccatctggccgtgaataaaaaatctgcacctgtcgccagactctgtggtttatgctcctctgccgaccaccacacaaacctttgcccttctgtgctacaatctgaagcaattgaatatcttgaagcttatgctgcaaacatctacaatagacctcctcaacctcaacatcaaaatcagccacaacagaacaattatgacctctccagcaacaggtacaatcccgggtggaggaatcatcccaaccttagatggttgaatccttcacaacaacagcaacaacaacaataaccttattttcagaatgctgctggcccaagcagaccatacgttcctccaccaatctagcaacaacaacaacaacacagccccaaatatagc

SEQ ID NO: 18501 - DNA, 199 bp, Glycine max
agcgtctttcgtatcttgacactagctatccatctgacattcttctgagatcctaccttcgtgaattttccaaccgtgaatgactctaacaccacctctgccattcattgacttcatgcctgtcaccatccgatgtccacatctttgatgccttattccgacctcatcttctgtgcagaatacacgtgctgctgaatta

SEQ ID NO: 18502 - DNA, 381 bp, Glycine max
ttgatgcaacatatggagagttaatgaaacaacgatatttgcgctccatgagaggctggatcaaatggagaatagagatcataatgaagaagaaaggaggagaagagggaatgatggtgttcctagacaaaaccgaattgatggtattaaactcaacattcctccatttaaaggaaagaatgatccggaggcctacttggagtgggagatgaaaatagagcatgttttctcatgccacaactatgaggaggaccagaatgtgaagcttgccgccacggagttttccgactatgctcttgtgtggtggaacaagctacaacaggagagagcaagaaatgaagagccaatggttgatacatggacggagatgaaaagatcatg

SEQ ID NO: 18503 - DNA, 420 bp, Glycine max
taacaatcagtgtcatactattgatcaaaacaaagcttgtataaatatgcaatactagactcaaaatatgcaacaaacactatacctaaatcagtgtcacagaaatcggaagaaaatattttatccaagcacaaacttcaagccttattccatgtattggggggaagttatggctggccatatgggtagaggtgtcatagaggagcaagtatggaggaagggaccttggactgctgaagaggacaggttgcttgctgagtatgtcaggttgcatggtgaaggtagatggaactctgttgctacgcttgcaagtaagaaacaccaaactttattcactgttttgtttcttaatatatatgattggattttcacatttataactgacaatatagcataaaaacactgatattgttttcaact

SEQ ID NO: 18504 - DNA, 411 bp, Glycine max
cgcttctacagaaatgtagttgtcgtaacattatttccttataacagtaaaagtactgtcgactgaaacaataaagatctagccatattcagcaaatgctgatgctttctatccaccacaaaatactgcagtggtctatagggacaactgaattgatgcagggtaccctgctgttggagaaatgtacgcaatgccaattcaagagcattaacatatctgagctttttaatttgaaatccaaattgagtctttattaatgcaaaaaaatccttaaccttatgagttgcttcactcttagtatggagcaggtaaatccatgttaacctactatagtcatccacaatggtgagaacatagtgcattccttgacgtgtgactgtatgataaggaccccatactccacatgaatga

SEQ ID NO: 18505 - DNA, 325 bp, Glycine max
tttgatcgtctcgatatataatgcgcctgagtcgcacatccgagttaaaagttatgaacctttgaatatctcgagagcttccattgttcaatttcgagcgtctcaatatattatgcgcctgaatctgacctccgtgtggaaagttatgaccatttgaatttctcgacagcttccattgttcaatttcgagcgtctcgatatattatgtgcctgaatcggaccttcgagtgaaaagttatgaccatgtgaatttctcgagagcttccgttgttcaatttcggcgtctcgatatattatgtgctgatcggacatccagtgaaagtat

SEQ ID NO: 18506 - DNA, 307 bp, Glycine max
  unsure (1)..(307): unsure at all n locations
actcggaggcctatttggttcntatatatcgaaacgcttgagattgagcaacggaagctctcgtgaaatccaaatggtcataactttcaactcggaggtccgattcaggcgcttaatatatcgagatgctcgaaattgaacaacggaagctctcgagatattcaaatgatcataactnttctcacgtaggttagacttacgcgcataatatatcgagacgctcgatattgaacaacggaagctctcgaaaattcacatggtcataacctttcactcggaggtccgattcatgcgcataatatatcaa

SEQ ID NO: 18507 - DNA, 464 bp, Glycine max
  unsure (1)..(464): unsure at all n locations
actcgaagattacacgggtatcttctagccaatatatttctttgtgattatatatgnggaaatgagagatagatntagtagttggttgatgaacgaggtaatattatgaattgagttattctccaccatttgtaattatatgggtaaattataaacttaatgatgatttattttagtaattagaaacacaattaattagcaaaacgtgtgagaaagtcacgtgtgaactttcctttttttaatttattctcctatttatatactatagatatagatataaatgttataagtatacaataagattatctgactgtacagtaaaaaacagattatttcgattcttttgttcggctttaatttagttgaatctagatttttttgaatcataatagtgtttatgttntgaaatggttctaacaccctataaataactattgcctctaaatattgaactaaactaaatc

SEQ ID NO: 18508 - DNA, 319 bp, Glycine max
  unsure (1)..(319): unsure at all n locations
atggcgaatgtgcaccgactacactaatctgaacagggcataccccacaagacgtgtaaccctctccccaacatcaatanggtggtcgatgaagcgtccgaattcaagtgctaaccttcttggatgcctacttcggatacaactagattagaatgcatcctctagatgaggagaanatgaaattcataactaanaatgtcaacttttgttacaaggtcataccattcggcctaaaaaatgcaagcgcgacattccaatgaccaatggaccgagtcttcaacaacagatcggacgaaatgtcaggtatatatggatgaca

SEQ ID NO: 18509 - DNA, 436 bp, Glycine max
ttcttgtgttttgtaatggactcttctattgcttgagtctcacaggttggctaggggtgtttaactcatctgaacgcacttggagtgttctttcagtacctccacccaagtgcccagagaatttttttgccaaaaattggtggaagggaaaattcatgacagagcatgagggagatataatagtaatttatacatgttctagtgaaaatcccattatttttaagctagatcagatgttaatggaatgggaagagatgacaacactggatggagtaactctttttgctagtttcttgtcttctcatgcaaggattgatctccccggaataatgagaaatagtgtctacttctctaaagttcgtctttatggaaagcgctgcatatcattctctcttgatgactgtagatactatcctcgtaagcagtggcatgactg

SEQ ID NO: 18510 - DNA, 356 bp, Glycine max
  unsure (1)..(356): unsure at all n locations
tacacattatgttgatgcaaattggaagttgaatagtataatgcttaattnttctcattttcctcctccacactcanggcatgagatggctaaagtgatatantggtttttggaagaatgggggattgaacanaaatttttttcattaactctatataatgcttcttccaatgatataatgcacgactatntgaaggaaagactatctttgcatactaatggtttagtaagtggtggtgaattttctcatatccgatgttgtgctcacattttaatccttattgtcaagaagggttgaaagtagtcggtcctgctataaacaacattagagaaatcattaagtatgttagtggatc

SEQ ID NO: 18511 - DNA, 372 bp, Glycine max
agcttgtcttccaataccctgatgaggatgtcccatatgttcttaaaactggactgattcatttgcttccaaagtttcatggccttgcacgtgaagacccgcacaaacatttgaaagaatttcacattgtctgctccaccatgaaacccccagatgtccaagaggatcacatatttctgaaggcttttcctcattcattagatggagtggcaaaggactggctgtattaccttgctccaaggtccatcacgagctgggatgaccttaagagagtattcttagaaaaaattttccctgcttccaggaccacagccatcaggaaggatatctcaggtattagacaactcagtggagagagcctgtatgagtact

SEQ ID NO: 18512 - DNA, 409 bp, Glycine max
  unsure (1)..(409): unsure at all n locations
ggatccacggagaacaactcgcgatgtagaggctgcanagttgtgttaaaaaaactgtaagtntcgctatttaaaatacaagaaatgaggtagaaaaagaccagggaaaagagtgctattaaattatcataccttcacattaagaanatataanacaccaatgttttaaagattaaatatttatttcccttttgaatgggatgtgttagaaagatatgaataatatattctgatgttatatagttgttatatctattagatntatctttaatcatatctttagctattaggtttatcttcagttttatagttggtatatctattagaattatctntagccatatctnntagctatatatcnnttagctggaatctngtatataagcgaatgatgcttaatgaaatattc

SEQ ID NO: 18513 - DNA, 377 bp, Glycine max
aaaatggagggctgtgtattaatatcttactcattcacattcgtaaatatattcattatgaatttaataataatgcactagtgtaaaattatatatctacatgtaattacaaatagcatgacaacataacttataagctacttattataaaaattaataagcttattatatgataatttgtgattaaagctaatactgcatagtctttttttttcttctctagttatataatccttaacacatcctatattatttcgctagtaatgtaacagttatttatttatttcctgctaatccattttgcattttataatgtaacacgttgcttcctttccgcttgtcctgtattttcttcattatcaaaaagaaaagtatat

SEQ ID NO: 18514 - DNA, 236 bp, Glycine max
agcaataccattaacacgaaactgttgtgattcaagcatagaccgagtgagtgcgccaatggcagcgcgtggctagatatctgctgccaactactatcatcttgatggcgccacgaaacagatccaaaatcactccttgcgatgccacaagttcgctatcatgaggcgggagcgattcagtggcgcttaccttgcgacccgctccaatacgtgctcctaagacgaaccatggctct

SEQ ID NO: 18515 - DNA, 456 bp, Glycine max
  unsure (1)..(456): unsure at all n locations
tgagttgcatatcaatcttgccaaagagatactcgtttttggtctgattccccgagccanaggctttgtcaagggaaagagtgagaagatcgccgttgttgagtatcttggcacgaccatctccccaagttacgtcanaatcctggtagaagttgccagcagaggctgcgatggaagaggccaatacaaatacataaaggacagtttttgttgaaaatgtaatggaatgaagagaagccatgattggtttgaatganatgtagaaagaggaagttaaaaatgtagtagcttggtagaagtaatgaaatgtgagagaagaaggaagggatgagtgtggcggagaggtangatntgtactatttatagatgtgtggaagctgctatgactatcagggttacgcgtaggacaatggttagtgtgtctggaagagttggaacaaacattaaaatattaac

SEQ ID NO: 18516 - DNA, 448 bp, Glycine max
  unsure (1)..(448): unsure at all n locations
acgtactgataaagtatcacttaccttcgttaagtttttcatatagtactttgtacgtatttgaatgtagattgaatcacctaaaatcatacattgaaacaacaattaatatgaatttaaataaatgttagcatatttctcccaggttaagaaattgattctgagtctaattatgtttgaattacctttgattataaataatttattgtactcaaaaagtaatttttacttaaaagtaattttaggtaacttttgtatatgaaaaattttataccaaatttgactataacttgcttttaagataaaaatatctaanacctaagttacttcacttcaaaatcattntttataaaattaattttatttgaattcaatttcgtagattgatcacgtgtaanttatagtacctcaaacatatatagtgggatactctangcagcaaacacaa

SEQ ID NO: 18517 - DNA, 355 bp, Glycine max
tgctttcactgtcataagttagccatatgtaaagatgcaaagccagttacccagaggaagagaaagatggggaaagagaggtattatgtagtacaacaagaagtggtcaagttaatggccgcccaattcatcagagaaattaactactccacttggctttccaacatggtcatggttaagaaaccaaacgataagtggaggatgtgtacagactacacaaatctaaatcgagcatgctcgaaggatgcatacttactcccaaacatcgactgactggtcgatggagtagtcagacacaagaatgttgagtttttggatgcttattccgactataatcagagcaacgtatcaacat

SEQ ID NO: 18518 - DNA, 446 bp, Glycine max
  unsure (1)..(446): unsure at all n locations
aatctcagaactgcaaagacatgaccttatgatatttttagtaagaatgtcatacaaatatgagttacattatgaagcatgtcaaaaggggaaacaaattaaaaactatttttcaagcaaaaactttgtttccatctcaagaccacttgaactattacatattgatttgtttgcttcaactagaacaacctttatcactagaaggacataaggtctagtagttgtggacaactactcaagatggacataggttatggtccttgctcaagagaatgagtcctttgaagtcttctttaaattctgtaaaaaggattctaaatgaaaaaggagtatgcattacttcaatcagaagtgatcatagtggagagtttgaaatgagagctttcgctattatgtaagagaatgaaancttcataacttctctattgctgaacacctcaacaaaa

SEQ ID NO: 18519 - DNA, 346 bp, Glycine max
  unsure (1)..(346): unsure at all n locations
agcttctctcttttcttgtntaatnattatatnttgagtgtaagccttgtattttgctatgtttntatgacatttgaacacttagtatttcttttaaatatttgtttagtatgactaaacatgatgattacttgctcttggttgtttatggttatgagttttaaacttaattactttgatgatatatgattagtggtatgtactattatttggttattatgaatgactntctggattatatgacattctatgaagtattatctctctaagattgatgaatggttaagttatcttgtctgattgttctctattctcttgtatgaatagtaatctatgtatgtattat

SEQ ID NO: 18520 - DNA, 375 bp, Glycine max
  unsure (1)..(375): unsure at all n locations
agcttgtatttataaagtctcatgattgtcacgtgctcatgcaacaattgttggtcgtggctatatgagacatcttgccaaacaaagtcaggttagcgataactcgcctatgctntntcttccatgctatatgtagaaagtcattgatcctgtcaagtttgatgagttggaaaatgaggccgcaattatactgtgccagatggagatgtattttccccctgctttctttgacatcatgattcacttgattgtgcatctggtcaaagaagtcaaatgttgtggtcctgtttatctacggtggatgtacccgattgagcgatacatgaagatcttaanagggtatacaaagaatctatatcgtccagaagcatctat

SEQ ID NO: 18521 - DNA, 437 bp, Glycine max
  unsure (1)..(437): unsure at all n locations
agctntttatgtgttgctgtatccaatgaaaactctgggttctgcctttntatcaagtttgtcccttttaacctgtggaacataagagaaacaaacacaaccaaagatttttagaatttgtaaatctggtttgtaaccaaaccagccttcaaatggagtttttttgtgcaaaactcttgtaggtagtctattcagcaaaaatactacagtgtttgcagcctccgcccatagctcctttggcaactccttttcatgcagcatacaccttgtcatctccatgatacttctatcttttctctcactcacanccatttgttgtgggatgtaaggtacggtgagttggtgctcaatgccagcttcttcacaanaattatcaaanacatcattnttgtattccttcccattgtcagacctttattgttgcaacctgcaatcac

SEQ ID NO: 18522 - DNA, 318 bp, Glycine max
  unsure (1)..(318): unsure at all n locations
agcttgtattcctangatcttcatcaatggattccgtttctttttggaagatgaatggcagcagaatggagaacgaagagagagaggagacgccacttcaaggagaagatgagtctagaagaagctcaccaccataggaggccatggataagagcttggaggaagaaggagatgaatgaagggagaggaagagaatagcacganattttatgctctaaaagagctctgaaatctgaagtttaattttcaaattatcaaagttgaaaaaatgcacacacatgacctctatttatagcctaagtgtcacacaaaattgga

SEQ ID NO: 18523 - DNA, 393 bp, Glycine max
  unsure (1)..(393): unsure at all n locations
ggggaggacagatatagagtgaaattggaggaaatgcgttgattatatttcaagtggcttcagaaagccctgtattctcangctttcataactctcatattctggagctcccctatatttgtctcggcggtcacttttgctacttccatattgtagggtggtcagctgactgctggtggtgtactttctgctctggctactctcatgatcctgcaagaacctttgagggaatttccggacttggtgtcaacaatggctcagacaaaggtttctcttgaccgattatctggtttcctgctggacgaggaattgcaggatgatgcaactatcgtcttgccacaaggcattactaacattgctatagaaattaaggatggtatctttctgtgggac

SEQ ID NO: 18524 - DNA, 404 bp, Glycine max
  unsure (1)..(404): unsure at all n locations
agcttcgctaactttttgatcacgcaagaatgagacgtggttttaatatgtttactcctcccatgtgccatgagatgctagactaaattaattgctgatttgttatcaatcaacaacctcataggactacaatcccttaagtgcagttcttccattaaagctttcagtcatagagcttgacacgctgccatagcagcaacaatatattatgctttacatgttgacaaaacaactacactctgcttctttgagcaccaagagattagtgttgttccacatttgaaaacatatncagcattgctttactatcatgcttatcactacaccaatctgaatcatttataccaaacactgcttcttttatattcttctgaccgtaaggatataaaatgccaatatccaat

SEQ ID NO: 18525 - DNA, 341 bp, Glycine max
  unsure (1)..(341): unsure at all n locations
tcttcttacctgctgcatgtatgccntatactcgtgagttgttactngnnnnaaagctatagcaggtgcagcaatgtggatattgtgtggcccnccttgcattgatggaaaaacagcaaaattgatcttttcttcaatgtcatattgatcactatcatgtccctgacttagaagtatccctctcttccttggctatgtacccttacgataaaaaattatgcctcaccttggacctcgaagactctagtgagttgtcgaagtaacaatgtcacaataatcaataggattcacacactcctgcggagacaacaccaccatactattaaagaaataatgagcat

SEQ ID NO: 18526 - DNA, 387 bp, Glycine max
  unsure (1)..(387): unsure at all n locations
agctncataaattctctttgataccagaggatggcatgagcttcaaacagcttgcaccccatcctctgtagagacccttcagaccttcttctctaataacttctgaaagtgccgctgccatgtttggcgggcacttaccttgcaaagcacccaccatcaggcgcttccttgctacctgcaaggggaagctaattgtactggcagtaaaacctgcgcgagcataaagaagtcagatagcacaaatcatttatattaccaagtataaaatgtgattaataagtgacacgctgctgtgaaaaccatgtccgcccatcaaatagtgaatggctattctttcancaaatatntcatgctatcatttgcttcatgcaacatgggtgtgtgact

SEQ ID NO: 18527 - DNA, 353 bp, Glycine max
  unsure (1)..(353): unsure at all n locations
acatactgnaatcgattaccagaggagattttcagaaaatattctcaacagtcacatctttntgtgtggttcttgaatggctatcaaaggcctatatatatatgtgacttgagacacgaatatgataagagtgtttcagaacaacaaaggtcttatcctcttagaaagaaaaataaatttatcctcttacatattccttagccaaaactcttgtgattaaataaggaattatttgagtgctccaattgttcaatctatctctntatagagagaattcttcttctcttcttcttcattctgaaaagggattaagagactganggtctcttgttgtgaaagaattctaaacacaa

SEQ ID NO: 18528 - DNA, 356 bp, Glycine max
  unsure (1)..(356): unsure at all n locations
agctattaatttgtatgtccgattcaagcgcataatatatcgagacgctcgaaattaaccaacggaagctctcgagaaattcaaatggtcataacttntaactcggatgtccgattcaggcgcataatatatcgagacgctcgaaattgaacaacggaagctctcgagaaattcaaatgttcataacttttcacacggatgtctgattcacgcgcataatatatcgagaccctcaaaatttaacaacggaagctctcgagaaataccaatggtcataacttttcactgagatgtccgattcacgcgcataatacatagagacgctccaaatcgaacaacggaagctctccaaaaat

SEQ ID NO: 18529 - DNA, 338 bp, Glycine max
atcttttggttggacatcttgacttgctatccaatctgacattcaccacagattcttgccttcttctattttcagaatgggaatgcctctaacagctcctttgtcaatgaatttcttcatgcctcttaagtgcagatgtccaaatctttgatgccatattttcgacttcatcttctttggagaatatacatgtggaggagtaactggcttcttgaggtgtccaaggtaacagatgtactttgatctgctggcctttcttagaacttcactcttctcttttgcaccaacattcttgactttgtgaagttacattgaatccttcatcacacagtgactga

SEQ ID NO: 18530 - DNA, 401 bp, Glycine max
  unsure (1)..(401): unsure at all n locations
ttctttaattcattatggatgcataagcaaagagcattctaatggcttctaatcttgcaactggagcatatattcttcataatctataccttcttcttgattgtatccttttgcaactaatctagcctaatttctaatgattatgccatgttcatctcacttattcctaaatacccattttgttcctatgatggggtagtttttaggtttctctactagttcccacacattgtttcttttaaactgatttagttcttcttgcatagcaattatccaatgatcctctattatggcttcatttatatttttaggttcaatcagagacaccaaagccatattattgcatanatctttaagagaatgtctagttgttaccctttttgagatatcaccaataatgt

SEQ ID NO: 18531 - DNA, 289 bp, Glycine max
  unsure (1)..(289): unsure at all n locations
gaacaacctgcagtncacatgcgtcggtggagatacagcagccctggaccaccaccagtaatgatcgtgtatcttggatcccaagtaagtagtttcttcttttgatgttctttttcaaacaaaagcttgtctaggctcccgtttggtacatagttgtaaacaatgaggagttcatccttcttcctgcaccacccatgtaactgcaccaaaattctatgctntagttgtgccatgcctgttatttctgaaacaaattctctgattccctgccttgaatcaggagcaactc

SEQ ID NO: 18532 - DNA, 343 bp, Glycine max
  unsure (1)..(343): unsure at all n locations
ttcttatgatcatgaaacctttctccaccaagcgagagagtaacatcaaatgattcctcatcctctaacaacatcccaaaatgttcaccaatatcagattcangaacctgtattgtgtntaactgagaagaatctatggacgacactaanaccgcaatagtgcaatttatcttcaagcaatcatccttgagaaaatttgacgtctcaaggtgtctccgtttgaaaaaccgcgtatagcccctattacacaacaagtgcatcattgatcactacctaatgtacaccaacaaaaatggataccagagctaataaatcatgatgatatccaatcatatcaccaaat

SEQ ID NO: 18533 - DNA, 447 bp, Glycine max
  unsure (1)..(447): unsure at all n locations
gagttcctagcttagcccataatgttttccagaagtggtaattgtcttagtatctttatctgacacagtggtcctatgcaaaccatggagtctcacaacttccttgaagaaaagtttgagatgtgagaagcatcatctaccatgtggcatggtatgaagtgtgccatcttgctaaacttatccaccacaacaaagatagagtctacanccttttgggttctaggaagcccaaggacaaagtccatactaatgtctacccaaggtgtagatgggatgggtaagggtgtgcatagcctatgaggcatcaccctagacttggcttgtaaacaagccacacatctagtgcaatgcttatgggcatctttctttatatgggaccaatagaacttttctttgagtaagacaagggtcttgtctatcccanagtggcccatgagccaccctcat

SEQ ID NO: 18534 - DNA, 445 bp, Glycine max
  unsure (1)..(445): unsure at all n locations
tcagctntgtccncaatacttcatgtagacttgtccaatatcttatattatacctcggattccctttggatacaatactggaaggaattccatgcaactntactacttccttaatatacaactccactagcttctccatcctatactntatattcactggaataaaatgagcagatntggtaagtcgatctactatgacccatacagcatcatgtccccaactagtcttaagtaaactagatacaaaatccatggatatgctctcccatttccattccggaatttctagtagcttcaattctcctgatggtcgctgatgctcagccttagccttttgacatgtcaaacacctcgctacatattcagctacatctttcttcatgccatgccaccaaaaacttctcttcanatcttggtacatcttagtcattcctggatggaaact

SEQ ID NO: 18535 - DNA, 423 bp, Glycine max
  unsure (1)..(423): unsure at all n locations
agcttcttttttcattttcaagcatctcgatatattacgggactcaatcgaccatccgagtcaaaactaattgtcgtttgaatttactcaaagcttctgtattcaatttctggcatctcaatatattaagggactctatcgaacatctgaggaanaagttattgtcatttgaatntgcttggagcttctgttttcaatttcgagcgtcttgatatatgatgggactcaatcggacatccgagttcaaagttattgtcgattgtatctgctcagagtttcagtgttcaatttcatgtatctcgatatactataagacttaatcggatttccgagtaaaatgttattgtcgcttgatttgctcaaagcttatgtattcatatcaagcgtcttgaattattatatgcctgattagacatctgagtc

SEQ ID NO: 18536 - DNA, 317 bp, Glycine max
agccatgattgattgatatttttaacaataatattttcggagtaaaactattattattaatatgatctataatattataattatttaaaagaaattatcaaattattttagtggctttaatgattagaatcattttaattgtttgagataagttaattcctataaacatatatatgggttatatgaataaatgtcttctttttctcttgaaggggcttacaacgctttgataacatgtcattgtgatgtttgtcgaccagttttggccacatcttgtggtttaaaattatcttatatttgaatctttgacattgtaa

SEQ ID NO: 18537 - DNA, 384 bp, Glycine max
  unsure (1)..(384): unsure at all n locations
agcttcctatagntccgttccttcctctctcgatatgagaccgagtctggcactccacattagtacattcaccaattataaaagcatcaactctgtcatacggaatgagggcaacctcatcatggtgctcagcattaccaaacttggtccaagtcaggtcagcaacacaaaactcctcctcaggtgggtcttgcaaaggaatcttccccacggattcaactatagccatatccaaaatggcacaaaaaccaaaaaacacaaaaaccttccttgctatatatacagaacaatctagaagtctctccacaaacactcacatgtccaaaacagttaaactgttaagcacataacaaaacaccctgaaacaacaaatacctttgagat

SEQ ID NO: 18538 - DNA, 326 bp, Glycine max
agccctgtatcaaatcaagcttagagaaataccttgcgccacccaattcatcgagtaactcatcgatcgtcgaaattgggaaccggtctctcacggtcaacgcattcagtgccctgtaatcgacgcagaacctccatgaaccatcctgcttcttaaccaacaaaacaggagaggaaaaggggctagagctgggctgaataaggcccttttgcaacattgaatccacctgagactcaatctcctggttttggtaatggggataacggtatgggcggacattgaccggaggtgcttggggaaggagatgtatgtggtggtccgtgtca

SEQ ID NO: 18539 - DNA, 325 bp, Glycine max
  unsure (1)..(325): unsure at all n locations
acctgtcgcagggtgggggtttggctcctctgctgaccaccatacagaccttngcacttccatgcagcaacctgaagcaattgagcaccctgaagcttatgctgcagatatatacaatagacctnctcaacctcagcagcaaaaacaaccacagcagagcaattatgacctttccagcaacagatacaaccctgcatggaggaatcaccctaacctcagatggtgcagccctcagcaacaacaacagcagcctgctccttccttccaaaatgctgctggcccaagcagaccatacattcctccaccaatccaacaacagcgacga

SEQ ID NO: 18540 - DNA, 335 bp, Glycine max
  unsure (1)..(335): unsure at all n locations
agctttctctattgttcttgatanaagaagagcaagacggttaatcatggtactttgacatcaagcggtacgtagagtataaggagtatccacaaggggcttctgaccatgacaagaggacattggtgaagttggcaactagttcctttttaagcagaggtatcctatacaaatganatcatgatatgggcttgctctgatgtgtngacacttaagaagccgagcgaatgctcatggaggtaccatgaagggtcctttggatgcatgctaatgtgcatgtcatggctaggaagattctaaggcagactataactggctcaccatggaaaatgact

SEQ ID NO: 18541 - DNA, 474 bp, Glycine max
  unsure (1)..(474): unsure at all n locations
tcatgttaagtatgtatggcanaacttcattactgttgttcttgacatacaagtgagcttgtaacanatcttctagacttggagtgatcacatgcagtcctcttgaacccttaccactcactctatcattatgctgagactcaagaaggccaataggtttagccttctcaatgtattctgaacaaaatccaatggcttcttctacaatgtacctctcaacaatagatgtttttggatgatatagattctttgtatacccttttaagatcttcatgtatcgctcaaccgggtacatccaccgcanataaacaggaccacaacatttgatttctctaaccagatgcacaatcaactgaatcttgatgtcaaagaaagcaaggggaaaatacctctccaactggcacaatataattgcagcctcattntccagctcatcaaacttgacaggatcaacgactntgctacttatggcat

SEQ ID NO: 18542 - DNA, 341 bp, Glycine max
agcttgaattctaactggatgcattggttaacttggtaacccagctggccttgaaccaaaaatctgtacctgtcgcaagggtctgcggtttgtgctcctctgctgaccaccatacagacctttgcccttccatgcagcaacctggagcaattgagcagcccgaagcttatgttgcaaatattttcaatagacctcctcaacctcagcagcataatcaaccacagcagaacaattatgacctctccagcaacagatacaaccctggatggaggaatcaccctaatctcagatggtctagccctcagcaacaacaacaacagcctgctccttcattccaaaat

SEQ ID NO: 18543 - DNA, 315 bp, Glycine max
atctctatatctttaaaggttatcatataagcttttaagatatctttgttatctctaaacatcttaataagaagctaaagtattatattgtattataaaggttattttattgagacccgcatatatcttggtagactaagatcaatacatgtggtaataagtttccaagtcttggaaaatattatactaatattttattgagttgtataaagatacttacttggtatgaaaatcatgtttcttatagcttacaagaataatatttcggctataattacatctgttaatggctcaagctaaataattgaactttga

SEQ ID NO: 18544 - DNA, 400 bp, Glycine max
  unsure (1)..(400): unsure at all n locations
agctngtattccttatatcttcttcatcaatggagtcctttgcttcttgaagatcaatggtagtggaatggagaaggaagaaagattattggagacacgaattcaaggagaagatgagtcatgaacaagctcaccaccataggaagccatggataatagcttgaaggtaggagaagatgagtggagggaggaggagagaatgagcacganattctatgcctcaaatgaggtctgaactttgaagtgtaattctcaaatgatcaaagttgaaatatattgcacacataagacctctattattggctaagtgtcacacaaatgggagggacattgaattttacttgatttgaattgaattggggagccaatttggagccaaatttcactaatttgttaatga

SEQ ID NO: 18545 - DNA, 442 bp, Glycine max
  unsure (1)..(442): unsure at all n locations
ctaagcctcgcgaccaggggtcttcgtaatagaagagacatacggctattagcctgtgcttgttcggagagatcgtcatacatgattaaagtgtgacgttcacggtacataaaatattcagccagagctgctcctgtataaggggcgaggtattgtaatgtagctggagaatccgctgtctcagctactacaatagtgtattccattgctcctctttcttgtaaagtattcaccacttgagccacagaagatgctttttgaccaatagctacataaacacatattacattgtgtccctgttgattgagaatagtatctgtggctactgctgttttacccgttagtctgtctacaataattaattctcgttggccacgtcctatggtgatcatcgaatcaatagcaataagtcctgttagagaggctcatatacngaacgtct

SEQ ID NO: 18546 - DNA, 479 bp, Glycine max
  unsure (1)..(479): unsure at all n locations
tcaagctggtcaaanagggaaaccaagttaaaactcatttcagagcatattcattatttctacttcaaaaccccttgatctacttcacattgatttatttggtccctctagaactatgagtttaggtggaaattactatggcttagtaatagtgggtgattactcaaggttcacacggactttgtttttgaaagccaaaaatgaagcttttgatgttttttgcaaacttgccaaggtgattaataatgaaaaaaggtcttaacattgtttcacttaaaagtgatcatggaggtgaatctcanaatgagtcttnttaaaacttttgtgaagaatatggaattcaccaatatttttttgcccctcagaacacctcaacataatggtgttgttgagatgaaaaatagatcccttgaagatggtgcaagaacctttctaaatgaaacaaagttacctaagtactnttgggctgatgttgtaca

SEQ ID NO: 18547 - DNA, 335 bp, Glycine max
  unsure (1)..(335): unsure at all n locations
aaaatggtgtatcaaagaggcgtaatacaactttaatggatatggttaggagtatgttaatcaattagactttacccgtatctttgtggatgtatgccttgaaaactgccatgtatttgttggacagggttcctagtaaggcagttccaaagacaccttttgaactatggacaaataggatacctagtataaggcacctgcatgtttagggttgccaggcagaaataaggatttataattcgcaagacagaatattggatgcaagaacaatcagtggatatttcattggttatccagaaaagttaaaaaggtatatnatttattgttctaatcat

SEQ ID NO: 18548 - DNA, 383 bp, Glycine max
  unsure (1)..(383): unsure at all n locations
naagcttttttatgttatgttgcctttaaaagatgttgacagcatatgaatagaccagcctctggccatatgttattaagtattaattacgagcatacttaggcctaccaaaatttaacctaatcaggcctatttcaaccggtagttataaatatgttaaattaatttgtaagtctttatattatttaataaatttaatcaagttctttaattatatatttcttttatatgagtctatgaacttgcatttatattctaaataagtcccgttattcttaattagttccttgctaagacctaattaaatattagatacaagtctaacgatctaattgataaaaaagctaagaattatttaaaaataaataatagttcaaagatta

SEQ ID NO: 18549 - DNA, 408 bp, Glycine max
  unsure (1)..(408): unsure at all n locations
tctgcgaagccacatgattattcatgtctatctgatgtaaccccttccttattgtagtgaggagccggatcttcaaaaggcaaggacaatccctggcctaggaaatccagtgcccatactctagtgtcacgccccagatctctcagttgcttctcataatggaaagagccaacaccaaaaccaggaagaaagagaacatgtggggaatccacgttctcacaccctgccttctcatagtacacgttaagcttaggcttccattcccaaaagcaactacttattggagcanccattgacccatctggcagacctggaatgacaactttgttagtagcaaggtcttctacccctgcaatatctgctacatnctcttcancaccaattacatatccatcgcaactttcacta

SEQ ID NO: 18550 - DNA, 456 bp, Glycine max
  unsure (1)..(456): unsure at all n locations
ggattnntttacaggagaaatatcatttagattttgtgtattananaataatccgaaaatctttgaaatatttacagttcaaataaaattacattccataaaatgatattttatgtaactaaaacatataagtaatatatttagatataaatatacaagtactcattcaagtgagtgagaacaatttgttatcccattaagattagatctaatatgttttatgactgtacaattatggatacaatacctcatccattgtcaatctaattatgattatttctctttgtattgttcacaatttgtatctntgcgaatgtgttatgtccttcaaaattattgatatattcccttccattgtaactaatctctaacaatagcacacccaattgaaactctatgttttgaaaattatttgaaacaaagaatgataattgttaacaaaaatatgatgacata

SEQ ID NO: 18551 - DNA, 406 bp, Glycine max
  unsure (1)..(406): unsure at all n locations
agcttgacgaactttctatattcatatagtatttgcctncagaagtcccattggcatctctgtgtttcaaatggtgtacgaaaaagtgtgctacctaccaatggagtaagaaattaaagctcattatgccatgatgttcctcaactatatctatatatcatccagagagaaaaggaatgtataactacaataacttacaaaaatatgccacaacgcatatgatatatccaaactctacaaacgaagaacccatatgaaccatgacaacacaatcctctacagagaatgtatgcccanactactattagtgctctacaactcaagattaaagatgtttcttggaaaataacaacaagacggagtgtgctctttactatccaagacattaagccatatggtggtatat

SEQ ID NO: 18552 - DNA, 288 bp, Glycine max
gctccttcaactgcacaaggctcttaatatatgaagagtttttttgtggaatcttcactttatgaagacactgacaaagactaatcttctacttttatgacaaagtatgacaagctgtgggcaaataaatgttcttcccatcagaccttggatgcaactgtaatcgtatcctcatttgagctaaatcttaacgaggattcaagccatcctttgtcttgcctcgaatgttaaagagcatcccaatcacactgtcacatacatatttctgtacatgcttaacatctatac

SEQ ID NO: 18553 - DNA, 355 bp, Glycine max
agctttgaccttctgaatttttatgacttactcagccagatgaggcaacactcttcagcttttgcggatggactccagcgtttggctcattactttgccaatggccttgagacaaggttggctgctgggaccccatcatacatgcccctagaaggaacaacttccgctgatatgttgaaagcttacaaactatatgttacatcctctcctttgcagaggttgacaaattatttggcaacccagacaattgttagtcttgtggaaaatgagggcagcggtcatattattgattttggcatttgctatggttatcagtggccatgccttatcaagaagctctcagaaaggcatggtg

SEQ ID NO: 18554 - DNA, 432 bp, Glycine max
  unsure (1)..(432): unsure at all n locations
agcttattcactttgcactctatagaagtgttagattgttgaaatccaggagcctgagacaagtaaacagtctcattaagtaagccattcagaaaaatattattcaaatctaattgagcaagatcccactgatttgaaatggctaaagtaaaaataagtctaatagtaattggttttactactggagaaaaggtttatgaaaaatcaaacccttggacttgattcaatccagtggcaactagaggagctttatacttatntattgaaccattttcgattttttcatcctaaatacccactggccttccaattagatgaaagaggtactagtttccaagtatgattcttcatcaatgcttcacaatctagttgcatagatgacaaccagtttggataagtcaggcatgttcacattctttgttcacaacgagt

SEQ ID NO: 18555 - DNA, 303 bp, Glycine max
  unsure (1)..(303): unsure at all n locations
tatgatactcagctttatnaaggttcgccctaatttctctactttttcctcacctctgaatgagctggngaagaagaatgtggcatttacttgtggtaaaagacaagagcaagcctttgctttgctcaaagaagagttcactaatgcacctgttctagctcttcctgacttttctaaaacttttgagctaaaatgtgatgctcttggagtgtgagctggagctgtattgttacaaggtgggcaccctactgcttattatagtgataaacttcatggtgccaccctcaactacaccacctatga

SEQ ID NO: 18556 - DNA, 443 bp, Glycine max
  unsure (1)..(443): unsure at all n locations
agctntgatggtgtcgagattatatcacatgtttgtcatcatcaaaaagagggagaatgtgaatgtatgtatacatgattntgatgatgtcaaagaagaatctaataaggctgcttcaaatgataagcatttgcttcaagaataattcaagattgcttcaacaaacaaagccttgtttcaagattcactaaagaccaagtcttgccttanaacaaagtgctttcaagacatgcaaggctctggtaatcgattaccaggagatgtaatcgattaccagaagacagggttgagaaatagctgttgaaaaatgttttgaatttgaattttcaacatgtaatcgattatcatatgtctgtaatcgattaccagcaacgaaactttggaaattcanattcaaaagtcataacccttcanattataactgtgtaatcgattacacaaac

SEQ ID NO: 18557 - DNA, 394 bp, Glycine max
  unsure (1)..(394): unsure at all n locations
gctcgttgagtcatccaaatcattntctttcatacagtttatgatgcatccagcaataagttcatttccaaattcacacttctattttaaccaaattcttgatgctccaaatgttgtgagaaagaactacagaaaacaatatcttccagggccaatgtttgggccctattcctttataaatgtagttggtggcattgaagagtttgatgatgctggacgaagccggacaaatatggttgaagtagcaattgtgatgaaaataattaaaaattgttttaaagggttgtgtgtgtatgcgaaatctcagtagtgatctatcattttagtgtattttcattctccttgagaaagactatacttgtcaaaagtgaaaattttcattatttccactact

SEQ ID NO: 18558 - DNA, 409 bp, Glycine max
  unsure (1)..(409): unsure at all n locations
cactctacaatacacacgcttctcaaagatgtacttaaccaggtccatcttggatatcaaccatgtggtatggttcagcatgtattgtcttagacggtgggacgcccagactaaagcacaacacgttctttcgagcagggagtagttcatttcataggccgtgaactttttactcaagtagtagacagcgcgttctctcttcccggactcgtcatgttgccccaacatacatccaatcgactcatccaaaatcatcatatacaagatgagaggccttcctggtaccaacgacataagcacgagagggttcatgagacactgtttgatccttccanacgcctcttgacaatcctcattccaacggacgggatgggttttgcgtaagagttggaataacggctcacaatta

SEQ ID NO: 18559 - DNA, 435 bp, Glycine max
  unsure (1)..(435): unsure at all n locations
agcttagccactcagttggcaagtgtatcagctgcttcctgtgtggatgcctcagcatacacacgaacaacatcttcagtgccagatggtcgcacaaagcatcgaccttgggggtccttagctgtaaatgcagaagaggaaagagtatcaagctgcaatattagtaaactgaaattctgcactttaatctttcacactaaaaggctttcatggatggatgaaactgacaaatatctcgcagtcagtgaaattttgccaagccacttggacttgataacagtaatagtataatcccataaacaagacaccaacttttcagagatataacattcaattntggtattatttatgcctccttgcctccctcactctgcccattcttggtggttcacanataanagcaagcaagcaatgatataaccaaaaaacaatgtt

SEQ ID NO: 18560 - DNA, 280 bp, Glycine max
  unsure (1)..(280): unsure at all n locations
tattgctaaatgctaatcaatcagcaattctcacagaaatcatcttgttcctgacaatgttagaaaccatcanaccatggccatatataactgtgcaagcatgatagaaaacaaattataaaactattagaaatgaatgaggaagtntgacaaaataataagacaaataccttttcattgtatatacgaaagccttctttgactactgctntagtatcatctgaccgagtaatgagctntgacatacagtgtgcaggaagaagaagtggagccatgacca

SEQ ID NO: 18561 - DNA, 376 bp, Glycine max
  unsure (1)..(376): unsure at all n locations
agctnttaagttaaaggatatgactcttcacatttgaatatgaatttcaacattcaagggcactagtaattgattaccaaaacattgtaatcgattatagctttttgaaaataattggaacgttgtaaattcagtttgaaaactttttcaaactcattttgctactggtaatcgattacaacaatatggtaatcgattaccagagagtaaaaactctttggtaaaaggttttgtcaaaaattcatgtgctattcaaagtgttagtgcttggctttactgagttttaaaagaatggctagcatgttgttaaaacataagcacttacacaatgaaggaaagctggagttgctgcacatgatgtctaacattatgtcaa

SEQ ID NO: 18562 - DNA, 415 bp, Glycine max
  unsure (1)..(415): unsure at all n locations
agctttatatttgtntgttcctaatttctctacaattgcatcacctctcaatgagctggtgaagaagaatgtggcatttacctgtggtgaaaaacaagagcgagcctttgctttgctcatagaaaagcttactaaggcacctgttctagctcttcctgacttttctaaaacttttgagctagaatgtgatgcctctggagtgggagtaggagctgtattgttacaacgtgggcaccctattgcttattctagtgaagaacttcatagtgccaccctcaactatcccacctatgataaagagctttatgccttaataagagccctccaaacttgggaacattaccttgtntccaaggaacttgtcattcatagtgatcatcaatcacttaagtacattagaaggcaaagcaagtta

SEQ ID NO: 18563 - DNA, 341 bp, Glycine max
  unsure (1)..(341): unsure at all n locations
gcttaacattcaatttcgagcgtctcgatatattacgagactcaatcttacatcagagaanaacgttattgtcgttggaatttgctcagagcttcaacattcaatttcgagcatctcgatatgttacgggactcaatcagacatccgaganaaaagttattgtcgtttgaattagctcagaagttcaacattcaatttcgagcgtctcgatatgttacgggactcantcatacattcaagaaaaagttattgtcgtttgaatttgcacagaggatcaacattcaatttcgagcgtctcgatatgttacggngcttaatcagacatccgagaaaaaattatt

SEQ ID NO: 18564 - DNA, 445 bp, Glycine max
  unsure (1)..(445): unsure at all n locations
tatcgtaaccgattacaccaatatttttgagacaatgattgatttttaggagtctctgctntaatccattaccagtagatataatcgattacttctctcttannaagtgtntcagaagtgatcaagaacactttaatcaattacatcnaaaatctaatcgattacatttgtctttgaagttttccaatntttgggaagaacactntaatcaatcanaatggtaataatcaattacttctttgaaataatngattacattgtatatntaattgattacaggcagttattacgagctggtataagctagaataacattattagaaaatatgttttttacatcggttatttatgactntcaacatcngtttttaaaatcgatgtgaaagtaccgaccgtgatagtattattggtaacatcngttttttaaaactgatgttacgtaaaa

SEQ ID NO: 18565 - DNA, 399 bp, Glycine max
agcttaagattaatctcaaagttgcaaaagtacaaccttgtaagagactgagtatgtcatgcaaagatgatttacattttgaatcttgtcaaaagggaaaacaagttaaaaaactctttttccagtaaaaatattgtttccacctctagacctttagagttgttacatcttgatctgtttggcccaacaagaacaacctcaatatgtggtaaaaggtatgaacttgtcatagtgaatgattactttaaatggacatgggtaatgttcttagcccacaaggatgagtctttcaaggtcatctaaaaattttcaaaatagattaaaatgaaaatggagcattgtcgcaacctacccttcgtcgggagggcgacgcgagactcacgggtgcatcttccatgg

SEQ ID NO: 18566 - DNA, 347 bp, Glycine max
  unsure (1)..(347): unsure at all n locations
agctttaagaatatttgcaacatcgttntggatatttaacaagaacattctatttcttgacattggtaccttggtaattagattatttctcccatctctgatggaaagactagaatctttcatgtgaatatcatagccttttttgagtaattgtcccaaactcacaatattgttcttcatatttgggacgtagtagacatttgatatgaattcatgtcttgcatccttcanatggattatgatcttaccttctgtcttttatacgaatcttggaattataacagattatgcattgccacttactgactcatcaagatccacgatcatgctttcttctcacacatatg

SEQ ID NO: 18567 - DNA, 440 bp, Glycine max
  unsure (1)..(440): unsure at all n locations
agcttgttaattcgtggaagctcctaatatctcccacactttttggggtgggccattcttggatggccttgattttctcaaggtccacttggaccccatttctacctactacaaaacttaagaaaactatattatctacacaaaaggtacatttctctatatttgcatagagggtgtttttcctaaggactgaaagaactttcctaagatgtcctaagtgatcatctangctcctactgtatactaaaatatcatcaaaataaacaacgacgaatctacctatgaaatcccttaagacatgatgcataagcctcataaaggtgcttggtgcattagtgagcccaaaaggcatcactagccattcatacaaaccaaacttggtcttgaaagcggttttccactcatcaccctttntcatcctgatttggtgataaccactt

SEQ ID NO: 18568 - DNA, 382 bp, Glycine max
  unsure (1)..(382): unsure at all n locations
agctaacaaaatanttattgtatttagctggctnaaatcaaggcaaggtgttgtgtctaaacaataatctatgcctgaatcaacttacaaataatcttacaataatgagaaaaattaataaacgagttctatatttaaaacaaatatactaacattttacaacagaaaaatagactatataccatacgagataattatcccagctctataatcatctaaaatatgggtacaattgtataacatataattataataatggtgtgagtaatccacacttatataattacacactcatgtaaccattacgagatatgaaagaaagaaatatgctcaaacatttctttatcatattcaagtaatatgttctacatgataagttaca

SEQ ID NO: 18569 - DNA, 438 bp, Glycine max
  unsure (1)..(438): unsure at all n locations
agcttaataacccttcttgtagagtatcaagatgtctttgcatggtcatatcaagacatgcccggtctggattccgacattgtgcagcataagttgcctttgaatcctgngtcttccccggttaagcaaaagttacgaagaatgagacccaagatgtctttaaaaattaaagaagtaaggaagcaatttgatgcagggtttttagctgtggctcggtacccagaatgggtagccaatattgtcccagtcccgaaaaaggacggcaaggttcgaatgtgtgtagactaccgggacttgaaccgagccagtcctaaagacaattttcccctaccacacattgatatattggtagataatacagccaaattcgtccttttctcatttatggatggtttctcggggtataatcaaataaagatggcacccgaagatgtagag

SEQ ID NO: 18570 - DNA, 389 bp, Glycine max
  unsure (1)..(389): unsure at all n locations
ntccgccaatggtatttgaggtttaatgataccattatctcctttatatataaggaaaatattgtttatcggtgtatgtatctgaaggtcagtgggagtaaggttattttctaattttgtatattgataatatcttgtttgcagctaacgatcttggtcttcttcatgagactaagaaatttctctctataaactttgaactgaaagatatgggtgacgtaagctatgtgatacggatagaaatattccataatagatcataatgattgttacgcttatctcacaaagtacatatatccataaagtgctacagaaattcaagatggacaggtgtttaacatcgcctattctaatgtataaatgagacacatttattctcacaccaatgc

SEQ ID NO: 18571 - DNA, 247 bp, Glycine max
  unsure (1)..(247): unsure at all n locations
tatgctgcanacacttataatagacctcctcatcagcaaaactctcaacaatagaataattatgacctttcaagcaatagatacaatccaggttggaggaatcatccaaatctgagatagacaagtcctccacaacaacatcagcctgtccctcctttccaaaatgctactggtccaagcaagccatatgttcctcctccaatgcaacaacaacagtagcagtcacaacaaagacaacaagcaactg

SEQ ID NO: 18572 - DNA, 397 bp, Glycine max
agcttctctcttttcttgtataattattatattttggttataagccttgtatttggctatgtatttatgacatttgaatacttagtatttcttttattattggattagtatgactgaacatgatgatcatatttacttgctcttggttgcttatggttatgaagttttaaacttaattattttgatgatgtatgactagaggtatgcatttttatttggttattatgaatgactttctggattatatgacattctatagagtattatctgtctaagattgatgaatgattaagatatcttgttagattgatttctattcttgcgcatgtcatttatgtatggtaattatatttcttacctctctaagtttgatgaatggttaacatatcgtgcttaa

SEQ ID NO: 18573 - DNA, 431 bp, Glycine max
  unsure (1)..(431): unsure at all n locations
agcttaagcttcttcaactgcacaaggctcttaatatttgaagagtatccttgtggaaccttcacccgatgaagacactgacaaaaacttatctttgccttcttggacaaagtatggcaggctgggggcaagtaaatcttcttcccatcagaccttggatgcaactgtgatcgtatacccatatcagctagatcttgatgggtattcaagccatccttcgtcttgccttgaatgttaaggagcgtcccaatcacactgtcacaaacattattctccacatgcataacatcaatacaatgtctaacgtcaagatcacgccagtacggaagatcacagaagatggacctcttcttccatatgcaacgctgactnttatccttcttttgggtcttcccaaatactatattcaggtgttgaacccgttgatatac

SEQ ID NO: 18574 - DNA, 386 bp, Glycine max
  unsure (1)..(386): unsure at all n locations
tgttntaatgtgttataagaaccaatgctcctatcaacaggcatattccatgaccccagtccccaaacatcagagcanataagtaagggaatataatagttgggtaaactataggatttgcttcttggtatcttgcaacactgccaagtaaaagggctaattangaatctaatcagttgtcatggatttattatataccgagaagaaatggatagtaagctagataatttgtatccaccctgganaaacaatgcactataaagcagtcctaaaatttacttcaagacatttaataattcatgttgctgctagtaaagtaactaaacactgtatgcatcaccaatttcttgataaggaattgtgaaagtgttggtcctaanatatgt

SEQ ID NO: 18575 - DNA, 422 bp, Glycine max
  unsure (1)..(422): unsure at all n locations
agtcttttattattcttggcccgcggntccttggccctcttgcaattatgagaatatggagcttctgtttgttctatgtcatggctgaattgtgggggagtgtggtgatttcggtgctgttttgggggtttgccaatcaggttgtttcattgtttgaactttgagcttactttgttagttggtaatttgtttctggctttaattntgttatagtatttgttggtgtcgttatcatcttaacattntttaattttggtatctgaacatggcttattgatttcatcatcatgaatggctgttgtttgntggattgtgtcacttttcagctattcgttntggtcatattcatttgtatgctgctcctttctctatagcttagccgcttagcttttgatgagtcccttatatgttattatttcttg

SEQ ID NO: 18576 - DNA, 404 bp, Glycine max
  unsure (1)..(404): unsure at all n locations
tattacaagtcagtgagacaacctcaaagaaggctgaatctaataatgaaagaagaagtaagataggaagtgctcaagttggtagaggcagggctcatttacctaatctcggatagttcatgggttagtcttgttcaagttgttccaaanaagggaggtatgacagtgataaagaatgatagagatgagttaattcctacaagaatagttactgngtggaggatgcgtattgattacaggaagctaaatgaagccactanganagaccattacctgctccccttcatggaccanatgcttgagagacttgcanggcaatctttctactgtttcttagatggatactcanngctacatcaaattgcagtggatcctcangaccaagaanaaacatctttcacatg

SEQ ID NO: 18577 - DNA, 434 bp, Glycine max
agcttggctattactttatacatgcaaccaatgagagaaatatgtctatagtcatttaaagactgtggatgggttgctttacgaataagagccaagaaggaggcattgctgcctctagggaagctgccatgaatatggaattcatccacaaatctcctgaattcaggtttcaaaaccccccaaaattccttattaaaattgaaattaaagccatctggccctgagcatttgtctccaccacaactccaaacaacatctttaagctcttggtctgaagaaggggcaattttaccctccctctgcctctgatcaatcatagggaaatataccccatccagagaaggtctgaacaatgtatcttcagtaaatctatggagagagaatttgagaacttcattcttgactaaattatgctggtgaacccatacaccatc

SEQ ID NO: 18578 - DNA, 401 bp, Glycine max
agcttaaacattcaacttcgagcgtctcgatatattacgggactcaatcagacatccgagtaaaaaattattgtggtttgaattggctcatagattcaactttcaatttcgagcgtatcgatatattacgggactcaatcagacatccgagtaaaaagttattgtcgtttgaactagttcagagattcaacattcaatttcgagcatctcgttatattacgggactcactcagacatccgagtaaaaagttattgtcgtgtgaattggaaaagaggttcaacattcaatttcgagcgtctcgatatattacgggactcaatcagacatccgagtaaaaagttattgtcgtttgaattggctcagagattcaacattcaatttcgagcgtatcgatatatta

SEQ ID NO: 18579 - DNA, 334 bp, Glycine max
  unsure (1)..(334): unsure at all n locations
ntgagccaactcanacgataataactntntactcggatgtctgattgagtcccgtaacatatcgagacgctcgaaattgaatgttgaacctctgagccaattcaaacgacaataacttttttcacggatgtctgattgagtcccgtaacatattgagacgctcgaaattgaatgttgaacctctgagcaaattcagatgacaataactttttactcggatgtctgattgagtcccgtaacatatcgagacgctcgaaattgaatgttgaaactctcagccaatacaaacgaccagtaacttttactcggatgtctgattgagtcccgtacatat

SEQ ID NO: 18580 - DNA, 426 bp, Glycine max
  unsure (1)..(426): unsure at all n locations
tcttatccaaggctcatcttggtggtgaagctccttcttttatgacttattccctagtggatggcacctcctctcacctcttctcctttgtcttccgctgcatctccatggtggaaaatcaccattaaaggacctcattgaagctcaaagatccagcctccatagaagccccacaagcaagcttccatcactgcctttgaggatcgaggatagacgaacaaagcacctaagaaggaaggaggttccattggtcaaggtgacctgnggaggtacatcaggagaagatgccacgtgggaattagagagtcagatgcaagccgcctatccatccttgtttgagtcaggtaaatttcggggacgaaatttctaaaagggtaggagagttgtaacaccctgagatattataagttatatatcgatgtttaa

SEQ ID NO: 18581 - DNA, 368 bp, Glycine max
tatgcacttctcttatgacaacggcagcactcctagcactaaactgctacgagcttgaagccatcttctcaactaaatttctggcttcagcaggggccatgtctccaagggctccaccactagcagcatcgatcatacttctctccatgttactgagaccttcataaaaatattggagaagaagctgctcagaaatctggtagtgagggcaactggcacacaatatcttgaatcttacccaatactcatacatgctttctccaccaagatgcctgatgcctgaaatgactattctgatggcagcggtcctggaagcagggaaaagtttttctaagaatactctcttgaggtcatcccagctcgtgatg

SEQ ID NO: 18582 - DNA, 423 bp, Glycine max
  unsure (1)..(423): unsure at all n locations
tacccatattgatgagttattnttttaagtctacattctttaactgtttgtcaaaanttgatgcaatgtggcgaatgcaatacacataagatacatccggtccaatccacccaactcgttttgattgcaaagctgctagtaaagtggttcacctgtctaatataatacataaatttggttaaagtgtaacatatctcctcaaataatgcaagaaccacatccaaacttctttgatctcgctctcaacaattgcaaaagaaagtggaaaattatttctactaccatcttgtctaatggcagtcaacaaagtaccataatattttccagttaaaaatgtcccatctgcttgctcaattggcttgcaatattgaaagccttcaatgcatagcttanaagcccaaaatacacgattaagaatcacct

SEQ ID NO: 18583 - DNA, 420 bp, Glycine max
tgtagggttaaagtctcacgattggcacgtgctgatgctcatttgttagccgaggctatacgagacatcttgccaaacaaagtcaggttagcgataactcgcctgtgctttttcttccatgctatatgtagcaaagtcattgattcagtcaagtttgatgagttggaaaatgaggccacaattatactgtgccagttggagatgtattttccccctgctttctttgacatcatgattcacttgattatgcatctggtcagagaaatcaaatgttgtggtcctgtttatctacgatggatgtacccggttgagcaatacatgaagatcttaaaagggtatacaaagaatctatatcgtctagaagcatcatggcagaacaagctagacatgtattttacgtgcaagacccttgtgatgaaa

SEQ ID NO: 18584 - DNA, 406 bp, Glycine max
  unsure (1)..(406): unsure at all n locations
gggatgtgaacgagatatcgcgggatatatacttgtgattgccaaacaataacgacatccatcgtctactacgaattagagagacatatgggctgacaggtatgtttgattctatcgattgcatgcatcggaaatcgataaatcgtctagctgcattacaaggtcaatattggacaagtgatcattgcatacccataataatacttgaatgcgtgccgtatcacgacttgtgcatttgacatgcattattatggagtggtggattcaacatgatgacattaatgcgtcaaaccacatcatttgtgtttaatgacattntggaaggttgagctctctactgcaatatacaatgaatcgaaccccatataatatgagatactatattgtagatgacgtttatcctgat

SEQ ID NO: 18585 - DNA, 403 bp, Glycine max
tctaaactttatacaagaatgaagctctgataccacttgttagacttttggcctcagatatcttaagaagggggggttgaattaagatattccaaactacttccccaattaaaatctatttcactctcttttcaagttataaattcccttaacaatgaacttcttaaatattaattcaaataagacaatttgaatatgaatatcaagcaataataaacaaaggagataaagggaaaagaaagtccaaactcaaattattactggttcggcccaccttggggcttcgtccagtccccaaccaacccgttggaaagtcccactatctggtaaattccttttacaagtcttaaccacataaggacaatccttccttggggttaaaaattccttaacaccagaaaac

SEQ ID NO: 18586 - DNA, 421 bp, Glycine max
  unsure (1)..(421): unsure at all n locations
tgagatctcccttgacaattgaatggaagagatgacatgtattntattctatgggtntaataccttcctagcacagtgtccaagtttttctcctgttgctggttggtgatcctcattctcactctcactctcagctaaaaggcgcctagcagtgccagaaatatcagagaaagagaaaaaagtctgaaaatgtgatgtggcttttgttaattcttcctttccattatcctttagactgcaaggaagcatatggtgagtccaacccactggaacacaaattctgattatcccattttgtgttattgtcagtagcagagaaataaagcccaatagcatcaactctgaaacgaagacagaaaacagaaaaggaaaaaaatattgcgaaattaatcacatcccaattntcataacagaagtccct

SEQ ID NO: 18587 - DNA, 422 bp, Glycine max
tttgtaagggatgtgaacgagatattgtgggatatatatttgggaaggccaaacaataacgacatcaatcgtctactacaaattagagagacatatgggttgacaggtatgtttgattctattgattgcatgcatcggaaattgaaaaattgtctagttgcattacaaggtcaatattgtagaagtgatcattgcaaacccatagtaatacttgaaggcgtcccgtaacaagacttgtggatttgacatgcattattatggagttgtggattcaaatgatgacattaatgtgttaaaccaatcatttgtgtttaatgacattttggaaggttgagctctctagtgcaatttacaattaatgtaaccccatataatatgagatactatattgtagatgacgtttatcctgatttggatacttt

SEQ ID NO: 18588 - DNA, 436 bp, Glycine max
  unsure (1)..(436): unsure at all n locations
tcaagaaaaagatggcctcagcaaattccttatttccagattggaattctatcaatagacctccaatctttaatggagagggttaccactactggaaaacccgaatgcaaatttttatcgaggcaatagatttaaatatctgggaagccattgaaatagggccttatatacccaccacagtagaaagagtttcaatagatggtagttcatcaagtgaaagcataaccatagaaaaatctagagatagatggtctgaagaggatagaaaacgagtacaatacaacctaaaagccaaaaacataataacatctgccctaggaatggatgaatatttcagagtttcaaattgcaagagtgctaaggaaatgtgggacactcttcgattaacacatgaaggaactacagatgttaaaagatctangataaatgcactaac

SEQ ID NO: 18589 - DNA, 347 bp, Glycine max
accaagaaaaaaccacttttacatgcccctttggtgtctttgcttacaaaaggatatcgtttgggttatgtaatgtccctgccacctttcagagatgtatgctagccattttgttgatctggtaaaaaaatgcatcgatgtgttcatggattatttctttgtctttggattttcctttgaccattgtttatccaacttggaattggtgtgaccacaagatctcgtctcgagggattgaagtggacaaggcaaaaattgatattattgagaagttgcctccacttatgaatgtgaaaggcatccaaagttatctcatacatgcccgacttctatcggaggttcataaa

SEQ ID NO: 18590 - DNA, 433 bp, Glycine max
tgaagaaactgtctacatgcagcagcccccaggtttcgtttatgacagtaaccttgtttgtaaactgaacaaggctctctatgggctgaagcaagcaccttgtgcatggtttgaaaagctttcagcaactctcatctctcttgggttcaaggctagcaagtgtgacccttccttatttgtatgtcatgtggaaacacaacttatgcgcttgtctatgtggatgacataatccgcactagaaataatagtgttctaattcagcaacttatttcatagctaaactctattttctctcttaaacatcttggcaagttggactacttccttgggattgaagtcaactataattccgcaggttctgtcatgctttctcaaaccaaatacatctcagatttgcttgaaagagtaaatatggaaaaagctaaaggaattt

SEQ ID NO: 18591 - DNA, 409 bp, Glycine max
tcaacattcaatttcgagcgtctcgatatattacgagactcaatcttacatcagagaaaaacgttattgtcgtttgaatttgctcagagcttcaacattcaatttcgagcatctcgatatgttacgggactcaatcagacatccgagaaaaaagttattgtcgtttgaattagctcagaagttcaacattcaatttcgagcgtctcgatatgttacgggactcaatcatacattcgagaaaaaagttattgtcgtttgaatttgctcagaggttcaacattcaatttcgagcgtctcgatatgttacggggactaatcagacatccgagtaaaaagttattgtcgttggaatttgctcaaagattcaacattcaatttcgagcgtctcgatatgttacgggactccatc

SEQ ID NO: 18592 - DNA, 389 bp, Glycine max
tgtaatcgattacacacatacttgaatcgattaccagattattttttcagaaaacattctcaacagtcacatctttttgtgtggttcttgaatggctatcataggcctatatatatgtgacttgagacacgaatttgacaagagtttttcagagcaaaaaggtcttatactcttataaagagaaatcgttttatcctcttacaaattccttggccaaattacttgtgattcaataaggaattatttgagcgctcaaattgatcaatctatctctttcaagagagatttcttcttttcttcttcttcattttgaaaagggattaagagaccgagggtctcttgttgtgaaataattctaaacacacaggaatgcgtgtccttgtgtgttt

SEQ ID NO: 18593 - DNA, 367 bp, Glycine max
tgatcaacacttgcacagtggtcgatgatgcatgggagatcctgaaaatcactcatgacggatcctcccaagttgaagatgtccagattgcaactgttggctacttaactcgggattctgatgatgatcgaggaagaatgtattcatgacttccacatgaacattcttgaaattgccaatgcttgcactgtcttgggagagaagatgacagatgaatagctggtgagaaagatcctcatatccttgcctaatagatttgacatgacagtcactacactagaggatgcccacgacatttgccacatgagagtagatgaactcattgattctcttcagacctttgagctaggactctcggatagggctg

SEQ ID NO: 18594 - DNA, 365 bp, Glycine max
  unsure (1)..(365): unsure at all n locations
tcttacgtagcctctcttggtgctcagaatatcccaataacntatccctcttattactagctattgtgaattctttagttcctgaatgtacaaccttaaaattgttgctcgttcccctctttgctaaaacatcaagagctgtaactacgtcactaatcaaaggtctggtatcagcttccttctgaatacacattgctgcaactgctatggcttggtgtagaccctatgttgggtagttccctttcatcaatggatcagccattgatgaaaatttccttctgtctctgaatacgggttgtgccttataaaaaaaaacattatgaatgtcaattgctgaacatttgtgcatattattggtcttagct

SEQ ID NO: 18595 - DNA, 427 bp, Glycine max
  unsure (1)..(427): unsure at all n locations
agaatcggacctcagtgtgaaaagttatgaccatcnctttttctcgagagcgttcgttgatcaatgtcgagcatctcgacatgttatgcgctcaaatcggacatccgtgtgaagaggtatgaccatttgagtttctcgagagcttccatggatcaatttcgagcatatggtcctattatgtgcccgaatctgaccttcgtgtgagaagttatgaccatttgaatttctcaagagcttgcgctgtttaatttcgagcgtctcaatatattgtaagcgtgaatcggagctcagtgtgaaaagttatgaccattagaatttctccaaagcttacttggttcaatttcgagcatctagacatattatgtgcacgaatctgtccttcgagtgacaagttatgaccatttgaatttatcgagagcttacgctg

SEQ ID NO: 18596 - DNA, 399 bp, Glycine max
  unsure (1)..(399): unsure at all n locations
tcaagcttcatgagagagtcatatatcaaatngagaggtttaattttagctatgctaaactagccaacaaagggagaaagaaggcagacttcgaaccccgatattgggtttgggtgcacatgacaaatgaaaggtttccggaacaaaggaaatcaaagcttctaccatggggagatggaccatttcaagtgcttgaaagaattaatgacaatgcttacaaagttgagctgcccggtgagtataatgttagttccaccttcaatgtctctgatttatctctttttgatgcagatggagaatccgatttgaggacatatccttctcaagatggagagaatgatgaggacatgaccaagagccatggcaaggatccacttgaaggacttggaggacctatga

SEQ ID NO: 18597 - DNA, 425 bp, Glycine max
  unsure (1)..(425): unsure at all n locations
tcttcttgtttctctccccatttgaaaccaacatttttcttgagcacttcattgagaggtgctgccaatgtgctaaaatccttcacaaatcgtctataaaaacttgctaagccatgtgtcgcaacctacccttcggcgggagggcgatgcgtgactcgcgggatgcgtgttccacgaaaggaatacgcgcggagtcgccactaatgtttatttgaggaaaacgtcggaaaaaccggaaaagaagcgatctacgaacttttaagtgaaaggctcgggagttgtatttacgcgtggggaaggtattagcaccccacacgtccgtcacaagggacggcagcctttaatcgaatgtgcaaacatgactttgatttttacgttcccttttatgtccttatatcctttataccctntntatanttttttct

SEQ ID NO: 18598 - DNA, 406 bp, Glycine max
  unsure (1)..(406): unsure at all n locations
actcagctgtcattggcgagcaaataaaatntttttcatgatagcatggatagtattaagaaagttgcaattgattcagacagatgttgtagggcctcaaagaacaccttcattgaaaggcaatttgtattacactatatttattgatgactttttctttaagttcaaatcaaaggtggctgaaattttttggatgttcaaagtcaagtagagaatgaaagtggtctcaaaattcaaattttgaggtctgacaatggcatcaagtacacatctgcaaaatttaatcaattttgggaggattctgacatccaacatcaacttactaatccttataccccacaacaagatggggttagtgagaggagaaataaatatatcttggagatgatgagatgcatgttgtatg

SEQ ID NO: 18599 - DNA, 312 bp, Glycine max
ttttatttcaaaagattctcatgaaacttgtgacattggtcatttagcttaacacaaacgaaagccctattctcttaattcgagaagaagccctaaaatttttgagttgatgcctatggatatttggggaccattttttaaatcatcaattcgtggacatagatatattgtaactatacttgatgatgatagtacatatactcgggcggctttattaaaatcaaaaagtgaagtgaaaacacatgttcaaaactttattaatctgatcgaaaatcaatccgaagcaaaaattaaatgcattcgattcgataa

SEQ ID NO: 18600 - DNA, 429 bp, Glycine max
actcagcttctaattttgggattgatgctcttaaactgttggtatatattaaactgagttccaaccaaggctgtctcaaagacaccttttgagttattcaagggttggaaaccaagtttgcgacatatacgcgtatagggatgcccgtctgaagtaagaatttataatccacaagagaagaaactagaccctaggactattactgggtatttcattggatatcctaaaaggtttaaagggtataggttctattgtccatcccacaacactaggattgtggaatcaaggaatgcaaagtttcatgaaaatgacttgatcagtgggagtgatcaatttcagaacatttcttctgaaagggatcactatgaagctgaaccttctgggacaagtaataggttggtagtcattctcacccctcaagttaaaatg

SEQ ID NO: 18601 - DNA, 437 bp, Glycine max
  unsure (1)..(437): unsure at all n locations
gacctataaaactcagctgtatcatacacacatctgaatcgatatcgtttagtttttcaganaacattctcaacagtcacatctttttgtgtggttcttgaatggctatcataggcctatatatatgtgacttgagacacgaatttgacaagagtttttcagagcaaaaaggtcttatcctcttataaagagaaatcgttttatcctcttacaaattccttggccaaattacttgtgattcaataaggaattatttgagtgctcaaattgttcaatctatctctttcaagagagatttcttcttttcttcttcttcattttgaaaagggattaagagaccgagggtctcttgttgtgaaataattctaaacacaaaggaagggttgtccttgtgtgtttagaacttggaaaaggaatgtataagatagtggaactct

SEQ ID NO: 18602 - DNA, 427 bp, Glycine max
  unsure (1)..(427): unsure at all n locations
ttccattctcttggaagttcatcattggatttttcttcttctggaggatctttattgtttcctttatcatttcctttggaatcttgttcatgaatattcatatgttctaaagaatctgcaatatcatctagcatattctttcttgacaagatagcattagattcatcaaaggtaacatgaatggattcctcgatattcatagttcttttattatatatcctatatgctttgctttgtaatgaatatccaagaaaaataccttcatcatattttgcatcgaattttcctagattatctctaccattattaagcacaaagcatttgcaaccaaaaacatgtagatgagaaatattaggttttctaccattaaataactcatatggggttntctttaanataagtcttattaaggccctattcatgatct

SEQ ID NO: 18603 - DNA, 402 bp, Glycine max
  unsure (1)..(402): unsure at all n locations
aactcaagcttgtaggctacatttacaaccatacattggctnngatcactatgaggaaattctcacaaaaaattgaattagtgagacatggagttacaagatttgctaccactttcttaactttgcaaagattgcataagcaaaaggccaatcttataaggatgtttacttcagatgaatggttgaagtctaaggcagctaaagagcccaaggggaagcaagcaacagatgttgctcttatgccatcattttggaatgatgttgtctatgctttaaaggctatagggcctcttgtaagtgtgttgaggttggtggataatgaacaaaaacctgcaatgggtttcatttatgaagcaatggatagggccaaagaagcaattcatagagctgtcaataacaatg

SEQ ID NO: 18604 - DNA, 417 bp, Glycine max
ttacgatttcaaactccacaaataagagatgctttattataattaggtgaatttaatgatggtcttaaaataaaaagcgaagcggattgtttagcaacttatgaacttgaaaattttgagtttttattaagtatgactatttggtatgacatattatttgctgtaaactccattagtaaaaagttacaatcaaaagatatgagtatggatgccactatagaacaattaaaaggtcttattttattttatttttgaaaaatatagagaaggtgaatttgaaaatactataatttatgccatagaaattgttaatgaaatggagatagaacctaagtttcatgaaaaaacatgtagtttgtagaaaaaaaacaatatgatagaaatattgataatgaagttgaaaatcgcctaaagaat

SEQ ID NO: 18605 - DNA, 425 bp, Glycine max
  unsure (1)..(425): unsure at all n locations
gcacgtatcggtcaagtgtatggaccacgttgtattcatttgctcatcgataatggttccagtttaaacgtgatgcccaagagcactttggagaaattaccattcaatgcttcccacctaaagccaagttccatggtggttcgtgccttcgaaggcacccggcgagaggttaagggagagatcgacctccctgtacagatagaccctcacacctgtcaagttaccttccaaataatggatattaaccccccttacagctgcctgttggggcgcccgtggatccactcggtgggagttgttccctctacactccaccaaaagttgaaattcgtagtggaagggcatctggtcatcgtatcangcgaggaagacatcttggtaagctgcccatcctctatgccttatgtggaggccgcagaggagtc

SEQ ID NO: 18606 - DNA, 425 bp, Glycine max
  unsure (1)..(425): unsure at all n locations
cggctgattaaaaaacacataactaggagtggaaatatattaaaagttcgattatatttgttgttgacaaatagagaatagaggatagtacacactaatattacaataataggaaaatggaataattcatgtaccaaataaatgataactcatatttgatgtgaaaaatatgttacccaaactgtcgagcttgtaaatcaacatatgatattttaacttaatcaagtgaatttaagtttaatataattgtgttaaatattttgataaagaattttgatagttataatagttataatgtgatttttatataaaaataataaaaatcattagtcaatctgggtaaagaaagaagacaagacatagaggttacaagtttaaattctccaaaacgaatatttcanacaaaacttataataaattaacat

SEQ ID NO: 18607 - DNA, 385 bp, Glycine max
acatgaaaattgaggaaccaaaccaaatctatatgggagaggcgtgagagctaacgaagtttctctgctacactttgagatggaaattcaattgcagcatccgaagaagcacttgagagcgagcacatcacaaggaggccaagggagaagcaacaaccacatgtcccaaagcaagtatgttggggtgaggcaaagagcatcagggaaatgggttgctgagatcaaagacacaacacaaaagataagaatgtggcttggcacatatgagacagcagaggaagcagcaagggcttatgatgaagctgcatgcctccttcgtggatccaacactcgcaccaacttcatcacacgtgtgttccttgattcccctctcgcttcgcggatt

SEQ ID NO: 18608 - DNA, 353 bp, Glycine max
aattgaggaacccaaccaaatctatatgtgtgagttgcgagaactaagggaggttctctgctacactttgagatggaaattcaattcccgcattcaaagaaacacttgggagccagcacatcaaaaggaaggtaagggagaaacaacaaccaccaaaccaaaagccagtatgttggggtgaggcaaaaaacatcagggaaatgggttgctgagatcaaagacacaacacaaaagataagaatgtggcttggcacatatgagacagcagaggaagcagccagggcttatgatgaaactgcatgcctccttcgtggatccaacactcgcaccaacttcatcacacgtgtgtccct

SEQ ID NO: 18609 - DNA, 426 bp, Glycine max
aggaatttggacaaagacgctagtatcatcgttcttttgtcaaggttagcttatgaacttctccaacgttgataggacagtgcatttctagtatcatcgtacaattgtcaaggttagcttcaattccccggtgggtgatcatgaaacccaagaattttctgcctctaaccccaaaggtgcatttttcaagattgaggcgcatgttatacttgagaatctctttgaacacctctgccaaatttgccacatgtttggccatgctatgagacttgacgaccatgtcattcacatagacctcgacattttgtcatatctgttgtttgaagacccagtccataagcctttgttatatggctcctacattctggaagtcgggcgcaccatccataagcttttcgatgatgggaaagggatatgcatccttgg

SEQ ID NO: 18610 - DNA, 415 bp, Glycine max
  unsure (1)..(415): unsure at all n locations
ntgagctcaatagctccaacctcatctataccccatatttagaatggccaaggtgctaccaagacgttcaaaggtacggccggagcattgacattatcggtgaaggcctggcacttgtggcacttcctcacatggatgcaacaatagttttccatagtgagccagtaataccctaccctcagaatcttctaggccatggcatgcccgttggcatgtgttccaaaggatccctcatgcacttctactagcatttgcttagcctccttggcatttacacattgaagcaaaaccatatcatggttcatcttgtacaagatatttccacttaggaaaaagcaggctgcacaaacattactcagctcagcaagaacaatttcttataatattcaaccaatttagaatcaagaactcaaca

SEQ ID NO: 18611 - DNA, 273 bp, Glycine max
taacttgcgtattgctgtgacttacagtcttcaccgggctcaccttatgtgtcctactgactgtgaagtcaccctcactggctgacagacccgcagggtcagccatacagagatttgacgaacgccaccatgcttgctctacaatctcgctaagacgatccatctatgatggccggtctgttcactgcgactgactattccgccatgacgctgagattttatctctgtacagctctctctggaactgccagagtgacctctgagacccactga

SEQ ID NO: 18612 - DNA, 355 bp, Glycine max
cttgattttctcacggtgcacttggaccccatctctaccaactacaaaccctatgaaaactatattatctacacaaaaagtacacttctctatattatcatagcgggtgtatttcctaacgactaaaataacttgcctgagatgtcctaagtgatcatctatgctccaactgtacactaaaatatcatcaaaataaacaactacgaatctacctacgaaatcccttaagacatgatgcataagcctcatataggtgcttagtgcattagtgagcacaaaaggcatcactagccattcatacaaaccaaacttggtcttgaaagcggggttccactcatcacccgttatcatactg

SEQ ID NO: 18613 - DNA, 278 bp, Glycine max
agacgctcgttattgagctacggctgctctcgagaggatcgaatggtcattagttgtggaacgaatgtgctatgaggggacgtgactcgtctatacgctcgaaattgagcgacggatgctctctagaggtgcgaatggtcataggtatcaacacggatgtccgatacgtggacgtagtagatcgggacgctcgaaatggaacagcggaagctctggagactatggaatggtaataacattccactatgatgttcgacttgggaacgtaatatatctag

SEQ ID NO: 18614 - DNA, 363 bp, Glycine max
  unsure (1)..(363): unsure at all n locations
cgagaaggaggaaaggtgattggagatgccacttcaaggagaagatgagtcgagaacaaactcaccaccatatgaagccatggataagagcttgaaagtaggagaagatgagtggagggagagggagagaagagggcacgaaatttatgcctcaaattaggtcaaaacattaaagtctaatttcttaaatgatcaaacttgaaaaaatgcacacacaaggcctctatttatagcctaagtgtcacacaaaattggaggcaaatttgaatttctattcaaatttcacttgaattagaatttgaatttgtggatccaaatttggagccaaaattntactaactatgagtaatgaatttcagctat

SEQ ID NO: 18615 - DNA, 317 bp, Glycine max
tgaattcaaaaaaaaaacaaaaattacaattacaattttttaaaaatattgtaatattttattttagcttgtgctcacgtactcccacgtagcccatatcctcacttgtctcagcaccgggtacccatcaatcctaccaagcttccgctttcaatgagctcttttttaaggttgagagaagaattgatttggtctatggaggtggtagcgtgggtttgatgggtctagtttctcaggcggttcatgatggtgggcgccatgttctggggtttgacctctctctctctctctgtatctgtctctctatcctaatctca

SEQ ID NO: 18616 - DNA, 314 bp, Glycine max
tgacctttctagctacaggtacaatcccacgtggacgaatcatcccaaccttacatggttgagtcttccacaatagcagcaacaacaacagtcgctactgcaatagccctataaatagcatatagctgaggcttcctccgcaccttcccttgaagaacttgtgaggaaaatgactatgcaatacatgcagcttcaacaagagaccaaagcctccattcatagcttaactaatcaaatgggacaattgcctacacagttaaatcaacaacattcctacaatcctgactgactaccttctccatctgtccagaatc

SEQ ID NO: 18617 - DNA, 310 bp, Glycine max
atgacgctctccagcaacaggtacaatgccggatggaggaatcatcccaaccttagatggtcgaatccttcacaacagcaacagcaacaacgaccttatttacaaaatgttgctggcttaagcagaccatactttcctccaccaatccaacagcaacaacaacaacagcaatagccccataaacaacagacagttgaggccactatgcaaccttccattgaagaacttgtgaggcgaatgactatgccaaacatgtagcttcaactagagaccagagcctccatatatagcttaactaattagatgggac

SEQ ID NO: 18618 - DNA, 360 bp, Glycine max
ttcatgaaaatacaaaaaaaagtccctactacaaagactacccaaaatgccctcaaatacaaggctaaaaccctatactacaagaatggccaaaatacaaggcccaaaagaaggaaaaacctattctaatatttacatagataagcgggctcatacttagcccatgggcccaaaatctaccctaatgctcatgagaaccctacggccttcccttggatctctggcccaatatactcggagtcttctatccaattccctaacgaggtaggattacatcactatgcatgcatcaactttgaataacacccacacggaaatgctcctgcgttactcaaatttctcaatttcagacacgttgat

SEQ ID NO: 18619 - DNA, 302 bp, Glycine max
agcttttatcatgggttatggaccatttcaagtgcttgaaagaatcaatgacaatgcttacaaagttgagctgcccggtgagtataatgttagctccaccttcaatgtctctgatttatctctttttgatgcaaatggagaatccgattgatgacaaatccttctcaagagggagagaatgatgaggacatgaccaagagcaatggcaaggatccacttgaatgacttggaggacctattgatgatgacatgaccaagagcaagggcaaggatccactggaaggacttggaggacctatgac

SEQ ID NO: 18620 - DNA, 388 bp, Glycine max
tttcttgtttctacacgtatgtatcagctccaatagatctttcgctctccatgctctgcttgttgagaaagaaaatcggtgttgcttaccaaggagacatcctttacacacttcattgttctcctttatgcttggaagatctctcatcatgttcttctcatgtaacaacttcaaggcatgtgtgttgaagtggccaaatcttcgatgccatagccatgaatcatcaacttgtaccttcatgccaatggttggtgcatatttaaatttagagggaagcttctattgctcttattcatctttacttgggctatctcagacctttctatttgttgcctaagatttgcatacacctcctttaaagtgaagcgtgtcgcctctctcaatcatt

SEQ ID NO: 18621 - DNA, 293 bp, Glycine max
ttcttttcacccttaccgacaatggaaaaagcttttaatggaagtcaagagcatgaaagtgcactgataccattaactagtcaatatgttcttgagcaggttgaagacatctatactatatttggaaagacccataagaaggataaaaagactaaaacttgcatatggaagatgaggccgatattgatcgatcttgcatattggttcgatctagacgtcagacattgtatcaatgttatacatgtggagacaaatgtgtgtggtagtgttattgccacactccttaacattca

SEQ ID NO: 18622 - DNA, 436 bp, Glycine max
  unsure (1)..(436): unsure at all n locations
tactaagcttgatccacatggcaccgtcttcctgatcgccctaattttcttccaccaacaagattattagtagcaaccaacatgacattcttttcagcttctatggccccaaatggcgcctccttcggcgtaacctcacttcaagaatccttcacccctcacaagttaagtcctattcacatgctcctgcaacgccttagatggttatttggttgctacttatgcctctgtgaatttcctggtagctgagatcgggagggacccaacagcttgggatgatcctttggcctttaagccagagaggttcatgaacaatggtgaacaaaatggaggcacaaattttgacataatgggaagtaaagagatcaagatgatgccgtttggggcagggaggagaatgtgtcctggctatgctttgngaaatttgcacttagag

SEQ ID NO: 18623 - DNA, 407 bp, Glycine max
agcttgataaaattttaagaaaataagtactagctcaaatggttaatagtttctataattttgaaaagtataatgtacattaacattagtgacaaaatagtaaatggagtagttatacccgatccaagaaatatttagcaacattgggaagattatgtaattccttttttgtcttgtatgtttcttgaacagcaggatctttccagatttcatctaccataggagcatactcacgcgttgcagcagggaagaaggcctccaaatctccgatggccataatatccagtaatcagtcagaaaagtgcttgaatctttgattatagagtaaacactcaccttgttttcgtcagctgctgtctctgctaaatttattatacaattagattcattcacataactctagcctt

SEQ ID NO: 18624 - DNA, 424 bp, Glycine max
  unsure (1)..(424): unsure at all n locations
tctaaactntgtacaagaatgaagctctgataccacttgttagattagttgcctcagatatcttaagaagggggttgaattaagatatcacaaactattccctaattaaaaattctaatttgattttaacccaaatcctaagattccttttaaaatgaattcctaaataattattcaaattaaacttactgaatagaagcaataagcaataataaataaaagagtttaagggaagagaaagtgcaaactcagttttatactagttcggccacacccttgtgcatacgtccagtccccatgcaacccgcttgagagttccactcaatcgcaaaaaccctttacaagttctgaaccacacaaggacaacccttcctttgtgttcagatttctttacaacaagagaccctcggtctcttaatccctt

SEQ ID NO: 18625 - DNA, 408 bp, Glycine max
  unsure (1)..(408): unsure at all n locations
gctgtgaataatagtcatgttcataaagaagagaaaaaggtttttatttatacatgtatgtaaaaggaaatgtgtatagaagaattcttgcgtgtaaatgatgtgtggaaaggaattcttgtgtgtgtgagcaacgagtgtatatgaagaaacttttgtgtgaactataagtgtgtgttgaaaaaaatgaaaaatctttgaatgtgaatagggtttgtatatagactatatgacgtaaagagaagagttccaatgcgtgtacagaaaaagtttgtcatgtataagaatatagatgtacaaagaaaggttttcctcataaaggaccacaggtgtataattntgtgaatgaaacaaaaaggaaaaagaaagaaagaccgcgaaggtcgacatgttatagttaagaagtat

SEQ ID NO: 18626 - DNA, 421 bp, Glycine max
  unsure (1)..(421): unsure at all n locations
tgctccanagaataagtgaactacatcttgtttatttctttttgcaacatccccttttgtaccccaaaggtgaagatggctatagaccaaatattcttcataaggatcatccaaatatctatgttgcaaagaggaaaaaagttatcatgcgtgaatgcaatcaagggacaatgaagctcacacaatgctacattcaagaagattgtttcaacaatggattattaatgaatattgtatgattgagtctcaaaaactaaactatgttagaaaacatcaacaggaactcagagttaacaagtacatgaatttaaatgcatgtaataatgagcccctaacccaaggcaatgaanaaggtaagagaattatactaccaagcttttttgctggtagttagagatatatggaacaactgtatttcgat

SEQ ID NO: 18627 - DNA, 391 bp, Glycine max
tgtcttttcttgtttctctccccatatgaaaccaacattgttcttgagcacttcattgagaggtgctgccaatgtgctaaaatacttcacaaatcgtctataagaacttgctaagccatgaaaactcctcacctcggtcacagacttatgtgtaggccattcttgaatagccctaaccttctcctgatcaacttgcactccttttgaactcacaacaaaaccaagaaacacaacatgtgtagtacaaaagatgcatttttcaagattggcatacaatcgttcttttctaagcacagtcaagacagattttaaatgatcaatttgcaaatcaagcgaagtgctatagataagactatcatcaaagtacaccacaacatactttcctatgaac

SEQ ID NO: 18628 - DNA, 412 bp, Glycine max
agtgtcatagtcatagcattattgttagtatttcttatagcccataatggttcggataatgtttcatgccaacacctgtgtttcttttcaacaaattttttgatttaatttacaataatcttgttagtggcttctgcttgtttgttagcttaggcatagaaaggcataaaataaatgatttcatgccaaactattgagcgaatgccactaccttgtcacatgtgaaaatagtaccctggtcatccattatagcctctggtatcccaaatctataggctatttggttttggatgaatttgatgatgtcattttgagtaacagagaccatcagttgtgcctccacccacttcgtgaagtaatgtgttgccacaataatataactatggcatttagaagaactagggtggatttt

SEQ ID NO: 18629 - DNA, 399 bp, Glycine max
agcttatgaatttaaattggatatgttatgaatatatatgaaaatatcgttcttttgcagatacattcaagttaaaggtcaagccagggaagacataccttatgcgtttgatcaatgctgcactcaatgacgaactcttcttcagcattgcaaatcacaccctcacagcggttgatgtcgatgcaatttatgctaagccatgtgacactgacactattctcattgcccctggacaaacctgcaatgttcttctcaaaaccaaatctcactatcctaatgccacattcttcatgagtgctataccatatgcgactggacaaggtacttttgacaactcaactgtggctgctatccttgaatatgaagttccaccacattgtgttcactcaacaacttcag

SEQ ID NO: 18630 - DNA, 427 bp, Glycine max
  unsure (1)..(427): unsure at all n locations
ggttaaagaaaaataaaaaaagtaaccaaatattgaccnnataggttattcagagagcaatcaagaacatcttatgataccttgtggactttgtataattggtaataatttgacctatgctactatttacaatggtagctggagccatgaacatttgggcaatttcaaaaacttgctcactttctattatagtaccaatgcctccaattgctttcacaacagcttcactgccccaagtacttaatctacagtatacaagttgtcctttcaccttttttggctctaaggagtcttcatagcataatctgtcaatgcattgaaatggtactttgttaatatggaaagcttaactaggtgttgtcaaataaacaaaaagaaaattacttagcattntccttgcttccaaattgtataatcattccttatc

SEQ ID NO: 18631 - DNA, 439 bp, Glycine max
ctcgtacccgggatactctaactcacctgccgcacgctttcttttacttattgtgaaggaattgagtaccttgagaccttctctcctgatgagaaaattgagacaattccagctattcttgcttaagactgcatcaattgctggaaacttcagctacttgatgttaacaatgcattccttcatggaatcgcatctgaggaagtctacatggtccctcccgctggcgtcaatgagtcacatccatctcaatgttgcaaactccttaagtctttgtatggcctcatacaagccaatcgagcatggtatgaaaaatatcccctttttctcttgtcttgtggatatcatccagctcatgccgatcatagcctgttcatcaaaactaatcagtccaactctatagactttatatatttattgttggcggcattgtgctaactag

SEQ ID NO: 18632 - DNA, 420 bp, Glycine max
  unsure (1)..(420): unsure at all n locations
ggancnanggcagggatntcaccagaaantaatgtttgttttttacacncnaaagacagccngccgcactcaccacggncactacgagcaccgggggangccatncgggctctgcaacgcaccgtcaatgtttcaagctgccatgaacaaccttctcagccctttcctgcggaagttcgcgacagtttttttttacgacattctgatctacagcgaaatcttcagtgatcaccttcatcatctcgaatgcgttttcaactctcttctgcaggctcattattatttgaagcaatcaaagtgcttcattggctaacgccagcttgattacttaggccacgttgtctccggcagcggtgtcagacctgatccaacaaatattcaggctatcgtcaaatggatcacgcctcgatcttccaagga

SEQ ID NO: 18633 - DNA, 423 bp, Glycine max
  unsure (1)..(423): unsure at all n locations
gcttgttagacaagtggccttagaaatcttaagaagtgttgggtgggttgaattaagattntacaaaccattccccaattaaaaattctactttgatcttaatgcaagttccaagttcccttaaagatgaatttctaaatgatgattcaaattaaacaatctgaatgtaaatgttaagaaacaataaataaaggagtttaagggaagagaaagtgcaaacacagtttttatgctggttcggcaaagttcgttgcctacgtctagtccccaagaaacccacttgggagttccactatctcgcanatcctttacactttctgaaacacacaaggaaaaccctttctttgtgttcagatactttataacaagagactttcagtctcttagccctttgattagaaagagaagaagaagaagaagatg

SEQ ID NO: 18634 - DNA, 433 bp, Glycine max
  unsure (1)..(433): unsure at all n locations
ctataacanatctaaaacacatagtttgaaaccaaagggagtactattttctcgcctatcttttcctctttttaaaagaacaagaaaaatacagaggaagggaatccctggaggaaaccaggaagaacaaaaaactcagaattgaaagaacatgcaatggtcctcttgattgccccatatttcaagcgtaatatcgtttaactacatcggagttcacgggcgagggcaattcctcgccatccatgtgggtgagtatcaaagcacccccagaaaaggctcttttcaccatgaaaggtccttcataatttggggcccacttgcctcgtttatctttaacagcgtgggacatcttcttcaacacgaggtccccctcgttgaacttgcgcgggcgtaccttcttgccgaatgcgttctttatccttcgttgatacaa

SEQ ID NO: 18635 - DNA, 233 bp, Glycine max
tgctttttgaacgcatactgtggatacaactagatccggacgaacgctccagatgaggagaaaatggaattcatcactgaagacgctaacttttgatacagggtcatgcccttacgcctaaaaaatgtaggcgctacataccagagattgatggaccagattttcaaacaatagatggtacaataagttgaggtctacattgacgacatggtggtcaaatcccatagcatacc

SEQ ID NO: 18636 - DNA, 402 bp, Glycine max
  unsure (1)..(402): unsure at all n locations
tttcttctggtatcaattacgagcgtctcgatatactacgggacataatcggacatccgagtaaaaagttattatcgtttgattaggctaagagcttgtgttttgaatttcgagcgtcttgatatattacaggactcaatcagaaatccgatttaaatggtattcattcggacatccgagtaaaaagttattgtcctttgaatttgctacgagcttccggtttcaattacctgcatctcgatatactatgagacacaatcggacattcgagtaaaaagatatcatcgtttgaatntgctcagagccttcgttgtcaatttcgagcgtctcgatatattacgggattcattcagacatccgagtagaaagttattgtcatttgagtttgctcatagcttctat

SEQ ID NO: 18637 - DNA, 413 bp, Glycine max
agcttccatcattactccacctccttttgcaacagattggatagtggaagggccactttgctaaaatccttgataaagcgcctataaaaccctgcatgaccaagaaaagaacaaacctctcgcacgcaagaggggtaaggcaattgtgaaataacagctataccttgttctaccatgaagtgacatttttcaaaattcagcacaaggttagtttcaatacatctactaagaactctatctagactatccaaacatgtatcaaaagaggattcataaacagtaaaatcatccataaacacctgtatgcaactctctaaaaaatcattgaaaatgctaagcatacaccgctggaaggtaccaggggcgttgcattggccaaagggcatcctcctatagacaaaagtgccaaaggg

SEQ ID NO: 18638 - DNA, 424 bp, Glycine max
  unsure (1)..(424): unsure at all n locations
tggaaggtagtcatacctcacanaatatatgtatgtgtgtttatgtagttagataccttggatatgcatgtatataacaaacatacctcacaaaatatatatatgtatgtttaggtagcaagataccttggatatgcatgtatatagcaaaaatatctcacaaaacatatatatgtatgtttaggtagcaagataccttggatatgcatgtatatagcaaaaatatctcacaacatatatatatgtatgtttaggtagcaagataccttggacacacatgtatatagcaaaatacctcacaaaaatatacatatgtttaggtagcaaaatacctcatggaaaaagaaaaagagataaaaaagaaaaaaaaataataataagttgtctagctaaaaaaacaacatgcttgtgaaaagagataact

SEQ ID NO: 18639 - DNA, 393 bp, Glycine max
atcttgtagcaccacttcaccctaccttgccttttgagagcggcaacaacatccatcgtggtacctgtcttccatttaacatgctcagtgtaagtaacaaagtaccgcagaccatccctgagaaagttcttaaagactctacgagccaaacaacgaatcccgagtttcgtaatgttctgcatgttgtcgcacaacaccaccttgtgccccttggctcctcccctgcatccctcccatgaccaccgtatcggccgctgtcacctccaccaccaccaccgaagccatcgcctccaccaccaccacggtcaatgcgggtttgcacttcatgggtagtgatgtttggccatcaaggtcttcgccgtgcaaactgctgttcacaactctcgctccctc

SEQ ID NO: 18640 - DNA, 420 bp, Glycine max
  unsure (1)..(420): unsure at all n locations
tcaacatcagaccacttccagggtgctggttcttttacttggatttgatggggcctatgcaagttgaaagccttggaggaaagaggtatgcctatgttgttgtggatgatttctccagatttacctgngtaaactttatcagagagaaatcagaaacctttgaagtattcaaagagttgagtctaagacttcaaagagagaaagactgtgtcatcaagagaatcaggagtgaccatggcagagaatttgaaaacagcaggttcactgaattctgcacatctgaaggcatcactcatgagttctctgcagccattacaccacaacagaatgggatagttgagaggaaaaacaggaccttgcaagaggctgctcgggtcatgcttcatgccaaagaacttccctataatctctgggctgaag

SEQ ID NO: 18641 - DNA, 414 bp, Glycine max
  unsure (1)..(414): unsure at all n locations
tcaagttgctaggatagcaacgtgancggtccttcagttcgtcctgagatgaaagctccaacaggcttcttttggttgggatgtgtgctctatctcgcaagattgcatggtcactagcagtcatattctcaatcaattccatggcttcttcaggggtcttcaattttatttttccccctgtagaagcatctaaaagttgctaggattgtggccttaacccgtcaatgaaaatatggagctggattggctttgaaaatccatgagtaggcgtctttcttagtaacccacgaaatctttccaaagcctcactcaaggactcgtctagaaattgatgaaaggatgagatgacagctcttccttcagcagtcttggactctgggaagtatntcttcaagaaattttcaaccacttcat

SEQ ID NO: 18642 - DNA, 430 bp, Glycine max
  unsure (1)..(430): unsure at all n locations
tgtgacanatctcttgagaaaataaatatgctcaatnntttgttctttttgaatncaanagcaaaccaaatgcaccttctctaactccttgatcataaagatctacttcagaagtgcccccttttggatcaccatgataaacttctctgcccatccaatccgtatcaaacagaaagaagggaaaccatgacaactgcaggtagacaggattgaaatgaacataagaaggatttcaaatgggaagcaccaacactaggctaatagcattcacaacacaaccgacttgaaaacacaaatatcaacagaaacctttgcaaataaatactagtacatacccaagtgagagccattacaaccaggacagaatgcatagcaggtggcaaatgccttaaacttgtcaacaagtttaccaatactgctccaggcccat

SEQ ID NO: 18643 - DNA, 396 bp, Glycine max
agtcttttagaaaaatggccttagcaaacttcttatttccagaaggaaattcaatcaatagacctccaatctttaatggagagggttaccactactggaaaacccgaatgaaaatttttattgaggcaatagacttaaatatttgggaagccatagaaatagggccttatatacccaccacagtagaaagaatcacaatagatgggagcacaacaagtgaaagcataacaatagaaaaacctagagatagatggtctgaagaggatggaagacgagtacaatacaatttaaaagccaaaaacataattacatctccctgtggaacggatgaatatttcagggtttcaaattgtaagagtgctaaggaaatgtgggacactctacaattaacacatg

SEQ ID NO: 18644 - DNA, 355 bp, Glycine max
ttgcttcttagtttcagatgatgcagatgagtttgtagctacctcatgcactcctctaatgactatagcatcatatttggcgctaaactgttgggagttggaagccatcttctcaattaaatacctggcttcagcaggggtcatgtctccaagggctccaccactggcagcatctatcatacttctctccatgttattgagtccttcataaaaatattggagaagaagctgctcacaaatctggtggtgaaggcaactggtgcataattttttaaatctctcccaatattcatataggctttctccactgagttgcctaatgcctaaaatatcctttctgatggccgcggtccta

SEQ ID NO: 18645 - DNA, 403 bp, Glycine max
tgcttatatcctcaggtagttcagcaaatacttgcttcatttcctccaagctcatattttccaaaatggacggccttggggcaaccctcacaatctcgccgcctttaggttccttaactcgagcctcggctttaatgattagttctgaatttgagcttgctccacatttaattataaatggtgaggtattacccgtattgaattgaaggacgttccactgtgccacatcagttccagatccagagcctgtatccgttgatggcttgcgagaatgtgatagattctgaatgcggtcatcttcttcaggaattgactgcatcataaaagagggattaggaatcccaaaactcaattaaggtcacgctcagacacagattcagatgccagaaatgctgagacagga

SEQ ID NO: 18646 - DNA, 395 bp, Glycine max
  unsure (1)..(395): unsure at all n locations
tgcttataaagaaaaatgatggcatgattttaacctaatcacactatattgaaagctattgaagaagtttaattattttgatgtgaaacatgtgtctacttcttatgactcatccatcaagttaaagaaaaatttgagtaaaggaatttcttcacataaatactctcaaattattgattctttgttgcatttgacaaacttctataggcctgacattgcatatgtagttggtagattagaaaggtatactaataattctgatcattctcattggattacattagaaagagtttttagatacttaaaaggaatcattaattatggcattcattatacatgttttcctgcagtaattgaagggtttagcgatgcanattggatttctaattctgatg

SEQ ID NO: 18647 - DNA, 418 bp, Glycine max
tgccagaagttcttagttggggatgctggttctgtttgttactaagatgatgaggaggcggaggatgaagatgagctggtagataatgattctgaagaatctgaggagtataagttctttgaaaaagtgtttgcagaagatggtgaccttaggagatattatgagaacaatcacaaggaaggagatttttattgtttggtttgtgggggtattgggaagaaggtatggaagaggtttaaggattgtattggactaattcagcactccactgccatattaaggacaagaaggaagcgagctcacagagcctatgcacaagtcatctgcaaagttgtaggttgggatatcgatcaaatgccagctattgtgttaaaggatttggattcctcattggctggttcaaagaagcttttcgtga

SEQ ID NO: 18648 - DNA, 396 bp, Glycine max
  unsure (1)..(396): unsure at all n locations
ttgtcattctttcagagagatggtggacaaactactcaaggctcagtttatcagagaagtcaggtactctacctagatagccaatgttgtcatggtcaaaaaagccattggcaaacggcgtatgtgcattgactacaccaacctcaacaaagtgtgcaccaaggacacatatgctttgcccagcatcgacaggctactcgactacgtgcctgtgttccaagtactgagttttcttgatgtctatttaggatacaaccaaatcagaatgcacaccccagacaagagaacacaacattcttaactgaagatgataatttttgctgtagggtcatgccctttggcctgatcttcanacaacagatagaccataatcttgaggtttatgtgaatgatatg

SEQ ID NO: 18649 - DNA, 450 bp, Glycine max
gcttatgttgcaaacatttataatagacctcctcaccagcaaaaccaacaacaacagaataattatgacctttcaagcaatagatacaattcaggttggaggaatcatccaaatctgagatggacaagtcctccacaacaacaacaacagcctgtccctccttttcagaatgctgctggtccaagcaagccatatattcctcctccaatgcagcaacaacagtagtagtcacaacaaaaagcaacaagcaactgaggctcctcctcaaccttccttagaagaattagtgaggcaaatgactgaaattctgatactgaggacagatgtcgtacaggatgtcacgacatcgcgcttcagaacatgcagaatgtatatgacagtatgaacagattaaacaagtaaataacacaagagaattgtaacccagttcggtgaacgtccctacatctg

SEQ ID NO: 18650 - DNA, 464 bp, Glycine max
  unsure (1)..(464): unsure at all n locations
gcttaatggcttctcgacatanactattaaaacgtacagtgagaatttttatgtcaattgtatctgttatnttttcatcagttccaatatcagattttgcattccttgtccatcgtttcaaaatgtagtgcgatggaagggtaagaacatttgtaacagtgaagacagtcaatatatgtcaacaaagaacgcctgagtattcaaacatctggcagctgcaattcaccttcatttcagagatatttaatgtgaccatgtatgccttgtgatcatgtacatattttgcaaccctgtatttactgatcacaccatcatcctcaacattatttgcagtataagcaaaagtttccaccagttcctcctgagattctgcaaaaatcttcttagtgtacatatttgctgcttgttgttccattggtgatggagtcttcagtacaggtgtgttacaaatagtctcataatct

SEQ ID NO: 18651 - DNA, 391 bp, Glycine max
  unsure (1)..(391): unsure at all n locations
agctttgaatggangctctggtctcttgttgaaactgcatgttttgcatagtcatttgcctcacaagttcttcaagggaaggttgcgaaggagcctcaactgtttgctgtttctggggctgttgctgttgttgttgctggattggtggaggaatgtatggtctgcttggggcaatagcattttgaaaataagattgttgttgctgctgtttgggatgattcctccacccgagattgtacctgttgttggagaggtcataattgttctgttgtggctgattttgctgctgaggttgaggaggtctattgtagatgtttgcagcataagcttcaagctgttcaattgcttcagattgttgcacagaagggcaaaggtctgtgtggtggtctgc

SEQ ID NO: 18652 - DNA, 449 bp, Glycine max
  unsure (1)..(449): unsure at all n locations
tctaaactntgtacaagaatgaagctctgataccacttgtctctgttatcttaagaagggggggggggttgaattaagatattccaaactgtttcccctaattaaaaatctatttcactttttactcaagttatgaattcccaatgacaatcttcttaaatattaattcaaatgaaacaatttgaatatgaatataaagcaataataaataaaggagattaagggaagagaaaatgcaaactcagttttatactgattcggccacacccttgtgcctacgtccagtccccaagcaacccgcttgagagttccactatcttgtaaattccttttacaatttctaaacacacaaggacaatccttcctttgtgtttagagatcctttacaacaagagactcacagtctcttaatcccttanagaatgagaagaagaagaagaacaaatctc

SEQ ID NO: 18653 - DNA, 424 bp, Glycine max
  unsure (1)..(424): unsure at all n locations
ttcttcctctagcttcccaaggaagctaccttccttgcttctcattgaagattcccatgtgctaggctataaatagaaacatgtgtaacacttgtcataactttaatgaatgagaaacacgtgagacacacttcaaagttcaacttctctccctaatctccttcaattcccatccccctctctctctctcattctcttcctccattgaagcttcctttctaagcttcttatccaaggcattctcttggtggtgaatgatgcaatcctacccccccaagggcattgtatagaggactccaagaagattgagctagagatacaagagaaggccataaggttctcatgagccttanggtagacttcgggcccatgggctacgtatgagtccacttatctttatacatattagattaaggtttcatta

SEQ ID NO: 18654 - DNA, 302 bp, Glycine max
  unsure (1)..(302): unsure at all n locations
tcttatccaaggctcatctcggtggtgaagctccttcttccatgtcttattccatagtggatggcgcctnctctcacctcttctnctttgtcttccactgcatctccatggtggaaaatcaccattaaaggacctcattgaagctcaaagatccaacctccatagaagccccacaagcaaacttccatcatattcctccacccgggattgtatctattgctggagaggtcataattgttctggtggtggattttgctgctgagtttgaggaggtctattgtagatgtttgcagcataagctt

SEQ ID NO: 18655 - DNA, 405 bp, Glycine max
agctttttggaaatcttgatgccttagtcaacctagtaactcagcttgccataaataaaaaatctgcatctgcatctattactgttgcaagagtctgtggtctatgttcttttgttgatcaccatacagatctctgtccttctttgcagcaatttggagtcaatgagcaacctgaagcctatgctgcaaacatttataatagatcccctcagcagcaaaaccaacaatagtagaataattatgatctttcaagcaacagatacaatctatgttggaggaatcatccaaatctgagatgggcaaatcctccacagcaacaacagcctgtccctcccttccagaatactactggtccaagcaggccatatgttcctcctccaatgcagcagcaacaacaaagacaac

SEQ ID NO: 18656 - DNA, 459 bp, Glycine max
  unsure (1)..(459): unsure at all n locations
gctgctttntgcaattctaagacactagagagcttncaagtatatgacttgtcccacgttgatcttttctatctaatatgcatcctgcaaaatcagaatatgaaaaacctgtcatgtttaaggaagtacctttaggataccacataagcaaacacttaccatgatatccaatctacttgcaattaagcaaagaagtgattcaatcatacctttgtatcttgaatgatgcactaatttacctttctcatcaaaggcaaggtatgttgatgtagacatangagcatatgcttctttgcatttcttcataccaaatttctttatcggntttatgcaatatctggtttgactgaagaaagttccatgtttcaatcgcttgactctgagtcctataaagaaatctaattctcccatcatagacttctcaaagtctttcagcatacaacatgaccattccttgca

SEQ ID NO: 18657 - DNA, 409 bp, Glycine max
agctttatgacaagtctatacgtggtatcttccttgggtatagcaatatctctaagggctatcgtgtctacaacttgcaaactaagaaactcgtcatcagtagagatgttgaagttgatgagtacgcttcttggaattgggatgaagaaaaagtggagaagaacgttcttatacccgctcaactacctcaagaagaagctgaggaagaagacccaggtgaaccaccttcacctccaccacaacaacaagatcaagaactatcatcaccagagtctactccaagacgaggtatcttcctttggtggacatatatgaaacctgtaacttggccatacttgaacttggaagctttgaggaagcgtcaaagtaggaagtatgggtcaaggcaatggaagaagagatacaaatg

SEQ ID NO: 18658 - DNA, 341 bp, Glycine max
  unsure (1)..(341): unsure at all n locations
agctttttagtcttatctgatgaagatgaattcgtggctacttcatgcactcctttaatgacaatagcatcacttctggcactaaattactggtagtttgaagccatcttctcaattaaatttctggcttcagcaggagtcatgtctccaagggctccaccactggcagcatctatcatacttctctccatgttactgagtccttcattaaaatattggagaagaggctgctcagaaatctggcggtgaggacaactggcacataagttcttaaatatctcccagtattcatataagctctctccactgagtngcctaattcctgaaatatcatttttgat

SEQ ID NO: 18659 - DNA, 440 bp, Glycine max
  unsure (1)..(440): unsure at all n locations
tagctacacatacctctctaatagctaagctcatctncgtgagattagaagctagagcttagctacacaccccctataatagctaagctcacccccatgagaaaaaacatganaataacaaaaaaagtccttattacaaagacaactcagaatgccccgaaatacaaggctaaaaccctatactactagaatggccaaaatacacggcctagacgaagganaaacctattctaatatttacaaagataagcgggctcatacttagcccatgggctcgaaatctaccctaaggctcatgagaaccctagggcctttccttggatctctagcccaatctacttggagtcttctagccaatgcccttgcggggtaggattgcatcacgagttgcttcaaggatttccttggtcttgtctttggatgcctgttccaagtctatg

SEQ ID NO: 18660 - DNA, 441 bp, Glycine max
  unsure (1)..(441): unsure at all n locations
tgaggatggtgtngcggagatgcgggatcaatatacggataaagttatgcnctctttttactataagngcatggcatatttatgttgctaaccaattatgtgacagactggtatttgaacctcctgtaattctctgaatggatgggtatcacctgtacatgggttcatatggttcactgatgaaatggattcattcaactctacttaatttaaaataaataaatagaactcattgataaacattgttatataataatattntatcactcaaagaagataatcaattctcatcataatcatttttatcaaaaataatataatcctctgaattaattatcacaatacgatagattttgaaaaacatcataataatgaataacctctattttaaaagacaatataatatatagtgatctcaaaacacaaattttctctttcagt

SEQ ID NO: 18661 - DNA, 462 bp, Glycine max
gcttgaaggtgtgtagcccaccatcttttcatagtagaatactggtaatgtgtctactattattgttattattgttttctccgtcattgaggtgccacttgagctgccaagtctctccacctttgggcgtattcttttgaaagattcgtgccccccttttgcacatgttctgtagttgcatcctatctgaagacattatactgacactgcctaacgaaggcaaccactaggtccttccaagaatggactcgggaaggttccaagttagtgtaccaggtaacagctaccccagtaagactttcttggaaggaatgtataagcaattcctcatcttttgcgtatgcctccatcttctgataatacatctttagatggttcttggggcaagtagtccacttgtacttgtcaaagtccagcaccttgaatttgggaggggtgatgatattgggtactacgaacaac

SEQ ID NO: 18662 - DNA, 399 bp, Glycine max
agcttctgtattccttttcgattttctcgatatattacgggactcaatcagacatccgagtaaaaagttattgtcgtttgaatttgctcagagcttcgataatcaattccgagcatctcgatatattacgggactcagtcagacaaccgagtgaaaagttattgtcgtttgaatttgctcagagcttgggtattcaatttccagcgtctcgacatattacggtactcaatcagacatctgagtaaaaacttaatgtcgttttagttttcttagagcttcggtatttaatttcgagcctctcgatatattataggactccatcagacatttgagtaaaaaagttattgtcatttgaatttgctcagagcttcaacattaaatttcgagtgttccgatata

SEQ ID NO: 18663 - DNA, 440 bp, Glycine max
  unsure (1)..(440): unsure at all n locations
ntgagcaaattcgaacgacaataactntntactcggatgtctgattgagtcccgtaatatatctagacgctcgaactggaataccgaagctctgagataattcaaacgacaataactttttactctgatgtctgattcagtcccgtaatatatcgaaacgctcgatattgaatgttgaagctctgagcaacttcaaactacagtaactttttactcggatgtctgattcagtcccgtaatatatcgaaacgctcgatattgaatgttgaagctctgagcaaattcaaacgacaataactttttactcggatgtctgattgagtcccgtaatatatcgagacgctcgaactggaataccgaagctctgagcaaattcaaacgacaataactctttactctgatgtctgattcagctccgtaatatatcgaaacgctcgata

SEQ ID NO: 18664 - DNA, 405 bp, Glycine max
  unsure (1)..(405): unsure at all n locations
tcagacgatacgcaaccttgcccatcctctccatcaccgcgaatgttccatagtacctctttgccaactttgagtatgatgtctcaaaagctgaggtttgacgatgaggtcgaagtttgaccaacacccagtccccgatgttaaactcttgaggtcgtctttgtgcgtctgctgtctacttcatcttctgctgtgccctgagcagtttccgactgagcagcttcaaaacctcgtcgcgttggttgagcacctcatccaccgtgttgatagacgatgtcccccccaaatattccggaatagcaggtggtttccgaccgtagatgatcttgaacggngtgatccttgtgcctgagtggcatgaagagttgtatgaccactcaacccataacaggaattgcccccacg

SEQ ID NO: 18665 - DNA, 410 bp, Glycine max
gcatgtgcacgctttcaagctattatcgaagttcaacattaaatttagaagtgtttacattattatttaaccaagtttaaattgagtttctattagttttaacacatatactgacttaattagtcttttatttatttatgtatttattttgctaactagaccttctcctataatgatttcgttttctgaaatactaataataatacattctttaatattccgtattttttttacccactctcttgttaaaagaaaatttgttcgggcttcattaaatatgagaatctcattattctatatgtatctgtggagtcttatttctaaaacggtggaattaattcacataaatttcaagagagttggtacattaaatgtaagggacgttgtggtgtgatttggctcgatattta

SEQ ID NO: 18666 - DNA, 403 bp, Glycine max
  unsure (1)..(403): unsure at all n locations
agctttcttattcatttttcaagttacaagtgaactccccaagaagtgacatggcccacttgtggttttccaatctagcttacattctgcaaagttagaatatgaaaatccaattaaactcaaggaggtacctttggggtaccttaaaccaacattggttgtgcccttaaggtacttaataatccttttgacaacatttaaatggtattccttgggattttatttatatctttcacatatgcacacacttagcatgatgtcaagttggcttgtagtcaaatataggagataaccaatcatacctctatactttgactcatctaccgatttacctttttcatccaagtcaagataaatggatgttgccattggtattgtttcttccttacactnttccatattg

SEQ ID NO: 18667 - DNA, 438 bp, Glycine max
  unsure (1)..(438): unsure at all n locations
cgcctttaacgataaaaataacacaaattgatcttaaaattatattttatctttaaataaaacgattttcaattctatcaaattagtccaatagaaatatattaatatttaagtctaataaaaaattattgacattttcatccaataataataatttattaacattttttgtccaatagaacttactcatatctaagtcaaaacaatgagtgacatttccctcgaataagaaatatattgacatttccgtttaacaaaaattattgatatttacgtccaaaaatgatatcttattgatanttttgtccaatttaattagcatgatcacattgacaatcatttgaatgataaatctatccttttgtgtcatgtagaactatttattaatcacaacgaacaatagttaacgaccgactantattatcacacttcttatat

SEQ ID NO: 18668 - DNA, 443 bp, Glycine max
  unsure (1)..(443): unsure at all n locations
tgagcacctcttccttcattgatgggttgagccttctctagggctgtttgacangtctatattcttcctccattattatcttgtgcatatagtaggcaggctgattccttttagatctaatatgtgccacccaattgcctccttctgtctcttgaggaactctatcaacctatttcttcttctgttgtaagcttactattgatcaccacaggcttggtcttgttctcttccaagaacatacttcaggtggttaggtaagatctttagctccaccttggtcttctcaggtggacttccgcttttcaattcttcaaaactggtcccccctgcaggcatattttcttcacaatctaagccttccaagcaagcccataaattcttcttctcttcactggttagacaatctacaacattggtcaaagctttctccagtaaagtttatg

SEQ ID NO: 18669 - DNA, 443 bp, Glycine max
  unsure (1)..(443): unsure at all n locations
tatacggcctangatgtggttttgtgactaaattcaatttagacacaagtcttgcacttgccacattgctacaactccctccatcattgatcatcatgcaaactttgccattgatcaaacatctagtgtggaaaatgttttctctttgactttcctccatagacttcaattgatggccaagtaatcatcaacaattctccctctggtgttttctccacttcctcctcctcatcctcactctcttctcccttttcaactttggactcactaatgtactctccgtctctaagaatcatggatttcttgatagggcactcatatgcataatgtcccaagccgtggcaccgaaagcacttgacatcccgacantttttntaggattgttcttggacatttggaggagttnttgatggtatangtgttgcattagaggtggcaacccc

SEQ ID NO: 18670 - DNA, 368 bp, Glycine max
  unsure (1)..(368): unsure at all n locations
agcttttggcaagtgtagcaacatagtatacggaaangatgctctagctgtggatagagcacggcacactgctggagaaatcgctataagagatcacgggccaattttaattgaggtgcaatcagctcccttcatgcgtaagacgatcattgcctgatgccacatcattttaatgttcaccgagctgatgctaatggctatataaccttcaggctctcactcatgcagtcggacatcactctacatctgatgagtaaactaagtaccggggaactgatgagatcgaatattggaatatggcaaggaatccagtgaatacggccaaaagacgggtagaaaggaatggttcggggagtgacaaggatgaa

SEQ ID NO: 18671 - DNA, 393 bp, Glycine max
cctcattgcagtcatttcacacaacataacccacatgacataagattaagacatggtgtgaaggaacttaccgtacgtttgagcaatcctataatttcttgatcttgccaaagccttatgtcaacaatattagcaagcaaatcaacctccatcaaaatgtgggattgttcattgggatgctgacttggcttcctcttaatttcttcttcctttacgattgagaggataataatcttagacattacacaataataatatatagatcaattaaaataagcatcatatctatttcacacttcttaatattacacctataaagtcacatcaacgtcttcattaccttgtctcgacttttcattgaacctttcctctaatatacacaccgacacctct

SEQ ID NO: 18672 - DNA, 451 bp, Glycine max
  unsure (1)..(451): unsure at all n locations
tatggcctcatcaaaatacttgtttcccgagggaaattctataaatagatctctcatctntaatggagtgggttaccactactggaaaacccgcatgcaaatctttatagaggcaatagatttaaatatttgggaagccatagaacaaggaccttatgttccctctataatagccggaagtgcaacaatagaaaaacctagagncaaatggactgaggaagaaagaagattagtacaatataatttaaaggccaaaaatattattacatctgccttaggtatagatgaatactttatggtttcaaattgtaaaagtgctaaggatatgtgggatacactacaagtaacacatgaaggcacaacagatgttaaaagatctaggataaacactntaacgcgtgagtatgaactntntangatgaatgtaaatgaaagtatacaagacatgcaa

SEQ ID NO: 18673 - DNA, 396 bp, Glycine max
  unsure (1)..(396): unsure at all n locations
agctttggtctagtttttctaaagcaaaggtttgttcattttgtgtgtatcaagattactatccattcaatatataatcacttcttgattaggggtttctttctaaatgaaggttacacggtaaaggaaaagtattgaattataactcccgaaaaaataataatacaatacttctgacctttaattttaacacattcataattattagatttttagaacagttatttcaaaagtcaataatcatttatccttttggtatatttagattaaaaagaaaaggtattataaagattntacacaatcattaatcactatatgataatttcaaagacttttaaaatatttatcttanaataagttaaaggatgatttgtgattagatgataatataatcag

SEQ ID NO: 18674 - DNA, 426 bp, Glycine max
  unsure (1)..(426): unsure at all n locations
tgagcacctcttccttcattgatgggttgagccttctctagggctgtctgacaggtctatattcttcctccattattatcttgtgcatatagtangcaggctgattccttttagatctaatatgtgccacccaattgcctccttctgtctcttgaggaactctatcaacctatttcttcttctgttgtaagcttactattgatcaccacaggcttggtcttgttctcttccaagaacatacttcaggtggttaggtaagatctttagctccaccttggtcttctcaggtggacttccgctnttcaattcttcaaaactggtcccccctgcaggcatattttcttcacaatctaagccttccaagcaagcccataaattcttcttctcttcactggttagacaatctacaacattggtcaaagcttt

SEQ ID NO: 18675 - DNA, 453 bp, Glycine max
gtttaagtgaaaggatatgactcttcacatttgtttttgaatttctttattcaacggcactagtaattgattaccaaaacattgtaatcgactatagctttttgaaaataattggaacgttgtaaattcagtttgaaaactttttcaaactcattttgctactggtaatcgattacaacaatatggtaatcgattaccagagagtaaaaactctttggtaaaaggttatgtcaaaaattcatgtgctatgcaaagtgttagtgcttggctctactgagttttaaaagaatggctaaaattctgttaaaacataagcacttagacaatgaatgaaagctggagttgctgcacatgatgtctaacattatgtcaaggaatcagatcgggctgcacaatgcacaatgcacgatataatgtcatatgaagaattgaagctgcaagatccacgatgtc

SEQ ID NO: 18676 - DNA, 455 bp, Glycine max
  unsure (1)..(455): unsure at all n locations
tataaaactcagctttaattngttgtttgtcttgatagtatttaaattactttttactagatgagttcaataatcaaatgtgataaaattgctgagcataactataaatgttattcaatctatcatgttatcacttttagtaaataattattctttattttattatcatatttattattttattaaatcgttaattcgacaagtctttgattaaattataggcttgttatcatgaagagattatgataatgagaaaaagttatttataatttcattctaaattgttcttgattgtaagattattgtgaatatgatatcaataatccggataagttaatatatatctaatggtctttattggataaagatcaatagatctaatttattaaattgcatataacgattatgtatatgtggatgttataattaaagcgacttaattgagaattcctaat

SEQ ID NO: 18677 - DNA, 392 bp, Glycine max
  unsure (1)..(392): unsure at all n locations
agcttctacatcagtatccttctattgtgctggaactacttcacatggacttgatggggcctatgcaagttgaaagccttggaggaaagaggtatgcctatgttgttgtggatgatttctccagatttacctgngtcaactttatcagagagaaatcagacacctttgaagtattcaaggagttgagtctaagacttcaaagagaaaaagactgtgtcatcaagagaatcaggagtgaccatggcagagagtttgaaaacagcaagtttactgaattctgcacatctgaaggcatcactcatgagttctctacagccattacaccacaacaaaatggcatagttgaaaggaaaaacaggactttgcaagaagctgctanggtcatgcttcat

SEQ ID NO: 18678 - DNA, 364 bp, Glycine max
  unsure (1)..(364): unsure at all n locations
agctttgtcactggtattcatgtttcatttaggccttttaagtatatgcattttgatttatggggaccatctagagtgaaaactcatggtggaagctcatactttctcaccatcatagatgatttctcaagaagagtatggccgtatgtcttgaaaatacaatcagaatctttttccaaattcagagagtggcatactcttattgaaaatcaacttggtacaaaattaaaagttntaaggattgacaatggcctggagttngtttcagagcaattcaatgagttntgcaggaaagtatgtatcataaggcacaaaacagtccctcacacaccacagcagaatggattagcataaagaatgaata

SEQ ID NO: 18679 - DNA, 477 bp, Glycine max
  unsure (1)..(477): unsure at all n locations
ctcaagtacaataaagaagcctanatggactngaaggtcttgccaacccacttgaagtgtgtgttcttgaaagagaacaatgcaaaacctgtggtgatttgcaatgatttatcttctaatgaagagtctaggtgggtcgaagtgctcaaaaagcacaaggcagtcattgggtggcacattttggacctcaagggaattagcctttcttattgcatgcataaaattatgatggaagctgactataagtcggtgagacaaccacaaagaaggcataatccttcgatgaaaaaagaggtgcacaaggaagtccttaaactcctagaagtagggcttacctatcctatcttagacagtgcttgggtgagttcagtgcaagtggttcccaagaagggtgggatgactntggtgagaaatgagaaaaatgacctcattccaatccgaactgtcatgggatggagaatgtgcatagaatatcgg

SEQ ID NO: 18680 - DNA, 403 bp, Glycine max
agcttgtgcattcaatatcctgatgatggtgttccatatgttctcaagactggactaatacatttgcagcccaagtttcatggtcttgcaggtgaagatccttataagcatcttaaggagttccatattgtttgtttcaccatgaagccccctgatattcaagaagatcatatctttctaaaggcttttcctcattctctggaaggagtggcaaaagattggctatactaccttgctcccaggtctattttcagttgggatgaccttaagagggtgttcttggagaaattcttccctgcatataggaccactgccatcagaaaagacatttcaggcatcaggcaacttggtggagaaagattgtatgagtattgggaaagattcaagaaattgtgtgcaagct

SEQ ID NO: 18681 - DNA, 407 bp, Glycine max
  unsure (1)..(407): unsure at all n locations
taaggcacctgaatcgtccaaagtaaaagtcaccttatgtgagattatgttntataaattataatttataacttatcttatgatttaacatgctaaaacatttatactatatatacgcacggaactatatatctctaacaatttaatatatgtgcagttaaaaaaattaatatatatgttaaaataattccatgaatcgaactaatctaaatctttgatatattaggaactaatcattttaggtctcttcaattttcttcttattttttcactactacaaaatatagacttaacatcgcatgattaacatcggtttttcaaaaaatcgatgttaaaaaaagcacagtaacatttttgtaaataagttgagttggttaacattggttntttaaaaaccgatgttaaca

SEQ ID NO: 18682 - DNA, 395 bp, Glycine max
agctttatgaggacagtgcaatgcagcaggtgtttttgatgaacaatctttattacctagtgcggaaagtgaaggactcggacctagggaaggtcttgggggataattggattacgaaacgccgtggtcagatacgccagtatgctacagggtatctcagagcctcttggagcagggccttatcttgtttgaaggatgaagggattggagggagctccaataatgcatcaaagatggctttgaaggagaggttcaagagtttcaatgcttgttttgaagaaatttacagggttcagacagcttggaaggtaccggatgaccagcttcgggaggagctgcggatatctatatcagaaaaggtgattcctgcataccgctcgtttgtgggaagattt

SEQ ID NO: 18683 - DNA, 451 bp, Glycine max
actaagcttatcatcgttgcttccacattgaaacggttgtgctggcctatgtttttactatagtagacgtacatgtgtgatattataaagatggaaagcctacactacccttctaaatctaccccaaagtaactttttaataaaaatattcattctttattgtaatattattttttaattaatagtattacaaatagttgcattgtttcattgaacatgatatacgtcctggacgaggataaatgcaatgcatatatgaatttaacctacacttatttttaagttgtcaatcaaaaatccctctttatatagcttttagaatatttattatttcccattaaaaatatctattattaaaattaaaaaactaatatctatcataatttatgatttaataacaataataaaatatactcgcaatatatatacatactattttctattactcttt

SEQ ID NO: 18684 - DNA, 398 bp, Glycine max
agcttttcagctatttggttactctccctaagagaatggagccaaacaaagcttccttgttgttcctcaaaagccttgaaatttcaaaacatgctttaagacaggtgaaatgaagggcagccatgattcagaagtgaaatagccacaaaggaatcagattccaacatgaattgcttgaatcttctactccgtgcaatttcaattccaagcatgatagcctcgagttctgcagttacaactaaacaatagcatacatcaataacaaaagagaagttcgctttgccattataatccttgagaactccaccaacaatggccttcttcgtgtctctattgattgaaccattaatattgagtttgaactagccatttgaaggcttgctccaactaatgctttt

SEQ ID NO: 18685 - DNA, 447 bp, Glycine max
ttgatagtgaggaatcaatgggtccagataggttgcatgatgacatactcagaacttcaagtttgtgcaatgaagatatggcttggcaccactcgtttccaattgcagataccttgacaccatctagatacaattctgccagttttgtgaggttttgcaagagtgtacctatatttggcttctcaagttttagagtatgttgcgaggtaaatgatgtagacaagtcaagagtagatagcttggttagatgagcaatctcaattggaatttgcccttgaaacccagcatttgacaagttcaaatacctcaaattctttagcaagccaaactttgaaggaatcatcgaagaatggatgtcattgtgtgccaaattcaaactttgcaaatattgtaggttgaagagacttgaattgtccaagccttcactgataaattcttcactcaagt

SEQ ID NO: 18686 - DNA, 442 bp, Glycine max
  unsure (1)..(442): unsure at all n locations
tccccgccttcaaggtcgcatctctattcctagacttggnttgcttacaccacagcttccctcgaagcatcatttctgatagagatcctgtgttcttaagctccttctagcgagagcttttttgactcagtggcacccatttacgtatgagcacgatgtatcacccacagaccaacggccagatcgaagtgatggaccatgtgttagaacaatacctacgttcatttgttcattcccaaccggcaagttggttccgttacctagccttagcagaatagtcgtataatacttccctttattccagttcaggctntactccgttcgaggcaatatacggcaagccaccaccagtgttgccccattatcttcctggaatgaccaacaacgaggcggttgaatcactggtaaagctctgatagaagatccatgcaaagcttcaatg

SEQ ID NO: 18687 - DNA, 386 bp, Glycine max
agctttatgccatgctacaatggttctccctgacatctccgcggcagctccgaggatttcttggtctaattggattctatcgacaatttgtccagaattatgcccacatcgcagagccactcactcgcctattgcgaaaagaacaatttgagtggtctcccgaggcacaattagccttcgacgatttgaaaatagccatgacaaccactcctgtcctctccctcccagacttcacgattccctttgtagtggaaaccgatgcctcagggacaggcatgggtgtcattttgatgcagcgcagccatccaattgcctacttcagtaagcaattctatcccaaattgcttcgttcttctacatacatctgcgagttgcacgccataacc

SEQ ID NO: 18688 - DNA, 445 bp, Glycine max
  unsure (1)..(445): unsure at all n locations
taaggtaaccttttggtcctccacactcatttctaagttatcatttcccatgtccaaaacacattttgcggtaagcatgaatggtcggcccaatatcaagggaatatcagaatcctcgtctatgtccattatcacaaaatccatcggaaaggtgaattggcgaaccttaaccaagacatcttcaactacaccatatggtcatgtaatggaggggtctactagttgaagagtcattatagtgggagctatcctcgggttctcaattctccgacacatagaaagaggcataaaattgatgctcgccaccagatcaatgagagctttacccactgacacagtcccaataaagcatgggatgatcacacttcctgngtctttgaacttctgtggtagaattctatggatcacaaaactacaatttcctttcaccataatgctctcattg

SEQ ID NO: 18689 - DNA, 421 bp, Glycine max
  unsure (1)..(421): unsure at all n locations
tgtcagaacttgttntaacanaaacaaagaaatttcttgatcaacttagtagcctcatacttatttttcattaaatataaccatgtaaacctagaactatcatcaacaatagtcaaaaagtaatgttttccatcatgagtagcatgttgatatgggccccacgtgtctacatgtatgagatcaaatggggactcaaaataatggttatttgaaataaaagagagccttctanatatggacagggggcagatcatgcaatctttagaactatgagatgtcaaatgcaatgaatttttatttgcaaaaagtttcaaaatcttgtcagatacatgtcccaaatgggaatgccacaaagattgttcactaagaacattacaacttgtaactacattattancaattgaagaatgtgaattcacaa

SEQ ID NO: 18690 - DNA, 485 bp, Glycine max
  unsure (1)..(485): unsure at all n locations
tcaagtatacaactaatactaacattgccatgagaacaactattgatgattcatggttatggcattgaagatttggtcacttcaacactcaagctttgatgttgctgcctcaaaataatatgatgagagatctaccatgcctatatgactataatgaagcttgtgaaggatgtcttcttaaaaagcaacaaaattaccattttcaactaacaaagcatgtagagctaaagactcgtcagagttaatccacactaacatttgtggaccaatgaggacatcgtcactaaacaacaacaggtatttcatcctctttattgatgacttttctagaatgacttggtctacttctttatagaanaatcaaaggtctctggaatgttcaagaatttcaaagctcttgttgagaaacaaagcacgaaacatatttaaagtaataagaagtgttcaacgcanagaatataactcacatgagtttgataagttat

SEQ ID NO: 18691 - DNA, 341 bp, Glycine max
  unsure (1)..(341): unsure at all n locations
attnttatatatacacgcgcgaaatggggtggacgtgcgatgaggctggtaacatgaatctataggccactgggccaatgcgcgccgttatctgaaagggtccataaaaccgcttggctagctaggaatatgtcggagccagcgacgtctgccggtatggtcggaagcggacgtgtacccatacacccacctcataagatatatcgcggcggtgtttatcggcagcaaccttcatgagttcctgcgctcgttgaaggcggcgcgtcaattgcgcgtgtacttgcagacgcgtggtgagtagcgagtcaacggcatcattcgacgattgaccttggagatag

SEQ ID NO: 18692 - DNA, 302 bp, Glycine max
ctggaactacttattttgttttcatggcgcctatgcagggtgaaagccttggaggaaagaggtctgcctatgttgttgtggatgatttctccacatttacctgcgtctactctatctgagagaaaccagaatcctttgatgtattcaaagagctgagtctcagacttcaaacacaacaggactgtgtcatcaagagaatcaggagtgaccatggcagatagttctaacacagcaggttcactgaattctgcacatctgatggcatcactcatgacttctctgctgccattacaccacaacag

SEQ ID NO: 18693 - DNA, 341 bp, Glycine max
  unsure (1)..(341): unsure at all n locations
tattcntttcattcaattctgagcgtctcgatatatgacgagactcaatcagacatccgagtaaaaagttattgtcgttttaattggctcagaggttcaacattaaatttcgagcgtctcgctatattacgggactcaatcaaacatccgagtaaaaagttattgtcgtttgaattggctcaaggcttcaacattcaattttgagcgtctcgatatatgacgagactcaatcagacatccgagtaaaaagttattgtcgtttgcatttgctcagaggttcaacattgaatttcgagcgtctcgatatattacgggactcaatcagacatccgagtaaaaag

SEQ ID NO: 18694 - DNA, 451 bp, Glycine max
  unsure (1)..(451): unsure at all n locations
ttgagccaattcaaacgacaataacttttactttttgtgtgatgagnctcgaaatataacgagacgctcgaaatagaatgttgaagctcttagccaattcaaacgtcaataagtatttactcggatatctgattgtgtcccgtcatatatcgagacactcgaaattgaatgttgaagctctgagccaattcagatgacaataactttttactcggatgtctgattgagaaccgtaatatatcgagacgctcgaaattgaatgttgaacctctgagccaattcaatcgacaataactattcactcggatgtctgattgagacccgtaatatatcgagaccctcgaaattgaatgttgaagctctgagccaattcaaacgaccataaatgtatactcggatgtctgattgagtcccagtatatatcgagacgctcgatatagaatgttgaatc

SEQ ID NO: 18695 - DNA, 416 bp, Glycine max
  unsure (1)..(416): unsure at all n locations
ttcttttttttaaattacgagcgtctcgatatattacgggactcaatcaaaactccaaattgaaagttattgtcattttactctttatagagctttcgttntcaatttcgagcgtctccatatattaaagggctcaattggacatccgagtgaaaagttattgtcgtttgaattttctcagagcttctgttttcgattacgagcgtctccatttattacgggactcaatcggacatccgagtcaaaagttatagtcgattaaatttgcacagagctttagttttcaattacgagcgtctcgatatattacgggatacaatcggacatccgagttaaatgatattgtcgtttgacttttcttagagcttccgttttcaatttgagcgtctcgatatattacaaggctcgatcagaca

SEQ ID NO: 18696 - DNA, 429 bp, Glycine max
  unsure (1)..(429): unsure at all n locations
ntgagcacattcaaacaacaataacttttgaatcgaaggtcngattgtgtctcataggatatcgagacgctcgtaattgaaaacagaagttcttagaaaaatcaaatgacaataagttttaactcggatgtcctattgagccctgtaatatatcgagacgcacgaaattgaaaacggaagctctaagaaaagtcaaacgacaataacttttaactcggatgtccgattgagtgccgtaatatatcgagacgctcgtaattgaaaactgatgctctgagcaaattcaaatgacaataacttttaactcggatgtccgattgagtcccgtaatatatcgagacgctcgtaattgaaaacagaagctctgagcaaattcaaatgacaataacatttcactcggatgtccaattgtgtcccagaggatatcga

SEQ ID NO: 18697 - DNA, 436 bp, Glycine max
  unsure (1)..(436): unsure at all n locations
agcntttattttnttggaatcaaataaaacaccaagatagtctcatattgtaaaattgccaaatcgtgtctcaatagaattaattgattgatctaatatgtataaaaaatactcgatacgaaaagattcttcaggtgaatgtgtgatctcattactaatattttcatcaaaatgagaatttctattaattttacgtttttcacgaaattttggctttatatccatttcgatagccattttttctgtggattttaaagtcaatgcaaacccattttccctataatgttttaaataagtgataagaccttttaaatgatctatggcaacatctatatgcatancctttgattgtagaattttgctaatagaattgacagcaaacaaaatatcataccanatattcattcctaataacaattcacaatcttcaagttca

SEQ ID NO: 18698 - DNA, 493 bp, Glycine max
  unsure (1)..(493): unsure at all n locations
ngtgacgatatttaaaanatgacaccaaatataaataaagggtaatattatattgcgacattttatcaaatattgtctatatcacatgtcctgctaaagcatttagtgatatgaactatatacaatatttgataaaatatatattacaaaaacatattaataacaattattcatatttgatgatattttttaaatgttgtcaaaaactattcacaatatttttactaaaatgtgacggtgtatataaatgggtagtaaatagtaatccttggtcattccctagtattagtacaactattcatgtatattcacaaatgtacgtagatatttattaaaatatttttttctaagaagtaaaacataaaataaaaattgaaatatatatgtatacaaaacataaattagaattactctatatatgataaagaacgtntaaataatgtcacattacacgtacctacatgtatgagtacctcattatatatccatcatt

SEQ ID NO: 18699 - DNA, 424 bp, Glycine max
  unsure (1)..(424): unsure at all n locations
agctattgttacgattcactgngacagtcaaagtgtcattcacttaacaaatcaccaaatgtaccatgagaggacaaagcacatagatgtgaaactacacttcatcagagatgtgattgaatctgagaaggtgaaggtggagaaggtttcacagaagaaaacctggctgatatgtttacaaaatccctctctagtgtcaagttcaagcactgcctggacttgatcaattttgaagatgcctaaagcagatngatagaagtgcagccttgaatcacaatgtagacacttgcttgattggagtcaaggtggagatttgtggtgtgtgactcanaatcacaattggcacaagtgagaaggctttanagtggtgctgtcataactgttntcagttattataacntgaattagtttggcaccaaagtat

SEQ ID NO: 18700 - DNA, 339 bp, Glycine max
  unsure (1)..(339): unsure at all n locations
ttcacgagagcttccgttgttcaatttcgagtgtcactatatgtgatgcgcctaaattggacattcgagttaaatgttatgaccatttgagattctcaagaacttccgttgttcaattctgagcgtctcgttatgtgatttgcctgaatcggacatccgtgtgaaaagttatgaccatttgaatttctcaagagcttccgttgttcaatttcgagcctatcgacatattatgcgcctgaatcagacatccgtgtganaagttataaccatttgaatttcatgagaagcttcgttgttcaatttcgagcatctctacatattatgcgcccgaatctgaca

SEQ ID NO: 18701 - DNA, 432 bp, Glycine max
  unsure (1)..(432): unsure at all n locations
ttttttgatatggagatcaaattgaccttgaagctatgtatatatacaacatcctctaagtatagaaactgagaaaattgcactgtgcctacatgagttgcaatgactgtgtggccaatgggaagcttaaaattatgggatttatcttcttacaagaagaaaataagtaaggaaaagttatgacatgatcagtggcttctgaattgagtatccattcatctggacctgtcttgcttacactacaagtaatggataagacattacctctgtgtgcattgctggaaccaatgattgtactaatttgattcacatgntgaattgtgtgactcgagctctattgctacagcanggccattagagccttatattgttgagaagtcaactntattatagtactttgctcatcttgattgttggtaactcattggcaag

SEQ ID NO: 18702 - DNA, 386 bp, Glycine max
  unsure (1)..(386): unsure at all n locations
atcttgtttggntctacttctctgatcatctggtaataaagccaatttggaaaatttcttgggactcactatctcaagtttctcagtaatttccttgaatgctggaacaaggccacgccttatgaagcacccttctataagccgcatcgaatttaactcggggagactaggagcatcttttaactccagatccaagcaaaatggggagtcttttagccacatcctgagagagtgagccttggccacaaggatgccttgtcgtgtcttacaaggaagaaaaggcgatcccatttcccanaggcatgccttcaatgtgctgtcaagagataccatgttatactctngctgttcccgtataagtacaactggatttggtgactctggat

SEQ ID NO: 18703 - DNA, 438 bp, Glycine max
  unsure (1)..(438): unsure at all n locations
agcttatggttattgtaaggagaataaaacaatccanaatcaattgtacctttcaagtaacgaagaattctttttgcggcttttagatgtggagaggtaggagccttcgtaaagagacacacaactcccaccgcatatagaatatcgggccttgtattggctagataccttaaactccccacaagactcttgaagatcgtggagtctaccttctgtccttcatcaaactttgataacttcaagccaccttccataggtgtgttcacaggattgcaatcaagcatattaaatttcttcaacacttcttttgtgtacctttcttgtgagacaaagataccattctccgtttgcttcacttccattcccaagtaatatgacataagtcccatatttgtcatatcanattcacgagacatggactccttgaagtcttcaaac

SEQ ID NO: 18704 - DNA, 465 bp, Glycine max
  unsure (1)..(465): unsure at all n locations
gttataggtttcatatatgtctcaccatagatcttactcgtcttggagtagactctggtgatgatagttcttgatcttgttgttgtggtggaggtgaaggtggttcacctgggtcttcttcctcagctatttcttgaggtagttgagcgggtataagaacattcttttccactttttcttcaccccaattccaagaagcgtactcatcaacttcaacatctcaactgatgacgagtttcttagtttgcaagttgtagacacggtagcccttagagatattgctatacccaaggaagatacctcgtatagtcttgtcttcaagtttgtgcctcttcacgtctggaatataaatgtagcatatagatccaaagacccttangtgctntgctgatggcttcttnccgttccaagattcaattggagtcttgtcttttacagacttnagtggacatctgttgagtgtgt

SEQ ID NO: 18705 - DNA, 426 bp, Glycine max
  unsure (1)..(426): unsure at all n locations
ttctttatgtttatgaatcaagttgattcaagaagtttagataatgacaaagatgtagacaaaaagcccaaagaatgatgtcaagattaaatcaagaacaaattcaagaatcaagagaagtttgatttcaagattcaagaaaagatgaattcaagttccaagagaagaaatcaagaagacttcacaagggaagtattgaaaagatttttcaaaaaacaacatagcacnagtttgtttttcaaaagagtttttctcacaagtttctaagttaccagagtttttactctctggtaatcgattcccagtttcctataatcaattaccagtgacaaagtttgatntcaaaagttttcaactgaatttgcaacgttccaattgatttcanaatggtgtaatcgattacaagatattggtaatcgattacca

SEQ ID NO: 18706 - DNA, 483 bp, Glycine max
  unsure (1)..(483): unsure at all n locations
gctaaccttagttcatcgctgttgatcccatggtcttatcttatactttgccacattatatcaccttgaccatttataaggccactagtctcctatggcacctagacttcattcccttagttttaacaactcattagattctcacttcactaatacattggacagaaatgtgtataaccttttttcttttgtaaactactctataagggctcacatcacctctctattaagcataatatattttacaagctaattacataatatatttaaattggactcatccattcatataacataaataaattccaatctaagaagaggaaataaagataaaatttatacacttagaanataaggcatataataaatagaaatttataacaaaactcaattcatacaagtcatctcatatacaagtacatcaacaaaatattgtcaaaccaagatatcatagttcaattactaaacatcaccatgtgacat

SEQ ID NO: 18707 - DNA, 478 bp, Glycine max
tgagagagagacaccttttggttgcaaacaatgtataataaataagtgtgacacctaaattccaagcatgcaaaggttcaacatagaaataacaaaactaacataaataaataaagggggggaagagttgaatttcatgaatggattacaattaccaatggtgggggaaagatcttcaacagaacttgaaataaagctgacaagtatgctactttttaccaccccggaatctccaatcaacaagatcttgaaagagagatcatagccactgctctgacctgaggatgaactcattctctcttcctctgatgaatgtcttacgtgtgtgtgtcaaaaagtacagtgaaagatacgtatgcaagggtgagagatatatagaggcttatggtgttgggctacggaaggctaacctgtaacgaagacaatgtggcaaccctttcattattggtggagagataatactgaagagagagagata

SEQ ID NO: 18708 - DNA, 416 bp, Glycine max
  unsure (1)..(416): unsure at all n locations
agcttgtcttttagtttatcgtctattctatatgcaagtatagatagccaggccaaaactgcccagattccatctttctcacgaatatggtcagaacctatccacaagcacaaggaataatcacaagataaaaagtttaaaactaggttctaataaagttgagagttgtactttgctcctcttaatgcaatagcaaacacataccagtcccaaaactttcttcaccacagactgaacataatccagcatccattaaattaccaaagaacttccaacccgtggggacctggttgtgaataacaattaaataaaataattgcatgtctaanagccatcaacaagtagtttcatacttaaaagacattgaagagcaatatacctcanagaatctcanattcagatgtttggcaacaaca

SEQ ID NO: 18709 - DNA, 429 bp, Glycine max
  unsure (1)..(429): unsure at all n locations
agcttttatgatatgattacactatcaagtataagccagggtttgctaatgttgttgccgatgcgttgtccagactcttctcgaccgaggtctcctgcttatcattaattatgcctcatttcactnttttgcatcaactccgtcacactttgttacaggatccccaatatgttgatcttctgcataccattaaattgcgcccagatgctcactccaacctcgccattcataaggaccttattttccgacaaggctgtatttagattcccttcccaaccccttttactgccttactcttagaggaatttcattcttctcctctcggaggtcacacaggggtatcaaaaactctccattgtttacgacaaatatttgattggccacatatacaganagatgttcgtcggtacatcgcgcaatgtcccacgt

SEQ ID NO: 18710 - DNA, 429 bp, Glycine max
  unsure (1)..(429): unsure at all n locations
ttcttttctttgcaactaaatcttgctttctttagttaattntataaacagtattttacatgtatgaattattttcgaattataaaaatttataaattaaaatataaaaaaataatatttaaatatttttattattntaatttacaggtatttaattttatcacaatattttattataatataaattaatatattattatatataaaaanttgttcttattntattatgattntaaaaaaactacataaactaacatatagattatntaataaaattattttatgtaagttatacgaattaagtaaattaaaataacatttanataatataagaaattgaaaatttattattttttataattaanataagaatttgtattaattatatataaaaataaatntacatggctcttgtannatacataaaat

SEQ ID NO: 18711 - DNA, 462 bp, Glycine max
  unsure (1)..(462): unsure at all n locations
tatgctgcanatatttacaatagacctcctcaatctcagtatanaaatcaaccacagcagaacaattatgacctctccagcaacaaatacaaccctggatggaggaatcaccctaacctcagatggtccagccctcagcaacaacaacagcagcctgctccttccttccaaaatgtagctggcccaagcagaccatacattcctccaccaatccaacaacagcaacaaccccagaaacaaccaacagttgaggcccctccacaaccttccctcgaagaacttgtgaggcagatgactatgcagaacatgcagtttcagcaagagaccagagcctccattcagagcttaaccaatcagatgggacaattggctacccaattgaatcaacaacagtcccagaattctgacaagctgctctctcaagctgtccaaaatcccaaaaatgtcagtgccatttcattg

SEQ ID NO: 18712 - DNA, 417 bp, Glycine max
  unsure (1)..(417): unsure at all n locations
agcttctgttttgttaaactggttcccagaagacaacagggagtgaagattgctgaanaccctagccttgcaacaagtcctagggaagtagatacggagatggacaagaaaatctgcagtattgtgagtagcattttgaaagacgcctctgtgcctgaagctgatgaagatgtcccaacatcgtccaccccanatgtttctgtgcctgatgtcaataaagatgttccaacatcttccggcccanatgctgaagtactctcttcccccagcaaagagagatcaacagaggaagatgatcaagccgcagaggagactcctacaccacgggcaccagaacctgctccaggtgacctcattgacttagaagaagtcgaatccgatgaagaacccattgcanacaggttggcacctggcatt

SEQ ID NO: 18713 - DNA, 433 bp, Glycine max
  unsure (1)..(433): unsure at all n locations
agcttgtaatttttatattngaatatatttgnatggtctatttatgtagatgtttatattttgataaatgaatagttttaggtagtgtaagataataattttgtatagtttagtttgaattcttaatgttatatgctacattagatttagtttaaatcttttttatgataaattaggaatagttttacatactctaagttattaattgtatatggtagattaggaatagtttacattgttatatgatagattaggtttagttgaaattttttgtataatagattagaaatagtttgaagtaccgtaacttattaattctagattagctttagtttaccatttntgtccgccacgttgcgtaataggattgaaggtctcctctacttcaaaccttgtggagtggatgtcatacacgcgaacgatgtgcgaacaa

SEQ ID NO: 18714 - DNA, 392 bp, Glycine max
  unsure (1)..(392): unsure at all n locations
catgctgngttgtatacgcagtgtatcacagtttttttagagactgccaaaccgctcagtaactagctcaacaaggacgctgtgtacntgctcgatgaatagtgcttgaacgcattcaacactatatagaccagcctagtgtctactaccgtcattacaacaccagattggagccaagaatttgagctcatgtgtgatgcaagtgattatgttgtaagcgctgtattgggccacaggaagggtagagttttccatgctatctattatgccaataaagatttaaatgatgctcaattgaattatggcaccatatataaggaaatgctcagccttgtctatgctctggagaactcagatcatacttaggtgatcaaagttattgttacactgac

SEQ ID NO: 18715 - DNA, 469 bp, Glycine max
  unsure (1)..(469): unsure at all n locations
ggcatgcaatgtcttttatatactnnntgtacaagaaatggaaaagctctgatacnncacttggttagaaaacaagtggccctcagaatattcttanagaaaggggnnggttgaattanagaatanntcacaaacttattccctttaattaaaaattcttaatttgatttntaacccaaatcctaagattccttttaaaatgaattcctaaataattattcaaattaaacttactgaatagaagcaataagcaataataaataaaagagtttaagggaagagaaagtgcaaactcagttttatactagttcggccacacccttgtgcatacgtccagtccccatgcaacccgcttgagagttccactcaatcgcaaaaaccctttacaagttctgaaccacacaaggacaacccttcctttgtgttcagatttctttacaacaagagaccctcggtctcttaatccctt

SEQ ID NO: 18716 - DNA, 436 bp, Glycine max
  unsure (1)..(436): unsure at all n locations
agctttcttgatanaattcctaaagaagctagagcttagctacacacacctctctaatagctaagctcacctccttgagatgagaagctagagcttagctacacaccccctataatagctaagctcacccccatgacaaaatacatgaaaatacaaaaaagtccctactacaaagactactcaaaatgcctcgaaatacaaggctaaaaccctatactactagaatggccgaaatacaaggcctaaacaaaggtaaaatctattctaatatttacaaagataagcaggctcatacttagcccatgggctcgaaatctaccttaaggctcatgagaaccctagggccttcccttggatctctggcccaatctacttggagtcttctatccaatgcccttgcgggatatgattgtatcattcctcccttcttctcatt

SEQ ID NO: 18717 - DNA, 488 bp, Glycine max
  unsure (1)..(488): unsure at all n locations
tgccncaagatgaaggtttcttgtggacgagggcatgcttgtattgttcgatcatgcgattcanaacttccgtttgtccatctgtttgtggatgataagctgagctcatccgcaatttcatgtcgctcatctgaaacaggtcttgccagaaaattgcttatgaataatgggtctctgtcggagatcaagctgcgtggcatgccatgaagctttctgacgatgtccatgaacaggatgacgactgagtaagctgagtgctgagttggcagcatgcctaggtgtatgccttttgaaaatcgatctactacaaccaatatggcagtatttctgtgaatcggaggtaggcctgtgatgaggtctaagggaaagtcctcccatggccgacagggtaccgataatggacataagagaccggcagacttcttagtctcatacttagtgtgttggcagtcgacacaggttgctacaaaacattntacatcttttct

SEQ ID NO: 18718 - DNA, 473 bp, Glycine max
  unsure (1)..(473): unsure at all n locations
tcactcgacccggatccttaagtcacctgcngcatgcagcttattttgccatctatggtcttaaacatgcncctagagcctggtttgataaactcaaggtgcacttctgaagtttgaatgtaagtccagcaagtgtgatccctctttatttgtctactccaaagggtcctcaacaacctatatgcttgtttatgtagatgatatcatcataacagggaataatccttccttaatcaagcaactcatctctaagctaaatactttnttctttcttaaagatcttggttctctagactatttcttgngaattgaggtaaaacatcaatctgatggatctattgttctcactcaaggaaaatacattagagacttgctggcctanactaatatgacagaagcaaaacctatntcttcacctatggttactggatgtaagctaactaanagtggatctgatccactcactgatccat

SEQ ID NO: 18719 - DNA, 428 bp, Glycine max
  unsure (1)..(428): unsure at all n locations
tcattcttatattctancataatccaatatccagaagactttgatagggaagttagaatcctagggaaagcaaggcacccaaatctaattgcattgaaaggatactattggactcctcaattacagcttttagtgaccgagtttgccccaaatggtagcttgcaagccaagctacatgaaaggcttccttcaagtcctcctctttcttgggctataaggttcaaaatcttgcttggaacagcaaaggggcttgctcatttgcaccactctntccgtccgccgatcatccactacaacataaagccaagtaacattntgcttgacgaaaattacaatgccaagatctcggatttcgggttggctcggcttctgacaaagctggacaggcatgtgatgagcaacaggtttcagagtgcattangatatgt

SEQ ID NO: 18720 - DNA, 342 bp, Glycine max
  unsure (1)..(342): unsure at all n locations
gcatccattatccatagngagaacacagatgtgtagactaggatggttgctggttgaaccaaacaaatactgtgctaaggactgcagaaacaactatctgttcttattaggttaatatctgatatgtgaaccattggttcacacgatactaaattaatgttttgaggggaggatccactacagtagcttgctaagttgctactgaagcccttatgtgttgctcatgcgttgcactactacatgggcttggacacccgactaaaccagtttctaagtttttatttggagcatgatgctagcaacatacgactattatagttaaattacagaattatttcatta

SEQ ID NO: 18721 - DNA, 468 bp, Glycine max
gggtcaggaagcacaacttcagtcaagcatttcaagtattatggatccttatgctataggcatgttcttgataagaggagaaagaagttggatgacaagagtgagccaatgatttttgttggatacaactctactggttcatacaaactatacaatccaaagaatcaacaagttctatttagtagagatgtctactttgatgaattaagctcatggggagagtttcaacctacttctgagacaatacagaagattcatcttgaattgaaaaatgatgatccagtaggagagatacatcaagaagtggtcaataacgaaccttagatggtggttgatagacctacaagagccaaaagttttcccttaagactcagagattatcaggtttaccctgatagtgcaattactgaggatggtgatttggtcagcatatggcacttatggcagacatggaacctattacttttg

SEQ ID NO: 18722 - DNA, 475 bp, Glycine max
  unsure (1)..(475): unsure at all n locations
tgtctcggaaatattggttctaatatggtactaattgtttatttatgggcttgtacagatccaaaaaatttgtttagtggagacaataatttttttatcaatggcaataaaaacaccacaacaactatcatttatatagatagatagataaatatatacccaaatattgttattgatccataataaatttttcttcatttttgttccctgatatttgacatggttttttaaattgtagtcattagttaagtgatgacatgtcactactaaaaaatagggtttcaacattggttattaaggactttccacatcggttattaaccgatgatgaaagtaccaacgttgaaagtaatatcgttaacatcgattntccaaaaccgatattaatataaaattacaacatcggttattgaaataactgatgttatataataagaattataaaanaaagtaatatatcttcatatcaacatcg

SEQ ID NO: 18723 - DNA, 474 bp, Glycine max
  unsure (1)..(474): unsure at all n locations
tgtggtggtcattctctacgccattntcatcgctgtcgtatgtaaaatgacggtcaaggctcttaagacagcaatgtaaagatgtacggtatgataatagcaaggcaaattgaaatagaatatgtatattgttatttcattgatcctttgcatgatatatataatacatgtacaagaatgttctataccaattctaaggcatgacagacgtgatccataatcagtggcatctgatttattctatgcattataaggtaaataaatatagaatcaaggtaacataggaaagtaaatatatacacagcatatttgcaatcatgtagaagatatttcctaatactcccnctcaagttggtgagtgaatatcgtgaagtcccaacttgttgcgcaatgtcacaaattgatcttttcccanagcttttgtaaacacatctgctagctagaaattttgtggcacataagaaggattgatca

SEQ ID NO: 18724 - DNA, 462 bp, Glycine max
tacattctcccactttctcaagcaaattcttaattcttcttgatatcatcaaaatcttcatgatttacaaatatgttttataacagctactaatatttgaattcgatattctagactgtgtaatcgattacacaattttggtaatcgattaccagcagttaataaacgttttaattcaaattttaaaagctgtaatcgattacacaattcctgtaatcgattactagacaggattttcagaaaaatatttctaagagtcacaacttttcaaaggctttattcatgactaccaatgatctatatatatgtgacttataacacgaaattgctcagaagttttcagaacaacaagtgtttatcctctcaaagagcaaaatcattttatcctcttaagaattccttggccaattcaatcgcaattcattaatgaattatttgagtgctcaatctgtaaaatctatc

SEQ ID NO: 18725 - DNA, 456 bp, Glycine max
  unsure (1)..(456): unsure at all n locations
tactaaggcacctgttctagctcagtatgacttttctaaaacttttgagctagaatgtgatgcctctggagtgggagatggagctgtattgttacaaggtgggcaccctatagcttattttagtgaaaaacttcatagtgccaccctcaactaccccacctatgataaagagctttatgccttaataagagccctccaaactagggaacattaccttgtttccaaggaatttgtcattcatagtgatcatcaatcacttaagtacattagagggcaaagcaagttaaactagaggcatgcataatgggtagagtacctagagcaatntccatatgttatcaaatacaaaaagggaataacaaatgtggtagctgatgccctctctangagacacacattgttttgctccctacgagctcaaaatttaggatttgataatattanggacttgtatgc

SEQ ID NO: 18726 - DNA, 420 bp, Glycine max
  unsure (1)..(420): unsure at all n locations
agctntatgcttgtcaattttcaggaggcatctcggagaggatctttttcggacatatttgcgcaaaatctcttgaactangaagatgttgcccatcatctttttgttcttaatgaaagcagtttgagtgtccctaataatagtctcaagcactggggctatgtggttagccagaattttagatacaatcttgtataacaaattacagcaagatattggtctaaaatggttaacctgcgaggcctgatcatgcttaggaataagcgcaataatagcatggttgagctgctttagaatttttccagttgtaaagaattcattaaccgctgcagagatataatcaccaatgatatctcaagccttcttgaagaataaaacattgaaaccatctggcctaggagcgttattgtatccatcaca

SEQ ID NO: 18727 - DNA, 451 bp, Glycine max
agctttaagccaattcatacgacaataactgtttactcggatgtctgattgagtcccgtattataacgaaacgctcgaaattgaatgttgaagctttgagccaattctaacgataataactttttactcggatgtccgattgagtctcgtaatatatcgacacgctcgaaattgaatgttgaagctctaggcctattcaaacaacaataacgttttactcggatgtccgattcagtgacgtaatatatcgggacgctcgaaattgaatgttgaacctctgagccaactcaaacgacaataactttatactcggatgtctgattgagtcccgtattatatcgagacgctcgaaattgaatgttgaacctctgagccaattcaaacgacaataactttgtactcggatgtctgattgagtcccataatatatcgagacgctcgaaattgaatg

SEQ ID NO: 18728 - DNA, 360 bp, Glycine max
tagagaagctagagcttagctacacatacctctctaatagctaagctcacctccttgagatgagaagctagagcttatctacacaccccctatcatagctaagctcacgcgcatgacaaaaaagacatgaaaataacataagaagtgcttattacatagacaactcaaaatgcctcgaaatacatggctaaaaccctatactactagaatggcaaaatataaggcctagacaaattatgaacatattctagtatgtacaaagataagcgggctcatacttagcccatgggctcgatatctaccctaacgctcatgagaaccctatggcctttgcttggatctgtagcccaatctacttgg

SEQ ID NO: 18729 - DNA, 346 bp, Glycine max
agctttgagcttttcaaatggtcataaatagtaactcggaggtccgattcaggcgcatattttatcgtgacgctcgaaattgaacaacggaagctctcaagaatatcattggtcataacttttaactcagaggtccgattcaagcgcataatatatcgagacgctcgaaattgaacaacggaagctctcaagaaatttaaatagtcataacttttaactcggaggtccgattcaggcgcataatatatcgagacactctaaattgaacatcagacgctctagagagaatcaaatggtcataacttttaactcggaggtccgcatcaagcgcataatatatcgatac

SEQ ID NO: 18730 - DNA, 457 bp, Glycine max
  unsure (1)..(457): unsure at all n locations
tgtanggttaaagtctcacgaatgtcatgtgctcatgcaacaattgttagccgtggctatacgagatatcttgccaaacaaagtctggttagcgataactcgcctgtgctttttcttccatgctatatgtatcaaagtcattgatccagtcaagtttgatgagttggaaaatgaggccgcaattatactgtgccagttggagatgtattttccccccgctttctttgacatcatgattcacttgattgtgcatctggtcagagaaatcaaatgttgtggtcctgtatatctacggtggatgtacccgggtgagcgatacatgaagatcttaatagggtatacgaagaatctatatcgtccagaagcatctattgttgagaggtacattgcagaagaagccattgaattttgttcagaatacttagagaaagctaaacctgttgggctatctgagtct

SEQ ID NO: 18731 - DNA, 384 bp, Glycine max
ctctctacatatcatgcgccgcactcggacatgcctgtgaaaagatatgttcataccaattgctcgagagcttacgatgcttaatttcgagcgtatcgatatattatatgcctgacccggacctcacagcgaaaagttatgaccataccaatttcacgagagcttacgttgtgcagttccgagcgtatctatatgagatgcgccgcactcgaacatcccagtgaaatgatatgaccatgtgaatttctcaagagcttacgttgcgcaatttcgagcctatcgacatgttatgcgcccgaactggacatcccagtgaagagatatgaccatacgaatttcacgagagcttacgatgtgatattcgagcctatcgacatattatgc

SEQ ID NO: 18732 - DNA, 444 bp, Glycine max
  unsure (1)..(444): unsure at all n locations
ntataagctntatttaagccatatctctagtcaatgtgggactaaattaccacccttgagctgcaattaaggcagcccccatagcaaccgcaactgagcttggataggggtgaccacaattaagcttggctttccaacaattaggcaattccctaactcttcttaccattttctccactctttcaccccctttttcctcctcttctctacacaccaacagacttttactactgttaggaccatttttatctttctttcctctcccatgtatcttgatcagcagcccatcagaactcaattaaattaaaatacaactcangcagaacaaaaaatctgaatattatttggacagtgaggtctctcccaagtttgtctatgtttgactgctgaacttatggagattaacataaatgatctggtacagttgcgagggacacacaaagc

SEQ ID NO: 18733 - DNA, 416 bp, Glycine max
agcttgaaggctaactggatgcattggtcaacttggtaacccagctggccttgaatcagaaatctgtacctgtcgcaagggtttgtggttagtgctcctctgctgaccaccatacagacctttgcccttccatgcagcaacctggagcaattgagcagcctgaagcttatgctgcaaatatttacaatagacctcctcaacctcagcagcaaaatcaaccacagcaaagcaattatgacctctccagcaacagatacaaccctagatggaggaatcaccctaacctcagatggtccagccctcagcaacaacaacagcagcctgctccttccttccataatgctgctggcccaagcagaccatacattccttcaccaatccaacaacagcaacaacctcagatacagccaacagtt

SEQ ID NO: 18734 - DNA, 468 bp, Glycine max
  unsure (1)..(468): unsure at all n locations
atgccgtggagtttgacacaatgtcaatgaacaacatatgtaccatgtgagctgtatgagcctgaggtataatgccgaagtgaatcccctttganaagcggtcaacaaccacaaggagtacaatcttgccctgaaaaaaaggaagaccaatgacgaaatcaagggagaggtcctcccatggtctgaatggaactggaagagggcacaacaagcccacaatatgtttcgtttcatatttcgtgaattgacattcaatacaattagctacaaagttggcgacatcagctcggagacctggccaagttaaattctccgacaaccatgttattgtctttgtgactccaatatgaccccccatgggagtggcatggtattcgatcaagagagattgaatgagtggaagatcatggtgtaaccatattctgcccttctggagaatgagattcntaataatggtgaagtctggat

SEQ ID NO: 18735 - DNA, 428 bp, Glycine max
  unsure (1)..(428): unsure at all n locations
agcttattcagatgtacttttatgataaaaacataagaagaaaaaatgacataaatttcttcataagtttaaaaatagttcacgcataagttagtttatagaagctatcttatatagcttctctaaaagatgatagagtttctacaaattgatatgtacataaattaatttgagcttatggagaaattcatctcattatatttctttttatctttttctcctaacagttcttctagaaaaattcatccaaacacgtctcattntaacagttaacataaaccatcaagattatatatactttatcctctaaattattttttactttgaaggagtcaagataaaagtcattataatgcatgtgtaaagaanatactacaactcatgcaagtgcatatatcgatatgtttagtatatgaaaattacgaatc

SEQ ID NO: 18736 - DNA, 475 bp, Glycine max
  unsure (1)..(475): unsure at all n locations
ntcttgagataacttccttgagaatcttctttgagataacttccttgagaagctagagcttagctacacacaccctctcataactaagctcacctccttgagaagcttgcttaagaagattcttaaagaatctagagcttagctacacacacctctctaatagctaagctcacctccttgagatgagaagctagagcttagctacacaccccttataatagctaagctcacccctatgccaaaaaatatgaaaatacaaaaaaagtccttactacaaagactactctaaatgccccaaaatacaaggctaaaaccctatactactagaatgaccataatacaaggcccanacgaagganaaacctattctaatatttacaaagataagcggactcatacttagcccatgggctcgaaatctaccctaaggctcatgagaaccctanggccttcccttggatctctggcacaatct

SEQ ID NO: 18737 - DNA, 423 bp, Glycine max
agctttgaccaaattcaaacgatgataactttttactcggatgtctgattgagtcccgtaatatatcgagacgctcgaaattgaatgttgaagctctgaccaaattcaaacgatgataactttttactcggatgtctgattgagtcccgtaatatatcgagacgctcgaaattgaatgttgaagctctcagcaaattcaaacgataataaatttttactcggatgtctgattaagtcccgtaatacatcgagacgctcgaaattgaatgttgaagctctcagcaaattcaaacgacaataatttttttagtcagatgtctgattgagacccgtaatatatcgagacgatcgaaattgaattctgaagctctgagctaattcaaacgacaataacgctttgctcggatgtctgattgagtcctg

SEQ ID NO: 18738 - DNA, 341 bp, Glycine max
  unsure (1)..(341): unsure at all n locations
agcttcacgattttcctagcaatttagtttcagacagggatcccatttttgtacgacttttttggcgcaaattgttcaccatgtgtggcataaagctatgtatgagcacttcacatcacccagaaatgaaccagcaaaccaaagttctgaaccatactttagagcaatatctcaaatgcttggtcagtgacacaccaactcgctggttcaactatctctcactggcagaatggcgttataatacatccattcattctgctacaagaattactcnctttgaagcaacttacggcaaggtcccttcttctattctcggtacttgatgggatcgtccagcgtat

SEQ ID NO: 18739 - DNA, 407 bp, Glycine max
agcttctgttttcaattttgagcgtctagatatattacgggtatcaatcggacatccgagcaaaaagttattgtcatttgaattttgtgtattcattttttagcatcaagaattattaaatgactcaatcggacatccgagtaaaaagttattgtcgtttgaatttgctgacagcttttgtattcaatttcgagagtctcgaattattaaatgactcaatcggacatccgagtaaaaagatattgtcatttgaattttcttagagcttttgatttcaatttcgagcatctagaattattaaaggactcaatcggacatccgagtaaatagttatggtcatttgaatttgcttagagttactggtctcaatttcgtgcgtctcgatatactataggactcaatcggac

SEQ ID NO: 18740 - DNA, 460 bp, Glycine max
  unsure (1)..(460): unsure at all n locations
tgtagcanatgcaaaccacaataactnttagctcggatatccgattgagtcccgtaatatatcaagacgctcgaaattgaatacagaagctcttagcaaattaaaacgacaataactttctactcggatgtctgattgggtcacgtaatgtatcgagtcactcgaaactgaatacagaagctgagagaaaattcaaacgacaatgacttttaactcggatatcccattgagtcccgtaatatatcgagacgttcgaaattgaatgtagaagctgtgagaaaattgtaacgataataactttttactcggatgttcgattgaatcccgtaatatatcaagacgcttaaaattgaacacagaagctcgtagcanactcaagcgacaataactnttaactaggatgagtcctgtaatatatcgagatgctcgaaacttataacggaagttcgtagcatattca

SEQ ID NO: 18741 - DNA, 375 bp, Glycine max
agcttgtccgttcggagttttccgactatgctcttgtgtggtggaacaagctacaaaaggagagagcatgaaatgaagagccaatggttgatacatggacggagatgaaaaagatcatgaggaagcggtatgtgccggctagttactcaagggacttgaaattcaagctccaaaaactaacccaaggcaacaagggggttgaggagtatttcaaggaaatggatgtgctcatgattcaagcaaatattgaagaagatgaggaggtaactatggctcgatttcttaatggtttgactaatgatatccgtgatattgctgagctgcacgaagttgttgatatggatgatttgcttcacaaagcaatccaagtggagc

SEQ ID NO: 18742 - DNA, 429 bp, Glycine max
agctttgccacatggagatagatgtccaaaaaatgaaaaaataaaaaataaaaaatcaactccctcttgttgtgtgtaacccttggccacaagcctagctttgtaactttggatggcgccattaacacaatgtttgatgtgataaacccacctataaccaattgaaacttagcttggggaaaatcagttagatacgaagtatgatttgcttcaagagtatgtaattcatccttcatagcttttcttaatacagtttcatacttaacagcttatgcatatgttttgggttcagaaatttttgaaatggctaaggtatatatttgagatgactaggagacaaatgatgataggacagaacagtggataaggaatataaagcagtacctgaagtagaagacaggaacctgctgagttagaagattgcatgta

SEQ ID NO: 18743 - DNA, 427 bp, Glycine max
  unsure (1)..(427): unsure at all n locations
gaatgacatactcttgttggacatcaacttgtgttcaaaattattagttntaaggactgacaatggcctgcagtcgttcaaagcagttcaatgagttctgcaagaaaataggcatcaaaaggcacataatagtccctcacacaccacaacaaaatggtttggcagaaagaatgaataagaccattttggaaagagtgaggtgcataacttctaatgcatgactgccaaagaccttctggggagatactgctacaccacagcatatttgataatagatgtccatcatcagccttatgtttcaagacactaatggaagcttggagcggtgaaccacctgattattcatgattaaaggcgttctgatcactggctttcgctcatgttaaacaacgaatgctggatgcaaggtgtataaagtgagtgttca

SEQ ID NO: 18744 - DNA, 417 bp, Glycine max
  unsure (1)..(417): unsure at all n locations
agcttcttatccaaggctcatcttggtggtgaagctccttcttccatggcttattccctagtggatgacgcctcctctcacctcttctcctttgtcttccactgcatctccatggtggaaaatcaccattaaaggacctcattgaagctcanaccaccaaaagtgagtgttttgttgggaaccttgaatgtggtcatccaaacactcttaggattcgcctagtttacatttcttgcttactttcatagcttatttcctttatcttccattgtcaaaccgcctagatagctttccttttaaccaattagttttttcccttatctntcagacctcttttagtgtttattttggctagtttcaaccatagttacttttaccttntgttttcaaacctccaataagaaagaaccacaactt

SEQ ID NO: 18745 - DNA, 463 bp, Glycine max
  unsure (1)..(463): unsure at all n locations
ttnntgaaagacaaatctcttcaaaccattntaaaaaggcacaaatggcaatttgaaaaggcatgaagggtctatatatatgtgtgtctaactttgaaaagcaagaaagagatattctaagagaacttcattgccaaatgttctctcaacaactcttgggcaaacacttacaaatctattgagagttcatccaggaatttcaatttgtatcatccactctaaaggagagaaatctttttgtttatctcanaagtcagttgtaatcaagagactggttgtctcttgaattgtgagtatcctgaacacaagagaaagggattcctcgggtgttcagaagttgtaaaaaggatttttacaaagttagtgaaaatctcaagtgggttgcttgaggattagatgtangcacaggaagtggctgaaccagtataaatcgagtntgcatttctctcttccttcatctcat

SEQ ID NO: 18746 - DNA, 454 bp, Glycine max
  unsure (1)..(454): unsure at all n locations
tccatggcatgaggtctggctcccgctctgctcttgcccgcgatgccttctccctttctttatccacatgctctctctccctcaatgaattaaggcaacccctctcccttccttcatccaagatgcttgtcgagctctccaagtcccaggactcccctgccggcgacagcaccaccaccgtcatcgtcatcatcggcgccctcctcaagcagtgcctncaccttctctcccacgacatccaccccaccatcgtcactgacgccctccacaaggctgccatcaaggctgtcgatgttctcattgccatggctgtcctcgtcaagctctccaaccgtgactccctcgtgaagtccactcanatntaatggataggggtaatatgaatangtaacccaattgaaataagaaactacccaattanatccaatgaactactacnaatatgcatcaacat

SEQ ID NO: 18747 - DNA, 367 bp, Glycine max
  unsure (1)..(367): unsure at all n locations
agctnttttcagtcgtctgtaaggatgattgggtgttagaaagtggtgatgcctactgtacacagtttttctcccatgtttaagttgtttgtaacttgtattttcttcacagatggggcatgcatgatgacccttaacactgtaaccgctgagattcccatatgctggaaagtcattaatggtacaaaaaagcattgcacgcatttcaaaggtctccttgcgaaacgcatcanacactacaacccccttgtcccacaactttctcagatcttcaaccaacggacttagataaacatcaatgtcatttcctggctgtcttgggcccgatatcatcatattcagcgtcatgtgttttcgcttcatgcac

SEQ ID NO: 18748 - DNA, 446 bp, Glycine max
  unsure (1)..(446): unsure at all n locations
nttaatggaagtcaagagcacgatattgcgcccataccgttgactggtgagcaggtatatcagcgggttcaacacctgaatactgtatttggaaagacccaaaagaaggataaaagtaagagttgcatatggaaaaagaggtccattttctttgatcttctgtactagtctgatctagatgttagacattgtattgatgttatgcatgtcgagaaaaatgtatgtgacagtgtgattggcacgctccttaacattcaaggcaagatgaaggatggcttgaatacccgtcaagatctagctaatacagggatacaatcatagttgcatccaaggtctgatgggaagaaaatttacttgcccccagcttgccatactttgtccaaaaaggagaagatcccgttttgtcagtttcttcgtcgggtgaaggttccacaaggatactcttc

SEQ ID NO: 18749 - DNA, 461 bp, Glycine max
  unsure (1)..(461): unsure at all n locations
tcaggttgctcattgactccagattgatgcataanaggacaaagatctgtatggtgatctacagaagaacatagaccacagactctttcaacaggtgtagattttttattcatggcaagctgagttactaggttgaccaaggcatcaagttttccctcaagctttttactaggttgaccaagccatcaacttttccctcaagctttttattttcacttgaatttgaaattgaattttggagacaaattttcactaattatgattagtgaattttagctatggttcagcccaccaatccaagatcaattccaagattctccactaagtgtgcttaggtgtcatgaggcatgtaaagcatgaaggacatgcacaaagtgtgactatatgatgtggcaatggngtgtagcaagcaaatgatcacctccccctctaatantttaatggattggtcttctcccaat

SEQ ID NO: 18750 - DNA, 330 bp, Glycine max
agcttctactataatgtaaaggtgaaattatgtataagttgggtgtcataagttgaactaaatacattgatctaaacataagtgaaaagcttaaggctctatctagctaaaaaaagacagacaaaataatgaactcgttccattaactaaaattcaattacgagataaagcatagatacgaaagattattacatagattatgtacttggctaaacttaaaggagtgttgttcgccggcgagctggaggttgccgctgacgaagacgatcatggcggagttgacagcggacggctgggaatcgacggtggtgatggagtgctggcactgtt

SEQ ID NO: 18751 - DNA, 403 bp, Glycine max
  unsure (1)..(403): unsure at all n locations
agctntcattgttcaatttcgagcatctggatatattatgcgcctgaatcggaccttcgagttgaaagttatgaccatntgaatttcacgagagcttccgtggttcaattttcagcgtatcgatatattatgcacctgaatcggacctccgagtgaaaagttatgaccatttgaatttctcgagagctttcgttgttcaatatcgagcgtctcgatatagtatgcgccggaatcggacctctgagtganaagtaatgaccatttgtattgctcaaaagctttcattgttcaatttcgagcgtcttgatatattacgcgcctgaatcggacctcctagttgaaagatatgaccatttgaatttctcgagaagcttcgttggtcaatatcgagcgtctcgatata

SEQ ID NO: 18752 - DNA, 443 bp, Glycine max
  unsure (1)..(443): unsure at all n locations
tctaaactntgtacaagaatgaagctctgataccacttgttagacaagtggcctcagatatcttaagaaggggggggttgaattaagatattcgaaactntntcttctaattaaaaatctatcttactttgtacttaagttatgaattcccttaaagacaatcttcttaaatattaattcaaatgaagcaacttgaatatgaatataaagcaataataaataaaggagattaagggaagagaaaatgcaaactcagttttatactggttcggccacacccttgtgcctacgtccagtccccaagcaacccgcttgagagttccactaacttgtaaattccttttacaagttctaaacacacaaggacaacccttcctttgtgtttagagattctttacaacaagagactcacagtctcttaatcccttagagaatgagaagaa

SEQ ID NO: 18753 - DNA, 306 bp, Glycine max
acagactcgcagcagctgaatcattcctctatagcatccttaaagctgctccctcagctttaagcgcttgaatgccatgctatacaggctgaactatgactcacagattcaagaaatcaatgaatctctgctgaccattgaactgtgagtgaacgagcttaaaagcaaatgacctcttgtgaagcttctagaagcaatgcttaatgcaggaaatcgaatgaatgcacgaactgcaagaggcaaagctcaagcttttttcaatgtggcttctctaaggaagctctctgatgtcaagaccaccaacgg

SEQ ID NO: 18754 - DNA, 421 bp, Glycine max
  unsure (1)..(421): unsure at all n locations
agcttgtagcatattcgaacgacaataacatttcactcggaagtccgattgagtcccgtaatatatcgagacgctcgaactttacaaccgaagctcgtagcaaatatgaacgacaatgacatttcactcggaagtcctattgagtcctgtaatatatcgagacgctcgaaatttanaatcgaagctcgtagaatatacgaacaacaataacttttcactcagaagtccgattgagtcccgtaatatatcgagacactcaataattanaacccaagctctcagatacttctaacgacaataactnttcactcggaagtnctattgagtcccgtaatatatcgagacgctcgaaatgtanaaccgaagcccgtagcacattcgaacgacaataacattccactcggaagtctgattgagtccc

SEQ ID NO: 18755 - DNA, 444 bp, Glycine max
  unsure (1)..(444): unsure at all n locations
cttcggtttaanattcgagcgtctcgatatattacgggactcaaccggacttccgaacgaaatgttattgtcgttataatttgcagagagcttcggttttaaatttcgagcgtctcgatatattacgggactcaatcggacttccgagggaaaagttattgtcgttagaattatctgagagcttgggttttaaattttgagtgtctcgatatattacgggactcaataggacttccgagtgaaatgttattgtcgttcgaatntgctacgagcttcggtttaaaaatccgagcgtcacgatatattacgggactcaatcagacttccgagtgaaatgttattgtcgttcgaatntgctacgagcttcgggtttaaatatcgagcgtctcgatatattacgggactcaatcggacttccgagtgaaatgttattgtcgttcgaat

SEQ ID NO: 18756 - DNA, 309 bp, Glycine max
atcttcaacattcaatttcgtgcgtctcgatatgttacgggactcaatcacacatccgagtaaaaagttatggccgtaagtatcggctcagagcttctactatcaatttctagcgtctcgatctgttacgggactcaatcatacatccgagtaaaaagttatggtcgtttgcattggctgagagcttcaactttcaatatcaagcgtctcgatatgttacgggactcaatcagacatccgagtaacaagtatggccgttcgtattggctcacagcttcaactttcaatttcaagcgtctcgatatgtta

SEQ ID NO: 18757 - DNA, 465 bp, Glycine max
tcgcgatatatcttgcgccttaatcggactttcatttgataagttatgaccatatgaatgtctcgagagctttcgttgttcattttcaagcttctcgatatagtatgcgcctgaatcggacttgcacttgaaaagatatgaccatttgaacttctcgagagcttgcgttgctcaatatcgagcgtcttaatatattatgcgcctgaatcggactttcgtgtgtcaagtcatgactatttgaatttcttgagagcttgtcgtgttcaatatcgagcgtctcggtatattatgcgctggaattggactgtcatatgacaagatttgaccatttgaatatctcgagagcttccgtgaccgttccaggtttaaataagaagaatcaccggacgacgccgatcgaacattgtctagtagacatcgtccaaatattatcggcggattgaatatataaaacaataccggaca

SEQ ID NO: 18758 - DNA, 470 bp, Glycine max
gcttgtgatatttatactatatatgtgtgtgtcttcgtttatctctacctgtttaaaaatgtgttaattcactcctcatgtgttgtttatgtttggatcatgtgatgatcttaaaccttgcgtttgtgagagcaaatgactaggtgaattactttaagaaaccttgtgatgaaggactccgagacacaatattttgataggatgtaacattggaacaagagtttctattttaattgcatgatgtatcaaacatgtcattttactctatttgataaacttgaacagtcttgttttaagtcataaatatttctaagacattttatttggtaacagtgaagcgaatgtgaacattatccacgtgaacttatttacgatcttattgaataaaattgatttaattagattccgcattgtatatatgtttctttcatatatatgtatgttggagtacaatgtgtgagagacatctt

SEQ ID NO: 18759 - DNA, 352 bp, Glycine max
  unsure (1)..(352): unsure at all n locations
agcttgaagaagttttgatctgcacattaaaggtgtacattcaatctaattttgatttctttgtaaaagtttaatcttggctagggttaccaatggattttgagttgatagggtttcaactcttggattttctctttgatgcaatcctccctatgaagggaccagttactagatccatgagccagaggcttcaagaggattgggctagagttgctaaagaaggccctatggttctcatgaacctcaaggtagatttctgagcccatgggtcaaggttgggtccaattatctttgtacatattagattangatgtcattatatttggtccttgtatttacgactccataatat

SEQ ID NO: 18760 - DNA, 418 bp, Glycine max
  unsure (1)..(418): unsure at all n locations
agcttcatcaatgaaacaaggaaccctttccgtcacggagtacttcacaaagcttcgtatcatatgggatgaaattgagaacttcagacctgaccccacttgttcttgcaccatcaagtgtacatgctcagtcctcaccatcattgcccaacggaaattagaagaccgagccatgcaattcctatgaggattaaacgagcagtacaacaatgtgagatctcacgtgttgctcatggaacccatgcccaccataccaaagaccttctcctgtgtagcccaacaagaacgtcagctatcaattccttttcaaatctcaatcttgaatcanaagaaaacgtttccattaatgccgtcaagaatacttgtgaattctgcggacgaaatggtcacaccgaaagcgttggtacaagaaacatgg

SEQ ID NO: 18761 - DNA, 445 bp, Glycine max
  unsure (1)..(445): unsure at all n locations
ttccaaanagagttactagagacatgttagtaagatctcttgattatgcaattgttgttacttttggttgccattgcctgcttaaacatctaaacactctgttaatgagatcttcaataggaaatatttttcccagtgatgcaagatgattaactatattagtaaatctcttttgcatatcttgtatggtctcatattgattcattctaaacagttcatattcatgtgtgagagtgtttattctagatctcttaacatcagttgtgccttcatgggttacttgtaatgtatcccatatttcttttgcatttttacaatttgagactccaaaatacttatccattcttctctaagtttttctatcagtgcatatcccactaccattgcaggaatgaagggaccaatgtcaatggtttcccatatatntaaatctatggcttctata

SEQ ID NO: 18762 - DNA, 432 bp, Glycine max
  unsure (1)..(432): unsure at all n locations
ntagcagattcaaatctcccagtgagtgcattcacatctctgtcagaatcactntcttgttcactctctgtatcatcagaccgacttacaganagtcctttcctctgcttcttgagatgagtgggacattcagctttgatgtgtccaaagccttcacacccacggcattgaattcctttgctgtgactgggcttttcatctgaccttttctggtattcactgcctttcctgatgtcgaaagggatgttccggacatgtggtttctgccttctgtccattctgttcatcactttgttgaactgctntccaaggagcacaactgcattagtcagaccttcatcagtttccaggtcatactcatcttcttctccttcatcattggacacgaaagccaaattcttgctcttcttttcagccctatccgagagtcct

SEQ ID NO: 18763 - DNA, 449 bp, Glycine max
  unsure (1)..(449): unsure at all n locations
ttttcattatatattagcatttcatttgcctccttacatttgatgcatcattggtgtcttctagcagtgatgatatgatttttataagataaccaaatgtttacttcttccaaaattgaggtgtttgtttgggttgtagaaatcttcatatttgatgttatgcttttaccctttatttcaatgttgattgttctttcattgcctcaccagacaagatctaagaggttcttggaaattcaacaattgagggagcataataaagagtatgacatgaagacaacaatatatttggttaaagaaacaactaaaaccaagtttgtagaaatagtagacgcccatttctgcctcaacattgaccctaaatataacgatcaacaattaagagcaacagtgagtctcctgctacttgcttgattatggtatatgcagttacattgaanacgtgaggt

SEQ ID NO: 18764 - DNA, 445 bp, Glycine max
  unsure (1)..(445): unsure at all n locations
tgctgccacggagttntccgactatgctcttgtgtggtggaacatgctacaaaaggagagagcaagaaatgaagagccaatggttgatacatggacggagatgaaaaagatcatgaggaagcggtatgtgccggctagttactcaagggacttgaaattcaagctccaaaaactaacccaaggcaacaagggggttgaggagtatttcaaggaaatggatgtgctcatgattcaagcaaatattgaagaagatgaggaggtaactatggctcgatttcttaatggtttgactaatgatatccgtgatatcgttgagctgcaggagtttgttgaaatggatgatttgcttcacatagcaatccaagtggagcaacaattaataaggaagggagtagtggctaagaggagttntaccaactttggttcttctagttggaaagacaaa

SEQ ID NO: 18765 - DNA, 374 bp, Glycine max
  unsure (1)..(374): unsure at all n locations
atgaaacaacgagatgatgcgctccatgagaggctggatcaaatggagaatagagatcatactgaagaagaaaggatgagaagagggaatgactgggttcctagaacaaatccgaattgatggtattaanactcaacatttcctgcatataaaggaaagaatgatcccgatgcctacttggagagggagatgaaaatagagcatgttttctcatgcaacaactatgaggaggaccataaggtgaagcttgccgccacggagttttcgactatgctcttgcgtggtggaacaagctacaaaaggagagagcaagatatgaagagcccatggttgatacatggactgagatgataaagatcatgatgaagcggtat

SEQ ID NO: 18766 - DNA, 412 bp, Glycine max
agctttgtgaagctcctgttttagctttacccgattttactcaaccatttgaagttgaatgtgatgctagtggagttggcattggggctgttttgatacaaaacaaaaggcctatagcttatttctcggagaaattgggaggagccagattgaactattgcacctatgacaaagagttctatgccattgtgagagctcttgatcattggaatcattatttgcgttctaatcactttatattgcattcagatcatgagtcattgaagtatatcaatgggcagcagaagttgagtccaaggcatgctaaatgggttgaatttcttcaatcttttaatttctcttcaaaatacaaggatggtaagagtaatgtggtggctgatgcactttcaaggaggtatgctttaatttcaat

SEQ ID NO: 18767 - DNA, 417 bp, Glycine max
agcttgaaaaattgatagagttttattcttagatttaataggaaatatccaagtgtacctggaaaaggcatcaataaaggatacacagtatttatgaccagcataggaagtcaaaggtccccacaaatctgtgaagataagctccaaaggagagtaaacagaaatagaagtgtgaggtggtaatctatgagatttttccatcagcaggaagaacaaaaatcagaaaatattttagtagttgtgggaaatattacaatgattgaagactagcttcattacatgactattaggatgagctaacctagcatgccagagactagcaatactaggagaagaaacaacagaattggaaaccacagtagagttttcattaaccgtagcagctgtaatagacaagccagtatctgaaattgagta

SEQ ID NO: 18768 - DNA, 359 bp, Glycine max
ttaacttcttggaatgtgcatgtggcgatggataaaggcataatccaagttaccttaaccaatccagatggaacttgcactgggatacgatataatggcggtgacagtctgcttgaagttctcaacaaggaaactaatagagggtatgtgcccctagcgatgagtatctgtgaattgtatctctctcacacgtgtgccgctgtgccgagctcagtgccagagaaccattttctgaaatgtaatggtaatgaacaggaagtatcagaattcagctgacagagtaacattgacacaggaatgggcgccagaccaaggatgttgatgtgatgcaatactgttttttgtaccgatggtgcttg

SEQ ID NO: 18769 - DNA, 305 bp, Glycine max
  unsure (1)..(305): unsure at all n locations
agcttatagtctttacttattgagaacaataagccaaagtcaatagttcctatataacgaagaattcattctgcggccttgagatgagtagtggttggagtctccatgtatcgactgatgagtctagtagcatatagaatgcctgatttgtgcacatcacatatcgcanactacccaccacactctggaaattattagcatccaccttttctgcctcattgaactgtgataacttcatcttgtactccaccgttgttcaaagtggcttgtagctatccatcttgaatttcttgagcatcttctat

SEQ ID NO: 18770 - DNA, 372 bp, Glycine max
agctttaaccttattgtctctcatagtctttagatttgggagccaatccaatccttgtgttcggactctcagccacttatgatagccgccaatgatcccattactgcttcccctaagctctctgtcctttcttcatgccgcatcccatgccttgcgaactccttggagtaccctcgcgttgtggtcactaaaatctcgtgcgatgaaaggcgtgattgatgcaagctccattggagcttgtaggcctaggatcttcttcaccaatggattcctttgcttcttggaagataaatggcagcggaatggagaaggaagagagagaggagacgccacttcaaggagaagatgagtctagaagaagctcaccaccat

SEQ ID NO: 18771 - DNA, 376 bp, Glycine max
  unsure (1)..(376): unsure at all n locations
atntccttgtttcctattaacacaacctgtacctgcgcaccanaaagaaatgcaagaagaggtcgtattattctcatgagccctangatagattttgggcccatgggctaagtatgagcccacttatctttgtacatattagagtaagatttcattatttttggatcttgtatttatggctccataatgtaggtagggtaccctagaaatgtaagatttttcaaccattgtattttatgacacctagactagtatttgtattatgggtagttctgtaatttcacatgcattaagtgaatatatgatgtgtgtgttgcgaaatacaattaattgaatcgngtgaagcccaatccaattaaattttatagggggagat

SEQ ID NO: 18772 - DNA, 429 bp, Glycine max
tcacacgtggttttgatacaacagcactgctgccgttgtggatcttgtattcactcataaaggacattagcgcgagtgtcatttactcaacctctgcatccaacatctggaacgatcttgagaaacatttcaacatcaagaacggacccagaatcttccaattgcggaaagcattactcaattgtgttcaaggaacgaactccatcaatatctacttcacgcgattcaaagggctttgggctgagctgggtgaactcaaggccaatcacagttgtaattatggcggggttgctccacttcttgcttccatcaaagaggaatttgtcatgtcatttctaatgggtgtcaacgagagttttgcccatgctagaggtcaaatcttgttgatgaaaccgattccggatattgatgagaccttctcattattgc

SEQ ID NO: 18773 - DNA, 382 bp, Glycine max
  unsure (1)..(382): unsure at all n locations
ttcttaagaagattcctaaagatgctagagcttagctacacatatctctctaatagctaagctcacctccttgagatgagaagctagaacttagctacacaccccctataatagctaagctcacccncatgacaaaaaacatgaaaataccaaaaaaaagtccttactacaaagactactcaaaatgccccgaaatacaagggctaaaccctatactactagatggcaaaatacaaggcccaaacgaaggaaaaacctattctaatatttacaaagataagcgggcttatacttggcccatgggctcganatctaccctaaggctcatgagaaccctanggccttcctttggatctctagcccaatctacttggagtcttct

SEQ ID NO: 18774 - DNA, 372 bp, Glycine max
  unsure (1)..(372): unsure at all n locations
agcttgttcgttttgctgatatttatcatgcacactnttctgatgatgaccgaggaacaattagggatcaacttgaaacttatgtgcttcaagtgagaagaaatgcttctttttccacttgtgaagatgttcaaagtttggctatgaagatggttcanactgagaaacatttggtatttccattggtttataaacttattgagctagctttgatattgccggtgtcgacagcatccgttgaaagagctttttcagcaatgaagattatcaagtctaaattgcgcaataagatcaacgatgtgtggttcaatgacttgatggtatgttacaccgagcgggagatattcaagtcgctggatgatattgatatta

SEQ ID NO: 18775 - DNA, 465 bp, Glycine max
  unsure (1)..(465): unsure at all n locations
gtcctttaatttcacaattatgttatgcccncttatagtgaccttaaactgttggacgtataagattcttatatttaccaatagttcactttgcctaataactttgcacacacgcatagaaatcagtatttccaaagtcctaaaatttgtgattgcaatattaatttttaatgctctttttcagggcaatatcagcatggtatgagaatcgtcattggtttaacactttatgcaagacagtgatggagcaagactggtcttggaatcgccctgcacttgattatctggagctttaccatgctgcacgtaagtcagcatgagatttaatagacatgaattaagtttcatcctctttgtacacattnttgtggtaagcttcagtttgaacacacttgattgcatctggtgaatccttcaaaaagataacaactacgaggtgaanagccataaaagatgatgagcttc

SEQ ID NO: 18776 - DNA, 423 bp, Glycine max
agcttctttcgattaatgaagatgataatattacatgttaataagttgacagttttaagtgtcttgatggcttgtggcacaattaagtctttgctatttggaagagaagttcatgcacagatgattaaaagtgatatccataccaacatatatgtaggaagcactctggtatggttctattgcaaatgtaaagaatactcctatgctttcaaggtgctccaatatatgcctttcacggatgttgcttcatggactgccattatctctggttgtgccaggctcgggcttgaacatgaggctctggagtctttgcaggaaatgatggaagaaggcgtgttgcctaattcctatacttactcgtcagccttgaaagctcgtgcagaactggaagctccaattcatggaaacgtaattcattcctac

SEQ ID NO: 18777 - DNA, 441 bp, Glycine max
  unsure (1)..(441): unsure at all n locations
aactgaaatttctttatcanaattacatatttataatacttaacagatgataagtaatattaatcatatttttttcatttgtaaaaaattaaactcacatattaaaagatttacaattttcaaatacagtgttcaattaataaagttaaacccgttaatgataattaagtgtagatagaatgatttcatatatttattctgtcaaaaagtttttattgaatataaaaattataacataaggattatgtttcaaacaactttnttctcttttaagatgttttcatacttttttactagttaaaaatgatnttattntttttatncaaacaaaattaatgaactcaagccactttttacaaacttactccgacaattttttttaattataatctatataacaataatattcattatcatataactaatattaaatatttaatt

SEQ ID NO: 18778 - DNA, 278 bp, Glycine max
tctttctcaatccaaggaagtatgcattggaattgcttgaagacagtggtttattggctactaagcctaggacaactccctttgattgcttcttgaagcttcatgaccgtgactcacccccttatgaagatgaaacagcctatatgagacttgttggcagacttttatatttaactacaaccaggcctaacattgctttcattgttcagcaacttagtcaattcatctctcagacattacaagttcatcactcagcagcaattatagtcctcaatatc

SEQ ID NO: 18779 - DNA, 307 bp, Glycine max
cacgttagttgagtcacacaatcaaatctctcacagcactcttaccaaatttacctaatatttaggtactgaacataacttacattaagcctctgctattttactattgctgttcattaaaataatttaagagaaatcatagtaaatcttaacaagtgaaaatatttatatgttatgaaccaattaagaattataatacatataatctttaagataagttttaattatagctttgatccctaattaatatttaattgttggatttaatttttgtatttaattctataataaatatttcttttacgac

SEQ ID NO: 18780 - DNA, 421 bp, Glycine max
  unsure (1)..(421): unsure at all n locations
tctcgatatattatgcacatgtatcggacctncgagtgacaagttatggccatttgaattnttcgagagcttccgctgctcaatttcgagcgtctcgatatattatactcctgaatcggacctccgagtgaaaaggtaagaccatttgaatctctcgagagcttacgatgttcaattttgagcgtctcgatatattatgcgcctgactcggacctccgagtggcaagttatgaacatttgaatttctcgagagcttccggtgctcaatttcgagcgtctcgatatattatactcctgaatcggacctccgagtgaaaagttatgaccatttgaatttctcgagatcttccgttgctcaatttcgagcgtctctatatgtgatgcgcctgaatcggacctccgagtcacaagttatgaccat

SEQ ID NO: 18781 - DNA, 485 bp, Glycine max
  unsure (1)..(485): unsure at all n locations
cactaagcttgcgtttggtaacaacttaactaacttcttattgaacaagtgtttatcatatctcatataaacgcttgtgtataagcgctttttataattgaagtggaaagaagtaaagttaaactggtttcatataagctataagttggtttcctaaactatcttgaagagcttatngaaataaacagaaaacagctaataagcatatcttaaacactggtttcataagctntctcanacactaacacaaagttcatgagagtaatatatgtccttcctacaaattctttactgcttaattcctataagctcatgtgcatgataagttcacaagggattgattaatctgtttacctaaatgtcacagggtggtcatgattagggtatntatacatcagtataatcatacctaataaataactatattataagtgggtattataattataaccataactttggttttaaatatgggtatataacta

SEQ ID NO: 18782 - DNA, 482 bp, Glycine max
  unsure (1)..(482): unsure at all n locations
agcttccagaattatgacctcatcaaactacttgtttcccgagggaaattctataaatagacctcccatcttttatggagtgggttaccactattggaaaacccgcatgcaaatctttatagaggcaatagatttaaatatttgggaagccatagaacaaggaccttatgttccctctatagtggccggaagtgcaacaatagaaaaacctagagcagattggactgaggaagaaagaagattagtacaatataacttaaaggccaaaaatattattacatctaccctangaatagatgaatactttagggtttcaaaattgaaaagtgctaaggatatgtgggataccctacaagtaacacatgaaggcacaacaaatgttaaaagatctaggataaacacattaactcgtgaatatgaactggttaggatgaatgtaaatgaaagtatacaagacatgcaaaagaagttcacacacatag

SEQ ID NO: 18783 - DNA, 328 bp, Glycine max
acactatagaaactcaacttgaaccctacttttgaaatgtattattcaaggaaaattcttctttgaacagcaatgaccatcaatatgatatttgtaatcttacagagcaacctgaggatctaaaaggtggttcttttgttccccatcagcttgaggcactgaactggttgcgtaaatgctggtataagtccaaaaatgtgatacttgctgatgagatggggcttggaaaaacaagatctgcttgtgcttttatttcatcattgtattttgaattcaaagtttcacttccttgctaggtcttggtaccactttctaccatgcctaattg

SEQ ID NO: 18784 - DNA, 455 bp, Glycine max
  unsure (1)..(455): unsure at all n locations
actaagcttaagaaatatggcctcatcaaactacttgtttcccgagggaaattttataaatagacctcccatctttaatggagtgggttaccactactgaaaaacccgcatgcaaatctttatagaggcaatagatttaaatatttgggaagccatagaacaaggaccttatgttccctctatagtggccggaagtgcaacaatagaaaaacctagagcagattggactgaggaagatagaagattagtacaatataatttaaaggccaaaaatattattacatctgccctangaatagatgaatactttanggtttcaaattgtanaagtgctaaggatatgtgggatacactacaagtaacacatgaaggcacaacagatgttaaaagatctangataaacactntaactcgtgaatatgaactgtttangatgaatgtaaatgaaagtatac

SEQ ID NO: 18785 - DNA, 408 bp, Glycine max
  unsure (1)..(408): unsure at all n locations
tcaagctagcatgattangattgctcaccctacaccagcagtcggggtaacctttacagaaatatgatcaccatcctgaatctctagcagtcttctacacttatcttcataaggattatgtgtactatgtgaagtttttatgctatcttgaatcaacttaatcctctcttcggtttgttgcaagaatcttggggccccacgaccatatttgcaccatcttggtaacaacaaaggggtggtctacacctcctaccatataaagtttcaaatggtgtcatgccaatgctagaatgaaagctgctgttgtacgtgaattccaccaaagggcaaacctgatcctatctacctagatgatcccacacacatgctggcaaatattgtctaatgactatatcgtcctctcggatt

SEQ ID NO: 18786 - DNA, 450 bp, Glycine max
  unsure (1)..(450): unsure at all n locations
tatcctataactgactaagctctattggtaatcgattgcagtcttgtgtaatcgattacatcctactgttctatggtaatcgattacagggagtggtaatcgattaccagacctaaatcaaggctttctctacaaatctaactattgcttactcctaaaaactacatactcattgtatcttttatctaccacaatcagagatcaataatagactttgaaaaacaagcattataaacatcttaactacaaccatcaagcacaatcacaagtacaaatatactcaccaaatcaataatcatcaaatcatacacaaagaanatcattaagccgcaatgtacaaccattatgattgtcaaaacacaaacaaagataatcattgacaatcattcaatcattatgaccatcaaaacacaaacacaatcataaaaaaagaanatataaattaacaat

SEQ ID NO: 18787 - DNA, 407 bp, Glycine max
  unsure (1)..(407): unsure at all n locations
agctntgaatgctctattcaatggtgttgacaagaatatcttcagactgatcaacacatgtacagtggccaaggatgcttgggagatcctgaaaaccactcatgaaggaacctccaaagtgaagatgtccagattgcaactattggccacaaaattcgaaaatctgaagatgaaggaggaagaatgtattcatgacttccacatgaacattcttgaaattgccaatgcttgcactgccttgggagagaggatgacagatganaagctggtgcgaaagatcctcagatccttgcctaagagatttgacatganagtcactgcaatagaggaggcccaagacatttgcaacatgagagtagatgaactcattggttcccttcaaacctttgagctangactctcggata

SEQ ID NO: 18788 - DNA, 471 bp, Glycine max
  unsure (1)..(471): unsure at all n locations
caatttcatgcgtctcgatatattatgcgcctgaatctgaccttcgtgtgaaatgttatgaccatttgaatttctcgagagctttcgttgttcaattttgagcgtctcgatatattatgcgcctgaatcggacctccgagttaaaagttatgaccatttgaaattcccgagagcttccgttgttcaatttcgagtgtctcgatatattatgcgccagaatcagacctccgtgtgaaaaggtatgaccatttgaatttctcgagagcttcagttgttcaatttcgagcgtctcgatatattatgcgcctgaatcggacctncgagtgaaaagttatgaccatttgaatttctcgagagcttccattgttcaatctctagcgtctcgatatattatgcgcctgaatctgacctccgtgtgaaaaagtatgaccatntgaacttctcgagagctttccgttgtcaatttcgagc

SEQ ID NO: 18789 - DNA, 433 bp, Glycine max
  unsure (1)..(433): unsure at all n locations
agcttgaaattgatacaacggaagttctcgagaaattcaaatggtcataacttatcacccggaagtccgattcaggcgcataatatatcgagacgcccgaaattgaacaacgaatgctatcaagaaattaaaatggtcataacttgtcacatggaagttcgattcagatgcatactatatggagacgctcgaaattgaacaacgaaagctcccgagaaattctaatggtcataacttgtcacacggaagtccgattcacgcgcatactatatcgagactatcgaaatagaacaacggaagctctcgagaaattcaaatggtcataacttatcacacggaagtccgattcaggcgcataatatatcgagacggtcgaaattgaacaacanatgctctcaagaaatagaaatggtcataacttgtcacacggaag

SEQ ID NO: 18790 - DNA, 484 bp, Glycine max
  unsure (1)..(484): unsure at all n locations
actaagcttctcgatatattatgcgtctgaatcggacttccgtatgataagttatgaacatttgaatttctcgagagcatccattgtttaatttcaagtttctcgatatattatgcacctgaatcagacttncgtttgaaaagttatgaccatnttaatttctcgagagcttccattgttcaatttcgagcgtctcggtatattatgcgcctgaatcagacttncgtatgaaaagttatgaccattttaatttctcgagagcttncattggttaatttcaagcttctcgatatattatgcacctgaatcagacttccgtttgaaaagttatgaccattntgaattctcgagagcttccgttggtcaatttcgagcgtcttgatatattatgcgcctgactcggacttncgtgtgataagttatgaccatttgaatntctcgagagcttccgttggtcaatttcaagcttctcgatatattatgc

SEQ ID NO: 18791 - DNA, 406 bp, Glycine max
taagcttccaattttttaagttattcctcaaaactgtcctacgcaaagttcccaaagtcctattaacaacttccgtttgcccatcggtttgtgggtgacaagtggttgaaaacaacaatttagtgcccaacttgctccacaaagtcctccaaaaatgcaaatcatcaagcctaggtataggatgcctatatttaatggtgatgttattaagggctctacaatcagaacacatgcgccatgtcccatcctttttagggaccaaaatcactgggacagcacaaggactcatactatctcttacccaacctttgctaatgagttcatccacttgtctttgaatctctttggtttcttgtgaattacttctataggctggcctattgggcaaagaagctctcggaatgag

SEQ ID NO: 18792 - DNA, 411 bp, Glycine max
ttagcttatgacttttattacaagcctttatagagaatgtgggaaacacaaattaaataaaaaatatataacgacttataaactagatgcatttatcataaaacatcgctatctaccatgttatattttatataaagagtattaaaaatgcacaattaactatttaaaccataagagtaacgtaaatcagttataaaggtgttgacaatttaaaagctgatatatatcagacgaaacctatttggtgtatgtatttgggaaatttcattcataatagttctttgctaaatgcaatcatgttagattgtaaagcaaaaggaaagaaaaacattatttataaaaatatataagagtcaagctaaaagacaagtagtgatagatacggaattttgcaatgaattacggtataac

SEQ ID NO: 18793 - DNA, 403 bp, Glycine max
agcttcaagatttatggcctcatcaaactacttgtttcccgagggaaattctataaatagaactcccatctttaatggagtgggttaccactactcgaaaactcgcatgcaaatctttatagaggcaatagatttaaatatttgggaagccatagaacaaggaccttatgttccctctataatagccggaagtgcaacgatagaaaaacctagagcagattggactgaggaagaaagaagattagtacaatataatttaaaggccaaaaatattattacatctgccttaggaatagatgaatactttagggtttcaaattgtaaaagtgctaaggatatgtgggatacactacaagtaacacatgaaggcacaacagatgttaaaagatctatgataaacacc

SEQ ID NO: 18794 - DNA, 213 bp, Glycine max
ggaatcggacctcagtgtgacaagatatgaccattttaatatccttatagcaaccgctggacattatccagtgtctctatatgtgatgcgccttaatctaacatccgtgtgaaaagttatgagcatatggatatctcaagagcttccgctgaacaatttcgagcctctcgacatattatgcgcctgaatcggacatccgtgtgagaagctatg

SEQ ID NO: 18795 - DNA, 485 bp, Glycine max
  unsure (1)..(485): unsure at all n locations
tgagcttcattcgcagatccctcatgtaagactacactcgatttagatagttctcttaggtttagactaagtttaactgagtttcatctgtagatccctcatgtaagactagactcagctcaagtagcttactaaagtttagcctaatttagcctaagcttcgtctgcgatggtgtagtttttaggagggggtggcttgcggtggtggcggnggacagttttgatgatgagggtgaagaagctgacgaggaaggcatagacaacgagagtgccaagtgtctagatgaagacctagcgactaacaatgatgcagcccagatatatgtaccttttcttcttctttntatgttctcctttgcccaagagccagctatgttgggtctcatccaaagcacctcggtccagctcatggagattcggtggcggagtctatggtgtgaatctcaagcaggcctccccacagatccctactgtgcatactaatt

SEQ ID NO: 18796 - DNA, 417 bp, Glycine max
agcttgtgtttttaatattccattgtatgtacaaattattgaaatatttgccatttaatttcatttcaaagcacattgcagaatttcaatgaaaagtgacttgttattacaaatagaaaagttatattttgtttaattacaattcaaaaatattattcatttttgaaaagtaattacaaatataccttttttagaagtaactcaataaaacttctcaaaataatcagaaatatattttttcaatttttttctcaaaatatcaaatgaatacattaaatattttaataataatattttctttttcaaatgaaaaataacttttcataaaatataaattaaacagacggacttgtaattagagatattgtccgcctttagtttaagcttcagagtcattaatttatgttcattatgttc

SEQ ID NO: 18797 - DNA, 315 bp, Glycine max
ccattgctaccaccaactttaggttctacgacttcaagcttaagaagaattgggtcagctatcactttggtcaagacatcattgacagaatcaaagtaatgatcacctttcacaaggtttgttcttgaaaactttttaacacccaggaaaagaaaggccactaaatttttggagctcagagaaccttgattctttagtttctccgagttctaaccttttgccaataagcgaggccaaacagcttcctagaagatatcattacttttggctttgcacaaattggtatcccccagtcaaatgcttgattatatcact

SEQ ID NO: 18798 - DNA, 298 bp, Glycine max
  unsure (1)..(298): unsure at all n locations
tggctggagaaactgataacattatgcttactggtgaaagcttgagatatagtactgatcaattgtactcccagaagagactcataaaggtctcccttaaggcgcttggttctgcaacatacgcgcctgcaaactctaccagatctcaacattctcaagacagttcattacctgtaactctaagattgattnttcagaatgtagataagtttggaggtgacatttattattcagctggtactggtatgagcgatataatccacanagatccaacctgtttttctgctctgcatgaaat

SEQ ID NO: 18799 - DNA, 444 bp, Glycine max
  unsure (1)..(444): unsure at all n locations
ttgatgctctagttngatatctatcanagacattaaaaaattatttataattggttcacanacaaaatgcaaggctgctactaggtggattggtgttaaagtaagtcatttaaacaatgcttctaatttgtattttattattgtgtagactaatttgtacttaacattgaatatccaaatttcataatgtatctagtgtaatagacaaaaaggaatcactgaatgcaggtattacgttatgcactggatgtcaactataatcttagtaagtttcaagaataattgtgaaaagataattggttaattcacacatatnntcattttttgtaattgatattatatattattaacttatgtcttattatatcatgcagtatttcaatgatgctagaccattaanaccagagagattgaaggcacttcgcatctagtgggcaaactact

SEQ ID NO: 18800 - DNA, 408 bp, Glycine max
agcttattcgttgccccttgaattgattgccaagctctgttcgttcatgaatcctccgccgaattgattgcctaacgctgttcgtgcatcctccatcatcaaatcttattcggagccccatgaattgattgccgttcatgcatcctccccattgagtccggagccatacgaattgactgccaagctctgttcatgcatcctttatcatcaaatcttattcgaagccccatgaattgattgccattcatgtatcctccaccattgagtctggagcccgccgaattgattgcctagtgttgttcgtgcatcctccaccatcttattcgtagccccatgaattgattgttgttcacgcatcctccaccattgagtccgaagccttacgaattgactgccgagctctgttca

SEQ ID NO: 18801 - DNA, 372 bp, Glycine max
agctttgaaattttttaaatgctattaactcttcactcggatgtccgattcaggagtatcacatattgagacgctcgaaattgaacaacggaagctctcgagaaattgaaatggccataacttttcactcggatgtccgagtcaggtgcatcacatatcgagacgctcgagattgaacgacgggagctctcaagaaattcaaatggtcataacttttcactcggaggtcaaatccacgcgcctcacatatccagacgctcgaaattgaacaacggaagctctgcagagattgacatgctaataacttttgactcggatggtcaattgatgcgcatcacatatcgagacgctccatattgaacaaccgaagct

SEQ ID NO: 18802 - DNA, 379 bp, Glycine max
  unsure (1)..(379): unsure at all n locations
agcttgttttgttgaaccacctaattacttangattgaaggtgtttggatcactatccttcgctcatgttaaacaaggaaagctggatgcaagggttgcaaagtgtgtgttcattggctatcctaaagaagttaaagggtacaagctatggaaattgaaacctggtgagacaagatgcatcattagtagggatgtaacctttgatgagagcagaatggcaatgctaagcaaggagctgaaggataacagctcaagtagtgagagtaccaaatttgacgtggagcattctaagatttcagatcatggcagtggagatgctattgatcacactgattaagcagaaactggagataatgaagagctggctactcagcatgac

SEQ ID NO: 18803 - DNA, 389 bp, Glycine max
  unsure (1)..(389): unsure at all n locations
tggtgctgatgccgcacggnctgatgatctcattcaatgtatgtgtttcatacgtcaagttcccttggttgtattgtatgattcaggtgcgactcattcatttatttctcgtgtctgtgttgaaaaacttgccttgcctgtgtcttccttgaaattttacttgattgtgaatacacctgctagtgggtctgttntaacttctgatgtgtgtttgcaatgtcatgtcttaatttctgatagacaatttcttattgacttagttgttctacctttgagtcagattgatgttattcttggtatggactggttatcttccaatcatgtcttattaaattgttntgagaaatctgttggctttcttgagtctggtgtgagtgaaagtgatatgt

SEQ ID NO: 18804 - DNA, 454 bp, Glycine max
tatgttgatgctatttctgacttaaaaatatttagaggtgagtcttccagttttgcaagttaaggaatttttttagaattatttaattcgagtaataatttttttgttagaatgaagtatcaatgtctagtttaagtttaatagtgctagcaaatagatttatttatttttatcattcacaaaatatttaattgaagtaataattgtttttttagataaaaaattaatatgtgaagtttaagcgtattaatttttgtaattaggttttttactttgaagtttttttaattatgtttaattatttacaagccttacaaatatttacctgattcccttctagttttttgaagttagaatgaaatttgaatctatattttaagttaaagttagtagatgaagcaaccaaatacagttatttatttaaaaactactcttgttatgattaattattttt

SEQ ID NO: 18805 - DNA, 410 bp, Glycine max
  unsure (1)..(410): unsure at all n locations
tcgacccgggatccttaagtcaccgcggctgcagcttagcattgatngnnccatgcttctcatttgatgctccccttatctctaacaatctnccccttttggctttgatgatgccaacctttaactatgacattgagtgcattggagagtattgagatggattggaaacatgatcttattaacacttaataaaggattaattcatcatgattgatgcaaccctaccccccaagggcattggatagaagactccaagaagattgngccagacaggcaagagaaggccctagggttcttatgagctttagggtagaatttgggcccatgggctaagtatgagcccacttatctttgtacatattagattangatttcattatttttgggccttgtatttanggttctataat

SEQ ID NO: 18806 - DNA, 441 bp, Glycine max
  unsure (1)..(441): unsure at all n locations
nggttaacaatatcctttatataatataaatgttaattaatatcttanaaatactagttaatgaacttaaagttgaaatacggaagataaacaattacaatgttcatattttttatgatttatgcatttaatattcttattcttttaattccttaactaatatctagaagcgctaattaacaagaaccatataagtaaaccaatgagtaactaacaatcccgttataaaaaaaaaggttatcatcatgtcttttttggactaatcatatcatcctatgatttcattcgacaaataataaagttaaaaatgaattgaaattaaaatacataggaccgaaaaggagttatgagttaatatatttaattaagacacatatctgttaacaaaattgatacagcatgaatgaataatgcgtctcagcgaacaaaatcttgatggtt

SEQ ID NO: 18807 - DNA, 406 bp, Glycine max
  unsure (1)..(406): unsure at all n locations
agcttgtagcattatgcanaccattantaacttttagctcgganatccganggagnncccgaatatatcaagaccctcaaaatgaatacaaaagctcttaacaaataaaacgaacataaactttctacacggatgtccgattgggcaacgtaacatatcgactcgctcgaaactgaataccaaagctgagagcaaattcaaacaacaatgacttttacctcggatatcccattgagtcccataatatatcgagacgttcgaaattgaatagagaagctgtgagacaattctaacgacaataactttttactcggatgttcgattgagtcccgtaatatatcgagacgttcgaaatttataacggaagctcgtagcaaattcaaacgacaataactttgaacttgga

SEQ ID NO: 18808 - DNA, 418 bp, Glycine max
actcttctgactcatgatgtagatccatgtctttcttgagtattcatcaattatggacaaaaaataccttccaccacctatagaagatactcttgcaggcccccgatagtcaagatgaatgtaatcaagagtctctttgagggtgtgaattgctttatgatattaaatcctatgttgctagccatatacacagtgctgacataatttcagttcatccaatctttgatttcccaacagttgctgtttttgaagtatcatcataccttcttcagtcatatgtcctagcctcatgtaccacaattgagtttagtcaggtatgcccttattggatcttgatggaacagttactataccatcatcaatacatgttgtaccttgaagtatatagagattacccctctttatacccttcatcacc

SEQ ID NO: 18809 - DNA, 420 bp, Glycine max
  unsure (1)..(420): unsure at all n locations
ttagcttcaagactaatggccttagcaaacttcttattcccaaaaggaaattcaatanataggcctcctatttttaatggagagggttaccactactggaaaacccgaatgcaaattttcattaaggcaatagacttaaacatttgggaatccatagaagttagaccttatgtacccaccatggtggctagaaatgcaacaatagagaaacctagagaatagtcgactgaagatgaaagaagattagtgcagtacaatttaaaggctaaaaacatcattacttctgccctaagaatggatgaatattntanggtttcaaattgtangagtgctaaggatatgtgggacactctacaagttacacatgaaggaacaactgatgttaaacgatctangatanatactttaactcatgagtat

SEQ ID NO: 18810 - DNA, 440 bp, Glycine max
tctgggacgcttactctggatacaactagatcatgatgctcgctccagatgaggagaaaacgacattcgtcactaaaagtaccaatttttgttacaaggtcatgcccttcggccttaaaaatgtaggcgctacataccaacgattgatggaccaagtctttaaacaatagattggacgaaacatcaaggtatatttggatgacatggttgtcaagtctcaaagcatagtccaacaagtggtagacctggaagaagtctttggggaactccgtaaatatgacatgtacctcaaccctaaaaaatgtacttttaaggtgggcggaggcaagtttctcggcttcatgatcactcaccaggggattgaagccaacctcgacaaatgcactaccatactagagatgtgtttcccgaccaacgtccaagaagtccataaactgaac

SEQ ID NO: 18811 - DNA, 391 bp, Glycine max
attgaattatttaacatgcccaaaataagttctctaatccttatgaatctttataattgcatattacataatggagaccggataaactatatatgaatttgcaatttattatgtctatttcttcttactaatatagcaatatacctaaatttcttcttgaaaaaattagtgcatgacacattaatctccaatactacagaaatattattgtatttagttcttaatatcataaattgcagtcatataaaacatggtacactttacgtttcaaaatgactaatataaccaatatttgattgtttttaaagattaacgtgagagtttatatgtttaaggattaacgttttataacaatagatatggctgctcggcggttactctatgtcttaac

SEQ ID NO: 18812 - DNA, 460 bp, Glycine max
  unsure (1)..(460): unsure at all n locations
tcatgtttttggtatgtacgcgaaggacttcaagtcttccaacttcatcaggaacaccaatatcaatttcactatcaaatctaccagacattttcaatgcagggtcaatgctatttggtcgatttgtaggcagtggcagtgaaattaacctcaactatataccaaaggatatccacctcatatgccgcttggggctataatctacacataaaggcacaactaaaaatctattgaggaccacgtagagaaactaaagccaccaataagtgtaaaatgctcagatcaaagatagcccaccaataaaaatgagatttttattatatatgtatgcaaaattatgaaaggaaaggtatatttgtttgataatcctagctgtcaaggaattactttntataaccattagattaaaaaaataagaggtgatataaggagtaacaaatttgtctagatataaaaatat

SEQ ID NO: 18813 - DNA, 313 bp, Glycine max
  unsure (1)..(313): unsure at all n locations
acaaccggccagaccctggagaacaatctagntcacactccaataataagggcacctgactggagtaaagagtttgagctcatgtacaacgctagtgactatgcagtaggggtagttcttggacaatggagagagaatgcattccatgccatttttatgctagcaagatcctgaatgatgcacaactaaattatgcaactactaagaaggagatgttggccattgtgtatgccttatagaagatccgagcgcacttaatgggctccagagtcattatctctactgatcatgcatcaatcatataccttttcac

SEQ ID NO: 18814 - DNA, 387 bp, Glycine max
acttctccaacccttgacctgacttcttggaaagccttttcacagcaaactctgggccatccttcagtcttccctgctaaccaaattgttagaaatattttgagttaggaaaacaaacatctatagttggttttccatatcaccttgtacacaggtccaaagccaccttctcccaatttgttactctcagcgaagttctcagtggctctttctatgatggggaaatcaaatgtggacaaatcaatgccttcttttctcagttttcgttcgaaatggttcctataaattattcttgctacccctgataggtttgaagataacaatagagaagcactatgacactcacaatgtgcacgtatgatacataaacctactatcatatattag

SEQ ID NO: 18815 - DNA, 417 bp, Glycine max
tcaagaataatggcctcagcaaacttcttattcccataaggaaactctataaataggcctcctatttttaatggagagggttaccactactggaaaactcgaatgcacaatttcattgaggcaatagatttaaacatttgggaagccatagaagttggaccttatgtacccaccatggtggctggtaatacaataatagagaaacctatagaagagtggttggaagatgaaagaagattagtgcagtacaatttaaaggctaaaaacattattacttctgcccttggaatggatgaatattttagggtttcaaattgtaagagtgataaggatatgtgggacactctacaagttacacatgagggaacaactgatgttcaaagatctaggataaatactcttactcatgagtatgaa

SEQ ID NO: 18816 - DNA, 460 bp, Glycine max
taacaagatttcggtgctgaagtttagcaatcagtttgacttcattcttgaactctgtcattccttgtcccgagcctcttgagagcctcttcacagcaatttcttgtccacttactaatcttccctacaaaataaataaataaattggaataatcttaatcacattgacactttttgaggtctttttcctaaaacgacaaagaagattgaatcaccttgtatactggtccaaaaccaccttctccaatcttgttgtttattgagaagttatcagtggcaatgactattgttgaaaggtcaagtaaggggagatcgatattttcttcacttcctcccctattttgatcacgtacaatatctgaatactctgataaaatggaacaatggcttcaatttagttaaaggcacaatgtatatgatagtttagtcaagtcaataactttgcagcattacatctttg

SEQ ID NO: 18817 - DNA, 418 bp, Glycine max
  unsure (1)..(418): unsure at all n locations
agcttgatgtctttagactgaattaactccctgatgnaaatggggtctatgtcaatgtgcttggatcattcgtggtgcgtatggttggaggcaaggcttacaacaaatttattatcacaaaacaatatcacagaggacacatcaatttcaaagtgaagaagtaaccttttcaaccaaacaacttcactagtaacaaaagacaaagcacaatattcagcctcagtggacaatttagaaacaattgattgtttcttagaatgccaagagagaacgttgtttcctacaaatacacaaaagccagaagtggaccttctggtatcaacacagctagcccaatcagcatcagtaaaggcaatgagtttgagagagctctgagcagganaaaataagccttgtccgggagcatatttgagatact

SEQ ID NO: 18818 - DNA, 464 bp, Glycine max
  unsure (1)..(464): unsure at all n locations
actcaagcttactaaaacaggagcatatctcttctcagatcctactctatatatatcagtagttggagctctccaatactccaccataaccagaactgagctaagttttgctgtaaacaaagtctgtcaattcatggtcatactcttgaaactcactgagcagtagtgaaaagaattctcaagtatctaaaaggctctttacaccatggcctacttctcanagctgctactccaggaattaccattcctattaaggccctatgtgatgcagattgngcttctaaccctgatgatcacagatctactttaggagctgctatttattttggtcctaaccttatatcttggtggtctaagaaacaacagattgttgcaaggtcaagtactgaagctgagtatcgaaacctatctcaagctacaactgaagtagtgtggatntattagaattctaacagtatcataga

SEQ ID NO: 18819 - DNA, 406 bp, Glycine max
  unsure (1)..(406): unsure at all n locations
tatcaacatcaaacttggagaaagagttcttgtggtcaagacatgagaagcaatcaagtataatgttacttccttcactaaagcggtgatccatctccacacatattttatcaatagcaacataaaaaatctctggacggtcatgatgaagattagtgatagtcctcccttctgctcttgaacgaccccgaactggtatatcgtcatccatatttggtaccagaatacttttagcaacacaaaatccttggacatcggcaaaaaaattattccagccactctctctcattgtgcccaaccgagctttgcaacatcaactaattccatggcattcacaatattaagatcttntcttcgcaatatatctgaaagctcgtttgtttgctatgacctgtatcacgcacaa

SEQ ID NO: 18820 - DNA, 440 bp, Glycine max
  unsure (1)..(440): unsure at all n locations
tatacatttagttaaacttcatatataactntaaacattatggcatataagatgatttttgaatatcgttaatggaatacaatcttacttaaaatggataaaattattatagaagatatttataaattaatagggtattgggattcatgactaactatcagtattatttaggacgtatttcactctatggagtgaaaaaaattatgtaaaatgagaagtaattatggatgtgtctattattaatataaataaaatatcctataaacagaatccaattaaattaaaaaaaataaaataaatgcacctttcttttcactctgtacgcgcttctcaccttttacagcaaaatagaaaatctaaaattaatttaggttgaaagtagtagttctaatttaaattcagtgatatctaaagtgataaagttaatctgtcgcttacct

SEQ ID NO: 18821 - DNA, 440 bp, Glycine max
  unsure (1)..(440): unsure at all n locations
nttaactgaatttgcaacgttctaattgttttttaaatggtgtaatcgattacaatatattggtaatcgattaccagtgtatctgaacgttgaaattcaaattcaattgtgaagagtcacatcttttcataaaattatttgtgtaattgattacatggttttggtaatcgattaccagtgacaagttttgaataaaaatcaagagatgtaactcttccaatggttttcaggtttttctcaaggttataactcttccaatggtttttcttgaccagacatgaggagtctataaaagcaagaccttgacttgaatttcaataactntatatatatacttttacatcctttgaatctctttgaacatctttttgaacttcttcttcttcttcttcctttgccaaaagctttctgagttttctggtttccaaaccttgttcttt

SEQ ID NO: 18822 - DNA, 371 bp, Glycine max
  unsure (1)..(371): unsure at all n locations
agcttgacaggtccaggtgcggttgctgctactggtggagggacttcaatttgcttgccagacctcaaggtgatggcactcacattcttcggattntgcaccatttgtgaaggcaatttgtcagaattttgggactgagcttggttcaactgagtagccatctgccccatctgatttatcagactctaaatagaggctcttgtctctntctgaaattgcatattctggatagtcatttgcctcactaactcctctaaggaaggttgagaaaagggcctcagttgcttgttgtctttgttggtggtgctgcattggaggaggaacatatggcctgcttggaccaacaacattctggaagggagggacaggct

SEQ ID NO: 18823 - DNA, 457 bp, Glycine max
  unsure (1)..(457): unsure at all n locations
tccctttctttggccaatgctggactcgtttggcagtgatttccttggcaatctgatgctcagaaacatcaatatccaccactccttcagtaggtctgcccaggtatttgttgatcaccgcaggggagaatctaacacactttcctctgacaaacactctttgataatcatcactttttctgtttgttatgtcagagggaatgttgacaataaattccctgactaggctttcataacagtctcccaacttggtgactgttttcagtagtccagcagccttgatgagttccatggtctccttgcaatccaaggcatttcttcccagttctctttccaaggcaagtctgcgttgatacacgtatttccacctttcagcattgccaatggagtggaatgagatgttgtccaatggtgcatcanggacattntcaggcacctttttcccagatttcttggt

SEQ ID NO: 18824 - DNA, 462 bp, Glycine max
  unsure (1)..(462): unsure at all n locations
ctaagctgagtcacattgggggttccagttaaacctgcgctgtgtatatacctcattatcaattggcctagtatcaacaacgttatcaactgtttgaatgccctccaaaagagttggttganaactatcattacttgaaggcagatatttatacacgactaataatccaagagtgaatatagcttgcagcttcgtagagtccccttgaactgagaagaatatgagcatggcacgtatgaacagatccacacagagacgcatgatgcatattacagtgtctattaacctcccatcgttgcctgcggggaagccacgaactcgatacacaaacagagtattgtacttgtcaaccacatatctatacccaaaataaatggcaccaacaggaaccacaatgggattaaatgaacagtatactagagtcagggctaatattgtcaaattaaaggcgtaatactgtgc

SEQ ID NO: 18825 - DNA, 413 bp, Glycine max
  unsure (1)..(413): unsure at all n locations
taggattaaagttcagaaacttaagagcccaacaagctttatgctctagctctatgggtaggtgacaattttatcaaacacaagtctataaggagacataccaatgagagttttaaatgttgtcctataagcccaaagtgcatcatctagtttaattgcccaatctttcctagatgcactaactgttttttcaagaattatttttaactcgctattggacaattctatttggccactagtttgtgggtgatatggggttgcaagcttttgagtcacccatatttagccaagaggccatcatacaacttattacagaagtcagtgcctttgtcactaatgatngctcgaggtgtgctaaatctggtgaannatattttctttgaaacttttttaccaccagagaatcattaatg

SEQ ID NO: 18826 - DNA, 399 bp, Glycine max
  unsure (1)..(399): unsure at all n locations
agcttagtcctcgtccaccagngacctgaattgaatataagaacatcagaatcaatccactcgtggctaatatcatcaatcttgtccaatctcagtgcagtcttcaccctttggggagcatgtctaggcacagaaccaggcctcaccaggaacactgatcgataaaaatcgattctaacatcaaaagtactaaacctcacacctaanaaccttatctgttttgtgatcttgttgcctttgatttcatagacactcttcttatcctcaactcctgtcattagcaaacatatcatggactcccattgcgtcctactcaaagaatcgccgacgaanaccacccttttcccacgaagtcgttcgagtattccacggacatcaaaccttggaatctcacagttc

SEQ ID NO: 18827 - DNA, 450 bp, Glycine max
  unsure (1)..(450): unsure at all n locations
tctctaagcttctcatccgagacactctcttggtggtgaaacttcttcttcaatggcttattccctaatagatggtgtctcatctcaccttttctcctttatcttacgttacaacttcatggctgaaaatcaccattgaaggacctcactgaagctcaaagattcagcctccatagaatcttctcaagcaagcttccatcaaaaagtactgaacacaacttgctatgttcaaaacagaatattgataagaccattgataaaaaaaactccttatgaactatagagtggaagaagacctaatatttcatactttcatcgatttggatgtgagtattttatactgaacactagatatcaacttgcaaagtttggttcanaggtggataaaataatcttcctcgaatgctctaacacatctaaagcatacaaagtgtttaactcaagaacttt

SEQ ID NO: 18828 - DNA, 367 bp, Glycine max
catcataccacctccaggtgctggaactacttcacatgtttcttgatggggcctatgccaattaagagccttggatgaaagaggtatgcctatgtcttccacaacagagtcacacttagaagacggactcctacctctccgtattaaatcatgaaagggaagaagccaactgtcaagctctttcacatctttgagaagtccctgttacactttggcgaatcaagatctaatgaaaaagatggatcccaacagtgaagctggactattcctgggatactctacctacagcagagcatatagagtatacaattccataaccatagcagcgatggaatccatcaatgtggttgctgatgatctgtctcca

SEQ ID NO: 18829 - DNA, 445 bp, Glycine max
taatggcctcattagtctcagtcttaggtccaacagcttgaggtggaaccttccaactgacctactttcccttccttccctgcgctttgtatatctccaacacaacaacttctcaggtgttattcctgattctctgccaccacggcttatctttcttgatttgtcccataactcttttacaggacaaattccagcctcaatccaaaacttgacacatctgataggatttaacctccaaaacaactctctcacaggacctattcctgatgttaaccttcctagccttaaggatttggatttgagcttcaactacttgaatggatctattccttcaggtctccataagtttcctgcctcctcatttagagggaatttgatgttatgtggagcacctttgaaacaatgttcttcagtttcccctaataccacattgtctccaccaaca

SEQ ID NO: 18830 - DNA, 439 bp, Glycine max
tgtggttttctcacagataggacatgcatgatgccttttcacactgtatccacttaaatttccatatgctggaaaatcgttaatagtacaaaacaccatggcgcgtaacctgaacatctgttgcacatttgcatcccacgcatctaccctttcttcccacaattttttcaaatcttcaattaacggactaagatacacatcaatatcattctcgggttgccttggacccgcgatcatcatacacaggataatgtatttttgcaaaatacacaaccaggggggaggttgtaaatcatcagtaaaacaggccacaaactgtggttgttgcttaagctgccataaggattcattccatcagaagcaagagcaagccttaagttccttggctcgtccccaaactctggatacaaatgatcaattgtcttccactgtggagaat

SEQ ID NO: 18831 - DNA, 461 bp, Glycine max
tctcttgattcttgaatcttcttgatttcttctcatgaaacttgaaatttatcttgatcttgaacttgttgactaaatcttgaaatcattctttggggtttttgtcgtcatcttagtcatcatcaaaacttcttgaatcaacttgattcatcatcatgaagcttgcttctacacttaacccccaagaccaaaaaccaactagcctgagaggctaggaaaaaagagccaccagtccctctaaaagagcccccatatcctttagttccatcaaagaagaataaggagcactacttcaagtgtttattggagatattcaaggggttggagataaccatgccatttggggaagccttacagcagatgctgctctacaccaaattcatgaaggacatcttcaccaagaaggggaagtacattgacagtgaaagcattgtggtgggaggcaactgcaatgcagtgat

SEQ ID NO: 18832 - DNA, 364 bp, Glycine max
  unsure (1)..(364): unsure at all n locations
agcttgccgcttctgagnnanactactatgtttcttgngnggnggaacaagctacaaaaggatagagcaagaaatgaatagccaatggttgatacatggacggagatgagaaagatcatgaggaagcgggatgtgccggctagatactgcaaggacttgaaattcactctccgaaatctaacaccatgcaacaaggaggttgaggagtatttcaaggaaatggatgtgctgatgattcaagcaaatattgactaagatgacgaggcaactatggctcgacttattaatggtttgactaatgatatacgtgatacttgtgagctgcatgagtatgttgacatggatgatctgcttcacaaagcaa

SEQ ID NO: 18833 - DNA, 328 bp, Glycine max
  unsure (1)..(328): unsure at all n locations
ctcacaactttcccaaaaaagaagtttaaagatgtgggaagccttcatccaccttgtggcatggtataaaagtgtgccatcttgctaatccaccaccatanagatagagtctacacctctttgggttctatgaagcccaatgacaaagtccatactaatgtctacccaaggtgcanatggaatgggtaagggtgtgtatagcccatgaggcatcaccctagacttggctcgtaaacaagccccactcctagtgcaatgcttatggacatctttcttcatatggngccaataaaacttctctttgagtaagacaagggtcttgtctatc

SEQ ID NO: 18834 - DNA, 442 bp, Glycine max
  unsure (1)..(442): unsure at all n locations
ngccagctggtagtccatggacatgccctgaagacgaagtgttttacaatgcttcaatcatttggggagtagtgggaccacagagaatgtttaccaaggatgggatttaccctgngatgaattggtttttcctgattggcctacttgctcctgttccagtgtggctgcttgctcgcanattcccaaaccataagtggattgagctcatcaatatgcccttaatcattgctggtggtggtggcatcccaccagccagatccgtcaactacataacttgcggatttgtgggaatcttcttcaatttctacgtttacagcaagttcaaggcatggtgggctagacacacttacatcctctcagctgctttagatgctggtgttgctttcatgggtgtcattctctattgtgcccttcagaattatggtgtttttggtccaatatg

SEQ ID NO: 18835 - DNA, 394 bp, Glycine max
  unsure (1)..(394): unsure at all n locations
ttttgcttatagattcctttgctttttttgctagacttgaagctataagaatcatgctttcctttgctactcataaaaatataaagttatttcaaatggacgttaaaagtgctttcttaaatggctttattgaagaggaaatatatgtcaaacaacctcttgggtttgaagatcatactcttccagaccatgctttcaaacttaaaaaagctntgtatggtctaaaacaggaaccacatngctggtgtgacagactgagttcatttctcttagaaatggttntattaaagtcaaagtggatacaactctttctaaatgagaaagtggcanagatttcattatagttcaaatntatgttgatgatagtatntttgaagctactaatgaatctctt

SEQ ID NO: 18836 - DNA, 428 bp, Glycine max
tatgaggtcggttatatattccttctttcaccctatttgaggtctctttttcctttcataagagaaaaattgtaaatttttagtctctcatttatatatataacacaatttcatacaagagaaattaaaaagacattgatttatttctgaaggattggaagctaacattgtcttgtactaaaactatatttgacaccttttattgcatgatcgctttctctaatatagaatctaagttagtgtattggtttagtgcaggttctgagtgatccccagaagagagcaatctatgatgaatacggagaagaagggcttaaagggcaagtgccacctccagatgccggtggccatacattcttccaaactggagatgtgccaacaacgttcaggttcaatccaagaaacgcagatgacatctttgctgagtt

SEQ ID NO: 18837 - DNA, 408 bp, Glycine max
  unsure (1)..(408): unsure at all n locations
agcttgtttgttacaatgacattgactgggctagagatgaagatgatcagaaaagtactagtggatatatgtttttcatgggaaatacaaccttcacttggatgtcaaaaaagtagtcgatatatagtcattcttttgacttgtaagccaaaatacctagcagttgcttcatgcatttgtcatgcaatatggctcaagaatttgttaaaagagttgggcatgtcacaagaagagttaccaagatctttgtcgataattaataagtcagtcattgctctagcaaagaatccaatgttccatgatcgaagcanacatattgatacccgttaccactacataaaggagagcacaacaagaaaggatgtacatgcangatatgtgaagtctcaagaccaagtagttgacatc

SEQ ID NO: 18838 - DNA, 306 bp, Glycine max
agataaatagtaaaaaagtgttttaaaacattgagtagcacaagaatttttcacaaaatcttttaccaaagagttctactctctggtaatcgattaccagaaggtagtaatcgattaccaatagccaacattgtttttaaaactgatttacaaagttgtaatcgattaccatgagcatgtaatcgattaccaatattttaaagcgttagatatcaaatgtcagaagtcacagatagtgatagaacattttcaaaacagtttaaacttgtgtaagcgattacacaatacttgtaatcgaataccagt

SEQ ID NO: 18839 - DNA, 443 bp, Glycine max
  unsure (1)..(443): unsure at all n locations
tatcatgatctggaaaagtaaaacaatgtcagttatatagtttagataatcatgattatatcagtaatttcattgcctccaatatcatataaagcatttagtataatatataacaatatatggtaacatatgagagttaaaagcttacaaacatacgcttacaaggtcatttcatatatcacaaaattgaagataacattcaatggttcatcatcaaatgttgcatcatattaatatacacattttgaataggcaacacttgcctctcagtcaaaatgcattttcagcaattggatgttatctctaaaaaagttaagattgtatcagacttagtagcacattcagcagcatgacaaaagacacaggataaataatgcaccatangatcaataccaaactggaagagataacttctcagttttaaaggtgaacactattataat

SEQ ID NO: 18840 - DNA, 406 bp, Glycine max
  unsure (1)..(406): unsure at all n locations
ctgctacttatatatcgagacgatcaaaattgaacaacggaagctctcgtgaaattaaaatggtcataagttttaactcggatgtccgattcaggagcttcacatatcgagatgcacgaaattgaacaatggaagctctagagaaattctaatggtcataaattttcacacggaggtcctattcaggcgcttaatatatccagacgctcgaaattgaacaatggaagctctcgagatattcaaatggtcataacttttcactcggatgtccgattcaggtgtatcacatatccagacgctcggaatngattagcggaagctctagagaaattcacatggtcataacttttcacacggatgtcctattcaagcgcttaatatatcgagacgctcgaaatttgacaac

SEQ ID NO: 18841 - DNA, 343 bp, Glycine max
  unsure (1)..(343): unsure at all n locations
tagctttgtttactttattnttggtaagaggctttacatattatatactaagatatctggttgaatcttccatttcttatctatggtcttgaacacttacgaagtctaccagtggtatgctaatcatgtgtatgcaattgactagatgaaactagaaggaatttggtagattggcctaaacgatttaacattatttgtggcattgctcgaggacttctttatctncatgaagattctagaatgaggattgtacatagagatctgaaaacctagcacattttactagatgaaaatttcaatccanaaatatcagactttggcttagcacgagcattcttgggag

SEQ ID NO: 18842 - DNA, 419 bp, Glycine max
aaagtctcacgattgtcacgtgctcatgcattatttgttagtcgtggctatacgagacatcttgcgaaacaaagtcaggttagcgataactcgcttgtgctttttcttccatgctatatgtagcaaagtccttgatctagtcaagtttgatgagttggaaaatgaggccgcaattatactgtgccagttggagatgtatttccccccccgctttctttgacatcatgattcacttgattatgcatctggtcagagaaatcaaatgttgtggtcctgtttatctacggtggatgtacccagttgagcgatacatgaagatcttacaagggtatacaaagaatctatatcgtccagaagcatctattgttgagaggtacattgcagaagaagccacttgaattttgtcataatacttacag

SEQ ID NO: 18843 - DNA, 399 bp, Glycine max
  unsure (1)..(399): unsure at all n locations
agcttatattcctattgtcctatagaggcatttcattccttctggagagtccactagctctatgatagttgtcacacctctgaacatattcataagcatccttgtgcaaggtaagccaataaaaactagattgaaggaccttggcagtagtcctctctccatcgtaattgccttcacaatgtgaactatggcaatgccacaatatgcttcttgcctccccctaagttacacatcttctcaagagattatctgctccaattttataaagattgggatccccccacacaaaatatttagtgtccttgacaaacttctttttttggaccaagtgagatcatcangaaatgcaccaattgctttgacactagtcatctcagcagaccatggccttctacaatg

SEQ ID NO: 18844 - DNA, 251 bp, Glycine max
  unsure (1)..(251): unsure at all n locations
atggttaataatctgcataaaggtgtgaatgtgtgtggtatgtttggtttagttcaattcttggtgcatggatngagatcccacattgactatagatatggctaaagtagaaattataaaggctggggaaatcctcacctcatgaagctagctttggagtttgagtcaagcttatctcanattcaagatggtatcagagcctatcataaattcgatattgggccaccctcaactgtccaaaaatctacatg

SEQ ID NO: 18845 - DNA, 444 bp, Glycine max
  unsure (1)..(444): unsure at all n locations
aatagatttagttagtcactctacttgcaaaagagagattttctagctttctaggaacttagacgttgatgaactttgtttaagataaattgaaaagtattcctagaagctatcttatgaaagatagacactccaaggtactttccaagatccttagtccaagcaatacccatttctccacttagttgatccttgacttgagtctccacatttttggaaaagaacattcaagatttctccaagctaattttctgcttagaactcttgcaaaataaattcaaaatattcttgatagaatggacctgctccactaaagccttcataaataaaataaggtcgtatgcaaaggctaagtgagatataagtggaccatgtctaaaaagacgaatagggcaccacactctntggtccacaacaacagagatcaattgaaacatatgttca

SEQ ID NO: 18846 - DNA, 426 bp, Glycine max
  unsure (1)..(426): unsure at all n locations
gctgcaccattgacagatntacttagtaaagaagcattcttgttgtctccagaggcagagacaacatttgttcaattgcagaaagtcatgacttcagctccagtgttagctcttcctaatttccagctgcccttcattctggaaactaatgcttccgacactggtattggagtagtattacatcagaatggccatccaatagcatttttttccaagaaacttgcacctagagtgcaaaagaaatctgactaatttagagagatgttagcaattgttgaagctatagctaagttcagacactacttgctgggacacaaatttattatcaaaactgatcacaattagtcagatgatgatgttgatggatggaacaaccgctacagacacctgaacaacaacagtggttacacaggtttttgggatatg

SEQ ID NO: 18847 - DNA, 382 bp, Glycine max
  unsure (1)..(382): unsure at all n locations
agtctttttgaaaagattcctaaagaagctagagcttagctacacacacctctctaatagctaagctcatctncttgagatgagaagctggaacttagctacacaccccctataatagctaagctcacccccatgacaaaatacatgaaaatacaaagaanagtccctactacaaagactactcaaaatgcctcgaaatacaaggctaaaaccctatactactggaatggccaaaatacaaggcctaaacgaaggaaaaatacctattctaatatttacaaagataagcgggctcatacttagcccaggggctcanaatctaccctaaggctcatgagaaccctanggccttcccttggatctctggcccaatctacctgga

SEQ ID NO: 18848 - DNA, 434 bp, Glycine max
  unsure (1)..(434): unsure at all n locations
ttagagganactcaatcacctaaatcatctgcagcatttctgtgttaagagaatccgaagtaggtgcatcagaagctcatatcatggctgaagatcaaccacgaacggttactcttgaagattattctagctcgatcgtgccacaattcttcacaagcattgcgcggccggaagttcaggctcacgtcatcacatatcctcaatccttgattcagctgattcaaggagatttatttcatggattgccaaatgaagacccttacacacacttggctacttatattgaaatctgcaacacagtaaagattgtcggtgtgccagaagatgcagtgaagctcagtttgttctcattttctttggctggagaagctaagaggtggctacactcatttaaggganacaatttgaagacttgngatgaggttgtagagaag

SEQ ID NO: 18849 - DNA, 421 bp, Glycine max
  unsure (1)..(421): unsure at all n locations
tcctagcggtttctaattatatggacctataaatctatatatgctgacaatagacgagaagttcgtggatctcctcgngggggagtaggtgtccgccatcgctttggccttggctagctcttcatcaatggattcctttgcatcttggaagatgaatggcaatgtaatggagacaggaagagagagaggagacgccacttcagggagaagatgagtctagaagaagctcaccaccataggaggccatggataagagcttggaggaagaaagagatgaatgaagggagaaggagagaagagcacganattttgtgctctaaatgagctctgaaatctgaagtttaatattcagatgatcaaagttcaaaaaaatgcacacatatgacctctatntataccctaagtgtcacaccaaattgga

SEQ ID NO: 18850 - DNA, 417 bp, Glycine max
tccactatggcgtagcccatagaatctatttttacccagctatcaaggaatgttagatccattttcaattcagttcccaacaaatcctcatcattctagttgttgtaccaatgacgacgacaacaacaactattggagcatggaggatatctggtcaatgcaattagccaattactgaacgggaattaaacctataaacataaatataaataatatatataaacctaagtgtctaagttccataaattaagctgtagtctctggcttaaaacatgttaggtttgtttatacaagtagttggatgtttggagtacttcggccttttgcgtaccatcaatatttaagaactaagttagttatgctccgtaacttatgggctcttaataaactatatctgcacaaaattatatatatatc

SEQ ID NO: 18851 - DNA, 409 bp, Glycine max
  unsure (1)..(409): unsure at all n locations
agcttttcataaaagccaaactaagcaataaagtacctcgtatttttccctctgcctccggttgtcgtgcaatcccttctacagcttgccctgcagcagtgccttgaccaaccccaggtccaatagaagcaagccctacggccaacccagcagcaataacagaagcagcagaaataattggattcatgataatttcctcgtaacctaaatataaaataaagaaatagttaatgatataatcaaccaataaattatgacttaattnttcaattatcaagatttattcggtttaaagtaattaataagaattccgaattgaaaataataatagttattgaactctacgaattacttcgagatttattttttcgtctctacctacatacatnagttttttttgtgaatatgt

SEQ ID NO: 18852 - DNA, 438 bp, Glycine max
cccttatcccatgcttctttggccgtcgatgcgttggatatcttctcaaatgtatcttcatccaccgagtgataaatgagaaagagagctttcttgtctctctttcttgactacttcaacgtctcctttacaccttggcttagcgaggcttcatcttgctcctcgaagccattctctacgatatcccacacatcttgagctcctagtagcgccttcatcttgatactccaattatcatagttgttctttgtgagcatcggcattcggaaaggaaaacctccattcgccatcttttgaggatcttgaagctctgataccactttggtggaaataaggctctttatgtctatgaaaagcgtttaggaatattggagactctgaatagacacttgataggaaggagaattctttatggaggagagaactttgtacttttgc

SEQ ID NO: 18853 - DNA, 437 bp, Glycine max
  unsure (1)..(437): unsure at all n locations
aaatgtggcatttgtgcacaatacacaatgtcctgtacattacaacaaaatggtgtatcataaaggcgtaatagaactttaatggatatgattaggagtatgttaatcaatttgactttacccgtatctttgtggatgtatgccttgaaaactgtcatgtatttgttgaatagggttcctagtaaggcagttccaaagacacctttaaactgtggacaaataggacacctagtataaggcacctgcatgtttggggttgccaggcagaaataaggatttataatccgcaagacataaaattggatgcaagaacaatcagtggatatttcattggttatccagaaaatgaaaggggtatatgttttattgtcctaatcatagtatgagacttgtcgaaactaanattgcaagattcattgaaaatgaataaatcagag

SEQ ID NO: 18854 - DNA, 370 bp, Glycine max
ttttcatagaaattgcgttctacctaagggtgcaaatgaaaatttcttgacactcattcctgatgtagagaattcgattggatcgaatgagtttagacccatttctcttgtgggttgtctatacaaaattgtagctaaaatactttctatttgccttacgaaagtgttgcacaaggtcattcatgagtgacaattggctttccttgaaggtagaaatatgttagatggagtggttatagcaaatgtgtcgaacatggatttcctaaattaaagggtgcattgagacctttactatgtcggttcttgtgaatgggagtccaactcacgagtccaaaaacgagacgggctcggtggtttgtacgaatgccat

SEQ ID NO: 18855 - DNA, 324 bp, Glycine max
  unsure (1)..(324): unsure at all n locations
tttcttttatcttctgtgntctgggaacctctccttcctcatgtgtacccaaacccaatcacctggctcaagaacgactttctttctgcttttgttggcttgccttgcatagctcgcatttttcttttcaattagagccttcacttgctcatgcaacttcttcacatactcagctctagcctgtgcatccttatgcttaaacatancaatgttaggcataggcaacaaatcaagaggagtcaaaggattaaatccatacactatctcaaatggtgaacaattagatgtgctatggacagcccgattatnagcgacactcacatg

SEQ ID NO: 18856 - DNA, 419 bp, Glycine max
  unsure (1)..(419): unsure at all n locations
agcttctggtcattgggcccgtaaaactcactagggatagcggtattattaaacgcagacaaagcaaccagcgataaaacccaatacagataaagcacctaaactaatagaaaagtaagcttctccagaccataccagtgcacgccgagcccatgcaaaaggtttggttaagatatgccagattccaccaagtatacaaatggaacccaaccatacatgccccccaattatatcttccaaatcgcacacactaacaatccacccttttcccccaaaaggtgattttaataaatatccaaatataatactcggactaatggtcacattggttatttttcttacatctccgccccccggagcccacgtatcatatatnacctccaaatanagagccttgaatactagatgaaacgcaccta

SEQ ID NO: 18857 - DNA, 411 bp, Glycine max
gaataatggcctcatcaaattatttatttcccgaagttattttctataaataagtctcctattgttagtggtgtgggttaccattattggaacaaccacatgcaaatttttatagagagaattcttcttcttcttcttcttcttcttattcatgagattgattaacggatcgagggtttcttaagttgaaggaattctgaacacaagggaagggttgtgcctatgtggttcagactttgtaaaaggcattttacaagatagtgaacatctcaaacgggttgtttggagattagacgtacgcacagggcatgaccgaactagtataataactgagtttgcattctctcttcccttaaaattctcttacttattggtctttatcttttgcattacagaagtttactttgaatt

SEQ ID NO: 18858 - DNA, 411 bp, Glycine max
  unsure (1)..(411): unsure at all n locations
ttgcttcttacaagagactaagaaatttctgacaaaaaatcttgagatgaaagatcttggggaagcctcttctgaattaggaatcaagatactaagagatcgctcttaaggtatcctaaggttttcacaagagagttatatcgataaggtcctaaatagattcgacatgaaagatagtaaaccaggagataccctgatagctaaaggagacaaatttattctcaaacaatgtcccaataatgaccttgaaagaatagagatgcaaaagattccttatgcatcaacagtaggaagtctaatgtacgctcaagtttgcactcgtnccgatatagcatttgtagtaggaagtctgggcagatatttgagtaatccttgaatgcagcatttaaaagcagcnaaacgtgtgatgcg

SEQ ID NO: 18859 - DNA, 410 bp, Glycine max
  unsure (1)..(410): unsure at all n locations
tgagacttttattactatattttccacttcttatctaaccttggaaaggctccacaaagagaaagccaatattagaaatatgtttatttctgatgaatggatcctaaacaagttatctaaggagcctaaggggaaagaagttgcaaaggtagtgctcatgccttctttttggaatagtgtggtttacactcttaaagtcatggctccacttgtcaaagtgattcttcttgtggatggtgaaaggaaaccagccatgggctatatttatgaagcaatggacaaggaaaaagaaacaattatcaagtctttcaacgacaatgaaagcaagtacaaagatgtgtttgcaatcattgataaanagatggaattgtcagcttcataggccattgcatgcatctacccacttctta

SEQ ID NO: 18860 - DNA, 417 bp, Glycine max
  unsure (1)..(417): unsure at all n locations
agctnttgatcaattcanatggtcataacttttaactcagatgtctgattcatgcgcataatatatcgagacgctcgaaattgaacaatggaagctcttgagcaattcaaatggtcataacttttaactcagatgtctgattcaggcgcataatatatcgagacgctctanattgaacaacggaagctctcaagtaattcaaatggtcataacttttcactcggaggtccgattcangcgcataatatatcaagtcgctcgaaattgaacaacggaagctctcgagaaattccaatggccatcttttcactcggnggtccgatttaggcgcataatatatcgagacgctcganaatgaatagcggaagctctcgagaaattcacatggtcataactcttcactcggaggtccaattc

SEQ ID NO: 18861 - DNA, 441 bp, Glycine max
  unsure (1)..(441): unsure at all n locations
tgggacatcttgacttgctttccaatctgacattctccttatattctgccttcttctattgtcagattgggaatgcctctaacagcacctttgtcaatgattttcttcatgcctcttaagtgcagatgtccaaatctttgatgccatattttgacttcatcttctttggagaatagacatgtggaggagtaactggtttcttgaggtgtccataggtaacagttgtcctttgatctgctgcccttcattaggacttcactcttctcatttgtcaccaagcattctgactttgtgaagtttacattgaatccttcatcacacaactgactgatgctgatcaagttcgcagtcagtcccttcaccagcagtactttgttcagactaggaagtccatcatggactagctntcccattccagtgatctttcctttagagccatct

SEQ ID NO: 18862 - DNA, 424 bp, Glycine max
  unsure (1)..(424): unsure at all n locations
ttcttttgtgttaggtattaagatactacgagattgctcttttgtatcctaaggttgtcacaagagagctatatcaataaagtacttgatagattcgacatgaaagatagtaaaccaggcgataccccaatagctaaaggagacaaatttagtctcaaacaatgccccaataatgaccttgaaagaactgagatgcagaagattccctatgcgtcgtagtagcaagtctgatgtatgcttaagtttgtactcatcccgacatagcatttgtcgtaggagttctgggcaaatacttgagtaatcctggattgcagcattggaaggcagtgaaacgcgtaatgcgttacttgaagagaacaaaaggctacatgctcacttattagaagtntgacaatntggagatcatcgggtactcagactctga

SEQ ID NO: 18863 - DNA, 440 bp, Glycine max
  unsure (1)..(440): unsure at all n locations
aagatttgaaacttcacatataagagatgctntattattattangttaaattaatgatgatctcaaaataaaaggtgagattgtttagcaacttatgaacttgaaaattttgagtttttgttaagtacgactatttggtatgtcatattatttcatgtaaactccattagtaaaaagttacaatcaaaagatatgggtatgtatgttgctatagaacaattgaaaggtcttatttctttttttgaaaaatatagagaagattgatttgaaaatgctataatttctgctaaagaaattggtattgaaatagatatagaacctaagctttttgaaaaatgtgttattcatagaaagaaaaacaatttgatgagaatattgataataaagttgtaaaattgcctaaagaatcatttanaattgattacttcttgtatataata

SEQ ID NO: 18864 - DNA, 415 bp, Glycine max
  unsure (1)..(415): unsure at all n locations
gcttgtgctatttctagttcatataccatacctttaagccaaaatgcttccttcactccttcaactagggcccttgattctgctttaataaatgaaagaacaaccactgaatggtgaattgctttccaactaattggtatacccaacaaaagaaatacatatccggtaaagactttcttgtacctacattttctacaaaatctgcatctacatagcctgtgattgctgcctcatgtgttgtcttcttgtaccttaatccagcattcaaagatccatttagataccttagtgtccacttcacagcttcccaatgtgcactgccaagatctcccatgaatctgcttataatacttacagcatgagccaagtcaggtctgctgcanaccattccatacattatgcttgcaacaccact

SEQ ID NO: 18865 - DNA, 413 bp, Glycine max
  unsure (1)..(413): unsure at all n locations
agcttctctgcacaaatattccgtcccctaaatatatgcgtaaatttaaaattaaaagtatgaattttatatgtatatagtttaatcatctattcctaagttttcaaagcaccaatattagagttgatttaaaatatttcagtactaaaagattatttacacttatatttaaaatgtcattttaacgtaatgtgttttaatattttaaatattatagttgtaataaaaataattacacatttattntaagtatgttattttaatgtaatatttcttaacttatttgtggttcattntttggtttataatgtggttaactattatttgtgaattttgttcttgagtcttatgtctaataaatataaaccaattttacatgtttcttacaaacattgtatctgtctcttttcttt

SEQ ID NO: 18866 - DNA, 409 bp, Glycine max
  unsure (1)..(409): unsure at all n locations
agcttctacattcaatttcaagcttttcgatatattacgggactcaatcggacatccgagtaaaaagttattggagtttgaatttgctcagggcttcggtattccatttcgagcgtctcgatatattacgggactcaatcggacatcagagtaaaaagttattggtgtttgaaattgctcagagcttcggtattccatttcgagcatctcgatatattacgggactcaatcagacatccgagtaaaaagttattgtagtttcaatttgctcanggcttcggtattccatttcgagcgtctcgatgtattacgggactcaatcagacatccgagtaanaagttattgtcgtttgaatttgctcagagcttctacatttcatntcgagcttntcgatatattacgggactc

SEQ ID NO: 18867 - DNA, 435 bp, Glycine max
  unsure (1)..(435): unsure at all n locations
attcanacgacaataactttttactcggatgtttgattgagtcccgtaatatatcgagacgctcgaaattgaataccgaagcgctgagcaaattcaaacaacaataactttttactcggatgtctgattgagtcccgtaatatatcgaaaagctcgaatgtgaatgtagaagctctgagcaaattcaaacgacaataactttttactcggatgtctgattgagtcccgtaatatatcgagatgctcgaaatggaataccgaagctctgagcaaattcaaacaataataactttttactcggatgtccgattgagtcccgtaatatatcggaacgctcgaaattgaatgctgaagctctgagcaaattcaaacgacaataacactttactcggatgtctgattgagtcccgtaatatatcgagacgctcgaaattg

SEQ ID NO: 18868 - DNA, 351 bp, Glycine max
acctcgccccgggatctctaagtcagctgcaagctgtttttttttcttgctaaacggctattgtgataaaatgttgtataataatgctctcattttctgtgtgtaattaaggtcctccgtccattcctccttcgaacgttgacctcatatgttgaaataggtttgccaccaaaaaaggaaaccattctcaacagtagcatgtcgcatatgcagaatcaattttataaggcattactgcataaggatctgtacgtcgcgaatgcacgaggagaacgtaacttcttctaaatatagcaatgctactacctaaatgctgccatcacccatatctcttacacggtgctgaacctg

SEQ ID NO: 18869 - DNA, 451 bp, Glycine max
  unsure (1)..(451): unsure at all n locations
tcatgctattgtaaggtntttagcacanattccaaatgagtgttgtgataatttcatatagaactatatatcagaatgtcattaaaaaaaaaaaccaatacaaacttcctcaagactccccttaatatgtcattcataagactttggaatgtagcagaggcattagtgagcctaaatggcataactagtcattcataatgtccatggtgagtcctgaaagctattttatacctatcctcaggtttcaacaaaatctggtgataaccagaccttaagtccaacttggagaaaaattcagctccaaacagctcatcaatcaattcatcaactgttggaataggaaatgtatctttaaccgtaatagaattcaatgctctatagtcagtgcacaccctccaagaaccatccctcttcttaaccaanataattggagaagaanatgggctcttac

SEQ ID NO: 18870 - DNA, 431 bp, Glycine max
  unsure (1)..(431): unsure at all n locations
cgacaataacttttgactcggatgttctatttgtcccgtagtatctcgagacgctagaaattcaaaacagaagctattagaaaaatcaaacgacgataactttttacacggatgtcccattgagtcccataatatatcgagacgctcgaaattgaaaacaatagcacttagcaaattcaaacgacaataagttttgactcggatgtccgattgtgtcccgtagtatatcgagacgctcgaattgaaaacagaaactgtgagcaatttcaaacgacaataactttatactcggatgtccgattgagtcgcgtaatatatcgagtcgctcgtaaatgaaaaaagaagctttgaggaaattaagacgacaataacttttgactcggatgtccgattgtgtcccgtagtatctcgagacgctcanaattcaaaac

SEQ ID NO: 18871 - DNA, 429 bp, Glycine max
  unsure (1)..(429): unsure at all n locations
gagattataataggattgtatggttnttaggtattgtttactctcaataccatatgcagtttctcaaggagggtggttgagtttcattctgctaattgttcttgcaatgatgttttggtacacggngttacttctacagaggtgtatgaacaagcatccactaatcaaatcttaccctgacataggtgaggttgcatttgggctaagaggaagagctatgatctctacattcatatacatagaattgtttttagtggccgttgagcttctgatattggaaggcgacaatctagannaattgtttcctcatatgaacttcanaattggtagccttagaattgaaggtaaaagtggttttgtggtgctagctgctntggtcatactaccaacaacattggtgagaagttnggagctttggctatgtttctc

SEQ ID NO: 18872 - DNA, 408 bp, Glycine max
  unsure (1)..(408): unsure at all n locations
agcttatgacaatttgaaattctcgagagctttcgaagattaattntgagcgtctcgatatattataagtcttaatcggacctacgtgtgataagttatgaaccatttgaatttttgagagattccgttggttaatttcgagcgtctcgatatattatgcgcctgaatttgacttgcctgtgaaaggttatgaccatttgaatntctcaagagcttccgttattcaatttcgagcttctctatatgtgatgcgcctaaattggacatccgggataaaagttatgaccatttgaatttctcanaaggttcggtagttcaatttcgagcatctcgatatattattcgcctgaatctgacatccgtgtaaaaagttatgactattttagtttatcgggagcttccgttttc

SEQ ID NO: 18873 - DNA, 392 bp, Glycine max
  unsure (1)..(392): unsure at all n locations
aaaaccattaaataaaagctgagtgacaaaatattaaaaatactttaatttatttaccaatgcttttcttattgaaattagtagaaagcactccccatatgtcagtgacttcaaaaaaatggaaccacataaagaaaatgagagtaattttggatctttatctacctataccaattggattgacattattcaataatttaaagttactaaaaaggttctattcaagacctttntccacttcaatagacttccttgttataaatataagaaaaataactgatttacatagtcgacatcgtttaattatattaatcttattaaagagtaatttttntcaactattctgtatggaacttntattatgtatacaaaaatcattaaactaatacttc

SEQ ID NO: 18874 - DNA, 430 bp, Glycine max
  unsure (1)..(430): unsure at all n locations
agctttgtttaatttgttttgacaataactntatacacggatgtccggttgagtcccgtaatatatcgagacgcctcaaatttagatccgaagctctgagaaaaattgaattgacaataactttatacacggatgtccagttgagtcccgtaatatatcgagacgctgcanattgaaaacggaagctcgtatgaaattcacacgacaataactntntactcggatgttcgattgaatcgggtaatatatcgagacgctcaaaattgagactagaagctctgagcaaattgatatgacaataactctatacacggatgtccggttgagtcccgtaatatatcgagacgctcccaattgaaacggagactcttatgaattcaaacgacaataactttttactcggatgcccgacagagtgtcgtaatttatc

SEQ ID NO: 18875 - DNA, 403 bp, Glycine max
  unsure (1)..(403): unsure at all n locations
caattatgaaaattaatttttgtgcgagatttaatgttgtcacatgagctatacttattggataaagtatataagtatactactaattactcatacaacatctaaattaataaaaaagattgcagtgcttatataataattattagaaagatatatnaagagattaataaaaagatgtattaggttctattgatagaggtatactaataaaaaaatacaacgaaattcattcagcatcgctattttttttttaaatttagaagtatgaaatgaaattaatctcttttgcattatacagtagaaatatataaaaaataaaataattattttatttatgatggctcattctagtgtatttcacttaaagtttctccattgaaatttctcttattgattctggatc

SEQ ID NO: 18876 - DNA, 395 bp, Glycine max
  unsure (1)..(395): unsure at all n locations
agctttatctactttgatggaatgaatccatatggcaatntaagcacttaacacaattcatggccaattctactagtaatntacaaattttccttccttggttgtgcatgcagtgaaaatacatgatgttgtcgatgatgatatcangcccaagacagccaggaaatgacattgatgtttatctaagtccgttgattgaaggcctgagaaagctgtgggacgagggggttctagtgtntgatgggtttcagaatgagacttttctaatgcatgcaatgctgttttgtacaattaatgactttccagcatataggaatttgagcagttacagtgttaagggtcatcatgcatgccccatctgtgaagaagacacaagctacatacaactganacat

SEQ ID NO: 18877 - DNA, 316 bp, Glycine max
tctgctgccaccatacaacctttgcccttgcatgcaactacctggagcaagtgagcagcctgaggcttatgctgcgaatatatacaatagacgctgctcaagccgcagcagcagaatctaccacagcagaacagttgtgacctctgcagcaacagatacagccctgcatggaggaatcacgctaacctcatatggtccagcccttagcaacaacgacaacagcctgctccttacttccaaaatgctgctggcccagacataccatacattcctccaccaatccaacaacagcagcaaccccagaaacaaccaacag

SEQ ID NO: 18878 - DNA, 379 bp, Glycine max
  unsure (1)..(379): unsure at all n locations
tatggtgttcaaggtggatgntgaaaaagcctatgactcactctcatgggttnttttggattatatgctgcanagaatgggtntttgccacacatggagacactggatgtctgcctgtctcaagtcagcaagcattgctattcttatcaatggcagtcctacaaaggaatttgctcctactanaggtttgaggcaaggtgatcctttagcccccttactctctaatatagttggagaaggcatcacatgattgatgaaggaagcagtcaaaagaacttatatagaagctatatggctggaaagaaaaacgaacccattaatatcttgcagtatgcggatgacagcaattttgtgggtgaggctgagtgggagaatgtta

SEQ ID NO: 18879 - DNA, 434 bp, Glycine max
atgaagagtccaaagcaatacacatatttaacaaatacaaaggtgaatgttttttaacacatgcacgcaaacgaacataaaggccaaaacgaacacatgcatgcaaacatacataaaggccaaaacgaaccacatacaaacgggtaaaaaaaaagaacaaaatagaaacaattgtaggcatcaaaactgatgcaatcctaccccgcaagggcattggatagaaaactccaagtagattgagccagagatgcaagagaaggccctagggttcttatgagccttaaggtagatttcgggcccatgggctaagtacgagcccacttatctatgtaaatattagattaaggtttcattattcttgggccttgtatttaaggctccataatagaggtagaggaccctagaaatataagagttttcagcccttgtattta

SEQ ID NO: 18880 - DNA, 456 bp, Glycine max
  unsure (1)..(456): unsure at all n locations
aatcattcaacgcattcagaatatgtgttcatccttantaaagctactctaaaataaatgacacagtcgncagcanagagtaagtatcagatgataggtgcacccctatagatnttaatgccataagtatgtccttgcccctccaacttcttaataagagcttanatcccttcagaacaaaggatgaacaaaaaatgagagatgggatctcctagtctgagacctttcccctggataataggaccaaccaagctttcattgataataacagagtagacagattggatgcgaattaaaatccacttaacccaagtcgcactaaatctcattttggccatgacgttttttaaataattcccatcgacttggtcatacgctttgttgatatccatcttcagcgcaacttgtaacctcccacatgttacccttgaccttacactgcatatgatggagaat

SEQ ID NO: 18881 - DNA, 409 bp, Glycine max
  unsure (1)..(409): unsure at all n locations
ggacctgcaggcaggcaagcttgatttcttttctcacatactggaatcgattaccagagaagtgtttcagaaatattctcacagtccatcttttacttgattctgatggctgcaaagcctatattatgggaactggacacaaantgccaagagtctttcaaaaccaaaaggtattatcctctaaaaagcacatcgttttatcctcttaacaaattccttggccaaattacttgtgattcaataaggaattatttgagtgctcaaattgtgcaatctatctctttcaagagagatttcttcttttcttcttcttcattctgaaaaaagggattaagagaccgacggtctcttgttgtgaaagaattctaaacacaaaggaagggttgctcttgtgtgtctagaacttgta

SEQ ID NO: 18882 - DNA, 366 bp, Glycine max
acctttgtcaatgatattcttcatgcctcttaagtgcagaagtccaaatctttgatgccatattttgacttcatctttctttgcaggtgggacatgtggaggagtaactggttctttgaggtgtccataagtagcagttgtcccttgatctgctgcccttcataaaaactcattcttctcattggcaccaagcattctgactttgtgaagtttacattgaatccttcatcacccaactgactgatgctgatcatagttgcagtcagtcccttcaccagcagtactttgttcagactaggaagccatcatggactagctttcccattccagagatctgtcctttagagccatctccaaatgtcacat

SEQ ID NO: 18883 - DNA, 408 bp, Glycine max
  unsure (1)..(408): unsure at all n locations
ctaataaatctatgtatgatntanaacaagcctcacgtcagagttatctttagtttcattggaatatttccttcttttggttttgaggaaacccacatggatcaatgcatattaccacaaggtcagtgggagtaaaatatgttttcttgttttatatgtagatgatattttacttgcaaccaatgatcaatgtttgctacatgaggtgaaacaatttctcttttagaattttgacatgaaagaatttgggtgatgcatcttatgtcatcagcatttaagattcatagagatagacctcgaaggattttaggtctatcataggaaacctatattaccaaattttatagtgattttggatgataattgtcaccaagtgttgctcccatcgagaagggtgatagatttaat

SEQ ID NO: 18884 - DNA, 324 bp, Glycine max
  unsure (1)..(324): unsure at all n locations
ttttttgtttattggcntactcaaaacaggaccacgtttcatatttcttccctagcatngacataactgtcagttactgtcgaggcttctggagcatctataacttgttcactatattctgtgcgacatttgcgtggataagctgcatcaaatctctcttgtctctctggattccttcagcacgaaagtagtttatggttgtcaattgcttggcaactgtacttcgtatctctactttgacaatcttcttccgtatcgcatgcagagaagcccccttctcaagctcttgtaacaatacttttcttgcttcctcaaataccatct

SEQ ID NO: 18885 - DNA, 437 bp, Glycine max
  unsure (1)..(437): unsure at all n locations
gaaactcagcttcacattcaattcaagcgtgtcgatatattacgggactctatcagacatccgagtaaaagggttattgtcgtttgaatttgttcagaccttcggtattccatttcgagcgtctcgatatattacggaactcagtcagacatccgagntaaaaggttattgtcgtctgaatttgctcagagcttcaacattcaatttcgagcgtccggatatattacgggactcaatcagacatccaagtaaaaatttatagtcgtttgaatttgctcagagcttcggtattccatttcgagcatctcgatatattacaggactcaatcagacatccgagtaaaaaattattgtcgttcgaatttgctcagagcctcaacattcaatttcgagcgtttcgatatattacgggactcaatcgaacatacgagtaaaaa

SEQ ID NO: 18886 - DNA, 404 bp, Glycine max
  unsure (1)..(404): unsure at all n locations
agctttagtcttttcaactgcacaacgctcttaatatgggaagagtatccttgtggaaccttcacctgacgaagacactgacaataacttatcttttccttcttggacaaagtatggcaggctgggggcaagtaaattttcttcccatcagaccttggatgcaactgtgctcttatacccatatcagctagatcttgacgggtattcaagccatccttcgtcttgccttgaatgttaaggagcgtcccaatcacactgtcacaaacatttttcttcacatgcataacatcaatacaatgtctaacgtcaagatcacaccagtacggaagatcaaagaaaatggacctcttcttccatatgcaactctgactnttatccttcttttgggtcttcccaaatacagt

SEQ ID NO: 18887 - DNA, 386 bp, Glycine max
  unsure (1)..(386): unsure at all n locations
agcttaactatatgtatgcgaagtgggtggaattcctagagcaattcccttatgttatcaaacataaaaagggaaaaggtaatatngtagccgatgctctntctcggcgtcatgcattactttcagagaatggtttctttagacatgaaggctttcttttcaaagaaaacaaattgtgtgtgcctaaatgttctactagaaatttgcttgtttgtgaagcacatgaaggacggttaatggggcattttggggtccaaaagactctagatacattacaagaaccattttattggcctcatatgataaatgatgtgcacaatatttgtgaacattgcattgtatgtaaaaaggcaaagtctaaggtaaagcctcatggattgtatact

SEQ ID NO: 18888 - DNA, 473 bp, Glycine max
  unsure (1)..(473): unsure at all n locations
actcagctagaaagcaactggatgcgttggtcaacttggtaacctatcttgttcttgaatcagaaatctgtacctgtcgcaagggtttgtggtttgtgctcctctgctgaccaccatacagaccttngcccttccatgcagcaacctggagtaattgagcaacctgaagcttatgctgcanatatttacaatagacctcctcaacctcagcagcaaaatcaaccacagcagagcaattatgacctttccagcaacagatacaaccctggatggaggaatcaccctaacctcagatggtccagccctcagcaacaacaacaacagcctgctccttccttccaaaatgctgctggcctaagcagaccatacattcctccaccaatccaacaacagcaacaaccccagaaacagccaacagttgaggcccctccacaaccttccctcgaagaacttgtgaggcaaatgactatgca

SEQ ID NO: 18889 - DNA, 418 bp, Glycine max
  unsure (1)..(418): unsure at all n locations
nttagttcctcccaataagtgcctgaaatatgtgtttctgatcttacacactacgtgctgttngcttgatattgccatgcatatctctatgatatcatgtgatgcaatcctaccccccaagggtattggatagaagactccaacaagtttgcgccagagatgcaagagaagaccctaaggttctcatgagccttaatgtagattttgagcccatgggcaaagtatgagcccacttatctttgtacatattagattaagatatcattatttttgggccttgtatttatggctctataatgtaagtaagggtccctagaaatgtacgatctttcagcccttgtattttaaggcacctatactagtttttgtattaagggtacttttgtaatttcacatgcattaagtgaatatgtgatgt

SEQ ID NO: 18890 - DNA, 195 bp, Glycine max
gcaagaattgcaggttaacatctaactgctccaagtgaagattctctgcagctactatgctcaaaataattctgatggtagtcatctttacaactggagagaagatctctatgaaatcaattccttgttttctgtgaaaccctttcaccacaagtctcgccttgtatcttcttttaccgtcagattctttcttta

SEQ ID NO: 18891 - DNA, 310 bp, Glycine max
  unsure (1)..(310): unsure at all n locations
agctnattatatcgagacgatcaaaattgaacaacggaagctctcgtgaaattaaaatggtcataagttttaactcggatgtccgattcangagcttcacatatcgagatgcacganattgaacaatggaagctctagagaaattctaatggtcataaattttcacaccgaggtcctattcangcgcttaatatatccagacgctcgaaattgaacaatggaagctctcgagatattcaaatggtcattacttttcactcggatgtccgattcaagcgtatcacatatccacacgcttggaattgattaa

SEQ ID NO: 18892 - DNA, 309 bp, Glycine max
  unsure (1)..(309): unsure at all n locations
agctttcattgttcaattncgagcgncncgangtggtatgcgcctgaatctgacctccgtgtgaaaagttatgaccatttgaatttctcgagagcttccgttgttcaattttgagtgtctcgatatattatacgcctgaatcggacctccgagtgaaacattatgaccatttgaaatgctcaagagcttccattgttcaatatcgagcgactcgatttattatgcgccagaatcggaccttttagtgaaaagttatgaccatttgaatttctcgagagctctcggtgttcaattttgagcggcttgata

SEQ ID NO: 18893 - DNA, 394 bp, Glycine max
  unsure (1)..(394): unsure at all n locations
aatgacgagtatgtgtaattgtaataagctccttagttgatattctagtcataatnaggatgcgtgctntaaagttttacaatgcttgaatntgtgtgataatcttgaatatgcatttcaacttactcatttaacttttataatattgatccatggttaaggattgaaatctttcgaaacatgttttggaaaatacttaagtttttatcccgcatcanataattgattatatgatgatataattgattatcttgatgatgatgcctttgtttttcataattgagaaagactcanaattagtctattatcttgagtgaataattaattatatggaattgaaacaaattttactatcacagataattaattatatgatgatataattgattatatg

SEQ ID NO: 18894 - DNA, 339 bp, Glycine max
  unsure (1)..(339): unsure at all n locations
atatatattagaggatttgtatataaatatgtaaaaatatataaaaatcattatccaaattaatatatattcaaatgattntatattcacacatgtcttgcattatgttaatttatgcaaacatantttgaaaattattatctttataagcatattcgcatttgcatatgacttttatatatatatatatataattttaataagaaaattagtaataaaaaatatattacattntgtaattattagttntatactcctatcatcataagggggaaaagtatactactaaaataaaactttaaatttattgggtttatactcatatcatcaagtgtacta

SEQ ID NO: 18895 - DNA, 257 bp, Glycine max
gacatcaaccggtccatagagtgtaaggagtatccacaaggcgcttctggcaacgacaagaggatgttgcagaggttggaaactagtttctttctaagtgggggtatcatgatggacctcattggaaccttgtggccttggatcttcttcatcaatggaagtccttgcttcttgaatttaatggcagcaaaatggaaaagaagaagagttgagaggagacaccacttcaaggagaagatgagtctagaagaagctca

SEQ ID NO: 18896 - DNA, 372 bp, Glycine max
  unsure (1)..(372): unsure at all n locations
ccacagcagaacaattatgacctttccagcaacagatacaaccctggatggaggaatcaccctaacctcagatggtctagctctcagcaacaacagcaacctgctccttccttccaaaatgctgctggcccaagcagaccatacattcctccaccaatccaacaacagcaacaaccccagaaacagccaacagttgaggcccctccacaaccttccctcgaagaacttgtgaggcaaatgactatgcagaacatgcagtttcagcaagagaccagagcctncattcagagcttaaccaatcagatgggacaattggctacccaattgaatcaacaacagtcccagaattctgacaagctgccttctcaagct

SEQ ID NO: 18897 - DNA, 433 bp, Glycine max
  unsure (1)..(433): unsure at all n locations
tctggtgggacatcttgacttgctttccaatcngacattctctacagattctgccttcnnctatnntcagagggggaatgcctctaacagcacctttgtcaatgattttcttcatgcctcttaagtgcagatgtccaaatatttgatgccatattttgacttcatcttctttggagaatagacatgtggaggagtaactggtttcttgaggtgtccataggtaacagttgtcctttgatctgctgcccttcattaggacttcactcttctcatttgtcaccaagcattctgactntgtgaagtttacattgaatccttcatcacacaactgactgatgctgatcaagttcgcagtcagtcccttcaccagcagtactttgttcagactangaagtccatcatggactagctttcccattccagtgatctttca

SEQ ID NO: 18898 - DNA, 350 bp, Glycine max
  unsure (1)..(350): unsure at all n locations
accttatctaggttggacctcggctggagttgaatacgtaaggctggagtttggctcattgcctgtcataggtttttnttaaagctcggctcggtttacataaaagtctggctttgcccacgagcctatttaaaaacttgcttaaagacgtctttgattaattaattattttaaaatctagtgaaatactaacttaaaaaagaaacttataaaatttcgtataagcaatgtacaaattcaaaaataattggataacaaaatcatattgaattcaagtcgttaaagtacaaagtatatcaaaagaaaataaaaagagcataatattaaaaaatgtatggattagagatgat

SEQ ID NO: 18899 - DNA, 376 bp, Glycine max
  unsure (1)..(376): unsure at all n locations
agcttttattgttcaatttcgagtgtctcgatagaggatgcccctgaatcggacctccgaatgaaaagttatgaccatttgaatttctcgagagctacctttgttcaatntcgtgcgtctcgatatattatgcgcctgaatcggacctccgagtgaaaagttatgaccatttgaatttctcgagagcttccgatgttcaatttcgagcgtcttgatatactatgcgactgaatctaacctccgtgtgaaaagttatgaccatttgaatttctcgagagcctccggtgttcaattttgagcggctctaactgtgatgcgcctgaatcagacatccgagtgaaaagtatggaccattgatttctcgagagctcccgtg

SEQ ID NO: 18900 - DNA, 290 bp, Glycine max
  unsure (1)..(290): unsure at all n locations
agcttttattatttttgccagctgcatcanaatgggaaacaactggaggtttttgagtctttgcctcttggcattgattgcatcaactcatgctcaacttcagcttggtttttatgctaataatcgcccaaaagcacagcaaattgctttgaaatttgttcatgaccatatccataatgcttcatcactaccaactgcattaataagaatgcactttcatgactgtttttgtaaggtacgtgcttcaatctttaagcttctgtcatttttacttaacacatacaatgtta

SEQ ID NO: 18901 - DNA, 227 bp, Glycine max
  unsure (1)..(227): unsure at all n locations
cacactgtattaacatgaagctgacgatttcaccaatccggatgaaagtatttgtgagtttggacttgagtgtttgtgagccaccttgatgtcaccctaacatcaagtgttggacctgagtgtgtagaagtgatctctattgntcagagagcaatctctggtgtgtatttgatttaattgtatacaccggagagtgattgagagggagtgagaggggttctcatatc

SEQ ID NO: 18902 - DNA, 277 bp, Glycine max
  unsure (1)..(277): unsure at all n locations
ttttgggggtggccatttcttggatggccttgattttctcaaggtccacttggaccccatttctaccaactacaaaacctaagaagactatattatctacacaaaaggtacacttctctatatttgcatagagggtgtttttcctaaggactgaaagaacttgcctgagatgtcctaagtgatcatctaggctcctactgtacactanaatatcatcaaaataaacaactacaaatctacctatgaaatccattaagacatgatgcataagcctcat

SEQ ID NO: 18903 - DNA, 186 bp, Glycine max
  unsure (1)..(186): unsure at all n locations
agcnttaaccaagangggatggtccatttcaagtacttgaaaagataaatgacaatgcgaacaagattggattgcctagtgagtataatgtgagtactacatctaatgtgtttgacttaactctttttgatgtagatggagaagccgatttgagaacaaatccttttgaagagggagagagtgata

SEQ ID NO: 18904 - DNA, 187 bp, Glycine max
taccacttgcacggtgctggaactacttcacatggacttgatggggcctatgcaagttgaaagcctaggaggaaagacgtatgcctatgttgttgcggatgaattctccagatttacctgtgtcaactatatcagagataaatcatactcctttgaagtttcctggagctgatctacaacttcatag

SEQ ID NO: 18905 - DNA, 383 bp, Glycine max
  unsure (1)..(383): unsure at all n locations
agctttaactttatttttcataagcactttgtgcttgtacattccaccgcaacgcacccttcttcaaacattcggtcataggacttgctatagagctaaaattctggataaagcgtcgataaaatgatgcaagaccaatgaaagatctcacctccgaaactgttgtacggctcggccaagtcttgatagcatccacttttgcntgatcaacggatactccatctttagacaccacatatncaagaaacaccaccctttcaaccaagatatcacacttttcccttctcccatagagttgttgtgctcttacggtctcaaatatttgtttcaaatgagtgaaatgctcctctatagattngctatacaccactatgtcgtcaaga

SEQ ID NO: 18906 - DNA, 303 bp, Glycine max
ttgctagagacagtgtcaatgctatgtatatggtttctttctttgtggcaccaaaggcttactcatatcagtgagaatgggctgaattgtttagccaagaaggatatgcttctacgattgaagaatgcaaatttagagaaatagtctcattgcatggttggtaagaaaaccaaagtatccttcaagaagaatcctccctccagaaaatctgagttgcttgaatcggtgcattcagatgtatgtgaccctttgaaggtgaaatcctttagtggtgcactttattcttgtaccttcattgatgac

SEQ ID NO: 18907 - DNA, 303 bp, Glycine max
  unsure (1)..(303): unsure at all n locations
gatgctcanaaacatcaatatctatcactccatcagtaggtctgcccagatatttgttaatcacagcatgggagaatttaacacactntcctctgacaaacaccttntgatactcatcactttttctgttagatatgtcagagggaatgttgacaatgaattccctgactaagccttcatagcaatctcccaacttgctgacagtcttcagcagtccagcagccttgatgaggtccatgatctccttgcaatccaatgcagctctttccagttctctttccaaggccagtcttcgttgataca

SEQ ID NO: 18908 - DNA, 392 bp, Glycine max
  unsure (1)..(392): unsure at all n locations
tatcttgtatgtcttggatcttcttcatcaatgaattcctttgcttcttgaggtttgattgcagcgaagtggagaaggagaaagatgaatggagatgccacttcaagtagaagatgagtctagaagaagttcaccaccataggaagccatggataagagcttgaaggtagaagaagatgaatgaagggagaggaagagaagagcatgaaatttagtgcctcttaagaagactgaactttgaagtttaattctcatatgatcaaagttgaaaaaatgcacacacaagacctctatttatagcctaagtgtcacacaaaattggagggaaatttgaatttctattcanatttcactcgaatntgtggagccaanatatcactaattatgattag

SEQ ID NO: 18909 - DNA, 279 bp, Glycine max
  unsure (1)..(279): unsure at all n locations
tagganaatgatcttagaggatttatatatgagcaacttgtgtactccaccctgggctgccaagatgtatcaggatctcacgacaatgttttggtgaccaaacatgaagagagaggctagtgagtttgtgtatgtgtgtatagtatgtcagatcgctaacatagaacatctgagaccctcatgtaagttgcaacactttgagatacccagaggaagtggaatatttttcattgatttcattgttgactacctaggacccccaaggtttcgatctatcta

SEQ ID NO: 18910 - DNA, 401 bp, Glycine max
  unsure (1)..(401): unsure at all n locations
gcttgtgattatcatgtagaggattcatcanaaggagttgaccacgaacaacactataagattcattcaaccccatgagaaattgcatcaacttgcgtcttttgttgtttgcttcacatgtgcaaatagcatcattataggatcctaactcatcccacaatttttttttaactttgtatagtatgcagcaactatcatttgatcttaagtaaggcaagcaatctctctctcgatctggaaaatgagtggtgcgttgctttgaaagaaacaattttgaagatcttcccaaacttcatgagcagtgtaaanaaaaataacactatctgtaatatcaggggtcattgaattaagaatcccatgacaaaccatatcattgcattnttcatgctacatagtcttct

SEQ ID NO: 18911 - DNA, 419 bp, Glycine max
  unsure (1)..(419): unsure at all n locations
agctntgagcttattcttacgacaataactnttgattcggatgtccgattgtgtcccgtattatatcgagatgctcgtaattgaaaatagaagctctgagcaaattcaaacgacaataacttttgactcgggtgtccgattgtgtcccgtagtatatcgagacgctcgaaattgaaaacagaagcactgagcaaattcaaacgacaataactttttactcggatgaccgattgagtcccgtaatatatcgagacgctcgtaattgaaaacagaagctctgagcaaattcaaacgacaataacttttgactcggatgtccgattgagtcccgtaatatatcgagacgctcgcaattgtaaacagaagctctgagcaaattcacacgacaattactttctactcggatgtccgattgagtc

SEQ ID NO: 18912 - DNA, 339 bp, Glycine max
  unsure (1)..(339): unsure at all n locations
tatcctctacgacaatcaactcggcggcaaaattcccggctctatcgggaaccttaagagccttcaagtgataagagcaggtggaaacaagaacctggaaggccttttaccacaagaaattggcaattgttccagtttggtcatgttgggtcttgctgaaactagcctttcaggttctctacctccaactcttggcctcttgaaaaaccttgaaaccattgccatttacacttccctactctcaggtgaaataccacctgaacttgngtactgcacaaggcttccaaacatatatctttacgagaactccctcactggatccataccaagcaagttggg

SEQ ID NO: 18913 - DNA, 154 bp, Glycine max
tctggtgggacatcttgacttgctttctaatctgacattcatttcagattctgccttcttctatgttcagattgggaatgcctctagcagcacctttgtcgatgattttcttcatgcctcttaagtgcagatgtgcaaatctttgatgccatat

SEQ ID NO: 18914 - DNA, 372 bp, Glycine max
  unsure (1)..(372): unsure at all n locations
tgagcgaatccaaacgacaataactgtgtactcggatgtcttattgagtcccgtaatatatcgacatgctcgaaattgaatgttgaagctctgagcacattcanacgacaataactttttactcggatgtctgattgagtcccgtaacatatcgagacgctcgaaattgaatgttgaagctctcagccaattcatacgacaataacttttttctcggatgtctgattgagtcccgtcatatatcgagacgctcgaaattgaatggtaaagctctgagccaactcatacgacaataacgttttactcggatgtctgattgagtcccgttacttatcgagacgctccgaattgaatgttgaagctctcaaccaa

SEQ ID NO: 18915 - DNA, 393 bp, Glycine max
  unsure (1)..(393): unsure at all n locations
agcttgaattttatgttgatttgacagagagaaatacttgtagcttgttgaagttactagaatttggtggtttgctataagaacttgacattgtcttggtggttgagatgaaccaacataaatntgatgtgtcttattcttttttatttctcttttgctatttgatctgttagggtttgaatttgatctttattatttaaaaactttgtttgttttacaaagatttgaaactatcatcttatttgttntgcaaaagtctgatatctgttttgttaagtcttacttcacaagacaataactntattantttacgaaaaaattatttttttatgaaaattacaattcaatcttatttcttgtaatatttatttttgcaatattattatattgtat

SEQ ID NO: 18916 - DNA, 381 bp, Glycine max
  unsure (1)..(381): unsure at all n locations
ntagcttccactcgtaagaccatatgccactagaccagtctattctagaatatagaaaataaacttcatggtctcgaatacatgtagcgtgcctaaactntgaggtgtaacatcccaaaaataatctaataattatctagataaagatatttaaatatatcttttattacacgacaagatagattaaataatttaaatatatcatataatgatttttatttcgaacagaggttactataataatatataagatttggtaacgataaattaacgataatagaaagtatagataaagaaggatcatttaacagattgcaaattacacacaattcttaatatatggttgacagtctttctcttagaacacacacataaaggatc

SEQ ID NO: 18917 - DNA, 346 bp, Glycine max
ttcgaatggtcttatacttttcactcggatgtccgattcgcgggcataactcatctagatgctcgaaattgaacatcggaagctctcgagaaattcaaatggtcataacttttcacacggatgtccaaatttaggacataatatatcgagacactcgaaattccacaacggatgtactcgagaaatttgaatggtcataacttttcacacggatgtccgaatgtgggacataatatatcgagacgctcgaaattgcgctacggaagcactcgagatttcgaatggtcataacttttcacacgaatgtctgattcgcggacataactcatctagacgctcgaaattg

SEQ ID NO: 18918 - DNA, 316 bp, Glycine max
tatgaagagagaacaatttagagagtgatcgaagactttcaaatggatttccactgaatttattcatagagagatcgagatatcttaatgatgaaagttttccaaatgatctaggaagagcaccaccaattgagttgttggaaaaaagtaacgtgtcaatatttttaaatgccccaatatgatctgtcagattgcctgaaagtcgtgaactctgaactgcaagtcttgtgagtccatgggaaatacaaggagcaagaatttctaaaagttcattaacctgttggttgagtttgagatatgataaatctatcaccct

SEQ ID NO: 18919 - DNA, 349 bp, Glycine max
  unsure (1)..(349): unsure at all n locations
gcttagctacacanccccctataatagctaagctcacccncatgatataatacatgaaatacttaaaagtccctactacaaagactactcaaaatgcctcgaaatacaaggctataaccctatactactagaatggccaaaatacaaggcccaaacaaaggaaaaacctattctaantattacaaagataagcgggctcaaacttagcccatgggctcggaatctacccttangctcatgagaaccctaaggccttcccttggatctctggcccaatctacttggtgtctattatccaatgcccttgtggngtaagatngcatcattccctccaccttggaaaggattt

SEQ ID NO: 18920 - DNA, 252 bp, Glycine max
  unsure (1)..(252): unsure at all n locations
ttatgttgcanatatttacaatagacctcctcaacctcattatctaaatcaaccacagtttatcaattatgacctttccagcaacagatacaaccctggatggaggaatcaccctaacctcagatggtccagcccttatcaacaacaacagcagcctgctccttccttacaaaatgctgctggcccaagcagaccatacattcctccaccaatccaacaacagcaacaaccccagaaacaaccaatagttga

SEQ ID NO: 18921 - DNA, 380 bp, Glycine max
  unsure (1)..(380): unsure at all n locations
agccttgaatttatcttttctatgtcttgaattgaacctaatctaattatcaaatattataaatcacatttcgttgtgggggaatgtgaggctcanagaacattgtgtattttccatctctctttgcagtgcatatgatagagcggctattaaattccgaggagtggaggcggacattaacttcaacattgaagattatgaagatgacttgaagcangtgatcaatttgtgaatatttatattttgttntatcttatcttgaacagtcacacctcatacgtataggatcaccttatctcctacagttagtgctatnttttctgtcttgaagtactctcatgaatttgttaaatgcaatgttaatagatgagcaatcttac

SEQ ID NO: 18922 - DNA, 439 bp, Glycine max
  unsure (1)..(439): unsure at all n locations
ntaaaggatgttntatcagtacaaaaatatatgtntttgctctggtaattgattaccaaatattgtaatcaattactagagatacattaccagagacaaattacataaaggctttttcaaaaagaagtttctcttttgaaatttgaattttaaatgctgtaatcgattaccacttgtatgtaatcgattacctgtgatgaaatttcagaagttaacattgaaaagtcgtgacctttcaaaacataactatgtaattgattaccaagaagctgtaatcaattaccagtgagagaatttttgaaaaatattctgaaaagtcacgtgtctntcaaaagttttgaaaagccaccaaggacctataaatacgtgacttgtctacgaanaacattagagttnttcattagaacctangtgacatattctctcaaaacaaatcatt

SEQ ID NO: 18923 - DNA, 276 bp, Glycine max
  unsure (1)..(276): unsure at all n locations
ttacctccttgagataagaagctagagcttagctacacacaccccactaatagttaagctcacctccatgccaaaatacatgaaaatacaaaaaagtctctactagaaagactactcaaaatgcccttaaatacaaggctaaaaccctatactactagaatggccaaaatacaaggcccagaagaagganaacctattctaatatttacaaagacaagtggacccaaccttgacccatgggctcaaaaatctaccctgaggttcatgagaatccta

SEQ ID NO: 18924 - DNA, 353 bp, Glycine max
agctttcacttacatacgaagatttgtgagtgacaaaccatgttgtcattcttgacaagataaccaagaggcatgtccatgtatactccctcaatcaaatcactattgaaaaacacattatttaaatcaagctgaaacatgttccaatttctgtgaggtgcaatggaaagaaacactctcattgccgtatgcttggcaacaagtgagaaagtgtccaaaaaatcgatctctgcttgtatgttgttgtgtgtaaccttttgcaacaagacgagccttgtatctatcaatggagccatctgctctatacttgaccatataaatccatctgcaactgatgggtctattatcgggtg

SEQ ID NO: 18925 - DNA, 402 bp, Glycine max
  unsure (1)..(402): unsure at all n locations
agcttccagtttattttcatattntcagctcctagtttatagcttataagctttcaactaacttattaattagttttaccaaattaaatttgttagtttataagttttacctagtttataaatgaaaaaataaattaagctaaaataaaatgttcgtcttttatgtattttttgtttctactctgctcctctaatttagnctcttataactttcgggaagataatagaaaatggaatcgattgaaacatagtagaatgggtgaatcatgaatagaaagaattaacaatatgtcactctattattaaataatgtagatgtataatataatggtcaaaaattagattccatcatttgataaaaggagttgaataaattatctttttattcattatgaaaaataa

SEQ ID NO: 18926 - DNA, 456 bp, Glycine max
  unsure (1)..(456): unsure at all n locations
agcttgaagttatatgttaaaataactnngtgtattctttttacattctcttgcaacagcctncacttgagnnttatcattanannagtgttcagggaatnntaatccaaacctattaannattgatcccaataanaattgatnaatcgagcanaattgttatanaaaaatacctaaacacttcaatgcnagttcggttttgtgattctcatgttcaaaattgaactgagtcaaattggaaacgtaactaaatttatattagtcttattttgtcttctttntttactgcaattcctatatatttatcttgaaatacaatttaaccttatttgaacttatattattatttctgaataacttgaagataatntgcaatntagtctgtgatttagatcaagttgtggttttatgaccagaattaatagtttgaaatgatatttctgtatatgcattatg

SEQ ID NO: 18927 - DNA, 364 bp, Glycine max
  unsure (1)..(364): unsure at all n locations
tatctntgatttcccgaaaactcacctcgttttatctgtgcattccaaattctcaaaagagtcagtcttgtggcatatcanattgcattacctccgtgtctttctaacctccacaatgtctttcacatgtctcatctccataaatatatccatgatccatctcacatggtcgaattagatgaagttcaagtgaaggagaacttgacatatgaaacatttgctttgaggatcgaggataggcagacaaagcacttaagaacgaaagagattttattggtcaaggcagtctggggaggtgctttacgataggaggcaatttgggaactagagattcaaatgcgagaagcctatcctgtcttgtctg

SEQ ID NO: 18928 - DNA, 360 bp, Glycine max
  unsure (1)..(360): unsure at all n locations
agctnttctatgaatcctcttacatgagaagaanataatgaaatgagnttttttttttaaactaaaattaattctccattaactaaatattaattaatttatagatatcatatcatctatgagagaaattatactaaagaggctcttatcctcttttgggggggttatttgctctatctagctcttgttctctatatctttgcaaataccttctcaatggctctgcatagtcgtcaaaaccaagcgaccccaaggcccagcatatgtcatccccgttcactgtcttactcctttccttcctgcacttctccgacgcctcgctggttacaaagcttatgaactccgacacgcactcttgca

SEQ ID NO: 18929 - DNA, 364 bp, Glycine max
agcttcatttaatccatgccgacatctgtggtcccattttgcctccctcacacagcaacaaaaggtacgttctaagctttattgatgattattcacgtaaagcttggatctactttttgcatgaaaaatctgaaacaaatactgtgtacaaaagcttcaaagcctgtgttgaaaaggaagctggtatctaaattgtttgtctaagataagatagaggtggtgaattcacctctaaagagtgtacagaattatgcactaatcaatgtatctctaggcaattgacgggtgcctacaccccacaacagaaaggagtcgccgaacgcacacaccgaactatcatgaatgttgtacgagctgtattaca

SEQ ID NO: 18930 - DNA, 402 bp, Glycine max
  unsure (1)..(402): unsure at all n locations
tcgatggagaagaataaagcgcgagcaaaatagggctcgcaatctaatattntacaatgtatgtacaacatcggttatcaatacaaaaccgatgttaactaaatgatgttaacattaacatcggttttctacaacaaaccgatgttaacctatcttatgttaacatcggttnttctaanaatcgatgttaacatactgactttaacatcggttattcaaaaaccgatgttaccagtttcatgttaacatcggtttttaaacaactgatgttaacataagctaattaacatcggttttctaaaaaaccgatgttaacaaattcacattaattacaattatgccaccatgttaacgttaacatcggntttgaggaaaaccgatgttaaacgtacgatgttaaat

SEQ ID NO: 18931 - DNA, 405 bp, Glycine max
  unsure (1)..(405): unsure at all n locations
ttgcttgcgtagtacaactcataatcaaattattaaatgttttttgagaaaaaccaaattcatttagcgtcaatttcaagaagccccaatcaactttatcatagactttctgcaaagtcaattnttagcctaagattcccttttttattatgcatgtgatgggcaatctcctgagctattatagcattatcagatggatctctattaggaatataaatgctttgcaaagggccaataagactatcaaaatgaggttgaatgcgattaacaagcacttcagagataattttgagatcgacattgcataactgatgggcctaaactcttttaaggaagaagggcaatccactttggggatagttacaataagagtttcaaccaaacttggattgatggagcctaaag

SEQ ID NO: 18932 - DNA, 283 bp, Glycine max
  unsure (1)..(283): unsure at all n locations
ataatataggatgattatggatccaacatataccttagtcatgatcaatgcagcatggtaacaaaggaaatgtatggaaactcactangtgccagctattcttgtgctcacatgggtttctgcctcatcattaagcttagcctagtccaaatcaaatatcttggggttgagatctttataccacaacacattattggccttgatgtccctatgaacaatcttcatgttggactcttcatgaaagtagccaaacctatagcgataccaacacgaaatctatgct

SEQ ID NO: 18933 - DNA, 238 bp, Glycine max
ctctgcagggaatctaagtgtgaagcatgctattctgcacacgattgtagctgccaactgggtacccactaatcatacttccactgttgccacaagttcgagtaaatttctgtatgctgtcggaaccacatccaaatattatctggaaactatatctttgatcaaactgtcaaacattcataatctttagctatcaaataagccattgccttccctactgtattgtgtgcattatgac

SEQ ID NO: 18934 - DNA, 337 bp, Glycine max
  unsure (1)..(337): unsure at all n locations
tttcttgcatttctctcttcccttanacttcttttatttattgctatgtatctcttgctttaaagaagttaattatgaattgtcttttgagtaattcatgttaacggtgcattgttaatccgaaaagagagagtgatagtttaattgaggaatagtctttgtatcttaattcaacccctttctttcttaacgttactgaagccatttgtcaacatcctattcttgacaactcgcttctctaagaagaccaactctcctgccttgataaatgaagccccatgaacgtctatatttttacttgaaaacacagtcatcaaatgtcctttctctttttgaa

SEQ ID NO: 18935 - DNA, 339 bp, Glycine max
  unsure (1)..(339): unsure at all n locations
tatctntctttcaattcacacgacaataacgttntactcggatgtctgattgagtcccgtaatatatcgataagctcgaaattgaatgttgaacctctgagcaaattcaaacgacaataactttttactcggatgtctgattgagtcccgtcatatatcgagacattcgaaattgaatgttgaagctctgagccaattcaaatgacaataacttattactcggatgtctgattgagtcccgtcatatatcgagacgctcgaaattgaatggtgaacctctgagcgaattcacaccacaaataacttttactcggatgtctgattgagtcccatattata

SEQ ID NO: 18936 - DNA, 416 bp, Glycine max
  unsure (1)..(416): unsure at all n locations
tgctaacccatggaagctcctaatatctcccacactntntgagatgggccattcatggatggccttgattntctcaaggtccacttggaccccatttctaccaactacaaaccctaagaaaactatattatctacagaaaaagtacacttctctatatttgcatagagggtgtttttcctaaagactgaaagaacttgcctgagatgtcctgagtgatcatctangctcctactgtacactanaatatcatcaaaataaacaactacaaatctacctatgaaatcccttaagacatgatgcataagcctcataaaggtgcttggtgcattagtgagcccaaaaggcatcactagccattcatacaaaccaaacttggtcttgaaagcangtatccacttatcaccatttttcatcc

SEQ ID NO: 18937 - DNA, 325 bp, Glycine max
  unsure (1)..(325): unsure at all n locations
tcaacctagaggagacggaccattccaagtgttggagaagatcaatgacaatgcctacaagattgacttgcctagtgagtataatgtaagtgccactttcaatgtgtctgatctatctctntttgatgcagatggaggggccttggatttgaggacaaatccttttcaagaagcagggagtgatgaggacataaccaaggtcaaggaccatgnaacacttgaagggcccatgaccagaggcagacttanacaagcccaacacgtcatagagacaaagctagtcatttgtatagctgccattgatgatgattgaaggcccaagtgg

SEQ ID NO: 18938 - DNA, 482 bp, Glycine max
  unsure (1)..(482): unsure at all n locations
taagagtntaaccatgcgtagatatcctatggtaatatctcatttttttaccatttgaatagtgtaaaaacactacccaatcgcctaacaaaacaataatactgtctaccacacacacatgaaaaattgngatgttaccgtgtttgtttgacattctttgtcttcctaggagtgtatgtaataatatctttgtagcacacatgagaccgatgttgtttggtaagagaaaaataagattctagtaaatttagagagtttgataagcactgtgctacttcaacaaatataaagatatgtgaaatttggtgaagggatatcttcctcaaatacttgtcaattaatataagcatacaaaatanaattaaatataatataaatcataaaatattctactaattataagatcaacattggataataagagtaagaacacattattatttaaacagttgaaagataaaagtaatattattaaagaacta

SEQ ID NO: 18939 - DNA, 404 bp, Glycine max
  unsure (1)..(404): unsure at all n locations
agcttgagtatagagacttctcaagctatttatcttctctctcagagagactctctcattggattgataggaatgaaggctcctacccttatttatactactctacctccacaatgaatggtggagattacttgtatcatanggtggagattaattctctagaatgttgcacacattctatgagtctttacactcttctactcttttccatatccttccataaggttccacacatctctagaatattctagaggtttccacattcttccacaagcttctagagagttctacactactctagagttctctaggacgttctaaaaaattctatactnttccagagatgtctagaattttctagaacttctccaattaagaaaggattccaacaattgtaatgtatc

SEQ ID NO: 18940 - DNA, 386 bp, Glycine max
tttcttgtgtatccaataccctgatgaggatgtcccatatgttcttaaaactggactgatccatttgcttccaaagtttcatggtcttgcaagtgaagacccacacaagcatctgaaagaattccatattgtttgctccaccatgaaaccaccagatgtccaagaggatcacatatttctgaaggcctttcctcattctttagagggagtggcaaaggactggctatattaccttgctccaaagtccatcacgagttgggatgacctcaagagagtattcttataaaacattttccctgcttccaggaccacgaccatctgaaaagatattttaggcattacaaaactcagtggagagagcctatatgaatattgtgagagattta

SEQ ID NO: 18941 - DNA, 417 bp, Glycine max
  unsure (1)..(417): unsure at all n locations
ctagattcatcacttaccccaagcaatacacactgcaagctcttgtcatccagctntgttcttttctgatcaggtacatggacatgagttangcacccaaatactttaaagtaatctactntaggtttgattccactccacatctcttctggagttttatctttcactgtcaatgtgggactcctgtngagaacatgaactgtccattttgcagcttctggccaaaaagccttaagtacttgtttgtcacaaagcatgcaccggaccatattcataatggttcgattttacacttcgctacgccgttttgttgtggagtgtaagatgtngtgagttgcctgcttatgccatgaattntacaaaatcattaactcatttgaggtgaatcaccccccctatctgtgcgtaacaacatat

SEQ ID NO: 18942 - DNA, 443 bp, Glycine max
  unsure (1)..(443): unsure at all n locations
cttctacattcaacctacagtcttctcanatgtttatgtacatctttctagttgcattntcaccttatcagaagagactctgnaaagttaaaatacaactcataatgctttcaattgaatntgtaacaatcaccaggatggcatgctgattgcanaggatgagatctttggtccagtcaatccatattannaatcaagtaagaaaacaactagtgttagttaattactttgcagagaatggtattatactaccatacatgtgttgtgctttgtgcattaatttttgtgttgatgactccagggaccttggtgaggtagttcatagagcgaacaacacacgttactggcttgcggcaggaagtgtcacaaagaacatggacactgcaaacactttgacgcgggcactgagagttggaacagtttggataaactgctttgacaca

SEQ ID NO: 18943 - DNA, 369 bp, Glycine max
  unsure (1)..(369): unsure at all n locations
agctntctatatattcaaatggtcagagcttttcacacggaggaccgattcatgcgcgtaatatatcgagatgttcgtaactgaacaacagaagctctcgagaaattcaaatggtcataacttttcactcggatgtccaattcatgcgcatcacatatctagatgctcgaaattcatcaaccgaagctctatagaaatgcanatggtcataagttttcactcggatgtcacattcaggcgcatcacatatcgagacgctcagaattgaacaatggatgctctcgagatattcaaatggtcataacttttcactcgcatgtgtccaattcaggggcatcacatatcgagacgctcgatagagaacaacgg

SEQ ID NO: 18944 - DNA, 480 bp, Glycine max
  unsure (1)..(480): unsure at all n locations
tcaagaaaaagatggcctcagcanattccttatttccagaagggaattctatcaatagacctccaatctttaatggagagggttaccactactggaaaacccgaatgcaaatttttattgaggcaatagatctaaatatctgggaagccatagaaatagggccttatatacccaccacagtagaaagagtttcaatagatggtagttcatcaagtgaaagcataactatagaaaaacctagagatagatggtctgaagaggatagaanacgagtacaatacaacttanaagccaaaaacataataacatctgccctgggaatggatgaatatttcagggtttcaaattgtaagagtgctaaggaaatgtgggacactcttcgattaacacatgaaggaactacagatgttaaaagatctaggataaatgcactaactcatgagtatgaattatntagaatgaatgcgaatgaaaatattc

SEQ ID NO: 18945 - DNA, 309 bp, Glycine max
  unsure (1)..(309): unsure at all n locations
agcttcatcatttcatttcgagggtctcgatatattacgggactcaatcggacatccgagaaaaagttattgtcatttgtatttgctcagagcatcaacattcaatttcgagcgtgtcgatatattacgggactcaatcagacatccgagtaaaaagttattgtcgtttgaatttgctcagagcttccgtattcaatttcgagcgtctcgaaatattacatgactcaatcagacatccgagtaaaaaattattggtcgttgaattttctcanagcttcaacattcaatttcgagggtctcgatatatta

SEQ ID NO: 18946 - DNA, 447 bp, Glycine max
  unsure (1)..(447): unsure at all n locations
ntgagggatttcanacgacaataactntntactcggatgtctgattgagtcccgtaatatatcgagacgctctaaattgaatgttgaagctctgaccaaattcaaacgacgataactttttactcggatgtctgattgagtcccgtaatacatcgagaccctcgaaattgattgttgaagctctcagcaaattcaaacgacaataacattttactcggatgtctgattgagtcccgtaatacatcgagacgctcaaaattgaatgttgaagctctcagcaaattcaaacgacaatagcttttttactcagatgtctgattgagtgccgtaatatatcgagacgctctanattgaatgttgaagctctgaccaaattcaaccgacgataaatttttactcggatgtcttattgagccccgaaatacatcgagacgctcgaaattgaat

SEQ ID NO: 18947 - DNA, 382 bp, Glycine max
  unsure (1)..(382): unsure at all n locations
agcttgtttggttctcctttgccaatgtcaaatctgtaacctggtggaagccacagaacccaatgttttcttttgtcattctacttatgtagtagaatatagtataccagctccatttacaaagacttgaaaagactaaccattccttccatctttgaggtaaatngaccaccacattgttgcttcagttttgtcaaaatacttctctcatgatcatcattggcactcttgtcaaaaaggagccttcgagcaagcttcttcctacaagcaatcacgcaagaacatgtntgactattcttttgcaagcatcttacagtangaaaaaaggtaatgatgacactcaaattagccacagaaagcagaattcaatgatagactacca

SEQ ID NO: 18948 - DNA, 412 bp, Glycine max
  unsure (1)..(412): unsure at all n locations
ctatagcaaactcaagctntcaagaaattcaaatggtcctaacttttaactcggaggtttgattgatgtttataatatatcgacacgctccaaattgaacaatggaagctcttgagcaattcaaatggtcataaatagtcactcggaggtccgattcatgcgcataatttatcaagacgctcgaaattgaacaacagaagctttcaagaaattcaaatggtcataacttttaagtcggatgtccgattcaggcacataatatatcgagactcacgaaattgaacaacggaagctctcgagaaattcaaatggtcaaaacttttaactcggatgtccgattcaagcacataatatatcgagacgcgcataattgaacaacggaagctctcgagaaattcaaatggtctaactt

SEQ ID NO: 18949 - DNA, 414 bp, Glycine max
  unsure (1)..(414): unsure at all n locations
tggggatttattntaggacaaaactcagatacagacattctttttcataggtatttttggtgttcttcaattagaattggagttttacctatgtaatatatgttgatcttttatagaagattttattacgtggattatcaagatgaaactccaattctgatcggagaacaacactaaaaacacttaagaaactacacctaagttttgtcctttattttatagtaactttgttcataaagttactagaatgatcaataaactacaaatttgtggttgaataggaactgagacgtttcccaactctccaagccgaaatagcagcagctacaaatgaggctttagagaggttccgcgaagagagtaagaagacagctatgcggcttgtggacatggaagcttcctatctcactgtgg

SEQ ID NO: 18950 - DNA, 419 bp, Glycine max
  unsure (1)..(419): unsure at all n locations
tgtatacatgaatttgattnttatgatgctcanaacctatatgttgggaaacataaacttcatcttcagtgatccatttagggaaacactcttgacatccatttggtctaactntaaatccataacataagcataagtagtaatcttaccacttctagtctagctatcggtgcataagcttaaccaaagactatactgttttgttggttatagctcttgactactatccttgccttattcctagtgatcaaaccatgttcattcaatttatttttaaacactcatttagtgtaaatgatgttcatgtttttaaaataaggtattaattcccatatatcatttcttttaaattggttcaactcctcatgcatggacatcatccagaacttacatttgagtgcctcttctatagacaatgg

SEQ ID NO: 18951 - DNA, 391 bp, Glycine max
  unsure (1)..(391): unsure at all n locations
agcttgagtgcttntgctgcaggacaagctgcagcctttaagatgtttgaaacaattaaaaggaagccagaaattgatgcttatgacactactggtcggcagcttgatgacatccgtggagatatagaacttagggaggtttgctttagttatcctactagacctgatgaactgatattcaatggattntctctttcaataccaagcggcactacaacagctttggtaggagaaagtgggagtgggaaatccacagttgttggtttgatagagagattttatgatccacaggcaggtgaagttctcattgacagtatcaacctcaaagaattcaaactgaaatggatcagacagaanataggcctagttagccaggaaccagttctcttta

SEQ ID NO: 18952 - DNA, 384 bp, Glycine max
agcttattcttgtctgaggcatcttccaagtcaatatctttttcttccttgagttcatcatatatccaaaacggaaagtaatcattgcttgaaagttgatctggaagaggatctgagttcctccttctacttgccatttccatcaaaagctttccaaaactataaacgtcggccttatatgatactccaccaatatttttgtagtataattctggagctatgtagcccaaagttccaattgcttcaggtaaaacaagagacctatctttcacaggatgtagctttgcaagtccaaaatctgaaacctttgggatgaagctctcatctagaagaatattgtgtggcttgatatcaaaatgtagaatttgcacatcacaaccttca

SEQ ID NO: 18953 - DNA, 396 bp, Glycine max
agcttgttaatccatggaagctcctaatatctcccacactttttggggtgggtcattcttggatggccttgattttctcaggttccacttggaacccatttctaccaactacaaaacctaagaaaactatattatctacacaaaaggtacacttctctatatttgcatagagggtgtttttcctaaggattgaaagaacttgcctgagatgtcctaagtgatcatctaggctcctactgtacactaaaatatcatcaaaataaacaactacaaatctacctatgaaatcccttaagacataatgcataagcctcataaaggtgcttggtgcattagtgagcccaaaaggcatcactagccattcatacaaaccaaacttggtcttgaaagcgtttt

SEQ ID NO: 18954 - DNA, 270 bp, Glycine max
taatatcccccacactttttggagtgggccattcttggatggcctcgattatctcaggttccacttggaacccatttctaccatctacaaaacctaagaatactatattatctacacaaaaggtacactcctctatatctgcatagaaggtgttcttcctaaggattgaaagaacttgcctgagatgtcctaagtgatcatctaagctcctactgtacactaaaatatcatcaaaataaacaactacaaatctacctatgaaatccctta

SEQ ID NO: 18955 - DNA, 389 bp, Glycine max
agcttcttagtttcagatgatgcagatgggtttgtagctacctcatgcactcctctaatgactatggcatcatttctggcgctaaactgctgggagttggaggccatcttctcaattaaatttctggcttcagtaggagtcatgtctccaagggctccaccactggcagcatctatcatacttctctccatattactgagtccttcataaaaatattggagaagaagctgttctgaaatctgatggtgggggcaactggcacatagtttcttaaatctctcccagtactcatacaggctctctccactgagttgtctaatacctgagatatccttcctgatggctgtggtcctggaagcagggaaaattttttctaagaatactctctt

SEQ ID NO: 18956 - DNA, 429 bp, Glycine max
tcaagaataatggtctcatcaaactatttatttctcgaagggaattctataaataggcctcctatttttaatggcatgggttaccattattggaaaacccgcatgcaaatttgtatagaggctatagatttgaatatctgggaagccacagaaattaggtcctacattcccactatggttgcaggaaatacacccatagaaaaacctagggaagaatggagtgaggaggaaaagaaattagtttaatacaatttaaaattcaaaaatataattacatatgctttaggaatggatgaatactttagggtatcaaattataaaaatgcaaaagatatgtgggataccctacaggtaacacatgaagatacaacatatgtaaaaagatctaggataaatacattgacacatgaatatgaattatttagaatg

SEQ ID NO: 18957 - DNA, 412 bp, Glycine max
agttggggtcacttataatttaactcattgatttgtcaagaaaactattggaaaaacgagagtgtgtaatgatttttgttttttgtcttgtatgaacatcctatagtaaaatttacatttctctctatatgattaactttggattttgagtcataccttatccaaaactaggcatacatgactttttatactggtaaagtttataaaattttgttatatgataagtataagttatgcaatagttttataagtactctatagaaggaaaaaaatgtaaacttgagttttaatataaatttttaatcagataaatatatttatgtataaatttggtttgggttggattagattgaattttaaaatgaaatccaaaatctgattctatccaaaacatatgagtttgttaaatttt

SEQ ID NO: 18958 - DNA, 372 bp, Glycine max
  unsure (1)..(372): unsure at all n locations
tgcacacaagtttctccttgcctagcacttcanaaccttctggttgggtcatataaatgtcttcctctaaatccccatgcaagaatgcagttntaacatctaactattccaagtgaagattctttgtagctacaatgcttagaataactctgatggtagtcatctttacaattggagagaaaatctctatgaaatcaattccttgtttttgctgaaatcctttcaccataagtctcgccttgtatcttcttctaccatcaaattcttcctttagcctatagacccacttattctgtaaagctttctttccttctagcaatttaattaaagaccacatcttattcttctgaagggatgtcatctcatctttca

SEQ ID NO: 18959 - DNA, 403 bp, Glycine max
tatgctacaaacatttataatagaccctctcagtagcattaccaacaacagcagaataattatgatctttcaagcaacagatataatctaggttggaagaatcatccaaatctgagatgggcaagtcctccacaataacaacagcctatccctcctttccagaatgttgttggtccaagcaagccatatgttcctcctccaatgcagcagcagacaacaagcagctgaggccccttctcaaccttccttggaggagttagtgaggcaaatgaccatctagaatatgcaatttcagcaagagacaagagcctccattcagagtctaacaaatcagatggggatgatggctactcagttgaaccaagcttagtcccaaaattctgacaaatttccttcacaaact

SEQ ID NO: 18960 - DNA, 339 bp, Glycine max
  unsure (1)..(339): unsure at all n locations
tatgaccattcgaatttctcgagagtttccgttgttcaatttcgagcgtgtagatgagttatgtccccgaatcggacatctgtgtgaaaagttatgaccattcgattttctcgagagcttccgttgttcaatttcgagcgtctcgatatattatgaccccgaatcggacatctgtgtgaaaacgtatgaccattcgattctctcgagagcttccgttgatcaatttcgagcgtctagatgagttatgttcccgaatcggacattcgagtgaaaacttatgaccattcgaatttctcgagagcttnncgtggtcaattttcgagcgtctcgatatataat

SEQ ID NO: 18961 - DNA, 294 bp, Glycine max
acttatcacacggaagtccgattggagtgcataatatatcgagaccctcaatattgcaaaaggtagtcctaatgaaagataaatggggataactttttaaacggaagtctcaattcaagtgcatacaatattcggaagctcgaaaatgaacaatggatgctttcgagaaaattaaatggtcataacttatcacacggaagtccgatttaggcgcataatataccgagacgctcgatattgcaactcggaagcactcaagaaattcatgtggtgataacttatcacacggaagtc

SEQ ID NO: 18962 - DNA, 384 bp, Glycine max
  unsure (1)..(384): unsure at all n locations
gcactcagctatgtaggcaatcgtgatctttgtgggcctccacttaccaaaatatgtttccagggtggtaaacctaacaacacagagccaatagatgaagatggagatgagtttgcatttttgtcgtggctttacattggaatagaatctggatttgccacgggctttttgggattttgttgtgtcattttcttaatcagaaaatggaggcatgcatacttcaagtttctttatgacttgaaagaccaactttatgtcatggtggccatcaaaatgaattcttttcgttgaggtcggacacaaccatactggtaagtaaaacctttgattagttgaaatttcngtttttattatacaagataaacatagaccatattttaacat

SEQ ID NO: 18963 - DNA, 433 bp, Glycine max
  unsure (1)..(433): unsure at all n locations
tgtgcatccaataccctgatgaggatgtcccatatgttcttaaaactggactaattcatttgcttccaaagtttcatggccttgtaggtgaagacccgcacaaacatttgaaggaatttcatattgtctgctccaccatgaaacccccagatgtccaagaggaccacatatttctgaaggcttttcctcattcattagagggagtggcaaaggactggctgtattaccttgctccaaggtccatcacgagctgggatgaccttaagagagtattcttagaaaaaattttccctgcttccaggaccacagccatcaggaaggatatctcaggtattagacaactcagtggagagagcctgtatgagtactgngagagatttaagaaactatgtgccagttgccctcaccatcagaattcagaacagcttcttct

SEQ ID NO: 18964 - DNA, 397 bp, Glycine max
agcttgtattatagttaagagtcatcgagtcactataccattaactatgaaaaaaagtaatgatccttttgctttaatccattatgacgtatggcgtccatccccaaaatcttctatatatgggtatagatggatagcgatatttgttgatgattgcactccaacgacacgtattgacttgatgaaacaaggatatgatgtggtacacatacttgaacaatctcatactatgattcaaactcaatattcaaagaagactacgatccttcgctctgataccatgtataactgatatgatatttgcatatatctcaatcgcatcttacaaacggaaatatgttatatgtatatacacagacaaccctatgtctaattataactagatcacgataattat

SEQ ID NO: 18965 - DNA, 431 bp, Glycine max
  unsure (1)..(431): unsure at all n locations
tttctttcttttgaggatgagaccagtctttatccccaaatacatgggttttatttctaatatcaacccaactataacctggctacttgttcatgttgctaatttttatcatcttcctcaaacttcgtacatcttcccattgctactcttttgcgtaaatatttgaaagccaaacatgagccacactatttttaggttcagccttcatcaatttgtctgctgcaagattggccctttccatgtccccatgaattttacaagccccaagaaaagaacaccagccaaagacatgttatttataaagtcttctgcttctttaagctttccagctctacctagcaaatcaatagcacaactgtaatgctcttctntagggactaccccataaatcttttcatggaattaaagtagttatacccgtcctcaaccat

SEQ ID NO: 18966 - DNA, 383 bp, Glycine max
agcttgattgcaagttgctttgtctatatgcatcttaattcttctagatcccatcctaccattacaccaagtgagactagatccccttgaacagaggtgggtgagatcattctagacagaccaattggaaaaatcttcacaagattgcttgaggggaaggtagccaccaattctttcatgtgcccctgaaaccgcattgaaatcaccaatgtaaacccaaggtccaaggaagttgatcagcatagaagagagctcatgccataagattgctcttttaatgttggaggtggaaccataaatagtagctacataacatgaaatgttgttaatagaaactacaaaagacatgctttgatcagagatagctaacatagacaaggaag

SEQ ID NO: 18967 - DNA, 393 bp, Glycine max
  unsure (1)..(393): unsure at all n locations
agctttgagcaaattgtaatgacaataactntatacacggatgtccggttgagtcccgtaagatatcgagacgctcaaaatttagatccgaagctctgagaaaattgaattgacaataactntatacacggatgtccggttgagtcctgtaatatatcgagacgctgcaaattgaaaacggaagctcgtaggacattcaaacgacaataactttntactcggatgttcgattgaatcgggtaatatatcgagacgatcaaaattgagactagaagctctgagcaaattgagatgacaataactttatacactgatgtgcggctgagtcccgtgatatatcgagacgctcaaaatttagatccgaagctctgagagaattgaattgacaataac

SEQ ID NO: 18968 - DNA, 424 bp, Glycine max
tgaactatcaggaaggatggtggtctaatttgtagaacttttataattcgacatctagtacgaaccctatggtccgatgaagacacaactcatggtagacttcctggaagaattcgttgggaatgaccaaaccaccccagactggtggagcttctacgttgacggtgcatccaacgtgaaggggagtagggcatgaatcatctttgaaggccctggaaatgtcactctaaagcaagcccttaaatttaacttcaaagcctcaaacaatcaggccgagtacgaggcactcattgcaggtctaaaactagcaacaaaagttggggccataaagctctgatgctacacggactcgcatcttgtccaggggcaggttgccaactgataccagaccaaagagacaatgttgctcaagtactaccacatt

SEQ ID NO: 18969 - DNA, 386 bp, Glycine max
  unsure (1)..(386): unsure at all n locations
agcttcccatctctagcatccctcttgaacttcaaatcatactgatggaacttccatatgtacttcaatttcctcagattcctatagaacagagttgtgggtatgttctgaaagtaaatcccaaagtctaggccattctcatgcagagaatcaaagatggttttttgaggatacccttttgctaactgcctcttgatatgacttgttgaaccatgagaggttgctgagtacacaaaaagcctattgggttgtgttggaccaggaattgaagaanaccacctgtcaaaaacagcaaattccttaaccaaagcagcataaatcggcacagagtccggtttaaaccctttcatgacagtctcagagaggttgggagacatagacaatgc

SEQ ID NO: 18970 - DNA, 393 bp, Glycine max
tgtaaccgaggcatgctagacggtctttatatttacaagaaatccttccattgtaagcacaccacatatgaatgagtttatttttggaaatatcatcattaatgataaaaataaagatctatggacatacaaacaccatatatatacgcactgtaaacggccaagactttagctgatacaagtgtcatcttctatactctccctctctttctttatatatatgctgccagattgctcacttcgcaaacaaagaacattaatgtccgcttcatataaacaaactgttcactctgctgctgcttctatggacagttaccaaatctctacattttctcgttactcttcttaccctgtaatcattcttcacggacttccgaacccggacacttttcc

SEQ ID NO: 18971 - DNA, 401 bp, Glycine max
agcttcaaatctagcttttggaagagcttttgttaaaatatctgcactttgatcttcagttctgcagtaaattagtttggcttcaccttctctctgtgcttcccttaaaaaaaaacttgatcttgaaatgcttagtcctgccataaaaaacaggattatttgaaatggaaatagctacttgattatcaacaagaatctgtgtaggctccttttgttccatatgtaaatcagcaagtatacgccttagccaaataacttgattcacaactgcagtggctgtcatatatactgcagtgcttgtagcctttgtccacagcttctttggcaactcctttttatacaacatacaccttgtcatcttcatgatatttctattttcttctctcacttgtaccattcta

SEQ ID NO: 18972 - DNA, 416 bp, Glycine max
tgttgaaactaaggatggaatagtgatgcaccagaagaagttcatttaagattgtttgaagaggttcaacatggatcaatgtaataatgtagatatttccgtggaaggaaatatgatactggatacaggcgatcatgaagcttcagtagatgccacattgttcaagaagctagtgggatgcttgagattcgtctaccatagtagaccagaaatctcatatggatttggtcttggcagcagattcatgagtaatccaaaacagtctcatttggcagcagcaaatagaatcttgagatatctaaaaggaacacttaattatggcatattggttcctcatcagacagaaaaatgtgagctatacctcgtagcttattctgactcatactggtgagggggataagtggagagaagatcta

SEQ ID NO: 18973 - DNA, 329 bp, Glycine max
aaatcagccattattgaaccattatgaactctccaaccaccgggaccatctccggtggaagaatcattccaaacaacagcaacaacaatcttattttcaaaatgctattggcccaagcagaacatacatttcttcaccaatccagcaacaacaacagcaaccgccccagaaacagcaaacaggtgaagctccttcgcaaccttcccttgaagaacttgtgaggcaaatgactatgccaaacatgcagtttcaacaagagaccagagccttcattcaaagcttaactaatcagatgggacacatggctacacagttaaatcaacaacagt

SEQ ID NO: 18974 - DNA, 315 bp, Glycine max
  unsure (1)..(315): unsure at all n locations
ccttgtccgaaaagtcacttanaaccattttaaggtccaacgccttanaacggtcctctttgcttttatcgattaacatggaccgttcaaaagcataagatcaacacataactttaccgcttttgcaagaactatgtaggtctgagttcctcatcacanatcgaggatacgtangagcaaaagccccgcttttgtcgaccaccccaagagatcgttaatggtccaacgccttaacgtttctctcctttcaaaaaccaagagatcgttaatggtccaacgccttaacgtttctcttctttcaaaatcaaaagatca

SEQ ID NO: 18975 - DNA, 439 bp, Glycine max
tataaaactcagctttacatggatgtccgattcggtgacataatatatcgagacgctcgaaatcgaacaacggaagctctcgataaattcgaatggtcataacatttcactcggatgtccgattcggggacataatatatcgagacactcgaaattgaacaacggaagctctcatgatattcgaatgctcataacatttcacacggatgtccgattcggggacataacttatctagacgctcgaaattgaacaacggaagctctcgagaaattcgaatggtcataagatttcacacgaatgttcgattcggggacataatatatcgatacgctcgaaattgaacaaccgaagctctctagaaattcgaatggtcataacatttcactcggatgttcgaatcggggacataatatatcgagacgctcgaaattgaacaac

SEQ ID NO: 18976 - DNA, 325 bp, Glycine max
gatgatactgctaactctataattataaatcatgcttttgtattctaatatatttcacttcctgtatgctgcgcaaaatctcattcttactggtgtcaagtttcagaccttgcatgatgatgggactgtggaactatgggatatatccggtagctttgtgttttcagaaaatgatgttgggaaaatcatggcagcaacttctgttagtaactgcaagagctcacaatgcagtggttgtacaaagcttgactactcagctgactaatgagcacctttccaattttcaagtacctacttcctctgtctaatcttccctttcttttaa

SEQ ID NO: 18977 - DNA, 435 bp, Glycine max
  unsure (1)..(435): unsure at all n locations
agctcacattttnctttattctgnnnctttnggagctgncaaatgattggttgtaatccttttatgtagttatgtactatgcataatgccaaaggacaagtcatactattcagttttcaaaaggaataaccttaaacgtgcatcctatattgcattgnggtggggtggttaagtaggaaagagaaacataataaatacaaaaatatgataaagggatataatgaaataaaaaatgttaatacacattnttatgtatttttattattgattaaaatttattanaacgttagagattctatntattgttaaatgtatntaactcataattctattattnttaanaagttttaattaacaataaagaatattttaaaataatatatggatctttnttcacaataacaacaatgaaattcanacttaanatttcatgct

SEQ ID NO: 18978 - DNA, 414 bp, Glycine max
  unsure (1)..(414): unsure at all n locations
ttgaaaatataatatcttgatttctaaaatacccattgtctctccctctttgtaaacatcaaaaaggccaaagtgcgcaaaacatgaataatttaatcatacacaaagcataatttgtaaaacaaacatataagattctgatacatacataaagaaaaacatgaataaaaccaaattgaaatgcaaaccacttagtcatataacacanaccataaatatcatgttcagtcatactaagcaaatattaaaagaaatactaagttttcaaatgtcataataatatagccaaatacacggctagaaaacaaaatactaataataatagtaatgtctaaactgatagtggtggtggagggaaattaatgtagtcacgaatgatggtgaaatcttcttcaacctttgtgatccttgagt

SEQ ID NO: 18979 - DNA, 418 bp, Glycine max
aatcttatccaatatatgatatgtgccatgatacgaaccatattactatagtgagatggtagtgactacgatgatagtgacaatggtggtgatagttacactgacaataatggtgatgacactagtagcgatagttacagtaacaataatggtggtgacattagtagtgatgatggctgcgacaacgacaatggtaatgagtgatagcagcgataatggtggtgtttcttatggcgacaatggtggtggtgatgatggtggtaatgatggtggtgacaatagtagtaatggtgatggttaggatggtgacaatgatgacgacaatgatagtgatgagtggtgagacactggtggtgactatgatggatatgatggtggagacaattgacgagtgacaatgatgtgatggggttattat

SEQ ID NO: 18980 - DNA, 439 bp, Glycine max
  unsure (1)..(439): unsure at all n locations
tggaacanatatattgagctcttggtccccttagagattgtgtaaatatgtctcctactttatcattagaactaacgaattcagtaataacttccttagaaagaactttctcctggacaaaatgacaatcaatctcaatatgtttaattctctcatggaatactggattaaaagctatatgtacggctgcctgattatcacagcatagcttcatttgttgagtatctccaaacttcaattcttcgaagaagttgtttaatccanatgagctcacaagtggctacagccatagctctatattcagcctctgcactagacctttgcacaacatttgcttcttactctttcatgagacaagaatttctccaacagacacacaatatgttgaagtggacgcctatcnatggtgatcctgccatctgcttgcaaatccactatt

SEQ ID NO: 18981 - DNA, 294 bp, Glycine max
cttcatcaatggagtcctttgcttcttgaagatcaatgacagtggaatgcaaaaggaggaaaggtgattggagatgccacttcaaggagaagagagtcaagaacaagttcaccaccatatgaagccatggataagagcttgaaagttggagaaaatgagtggagggagagggagagaatgggcacgaaatttatgcctcgaatgaagtctaaaatttgaagtgtaatttctcaaatgatcaaagtagaaataatgcacacaaaaagcctctatttatagcctaagtgtcacatg

SEQ ID NO: 18982 - DNA, 432 bp, Glycine max
  unsure (1)..(432): unsure at all n locations
tgcatgatttacatctccctctntctcaagcaaattcttcttgatatcatcaaaatcttcatgatttattaaagaatttgaaaataaagattttgaattattttgtgatgaacatggtattgaacataatttttctgcaccaagaactcctcaacaaaatggagttgttgagaggaaaaataggtcattggaagaaattgcaagaactttattaaatgatacttctcttncaagtatttttgggctgaagctgtcaatactgcatgttacatcatgaatagagccttgataagacctattntaaagaanaccccatatgagttatttaacggtagaaaacctaatatttctcatctacatgtttttgggtgcaaagtgcttgtacttaataatggtaaagataatctangaaaattcgatgcanaatctgat

SEQ ID NO: 18983 - DNA, 413 bp, Glycine max
  unsure (1)..(413): unsure at all n locations
tgtcaaagaatccaacctctcatggtagaagcaaacacatagaaacaagatttcactatcttagggatcaagtgaacaaagagaaactgaaagtggagtactgctacacatttgatcaacttgctgatattttaaccaaacccctcaaaggggagaggtttaaaaatgtaaggggcataattggcttgatgaacttangagatcagaataagggagggtgtgagagtttaattnttgtttgtgtggggtagaattgtttgtgctttgaatataagagagagtaacagaatttttaaattcttgtataagtactagcctaagtgtgagnggttatttactctgttttgcttgtataaanggcatacatacatcttaataaagaggatttattcattctatcattttcagtctct

SEQ ID NO: 18984 - DNA, 303 bp, Glycine max
  unsure (1)..(303): unsure at all n locations
tgaaattgatcaacggaagctctcgagatattcanatggtcatatcttttgacaagaaggtcagattcaggcacataatatatcgagacgctcgaaattaaatagcggaagctgtcgagatattcanatgctcattacttttcactcggaggtccgagtcgagcgcataatatatcgagatgctcgaaattgaacaacggaagctctcgagaaattcacatggtcataactgttgacacggaggtcagcttcacgcgcataatatattgagacgctcgatattgaacaacagaagctctcgag

SEQ ID NO: 18985 - DNA, 391 bp, Glycine max
  unsure (1)..(391): unsure at all n locations
tatgcatccaataccctgatgaggatgtcccatatgttcttaaaactggactgattcatttgcttccaaagtttcatggccttgcaagtgaagacccgcacaaacatttgaaagaatttcacattgtctgctcaaccatgaaacccccagatgtccaagaggatcacatatttctgaaggcttttcctcattcattagagggagtggcaaaagactggctgtattaccttgctccaaggtccatcacgagctgggatgaccttaagagagtattcttagaaaaaattnntcctgcttccaggaccacagccatcangaaggatatctcaggtattagacaactcagtggagagagcctgtatgagtactgggagagattaagaaactatgt

SEQ ID NO: 18986 - DNA, 363 bp, Glycine max
  unsure (1)..(363): unsure at all n locations
aaataagccctccatcagtgggaccttaagcttcattggataatttcttcatttggttatgatgaaaaccccatggatcaatgcatataccacaaggtcaatgagagtaaaatatgttttcttgtttcatatgtagatgatattntacttgcagtcaataatcagggtttgctaaatgaggtgaaacaatttctctctaagaattttgacatgaaggatatgggtgatgtatcttatgtcattgacattaatattcatagagataaacctcgaggtattgtaggtctatcacatgaaatctatattaacaacaatttagagagatttangatganagaatgctcaccaagtgtcgctcccatt

SEQ ID NO: 18987 - DNA, 380 bp, Glycine max
  unsure (1)..(380): unsure at all n locations
agctttgaatttactattcaatggagttgacaagaacatcttcagactgatcaacacttgcacagtggccanagatgcatgggagatcctgaaaatcactcatgaaggaacctccaaagtgaagatttccagattgcaactcttggctacaaaattcgaacatctgaagatgaaggaggaagagtgtattcatgacttccacatgaacattcttgacattgccaatgcttgcactgccttgngagagaggataacagatgaaaagctggtgagaaagatcctcagatccttgcctaagagatttgacatganagtcactgcaatagaggaggcccaagacattngcaacatgagagtagatgaactcattggttctcttc

SEQ ID NO: 18988 - DNA, 409 bp, Glycine max
  unsure (1)..(409): unsure at all n locations
agcttatgagttatctaatcaagattcttgattgctcttaaagttgtaacatgtggtctgactagtctccactttctaggtaaacttcgtaagattttatcaacatgatcataattatcataatgtatacctagagagcggagctcgttcagaatgatttggaagtttccaaacatggtttgaatatcttctccctcttccatattaaagagttcatacttatgtgtcagaaggctcaacttgttacgttntacgttagaggacccttcgtaggtaatggataaggtatcccacatttgtttggcgcttttgaagttgtgaactttggaatattcttgcgcgttagttgataagaaatatagacttatgatcatccatccatttgtccttggggatcttgttcttctga

SEQ ID NO: 18989 - DNA, 388 bp, Glycine max
  unsure (1)..(388): unsure at all n locations
ttacgaagctntctgggccttgcgggcttttataggagatttatcaaggggtatgcttcgatagcttccccattggtggcagcaaccacggtggagcctttccagtggaccgcggcggctcagctcgcatttgacctcttgaagaaagccttgttcgaaaccccggtacttgccttgccgaatttctagctaccatttacagtcgagaccaatgcttctggggtgggcatgggtgcaatcctctcttagcagggccacacaattgcatattttagcaagccatttttgcctaagcttcaacgatcgtccacttatgtccgagaattgttcgcagtgatggcggcggtcaagaaatggtggcaatacctcctcggtaaccggttcatca

SEQ ID NO: 18990 - DNA, 445 bp, Glycine max
  unsure (1)..(445): unsure at all n locations
tctaatttactacattcatgcaagacttaattggtttcctttnttaacaaattgaacattttgtaaagacaagggcttaattataattgaaaaaaagaagattgtgtttaattaattaattaccaaaggtgaaggagctgaacattatgcctaaagaatcagagagctctcggtaactcttgtacatcttcaagtccactttgcgaaggtaaggtgctccatccatgctaactttgacaaagcttgcattagggctgctgttcttctcgctctcttctccaacgctcttttgcacagccaacatgttcttccggaaggaccgcacaggtggccaacccaccacctgcgtcctacacatttcaactcatcaatatcactctatatattatgatcaattaatacgcatcatgaacatatatggcaatcatataacgaagttaaaata

SEQ ID NO: 18991 - DNA, 333 bp, Glycine max
  unsure (1)..(333): unsure at all n locations
ctaaaaaatcctatatttctagggtaccctacctatattatggagccctaaatacaaggcccaaaaataatgaaaccttaatctaatatttacaaaagatagtgggctcgtacttagcccatgggcccaaaatctaccctaaggctcataaaaaccctagggccttctcttgcatctctggcccaatctacttggagtttctatccaatgcccttgcggngtaagattgcatcattccctccccctagaagaggatttgacctcaaatcccgaggctcttgaactttgggctttttttctcacactatanaagaacaaaacatatgtatagtg

SEQ ID NO: 18992 - DNA, 307 bp, Glycine max
  unsure (1)..(307): unsure at all n locations
tggaaaccaacatttaagatatgataagattgttagtttaaggtaatgattgaaattaaatttaaaaatatattcgattttatagttataaaaaatattgtaacctacatttaaatttagactattatcagattgctagtgtaagataatgattgaaatcaaatttaacaatatattacatttggtagttataaaaaatattgaaaccaaaatttaagatttanaatatatctattaattcatatgttctaattnttttacgagtatgtttttagagnaaaaaattcatttaatttatttacaaaat

SEQ ID NO: 18993 - DNA, 462 bp, Glycine max
  unsure (1)..(462): unsure at all n locations
agcccanncgttaggccttaattttgggaacaatcncgngnattggcaaagaagacatcatatgccaagggaacaatttcctcctatcactggaggtatatacctaggttaagagcgaggttgattcatatttctaaaaatttgagacaaaagttgacctaatacgcttctacaatcttgtcaagataagttgcatcgaggatgatgaagtcgtccctatatacttgtaaggtctcaataactatatatacccccgaaagaaaactacttctttgacaaagacggtgttgcactattagaaattacactttcaacatcggttatttagggcattctacatcggctctaanaccgatgttgaaagtgatgatgttgaatgtatcatcgttaacatcggtttttaaaaaccgatgttaacatanatatgataacatcggttttctaaataatcgatgtaaacac

SEQ ID NO: 18994 - DNA, 386 bp, Glycine max
  unsure (1)..(386): unsure at all n locations
accataagagccttagatattngttngatcaaaaagagcttaacatgaggcagaggagatggttagagttcctttaagattacgattttgagcttagctatcatccaggtaaagccaatgtagtagctgatgccttaagtagaanatcccttcaaatgtctgctttgatggttagagacttggatctcttanagcagtttagagacatgagtttggcatgtgagatcacctctaatagcattaagttgggtatgttgagagtcaccagcgaactcttgagcgagattcgcgagggtcagaagtctgacccattcttgtcaactcagttagagtccatagtcgcanggagagagagtatttttagagtggctactgatggagtcttg

SEQ ID NO: 18995 - DNA, 406 bp, Glycine max
  unsure (1)..(406): unsure at all n locations
nttgttttcaatgacgagcgtctcgaaatcctacgggacactattggacatccgagtgaaaagttattgtcgtttgaatttgtttagagcttatgttttcaattacgagcgttttgatatcccacgggacacaatcggaaatccgagttaaaagttattgtcgttagaattttctcatagcttccgttttcaattacgagcgtctcgatatcctacgggacacaatcgaacatccgagtcaaaagttattgtcgtttgaatttgctcagagcttcagttttcaattacgagcgtctggatatattacaagactcaatcagacatccgagttaaaagttattgtcgttngactnttcatagagcttctgttntcaattagagcgtcttcatatattacgagactata

SEQ ID NO: 18996 - DNA, 399 bp, Glycine max
  unsure (1)..(399): unsure at all n locations
ttatcattttactanattcaaattgncataacatttcactcagatgtctgattcggagacataatatatcgatatgctagaaattgaacaacggatgccctcgggaaatttgaatggtcataacgtttcacaccgatgtccgattcggggacataatatatcgagatgctcgaaattgaacagcggaagctgtccagaaattcgaatggtcctaacttttcacacagaagaccgattcggggacataatatatcgagacgctcgaaattgaacaacggaagctctcgacaaagtcgaatggtcataacttttcacacgatgtccgattcgcagacataactcatctaaacgctccaaattgaacaacggaagcaatcgacaaatttgaatggaataaca

SEQ ID NO: 18997 - DNA, 306 bp, Glycine max
  unsure (1)..(306): unsure at all n locations
ntgaccattcgaatttcgagagtgcttccgttgttcaagttcgagcgtgtcgatattttatgtccacgaatcagacatccgagtgaaatgttatgaccattcgaatntgtcgagagcttccgttgttcaatttcgagcgtctcgatatattatgtccccgaatcgaacatctaagtgaaatgttatcaccattcgaatttctcgatagcttctgttgttcaatttcgagcgtctagatgagttatgtacccgattcgaacatccgagtgaaatggtatgaccattcgaatttctcgagagcttccg

SEQ ID NO: 18998 - DNA, 411 bp, Glycine max
  unsure (1)..(411): unsure at all n locations
agcnngnncattttctttatcccatnngaactntnnggnctttntcagtaagttcatgatcggcctagccttctcagctatccaaggtagaaatcttatcaaagaggctatgcgtcctgtgagtctttgtatctctttgaaagtcttcggactcctcatctcaatgacgacttgacatttatctagattagcttgtatgcctctttgggaaagcataaaaccaaaaaattntcctcctccaatcccaagaacacatttttagaggttaagtcgtatgtatgtttttggatttgtgaaatgatctcggctaggtcctcaacatgggacttgactccatnggatntgaccactatctcatcaacgtacacctctatatttctacgaatnntatctttgaagatcttatccatg

SEQ ID NO: 18999 - DNA, 248 bp, Glycine max
tacccagctggccttgaatcagatatccgtgcctatcgcaaaggtttgtgggttgtgctcctttggtgaccaccatacagacctttgcccttccatgcagcaacctggagcaattgagcagcctgaaacttatgctgcaaatatttacaataaacctcctcaacctcatcagcaaaatcaaccatagcagaacaattatgacctcttcagcaacagatataaccctggatggaggaatcaccctaacc

SEQ ID NO: 19000 - DNA, 433 bp, Glycine max
  unsure (1)..(433): unsure at all n locations
agctttacaattttgttttaaatccaagcccataaataatataaaatctagataagataagataagatctagatgaaataatatctagatgagatcaaatctagataagataagataagataagatctagatgaaataatatctagatgagatcaaatctaaataatatctagatgagataaaatctagataagataagatctgatagaataaaattgtctgctcttttcaagtccaagcccaattccggattcaagcccaattgcttataattctcctgaaattaaatcanaaacacaaaattagtccagtaggtccaattgataaaactgcatattanattgacaattaagcctaatcagtaattaaaatgatgacaaaaagggttaagaaatatgagaaaatgatgacacatcanatcccctcacactta

SEQ ID NO: 19001 - DNA, 294 bp, Glycine max
tatagcttactgattatccacaaaaagcttcactgcatcactatccttgattcttaattcttgtaataatgtgtccaacgagacagctaggcaagcactcattgtagctggaacatacttagcttcacatgttgataaagccactatggattgcttcttagaactccatgatattggtgttgcaccatacatgaatatgtaacctatagaactctttctgtcatctctgtctcctccccaatccgcatcaatatatcccactaattcctctgagctgatgctgtctatatttgg

SEQ ID NO: 19002 - DNA, 273 bp, Glycine max
  unsure (1)..(273): unsure at all n locations
attttctcaaggaaacctggattaccttttctttctcgggctcttcagcattgctcaaagaaccttctgatactttccccttttgtgattgtaacataaccatcntctacaattaacctgcaatgtacacactgttgacccttcaacgaatgagctntaacagaaagttcagtacagcgtccatctaatctccaagctcggagggtaacaaaacatgcactcanaccaccaagatccangccactggctcgaacacatncattcaatccaaca

SEQ ID NO: 19003 - DNA, 461 bp, Glycine max
  unsure (1)..(461): unsure at all n locations
caagcttgatcttttattctatatctgacagccaatgggtgagtcccgtccaggtagtcccgaagaanaccggcctcatcatgataaaaaatgagaaggaggagctgattcctattcgggtgcagaacaggtagagagtctgcattgactataggaggttgaaccaggtcaccaaaaaggaccattttcccctgccattcattgaccagatgcttgaatgcctggcaggtaaatctcactactgtttccttgatggttnttctggctatatgcaaatcactattactcctgaggatcacgacaacaccacattcaccagccccttcggaactttggcctatagaaggatgcctttcggcctgtgcaatgcccctggtaccttcaagcggagcatgattagtattttcagtgattttgtagacnattcatagaggtgttatggatgatntcactgatatgtg

SEQ ID NO: 19004 - DNA, 417 bp, Glycine max
  unsure (1)..(417): unsure at all n locations
tgtcgaccttgctctagcctctggagaaatttttgaaggagaatgtttcaagtacataaaggaatgttntgaaaatggcacattgcatctcattgggctactgagtgatggtggagttcactccagacttgatcagttgcaggtgattatttggggttggagctgtttttccttcatgtgtattcagtttattctttctaactaactacttttgtacagttgttgcttaaaggagttagtgagcgaggtgttaaaagagtccgtgtccatattcttacagatggccgtgatgttctggatggctcaagtgtggggtttgtggaaaccctttgaaaatgatcttgcaaactcgcgcgcanaaggtgtcgatgctaggatagcatcacgtggaggtcgtatgaatgtcacaatggatcg

SEQ ID NO: 19005 - DNA, 429 bp, Glycine max
  unsure (1)..(429): unsure at all n locations
agcttgacatttatctggttcgcatngngnagcagattgatagcgtgatctgtggatcgagatggcggaaggtttgtaagtggttgaaacaggcatgagtatttcgtaagtaactcagaaatctcgggtaagatgggtggtgttgtagctgattgtgtgtttgtttccactctaatatggaagaaggtgctagaggggctcctatgtagaagacgacgcagttgcgagggagacacgggttcacctatttgctcacgttccccctgtaactccacaagcttaccctcagtgatgaatttcatggatggagacgtgtagtctgtcagaaccggtcctaatgttntgagccattcgactcccagaactacatctgtgccacataagggtaggatgtgaaagtccaccatgaacgtatgctcctgcacctgt

SEQ ID NO: 19006 - DNA, 441 bp, Glycine max
  unsure (1)..(441): unsure at all n locations
tgtttacacctaaatacaatcatggtattnatactataaattaagattatattctaacattggaaaatttttacataattatctaatcataattggaaaatttttacataattatctaatcataattggaaaaattctacataattatctagtcataattcattatatatagcataaattttttgacttttaaaataatttaaacagttatttaattatataattaaatgataatataaaaatatttcacattgtatcagcattaacctcctgcttccggcttttgtgtacaacatggagtctttaattttccatcgattatgcggctgatactttgccacacataaatgtataagaaatatctttcagatgttgactagtagttgattcattattttacgggtccagattattctgaacatccattccactggtgcaatg

SEQ ID NO: 19007 - DNA, 276 bp, Glycine max
acaacgagatgatgcgctccatgagagggtggatcaaatggagaatagagatcataatgaagaagaaaggaggagaagagggaatgatggtgttcctagacaaaaccgaattgatggtattaaactcaacattcctccatttaaaggaaagaatgatccggaggcctacttggagagggagatgaaaatagagcatgttttctcatgcaacaactatgaggaggaccaaaaggtgaagcttgccgccacggagttttccgactatgctcttgtgtg

SEQ ID NO: 19008 - DNA, 439 bp, Glycine max
  unsure (1)..(439): unsure at all n locations
agcttgngtgtcntgtttataacttcacaagagatatttgaaaaaggtattacaaccatttctctatctctttctcttatttntatatccttatgttttcatatgataagaagaanaataaattgaattaagaaaaaaaattgatcataatgatttatccctttaggtataatacaataccaaaattgaaatatttatagcatattaggtctacaatttttattcttacaatcttaaaaaataatcattctcattatgtatgtcttcctagatccaatatgcaataaatatatcaattttagccttccaccatatctaaaggaataaaccatntaataataatgactatgcaattatatgtgaatgataaaattagtttgtgggtacataatcacttatanaaatcatacanttttatattttaatttaacctataaat

SEQ ID NO: 19009 - DNA, 314 bp, Glycine max
  unsure (1)..(314): unsure at all n locations
tgttgccattgaactcatgtgctacaaccaagccatgtttgggtttgcaccctatggtccttattggcgccaactaaaaaagattgtaaacttagaaatcctctccaatcgccgagtagagcaactacagcacgttcatgtctcagaagttcaaagttcaatcaaagagctcttcaatgtttggtcaagcaaaaagaatgagtctggctatgcgttggtggagttgaatcaatggttntctcatttgacattcaacacggttcttcgagtggtcgttggaaagcgacttttcngtgctacaactatgaatgatg

SEQ ID NO: 19010 - DNA, 385 bp, Glycine max
  unsure (1)..(385): unsure at all n locations
ttctaaatgataggctcagaatgcagaagaagtagcaatcaatttaataatgttctttatacatgcaagacaaaattgattgcaataataaatgagataagggaagagagaaatataaactcgatttatactggttcggccactccccgtgcctacgtctagttctcaagcaacccacttgagattntcctttctctttgtaaaacccttttacaaagtttgaaccacacagggacaacccatcccttgtgttcagaaattcttacaacttaagagaccctcagtctcttaatcaatctctttgattaagaagaagaagaagaagaattctctcttttaagagaaagataatacaatgaagttccataaactcttaatagatttg

SEQ ID NO: 19011 - DNA, 338 bp, Glycine max
tctgttctcaattacgaacgtctcgatatattacgggacacaatcggacacccgagttaaaagttattgtcgtttgaatttgctcagagcttctattgtcaattacgagcgtctcgatatattacgggactcaatcggacatccgagtaaaaagttattgtcgtctgaatttgctcaaagcttctgttttcaattacgagcgtcctgatatattacgtgactcaatcggacatccgagtcaaaagttattgtcggttgaatttgctcagagcttctgttttcaattacgagcgtctccatgtattacgagactcaatcggacatccgagtaaaaatta

SEQ ID NO: 19012 - DNA, 394 bp, Glycine max
  unsure (1)..(394): unsure at all n locations
aaatgtttcaaacttttatggtcagtgtaaaccacaaagggcctgcccaacagatagtgcctccagcgtggaatagctaacactaaagccatgagctccttttcatacgcagattttgataaatcgccctctgatcaagctatgctaactaaagctataggctgcctctgctgcatcaaaacagcaccaattcctctccccgccgcatcacattccacttcaaacagaatagagaaatcaggtaacactagtactggagctatagtcatgatctgcttcagatgattganagcctccagagcatcttttccccaaataaagttattcttcttagtcatttcagtcaacgggttagcaattgtaccataatcctttgataatttctgtataaccc

SEQ ID NO: 19013 - DNA, 323 bp, Glycine max
  unsure (1)..(323): unsure at all n locations
ccaaacgcacccttcttcaaacattcggtcgtaggacttgctataacgctaacattctggataaagcggcgattacatgatgcaagaccaaggaaagatctcacgctacgaactggtagaaggctcggccaagtcttgatagcatgcacttttgtttgatcaacggatactccatctttagacaccacatatccaagnacaccacactttcaaccaagaaagcacactnttccctcttgccatagagtnttcgggctcttagggtctcaaatatttggttcanatgagtgaaatgcccctctatagatntgctatacaccaat

SEQ ID NO: 19014 - DNA, 343 bp, Glycine max
tgtcctcggtgacgaagacaattgaataagccccttcgagcttttcacaggcgtcaacgattctcaaaatgaagggtctgtgtttggaagtggcgatgaggtggagaacaacctcggtgtcggaggtagtgttgaagatggacccgctgtcctcgaggttggttcggagggtgcggtagttgacgaggttgccgttgtgggccacgccgacggagccgaagcggtagccggcaacgaagggttgcacgtttttgagcatggattggccggcggtggagtagcggacgtggccgatggcgaggctgccggggagctggtccagcttcgactggttgaacacgtc

SEQ ID NO: 19015 - DNA, 236 bp, Glycine max
tctatagaaggttcgttcctaatttctctacaattgcatcacctctcaatgagctggtgaagaagaatgtggcatttacctggggtgaaaaacaagagcaagtctttgctttgctcaaagaaaagcttactaaggcacctgttctagctcttcctgactattctaagacttttgagctagaatgtgatgcctctggagtgggagttggaactgtattgttacaaggtgggcaccct

SEQ ID NO: 19016 - DNA, 401 bp, Glycine max
  unsure (1)..(401): unsure at all n locations
tgtcttataagctaaaatctacttatatacttaacttttatagatatcctctcatctaacttttccaaaagttgaagcaaataaattaatttaacttcttatagataaatttatccaggatgatcttgttatgtatttcttctttgggagattgtaagattatccttaacttacaatntgaatntatattctgaattatgtgagttatatataagtggtgttatgtttgataatggatttgtttattttagctctaaatatattnttattcttgtatcttttttagtctttataaaatatgtttattttatttttgtgttntagatagtactttgaacagtaaaaaatattctaaacaacgaaataaagactatttaaaacactttacagggacaaaaatg

SEQ ID NO: 19017 - DNA, 450 bp, Glycine max
  unsure (1)..(450): unsure at all n locations
tcttctccatttgatcacgcgatcttatatgatcatctccaccaccccaaaggaacctacgttgtatgcgcaccaatttgtccaccacccttatgggtaccctgaaaaaagaaaagaaataaattggaatagaggttaggattgattttataagagtgactcttcccccanaagatatgtgtctctgtttccactttgctagtttcctctcgtacttatagattattgngtcccacaactgacacctccttggatttgccccagtgggcatccccaagtaaacaaaagggatggacagcaggctacaattcaagtaattggctgcattntgcttccacgactccgacataccaatngatccgaatctgctttttgcannaattattgagacctgacaccaattcaaaggtcctcaagatggctttgatcaccctgatgttctncattgat

SEQ ID NO: 19018 - DNA, 411 bp, Glycine max
  unsure (1)..(411): unsure at all n locations
ttagcttttcntttcccttganacacnngagggacccgaggtcattatgaatgacaaattccttgtgataaaggtagtgttgccatgttttcacagcccatattaatgcatacaactccttatcataagtagaatagttcaaggtaggaccacttaacttttcactaccataagcaatcggatggccttcttgcatcaacacagcctcagtccccacattcgaagcatcacactcaatntcaaaagattgttgacagtcagacaacgcaagtatggaggcattagatagctntttcttaagaacattgaaagcatcttcttgattctctccccattcgaaaccaacattatgctagagcacgtcattgacaggtgctggcaatgtgctaaaatccttcacatatcatctat

SEQ ID NO: 19019 - DNA, 445 bp, Glycine max
  unsure (1)..(445): unsure at all n locations
gcttctatggaggctggctctgtgagcttcaatgaggtcctttttgttgatttttcaccatggatatgcagcggaagataaaggagaaaagctgataggaggcaccatccactagggaataagccatggaaaaaagagcttcaccaccaagagagtgtcttggataagaagattagagaggaagcttcattggaggaaaagaaagaaagagaaaggtgggggtgatgcaatcctacccnccaagggcattggatagaagactccaagaagattgggacaaagatgcaagagaatgccctanggttctcatgagccttanggcagatttcgggcccatgggctaagtatgagcccacttatctttgtatatattagactacgatgtcattatatttgatccttgtatttagggctccatattgtagatagggtaccctagaaatat

SEQ ID NO: 19020 - DNA, 343 bp, Glycine max
  unsure (1)..(343): unsure at all n locations
tgaataacggaagctcttgagaatttcaaatggtcataacttggcacactcgggtccgattcaagcttataatatatcgaagacgcctacaattaaacatcggaagctctcgagaaattcgaatggtcataattttccaaacggatgtccgaatccggcgcataatatgtctagacgctcgaaatcgaacaacgaaaactctcgagacattcatatggtcataacttttcctcggatgtccgattcagacgtatcacatatagagacgctcgtanatgcacatcggaagctcttgtgaaattacatggtcataacttttacacggatgtccgattcaggcgca

SEQ ID NO: 19021 - DNA, 413 bp, Glycine max
  unsure (1)..(413): unsure at all n locations
agcttttttgctctatttataggagctgacaagaatatcttcagacttatcaacacatgcacaggggccaaagatgcatgggagatcctgaaaaccactcatgaaggaacctccanagtgaagatgtccagattgcaactattggctacaaaattcgaaaatctgaagatgaaggaggaagaatgtattcatgacttccacatgaacattcttgaaattgccaatgcttgcactgccttgggagaaaggatgacagacgaaaagctggtgagaaagatcctcagatccttgcctaagagatttgacatgaaagtcactgcaatagaggaggcccaagacatttgccacatgagagtagatgaactcattggttccttcaaactttgagctaggactctcgatagggctgaaag

SEQ ID NO: 19022 - DNA, 327 bp, Glycine max
  unsure (1)..(327): unsure at all n locations
tcatgattgcctaagtgtggaccctcaagtgcaatcctttattcttctctttnttcggagccccatgaatgtcattgcctagcgctgttcatgtgtcctccaccttccagcttggtgctatatttcatgattgcctaagtgcggaccctcaagtgcaatcctccattctcccccttctttggagccccatgaatgttatttcctagcggtgttcatgtgtcctccaccttcgaatttggtgctatatttcatgattgcctaagtgcggaccctcaaggcaatactccattctcacactttcttggagccccatgaatgtcattgcct

SEQ ID NO: 19023 - DNA, 426 bp, Glycine max
  unsure (1)..(426): unsure at all n locations
agcttttatatatatgttcatagtgtatgctaactttgtctccttctttaattccaatccccactcggacttccaaaatagcagattctgaatatgataaaaagaaagatccacacattaatatttaagttttatagttattccaaccaactggggaaatttagattcatcatanatagattagtaggctaattttgcatatctgaccttgcagagtatataacagaatttgggccgatgtacttatacatganaaatgggtaggaagaaactaaagatatggaaagcaacatcacctgataaaggtatgtgattgactcaacggaagatcttctccaatggcaacaaggatntgccattcaacaagatcctgaccaacaatcatttttgaacatggatgatcaacctgtattaacatcccccatg

SEQ ID NO: 19024 - DNA, 394 bp, Glycine max
  unsure (1)..(394): unsure at all n locations
tgccccaatgattgcatactgtacaggcatgaattttatgtaatgtccaaatgccctatctatgggacttcacggtacgaagtgaacgatgaagaacacagtagttctgatgaaaactccaacaagggccccccaacaaaggttttgtggtatcttccaatcattccaaggtttaagcgtccttttgctaacgaggacgacgcanaanaccttacatggcatgcaaatggaaggatttctgatggaatggtccgtcatccggctgattgctcccagtggaagaagattgatggtttgtatccggatttcgggaatgagccaagaaatcttagacttggactagccagtgatggaattgaatcatatggcaccttaagcactcaacatagttcat

SEQ ID NO: 19025 - DNA, 398 bp, Glycine max
agcttttgttaatatattcgttctgaacttatcttggaattaattgtttcttaaaaaggaagtgtacacaaataacattttaagaaaaaaaaacttttaaaaaacaacttttaatgaagaaaagtaaaaataaaagaaaaagaaactgtagcaaaaagttaatattatgatcttttacttctatttctttttttccaaattataaaaattgaaggacacacaatttaaaaaattcaacttaataagtaatttctaacttaaaagatatttttattttctatgtctatattgttaaaaagtaatttagttaaatgcattcaaaatattttttatattattattaaatcttaaattgagatattaattaaaacttgtgacttcttataattattacttta

SEQ ID NO: 19026 - DNA, 297 bp, Glycine max
ccttatcgacgattaacaacagcttttaatgaaaggcaggagaatgaatgccccccgaaaccattaactggaaacgaagttcatgattgggtaaacgacattgtaaccgtgtttgggaagtcccatttgaagacatcatctcgcaacaacatgtggaagaaacgcttaatattctttgatcttccatactggtctgatctacatgtgcgtcattgtctagatgttatgcatgtggagaaatatgtgtgtgatacgttaattggctctcttcttaacattaaacggaatacaaatgat

SEQ ID NO: 19027 - DNA, 414 bp, Glycine max
  unsure (1)..(414): unsure at all n locations
agcttttgattccttcaaacaacaataactttttactcggatgtctgattgacacctgtaatatatccagacgctcgaaattgaataccgaagctctgagcaaattcaaacgacaataagtttctacttgtatgttcgattgactctggtaatatatcgaaacgctcgaaattgaagaccgaagctctgagcaaattcaaacgacaataactttttactcggatgtttgattgagtcccgtactatatcgagacgctcggacttgaatgccgaagctctgcgcanattcaaacgacaataacttttttcctcggatgtctgattgagtcccataatatatcgagacgctcggacttgaatgccttagctctgagcaaattcaaatgacaataaatntttactcggatgtctaag

SEQ ID NO: 19028 - DNA, 430 bp, Glycine max
  unsure (1)..(430): unsure at all n locations
acacatagaatactaagcttcggattcaagtccgagcgtctcgatatattacgttgantttgtctgacatccgagtaaaaaagttattgtcgtttgaatatgctcagggcttccgtaatcaatttcgagcgtctcaatatattacgggactcagtcagacatccgagtaaaaagttattgtcgttggaatttgctcaaagctgtcgcattcaagtccgagcgtctcgatatattacgggactcaatcagacatccgantaaaaagttattgtcatttgaatttgctcatagctaacgcattcaagtccgagcgtctcgatatattatgggactcaatcagtcatccgagtaaaaaagccattgtcgtctgaatttgctcatagcttcggcattcaagtccgagcgtctcgatatattacgggactcaatc

SEQ ID NO: 19029 - DNA, 370 bp, Glycine max
  unsure (1)..(370): unsure at all n locations
agcttttcntttgtntgattttcatacaacaacctgtctggtttggcgcctggtaccggtcaattcagctacttcaattacacgtctttcttgggaaaccctgacctctgtggcccctatttgggtgcttgcaaagatggggttgccaatggcgcacaccaacctcatgttaaaggtctctcctcttcttttaagctgctacttgttgttgggttgctactatgttccattgcttttgcttgggctgcaatattcaaggcccggtcactgaagaaggccagtggggctcgtgcatggaagttgactgcgttcaacgtttggacttcacttgcgatgatgttttgcattgcttgaaggaggataatattat

SEQ ID NO: 19030 - DNA, 453 bp, Glycine max
  unsure (1)..(453): unsure at all n locations
tgcanaccanatgctcaccactgctagacgaaaagttctttttgtggttcatataaacctcctgctctaaatcaccattaagaaagattggtttcacatccatttggtgcaactcaaggtcaaaatgaacaactaatgtaaagataataccaagataacctttattagatacaggagaaaatgtctgtgtaattgattcattctttttaagtaaatcccttagcaatgagtcttgccttatatctttcaatgttgcctaatgaatcccttttggtcttaaagacctatttactgccaatggcctttgccccattangcaactctacaaggtttcaaactccgttactctgcatgaaattcatctcatccttcatagcatcataccatanatntgactctttacaactcatggcttgctcanaagtttcgggatcattttcaactgcaatatta

SEQ ID NO: 19031 - DNA, 372 bp, Glycine max
attcttaatagaagaccttataaaaaaaatttaaaaaaaaatctttatgaactatggagaaaaagaaaactaaatctaaaatatcttaaagtgtgggggtggctaataaaaggtaatatccctattaataagaaatgaaaaattgaaaaaaatggtaattggattttggtggatattttttacataatactacttatagattcttagtttgtaattcagaagtaactgaaatttctaatgttactattatgcaatctagagatgttacttcctttgaaaatctttttccttaacaaataaatccgtaaatctttatatggtttgaaacaaactcccaaagcagtacacaaaaagttgattaagttattcttt

SEQ ID NO: 19032 - DNA, 401 bp, Glycine max
  unsure (1)..(401): unsure at all n locations
agcttttctctaaatttaaaatatgcatcaaacattgccatgaaggtacaagttgatgattcatggctatggaattgaagatttggccacttcaacacacatgccttgaagttgttacatgagaagaacatgatgagagatcttccaagcataaaggagaacaatgaagtgtgtgaaggatgtctccttggtaagcaacaccgatttccttacgcaacaggcggagcatggagagcgaaagatctattggagctgatacatacggacgtttgtggaccaatgaggacgccatcacatgagaacaacaagtacttcatactcttcattgatgacttctctagaatgacatgggtatattntctaatagaaaaatcaaaagtctttggagtattcanaaagtt

SEQ ID NO: 19033 - DNA, 450 bp, Glycine max
  unsure (1)..(450): unsure at all n locations
ttgtgccanaatcccaactcaccataaaccttgacccgggatgagaatttccatcgtcgccctcggaagaaaacaaaaaaagaaaaagaaagttcccgatcaaagatcggaagaaaacaaaaatagaaaaaagttcgcgatcaaagatcggaagaaaaaaaaagttaccgatcaaagatcggaagaaaccaccacttgaagtggtcctctccctttgattgccaaccaaaatcttgtgcactagtgacattctcgtcccgcactaaacaaaaacagaaaagggaaaggccaaaacactcagccaaatttctcaccaaaacaccattcccgaaaatgtcctattgatccatgatcatgcatgtaatctttgatttgataggaaatgattttcanaatcaagtcatgacatatctatgggttggaattaggataaaacacttgcctatgtga

SEQ ID NO: 19034 - DNA, 407 bp, Glycine max
  unsure (1)..(407): unsure at all n locations
agctngtaatattgaacaacggaagctctcgagaaactcaaatggtcataacttatcacacggacgtctgattcagccgcataatatatcgagaagctggaaattgaacaacggaagctctcgagaaactaaaatggtcataacttttcacacggaagtccgattcaggtgcataatatatcgagacgctcaaaattgaacatcggaagctctcgagaaattcaaatggtcataacttgtcacacgaatgtccgattcaggcacataatatatctagatgctcgaaattgaacatcaaaagctctcgagaaactcanatgctcataacttatcacacggatgtccgattcaggcacataatatatcgagacgctcgaaattgaacaacgtatggtgtcgagaaattc

SEQ ID NO: 19035 - DNA, 443 bp, Glycine max
  unsure (1)..(443): unsure at all n locations
tgaatttgacaacagaagctctgagaaattcaatggttattacttatcacacggaagtccgattcaggtgcataatatatcgagaccctcgaaattgcacaacggaagcccttaagaaagacaaatggtgataacttttcaaaccgaagtccgattcaggtgcataatatatcgagaagcttgaaattgaacaatggaagctctcgagaaattcatatggtcataacttatcacacggaagtccgattcaggcgcataatataccgagacgctcgaaatngcacaacggaagccctcaagaaattcaagtggtgataacttatcacacggaagtgcgattaaggcgcataatatatcgagaagcttgatattaacaacggaatgtgtcgagatattcaaatggtcataacttatgacacagaagtccgatcaggcgcataata

SEQ ID NO: 19036 - DNA, 378 bp, Glycine max
tcaagcttttatgcaacatatggagaggttaatgaaacaacgagatgatgcgctccatgagaggttggatcaaatggagaatagagatcataatgaagaagaaaggaggagaagagggaatgatggtgttcctagacaaaaccgaattgatggtattaaactcaacattcctccatttaaaggaaagaatgatccggaggcctacttggagtgggagatgaaaatagagcatgttttctcatgccacaactatgaggaggaccagaaggtgaagcttgccgccacggagttttccgactatgctcttgtgtggtggaacaagctacaaaaggagagagcaagaaatgaagagccaatggttgatacatggacggagat

SEQ ID NO: 19037 - DNA, 404 bp, Glycine max
  unsure (1)..(404): unsure at all n locations
tgaatcggacatccgtgtgaaaaggtatgaccatttcaatttctcaagagcttccgtagntcaatttcgagcttctcgacatattatgcgcccgaatcggacatccgtgtgaaaagttatgaccatttgaatatcttgagatcttccgatgtttaatttcgagcgtatcgatatattataagcctgaattggacatccgggtgaaaagttatgaccatttgaatttgcgagagtttccgatngttaatttcgagcgtatcgatatattatacgcctgaatcggacattcgtgtgaaaaggtatgaccatttgaatttctcaagagcttcgggtgttcaatttctagactctcgacatattatgcgcccgaatcggacattcgtgtaaaagctatgaccatttga

SEQ ID NO: 19038 - DNA, 401 bp, Glycine max
  unsure (1)..(401): unsure at all n locations
agctttatcttaatattttccaaatcatcaagaatcttgttgaaatcagccaattgttcagtggctgttcttgactctgtcatcttgaaggtgtacaattgttgcttcaagcatagccgatttgcaagggactttgtcatatacaatggctctagtttcaaccacattgaggttgttgtcctttctcttgcaacttctcttanagctttatctccaagcaatagaatgattgcacttcgggatttagcaatcatctctgatttctcctttgagcttagagattcaaacatcctttcttctcctttaagagcttctgcatagccatgttgaatcaagattgcttccatcttgattctccataacccgaagtcattttcccttanaacttctcaatatcgtac

SEQ ID NO: 19039 - DNA, 423 bp, Glycine max
  unsure (1)..(423): unsure at all n locations
agtattgctatattctgattattatgcctttttttatggttggcnttggctatattaattttatgaaaacagtctaagcaatgctggtgttttattggtttggaactaaacttaaacatggttgtgctacagattaagttggacaaggaaaagaaaagtctctcaattcgagagagagggatcggtatgaccaaggaggatttggataagaatctggggacgatagcaaaatttggaacttctggtatgtatgttgcggacattatcgctgaagtaatttttgtttgtgatgtgactgggaatatgttaattggagatgtgtgttatttcaacatttgttgagaagatgccaacaagtggagatctcaatctgattgcgcagtttggagtcagcttctactctgttatcttgtggccgactat

SEQ ID NO: 19040 - DNA, 407 bp, Glycine max
tgtagggttaaagtttcacgattgtcatgtgctcatgcatttattgttaaccgtggctatacgagacatcttgccaaacaaagtcaggttcacgataactcgcccgtgctttttcttccatgctatatgtagcaaagtgattgatccagtaatgtttgatgagttggaaaatgaggccgcaattatactgtgccagttggagatgtattttccccctgctttctttgacatcatgattcacttgattgtgcatctggtcagagaaatcaaatgttgtggtcctatttatctatggtggatgtacccggttgagcgatacatgaagatcttaaaagggtatacaaagaatctatatcgtccggaagcatctattgttgagaggtacattgcagaaaaaccattgaatt

SEQ ID NO: 19041 - DNA, 287 bp, Glycine max
  unsure (1)..(287): unsure at all n locations
tactaagctgaaatgacatcgaagctctcgacaattccaaggtataatantgcacacggaaggtcgattctagcgcatcacatatcgagacgctctaaattgaaaacccgaagctctcgagaaactcaacaagtcataaactagtcacacggaagtccgattccggcgcataatatatcgagacgctcgaaattgaaccacacatgctctcgaagaattccaatgatcataacttttctcacagaaatccgattctggcgcatcatatatcgagatggtctgaattg

SEQ ID NO: 19042 - DNA, 373 bp, Glycine max
  unsure (1)..(373): unsure at all n locations
agcttatataaccaccgtgctccacccagctcatcgagtaactcatccaccgtgggtatggggaagcgatcgcgcaccgtgatggcattgagagccctatagtctacacaaaatctccatgatccatctttctttcttaccagcaagactggggatgaaaatggactcgagctaggttgtataaaacctttcgcgagcatagtagctacctgttcttcgatctccttcttctgaaagtaaggatatctatatggtctaaccgttcaccgggttgagttaggcaatagattgatggtatgatctgtggatcgtgatggtggcanggtcgtgggaggttggaagagggaagcgtatntggtgatcaatgtattga

SEQ ID NO: 19043 - DNA, 449 bp, Glycine max
  unsure (1)..(449): unsure at all n locations
gatactgtganatagaaactaacctctacacttataatatcttctccaaattgngcactagattntgaaataatgtgtgatgcaagtgattatgcagtaagagcagttctgggtcaaaggaaaaataaaatgtttcatgtcatacactaacaagcaagggtttaaatgaagctcaaataaattatgccacaactgagaaaaaattgcttgcaatagtatatgctttggaaaaatttaaatcttatttgataggatctaaaattgtggttgttactaatcatgctactataagatatttgttagttaaagctgattctaaaccctgacttatccaatggattctattgttgcaagagtttgacttaaagatcaaggatgaaaatggaagtgaacattatgtggcagatcatctgtccagactgaccattgatgaggtgaccacacaataa

SEQ ID NO: 19044 - DNA, 438 bp, Glycine max
  unsure (1)..(438): unsure at all n locations
taaaaagaatcatgtaatagtagntntgtgatctctgatttaactaataacttgtgaatagcatattcactcttatctgattttttgntattatctattttaccctatttttcaaggtttttggcactaagaaggccctatggttgtttccattgttttcaaaagaggatttaaacaacatacctgcactaaggggcattgagttccctacacgttcggatgttgatgtatgaaagctgggtagcttataggtttgaacattnttttcattaaatgatgtcatttatgcttacttcatgacagtgcagcgtanggcatgaaagtaatactctacttgattgctgatgttttaaattatagaatngtccagtagatgtatatatgtaatgttcgattcagaatgtttgattattcttataatctaagaacctgtgatct

SEQ ID NO: 19045 - DNA, 406 bp, Glycine max
agcttctgttgttcaatttcgagcgtctcgatatattatatccccgaatcggtcttctgtgtgaaaagtttgaaccattcgaatttctggacagcttccgttgttcaatttcgagcgtctcgatatattatgtcccaaaatcggacatttgtgtgaaaaggtatgaccattcaaatttcttgagagcttccattgttcaatttcgagcgtctagatgagttatgtccgcgaatcggacatcctatgaaaaggtatgaccattcgaatttctccagagctttctttggtcaatttccagcgtctagatgaattatgtccgcgaatcggacattctatgaaaagttatgaccacttgaatatctcgaatgctttccgctgtcaatttcgagcgcctctatattttatg

SEQ ID NO: 19046 - DNA, 455 bp, Glycine max
  unsure (1)..(455): unsure at all n locations
ntggagtttccaagtgccaattcgtcttcttctttagtccagtcttcttctggcttcaattcttcagtgggctttccttctgtgtccagcatcttgggatgttcccagcctttgatgacagctttccaggttctgctatccagtgatttgaggaaggccaccattcttgctttccaatattcatagttgcttccatcgagaattggtggtctgttcactggtccgccttctttctccatgttcatcagaatttatctccctagatctcactctgtgatttccagtgttggctctgataccaattgaaattctgataccaggggacagatgtcgtacaagatgtcacgacatcacgcttcagaacatgcagattatatgtgtccgtatgaacagattatacaagtaaataacacaagagaattgtgtacccaggtcggtgctacctcacctacatc

SEQ ID NO: 19047 - DNA, 361 bp, Glycine max
  unsure (1)..(361): unsure at all n locations
tactaagcttggacatcaactaacttcattccctatgcatattactatctctttatatctttgacccgaaatagngggaatggtgagattatgataagataatattgaacatatcatgtttttaagagtggctgatgtaatatcttgcatgttggagtataagtataaggtgaagtcccacatcgggttaaaatggacaagttgagcaccatataagtgaggagaagacccataaaccagagccttaaggttttgggttaaagtgtggtgtcaagttcacttatgtggttgctcatgattcattgatgtaaatctctccaatttttacccccgctcagttgcacaacaattggtattaaag

SEQ ID NO: 19048 - DNA, 387 bp, Glycine max
  unsure (1)..(387): unsure at all n locations
agcttgtatgtttgtacatgaccaaatctttagttaatcgtctttacctaaagcagtctttgtattcgtttaaaatgcatgaagatagatcagtaggagaacaattgggtttggttaataaaatgattctagatcttgaaaatatcgatgtcaccattgatgatgaggatcaagctttgctattgctatgctttttgcctaagagttactctcatttcaaagagactttactatttggaagagactctgtttctcttgatgaagtgcatgctgctctgaatttaaaggaattgaatgaaagaaaggaaaagaagtcctctataagtggtgaagggctgacaacaagaggcangaccttcaagaaagatagtaaatctgataagaaga

SEQ ID NO: 19049 - DNA, 452 bp, Glycine max
  unsure (1)..(452): unsure at all n locations
tnccatagttctgaataaatcttctatagtagcttgaaatttctatatattctcttaattctttgactgtctcaggtcttggccactgttggattgccttaattttatcaagatctggatgcacccctttgacagaaatcaaatgtcccaagtaattgattttggttgttccaaagctgcattttttgtagttgaatgccaagttgcgttcttgtagtatttgtagtgtagtgtgcatgcattgaatgtgttctgaccatgtcttggtatagactaagatgtcatcaaagaaaaccaaaatgaacttcctaaggtgctccctgaaaatatcattcatcagattttgaaatgtggctggtgcattgctaagtctaaaaggtaacacaacccattcatagtgcccactatgggttctaaaggcacgtttatgaatgtcttcctctaccattctg

SEQ ID NO: 19050 - DNA, 425 bp, Glycine max
  unsure (1)..(425): unsure at all n locations
tgcaattgacataaagggacgtcccanaatgactggtacctcatggtcttcctccagatccatgaccacaaaatcagctggaaagaccttcacttttatcaaaacattctcaattaccccggaaggtcttgtgatggatcggtcaacaagttgtaaagtcattctcgtgggcatgatttccaactctcacaaccttctacacatggagagcggcattaagttgctactggttcccaaatcaatgagagtctttctgatgtgccatcattttcttctatttcttaaaccctttntgcaccattttaattactgattagtcttaattgtcaaattaattaagcagttttattatttgggcacattgagctaatttgatgtttntaatctaatttcatgaattaatgaaacattgggcttaatctgga

SEQ ID NO: 19051 - DNA, 398 bp, Glycine max
  unsure (1)..(398): unsure at all n locations
ntgatggtgtcgagaagaaatcacatgtctgtcatcatcttataaggggagaatgtgaatgtatgtatacatgattttgatgatgtcaaagaagaatttaacaaggctgcttcaaatgataagcatttgcttcaagaataattcaagattgcttcaacaaacaaagccttggttcaagattcactaaagaccaagccttgccttaaaacaaagtgctttcaagacatgcaaggctctggtaatcgattaccaggaagtgtaatcgattaccagaagacagggttgagaaatagcagttgaaaaaggttttgaatttgaattttaacatgtaatcgattaccatatgtctgtaatcgatcactagcaacggaactttggaaattcanattcaaaagtca

SEQ ID NO: 19052 - DNA, 368 bp, Glycine max
  unsure (1)..(368): unsure at all n locations
tctagcttattcgaagccccttgaattgattgtcgttcatgcatcctcaaccatngagtacggagccccatgaattgattgcctaacgctgttcatgcatccttcatcatcaaatcttattcggagccccatgaattgattgtcgttcatgcatcctccaccattcagtccggagccttacgaatagactgccaagctctgttcatgaatcctctatcatcaaatcttattcgaagccccatgaattgattaccattcatgcatcctccaccattgagtccggagccccacgaattgattgcctagtgttgttcgtgcatcctccaccatcttattcagagccgcatgaatngattgtcgttcatgca

SEQ ID NO: 19053 - DNA, 437 bp, Glycine max
  unsure (1)..(437): unsure at all n locations
tagaaannatgggtgaacatatgacatcnttcttatattttatctcaatttctctcttggttcttgttaagattatatatatatacacggacttactccactcaatgccaatgtctatctttaatgtttaaatttagagttgatctcttttctcaatttttcaattaaaattacatcaaagaagtcatatatttagagataatacattgtttattcttgataaggatgttcaaaactaattacacaagtgaggactaaaaattgagtcctgatacaaatttatccttgtacagaagtctttagtatcatctctaatgattctcaaactattaattatctcatcatttatgtcttgtataattcagatataagtcatgtaaatatatttctttgtcaaagctttccataatacttatctcaacactccatcaaatatt

SEQ ID NO: 19054 - DNA, 414 bp, Glycine max
ctatatggacgaaagtgcaaaactcctatttgttggtatgatgatggagaagcagtacttcttggacctgaaatgctacaacagattaacgaacaagtgaggttgattcgagagaagataaaagcatctcaggataggcagaagagctattatgatataaggaggaagccactagattttcatgaaggagaacatgtgtttttgaagggttctcccgtaaccggagtcggaagagctcttaatgctaggaagttgacacccaagtatctaggtccatatcaaattttgaagaagattgggcctgtagcttatcatatcgccttacctccgagtttatcgaatctgcatcctgtgtttcatgtctctcaactgagacggtacaacccagatccatcacatatacttgcagtggac

SEQ ID NO: 19055 - DNA, 435 bp, Glycine max
  unsure (1)..(435): unsure at all n locations
tagccctagagaggatggaccttttcaggttttggagaggatcaataacaatgcctataggttggacttcccagaaaagtatggagtcagcaccacttttaacatttctgatttaattccttttgcaggtggagctgagattgaggaggaggaactaacagatttgaggacaaatcatcttcaaggggaaggggatgatgcaatcctccctaggaagggaccagtcactataaccatgagcaagaggctccaagaagattgggctagagctgctgaagaaagccctatggttctcatgaacctcagggtagatttctgagcccatgggccaaggctgagtccaattatctttgtacatattagactangatgtcattatatttggtccttgtatttanggctccatattctangtagggtaccctataaatatac

SEQ ID NO: 19056 - DNA, 420 bp, Glycine max
  unsure (1)..(420): unsure at all n locations
ggaatcggacctgagtgtgaaaagttatgaccatttgaatttctcgattgtctttcgttgntcaatgtcgagcatctcgacatattatgcgctcgaatcgaacatccgagtgaaaagatatgaccatttgagtttctcgagagcttccgtggttcaattccgagcatctcgacatattatgtgcccgaatctgaccttcgtgtgaaaagttatgaccatttgaatttctcgagagcttccgatgtttaatttcgagcgtctcaatatattgtaagcctgaatcggagctcagtgtgaaaagttatgaccatttgtatttctcgacagcttccttggttcaattccgagcgtctcgacatattatgtgcccgaatctgaccttcgtgtgaaaagttatgaccatatgaatttctcgagagc

SEQ ID NO: 19057 - DNA, 445 bp, Glycine max
  unsure (1)..(445): unsure at all n locations
tgtaggccttggatcttcttcatcaatggattcctttgcttcttgatgtctgattgcagcagaatggagaaggagaaagatgaatggagacgccacttcaagtagaagatgagtctagaaaaagctcaccaccataggatgccatggataagagcttgaaggtagaagaagatgaatgaagggacaggaaaagaagagcacgaaatttagtgcctctaaagaagtctgaactttgaagtttaattctcaaaatgatcaaagttcaaaaaaatgcacacacatgacctctatttatagcctaagtgtcacacaaaattagagggaaatttgaatttctattcaaatttcacttaaatntgtggagccaaattttggagccaaaatttcactaattatgattagtgaatnttagttatggttcagcccactaatccaagatcaagtc

SEQ ID NO: 19058 - DNA, 439 bp, Glycine max
  unsure (1)..(439): unsure at all n locations
cttatagagaaaatgatggtatgattntctacccaatcttattatgttgaacagctatatattaaagaagtttaattattttgatgtgaaacatgtttctactccttataactcatccatcaagttaaagaaaaatttgagtaaaggattttcttcacataaatattctcaaagtattgattccttattgcatttgacaaacttctctaggccagacattgcatatgcagttggtagattaggaaggtatactaataatcctgatcattctcattggattgcattagaaagagtttttagatacttaaaaggaatcatcaattatgacattcattatacatgttntcctgcagtaattgaggggtttaatgatgcaaattggatttctgattctgatgaaacanaatcaacaagtggttactgttttactttagctagt

SEQ ID NO: 19059 - DNA, 439 bp, Glycine max
  unsure (1)..(439): unsure at all n locations
nttacctgcttatcttgacccanatttgcaacttcaagatctcctcactggtgtaagctttgcctcaggcggtgccggatatgatcctctaacagctgaattagtggtacataaccatatattcaaccttgttcatgctatctatcaattaataatttactttggcacatcttagagctaactccagtctattttctccttgtcacaagaatgtgatgtcattgtcagatcaattagacatgttcaaggaatacataaagaagataaatgaagcggttggaagaaacagaacgacaatgatagtatctaagagcatatacatagtatgtgtaggaagtgatgacattgccaatacttactatcaatcaccttttaggagtgctgagtatgatattccttcatacacggacttcatggcttcagaagcctcanaattctt

SEQ ID NO: 19060 - DNA, 440 bp, Glycine max
  unsure (1)..(440): unsure at all n locations
tgtccgcanaanatcactcaagaccgttttaaggtccaacgccttanaacggtcctctttgcttatattggttaaaatggaccattcaaagcataaaatcaacatataaatttatcgcttttgcaagaactacgtaggtatgattttctcatcacaattgaggatacgtaggagcaaaagccccacttttgtcgaccaccccaagagatcgttaattatccaacgccttaacgcttctctcatttcaaaaatcaagagatcattaatggtccaacgccttaatgtttctctcctttcaaaaccaagaaattgttaatggtccaaacgccttaacgtttctctccttttcaaaaatcaaaagatcgtttaaaaggtccaatgccttanacgacttttgttcggttaaaatatatcttgcgannaaacataaaaacaactta

SEQ ID NO: 19061 - DNA, 433 bp, Glycine max
  unsure (1)..(433): unsure at all n locations
tcttagtttcagctgatgaagatgaattcgtggctacttcatgcactcctctaacgacaatagcatcattttggcactaaactattgggagttggaagtcatcttctcaattaaattcctagcttcaacaggggtcatgtctcctaggactccaccactagcagcatctatcatacttctctccatattactgagtccttcataaaatattggagaagaagctgctcagaaatctggtggtgagggcaactggcgcatggtttttgaaatctctcccagtattcatataggctttctccactgagttgcctaatgcctgaaatatcctttttgatggtcgtggtcctggaggcagagaanattttttctaagaatactctcttgaggtcatcccagctcgcgatggaccttggagcaaggtaatatagtcagt

SEQ ID NO: 19062 - DNA, 438 bp, Glycine max
  unsure (1)..(438): unsure at all n locations
tgcctaattaacctgaaattgagagaaaatgattattaaatttactaaatggaagtactaagtatttattgcctatacttaacagaaaatacttataacactacaaaataaccataaattggaagagtttgatacaatttacacaagttttatacacataagttagtcgtattcatcgactaacaatggtccaaaatttaattggattgggcttctcccaattcaattaaatttctctcccaacacacacacatcaaatagtgcacttaatgcatgtgaaattacaaaactacccctaatacaaaaactagtctaggtgccctanaatacaagggctaaaaaatcctacattactagggtaccctccctacactacggagccctaaatacaaggaccaaaaataatgaaaccttaatctaatatgtacaaagataagg

SEQ ID NO: 19063 - DNA, 441 bp, Glycine max
  unsure (1)..(441): unsure at all n locations
tgagcgtagtggaagaaaagttcttgaatagaattttccctccttctagatatatcagtgcaaagtcagatgtttccactttcaagtaagaaccagatgaacccatttgtgaagtctggaagtgattcaaatcattgttgagaaaatgtcccaatcatggttttgatgatgttacccagctaagcatattttgcaatggtctaaggcctaaaactaagatgattctggatgcagtcgctagtggaacaattatgtttgtagatgttgaacaagccacaaggataattgatgcctttgcttcaactgatcaccaatctcagcataacagacaatcgatacagaaaagaggagtgttggatctcattctcaagggtttttcaaaggaagtgtaaaaacattntgttgtggtacctataacacaagagacgctgagagaagctc

SEQ ID NO: 19064 - DNA, 432 bp, Glycine max
  unsure (1)..(432): unsure at all n locations
tagccctagaggggatggaccttttaggttttggagaggataaataacaatgcctataggttggacctcctagaagagtatagagtcaacaccacttttaacatttctgatttaattccttttgcaggtggagttgatattgaggaggaggaactaacagatttgaggtcaaatcctcttcaaggggaaggggatgatgcaatcctccctatgaagggaccagtcactagagccatgagcaagagactccaagaggattgggctagagctgctgaagaaggccctagggttctcatgaacctcacggtagatttctgagcccatagaccaaggttgggtccaattgtctttgtacatattagactangatgtcattatatttgatccttgtatttanggctccataatgtangtagggtaccctagaaatat

SEQ ID NO: 19065 - DNA, 439 bp, Glycine max
tataattctaatatatctcttaatgagaacaatgcatgttattgttacagttcttgagattactttcacaagaattggacgatggttcttctcaaaggttagatcaagaacgtgctttgtcaagtgcggttgatggtatagcacttgacatgcagagaaaatccgagtcttctgagtgtaaaagagagaagcttcgtgaatatgagcatcaatgtcgtgagaagatttcaattgatgatgttcagcctcattgtgaaaaggtggatgcacatttggaagttcagaaggagacggatgctgctcctttacttgactgtaaagagacgcagcagggatctgttgattggaaaattgatgagagaccgattgaggaagtaatgatgctgagtgatcagaggaaggtgacagttctgtatgaacttctgtctggttgtctatc

SEQ ID NO: 19066 - DNA, 345 bp, Glycine max
ctccaataattcaaatggtcataacttttcacacggaggttcgattcttgcacatgatatatcgagacgttcgtaattgaacaacggaaaccctcgagaaattcaaatggtcataactttttactcggatgtccgattcaggcacatcacatatcgagacgctcggaattgaacaacggaagctatgaagaaattcaaatggtcataacttttcactcgaatgtctgattgatgtgcatcacatatcgcgacgctcgaaattgaacaacggaagcaatcgagaaattcaaatggtcatacttttctgaccgatgtgcgattcaagtgcatcacatatccagacgc

SEQ ID NO: 19067 - DNA, 431 bp, Glycine max
  unsure (1)..(431): unsure at all n locations
tgtatttaacaatgttntanaaatacttttaattaatatttgaatttttattcctttattaatatatatgtgaggggtagagggtgtcacactatatataattgtttatgttttagtgttttaatgataaacttatttgactaacaatggattagggttactataatacctanggtttagtgttatatgtcttattagggttcagttttacttgaatacgtaaggcttagtggtatgtgactaattaacgttcaatgttagttcagtacttanggtttattgttacgtgactaatatagggtttatggttgtgtgaatacctaaggtttagtgttacatgtcttattacggtttagttttacttatatacgtaaggtttagtggtatgtgactaattaacgtgcaatgttagttcaatacttatggtttat

SEQ ID NO: 19068 - DNA, 443 bp, Glycine max
tgagatatccgtaaagatcaaagaagaggtgaaaaagtagttcgtcactggctttttggcagtggttcgataccccgaatgggtggccaatattgtgccggtccctaagaagatgggaaggtatgaatgtgtggactattgggacctgaaccaagccagtccaaaggataacttccctttaccacacattgatgtccttgtggataacacatccaatttcactttgttttccttcatgtacgggttctcgggttacaatcagataaagatggtgccggaggacatggagaagactatgttcgtcaccttgtggggaatgttctattataaggtgatgttctttaggctcaagaatgctggggcaacctatcagcgggctatggtagcattattccacgatatgatgcacaaagagattgaagtctacatggatgacatgattt

SEQ ID NO: 19069 - DNA, 381 bp, Glycine max
tcaataactgttcatgtccattacctgtagaaatctcacaaatgtctggacttaccttcttaaccttaacctacaaccaggtctctggacctattccatctgaattgggaaagttgactcgccttatggcacttgatcttgccttcaacaatttcactggaccaatccctccaagccttggaaacttgagttctctcctatggctaaccctttcagataattcgttatctgaagaaatcccaccagagctgggaaactgctcaagcatgttatggctgaaccttgcaaacaacaaactctcgggaaaatttccttctgagctaacgagaattggaaggaacgcaagggccacatttgaatcaaataatagaaaccttgggg

SEQ ID NO: 19070 - DNA, 444 bp, Glycine max
  unsure (1)..(444): unsure at all n locations
aactaagcttgccagcgttattatggatctttcaagattatcaaacgcatatgtcctttggcctatagacttctgttgccagcagggtctcgcattcacctggtctttcattgctcactactcaagccatttcttcaagatgttgacaatcaactcgcgccacttccactcccaccaacgaccttggataaccaacctgtgatctcatcgttagctattcttagctcgcgtcaggaaggtccagatgaagacatgtatctccaagttctagtgcagtggaagggtctccacgtagacgacacctcgtgggaggactgggccacattgaagggcacctatcaccttaaggacaaggtgattnttgatgaggttgngaatgatagaccaagcgggtcacaagcagtccataccgagaggcccacaagaaagatcacaacacctcga

SEQ ID NO: 19071 - DNA, 448 bp, Glycine max
cttgcctttgcaattccaagacactagtgagcttccaagtatatgacatgtaccatttgtaattttcctatctaatttgcatcttccaaaatcagagtctgaaaaaccttttaagtttaaggaagttcctttggaataccacaaacctacattggttgtgcccttaagatacttaatgatcctcttaacagtagttaagtgagattcctttggattggactgatatattgcacataatcaaacacttagcatgatatccggtctacttgcagttaggtagagaagtgatccaatcatacctatgtatcttgattcatccactgatttacctttctcatctaagtcaaggtaggttaatgttgtaacgcctttaaatttcaataactgaaaatagatgtttgatgtatttcttgtgttatttgattactgggattaattggatgagttg

SEQ ID NO: 19072 - DNA, 452 bp, Glycine max
  unsure (1)..(452): unsure at all n locations
gaaactcaagcttggtgtagaagggattgctaaaaaatgtaatcggatgtccttgttgtgttagcacagtgcccattcctacacctggtgcatctgtttcgatcatgaagggtaaggcaaagtctggaaaactcagaactagagccttgttgattgcttcctttagttgctcgaaggcattaatggcttttggagtccaagtaaattggtcctttgccaaaagttgtgttaatgatgtagcaatagctgcataccctttaatgaatcgccatgagccatcacttttcttaaccaggagaaccgaagatgagaaagggcttgtgcttggctagattatgccatttcgtaacattgattctacttggttctcaatttcttgcttctggaaatgggggtatcggtatggtagcacattaactggttntgagtttggaaggagatggatcacatga

SEQ ID NO: 19073 - DNA, 409 bp, Glycine max
  unsure (1)..(409): unsure at all n locations
cctttcattntaacccttagaacttcccagttcaaattgtcatagataaagnaatgttgatgttcaaaggacactttaaatccctttttaatcaattgacctacacttagcaagttttggtcaatgttaggtacataaagaacatctgatattaatttgatacctgaacatgttgaaattgcaacagttccttttccttttactgaaatatagccaccattcccaattctgacctttgagacattanttggcttcaaatccttgaatagagtcttatcatatgtcatgtggtttgtacaaccactatcaatcaaccaactttcacttgattcactactcaagaagcatgtggccacaaacagttgatcctcctcttcttgattagcaatctgagctccctcatcatgat

SEQ ID NO: 19074 - DNA, 422 bp, Glycine max
  unsure (1)..(422): unsure at all n locations
tgtaggccttggatcttcttcatcaatggagtcctttgcttctttaagatgaatggcagcgtaatggagaaggaagaaagatgattggagacgccacttcaaggagaagatgaatcaagaagaaactcaccaccataggaagccatggataagagcttgaaggtaggagaagatgagtggagggagaggagaggcacgaaattttgagcctcaaatgagatctgaactttgaagtataattcttaaatgatcaaagttgaaaatatgcacatacatgacctctatttaaagcttaagtgtcacacaaaattggagggaaatttgaatttctattcaaatttcacttgaatttgaaattgaatttgtggagacaaattttcgagccaaaaattcactaattatgattagtgaattntagctat

SEQ ID NO: 19075 - DNA, 449 bp, Glycine max
taagagcaaaaactacggctactaactcaagatcgtgtgtgggataattcctttcatgtatcttaagctgtcgagaagcataggccactacctgtccccgttgcataagcactccacccaaacccatcttggacgcatcacaatacaccacaaaagattcactcgggttaggtaacactaaaactagtgcagtggttaacctttccttaagggtacggaaactactctcacattgggcatcccacacaaaaacttgacccttacgagtaagcttagtcaaaggtaaggctagcttagaaaaaccctctatgaatctacggtagtatcctgctaagccaagaaagctcctaatctcaaacactgacttaggactctcccaactcatcaccgcctctaccttggaaggatctactggctatccctccttagatataacgtgccctaagaag

SEQ ID NO: 19076 - DNA, 429 bp, Glycine max
tcaacattcaatatcgagcgtctcgatatattacgggactctatcagacatccgagcaaaaagttactgtcgtttgaatttgctcagagcttcgataatcaatttctagtgtctcaatatattacgcgactcagtcagacaaccgagtaaaaagttattgtcgtttgaatttgctcagagcttcagtattcaattctgagcatctcgacatattacgggactcaatcatacatccgagtaacaagttattgtcgtttgaatttggtgagagcttcgataatcaatttcgagcgtctcgatatattacgggactcagtcagacatccgagtaaaacgttattgtcgcttgaatttgctcagagcttctgtcttcaatttcgagcgtctcgacatattacgggactcactcagacatccgagtaacaagta

SEQ ID NO: 19077 - DNA, 435 bp, Glycine max
cttaattaattgtcttgatataaaatttctacacagactaataatttcaaagtctatacagtcgtattacttttaaatttggatgtaattgtgtgtttaattttctaacccattaaaagagttagaaaacaatgaagaccacaatatcatctttttttatcattattttaaagtactaatttatttcaatacatgtgaaatttttttaaaaattatagtttatacgctatttatttaaaacataatctttatattataatacaaaaatatcactatttcatactcatacaatcagtatgaatataataaacactataatttgtctaattattattatatatatcattattatataacaataacatttacaatagtcgtattctattactattagactcaaataaaaatcaaaatctcaactatattatttattga

SEQ ID NO: 19078 - DNA, 389 bp, Glycine max
agctttcttatgaagattcctaaagaatctagagcttagctacacatacctctctaatagctaagctcacctccttgagatgagaagctagaacttagctacacacccccaataatagctaagctcatccccatgacaaataacatgaaaattcaaaaaaaagtccttactacaaagactactaaaaatgccccgaaatacaaggctaaaaccctatactactagaatggtcaaataaaggcccaaccgaaggataaacctattctaatatttacaaagataagccggctcatacttagcccatgggctcgaaatctaccctaaggctcatgagaaccctagggccttcccttggatctctagcccaatctacttggagtcttctacca

SEQ ID NO: 19079 - DNA, 336 bp, Glycine max
acaattgcatcacctctcaatgagctggggaagaacaatgaggcatttacctgcggtgaaaaacaagagcagtcctttgctttgctcaaagaaaagcttactaaggcacctgttctagctcttcctgactgttctaaactttagagctaaaatgtgatgcctctggagtgggagttggagctgtattgttacaaggtgggcactctattgcttattctaatgaaagactccatagtgcccccctcaactacaccacctatgataaagagcattatgccttataaaagccctgcaaacatgggaacattaccttgctttcaaagaatgtgtcattca

SEQ ID NO: 19080 - DNA, 398 bp, Glycine max
agtcttgtagcaaatgcaaaccacaataaattatagctcggatatcccattgagtcccgtaatatatcaagacgctcaaaattgagtacagaagctcttagcaaattaaaacgacaataactttctacacagatgtccgattgggtcacgtaatatatcgactcgctcgaaactgaataccgaagctgagagcaaattcaaacgacaatgacttttacctcggatatcccattgagtcccctaatatatcgagacgttcgaaattgaatacagaaactgtgagaaaattctaacgacaataactttttactcggatgttcgattgagtcccgtaatatatcgagacgctcaagatttataacggaagctcgtagcagattcaaacgacaataactttg

SEQ ID NO: 19081 - DNA, 388 bp, Glycine max
  unsure (1)..(388): unsure at all n locations
agcttttacaaaacactgtggccatctttgtctttagaagctaaagattttgtcaaacgcatattgaataaggatccacagaatcgaatatctgctgctcaggctctaagtgagttatttttcttgcctctatcatcaatttcaataatatctagtaagacattnttcaagttgtcagccataatcttgtgcttgcaggtcatccttggatacaaaattgcaataatgtaaaagttccacttgataaattgtcagccataatcttatgcttcctgttggaatgaagtattcctactttattccaacccttgtgtttgaaaatgatatataatcttctgaccacaagtattttcgatttatttctctcttgtaaacctctgagaattga

SEQ ID NO: 19082 - DNA, 403 bp, Glycine max
agcttcttctattgtcaatcacccagcaagccttggcacgagagtgtagcaatgaatgtgttgatgaactactagatggatctgtgaggatcttggatatctgtagtacaattaaagattgcctactgcaacacaaggaaagagtgcatgaacttgagtcagctattcgcaggagaagagatgccgaggccggattcacagtttcgagtggaaaatacttggcatctacgaagcaggtgaaaaaagcaattcggaaggccttatgaaatttgaaaggattcaagaatgaactcatatttgcttcctcaaacaaagacaacgagacattgtccatgcttagcttcttaaaagaatcagaactagtcaccgtgagctcattaaaagccttcttggtgttatcact

SEQ ID NO: 19083 - DNA, 363 bp, Glycine max
  unsure (1)..(363): unsure at all n locations
tatatangtactagcacgcagtatttcattgacatataacacctttattgactatttgctcccacttatcttgcggtatacacaatcatcaactatatttgcctaaagatcatatgaagtaatgacatgatggaacttgttgtagcgttgtctggagacttgattcagaccatagatgtgctaatttagaatgcaaaccatacactttgaatgacctgatacaaaggtttagggttgcatcatataaatgggttcttcaatgtcacaacttataaatgcgagcttaacatccatatgatgtagctctaaatcataatgagctacgagtgccattattgttctaaaagaatactttaaagatat

SEQ ID NO: 19084 - DNA, 375 bp, Glycine max
  unsure (1)..(375): unsure at all n locations
ttgcttttatccaaaatcttgactcaccataaaccttgacccagagtgagaatgtcaatccttaccctctgaagcacaaaaagaagagaatgaatatttccaatcaaacgataaaggagaaggaaaatttccaatcaaagaggaagcaaaaaaatgaaagaatgaaaatttccaatctaaggaaatagagaggaaaggaaattcccaatcaaagagtgggagaatgcacatagaagagaaagaanattgccaatcaaagaatgggagaaagaaaaaaagagaacgataagattgacagagagctcatgatcaatgatcgaaagagaacaaaagacatgtgcagagatgtctttggaccacacaatatctgaacaa

SEQ ID NO: 19085 - DNA, 420 bp, Glycine max
  unsure (1)..(420): unsure at all n locations
nttaatggaagtcaagagcatgatattgcgccgataccgttcactggtgagcaggtatatcagcgggttcaacacctgaacactgtatttgggaagacccataagaaggataaaagtcagagttgcatatggaagaagaggtccattttctttgatcttccgtactggtgtgatcttgacgttagacattgtattgatgttatgcatgtggagaaaaatgtttgtgacagtgtgattgggacgctccttaacattcaaggcaagacgaaggatggcttanatacccgtcaagatctagctgatatgggtataagagcacagttgtatccaaggtctgatgggaagaaatattacttgcccctagcctgccatactntgtccaagaaggagaagataagttnttgtcagtgtcttcgtcgg

SEQ ID NO: 19086 - DNA, 440 bp, Glycine max
  unsure (1)..(440): unsure at all n locations
tgttaagctacaacttgggcctaagcccaagaaatgtactcagctcagcagagacctcactagctcatgagcacaaacatatagctgaagtcctatgaaggaacatagatttgttcgcctggcagccatctaacatgccgagaatccaccccagcattgtatgccaaaaattggttgtctgcccttaggccaaacaaatctcacaaaagaaaaggaagatgggagaagaactacgtaaaacaattaggggagagatcgacaagctactcaattcccaattcatcagagaagtcaaatactcgacttgttaggctaacattgtcatggtgaggaaggctaatggaaaatggcacatgtgcacaaaatacaccaacctgaacaaagcgtatcccanaggcgtgtatcccttacctagcatcgacaagctagtggacgatgcg

SEQ ID NO: 19087 - DNA, 430 bp, Glycine max
  unsure (1)..(430): unsure at all n locations
agctttgatccaatacaaacgacaataactnttttctcggatgtctgattgattcccgtaacatatcgagacgctngaaattgaaagctgaagctctgagccaatacaaacgaccataactttgtactcggatgtctgattgagtcccgtaacatatcgagacactcgaaattgaatgttgaagctgtgagccaattcaaacgataataacttttttcacggatgtctgattgagtcccgtaacatatcgagacgctcaaaattgaatgttgaacctctgagccaattcaaacgacaataactttttactctgatgtctgaatgagtcccgtaacatatcgagacgctcgaaattgaatgttgaacctctgagccaatcaaacgacaataactntttactcggatgtcatgattgatgtccgaacatatc

SEQ ID NO: 19088 - DNA, 426 bp, Glycine max
  unsure (1)..(426): unsure at all n locations
cttaacattcaatttcgagcgtctcgatatattacgggacacaatttaacatccgaganaaaagttattgtcgtttgaatatgctcagaggttcaacattcaatttcgagcgtcttgatatattacgggactcaatcagacatccgagtaaatagttattgtcgtttgaaatggctcagagcttcaacaatcaatttcgagcgtctggatatattacgggactcaatcagacatccgagtaaaaagttattgtcgtttgaattggctcagagattcaacattcaatttcgagcgtatccatatattacgggactcaatcagacatccgagtaaaaagttattgtcgtttgaactagttcagagcttcaacattcaatttcgagcgtctcgatatattacgggactcaatcagacatccgagtaaaa

SEQ ID NO: 19089 - DNA, 284 bp, Glycine max
agcatattgagacgcttgaaattgaaagctgaaactctgagacaccacgacacaccattacttcttactcagatgtacgattgagtaccggaacatatctagacactcgaaattgaatggtgaaactgtgaacccattcaaacgataataactattttcaccgatggctgattgaggaccggaacatatcgagacgctcaaaaatgaatggtgaacctctgagcacaatcagacgaccataactctttactcggatgtctgattgagtcccgtaacatatcgag

SEQ ID NO: 19090 - DNA, 441 bp, Glycine max
  unsure (1)..(441): unsure at all n locations
ntggatctaattgatatcttgcacacatgcatacactaaacatattatntggcctacttgtagataaataaagtagagatccaatcatacctctgtattgctgtggatcaacaggttgaccggattcatctttgtctagatagcaacttctattcataggagtagccaagtgttttgagttttccattccaaacctcttaataagttcttttcaatactttgcatgattgacaaagatcccatcatttgtttgtttgatttgtagtccaagacagtaatttaattcacccatcaaggacatctcacactcactttgcatatcaatagacaactccttgcacaaagatgcattagtagatccaaaaattatatcatcaacataaatntgtaccaacaagatatcattatctctcttttatatgaataaggtggcatctactt

SEQ ID NO: 19091 - DNA, 468 bp, Glycine max
  unsure (1)..(468): unsure at all n locations
agcttcacaatatgaanatcgatcatttgatgaagccttcacattgcatttcttcaacaccttttccatatcttaattgttggggtgtccaagctttctatgccaattctccttgactgacatgtaggtacatgggtctatattgacttgagagttgacacttgaaagttggtataatccatctctaagattcccttttagtagtgccttccctgtcagtttgtccttcacatagcagtagtttgcatcaaattcaacaagagcattattgtctgcagttaatttagatacactcaacaagttcttggttatttctgggacatacaagacattacgcaagttgaggttattcaattgagtcgagcctgatgccaatatgctcaatcttttaccattgccaactaacaaagaattcttaccattgctttcactgagatcttggagttctcattntgatgagtcacatga

SEQ ID NO: 19092 - DNA, 378 bp, Glycine max
  unsure (1)..(378): unsure at all n locations
agcttatgaagcatcaatagaccttaagaaaatagtccatttaggacaataaacaagaaaattaatgagagttctcctagggtgatcagtccacccatcagccatcatagtacatctagtttccttccaaacttcttggtaaattttaacaagcttcctcccttcatcaaaccatttatataacaaaggaccacaaattctataaaaaaaaaatggagatttatacaccggactcatgctactaataacatcaatcataggttgataatatgtcgagttaattgcattaaatggcactatagcatctatcatccattntgcaatggctttgtcacacttttctacaattttcttattgtgcaagacactcttcaagct

SEQ ID NO: 19093 - DNA, 399 bp, Glycine max
  unsure (1)..(399): unsure at all n locations
agcttggttacctccttcttcactacatcaagaatcaccgggttgagtcttctctgtggctgtcttactggtttaaccccatcctctaaatttattcaatgcatacatgtggatgggctaatacctggaatgtccgccagggtctagcctatagcctttttatgcttcttgagaatagataacagtttctcctcttgctcatccgcaagggaggcagatataattattggaaaacttttgctatcatccaagtaagcataatttaaatntgatggtagaggcttcaattctggtgtgggtggctggataatggtagaaagagatggtttctcagcctgtaccttataaagaaagtcagaggtatgtgtacttnctganacanntggtagtctatctaac

SEQ ID NO: 19094 - DNA, 345 bp, Glycine max
  unsure (1)..(345): unsure at all n locations
tatcttgtttgcaaactggatgcgttggtcaacttggtaacccagctggctttgaataagaaatctgtacctgtcgcaagggtttgtggtttgtgctcctctgctgaccaccatacagacctttgcccttccatgcagcaacctggagcaattgagcagcctgaagcttatgctgcaaatatttacaatagacctcctcaacctcagcagcaaaatcaaccacagcagagcaattatgacctttccagcaacagatacaaccctggatggaggaatcaccctaccctcagatggtccagccctcaacaacaacaacagcagcctgctcctttccttcanaatgct

SEQ ID NO: 19095 - DNA, 422 bp, Glycine max
  unsure (1)..(422): unsure at all n locations
gtgtctntntcctttattcttcatgtcatgattgaatgattcattatgtctttccttctcccttctttnttggtccataacaatgattatacaactcgtcattttctctctatgctttgattgaatttcatacacaattattttattaatccaaaccatataaattattacgtgtgtgtaatataaaagcatatttagtaaaaaatattgtttatatgaggataaaataataaatgttgatatttaaattacataagtacataaagctaatgaacacatgtcttttaaatctaatgctagatatacattgcatgataatgccatatatagtggttagtcatgtcttaacttatatatatggattggataaacagaataattggatatgaatacgaataagagcataagacgaggaggatgaa

SEQ ID NO: 19096 - DNA, 325 bp, Glycine max
aagataggaacgggtatgaccacacccgtccgtgaagaattaatggccctgccaaaaaactaccaagacatctttgccttgtcataccaagatatgcccggtttgagttctgacatcgtacaacacagattacctctaaatcccgagtgttccccggtaaaacaaaagctgaggaggatgaagcccgagacgttcttcacaataaataaaagagggtaagaaacaatttgacgctggctttctggctgttgctcggtactcggaatgggttgccaacattgtacccagtcccaagaaggatgggaaggtatgaatgtgcgtggat

SEQ ID NO: 19097 - DNA, 368 bp, Glycine max
  unsure (1)..(368): unsure at all n locations
agcttatactcactgagctcttgattgacacaagccttagggtgatgcaatcctactcccaaagggcattggatagaagactccaagaagattgagccagagatgcatgagaaggccctagggttcttatgagccttagggtagattttgggcccatggactcagtatgagcccacttatctttgtatatattagattaaggtttcattatttttgggccttgtatttagggctccatagtgtaaggagggtaccctagtaatgtaggatttttcagcccttgtattttagggtacatagactagttattggattaggggtaattntgtaatttctcatgcattaagtgcactatntgatgtgtgtgt

SEQ ID NO: 19098 - DNA, 328 bp, Glycine max
  unsure (1)..(328): unsure at all n locations
tagcttttattttcaatttagagagtctcgatatgttacgagactcaatcggacatctaagtataaagttattgtcgtttgaattctatatgagcttccgttttcaatttggagcgtctcgatatattacaggactcaatcgtacatctaagtataaagttattgtcgtttgaattttctcagagcttctgttctcaatttcgagcgtctccatatattacgggactcaatcggacatccgagtaaaaagttattgtcttttgaatttgatatgagctttccttttgaatntggagcctctcgatatattacaggactcaattagaca

SEQ ID NO: 19099 - DNA, 362 bp, Glycine max
ttctttaaactctgtacaacaatgaagctctgataccacttgttaaacaagtggcctcagatatcttaagaagggggggttgaattaagatattccaaacttttctcctaattaaaaatctatcttactttgtacttaagttatgaattcccttaatgacaatcttcttatatattaattcaaatgaagcagcttgaattatgaatataaagcaataataaataaaggagatctaaggaagagaacatgcaaactcagttttatacttgttcggccacacccttgtgcctacgtacagtccccaagcaacccgcttgagagttccactaacttgtaaattccttttacaagttctaaacaca

SEQ ID NO: 19100 - DNA, 426 bp, Glycine max
  unsure (1)..(426): unsure at all n locations
tggaagggtgattatgtttagataacgtttatgtcgagtgtatattattnttctttcaagtttcaattgtacgtagcttgtgtcttcttcacacatagggcatgcataatggcctttaacactatttccactcaaattctcatatgttggaaagtcattaatggtatagaatagcattgcacacaacttgaatgtctcattttaatacccatcaaatacaacaaccccctcgtcccacaactttgtcaagtcttcaatcaagggactgagataaaacattaatgtcaatttctggttgtctcatagacaacatcatgtatgttcgcttcatgcacaaccaatgaggataattgaaattactatcaaaacaggtcatgaactgtgctgagagcttaaactaccatagagattcattccatcactggt

SEQ ID NO: 19101 - DNA, 431 bp, Glycine max
  unsure (1)..(431): unsure at all n locations
ntgagccaaaatcctgactcaccatanaccttgacctcaggtgataatgccaatccttaccctcggaagcaaaaaagaatagaggggaaatttccaatcaaagaaaaagagaaggataatttccaatgaaagcaaaaaagaaatgaaggaatattccccaatcaaagagtgggagatagcaaaaaaaggaaaagaaggaaaattccccaatcaaagagtgggagatagcaaaaagaaaagatagataattcccaaccaaagaatgggagaaagtaaaaaaggaagagaagatagcttctggtcaaagataccagaagatatgtgcagagaggtctttagaaccgacaatatctgaacaatacagaattgtcactaaatgaacaaaaagaaggataggaaaccgtgacctanaatggtcttctccctttaat

SEQ ID NO: 19102 - DNA, 419 bp, Glycine max
  unsure (1)..(419): unsure at all n locations
ttatggagaaacagtacacatttgatagttnctggtcctggctntagccacttggtcccaattcttcagttctccaagagacttgttcagctccatccaaactntcatgtcacatgcctaattcccacactcgtgtctcccccaagtgcctcaatatccatccttcaaactcttccaccaaacatcaacactatttttcttcaaccggtgaaacctgaggacctaccacaaggggctaccatagaaactcaaattcagctcatagtggctctctctatgccctccatacatcaggccctgaagaccttaacttcaaggactcgctntgtggccttggtggctgattcttctgcctttgacgcattagatnttgctaatgagttcaacatgttgtcctatatntacctccccatatcagc

SEQ ID NO: 19103 - DNA, 468 bp, Glycine max
actcagcttgtcaaaagggaagcaagttaagaaatcctttcaaagcaaaaacgttgtttctacttcaaaaccccttgaactacttcacattgatttatttggtccctcaagaactatgcgtttaggtggaaattactatggcttagtaatagtagatgattactcaaatttcttggactttgtttttgaaaaccaaaaatgaagcttttgatgattttcacaaacttgccaaggtgattcaaaatgaaaaaggtctcaacattgtttcaattagaagtgatcatggaggtgaatttcaaaatgacttttatgaaaaaaatgaaattcaccataatttttctgccccaagaacatctcaggagactggtgttgtggagaggaaaaatagatccattgaataaggtgcaagaaaccttctaaatgaaacaaggttacctaagtacttttgggaagatgtatacatactat

SEQ ID NO: 19104 - DNA, 432 bp, Glycine max
  unsure (1)..(432): unsure at all n locations
gaatgctttctgtcttgtgccaatggaataaattgacttgtcgccaagttttggactggttcctgaaccataatgatactggtcaatctttagttcaaatggacaagctaaatgtgaaatctaattgtcacctatacaggaatttggagggaagagtggaaaggcggcagaaaacagaactcatacctgtagtgtcaagcacagaagaatgacttttctttaaattccccagactttcttcttcaaaacgttcacgaccctcagagagtatgccaagataagcatacacattggtctgaatggtcaactntatattntcacgttcatcttctgannagggggtgcttttgtaaagaatcttggcctgacataagcatttacaattctataaatacattgatttcttggctttcttcaacaacaacatgcatg

SEQ ID NO: 19105 - DNA, 401 bp, Glycine max
tgaatcggacatccgtgtgagaagttatgaccatttgaatttctcaagagcttccgctgttcattttcgatcctctcgacatattatgcacccgaatcggacatctgtgtgagaagtcatgatcatttgaatttctcgagagtttccgatgtataatttcgagcgtatcgatatattataaccctgaatcggacctcagtctgaaaagttatgaccatttgaatttgacgagagcttccgttgttcaatttcgaatatcactgtatgtgatgcgcctaaattggacattcgagttaaatgttatgaccatttgaatatctcaagagcttccgttgttcaattctgagcgtctcgatatgtgatttgcctgaatcggacatccgtgtgaaaacgtatgacca

SEQ ID NO: 19106 - DNA, 384 bp, Glycine max
  unsure (1)..(384): unsure at all n locations
tagcataactaattccctgaatgacaaaagtcaatagttgaatatgataaccaagttaatactgtgggtgaacatttgttatgcgagaacaagttcgagcagattgtctccaatgaagaatgtaagtgttgtactttgtaacagacatagaaaagaggcagagtgagaacttgacaaaacctgcgggatggccaagctagcaatagtgatgccggacacaaggtcagatttgaagagtttgagattatacttangaccccattggagaatagggaacacatattgagctccaaggatcagttntctcttaagaggttgtcccttgaattggcgcagaggatcatcanggaagaaagtttccttgagcctacccttgagtttctg

SEQ ID NO: 19107 - DNA, 354 bp, Glycine max
  unsure (1)..(354): unsure at all n locations
tccttgagaagctagagcttagctacacacacccatctaagaactaagctcacctccttgacaaaatacatganaatacaaaaaanaaaaagtccctacaacaaagacaacccanaatgccctcaaatacaaggctaaaaccctatactacaagaatggccaaaatacaaggcccaaaagaaggaaaaacctattctaatatttacaaagataagcgggctcatacttagcccatgggctcgaaatctaccctaaggctcatgagaaccctagggccttcccttggatctctagcccaatcaacttggagtcttctacccaatgcccttgcggtgtangattgcatcaatatgt

SEQ ID NO: 19108 - DNA, 420 bp, Glycine max
  unsure (1)..(420): unsure at all n locations
agcttctcttttcttgtttaattattatattttgtttttaatccttgtatttggctgtgtttttatgacatttgagcacttattatttctttttaatatttgtttagtatgactgaatatgatgattatatttactatctcttggttgtttatggttatgaattttaaacttagttattttgataatatatgatcagtggtatgtacttttatttggttattatgagtgacttttctggattatatgacattctatgaagtatatctttctaagattgatgaatggttaagttatcttgtttgattgttttctattctcttgtatgattagtaatttatgtatgttttatatttgttatgcattttggctttntgttgatgccaaagggggagagaaatanggattaaatcaagaactcg

SEQ ID NO: 19109 - DNA, 427 bp, Glycine max
  unsure (1)..(427): unsure at all n locations
agcttagattctttctaacgacaataactttttactcggatgtctgattgagtcccgtcatatatcgagacgctcgaaattgaatgttgaatctcttaaccaatccaaacgacaataactttttactcggatgtctgattgagtcccgtaatataacgagacgctcaaaattgaatgttgaagcttagagccaattcaaacgacaataacttattactcggatgtctgattgagtcccgtcatatatcgagacgctcgaaattgaatgttgaagctcttagccaattcaaacgacaataactttatactcgaatgtctgattgagtcctgtaatataacgagacgctcgaaattgaatgttgaagctctgagccaattcaaacgacaataactttntactcggatgtctgattgagtcccgtcatat

SEQ ID NO: 19110 - DNA, 413 bp, Glycine max
  unsure (1)..(413): unsure at all n locations
agcttagttctagaagggatggaccttttcaggttttggagaggatcaataacaatgcctataggttggacctcccagaagagtatggagtcagcaccacttttaacatttctgatttaactccttttgcaggtggagctgatattgaggaggaggaactaacagatttgaggtcaaatcctcttcaaggggaaggggatgatgcaatcctccctaggaagggaccaatcactagaaccatgagcaagaggctccaagaagattgngctagagctgctgaagaaggccctanggttctcatgaaccttanggtagatttctgagcccatgggccaaggttgggtccaattatctttgtacatattagactangatgtcattatatntggtccttgtatatanggctccatatt

SEQ ID NO: 19111 - DNA, 362 bp, Glycine max
  unsure (1)..(362): unsure at all n locations
agcttgattttgttcatcggaagctcttgagaaattcaaatggtcataacttttcacacggatgtccgattctggcaaatcacatatcaggacactcgaaattgaacaatggaagctcttgagaatttcaaatggtcataacttttcacacggatgttagattaaggcgcatcacatatagagacgctcgaaaatgaacaacggaagctctggggaacataagatggtcataacttctcacactgaggtcctattctggcttataatatattgatatgctcgagattaaacatctgaagctctcgagaaattcanatggccataactattcacacggatgtccgattcgggcgcataatatg

SEQ ID NO: 19112 - DNA, 311 bp, Glycine max
agcttgttttgatatcaatcttgccaaagagatactcgtttttggactgaaaccccgagccagaggctttgtcaagggaaagagtgagaagatcgccgttgttgagtatcttggcacgaccatctccccaagttacgtcaaaatcctggtagaagttgccagcagaggctgcgatggaagaggccaatacaaatacataaaggacagtttttgttgaaaatgtaatggaatgaagagaagccatgattgttttgaatgaaatgtagaaagaggaagttaaaaatgtagtagcttggtagaagtaatgaaat

SEQ ID NO: 19113 - DNA, 406 bp, Glycine max
  unsure (1)..(406): unsure at all n locations
agctntgattgatttgacctgaaatgttgtttagtgagagatcaagggattctaacaatttcatttttcccatgtcatttggtatccctccaaacagatgatttctagacaagttcaaaaaccgcaaagcagatagcttggaaatttcagatggaattgctccagacagcttattacttgaaagatcaatcattctcaccaatatcagattgtctctgtactctaactcatctcctttgggaactaagacaagagtttccttgtagtggttataactgaagtcagagccatatgaataacttanagggttggcaaagaagtcatcttcaccagccattgtcttcatgtcatccaaacaatntggaatggatcctgacaggctgttattgccaagatccagcactat

SEQ ID NO: 19114 - DNA, 366 bp, Glycine max
  unsure (1)..(366): unsure at all n locations
agcttcaagagattcattttctcgacaatattattggtgatatctcanaaggggtaacaactagacattctcttaaagatttatgcaataatatggcttttgtatctatgattgaacctaaaaatataaaagaagccataatagatgataactggatcattgccatgcaagaagaactgaaccaatttgaaagaaacaatgtatggaaattagtagaaaaacctgaaaattatcctatcataggaacaaaatgggtttttagaaataagttagatgaacatggtataattattagaaataaagccaggttagtagcaaaagggtataatatagaagaaggaatagactatgaagaaacatatgctc

SEQ ID NO: 19115 - DNA, 415 bp, Glycine max
  unsure (1)..(415): unsure at all n locations
agctntggtgtcttactttcgaccataactttttactcggatgtctgattgaggctcgtaatatatcgagacgctcgaaattgaatgttgaagctctgagccaatacaaacgatactgactttttactcggatgtctgattgagtcccgtaagatatcgagacgctcgaaattgaatcttgaacttctgagctaattcaaacgacaataacttttttctcggatgtctgactgagtcccgtaacatattgagacgctcgaaattgaatgttgaacctctgagctaattaaaacgacattaactntttactcagatgtctgattgagtcccgtaacttatcgagacgctcgaaattgaacgttgaagctccgagccaatacaaacgaccataactgtntactcggatgtctgattg

SEQ ID NO: 19116 - DNA, 369 bp, Glycine max
  unsure (1)..(369): unsure at all n locations
agctttgtttgtgttgttccaatggttgcaataccacaagaggctgaccaaagcactaatgcccagcatattgtagatgttcggaaggcgggaatcaaaccttcagttgatgataaacatgttgtgagacgagaagcgttgaagcgttgtacatgggaagtaatggacagtgacagaggcgaagagatgaagatatacgccatgcacctgaagacattggctgcatacgctgctggtgacggtggaatttctcatagaaacattactgaatttgtgaataacttgttccattngtaattaatgcactcaacctcatattacttcttatttactcagtcacacaccgtgcgagaatttacagttgtttca

SEQ ID NO: 19117 - DNA, 407 bp, Glycine max
  unsure (1)..(407): unsure at all n locations
agctttgattgatttgacctgaaatgttgtttagtgagagatcaagggattctaacaatttcatttttcccatgtcatttggtatccctccaaacagatgatttctagacaagttcaaaaaccgcaaagcagatagcttggaaatttcagatggaattgctccagacagcttattacttgaaagatcaatcattctcaccaatatcagattgtctctgtactctaactcatctcctttgggaactaagacaagagtttccttgtagtggttataactgaagtcagagccatatgaataacttanagggttggcaaagaagtcatcttcaccagccattgtcttcatgtcatccaaaccaattggaatggatcctgacaggctgttattgccaagatccagcactata

SEQ ID NO: 19118 - DNA, 415 bp, Glycine max
  unsure (1)..(415): unsure at all n locations
agctntggtttttatgacttgctccaatggctcatcatgtcttctattgaacctttcttcatagacttgaagagaacccatcaattggtctacggtcattgagtctaaatccttagactcttcaatagcacaaaccatataatcaaatttagcgattaaggagcgaaggatcttttccaccacatgaacatcttccatattttctccataatgcttcatttggttcacaatagccaacaccttgttgccaaaatctgagatagattcggattccttcatatgcaatgattcaaactctctacatagaatgtaacttcataccttgttttcccaacatgacaatattgaaagcataaattttgtgaaagcctaatcctccaaaccccttgttcattgacattntactccatctcat

SEQ ID NO: 19119 - DNA, 429 bp, Glycine max
  unsure (1)..(429): unsure at all n locations
cactcggacccgggatcttaagcactgagctcagctttttttatgccctgatcgactcgagtaagtatacataaattctagagcttcgttgttaattccgtgcgtctcgatatattatgtgcctgaatcggacctctgagctaaaagttatgaccatttgaatttctcgagagccttccgttgtcaatttcatgcgtctcgatatattatatgcctgaatcggacctccgagttaaaagttatgaccatttgaatntcttgagagcttccgttggtcaatttcgagcgtctcgatatattatgtgcctgaatcgaacctccgagtgactatgtatgaccattngaattgctcaacagcttccattggtcaatctggagcgtctcgatatattatgcgcctgaatcggacctccgagtaaaacgtatgac

SEQ ID NO: 19120 - DNA, 310 bp, Glycine max
agcttctcatatgtgtttgcacctaaatcggtcatccgagttagaagttatgaccatctgattttctcccgccgtttcttttctcaattccgagcgtctcgatatattatgcacctgaatctgacctccgagagacaagttatgactcatgcgaattgctcatgagcttccattgttcaatctcgagcgtgtcgatatattatgcgcctgaatcggacctccgacttaagagatatgaccttctcataactcgatagctcccgccgttcaatttctaacgtctcgacatattttgcgctcgaatcggaca

SEQ ID NO: 19121 - DNA, 413 bp, Glycine max
agcttgaatcatttctgtatgcattggataactgggcgacccatctggccttgaatcacacattcgcacctgtctcaagggtttgtggtttgtgctcctctgctgaccaccatacagacctttgaccttccatgcagcaacctgtagcaatcgaacagcctgaagcttatgctgcaaatatttacaatagacctgctcaacctcagcaacaaaatcaaccacagcacaacaattatgaccttcccagcaacagatacaaccctggatggaggaatcaccctaacctcagatggtacattcctgagcaacaacagcagccagctctttccttacataatgctgttggcccaagcagaccatacattcctacatcaatgcaacaacagcaactactctaataactagcaacaact

SEQ ID NO: 19122 - DNA, 406 bp, Glycine max
  unsure (1)..(406): unsure at all n locations
agctttcanattaagttgcctaatgcctaaaatgttttttctgatggtagtggtcctagatgcagggaagaatttctccaagaacaccttcttaaggtcatcccaactgaaaatggacctgcgagcaaggtagtatagccaatcttttgccactccctccagagaatgaggaaaagcctttagaaagatatgatcttcttggacatcagggggcttcattgtggaacaaacaatatggaaccccttaagatgcttatgaggatcttcacctgcaagaccatgaaacttaggcaacagatgtattagtccagtcttgagaacatatggaacacccttatcangatattgaatgcacaagctctcacaagtganatcaggtgcagccatctccctaagagtcctctca

SEQ ID NO: 19123 - DNA, 393 bp, Glycine max
agcttcattctgccatcatattcattgatgaagtagacagttttttgggtcagcgtcgtggaacagatcacgaggctatgttaaacatgaaaactgaattcatggctctgtgggatggatttacaacagatcgtaagtttaacagttatcatattttattttgttgcataaatattgaaaataagttgcaaataagataatgacaattttgatagagatttagttggtaacataatgttctcaatttatttatatttgagtagatttgttgattggggtgacttattgtgtgtgtagagaatgctcaagttatggttcttgcagcaactaatcgtccttcagaacttgatgaagcaatacttcggcgtcttcctcaagcctttgaaattggaa

SEQ ID NO: 19124 - DNA, 428 bp, Glycine max
  unsure (1)..(428): unsure at all n locations
agctntacttcttatgccactctactccaaattcttgaaggatatgttaacaaggaaacataagtatattcaccaggaaaacatcgtagtggaaggaaattgtagtgctgtgattcaatagatccttccacccaagcataaagaccctgngagtgtaactattccttattcaattggagaagtcactgtgggaaaggctcttattgacctgngagccaacattaatttaatgccactctccatgtgtagaaggttgggagagttggagatcatgcccactangatgactntacaacttgttgatcgctccattaccagaccatatggagtaattgaagatgtgctggtcagagtgaaacattntatcttcccggcagactntgtagtaatggatatctgtgaagatactgacattcctgtaatattgg

SEQ ID NO: 19125 - DNA, 421 bp, Glycine max
agcttatatttattgtagggagaataaaacaatccaaaatcaattgtacctttcaagtaacgaagaattctttttgcggcttttagatgaggagaggtaggagcctccataaagcgacacacaactcccaccgcatatagaatatcgggccttgtattggttagataccttaaactccccacaagactcttgaagatcgtgaagtctaccttctctccttcatcaaactttgataacttcaagccaccttccataggtgtgttcacgggattgcaatcaagcatattaaattacttcaacacttcttttgtgtacctttcttgtgagacaaagataccattctccgttttcttcacttccattcacaagtaatatgacatgagtcccatatctgtcatatcacattcacgagacatggact

SEQ ID NO: 19126 - DNA, 385 bp, Glycine max
  unsure (1)..(385): unsure at all n locations
agctttggttaattttatttactgganaaagctatggggtgcttgttttgggagagtactgcaccaatgctagatccttangcatttgtttccatggtgaaaggtttagagaaattgagtatgcatagcactggggctgagctaactgcctcttgtaacgcgtgaaaggctagcatggcctacggtgaccacacaaggtgttccttggtcaagagatgaatcacaggggttgctatggtagcatattctctgatgaaacatctatcataacctgtgagacccatatatccccacagggttctaaaggaggtgggtcgcggccattgatgaatggcaagtatcttgtcacgaacgggatgaacaccgcgaacggataccacatgac

SEQ ID NO: 19127 - DNA, 417 bp, Glycine max
  unsure (1)..(417): unsure at all n locations
agcttgtgtctatctttctattgtcgaagctgaatacatagctgcaagaagttgttgtgctcaaagtctttggatgaagcaacaatgatgtaagctccattggagcttgtaggcctaggatcttcttcatcaatggattcctttgcttcttggaagatgaatggcagcggaatggagaaaggaagagagagaggagacgccacttcaaggagaagatgagtctagaagaagctcaccaccataggaggccatggataagagcttggaggaagaaggagatgaatgaagggagagggagagaagagcacganattntgtgctctanatgagctttgagatctgaagtttaatattcanatgatcaaagttganaaanatgcacacacatgacctctatntatagcctaagtgtcacac

SEQ ID NO: 19128 - DNA, 403 bp, Glycine max
agcttgctacttctggaagctcctaatatctcccacactttttggggtgggccattcttggatggccttgattttctcagggtccacttggaccccatttctaccaactacaaaacctaagaagactatattatctacacaaaaggtacacttctctatatttgcatagagggtgtttttcctaaggactgaaagaacttgcctaagatgtcctaagtgatcagctaggcttctactgtacactaaaatatcatcaaaataaacaactacaaatctacctatgacatcccttaagacatgatgcataagcctcataaaggtgcttggtgcattagtgagcccaaaaggcatcactagtcattcatacaaaccaaacttggtcttgagagcgatttacactcat

SEQ ID NO: 19129 - DNA, 382 bp, Glycine max
agctttgagcaaattgaaatgacaataactttatacacggatgtccggttgagtcccgtaatatatcgagacgctcaaaatttagatccgaagctctgagaaaattgaattgacaataactttatacacggatgtccggttgagtcccgtaatatatcgagacgctccaaattgaaaacggaaactcttagaaaattcaaacgacaataactttttactcggatgcccgacagagtgtcgtaatatatcgagagacgctccatattgactatgaacgctcgtatcatatgtaaacgacaataactttatactcagatgtctgatagagtcccgtaatatatcgagacgctcaaattttagatccgaagctctgagaaaattg

SEQ ID NO: 19130 - DNA, 445 bp, Glycine max
  unsure (1)..(445): unsure at all n locations
cttgtgacaacttcatgtgctactcaatgttctgaataactttttactacttatcttgattgactcttttcttgagtcttgagtcttgatcttgattattcttgattcttgattcttgaaacttgaaacttgattcttgaattgttcttgactcaatcttgaagtcattctcttgngctttttgtcatcatctgtgttatcatcaaaacaccttgaatcaatcgcgacctatcatctgaatcaatcttgattcatgactcaatcttgattcaatcatgaagcttgcttctgcacttatgcgtcatgtcttagaggatctcataggtagatttgtagttgtctattttgatgatattttagtgtacagtacgagcctagatgatcacttacgacatntcatgccagttctttcagtccttangaaaaacactctctatgcaaatat

SEQ ID NO: 19131 - DNA, 453 bp, Glycine max
ctaccagacagatcagccaaaagtgctcgagctggcccctacaaattaaattgaagaaataaaggggaatttagttttcagctgcacaactgaatcagtatgaagttaatataacagaagcacatgtcaattactttaacaagcttacctgcactgtgttgttagcaaggtccagcatccagaacccaagaataaatacaagagcagcccttgttcgggtccctttaaatgttcttaatttcagacagaatttcattaatgtctaactaaggtcatcatatctgtgaattttaaaaagacagaaataaaatgagtaacgaaataacgaaaggatgagataagaaacctgcaatgctcgtgtgtatcacctaatacatatccaatgtctgcagaacatccgattaatatcacctacattacaagacttgacttaccatatgtgtaatgtagcat

SEQ ID NO: 19132 - DNA, 375 bp, Glycine max
agcttgtgatctattacacaagtcttgtaatcgattaccagaggagattttcagaaaataatttccaagagtcacatctattcaaatggtttatgaatggccatcaaaggtgacttggaaacacgaatttaaagagagttttcattgcccacaaagtttatcctctcaaaagattaagagtttttctgaactgaactgtcttatcctctcaaaaagattccttggtcaaccacttgcatattcaataaggaattttgattggtcttcattgtacaatctatcccttttaagagagatttcttcttctcttcttcttacttctgaaaagggattaagagactgagagtctcttattgtagaggattcttgaacaca

SEQ ID NO: 19133 - DNA, 323 bp, Glycine max
agcttgaaggcaaactggatgcattggttaacttggtaacccagctggccttgaatcagaaatctgtacctgtcgcaagggtttgtggtttgtgctcctctgctgaccaccatacagacctttgcccttccatgcagcaacctggagcaattgagcagcctgaagcttatgctacaaatatttacaatagacctcctcaacctcagcagcaaaatcaaccacagcagaacaattatgacctctccagcaacagatacaaccctggatggaggaatcaccctaacctcagatggtccatccctcagcaacaacaacaacaacct

SEQ ID NO: 19134 - DNA, 432 bp, Glycine max
  unsure (1)..(432): unsure at all n locations
tctgtccctgaganactggttcccagaagacaacagggagtgaagattgctgaaaaccctagccttgcaacaagtcctagggaagtagacacggagatggacaagaaaatccgcagtattgtgagtagcattctgaaagatgcttctgttcctgaagctgatgaagatgtcccaacatcgtccaacccaaatgtttctgtgcctgatgttgagaaagatgttccaacatcttccgcccaaatgctgagtactctcttcccccagcaaagagagatcaacagaggaagatgatcaagcgacaaaggagacccctgcaccaagggcaccagaacctgctccaggtgacctcattgacctgcaagaagtagaatctgatgaggaacccattgccaacaggttggcacctggcgttgcagaacgattacaaagccg

SEQ ID NO: 19135 - DNA, 393 bp, Glycine max
agctttccctctttgaacaaatacccctcagccaaataaaatccatcttgggccttttgcccataactctcattaatgggagagaaatgttcatctgaagcatacaattccctaatgttatcaaatcctaaaatttgagctccaaaggagtaaaacaatgtgtgcctgctagagagggcatcaactaccacatttgtttttccctttttgtttttgataacatatggaaattactctaggtactctacccattttgcatgcctttttttaacttgctttgcgctctaatgtattttagtgattcatgatcactatgaatgacaaattccttggaaacaagataatgttcccaagtttggagggctattattaaggcaaaaagctctctatcat

SEQ ID NO: 19136 - DNA, 454 bp, Glycine max
  unsure (1)..(454): unsure at all n locations
tatgctgcacacatttataatagacctcctcagcagcaaaaccaacagcaatagaataatcatgacctttcaagcaatagatacaatccaggttggaggaatcatccaaatctaggatggacaagtcctccacaacaacaacagtctatccctccttttcagaatgctgctggtccaagcaagccatatgttcctcctccaatgcagcaatagcagcaacaacaacaaagcaacaagcaactatgcctctcctcaaccttacttaaaagagttagtgatgcagatgaccatccagaatatgcaatttcagcaagagacaagagcctccattcaaagtctgacaaatcagatagggcagatggctacttacatgaatcaagctcaatcccaaaattctgacagattgccttcacaaactgtgcagaatgcanaacatgtgagtgccatcaccttg

SEQ ID NO: 19137 - DNA, 392 bp, Glycine max
agcttctggtgggacatcttgacttgctttccaatctgacattcaccacagattctgccttcttctattttcagattggggatgcctctaacagcacctttgtcaatgattttcttcatgcctcttaagtgcagatgtccaaatctttgatgccatattctgacttcatcttctttggaggatagacatgtggaggagtagctggtttcttggggtgtccataggtaacaattgtcctttgatctgctgcccttcattagaacttcactcttctcatttgtcaccaagcattctgactttgtgaagtttacattgaatccttcatcacacagctgactgatgctaatcaagtttgcagtcagtcccttcaccagcagtactttgttcagact

SEQ ID NO: 19138 - DNA, 452 bp, Glycine max
  unsure (1)..(452): unsure at all n locations
tctgttctcaattgcgagcgtctcgatattgtacggcgttctatccgacatccaagttaaaagttattgtcgctggagttttgtaagagcttcccttttcaattacgagcgtctcgatatattacgggacacaatcggacacccgagttaaaagttattgacggttgaatgcgctcagagcttctattttcaattacgagcgtctcgatatattacgggactcaatcggacatctagccaaaagttttgtcgttcgatttttctgagagcttctgttntcaatgacgagcgtctcgatatactaccggactcaatcggacatccgagttataagttattgccgtgagaatctgctcagagcttctgttttcaatttcgagcgtctcgatatactacgggactcaatcngacatgcgagtgaaaagttattgtcgtttggattggctcagagc

SEQ ID NO: 19139 - DNA, 388 bp, Glycine max
agctttgatgcaacattgggagaggttaatgaaacaacgagatgatgcgctccatgagaggttggatcaaatggagaatagagatcacaatgaagaagaaaggatgagaagatggaatgatggtgttcctagacaaaaccgaattgatggtattaaactcaacattcctccatttaaaggaaagaatgatccggaggcctacttggagtgggagatgaaaatagagcatgttttctcatgcaacatctatgatgaggaccagaaggtgaagcttgccgccacggagttttccgactatgctcttgtgtggtggaacaagctacagaatgagagagcaagaaatgaagagccaatggttgatacatggacggagatgaaaaagatcatg

SEQ ID NO: 19140 - DNA, 390 bp, Glycine max
agcttgcaaaatggaagcaaagaagtctatctatggggggcagaatcactctcattaattcagttttatcagctttacctatctttttactatctttttttaagatccctaaaaaagtggtgcaaaagattgtatcaattcagagaaatttcctttggggaggtcatcatgaggccaacaagattccttgggtgaagtgggacacaatttgccttcctaaaaataaagggggcctagggattaaagatctctaaatttaatgaggctttacttggcaaatgggggtgggagctgactaataatcagaaccaaccttgggcaagaatcttactctccagatatggtggcgggaaggagttgatctttggtggaaagagcaaatcttcctct

SEQ ID NO: 19141 - DNA, 275 bp, Glycine max
taccctgatgaggattgtccatatgttcttaaaactggactgatccttttgattccaaagtttcatggccttgtaagtgaagacccacacaagcatctgaaagaattccatattgtctgctccaccatgaaaccaccagatgtccaggaggatcacatatttctgaaggcctttcctcattctttatagggaagtggaaaggattggctatattaccttgctccaaagtccatcacgagctgggatgacctcaagagagtattcttaaaaaaaaa

SEQ ID NO: 19142 - DNA, 409 bp, Glycine max
taacacatgtttccatgttcaaatcaaatcagtgttaagacatagtttcgaaacactgggttgcctcccaggaacacttctttaatgtcttttaagttggatgtccttgttatgacttacgccttcactgtttcatcatccataattcttttcttctttgtaagaaaatacttcatgaatttagtgtatgttggtatatgctctaatgccttacaaaaaggaatgttacctcctgtcgttcaaaatgtttaagaaacacttgtatttcctttccttatatttctttgacggagcatacacataaggaagatgctcaagtggcggatggcttactacaactctacctttgctagtggcttctttctttgatttcttcttgacgtaccactctctcttcaactttttcagt

SEQ ID NO: 19143 - DNA, 444 bp, Glycine max
  unsure (1)..(444): unsure at all n locations
tgataatcattntctttgcctcataaaatgaacttggaagctttccatgttcaaatgcatcttgcaagagttacaaaatcattgccatggctttgtcattcatcccacacatgcatttaatatgatacaatttcaacaaaaaagacaaccttgaatattttgaaccttcatacaagggttgttctgcatcttttggtaattcataaaactcttcggcttcattcctttctgagtgttttttgaaccatatcttcatccctatcaacctctacattgaagcaatgggcacttcattcgtatgctgcctatcaactctaaaagcatcattaatcatattttggataggatntttaataatgttgtcttgaactacatttgtatgtgagacatttcgagtttcttcacttctagactccccatggtacaaccaaaatgtgtacccta

SEQ ID NO: 19144 - DNA, 382 bp, Glycine max
agcttggttacctccttcttcactacatcaagaatcactgggttgagtcttctctatggctgtcttattggtttagcctcatcctctaaatttatccgatgcatacatatggatcggctaataccaggaatgtccgctagggtccagcctatagccttcttatgcttcttgagaactaataacaacttctcctcttgctcatcagcaagggaggcagatataaatactgttaaactttttctatcatccaagtaagcatattttaaatttgatggcagaggtttcaattctggtgtgggtggctagatagtggtagaaagagatggtttctcagcctgtacctcataaagaaagtcagaggtatatgtacttcctaaaacat

SEQ ID NO: 19145 - DNA, 442 bp, Glycine max
  unsure (1)..(442): unsure at all n locations
tcatagggagtcatgctaatggtagagtgaaaactattgttataagtgaactttatcaacggcagaaaactctaccaattccccttttgttctaagacacacgccctcaaaaggtcctccagtgactaaatggttcattcagtctgagggtggtaggctgaacttagcctaagcttagttcccaacgctttattcagactctcccaaaatctagagataaacctaggatcctatcacacacatgctatatggcacaccatgtaatctgacaatctcaataatatatagggaggtcaacttctccaaggaaaatcttatattaatgggaatattgtgagcaaacttggtcagtccatcaataataacctagataaaatctaaacctctgggggtcctaagtagtcctaccacanaatccatggaaatactatcccacttccac

SEQ ID NO: 19146 - DNA, 385 bp, Glycine max
agcttgtagggttaaagtctcacgattgtcacgtactcatgcaacaattgttagccgtggctatacgagacatcttgccaaacaaattcaggttaacgataactcgcctgtgctttttcttccattctatatgtagcaaagccattgatccagtcatgtttgatgagttagaaaatgaggccgcaattataatgtgtcagtaggagatgtattttccccctgctttctttgacatcatgattcacttgattgtgcatctggtcagagaaatcaaatgttgtggtcctgttcatctacggtggatgtacccgattgagcgatacatgaagatcttaaaagggtatacaaagaatctatatcgtccagaagcatctattgttgagag

SEQ ID NO: 19147 - DNA, 419 bp, Glycine max
ttgataaccttcgatagtgaccagtgaggcctaacaaacctctcagctgctggatattgaaacgtgtcagccactctacaactgactgcaccttaatagcatccatatccactccttcaccagaaactatatgtcccaactgctctatcttcaatacaccatcagagcattcagacaacttatcacaaaaaacattgtctttcaacactttcaatactcctccagatgcataagggtccatgccatgtggaactatataccaatatatcactcaataaccataacacatattgccttacagcatgctggataatatggctcatcatacactgaacagaattcgtagcattggtcaaaccaaaaggaactaccaaccactcataatggccatgagggagcacaaaggctgatcatgtcta

SEQ ID NO: 19148 - DNA, 391 bp, Glycine max
  unsure (1)..(391): unsure at all n locations
agcttatgggttgcctcttgtatgcaggaaggctggagagctctccttattctgagctgttgtccccaattcattgggagatgacaaccgaagagctcgcacgacagttctgcactctcttgggtcagtcctatgagaacccactgagtgtagcagttgcagcaggagttgaggggttgcctatactgttaaagctggcaaatgtaatggcagcaaagaagcaggagtggcaggaaatgaagcagttgcctgtgccagttgaattgggtaaggaatttcagttccattcgatttttgtttgccctgtgagtagggatcaaggaagtgaagaanatcctccaatgctgctaccatgcttgcatgtcctttgcaagcaatcaattatgaagct

SEQ ID NO: 19149 - DNA, 392 bp, Glycine max
  unsure (1)..(392): unsure at all n locations
agcttctggtgggacatcttgacttgctttccaatctgacattcaccacagattctgccttcttctattcccacattgggaatgcctctaactgcacctttgtcaatgattttcttcatgcctcttaagtgcagatgtccaaatctttgatgccatattctgacttcatcttctttggaggatagacatgtggaggagtaactggtttcttgaggtgtccataggtagcagttgtcctttgatctgctgcccttcattagaacttcactcttctcatttgtcactaagcattctgactntgtgaagtttacattgaatccttcatcacacagctgactgatgctgatcaagttagcagtcagtcccttcaccagcagtactctgtccagact

SEQ ID NO: 19150 - DNA, 471 bp, Glycine max
  unsure (1)..(471): unsure at all n locations
tagagcaatctgaactttccaagtgatcaccaaaggcttctgcatcaacattgacactctccaccctctntgctttaagcttttgtgctgcattccctgcttcctccttataaatctcagatttattagaggttgcagcagcacaatcaagtgaatcatgatgtctctgaccagatgcacaatcaagtgaatcatgatgtcaaagaaaacaagggaaaaatacatctctaactagcacagtatcttgcggcctcatttccagctcatcaaacttgacaggatcaatgacttttctacatataccatggaagaaaaagcacaggtgagttatggctaacccaactntgtttggcaagatgtctcgtatagccacggctaacaattgttgcatgagcacgtgacaatcgtgagactntaaccctacaagcttaagctccttgaactacacaaggctcttaatatttgaagagt

SEQ ID NO: 19151 - DNA, 423 bp, Glycine max
  unsure (1)..(423): unsure at all n locations
tattgaatntatctctatagagtgtacaacaacgagagagatggactagcaaatcaagacaagcttcattgtgggagaaggctcatgaacgtaatgctaagcgtgttctaaatttgataatagagatggaaggcttatgggttaaacttgggcaatatatgtcaacacgtgcagatgtgcttcctgctgcctatatacgtcttttgaagcagttacaggactctcttcctgctcacccttggaagagtttttcttcaattttttttattttaaaaatattctagtttatgttatggaagaaaaaatgcttttaggaaacaatgtacattatgtggctgtaataaaaagagccccacatattctntgagcattgtagatgattgttgttcattaacctactacaacaattcaaagtcttttctt

SEQ ID NO: 19152 - DNA, 381 bp, Glycine max
agcttatgacaattagaaattctcgagagcttccgatgattaattttgatcgtctcgatatattataagtctgaatcggacctacgtgtgaaaagttatgaccatttgaattttttgagagattccgttgtttgaatttcgagcgtctagatatattatgcgcctgaatttgacttgcctgtgaaaggttataaccatttgaatttctcaagagcttccgttattcaatttcgagcttctctatatgtgatgcgcctaaatcggacatccgggaaaaaagttatgaccatttgaaattctcaaaagcttcggtagttaaatttcgagcatctcgatatattattcgcctgaatctgacatccgtgtaaaaagttatgacca

SEQ ID NO: 19153 - DNA, 370 bp, Glycine max
tcatcactaatttacaagagaaataggaatctatcacagatttagagagtggaccggaaatttatgagtgtatagataataaaatctataaatattatactctaataaataagtttattaattacttacgacatattatagctttttttaattgatcatatgttattctcttcttgacaatagattacaaatcattgatgataattgctatcgaccgatgagttaatttcgtatgacctttccacctacaatacgacaaccttattatactagaaacaaaatgttacataaaattttatattggtgtataatttataatagtcataatgcctgaaaatttgaaatgaacttttaggactattatatatat

SEQ ID NO: 19154 - DNA, 382 bp, Glycine max
  unsure (1)..(382): unsure at all n locations
agcttgtgcatccaataccctgatgaggatgtcccatatgttcttaaaactggactgattcatttgcttccaaagtttcatggccttgcaggtgaagacccgcacaaacatttgaaagaatttcacattgtctgctccaccatgaaacccccagatgtccaagaggatcacatatttctgaaggcttttcctcattcattagagggagtggcaaaggactggctgtattaccttgctccaaggtccatcacgagctgngatgaccttaagagagtattcttagaaaaaattttccctacttccaggaccacaaccatcaggaaggatatctcaggtattagacaactcagtggagagagcctgtatgagtactgggagagat

SEQ ID NO: 19155 - DNA, 456 bp, Glycine max
  unsure (1)..(456): unsure at all n locations
tcttcagaaggacgtanattntgtgcttgaccagtcttgtagagaggcatttgaggagctaaggaggaggcttaccacctctcccatcatgcagccatcggattgggagcttccatttgagctcatgtgtgatgcctccaattatgcacttggggttgtttttccgcacagagttatagactatcacatgtcattgcttacgcctcacgcctctagatggagcccaagttaactcaccaccatcgatacgagcttttagctgttgtttttacattagataaatttagatcttattagcttttctcccatattactgtctatactaaccatgcagccttgacgtacctattgaagaagcttgatgctaaacgtagattgatcaggtagatgcttcttcacgagtttgatattgagatcagagacagaagtggtgcacaacatgtggtgactgatcat

SEQ ID NO: 19156 - DNA, 378 bp, Glycine max
agcttaaaagaataatttctagaaagttatccgtttctaaaacgcacttgaacacatctgaattgaagtagatgaaaactgaactaattttgtaagaaagtttttcactgcaaaattataaaatcctttatttgtatcttaagaaattggttattctaatcttagaaacgtcatttttaaaaataatttcacaaaataaatataaaattttcatgtttgcccaaaatttgtcatattgattatcatcttcagagttggttctcatgtgtaacattaaacttaatcaaactaaattacacataatttattatgttttatgtaatatttatccaaatttgataatgtgattttcaggtttagtgttaattctcaagtcaa

SEQ ID NO: 19157 - DNA, 451 bp, Glycine max
tataaactctatacaagaatgaagctcttataccacttgttataccagtggcctcaataacttaagagggataggctcaaaatgcagaagaagtagcaatcaatttaaaaatgttctttaaatggacaaaattgattgcaacaaaataaatgagataagggaagagagaatgcaaacacaatttttatactggtttggcaaagtccgtgcctacgtccagtactcaagtacccacttgagatttccactccctttgtaaaaatccgtttacaaagtctgaaccacacagggacaacccatcccttgtgttcaggaatcattacaacttaagagacccttagtcccttaatcagtctctttgaatgagaagaaagaaagaagaattctctcttgaagagaaggatattacaattgaagtccatggagaaactcttaatagatttgcaagtat

SEQ ID NO: 19158 - DNA, 393 bp, Glycine max
agcttgaatgcaaactggatgcattggttaacttggtaacccagctggccttgaatcagaaatctgtacctgtcacaagggtttgtggtttgtgctcctctgctgaccaccatacagaactttgcccttccatgcagcaacctggagcaattgagcaacctgaagcttatgctgcaaacatttacaatagacctcctcaacctcagcagcaaaatcaaccacaacagaacaattatgacctctccagcaacagatacaaccctggatggaggaatcacccaatctcagatggctagccctcaacaacaacaacaacagcctgctccttccttccaaaatgctgctggcccaagcagaccatacattcctccaccaatccaacaacaacaacag

SEQ ID NO: 19159 - DNA, 382 bp, Glycine max
agcttttggtatcaattacgagcgtctcgatatactacgggacataatcggacatgcgggtaaaaagttattgttatttgaatttgctcatacgttctgttttcaattacgatcgcctcaatatattatgggattcattcggacatccgagtaaaaatttattgccatttgaatttgctacgagcttccgatttcaattacgagcgtcttgatatacaacgaataacaatccgacatccgagtaaaaagttattgtcgttagaatatgcctccagcttctgtttcaatcacgagcgtattgatatattacgggactcaatccgacatccgagtaaatagttattgccatttgaatttgctcatagcttctgttctcaattac

SEQ ID NO: 19160 - DNA, 383 bp, Glycine max
ttccttgtcccttgatatatttgagggacttatggtcattatgaatgacaaattccttgggataaacgcagcgttgccatgtattcaaagcccgcactaaagtatacaactccttatcataagtcgaatagttaaaggtaggaccacttacattttcacataaaataagtcattagatggccttcttgcattcacacagtcccaatcccaacatttgaagcatcaaactcaatctcaaaagattcctgaacagttggtaaccccaccatcggggcattcctatcttttgcttaagaaaattgaaagcttcttcttgtctatattcccatttgaaaacaacatttctcttgaccaccttattgagaggtgctgcaatgtgccta

SEQ ID NO: 19161 - DNA, 393 bp, Glycine max
agctttgatctaccaccaccgcagccaccgtcatcttaattttctattatttaatattactagtacttctctttctagccgtgtatttggctatattaagacatttggataatttagtatttctttatttgcatggtttgaatgaacaattatgaattatattatatgactatgtgtttcatattttttaattattcatatatgttttatttgaatattatgaatgactttttggattataagacattctatgaagtattatctttctaagattgatgaatgacaagttatctttttgattgttttctattcttttgtataacatttatgtatggtttttatatttcttgcctttctaagtttgatgaatggttaaattatcttgtttaattg

SEQ ID NO: 19162 - DNA, 417 bp, Glycine max
  unsure (1)..(417): unsure at all n locations
tctatagaaggttcgttcctaatttctctacaattgcatcacctctcaatgagctggtgaagaagaatgtggcatttacctgnggtgaaaaacaagagcaagcctttgctttgctcaaagaaaagcttactaaggcacctgttctagctcttcctgacttttctaaaacttttgagctagaatgtgatgcctctggagtgggagttggagctgtattgttacaaggtgggcaccctattgcttattttagtgaaaaacttcatagtgacaccctccctaccccacctatgacaagagctttatgccttaataagagccctccagacatgggaacattaccttgtttccaaggaatttgtcattcatagtgatcatcaatcacttaagtacattagagggcatagcaagttaaacaag

SEQ ID NO: 19163 - DNA, 370 bp, Glycine max
agctttggagtttccaagtgccaactcgtcttcttctttagtccagccttcttctggcttcaattcttcagtgggctttccttctgtgtccagcatcttgggatgttcccagcctttgatgacagctttccaggttctgctatccactgatttgaggaaggccaccattcttgctttccaatattcatagttgcttccatcgagaattggtggtctgttcactggtccgccttctttctccatgttcatcagaatttatctccctagatctcactatgctatcccgagcgtcgctctgataccaattgaaattctgataccacgggacagatgtcgtaccggatgtcacgacatcacgcttcagaacatg

SEQ ID NO: 19164 - DNA, 421 bp, Glycine max
  unsure (1)..(421): unsure at all n locations
tgaaatcgaaaacggaagctctaagaaaagtcaaacgacaataccttttaactcgtatgtccgattgagctcctgtaatatatcgagacgctcgaaattgaaaacggaagctctaagaagagtcaaacgacactaactcttgactcggatgtccgattgagtctcgtaatataccgagaccctcgtaattgaaaacaaacgctctgagtaaattcatacgacaataacttttcactcggatttccgattgagtgccatcggatatcgagacgctcgtaacgcacacggaagctctgcacaagtnaaacgacaataatttttaactcggatctatgatggagccctttaatatatcaagacgctcgaaattgataacggaagctctatgaaaagtcaaacgaccataactactgactctgat

SEQ ID NO: 19165 - DNA, 393 bp, Glycine max
agcttcgacccctccgtcggaaacctagtccagaacttctccttcggatcaaaatcaccctgcttaagctcccgcaaaatcgaagcctccttcccaacagtgtacctgcacaaattaaaagttaaaacccaaaaagcatctaaaattctcaataaaatcaaaaacaaaaagctctagtgcttcattcaccttatccccaattgcagattaagcatcaactcataattcttatgccccttggaaactgtttatccaggtcttttcacctcgctcgagaaaaacaacggttcctctcatctctttctctatacaatccgacgtcgttccgtcgcggtaaaacatcgacgccttcacattatcgataatatcgcacgtgatgtcaccggctccacc

SEQ ID NO: 19166 - DNA, 243 bp, Glycine max
ctatcaaaggcttggcaagacaggtagttgtggatgcattgacgtacacaacagtgacatcatgatactgtactatctatgcacttaaaacgactctattaaagggttaagactacgctactgcatatgtgatctgagatgagatctaccatttatacctgccgaaaggacatacacaatttatgcaccttatcaattatgacgtactcattacctacctctgacttgaaggtgatacatgac

SEQ ID NO: 19167 - DNA, 364 bp, Glycine max
agcttcaacatcagaccacttccagggtgctggaactacttcacatggacttgatggggcctatgcaagctgaaagccttggaggaaagatgtatgcctatgttgttgtggatgatttctccagagttacctgcgtcatctttatcagagagaaatcagacacctttgaagtattcaaagagttgagtctaagacttcaaagagaaaaagactgcgtcatcaagagaattaggagtgaccatggcatagagtttgaaaacggcaagtttatcgatcctgcacattgaacgcatcactcatgagttctctgcaaccatcacaccacctcaaaatggcatagttgaaaggaaaaacaggactttgc

SEQ ID NO: 19168 - DNA, 376 bp, Glycine max
agctttatcttcacagaaatcgtgtgatttttttttctctcggcgagacgattgtgcctaagaaaatctcgagtagttgacatgcgttgcggttcacgccgacgggaacgggtgacaaccagaggattactcccgtcctgatggaggctattagcggcttaatcgaactgtcttgtcatggctgtaccgcggtaaataaaagattcttctctgaagattcgaatcctactgatgaacttattcgttgcagtatgctgtgaatatgaatgcccgctaccttggcatccaccgattgttgtaaagtgaaagctgccggtgcctacactatgaagtaatgcactttttgcttcctatcctactcatacattctgacttt

SEQ ID NO: 19169 - DNA, 416 bp, Glycine max
  unsure (1)..(416): unsure at all n locations
tgaaaaaaaccactccgttcaggggattttcttcctgcaccagctatttttcttctagatccaacagtgagagagaaatttcaaaaacaccattccttaagacggatctgtaatggtcttatggaatgtcaatccgtttgtctatacataatttttaaaaatgtattttacaaattaatttaaaattaatagctcatgtagaattcgaacctatgactttaaggttattaacacaacactctaatgccaataagccaattatattataaaataattacattgttttatgtaacactaaaatttctaatgtatatttaatgcacatgtaagtntatataataatttttgtgataattttgatctcataattaattcttttacatatataaatttttattaaacgtataatttttatt

SEQ ID NO: 19170 - DNA, 385 bp, Glycine max
agcttgtgcattcaatatcctgatgagggtgttccatatgttctaaagactagactaatacatttgctgcccaagtttcatggtcttgcaggtgaagatcctcataagcatcttaaggagttccatattgtttgttccaccatgaagccccctgatgtccaagaagatcatatctttctaaaggcttttcctcattctctggagggagtgacaaaagattggctatactaccttgctctcaggtccattttcagctgggatgaccttaagagggtgttctggagaaattccccctgcatctaggaccactgccatcagaaaagatatttcaggcatcaggcaacttagtggagagagcttgtatgagtactgggaaagattcaag

SEQ ID NO: 19171 - DNA, 371 bp, Glycine max
agctttgagccaattcaaacaacaataactttttactcgaatgtctgattgagtcccgtaacatatcgagacgctcgaaattgaatgttgaacttttgagctaattcaaacgacaataaaatttttctcggatgtctggttgagtcccgtagcatatcgagacgctcgaaattgaatgttgaacctcttagctaattcaaacgacaataacttttttcacggatgtctgatagagtcccgtaacatatcgagacgctcgaaattgaatgttgaagcttcagccaattcaaacgacaataacttttttctcagatgtctgattgagtcccgtaacatatcgagacgctcgaaattgaatgttgaagctctga

SEQ ID NO: 19172 - DNA, 426 bp, Glycine max
  unsure (1)..(426): unsure at all n locations
taaacattcaatttcgagcgtctcgatatattacaggactcaatcaaacatccgagaaaaaagttactgtcgtttgaatctgctcagaggttaaacattcaatttcgagcgtctcgatatgttacgggactcaatcagagatccaagtaaaaagttattgtcgtttgaattgtcttagagcttcaacattcaatttcgagcgtctcgatatgttacgggactcaatgagacatccgagtaaaaagttattgtcgtttgaattggctcagagcnttaacacccaatttcgagcgtctcgtatatgacgggactnaatcagacatccgagtaaaaagttattgtcgtttgaattggctcagagcttcaacattcaatttcgagcgtctcgatatattactggactcaatcagacatccgagaaaaaag

SEQ ID NO: 19173 - DNA, 412 bp, Glycine max
  unsure (1)..(412): unsure at all n locations
ntagattcctttaaagtttttaaggttgaagttgagaaacaatgtggaaaacaaattaagatcgtgagatcagatagaggtgggagtactatggtagatacacagaagatggacaagcaccaggttcatttgcgaaatttcttcaagaacatgagattgttgcccaatacactatgcctgattctccggatcaaaatggtgtggcagaacgaagaaatcgaaccttattagacatggtgagaagcatgaggagtaatgtaaagctttctcccctttgtggattgatcgcttaagacggatgcgtatatattaaactgagttccaaccaaggctgtctcacagacaccttttgagttattcaacggttggaaaccatgtttgcgacatatacgcgtatacggatgcccgtctg

SEQ ID NO: 19174 - DNA, 395 bp, Glycine max
  unsure (1)..(395): unsure at all n locations
agcttgaagaaaaaaggccagtaagtaatgtataaattaacatagtgtgaaagatgagaaaaattaatcttaaccattaattaatcaacccctatattataaatgactaccattatttggtacgaattgagacgaaaaagaattacaaatcatgtcaaatcatttatttaatctatactatcatttatgtctatttctaaattgaattatcaataaataattntattctattagtacatgtgccatttattctaaaattaaaattaataaataatttgtaacactaaatttatcatagtaaataatatacaccaattatcaaacgtgtaagtgttacctaagaagtccctttctccatccataagaataaagtaaaggcctatcggacatataaa

SEQ ID NO: 19175 - DNA, 416 bp, Glycine max
  unsure (1)..(416): unsure at all n locations
tcaagaaaaagatggcctcagcaaattccttatttccataaggaaattctatcaacagacctccaatctttaatggagagggttaccactactggaaaacccgaatgcaaatttttatcgaggcaatagatctaaatatctgggaagccatagaaatagggccttatatacccaccacagtagaaagagtttcaatagatggtagttcatcaagtgaaagcataaccatagaaaaacctagagatagatggtctgaagaggatagaaaacgagtacacacaacctaaaagccaacacataataacatctgncctaggaatggatgaatatttcagagtttcaaattgcaagagtgctaaggaaatgtgggacactcttcgattaacacatgaaggaactacagatgttaaaagatc

SEQ ID NO: 19176 - DNA, 392 bp, Glycine max
agcttaactatttatggattttcccacccatccattctatagtccatttcaccattagcctccaccaacaacctccaacactaggttgaagaccttcttagcacccccaacttacgtgcctactcacatgcaacaccattcattaatgcatgtatgctatgatcattcaaataaaaatcattgtatcacactattaacatattcattcaccatcatcaatataattcatttcatcaacagctcaatccattatatattaattcaattcatcatacatatcgccattcaacatacaatttagcattcatatgttgttcaattccacatcaattcatcattcatatcattctcaccatccatgaactctcaaatagttcatctacacctcatga

SEQ ID NO: 19177 - DNA, 404 bp, Glycine max
  unsure (1)..(404): unsure at all n locations
tcaagaataatggacttagcacacttcttatttctataaggaaattcaatcaatagacctccaatctttaatggagagggttaccactactggaaaacccgaatgcaaatttttattgaggcaatacacttaaatatttggcaagtcataaaaatagggccttatatacccaccacagttgaaagaaccacaatatatggaagcacaacaagtggaagcacaacaatagaaaaacctacagatagatggtctgaagaggataaaagacgagccactataatttaaaagccaaaacataattacatttgacctgngaatggatgaatatttcaaggtttcaaattataagagtgctaaggaaacgtgggacactctacatgtaacacatgaaggcacaacagatg

SEQ ID NO: 19178 - DNA, 378 bp, Glycine max
tagcttatgctgcaaatattcacaatagacctgctcaacctcagcagcaaaatcaatcacagcagaacaattatgacctctccagcaacagatacaatcccggatggaggaatcaccctaatatcagatggtctagccctcaacaacaacaacagcagcctacaccttccttccaaaatgttactggctcaagcagaccatacattcctccaccaatccaacaacagcaacagccccagaaacaacaaacagttgaggctcctccgcaacctttccccaccaactttcacgcacatgattatgcaaaacatgcaggttctacaagagagcacaggctccattcagagcttaactaatcagacgggacaattggctaca

SEQ ID NO: 19179 - DNA, 420 bp, Glycine max
tcaatggagctacatcggtattgtagggcacctagactagtttttgtactagaggtagttttgtaatttcacatgcattaagtgaatatttgatgtgtgtgttcgaaaataaatttaattgaattgggagaagcccaatccaattaaattttagagggggaggtgagcatttgcttgctacaccctattgccacatcatattgtcacactttgtgcatgtccttcatgctttacatgcctcatgacccctaagtacacttactggagaatctcgcacttgatcttggacagtgggctgaaccatagctaaaattctctaatcataattaatgaaaatgtggctccacatattcacacccaaattcaagtgaaatctgaatagaaattcaaatctacctcccattttgtgagacacttacg

SEQ ID NO: 19180 - DNA, 374 bp, Glycine max
agcttgttgtccgtgtacacggttccggtaatggtggcattgacggcaccggtggtcatgctcacttggctgccaccataagtggtgacattaagttgcagccttttagagtcatcaccggcttgggtctgaacggggttggtgagagtgtcgaagttggagattgagaggaaggaagaaagagtgtgaaattgtaaaagttcaaccttttgcctgtcgttgagtgagttgaggaatcctgcttttagctttgagaaggcagaatcaggtggcacaaaatggtcatcccccagaacctgacgtgaggagttgagagttgagttggttgatcaactgggtcgtcttcagaagccgaatcagaacagaaaatctct

SEQ ID NO: 19181 - DNA, 417 bp, Glycine max
  unsure (1)..(417): unsure at all n locations
tagctntattccttacaaccactaccatccaaatgggtggaaataagaaatgttgggcttacgtcctttccacaattcataagaattccttttaagattggcctaatataaattttattttgtaaataatagacaatgtttattggttcagcccataagtgtttaagggttgagtgatcactaagcatggtcctagccatttcctgaagaaatatacttttcatttacctctaaacatattctaatttggtgttcttggagtggaaaattgtggtcataccattctcttcacgaatatttcaaaatatcattttcaaattctcccccatgattacttctaattgaagagatacatgataatgactattgaattactccaaaacaaataaaactaggaaattntgcaatacaggatta

SEQ ID NO: 19182 - DNA, 411 bp, Glycine max
  unsure (1)..(411): unsure at all n locations
tagctttattccttacaaccactaccatccaaatgggtggaaataagaaatgttgggcttacgtcctttccacaattcataagaattccttttaagattggcctaatataaattttattttgtaaataatagacaatgtttattggttcagcccataagtgtttaagggttgagtgatcactaagcatggtcctagccatttcctgaagaaatatacttttcatttacctctaaacatattctaatttggtgttcttggagtggaaaattgtggcaataccattctcttcacaaatatttcanaatatcattttcaaattctcccccatgattacttctaattgaagagatacatgataatgactattgaattactccaaaacaaataaaactaggaaattttgcaataca

SEQ ID NO: 19183 - DNA, 374 bp, Glycine max
tagcttcaacattcaattttgagcgtctcgatatataacgagactcaatcagacatccgagtaaaaagttattgtcgttttaattggctcagaggttcaacattaaatttcgagcgtctcgctatattacgggactcaatcagacatccgagtaaaaagttattgtcaggtgaattggctcagagcttcaacattcaattttgagcgtctcgatatatgacgagactcaatcagacatccgagtaaaaagttattgtccgtcgcattggctcagaggtctaccttcaatttcagcgtctcgatatgttacgagactcaatcagacatcctagtaagaagctattgctcgttgaatttgctcagagattcaacat

SEQ ID NO: 19184 - DNA, 413 bp, Glycine max
  unsure (1)..(413): unsure at all n locations
tatgctgcacacatctacaacagacctcctcaacctcttcagcaaaaacaaccacaacagaacaattatgacctctccagcaacaggtacaatcccgggtggaggaatcatcccaaccttagatggtcgaatccttcacgacagtagcaacaacaaccttattttcaaaatgttgctggcccaagcagaccatacgtncctccaccaatccagctgcaacaacagcaacagccccagaaacagcaaacagttgaggccccttcgcaaccctcactcgaagaacttccaggcaaatgactatgcaaaacatgcagtttcaacaagagaccagagcctccattcagagcttaaccaatcagatgggacaattggctacacagttacatcaacaacagtcctacaattctgacaga

SEQ ID NO: 19185 - DNA, 381 bp, Glycine max
agcttagtgttgcaataatttaatataatttactttattttacttagtatttcttaactaaactaattaatgtatcgaatcatctaatttattaatgttttatttttgtaatatgtgaagtataaataaaacataacagacaaggaagaacatttttcacgaaagaatgaaaagaaacacttatgtcatgggatgatcaacttaattaccttaaattatgttaatatttgaataacttacgaaaaatttatgaattattataattttactacctcaaatttattttgtaataaatttaatatgaatttaatttgtctttcttatcataaggttctgacatgtttgtttgacttacagggtccttcaactaaaggtgagttt

SEQ ID NO: 19186 - DNA, 287 bp, Glycine max
ttagagctcgaatatgccctataatgagtctgattacaattcgatgtgcgacagacttcgacgtagggattgataataccctggagctgcccatcttagtaggcttgaaagagatcgctgttagcacagctgacgtgatagcgaatacgctagcacggatcagacttgctatttgatgtgcaagctgtattgcgaatggctcctgaagcggaatttaatccttacgtatatgtcccgccaatcacaccgccatggtgcattctctatataacttgcactgatgctgc

SEQ ID NO: 19187 - DNA, 408 bp, Glycine max
  unsure (1)..(408): unsure at all n locations
tgaagganaacttgatgccttggtcaacctagtaactcagcttgccatgaatcagaaatctacacatgttgcaagagtttgtgttttatgttcttctacagatcaccatacagatctttgtccttctttgcagcaatttggagtcaatgagcaacctgaagcttatgttgcaaacatttataatagactccctcagcagcaaaaccagcaacaacagaataattatgacctttcaagcaatacatacaatccaggttggaggaatcatccaaatcaagatggacaagtcctcacgacaacaacagtctgtcccttctttntagaatgctgctggtccaagcaagccatatgttcctcctccaatgcagcaacagcagcagcagtcacaacaaagccaacaagcaacta

SEQ ID NO: 19188 - DNA, 235 bp, Glycine max
agcttccattgttcaatttcgagtgtctcgctatattatgcgcctgaatcggacctccgaatgacaatgtatgaccatctgaacttctcgagagctaccatcgatcaatttcgcgcgtctagaaatattatgcgcctgaatcggacctccgagtgaaaagatatgaccatgggaatctctcgagagcttccgatgttcaatctcgaacggctagatctatcatgcgagagtatgc

SEQ ID NO: 19189 - DNA, 418 bp, Glycine max
tgtgcattcaatatcctaatcaggctttttcatatgttctcaagactggactaatacatttgctgcccaagtttcatggtcttgcaggtgaagatcctcataagcatattaacgagttccatattatttgttccaccatgaagcccttgatgtgcaagaagatcatatctttctaaaggctattcctcattctttggagggagtggcaaaagactggctatactaccatgctcccaggtccattttcagctacggtgaccttaagagggtcgccttgcagaaattctcgagacaaatgaccatacagaatatgcaatttcagcaagagacaagagtctccattcagagtctgacaaatcagatggggcagatggctactcagttgaaccaagctcagtcccataattctgacaaattg

SEQ ID NO: 19190 - DNA, 425 bp, Glycine max
tattaggaactataaaactcagcttcacaaatagctgatagaatcaattcacagctgaacaactcaaaccaaggcctaaccgtgtttgcacccactgataatgcattctcaagcctcaaagcaggaacattaaactccataaactcacaagaccaaatgcagctgatacaattccacattctccccactctctacaccatctcacagttccaaaccgcaagtaaccccttgcacacgcaagctggaaacagtgatgatggagagtatcctttaaatgtgaccacctgacgcgaaccaagtgaatgtcgaactgaggtggttgatacaacagtgtccaatactatctacagtgatactcatctctcagtgtatcaagtggataaggtgcttctttctatgaagcttttcggcgcgacggcaccggc

SEQ ID NO: 19191 - DNA, 401 bp, Glycine max
  unsure (1)..(401): unsure at all n locations
agcttctctgaagttaaaccacacacatatatatatcaagacatgggacaaaatagttcttacaaaaatgttttccccagaacaagtacacgtaaattataacaaatgaacaaacaaaaaagcatactttcattttctcctatcaaatttatcctgagaaaacaaacaaaagtgagtcacttacagggaacaaattcttccagaactgaagatcagtcttaggaggctcaactatcttggtggcccaacagaacaacattatgagagagccacatgcaagggagagagttgaggtaagccaagggtatgggaatgcattcagcaccttcttgttataaatgttgaacaccacattcagtgcccaccatgttgcanagtatatcccaatcttcaccttctta

SEQ ID NO: 19192 - DNA, 465 bp, Glycine max
  unsure (1)..(465): unsure at all n locations
aattgtgattctgcattttttttcctaagtatctagattaccagtgtttctccatcgattaagattaatcttattagtaatatataactattattaattcaaaaaaaaattacacataaagaaaatcaaacttaaattgtttgttaaataaataattctcctacatataaatacaatttacaccactatatcaatcctataaactaattttgaatttgaatttgaatttacacaataaagtttgttcaattgttgtaagataatatcttattatatttttttagattagtataaaattgattaaataatatcctattatattagtcataataggacaattcttaaattgattaattagttaatctgatttagaatagctcaattgcattcggtgaaacatacttgtgatgcagaaagaacaggttcaagtttcaagtatctaagacatggntgtatataacctat

SEQ ID NO: 19193 - DNA, 533 bp, Glycine max
  unsure (1)..(533): unsure at all n locations
cgctccaaaacgtcttcgttcggctccgctctgttttccttcaccgagtcggacgaaggagacggagttggcggcggcggcggcggtgatggatgggacaacggtgacggcggagggtcggggttttgggattcgaataatgggaatgatagcacggacttgtattaccggacgatgattgaagcgaatccagggaaccctctgtttcttggcaactacgcgaggtacttgaaagaggtacgtgaattgaagctatttagttattacttttagattaaagcgtgtagatggatgaggtgatagagttgtttatttgatggcaggttcgaggggactatgtgaaagcggaggagtattgtgggagagcgattttggcgaatccgaatgatgggaaggtgctatcgatgtatgcagatttgatatgggagagccagaaagatgcttcgcgtgctgagacttattttgatcaagcggntannagcagctccgatgactggtaactaacatcaaactcttgggtggttctctttatg

SEQ ID NO: 19194 - DNA, 463 bp, Glycine max
  unsure (1)..(463): unsure at all n locations
caatgagctggtgaagaagaatgtggcatttacctgcgtgaaaaacaagagcaagcgttagttttgctcaaagaaaagcttactaaggcacctgttctagctcttcctgacttttctaaaacttttgagctagaatgtgatgcctctagagtgggagttggagctgtattgttacaaggtgggcaccctattgcttattttagtgaaaaacttcatagtgccaccctcaactaccccacctatgataaagatctttatgccttaataagagccctccaaacttgggaacattaccttgtttccaaggaatttgtcattcatagtgatcatcaatcacttaagtacattagagggcanagcaagttaaacaagaggcatgcaaaatgggtagagtacctacaccaatctccataggttatcacatacaaaaagggacaacaaatgtggtagctgatgcgtctct

SEQ ID NO: 19195 - DNA, 500 bp, Glycine max
gacattcatggtgctccgaacaaaggtggagtatggaggattgccttgagggtccgcacttaggcaatcatgaaactcagctccaaactcaaaagtggaggacacatgaacaaccctaagcaataacattcatgtgtctccggaaaaggacgagaatggaggattgccttgagggtcctctcttaagcaatcatggaatacagctccaaactcgaaaatggaggacacgtgaatgacaatgcaattcactcacgtggctccagaaaaggatgagaatggaggattgccttgagggtcctctcttaagcaatcatggaacacaactccagactcaaaagtggagaacacatgaacagccctaagcaataacattcatgtggctccagaaaaggatgagaatggaggattgccttgagggtcctctcttaagcaatcatggaacacagctccagactcaaaagtggagaacacatgaacagccctaagcaataacattcatg

SEQ ID NO: 19196 - DNA, 400 bp, Glycine max
tttgcttgcttatttagtagacccttgaagataaaaccattacattttggttcagaacagcatgtgcaaaaatgtaactgatgaataaaacagagaatgtatgccaatgatataagcaatagtttaaatggtatttaatctgatgtgaaagccatacaaacaaaccttaacagcaccatcatagtctgtggaggcaagatagttctggatgtagttattccaacaaacacaactgagccttgatctgtttgacatctcaactacaggataatggatgtcaatggaatcattgaaaagtgcattgaactcaaatattttaattttctttgatatcccagcagcagcaaagtaatcttcatccctatcaaaactcagagagcatattacatttgcaggatta

SEQ ID NO: 19197 - DNA, 526 bp, Glycine max
  unsure (1)..(526): unsure at all n locations
ggcactatcacgacctgaaagaaagacccttcttcgatgggctgtgtgattntctaagctctggccctgttattgcaatggttagaaaatataaatgactcaaccactgacttaagaatccaacaagccagtgtccctaatctgtctttttttcttgtttccaaaaattgatatcatacgtgtgggaaggacaaggagttatttcctatggccgaaagctaattggagccacagatccacagaaatcagaacctgcaaccattangggtgatcttgctgttgctgttggaaggtaactaatagcatgtttggttacaagatgtggtttttacgtgtactgagatgtttatagttataattntcacatccaaaatgtaatttcttacttcttaacnntgttcaaacatcngtataattgttaaccanagaaaagtgctagtttcgtttctctttacataatgaattgtccatttattggtgatcacaatttgataattgttgtcatgcatgcagaaacatcatccat

SEQ ID NO: 19198 - DNA, 465 bp, Glycine max
  unsure (1)..(465): unsure at all n locations
ctctaagggctaccgtgtctacaacttgcaaactaagaaactcgtcattagtcgagatgttgaagttgatgagtacgcttcttggaattgggatgaagaaaaagtggagaagaacgttcttatacccgctcaactacctcaagaaaaagctgaggaagaagacccaggtgaaccaccttcacctccaccacaacaacaagatcaagaactatcatcaccagagtctactccaagacgagtaagatctttggtggacatatatgaaacctgtaacttggccatacttaaacctggaagctntgaagaagcgttaaagcaggaagtatgggtcaaggcaatggaagaagagatacagatgatcgagaaaaacaacacatgggagttagtaaatcgtccccatcaaaaagatatcattgggggtaagtgggtctataagacanagctcaaccctgatggcaccataca

SEQ ID NO: 19199 - DNA, 501 bp, Glycine max
cagacccttattccatttttttaaccaagccacaactaagtctctcgttacccattatctttggctttggttgttacttcttcctcacttcctctctgcacattttttgtttctaatccttctatttaggtatgtttttatggcatttaaatacttagtatttcttttattatttgattagtatgactgaacatgatgattatatttatttgctattggttgtttacggttatgagttttaaactcaattattttgatgatatatgactagtggtatgtacttttatttggttattatgaatgactttctggattatatgacattctatgaagtattatatttttagtgtgatgaatggctatgatatcttgtttgattggtttctattctcatgtattctggctatattattatgcgatttgaacaatctaactatttcttatttgcatggtatggttgaacaagtatgctatttcgctatgtggatttatagctaatct

SEQ ID NO: 19200 - DNA, 449 bp, Glycine max
  unsure (1)..(449): unsure at all n locations
tggcccatcccaaaaagtgtgggagatattaggagcttccatgggttagcaagcttctatagaaggtttgttcctaatttctctacaattgcctcacctctcaatgagctggtaaagaagcatgtggcatttacctgnggtgaaaaacaagagcaatcctttgctttgctcaaagaaaagctaactaaggcacctgttctagctcttcctgacttttctaaaactttttagctagaatgtgatgcctccagagtgggagttggagctgttttgttacaaggtgggcactctattgcttattttagtgaaaaacttcatggtgccacccttaactacccctcctatgataaagagttntatgccttaataagagcactctgaacttgggaacattaccttgtatcctangagattttcattcatagtgatcatcaatcacttaagttcat

SEQ ID NO: 19201 - DNA, 466 bp, Glycine max
  unsure (1)..(466): unsure at all n locations
agactggaaagcggtttctaatgactcctctgcggcttccacataaggcatagaggatgggcagctcaccaagatgtcttcctcgcttgatacgatgaccagatgcccttccactacgaatttcaacttttggtggagtgttgagggaacaacccccactgagtggatccacgggcgccccaatagacagctgtagggggggttaatatccattatttggaaggtgacttgacaggtgtgagggcctatctgtactgggagatcgatctctcccctaacctctcggcgggtgccgtcgaaggcacgaaccaccattgaacttggctttaagtgggaggcattgaatggtaatttctccaaagtgatcttaggcatcacgtttaaactggaaccattatcgatgagcactttggctacgatatggtccatacacttgactgatacgtgcanagccttattatgccct

SEQ ID NO: 19202 - DNA, 501 bp, Glycine max
  unsure (1)..(501): unsure at all n locations
ttgatggggcctatgcaggttgaaagccttggaggaaagaggtatgcctatgttgttgtggatgatttctccagatttacctgngtcaactttatcagagagaaatcacaaacctttgaagtattcaaggagttgagtctaagacttcaaagagaaaaggactgtgtcatcaagagaatcaggagtgaccatggcagagagtttgaaaacagcaggttcactgaattctgcacatctgaaggcatcactcatgagttctctgcagccattacaccacaacagaatggcatagttgaaaggaaaaacaggactttgcaagaggctgctagggtcatgcttcatgccaaagaacttccctataatctctgggctgaagccatgaacacagcatgctacatccacaacagagtcacacttagaagaggcacttcaaccacactgtatgaaatctggaagggangaagccactgtcagcacttcacatctttgaagtcatgtaca

SEQ ID NO: 19203 - DNA, 397 bp, Glycine max
ttgcttatcctatgcttctttggccgtcgttgcattagatatcttctcaaatgtatcttcatccaccgattgataaatgagaaagagagctttcttgtctctctttcttgactccttcaacgtctcctttacaccttgacttagcgaggcttcatcttgctcctcgaagccattctctacgatatcccacacatcttgagctcctagtagcgccttcatcttgttactccaattatcatagttgttctttgtgagcatcggcatttggaaaggaaaacctccattcgccatcttttgaggatcttgaagctctgataccaatttgttggaaataaggctttttatgtttaggaaaagtgtttaagaatattggagactctgaatagaaacttgatag

SEQ ID NO: 19204 - DNA, 422 bp, Glycine max
  unsure (1)..(422): unsure at all n locations
aaatctgcacctgtcgcaagactctatggtttatgctcctctgacgaccactatatagacctttgcccttctgtgcagcaatcttgagcaattgaacagccttaagcttatgttgcaaacatctacaatagacctcctcaaccttagcagcaaaatcaaccacagcagaacaattatgacctctccagcaacagatacaatcccggatggaggaatcaccctaatctcaaatggtctagccctcaacaacaacaacagcagcctgctccttccttccaaaatgctgctggtccaagtagaccatacatttctcctccagtgcaacaacaacaacaacatcaacagagacaacaatccactactganggccctcctcaaccttcatgggaagaattagtgaggcacatgacaatatagaacat

SEQ ID NO: 19205 - DNA, 541 bp, Glycine max
  unsure (1)..(541): unsure at all n locations
cctctcataactaagctcacctccttgagaagcttccttaagaagattcctaaagaagctagagcttagctacacgtacctctctaatagctaagctcacctccttgagatgagaagctagaacttagctacacaccccctataatagctaagctcacccccatgacaaaaaaacatgaaaatacaaaaaaaagtccttactacaaagactactcaaaatgccccgaaatacaaggctaaaaccctatactactagatggccaaaatacaaggcccaaacgaaggaaaaacctattctaatatttacaaagataagcgggcttatacttggcccatgggctcgaaatctaccctaaggctcatgagaaccctagggccttcccttggatctctagcccaatctacttggagtcttctacccaatgcccttgcgggataggattgcatcataacgtatctaccatanatgcgatcatcntccttttcatcatgggcggtacgacttgggctgcgagaatctctcatcttnttgcatattcct

SEQ ID NO: 19206 - DNA, 326 bp, Glycine max
cgagagctaccattgttcattttcaagggtctctatttataatgcccctgagtctgacctccgcgggaaaaggtgtgaccattggactttctagagagctacgttggttaattttcaagcgtcgctatatataatgcccctgagtctgacctccgaggtaaaaggtatgaccattggaattgctcaagagctaccgtggttcattttcaagcatcgctatatataatgcgcttgagtctgacttccgagtgaaaggttataaccatgcgaattgctcaagagctcgctttgtacagttccgagcgtgttgttatattatgcgcctg

SEQ ID NO: 19207 - DNA, 407 bp, Glycine max
  unsure (1)..(407): unsure at all n locations
ttgtttatcttttccttcaacatacattgttgtaactttattggttgtataaggaagtgtcaacatgagaaaatggtcatatttgcttagccaatcaaccaccaccatgatagcatttttcccttgtgatgttggcaacccctcactaaagtcaatggtaacatcctcccacccttgatctggaattgcaagaggttgtatcaaaccaactggcttctgggtttcatatttatttacttangaaggcaattgaatgtttatcttgngagagcaccgcacctatcacaatatcacttgcatctgtttttacagtgaatggtcaagaaaatttgacatgacaaatgttggtgtagacatcatagttgtctttaactcttcaaaagccttggaagatgactctatccaag

SEQ ID NO: 19208 - DNA, 399 bp, Glycine max
ctttccattcaccacatacacactcccaatttgacttttaaagagaataacaagactatatttatactgtcagcttcatacagaataaatatgaacataaatctgttagatagaaataaatgtgaaatatatatctttttttaaaaaaagaactaaccatcgcaatagtgtcttctacatcatccttgtttctgcctgccagacgcctttttaaggattcaagtgcatctctaagcttcttcaaaagaacatgtttttccaatgatgctgcctctctaagtctagcctaaacttcaccagcatacaaaaagctagttaaaacaggaacatcaatctattagtaaactatgaatataatcattggttatttcagttgcaaaccatttacaataagaatct

SEQ ID NO: 19209 - DNA, 501 bp, Glycine max
  unsure (1)..(501): unsure at all n locations
aaacatggtaccagcttgagagttaatcaaaaaattaatgatgcatctttgtttccgatcagtccatgcatcggacataatagtacaaccatacttgacccattgctccctatggcctttcatcaaattttcagtatattcaacttccttcttcaagagtggaactctgatgtcatgatagctaggaatgggcaaatgtggcccatattgaccaatggctgcaaccatgttctcaaagcttttcaatttaatgaggttgaatgacaaacctgcttggtaccaaaagcgagcaatatgttgatgcaccttcaatacttcattcttatccattgactctcttatgttcatttgcctcagcatctccatttttctccgatngattgcattntctggattcttacagaatntgtccattggtccttttttagtcccacactttgtctttgcacttgcagcagcattacaagagtccgcanactcatcttcttcacttccatcaca

SEQ ID NO: 19210 - DNA, 402 bp, Glycine max
agctttctattttcagtagatgaagatgaatctgtggccacctcatggactcctctaaggacaatagcataatttcttgcactgaattgtgagttggaaaccatcttctcaatcaaattcctagcctcagcaagggtcatatcaccaagagctccaccattggcaacatcaatcatactcctctccatgttgctaagtcccttatagaaatattgaagaaggagttgctcaaaaatctagtggtgaggaaagcttgcacataatttcttgaatctttcccagtactcatacaagttttctccactaagttgcctgatgcctgaaatgtcttttctgatggcagtggtcctagatgtagggaagaatttctccaagaacaccctcttaaggtcatcccagcta

SEQ ID NO: 19211 - DNA, 443 bp, Glycine max
acaacagatcttaattaggaccatttcgatgaaattgactcattacaactatgactttaacaatgatgattataaaaggtgcatgcatgttatgttgcatgtgaatctagtttaagaccatgcaataatgcaaacaagtatacatttcaactaaaatgctaccatgaaatgtttataagccaattaagaaaatgcaagctcaccaattgcatcaacagtggtttttccattggaaaaccttccagaaggtccaccagggaagtcaatcccataaggcaagtaatcagccctagccaaagattggagctggttgttgttcccattatcaaccaaagaatcaccaaaaatgaagtagcatggaacttgtggcgcaccttgaacaccaccccacaagccaagagaaacaacaacaactatgagtgccaacatgcttattgtgagat

SEQ ID NO: 19212 - DNA, 443 bp, Glycine max
gagaagctagagcttagctacacacacccctctcataactaagctcacctccttgagaagcttccttaagaagattcgtaaagaagctagagcttagctacacatacctctctaatagctaagctcacctccttgagatgagaagctagagcttagctacacaccccctataatagctaagctcacccccatgacaaaaaacatgaaaataaaaaaaagtccttattacaaagacaactcaaaatgccccgaaatacaaggctaaaaccctatactactagaatggccaaaatacaaggcctagatgaaggaaaaacctattctaatatttacaaagataagcgggctcatacttagcccatgggctcgaaatctaccctaaggctcatgagaaccctagggcctttccttggatctctagcccaatctacttggagtcttct

SEQ ID NO: 19213 - DNA, 527 bp, Glycine max
  unsure (1)..(527): unsure at all n locations
aataaagcaagttattgacacagcttctccccaaaaatacttaggcaatttcctgccttttaacatgcttctcaccatgttcatgatagttctgttccttctttcagccaccccattgtgttggggtgtataaggagtaggtacttcatgaagcatcccttcatcacaattatttttgaaagtcatgtgaagtatattcagctccacatctgtccttatcaccttaattacctttccactttgtttttcacacatcaatttagacttcttaaaaacaaacaacacttcactctttctttntaatagataaatctacatcatccttgtatgttcatcaatgaaggatacgaagtacctgttacctccaagagactggatctcanagggtccacacacatcttatttgatagtgagagtgagagagacattntagagagaanaactgatatcatttcattctaaaaagttagttacaaagaggtatatatagacctctaaacctctgaactaagcanacagaaacaacc

SEQ ID NO: 19214 - DNA, 497 bp, Glycine max
  unsure (1)..(497): unsure at all n locations
acggcccaataagcacggtgctcaatctccactggaaggtggcatgccttaccaaaaaccatcctataaggagaaatcctcaaaggtgtttggtaagcggtcctgtgagcccatagagcatcttcaagtagctttctctaatcctttatgttgggttgcactaccttttgcaacacttgcttgatctctctttgtgctgctggggcatctcatgcctatatgcaatagtccctttcgctctctaaaattgctcacaagtggtagaaaaatgatgagcatctctaaaaatggtgggccaatagaacccacaatccaataccttcttagtggtctactgaggaccaaaatgactgcgggtaggtgtgccatgacaaaactganaaatagattgaatctcatgatttggcacacatctgcggatcacttggtcactaccaaaccttgaaaaataaggatcatcccacacataatctttagcatcactcttaagnttatct

SEQ ID NO: 19215 - DNA, 334 bp, Glycine max
aatcatccaaatatcgagaaggacaagtcctccataacaataacagcatgtccctcccttgcacaatgctgctggtcctagcaagccatatgttcctgctccaatgcatcaccgactgagacaacacgctgctgaagcccctccttaaccttacttagaagagtcagtgaggcaaatgttcatccagaatatgagatctcaacagcagacaagagcctgcattcagagtctgacaaatcagatggcgcagatggctactcactcaaaccaagctgagtcccaaaattctgacaaactgccttcacaaactatgcagaatctgaagaatgtgagt

SEQ ID NO: 19216 - DNA, 406 bp, Glycine max
agctttggttttgttgactcgctccaatggctcatcatgtcttctattgaacctttcttcatacgctcgaagagaacccatcaattggtctacggtcattgagtctaaatccttagactcttcaatagcacaaaccacataatcaaatttagcgattaaggagcgaaggatcttttccaccacacgaacatcttccatattttctccataacgcttcatttggttcacaatagccaacaccttgttgccaaaatctgagatagattcagattccttcatatgcaatgattcaaactctctacgtagagtttgtacgcgcaccttttttaccttatcaacaccttcaagggaggttttcacaatctcccatgcttctttggatgtggttgcatttgacaccaactcc

SEQ ID NO: 19217 - DNA, 405 bp, Glycine max
  unsure (1)..(405): unsure at all n locations
agcttgttatttagttnttgatgcagcaagtgagggaaaacaattcttaattgttggtacaaaaaaaaaagcagcggattcagtagcacgggcttgaataagagctcggtgtcattatgttaataaaaagtggctcggcggtatgttaacgaattggtatactacagaaacacgacttcaaaagttcagggacttgagaatgcaacaaaagacggngagactcaatagttttccaaaaagagatgccgctatattgaagagacatttagctcatttggaaacatatcttggcggcattaaatatatgacggngttacctgatattgtaataatcgtcgatcaacaagaagaatatacggctcttcgagaatgtataactntggaaattccaacaatttgtttaat

SEQ ID NO: 19218 - DNA, 475 bp, Glycine max
  unsure (1)..(475): unsure at all n locations
gatggatcttatatatctatatatctatagatagatatatagatatagatatatagatatagatcatacaatgaagtaccgcacgagtgggtatataggaatccaaatctgccgaatcactcatgttatgatcttctacatcctaggtcttcccgttccttcatctggcttatgttcttcatgtagcattcagactgaatgactctatgaaattacgtcgctacttccacatggtacgggtaacgtaggagacatctctatttttcccggggggaatccttagaattaccacagcttagctntcaattcgcctctgaccatcaaatgaaatgtgaataacccgtcctcccctctntgaaactntgaaacaaagggtgcttccggttctgtcggtgcttgaaacaattntagtcttctcatattactatatctcgagagtcacataatttatatgaggaactactgaactcaatca

SEQ ID NO: 19219 - DNA, 525 bp, Glycine max
  unsure (1)..(525): unsure at all n locations
gatgatcgtgcaaaatggatagaattaaatgatttaataaaagttggtgcagtgggaagcaaaattttagtgacaacacggagtgactcaattgcttcaatggtgggcactgtaccctcttatgttttagaaggtctgtctgtggagaattgtttgtctctgtttgttaaatgggcattcaaggaaggtgaagaaaaaaaatacccaaatctagtggatataggaaaagaaatggtgaaaaaatgccaaggggttccactagctgttcgaactttaggaagttctctgttcttgaattttgatttagaaagatgggaatttgtaagagaccatgagatctggaacttaaaccaaaagaaagatgacattntacctgcccttaagttgagctatgatcaaatgccatcttatttgangcagtgttctgcttatttttccctctttttccaaggatttggccacattggttctcantttgtgagtctttgcngatcatttggattacttcgatcntcctctggaagt

SEQ ID NO: 19220 - DNA, 510 bp, Glycine max
  unsure (1)..(510): unsure at all n locations
gaaacttctcagctgcttgatattgagtggtgtaggccactctagaactgtctgcaccttagtagcatccatagcaactccttcacctgaaactatatgtcctaagtactctatctccaatacaccaaaagagcatttagacaacttagtaaacaaaacattttctttcaacactttcaatacagcctcaagatggcataagtgttcatgccatgtggaactatataccaatatatcatcaaaaaacactaacacatatttccttaaagcatgttggaaaatatggttcatcaaacactgaaaagaagtcggagcattggttaaaccaaatggcattaccaaccactcataatggccatggtgagttcaaaaggctggtttatgtctatcctcacgttggactagtatctggtgatagcccgaccttatatccagtntagaacaatactttgcaccaaatagttcatctaacagcttggtcatagtaggcacagggaaactatcttttac

SEQ ID NO: 19221 - DNA, 404 bp, Glycine max
ttgctcaacattcaatgtcaagcgtctcgatatattatgggactcaatcagacatccgagtaaaaagttattgtcgtttgaattggctcggagcttcaacattcaatttcgagggtctcgatatattaccggactcaatccgacatccgagaaaaaaattattgtcgtttgaattggctcacaggttcaacattcaattttgagcgtctcgatatgttacgggactcaatcagacatcccagtaaaaagctattgtcatttgaatttgctcacagattcaacattcaatttcgagggtctcgatatattacgggactcaatcagacattcgagtaaatagttattgtcgtttgaattggctcacaggttcaacattcaatttcgagcgtctcgttatattaccg

SEQ ID NO: 19222 - DNA, 464 bp, Glycine max
  unsure (1)..(464): unsure at all n locations
gattgagtcccgtaacatatcgagacgctcgaaattgaatgttgaagctctcagccaattcaaacgacaataactttttactcggatgtctgattgagcctcgtaatataacgagacgctcgaaattgaatgttgaagctctgagccaattcaaacgacaacaactttttactgggatgtctgattgagtctcgtaatatatcgagaggctcaaaattgaatgttgaagctctgagacaattcaaacgacaatagctttttactcggatgtctgattgagtctcgtaacatatcgagacgctcgaaattgaatgttgaagctctgagccaattcaaacgacaataactntttactcggatgtctgattgagtcccgtaacatatcgagacgctcgaaattgaatgttgaagctctcagccaattcanacgacaataactntntactcggatgtctgattgagtc

SEQ ID NO: 19223 - DNA, 398 bp, Glycine max
  unsure (1)..(398): unsure at all n locations
ttgttagcttatattattctatgaaaagaatggtatcttccacaacttctcatcactgagaacacctacacanaatggngtagttgaaaggaaaaatagaactttgcaagaaatggtaggaccatgctttgcacaatctcactaactaaaaacttttgggcagcaacaataaacacaacttgctatgttcaaaatagaatatggtaagacattgattaaaaagactccttatgaactgtggatggaagatgacctaacatttcatactttcatccatttggatgtaagtgttttatccttaatccaagaaatgaactcgcaaagtttggtttagaggtggataaaggtatcttcctaggatattctgacatatctaaagctttcagagtggttaactc

SEQ ID NO: 19224 - DNA, 422 bp, Glycine max
  unsure (1)..(422): unsure at all n locations
gggcagcaatactactaacttgactgtagtgtgcttgtatgtagatgacttgcttgtgacacgaaataatgagactgagattgccaactntaaaggagagatgataagagagttcgaaatgactgatttggaccttatttcttattttcttggaattgaattcaagagaactaatgggggagtgatcatgaatcaagggaggtatgaaagagatgtactgaagaagttcagaatggttgactgcaattntgcagacacacccactgccactggtgtgaacttggtgaaagatcctaatgaagaagaagtagatgtaacattgtatagacaaatggtgggctcactgaggtatctntgttgtactagacctaacttattgtatgttgntggcttaattagtagatatatggagaatcttgaac

SEQ ID NO: 19225 - DNA, 276 bp, Glycine max
agcttcttgttgtcggtaagatatgccccatagtcaatagtgcatgggttactcccttgcgagtggtatcacagaaatggggtacacagattatcactaatgaccagaatgagttgattcccacaataactatgaccggatgaagaatgcgcattgattatcgtaagctaattaaagctacacaaacatatcattcttctcttactttcatggataaaatgttggaacgccttatgggataagcctattatactttccttgatggttattcccgat

SEQ ID NO: 19226 - DNA, 209 bp, Glycine max
  unsure (1)..(209): unsure at all n locations
agcttgtagtcgattacttacatactgtaatcgattaccagaggagtttttcagaaaacattctcaacagtcacatctttctgtgtggttcttgaatggctatcataggcctatatatacgtgacttgagacacgaatntgacaagagttttgaacgaaaaaagtctcatcctcctaaaaagcaaaattgctttatcctcttacaaatt

SEQ ID NO: 19227 - DNA, 431 bp, Glycine max
tatctaacattaaggtttatttaatttgtttgacaatttatgtaataactctatagactatagagtgtttgattaccgaaccttaactactactgaaaattatattacaacaacctaaatttgtaaacattatcttggttattttttatgaggacacatgtattttatacggaagaaaatattgtgagttacataaaaaattattattataagagataaaagtttctctttgaatatttagcatataaatgtacactcaaagctcaaatttggaatcacatatgaatttagactagtcatgagtaaattaatttatacattccatgttaaaacaaattatcatcataatatgaattatttaatttcatattataaatatattaaatactattgcacgacttacccttgaactaatttttacagattaaccg

SEQ ID NO: 19228 - DNA, 415 bp, Glycine max
tatgctgcagacatttattatagttctactcaacagctatgcgcgcaacttcagagtaattatgacctttcaagcaatagatacaatccatgttggaggaatcatccaaatctgagatggacaagtcctgcacaacaacatcagcatgtccctcctttccagaatgttggaggtccaatcaagccatatgttcctcctccaatacagcaacagtgacaacaaagacaacatgcaactgaagctcctacttaacctttcttagaagagttagtgaggaaaatgaccattcaaaatatgcaatttcagcaatagacaacagcctccattcatagcttgacaaatcagatggagcagatggctacttagatgaaccaagctcagtcccaaaattctgacaaattgccttcataaactg

SEQ ID NO: 19229 - DNA, 142 bp, Glycine max
acaagcactgccgcagtggtacaagacagttaatgagtttatgagcgactcacgattcacaagatgtgacatggaccattgctgctatgttaaaaaatatactaatagttatgttatcccttgtgcgtatgctgatgacatg

SEQ ID NO: 19230 - DNA, 440 bp, Glycine max
  unsure (1)..(440): unsure at all n locations
cttccgttgttcaatttctagcgtctcgatatattattttttcgaatcttacatccgagtgaaatgttatgaccattcgaatttgtcgagagcttctgttgttgaatttcgagcgtctagatgagttatgtcaccgaatcggacatctgtgtgaagagttatgaccattcgaatttctcgacatcttccgttgttcaatttcaagcgtctcgatatattatgtccccgaatctgtcttctttgtgaaaagtttggaccattcgaatttctggacagcttccgttgttcaatttcnagggtctcgatatattatgtccccgaatcggacatttgtgtgaaaagttatgaccattgaaatttcttgagagcttccgttgttcaatttcaagcgtctcgatatattatgtcccctaatcagacatccgagtgaaatgttatga

SEQ ID NO: 19231 - DNA, 240 bp, Glycine max
  unsure (1)..(240): unsure at all n locations
tctgcttaaggtacttgtggctggtgcgaggcattggtggctcggtgcttgctctggctgcaaagaggaaagggtttgaggcggtagctttgagaacgatatgagtgctataagaggggaggggcactatacgggtcccattcacatacaaagcactgcttcggctgatttggaagctatagatttggacgctgctgcaaacctatgacagctggctgtatcacggatgatangatcaat

SEQ ID NO: 19232 - DNA, 246 bp, Glycine max
  unsure (1)..(246): unsure at all n locations
agcttatgatattgtcttggaaactataaaaataaattatttgaatcaaagatacattattttcatgcctatcaaatgtgttaaattttaaaattaataaatcattattgatataactttcatgataattattataaaaatcacgaaacttattataaatacataattactataattaaatacaaatataaaatacttcacactatcaatatataatctatttaatcaaatcanaatcaatatata

SEQ ID NO: 19233 - DNA, 433 bp, Glycine max
  unsure (1)..(433): unsure at all n locations
tctattctgaatttcaagcgtctcgatatactatggttcacaatcgaacatccgagtaaaaagttattatcgttagaatatgctcagagcttctgttttcagtttcgagcgtctcgatatattacaggactcaatcggacatccgaattaaaaattattgtcgtttgattttgctcatagcgtctgcttttaatttcaggcatgtcgatatactgcaagacacaatcggagatccgagaaaaaatttaatgttgtttgaattttctcaaagcttccattttcaatttcgagtgtctcgatatattacaggacttcatcggacgtccgtgttaaaagttattgtcatttgaatntgctacgagcttctgttttcaatttcgagcgtcttgatatattacgggactcaatcagacatccgagtaaaatgttattg

SEQ ID NO: 19234 - DNA, 249 bp, Glycine max
agctttgagcaaattcaaacgacaataacttattactcggatgtctgattcagtcccgtaatatatcgagacgctcgaaatggaattttgaagctctgagcaaattcaaacgacaatcactttttactcagatgtctgattgagtaccgtaatatgtcgagacgctcaaaattgaatactgaagctctgagcaaattcaaacgacaataacttgtcactcagatgtctgactgagtcccgtaatatatc

SEQ ID NO: 19235 - DNA, 393 bp, Glycine max
  unsure (1)..(393): unsure at all n locations
agcttaccattataggaggccatggataagagcttggaggaagaacgagatgaatgaagggagagggagagaatagcacaaaattttgtgctctaaatgagctttgaaatctgaagtttaatattcaaatggtcaaagttaaaaaaaatgcacacacatgacctctatttatagcctaagtgtcacacaaaattggagagaaattcgaatttcaattcaaatttcacttgaatttgaaattgaatttgtggagacaaacttcggagccaaaatttcactaattatgattagtgaattntagttatggttcagcccactaatccaagatcaatctcaagattctccattaagcgtgcttangtgtcatgacgcatgtaaagcatgaacgacatg

SEQ ID NO: 19236 - DNA, 427 bp, Glycine max
tgtcacaagtatatttaacctgaacctcttagaagcttggcaaacataccagccagctgattgctggagttaacaatgttggttgtaatttcgctggaaagcaccttttctctaacaaagtgacagttgatctttctatgcctttgatcttttcatgtgtttgtctcccaattttagttgttggagtagttgcctaagttccataagctcacatgtgactattgccatagaacaaaatccaacttttgcactggatctagtaattatgttttccttattgctcttccatgatattaggtttcctccagcaagaacacagtatccttaagtggatcttgtgtctaagggtgacctttcccagtcaacatcagagtaatgaatgatcttttcattgcctttgtcctcatgtaataatcctttacctagt

SEQ ID NO: 19237 - DNA, 430 bp, Glycine max
  unsure (1)..(430): unsure at all n locations
atccaccatcctagcgttacaatatttattaatcatataatngnaagcataagcattaggcacaattccacttggcttcatattctcatacatttaaaacccttccctttgaaggccttgcttgaaaaagccgctcattaacacaccacaactatggtggttggcaaccaaacccaacctatccatcgtgcaaaacaacttctttgccagcctaacatctgcactcttgcaacacccataaatcaacgtagtgtatataacaacattcagagagaaaccaaactcttncaacatggccaaaagccgaaaccctttcatcaagtcaccagcttcacaacgacccttgatcataatcccaaaactgtaggcatccataacaactttacgcttgaattcattatatacccaccaagctatatcgaaacaattt

SEQ ID NO: 19238 - DNA, 425 bp, Glycine max
  unsure (1)..(425): unsure at all n locations
atactcacgcttgccttgccccttgatatatttgagggtttcatggtttctatgaatgacatattccttgggataaaggtagtgttgccatgtattcaaagcccgtactaaggcatacaactgcttatcataagttgaatagttaagggtgggaccacttaacttttcactaaaataagcaattggatggccttcttgcatcaacacagccccaatcccaacatttgaagcatcacactcaatttcaaaagatttttgaaagattggcaacgcaagtatgggggcattacttagcttttgcttaagaacattgaaagcttcttattgtttgtctcgccatatgagaccaacattcttgttgagcacttcattgagaggtgcgtgcaatgtgctgaaatccttcaaggatcggctataanaacttg

SEQ ID NO: 19239 - DNA, 312 bp, Glycine max
ctctttatcacgatttgcttacatgcaagctaggaaatcaacaccttcatctactctcttcatcattcctcttcattttatttctgagatacaagctttaggtaagggggctctttcatgtggtcatggcaatagacaatggaatcctcaaatgtcaccttatatatctgcacagtgtaagggcattcatattacaaatcttattacaactgctccggaaaacatggtctgtctggggagctcacccatgtattctgcatatctttctcaatttactgctgaaaatacaatttcatgttgaattggatgaac

SEQ ID NO: 19240 - DNA, 271 bp, Glycine max
  unsure (1)..(271): unsure at all n locations
agcttcttcttatagtccacctttgcttgaccttctttatgcttaaaaatagaaacattacgcaaaagatcaagaggagttagtgggttaaaaccataaacaacttcaaaaggagaacaattagtggtgctatgaacaactctattgtaagcaaattcaacatggggtaaacaagctctccaagtttttaagttattcctcanaactgtcctaagcacagttcccaaagtcctattaacaaccttccgttgcccatcggtttgtgggtgac

SEQ ID NO: 19241 - DNA, 427 bp, Glycine max
tgcttctacattctctcttgaagagaaggatattacttttgaagtccatagagaaactcttaatggatttgcaagtgtttgcccaagagtttcttttgagagagcatttggcaatgaatttctctggaatatctctctcatttccttttgagaggataatacattttgaacaagcaaaactctctctttaaaattcgtgcccaagttacctatttgtaggcctttgatggccattcacaaattcaatcaaaagatatgactgttggcagattttctgaaaactctccattggtaatcgattacacagttataatttgaagggttatgaattttgaatttgaatttccaaagttcctttgctggtaatcgattacaaacatatggtaatcaattacatgttcaaaattcaaaattgaaaacccttttc

SEQ ID NO: 19242 - DNA, 251 bp, Glycine max
agcttgtttacaaaaacctatttggtttcgattagcttatgagaagaaagtttagggactaaatcccatacttcattccttttaaactgatttaattcttcatgcaaagccaacaaccaatgctcatcatgtagtgcttcacatcttcatcttccacagcattttcttgaacaagagagttagttccatcacaaacaacatgtacatattcttccacacataatgttcttctattaaacactctatatgcc

SEQ ID NO: 19243 - DNA, 347 bp, Glycine max
agcttaatacccaaaatgacatctataggaccaaggtcctttatatcaaaattactagacaagaaagacttcacatcatttatgaaatgtatattactatcaaatatcattatgtcatctgcatacaaacataaaatgacacatccaatatcatcaaattgtttcacatacacacatttacaactattattgatttgaaaaccatatgaaagaacaacttgatcaaacttttcatgtcattgctttggagcttgtttcacaccacataaaaatttacaaagtttgtaaactctcttttctttacccgattctacaaaaccttacgttagctcatactaaattcttct

SEQ ID NO: 19244 - DNA, 303 bp, Glycine max
  unsure (1)..(303): unsure at all n locations
agcttcgcacatgataatggagacacatgaacagcgctaggcaatgacattcatggtgctccgaacaaaggcggagtatggaggattggcttgagggtccacacttaggcaattatgaaactcagctccaaactcgaaagtggaggacacacgaacaaccctaagcaagaacattcatgtggctccgaacaaggacgagaatggaggattgccttgagggtcctctcttatgcaatcatgaaacacagctncatactcaaaagtggaggacacacgaacagccctaagcaagaacattcatgt

SEQ ID NO: 19245 - DNA, 437 bp, Glycine max
tatgctgcaaacatttataatagaccctctcagtagcttaaccaacatcagtagaataattatgatctttcaagcaacagatacaatccaggttggaggaatcatccaaatctgagatggacaagtcctccataacaataacagcatgtccctcccttccagaatgctgctggtcctagcaagccatatgttcctcctccaatgcagcaacaacaaagacaacaagcaactgaggcccctccttaaccttccttagaagagttagtgaggcaaatgtccatccagaatatgaaatttcagcaacagacaagagcctccattcagagtctgacaaatcagatggggcagatggctactcagttaaaccaagcttagtcccaaaattctgacaaactgccttcacaaactatgcagaatctgaaaaatgtgagtgtcat

SEQ ID NO: 19246 - DNA, 334 bp, Glycine max
agcttgaatatttacaatatcttgctcgctgtctcaacgaatgctcctgttctctccacggaagcaactataacgtggcaatggtataaattgcttaagggagaaaatcttattggaaaacatttcaaccatcctccggatgatccatatggttcttggtatggaaactttacggtgccccttgaaaacccattcccagccaaaactaaaccagattccttaaaaatgagttctaaaggctcatctgatgatgacattgctgggtctgaggatgcgagtccgacaagtcacgacagatacacaacttcaatgaatcgctctgctggaaatgatc

SEQ ID NO: 19247 - DNA, 427 bp, Glycine max
tctgatcacctggagcacctccaaatcgcattacatactcttgcttacaatagtttcgttttaaaactgtctaaatgctcattcgcgacccagcaggtggattacttgggtcatctggtctctgtgaagggagtagaacgagtaccggaaaaggtcatagctgtgcaacaatggccgactcccaattccactcgtgccttaaggggattcttaggcttatccggattctatcggcgtttcattaggggatacgccaccctcgcggctcccctcacagctctcttggccaaggacaaattcaattggaaccctgaggctgatcgtgcctttcatcttctcaaagatgctctgtgtcaagctcccgtgctgcgattacctgactttaattccgaatttgtgattgagactgatgcctcgggaattggta

SEQ ID NO: 19248 - DNA, 223 bp, Glycine max
  unsure (1)..(223): unsure at all n locations
agcttttatcattagtttacttctgagttgtgtaaacttggctttcttcaatggttttgtcggtaaatcagcaagattatcttctgatttgcagtagatgagcttgatttttnctttgtcaactttgtccgtgataaaatgatacctagtatcaatgtgcttgttgctcccatgatctacagggttcttagcacgactgattgctgacttattatcaatcagt

SEQ ID NO: 19249 - DNA, 207 bp, Glycine max
agcttaagagatagttagatcaaagagcacttagagaaacaatttgtgagacctagtgtagcgtgtcaccctgcggagtgtcggtgttgttagtcaagaagaaggatgcgaccataaagctatgtgtagactatcgtcagctaaacaaggtggcgattaacaataggcaccctctgcctagtatagatgacctgatggactacttag

SEQ ID NO: 19250 - DNA, 420 bp, Glycine max
  unsure (1)..(420): unsure at all n locations
tcagctntgtccccaaggcttcatgtagactcgtccttaatcgcgaagtgaacctcggatccctgtcagatacaatactagaaggaatttcatgcaaccttactacttccttgatgtacaactccacgagtctctccattctatacttcatattcactgggataaaatgagcagatttggtgagtcgatctactatgacccacacagcatcatgtccacgactagtcttgggtaaactagatacaaaatccatagatatgctctcccatttccattccggaatctccaatggcttcaattctcccgatggtcgttggtgctcaaccttagccttttgacaggtcaaacatcttgctacatattcggctacatctttcttcatgccatgccaccaaaaacttctcttcaaatcttggtaca

SEQ ID NO: 19251 - DNA, 322 bp, Glycine max
  unsure (1)..(322): unsure at all n locations
taagctttccaacgggcatcgcttcatgttagtgaccgttgattacttcaccaagtgggaggaagcagcttcatatgctagcgtgactaggaatgtggtgatcagattcattaagaaggagataatctgcagatatgggttgcccaagaagatcatcactgataatgccaccaatttaaacaacattatgatgaaggaaatgtgtgaggatttcaaaatccaacaccataatttcacgccttattagccaaagatgaatggngcagttgaggctaccaataaaaacatcaagagaatcatccagacgatgactatgtcatac

SEQ ID NO: 19252 - DNA, 427 bp, Glycine max; identical to SEQ ID NO: 19236

SEQ ID NO: 19253 - DNA, 410 bp, Glycine max
  unsure (1)..(410): unsure at all n locations
tgtaggccttggatcttcttcatcaaaggagtcctttgcttcttgaatatcaatggccgcggaatggacaagaagaggagttgagaggagatgccactccaaggacaagatgagtcaagaataatctcaccaccatggactctatttatcgcccaagtgtcacacaaaatcggagggaaatctgaatctctattcaaatttcacttgaatttcaaattgaatttntggagccaaaatttcactaattatgattagtgaatgttagctatggttcagcccactaatccaagatcaagcctacactcctccactaatatgcttacgtgtcatgaggcatgtaaagcatgattgatgtgcacaaagtgtgactatatgatgtggcaatggcgtgtagcatgcacatgctcacc

SEQ ID NO: 19254 - DNA, 342 bp, Glycine max
  unsure (1)..(342): unsure at all n locations
tctggtgtgacatcttgacttgctttccaatctgacattcaccacagattatgccttcttctattttcagattgggaatgcctctaacagcacctttgtcaatgattttcttcatgcctcttaagagcagatgtccaaatctttgatgccatattttgacttcatcttctttggaggatagacatgtggaggagtaactggtttcttgaggtgtccatacgtaacacttgtcctttgatctgctgcccttcattagaacttcactcttctcattcgtcancaagcccctgactttgtgaagttacattgaatccttcatcacacaactgactgatgctgatc

SEQ ID NO: 19255 - DNA, 448 bp, Glycine max
  unsure (1)..(448): unsure at all n locations
gcctcagcaaattccttatttccagaagggaattctatcaatagacctccaatctttaatggagagggttaccactactggaaaacccgaatgcaaatttttattgaggcaatagatctaaatatttgggaagccatagaaatagggccttatatacccaccacagtagaaagagttacaatagatggtagttcatcaagtgaaagcataactatagaaaaacctacagatagatggtctgaagaggatagaaaacgagtacaatacaacttanaagccaaaacctaataacatctgccctggaatggatgaatatttcanggtttcaaattgtaagagtgctaacgaaatgtgggacactcttcgattaacacatgaaggaactacaaatgttacatgatctcngataaatacactaactcatgagtatgaattatttagaatgaat

SEQ ID NO: 19256 - DNA, 466 bp, Glycine max
tggaggaagaaagagatgaatgaagggagaggaagagaagatatcgattttctgtgctctaaatgagctatgaaatctgaagtttaatattcaaatgatcaaagttgataaaaatgcacacacaatgcctctatttatagcctaagtgtcacacaaaattggagagaaattagaatttctattgaaaactcacttgaatttgtggagccaaactctggagccaaaatttctctaattatgattagtgaattatagctatggctcagcccactaaattcaagatcaagtccaagattcccactaactatgcttagtggcatgaagcatgtaaagcatgaagcacatgcacatagtgtgactatatgatgtggcaatgcggtgtagcaagcaaatgcttaccttccaattcaattaaatctatttttcaacacacacatcatatattcacttaatgcatgtgaaatta

SEQ ID NO: 19257 - DNA, 410 bp, Glycine max
  unsure (1)..(410): unsure at all n locations
tganagtgtgtaaccaaccattntctcattgtagaacaccggtaacgtgtatactatcattgtgatcatctttttctctgtcattgaaggtgccacttgagctgtcaagtccctccacctctgggcgtattccttgaatgactcatgctcttttttacacatgttttgtagttgcgttctatccggagccgtatcataattgtactgatattgcctaacgaaggcaaccattaagtccttccaagaatagactcgggaaggctccaagttagtgtcataccctaattttgctcgcgattattacttgcgacatgcaacctttgattgcgcgtttcaagatacttgcgcacctttgttgcacaatatgtaagtcttgagacgcaccggaagtcacaaggagcagggttatg

SEQ ID NO: 19258 - DNA, 405 bp, Glycine max
  unsure (1)..(405): unsure at all n locations
agcttggcactgattntgtaggtataacatcattattcatgttcttaatttgcatgttaaatatggagaaaaatgtgtttttagtctttatatttttggtaaaatataattaagggttctgtacctttatattgataaatttaattttcccaactctaaacggcgtgtatttaatctcttttatttctaagatttcattatattttttaaagctattatatccataaattgttaatcccatcgatactaatttcgatctacttatacaaaatctcgatttaagctgcgaaagaaaaaaataacatgtaatcgagagacaagattctctagaagcgattagtcacttatacaaagatcaatatcagcaaaattagtgaatatttcatataaatactatgctaaaat

SEQ ID NO: 19259 - DNA, 391 bp, Glycine max
  unsure (1)..(391): unsure at all n locations
ngagcatatggatggcctttggctaaatcagcagcatgagccgtaatcttgtaagctataacgccagccttcacgtgatcccggtttggcaacccaagatgttcttttggagtcacataacacagaagagctgtacctagtgccccaatattcgcagcaccaattgcagacgcgatgtgatcatagccaggggcaatatcagtattctaatgaccaagagtgtaaaaaggcgcttcactacaccattctaactgtttctgcatgttttcacgaatcttgtgcattgggacatgcccccgccttcatctcatacctgtaaagtaacttaaagtaaaaaatataccccatcatcttcaagatatattgatggtaatatcgcctcacatgatga

SEQ ID NO: 19260 - DNA, 433 bp, Glycine max
  unsure (1)..(433): unsure at all n locations
tgtacgccttggatcttcttcatcaaaggagtcctttgcttcttgaatatcaatggcagcggaatggagaagaagaggagttgagaggagacgccacttcaacgagaagatgagtcaagaagaagctcaccaccatggcctctatatatagcctaagtgtcacacaaaattggagggaaatttgaatttctattcaaatttcacttgaatttgaaattgaatttgtggagccaaaatttcactaattatgactagtgaattctagctatggttcagcccactaatnnaagatcccctcccagattctccataagtgtgcttaagtgtcatgaggcatgtaaagcatgaacgatgtgcacacagtgtgactatatgatgcggcaatggtgtgtatcatgcacatgcttcacctcccctctacaatttaattgga

SEQ ID NO: 19261 - DNA, 445 bp, Glycine max
  unsure (1)..(445): unsure at all n locations
taacgcattntacctctaagggtcttgtaattgcataatggtggtcagtctctcgatgttcccaccatggtatagcttcaatctctgaccatttactatccatgttctgtgcggagtttctgactgagggtcaagtaattccacaactccatatggcttgacttccttcatggtgaatggtccagactatttagactttaatttgcttggaaacaactttaatcttgagttgaacagcagcacttgttgtcctggcctanagtccttctttagcagcttcttgtcatgataagccttcgtttttctttgtacagctgaaagactcataagcattcaatctcatctcttccagctccaagagttgcaacttcctcttttcccctaatagagcctcatcaaaattcaggaatttcanagcccagtatgccttatgttccatttctac

SEQ ID NO: 19262 - DNA, 369 bp, Glycine max
agcttaaacattcactttcgagcctcacttcaacattcaatttcgagcgtctcgatatatgacgggactcaatcagacatccgagtaaaaagttattgtcgcttgaaatggctcagagcttcaacattcaatttcgagcgtcccgatcgctcacggcactcaatcagacatccgagttaaaagttattgtcatttgaattggctcagagcttcaacattcaatttcgagggtctcgatatattacgggactcaatcagacatccgagaaaaacgttattgccgtttgaattggctcagaggttcaacattcaatctcgagcgtctcgatatattacgggactcaatcagacatccgagaaataaattat

SEQ ID NO: 19263 - DNA, 410 bp, Glycine max
  unsure (1)..(410): unsure at all n locations
tccatcaggatgtcttattgagtcccgtaatatatcgagacgctcgatattgaatgttgaacctctgagcattttcaaacgacaataacgttttactcggatgtctgattgagtcccgtaatatagcgagacgctcaaaattgaatgttgaacctctaagccaattaaaacgacaataactttttaatcggatgtctgattgagtcccgtaatatatccagaccctcnaaattgaatgttgaagctctaagccaattcaaacgacaataactttttactcggatgtctgattgagtcgcgcactataacgagacctcgaaatgaatgttaacctctgaccaattaaacgacataactatttactcggatgctgattgagtcccgaatatatcaaccctcgaattaatgtg

SEQ ID NO: 19264 - DNA, 397 bp, Glycine max
  unsure (1)..(397): unsure at all n locations
agcttgcacacaagattctccttgcctggcacctcaaaaccttcaggttgggtcatattgatgtcttcctctaaatccccatgcaagaatgcagttttaacatctaactactccaagtgaagattctctgcagctacaatactcacataactctgatggtagtcatctttacaactggagagaagatttctgtgaaatcaattccttgtttctgctgaaaccttttcaccacaagtctctccttgtatcttcttctatcgtcggattnttcctttagcctatagactcacctattctgtaacgctttctttccttctangaaattagttaaagaccacgtcttattcttttgaaggggtgtcatctcatctttcatcgctagctcccactcaatagt

SEQ ID NO: 19265 - DNA, 375 bp, Glycine max
  unsure (1)..(375): unsure at all n locations
tactgattgagaagattgaaaccacaataatgacatgtccatgctacgcatgccatcaaaaggaggcttatggtggtaagagaacaataatgatttatcggccattcatgctctccatcgtgaccataacagacgtatgtatctatgtagcattgctctttacagactcacctacagtttactatgtctttcaacccataaattgcgaatcattacagcatggcgcaatgtcattttgtatattaattagtttctactagaagctaccaccttttgttaatatattattntaaacctcatacagtcttaatttctcattatggactaaagtacatgcatacagaattaacatagcatcgacttaagcatttcatt

SEQ ID NO: 19266 - DNA, 347 bp, Glycine max
ttgcataccccaaggatccatcagtatattacttgtgaaatatagccacgagggcgggctcataggccactttgggatacataagacccttgtcatactcagagacaagttttattggccccgtgtgaagaatgatatccataagctttgcactatgtgcgtggcttgtctacaagccaagtctacggtgatgcctcatgggctatacacacccttacccatcccatctgcaccttgagtaaacattagcatggacttctgccttgggctatctagaacccaaagagcccgcactctctctttggcgggtggataggtttatcaagatggctcactttataccatgc

SEQ ID NO: 19267 - DNA, 415 bp, Glycine max
  unsure (1)..(415): unsure at all n locations
ntggatgcaaatcagtttggaaaactgaggggcaagctgggcatttgtctgctagaggaattatagcagctactgcaatctgaacgtgcccaaacgaatcacttaacattaatagcacgttcaccacaaagaaaattcgaccgttgcctcacacgcccctctacattcttcattcaaatttatatctgcttggcattcgtgtttttaccagcatttcccaatagccttctgagatttacgaaatcattccaaacgctctgcttttccatggctacctcaccaaaagaacttccgctcctggtcacccgctgtaccatcatctccgcaccaggaacaaccagaattcaacatccaacccatacaaataattcctgggcaagcttctgtccctgagaaactggttccagaagacaac

SEQ ID NO: 19268 - DNA, 300 bp, Glycine max
agctttgttatctactgaaggctctcgaagagtcagatgagggagatagcgttacggttacagaggagtggacaaagggtcttgtgggttatgaggaacccatatgagagaagcgaattgattttggaggaattgttgccataagggcccctgcaccgacctacagagaggggaatggtgatgaagaattgcgcgccacaagttaagattctgagtcatgactcggtgggtgggttcgtgactcactgcgggtggaactcggtgttggaagcggtctcttggggtgtgcctatggcgtcg

SEQ ID NO: 19269 - DNA, 402 bp, Glycine max
  unsure (1)..(402): unsure at all n locations
agcttattgtgtgttgatgattataacacatatatatgtatatgaattgttaaaataaattatgaattaatagttcaaataataaaattaaattgaaggaaattaatatattaagattcaacgataaatactttcaatgcattctagcctacttatttattaactttttttaattgataataatatagtttggtttaatatatacatgtttagtatgtaaatactaatatggtgtgacgtgcatatgattcatgaggcgggataacatgctgctttgggattataacattgtcgatnacactgagtgtatgtgataaattgagtatgtgtcgaattataagatacaagcgtattgagattttgtatgcatcgagctgtgagctatgaactatactattacac

SEQ ID NO: 19270 - DNA, 395 bp, Glycine max
  unsure (1)..(395): unsure at all n locations
agcatctactaagtcctcttcactatctctatcgagccacaaccagcttctgcaggtgtttcagcactgttacagtgttgcatattgaatctatgcagaatatcagtagcatatttttgctgtgtgagaacaattccttcactacacccttgaatttaattccagggaaatatgacaactcacccaggtcagtcatgtcaaactcatccatcagatttttcttaaattcattcacttttgcttcattgtttcctgtcaataacagatcatcaacataaaggcatagcatcataatgtcttcacccccagacttcacatacactccatgcttagacctacatttcacanaacccaaattggtcaagctcttatctattttcatgttccaagcacgt

SEQ ID NO: 19271 - DNA, 353 bp, Glycine max
agcttaatctttggcgtcatttagctcggttaaagtccaaggcttcagagatatttgacattatccttaagatgaacaaagatgaagcttaagctttggcttcactccaattatataatatgcttcaaatactcaccattgactggattccccccgcgtaatccacaacaatcaaatttggatactgatcaagcacagatgcaagagcactgtccctgtctgaaggaccatgcacatgaaactccttttcaccaatctgaaaagtcttgtctgacttctcttcacacccaaacgacacaggaacaacattcagttcagcagctttcgccgcattaatcacggtctctcccatt

SEQ ID NO: 19272 - DNA, 404 bp, Glycine max
agctttgagcaacttcaaacaacaacaactttttactcggatgtctgattgagacccgtaatatatccagacgctcgaaattgaataccgaagctctgagcaaattcaaacgacaataagtttttactcgtatgtttgattgagcctgtaatatatcgaaacgctcgaaattgaagaccgaagctctgagcaaattcaaacgacaataactttttactcggatgtctgattgagtcccgtagtatatcgagacgctcggacttgaatgccgaagctctgagcaaattcaaacgacaataacttttttcctcggatgtctgattgagtcccgtaatatatcgagacgctcggacttgaatgccttagctctgagcaaattcaaatgacaataactttttactcgg

SEQ ID NO: 19273 - DNA, 410 bp, Glycine max
  unsure (1)..(410): unsure at all n locations
agcttctatatattaatgaataaaattatcgatgcatgtgccatgttatttttgccctctcacacgcagttctgaacctccttagggttttgactaatgtccactttgttcttctttttaaattcctatacaaaatgggtcaccattccctttcaaagtcatgtccaccttaagtgagtgtttccagcaatagccttatcttggaatagcttatccttgatcgttagaagtacaactgccaaggtgaaacatgaaaatgttttgctctccaacgcaattagtcttgttgtcaaggccatgtggtcagcaactactgaatataaagcagcctcaatagcagcggcttctcttaactctccttcaaccatctttatcttgttntccaagtagtcaatcttgttgtctaaaat

SEQ ID NO: 19274 - DNA, 344 bp, Glycine max
  unsure (1)..(344): unsure at all n locations
agcttgatcttttagttntttatctctaatctttaatccctgaacgaactattcaagtttgtaattcgaactttaattatcttttaattcgttcctaaagatagatcgccaaatctgttgctaactgcacattaatctgttaaagactcacagattcatgtgtccagtattttcgggcaagatgtcctggacatcgtatgcgacattcgtggatcctgcagcttcaattcttcatttgacattttatcttgccttgtgcattgtgcaagccaatctgactccttgacataacgtggacatcatgtgcagcaacttcagctttccttcaatgtctaagtgcttat

SEQ ID NO: 19275 - DNA, 399 bp, Glycine max
  unsure (1)..(399): unsure at all n locations
tcagatntcagagctcttcagagcacaaaattcatgctcttctcttcctctcccttcattcatctccttcttactccaagctcttatccatggcctcctatggcggcgagcttnttctagactcatcttctccttgaagtggtgtctcctctctcttttccttctccattccgccggcattcatcttccaagaagaaaaggaatccattgatgaagaagatcctacgcctacaagctccaatggagcttacaccatgtggtatcaagagcatctccatctaggggatgttccttcgctccctctatcttctgtccggagaaatctctntaattacttggtcttcatcttattctccatgtatatcctccattatcttgtgagatggcgctgtctagagt

SEQ ID NO: 19276 - DNA, 409 bp, Glycine max
  unsure (1)..(409): unsure at all n locations
tgaatgttaatagtgcattggagaagagagcgcgatagggtacacggagaagaagagagcggagcacaataggtcgcatcaaatataatttaaaatgtacgctcaacatcggttttcaataaaaaactgatgttaacaaattgatgagaacgttaacatcggttttattcaacaaaccgatgttaagggtgcttccttaacatcgattttttgaaaactgatattaacgtcgcttcgttcacatcagttctcttcaaaaccgatgttaaggaatacacattatttanaattacccaccccatttacgtaacatgcggtntgtgaaaaaccgatgttaatccgccgatgttaaatctggttcttctagtagtgaaccataccatcaatatttcagttgattgataaaata

SEQ ID NO: 19277 - DNA, 282 bp, Glycine max
tgcttctacagttttgtacgatatatcagccaattgactctgtgtgtcattaaactctaatatgcactcgcccttttgaacatggccttgatggatccgacgccttattcaatatgctttgctctagagcgccgaatataatttttggatagattgatccccttcatattgccacaacggatacgcatatgtacaagctctcagccattatcagagagttgctgtctcatccaaatgatctgtgcacataaacttccagcataaatatattccgcttctgca

SEQ ID NO: 19278 - DNA, 458 bp, Glycine max
  unsure (1)..(458): unsure at all n locations
tcaagagaccgcttcaacttcaagaagatcttggaatgtggcatattcaaagagtcattgttactccaaaagtctaggtcaaggtgaattaaggagagagattgcaacacaaaactttttcattcaatcaatgagttccataggcatggagtccttccaagaggtactaacttatcttttttagatcaactgccaatgtgataatacacaaagtttagatcattttagacctatttctttggttggatgtttgtataaagttttggcaaagattttagctaatagaatgaaaaatgtacttgataaggtgattgatcctagctaaagtgctttcctagaggggagagaagttctacataattcggtggtggccaatgaggttgaggatgaagtaaaaaggggaaaaaagtcatgtttgttgctcaatgtngcatttgagaaggccttcaacttgatgt

SEQ ID NO: 19279 - DNA, 391 bp, Glycine max
tgccgccacggagttttccgactatgctcttgtgtggtggaacaagctacaaaaggagagagcaagacatgaagagccaatggttgatacatggacagagatgaaaaagatcatgaggaagcggtatgtgccggctagttactcaagggacttgaaattcaagctccaaaaactaacccaaggcgcacgggggcgaggagtatttcaaggaaatggatgtgctcatgattcaagcaaatattgaagaagatgaggaggtaactatggctcgatttcttaatggtttgactaatgatatccgtgatattgttgagctgcaggagtttgttgaaatggatgatttgcttcccatagcaatccaagtggagcaacaattaacaaggaagggagt

SEQ ID NO: 19280 - DNA, 454 bp, Glycine max
  unsure (1)..(454): unsure at all n locations
ggcctaattaacctgaaattgagaganaatgattattaaacacacaaaatggaagtactaagtatttattatctatacttaacaaaaaaatacttataacactacaaaataaccataaattggaagagtttgatacaatttacataagttttatacacaaaagttattcatatttaccgacgatcttcttacattcttattagcagcctcaactgccccattcatcttgggccgataagacgtggaattatggtgttggattttgaaatcctcacacactttcttcatcatattgttgtttaaattggtggcattatcagtgatgatctttntgggcaaaccatatctgcaaattatttccttcttaatgaacctaatcaccacattccaagtcacactagcatatgaagctgcttccacccatttgctgaagtaatcaatggtgactaaaatg

SEQ ID NO: 19281 - DNA, 406 bp, Glycine max
  unsure (1)..(406): unsure at all n locations
tctggtgggacatcttgacttgctctccaatctgacattcaccacaaattctgccttcttctattttcagattgggaatgcctctaacagcacctttgtcaatgattttcttcatgcctcttaagtgcagatgtccaaatctttgatgccatattctgacttcatcttctttggaggacgcacatgtggcgagtaactggtttcttgaggtgtccataggtagcagttgtcctttgatctgctcgccttcattagaacttcactcttctcatttgtcaccaagcattctgactttgtgaagnttacattgaatccttcatcacacagctgactgatgctgatcaagttcgcagtcagtcccttcaccagcagtactttgtccagactaggaagtccatcatggact

SEQ ID NO: 19282 - DNA, 458 bp, Glycine max
  unsure (1)..(458): unsure at all n locations
tatgctgcanatatttacaatagacctcctcaacctcagcagcaaaatcaaccacaacagaacaattatgacctctccagcaacagatacaaccctggatggaggaatcaccctaatcttagatggtccagccctcagcaacaacaacaacagtctgctccttccttacaaaatgttgctagcgcaagcagacatacattcctccaccaatccaacaacagcaacaaccccagaaacagccaacagttgaggcccctccacaaccttcccttgaagaacttgtgaggcaaatgactatgcagaacatgcagtttcagcaaaagaccagagcctccattcagagcttaaccaatcagatgggacaattggctacccaattgaatcaacaacagtcccagaattctgacaagctgccttctcaagctgttcaaaatcccaaaaatgtcagtgccatttca

SEQ ID NO: 19283 - DNA, 445 bp, Glycine max
taattccacttttgattccttaattattctttttagtgcattccttaattagtataattttacactttcggtcttctaatcaactatatatatagacaatttgattctctttgtgacaatcccaaattattctcgtaaaaatattttattttaatatttaatcaattctattagggctattcactgcccattatacctgtaattaataattgattattataattgattgtcataattaaatgaaactgaattattaacaaaaaaaaataaaatataaaaatattatataattgattcttttaatatataaaaatattatataattgattgtttatatcttaatattattttaagttaactatgttaaaacactaatatatatttgtaattatagcatgttgaagagtatgtatagctatatatctttaatagagtttaacaaata

SEQ ID NO: 19284 - DNA, 451 bp, Glycine max
tctctgcatgatgaattgccaaaatggatggatccatgcttattgatttcttttctgtgtatgtgacagggggggaaaaggagtgatgggcgaacacctgacggaatacgtccaattaactcgagatgtggcctattacctatagcacatggaagtactctttttacaagaggcgagacacacgctctgacccactttatttgttttccagtttatgcttttgatgatatctgttggtgtctatatatgcttatgcaagtcacattatctcttttctgtgtttgttagttctattagaagggagatagaatgatcaaacacaaaggaggaacaaaactaataatgctgactccttggacctttaacacacttctcatttaaagtctccaattgtaatcaacttggatataatctagaaactagtgattggaagtcagtattctgattactc

SEQ ID NO: 19285 - DNA, 430 bp, Glycine max
tttgtttgtggagtcgcctttgatctcaactgtaccatatggaataacattagtaacaacaaaaggaccaatccacttagacctcaacttaccactcatgagtccaagcctagaattatacaataacattttttgcccaaccacgaagtcttttttaactatcatgctatcatggaacttctcgtctctccctgcagaacttggcattctcgtaggcttctatgcggatttcatctaactcactcagttgcaactttctttcctcaccagcttgatccatagagaagttgcaagtcttcactgcccagtaagctttgcgctcaatttccactggaagatgacatgcctttccaaagacaacccgataaggagacattcctatgggtgctctataggcagtccgatgtgcccaaagagcatcatcaagcct

SEQ ID NO: 19286 - DNA, 450 bp, Glycine max
tcatatggagccatgccaatggtagaatgaacactattgttatatgtgaactctatcaacaggagagaacactcccaactccctttttgttctaatacatatgctcttaaaaggtcctccgacgactgaatggtccgttcagttcggccatcagtctaagggtggtaggctgaacttactctaagcttggtcccaacgctttgttcaaactcttccaaaacctagaggtgaatatagaatctctatcagacactatgctagatggcacaccatgtaatctgacagtctcactaatgtacagggagcgtaacttctctaaggaaaacctaatattgatggggataaagtgtgtagatttggtcaatctgtcaacaacaacccaaatagaatcaaaacctctgggggtcctaggtagtcctacaacaaaatccatggagatactatcccacc

SEQ ID NO: 19287 - DNA, 442 bp, Glycine max
  unsure (1)..(442): unsure at all n locations
ntgagctcagacattagagttacgttacctcgaagattccggtgagacagatccaagccctccaccattgagttgttaccacagctgacaccttgccaattgcagtaatctgagttgttgccatcaccccatccagggactctcagctcttggttgatggcatgtaatatatcttggtcccacgctcagaccaacaagttcagaacttgaaagacaccaagctaccagtatatacaacaacaagcatagaaattccatcactgtacagtgtacactgttgttctcttctcttctctgctgaagcgaagtgttagtgtttacactccactcaacagtgttcttctccaagagccaaaaaattggtatcaacactctaccacagcattaacaacttttgctgcttgttcttttcaccaaaaaaaagtgcaaactttctttcaca

SEQ ID NO: 19288 - DNA, 406 bp, Glycine max
  unsure (1)..(406): unsure at all n locations
agcttgcgatcacgcaagattgaattgtagagaagctttaagtgttcgagatcgtgaagagaatctggtaaacagcgaattgtttcgaagagtgaagctcttgtttcgagtgcttggatgcaagtggggtccaatgcgagggtgcggctgcaatcggcaattgactcggcgattcgccctgcggaacggtgcgcggaggcgcggtgcatgtancattcggcgaggaagctctgcggcgcgctgcgccggccgtcgacgattttcgagaagtggcggatggcctcggagtaaagcccggcgtcgagggcggcgagtgcggcggcgcggcggcggaggaggaacttaatgtggccgangagttgggccacgctctcggagtccgcgagaagggttcgcggcggagttg

SEQ ID NO: 19289 - DNA, 404 bp, Glycine max
  unsure (1)..(404): unsure at all n locations
tgtcttcaataccaatcaccttataattatgatccacagctttaccagattggcatcccccatggtaatgataaattgttagcacaatgtctatgcaatactgttctaaagagaaggaaatattagcatgtttaggcctcaagttaactggtaaattcaacatcaagtctattagatcttggaccgacatgttgtggtancaaaactttgagaatgcttttgagtttatcatatctatgacgattatcatgccttcaacacatttctttaagtcttctggatccttacaatagttgaaggtaactgatggctatcattcggatccacttgaggatatacttatttgtgtataaactttcctaattatattaagaggtctcacaaatatgaaacaaagaacaatc

SEQ ID NO: 19290 - DNA, 415 bp, Glycine max
  unsure (1)..(415): unsure at all n locations
agcttgtattattacaccatagctctgcacaaaatgactctaggatgtatatacttgtactgatttatttgctataatatataatacatacatattttgcctatcaaaaaaaaatccttgactttctcaggcaagtcttaaaagaaagtatcacacgggctaccttgttttaagaaatacctcaataagaaaaaccacactaagtcttaccttggcaacagcataaacaccaaaaagacccgtgtccttgtaattggtgttgaaagccataatgctctcagcaacttcattaatgccaattcgctgtgctaactccgaactgtttatagtcaaaatgcattcagttagtatcagggagagaacttttcctttntcaggaaggggcgttcaagtcacataccccatgtgttttcca

SEQ ID NO: 19291 - DNA, 370 bp, Glycine max
agctttgaatcgattacacacatactataatcgattaccagaagagattttcagaaaatattctcaattggcacatcttttcatttggttcttgaatggctatcaaaggcctatatatatgtgacttgagacacgaatttgctaagagtttttaagaacaaaaaggtcctatcctcttaaaaagcaaaatccgtttatcctcttacaaattccttggccaaaacacttgtgattcaataaggaattatttgagtgctcaaattgctcaatctatctctttcaagagagatttcttcttcttttcttctttattctgaacagggattaagagaccgagggtctcttgttgtgaaagaattctaaacacaaa

SEQ ID NO: 19292 - DNA, 413 bp, Glycine max
agcttgtggtgcattatattacatctatacaaaggaattttttatggggcagcctccaagactccaccaagattccctgggtgaggtgggacatagtctgcctacctaagagtaaaggtgggttaaggatcaaagatttgattaaattcaatgaggctttgcttgctaaatgggggtgggagttggaaaataatcagaatcagttgtgggccagaattctattgtctagatatggtggttggagggatttgatttctgataggaactgcagtttagactctccttggtggaaagacctcaaggttatcttcaagcagcagcagagcaacacaatttgcaatcacctgaagtggaagctgcgatcgggagataaaattagttcttggaaggataagtggctacatcataatctg

SEQ ID NO: 19293 - DNA, 399 bp, Glycine max
agcttgtgaccatttgaataactcaagagcttgcattgttcaattttgagcgtctcgatatattatgcgccttaatcggacctccgagtgaaaagttatgaccatttgaataactcaagagcttccattgttcaatttcgagcgtctcgatatcttatgtgcctgaatctgacctccgtgtgaaaagttatgaccatttgaatttctcgagagcttccgttgttcaatttcgagcgtctcgatatcttatgcgcctgaatcggacctctgagtgaaaagttatgaccatttgaataactcaagagcttccattgttcaattacgagcgtctcaatatattatgtgcctgaatcggacctccgagtgtaaagctatgaccatttgaattgctcaagagct

SEQ ID NO: 19294 - DNA, 388 bp, Glycine max
  unsure (1)..(388): unsure at all n locations
agcttttggaagaatcaagaagtgccttatgaatcctcccgtgcttatgccaccagtacctggaaggcctctcatcttgtacatgacaatcttagacgagtcaatggggtgtatgctagggcaacatgacgaatctggaaagaaagagcgcgctgtttactacataagtaagaagttcacgacctgtgaaatgaactactccttgctcgaaagaacgtgttgtgctttagtatgggcatcccatcgcctaaggcagtacatgctgagccatactacctagttgatatccaagatggacccggttaagtacatctttgaaaagctagctctcacggtggcaagtcctgctatccgagtttgacatagtctangtcacccaaaaggcgat

SEQ ID NO: 19295 - DNA, 410 bp, Glycine max
  unsure (1)..(410): unsure at all n locations
agctttaacagtataatctgagctagctgaataaaaatctgacatgaagcagttattaaggtaatcattgcttcccatgcctgaaaagaatagacatttgtttaggtagctattaagtgattcattgtctcctctgaagaaccttctcaactgctgcactgtgttgtcaaagttagccacttgctcattcaatgatgtatgagccccctgcaaacaattacataagaaaatcagaggaggtgtggctcacgaattattgtgcctcacagaacgatatgtacatttaatatgtgcttaatttctcanaatactcatgaatatgaatttgcatacaaggttacttcctgtttcttctctaatgcctgctgctccagatgcatagctagctcctcttaatagtctcaaacccc

SEQ ID NO: 19296 - DNA, 413 bp, Glycine max
agcttgcaccatgtgcctcagcagcacaagatgagaatgctagtgtttctcagagttgctgtgctcacgtgaacaaaactgcgcagaaccctagttgactctgtgcagttcttctctctatcacagccaagatggctggcgtcaaccctcaagttgctgtcaccatccccaagcgttgtaacctgcctaatcgccctgttggttacaagtgtggacgtaagtgcgattaattaataattaccccttctttatatatacaaaggagagttactcacgtgacactactttgataaagatgctataaaaaaaagactattcaattatcaaaattgaaagaaatatacacatatgtatatatataaatatatatatatatatatgactctttctatgataactcttaagcttaacta

SEQ ID NO: 19297 - DNA, 412 bp, Glycine max
tttgcaagtcttgcagcacactagcaaacgtagaattatttggaacaacagacgactgcctcattcgacaaaacaactccaaagcctccctacttttatcactctgagcataccgcgctatcatgagactccaaggaataagatcatctttcggcatttcttcaaaaaactgctgcgtctcagcaatctctccagacttggttaacaattcaagcagcacagtgccaacataaagatccctatcataacacgctttcaaagcacatccatgaacacttttcccaacctcaaaattgttcggtctaaaccccataaccctcatctggcagacaagtagcaacgaatcttcatggcagtaattctcagcatagcaagccatcatcccagtccaagataccatgcccttacaaca

SEQ ID NO: 19298 - DNA, 404 bp, Glycine max
agcttatttgaagtgaatggattagcatgggcagaaatgtctccgcattgattggtaaatctgttcctcaaattcctgaaaaatgcaaagatccaggtacattcagcataccttgtattatagggaatagtaagtttgacaatgccatgctaaatttaagagcttctgttagtgttatgcctctgtctatttttaattctctatctctaggtcccttccagtcaactgatgtggtaattcatttagctaatagaagtgttgcctaccctgttggtttcatagaagatgtcttacttagagttggtgaactgattctccctgttgattcttatattttgaatatggaagatggattctctcaaggatcagttcccatcattctaggcagaccctctatgaaaact

SEQ ID NO: 19299 - DNA, 397 bp, Glycine max
  unsure (1)..(397): unsure at all n locations
agcttgtctcatataatgacgatctcgaactgattcaccgttggattgttgtgaaatttaagcattaggatcgcaacgcaattccaagaattctaaccgttggaaattgtgatatgatgtctgggctgagataaatatccatcgcatcgtaaccttttcctttctccgagaaacgcagagttgtcttggtaaaactacaatcccggtttcgttaaccgttagattatcgtgaaattcttatattttgttcgtgatccaatcacgcacacctncaccattgggatttgcacaacagtgtctatggagggagaaatatgcatcacacgaagcagtatagaatggaggcttcaatcgtttctctatctctctaatgtttgggaactctatcagagcaatc

SEQ ID NO: 19300 - DNA, 415 bp, Glycine max
agcttatctgctttaataaactctgggccagtattagctaatattgctcttggtacgtgtgattaattcaagtttcacattggctagagataagacaaagatagaatatataagtgggagacaaccctcactctatgggctaactgttaaaattgagttaggtccaaactcgcattctagatggtatcagagcctatcttagatctattaacaggctacccgccatgttatcagcgcaccatacccaaaagtgctgctgggcatgaggagatgtattgagaaaaacctcggtcccacattgattaaagataacgtcaagatagattatataattgaggtgcaaccctcaagttgaagtatgtatgtcatgtactaagcttcttataaataaagtcaacctgaggccaagtgattc

SEQ ID NO: 19301 - DNA, 404 bp, Glycine max
  unsure (1)..(404): unsure at all n locations
agctttataattgtttatatggcttgaaacaagcaccgaggcagtggtacaagaagtttaatgagtttatgagcaactcaagattcaacagatgtgacatggaccatttttgctacgttaagaaatatactaataactatgttatccttgtcgtgtatgttgatgacatgttgatcgcaggatctagtatggcagaaattaacaagttgaagcagcagttggcaaaaaaatttgaaatgaaggatcttggtccaactaaacaaatccttggtatgagaattcttataaacaaatcanaaggaattttanagctgtctcaggagaaatatatacacaagttgcttgacaggttttaccttgaagattctaagaccaggaatacccttttgggatctcatttgaag

SEQ ID NO: 19302 - DNA, 245 bp, Glycine max
agtcttttcactcggagatgtgattcaggcgcataatatatcgagacgctcgaaaacgaacaacggaagctctcgagaaattccaatggtcattacctttaactcggaggtctgatttacgcgcataatatatcaagacgctcgcaactgaacaacggaagctctctagaaatccaaatggtcataacctttcactccgaggttccgattccgtgcatgatatatccacacgctccaaattgaac

SEQ ID NO: 19303 - DNA, 284 bp, Glycine max
tggagccaagcgagagctcaaaaactagacaaaataggtaaggatgtgaggaacaaggctagacttgtgaccaaaggttactcacaataggaaggcatacattatattgaaacttttgatcctgttgctcatctataggcaatatgcaatatactatcctttgttgctcatcatggaatgatgcggtatcaaatagacgtaaaaagcactttccttaatggacttatcaagaagtttatgtggaacacacccctgggtgtgagaggactatctaccctcatcat

SEQ ID NO: 19304 - DNA, 381 bp, Glycine max
agcttcagtccctgagattttggttcccagaagacaacagggagtgaagattgctgaaaaccctagctctgcaacaagtcctagggaagtagacccggagatggacaagaaaatccgcagtattgtgagtagcattctgaaagatgcttctgtgcctgatgctgagaaagatgttccaacatcttccaccccaagtgtttccgtgcctgatgctgagaaagatgttccaacatcctccgctccaaatgctgaagcccttccttcacccagtgaagaggaatcaacagaagaagaggatcaagcctcagaggagactcctgcaccacgggcaccagaaactgctccaggtgacctcattgacctgcaagaagtcgaatctga

SEQ ID NO: 19305 - DNA, 358 bp, Glycine max
taatattcgattattattcttgtggaaccttcacccgacgaagacactgacaaaaacttatcttctccttcttggacaaagtatggcaggctgggggcaaataaattttcttcccatcaaaccttggatgcaactgtgatcttatacccatattaactagatcttgaccggtattcaagccatccttcgtcttgccttgaatgttaaggagcgttccaatcacactgtcacaaacatttttctccacatgcataacattaataccatgtctaaccgtcagatcaacacagtacggaagatcaaagaaaatggaccttttctttcatatgcaactctgacttttattctttttttgggt

SEQ ID NO: 19306 - DNA, 368 bp, Glycine max
tgtttgaatacaaagagtttactctgctaagcaaacaacaaagggtctatgttctcgttttttaccgcccaatacttttgacaaaatttcaccacttgcgtcctttagcgtccaatacttttggtctggatgcactgacgtatagaagggatcatatcattcctttgtattgggtgccatcctctttctttgattcctcgtccagttcaagatgtgtactcgaatgcatgcgtgtcttcattccttttacatcaaccattttgaacttttttagaagttcattcacatacttggtttgatgaactgaaatgcctttatctatctgcttcattctcgcctaacgcacaatttacgtccctatcatactg

SEQ ID NO: 19307 - DNA, 330 bp, Glycine max
  unsure (1)..(330): unsure at all n locations
actggatgctttggtcaacttgagaacctanctggccttgaatcacaaatctggagctgtcttaagggtttgtggggtgcgcccctcccctgaccancatatanacctttggccttccatgcagcaacctaaagcaattgagcagcctgaagcttatgcttgaaatatttacaatagaccttctcaacctcagcagcaaaatcaaccacagaagagcaattatgacctttccagcaacagatacaacccctggatggaggaatcaccctaaccacagatggtccagccctcagcaacaacaacaggagcctgcttcttcctttcaaaatg

SEQ ID NO: 19308 - DNA, 352 bp, Glycine max
agtttgtatcatctactttctacaaattgagggtttcatcaaagatttgtattctacaggataccaataccaaggtgaggattggtacaattgaagtgaatcgcggcctctatcaattcacccccgaagcaccaaaaacacataccatatgttctatcattacacacccaaagtgtctaatcctccctgtaaatctatggcattctcgtatgggtcaccccttctccgaaagattacaagccatgcaaacatacctatcctttcttaataataacaagagtttcatttgtaatacttgccattatgccaaacataagaaattaccttttcatctaacacatctcatgcatta

SEQ ID NO: 19309 - DNA, 210 bp, Glycine max
agcttgaagtacaagaaatgagtacaaagagagggagagggggggggcaccaaatctatacctcaaataaggtctgaactttgaagtttaatttctcacatgatcaaagttgaaaaatgcacacacacggcctttatttatagcctaagtgtcacacaaaattggaggggaatctgaattttattcaaatttacttgaattgaattttga

SEQ ID NO: 19310 - DNA, 291 bp, Glycine max
atctttctgctttcttactccacatacaaccagatcaggatgcacactccacaccacgagaaaacgacattcactactaaagatgccaatttcttttacatggccatatccttcggccttaaaaatgccagtcctacataccaacgactgatggactgagtctttagacaatagatcggaccaaacatccacgtatatgtggacgacatggtcgtcaagtctaaaagcatagcccaacacgtggcagacctacaagaattctttggggaactctgcaaatatgacatgtgc

SEQ ID NO: 19311 - DNA, 337 bp, Glycine max
  unsure (1)..(337): unsure at all n locations
agtttcacatagctgtcagctaaattaggagccatgaagaagtcaacatacccatctaacattttcagatgcccagcctanacccatgagaagggagaagaaagaaaaagggcatgttactgtattgaaatccatggagatattctaccagaagaagcatgtgtatcaactaattaatcacctgtatcccattacttagagcaccaccaaaaaggataagtattgaatcacatacaccactggaatcacggatgacaacagcattgaccttaactctctcacccaaaaccaaccaagggtaaggaatggtctggtaacgtgcattcactgaattctg

SEQ ID NO: 19312 - DNA, 316 bp, Glycine max
agcttgtagcatattgaaacctcaatatatcgagaagctcgacattgaaagaagaaactctgagcaaattgaaacgacaataacttttcatttggatgtccgattgagtaccgcaatatatcgagctgctcgatattggaaacataagctctgagcaaattcaaacgacaataactctttactcggatgtttgattgagtcctgtaatatatcgaggcactcgaaattgaaaatcaagctcgaagccaattcaaacaacaataagtttttactcggatgcttgattgagctccttaatattttgagacgcttgaaa

SEQ ID NO: 19313 - DNA, 328 bp, Glycine max
agcttgccattaattgtacatctggtgtggaaaatattttctctttgggtgtcgtccagtggctgcatctgacttcacaagagccttctcaccattagcatatcaccctgcatagctttctcctcaagctcttcttccacctcttcttcttcactgatttcagattcactggtgatttctccatctgccttcatgatcatggctctcctggttggacagtcaaaagcaatatgtcctctgcctaagcatttgaagcattttatgtttctggtaccggtgttggatcatggcgtacaattatgcttagctctagctactgacattccat

SEQ ID NO: 19314 - DNA, 350 bp, Glycine max
  unsure (1)..(350): unsure at all n locations
agcttgtgcatccaataccctgatgaggatgtcccatatgttcttaaaactggactgattcatttgcttccaaagtttcatggccttgcacgtgaagacccgcacaaacatttgaaagaatttcacattgtctgctccaccatgaaacccccagatgtccaagaggatcacatatttctgaaggcttttcctcattcattagagggagtggcaaaggactggctgtattaccttgctccaaggtccatcacgagctgggatgaccttaagagagtattcttagaacnaatnttccctgctttcaggaccacaaccatcangaggatatctcacgtattacacaactcagt

SEQ ID NO: 19315 - DNA, 415 bp, Glycine max
  unsure (1)..(415): unsure at all n locations
aagagacaaatattccaactgacttagattagcatattctttntgaatgacaaacaatgcgcctaccagggaaggagagtctgctgatggaatctcccataaccataaatgagattttggatgttagcatttcgtttctaaatgaccatttagaggaaacactgggttcgacaaaaatagaagaaatccactcaaagtgtatcaatctcgcacaggtaagtgtttcatcctaattccgaaccatagatatgtcatgacttgactttgcaaattatttcctatcaaatcaaaaattacatgcgtgatcatggatcaatagggcttcccttgggaatgggttcttttggtggtctcttctttcggcttttgcgtgtatttggcttttgattctcctggctttttctttttctgttct

SEQ ID NO: 19316 - DNA, 304 bp, Glycine max
  unsure (1)..(304): unsure at all n locations
atcttgggtacactangaacacacaccctatcctgaaacctcaagactccatcagttcccactctaaaactactctctctccctgcaactatggactataattgggctgacaagaatgggtcagacttctgaccctcacggatcttgctcaagagttcgctggtgactctcaacatacccaacttaatgctactacaggtgatctcacatgccaaactcatgtctctaaactgctctaagaagcccaactctctaacatcaaaccagacatttgaaggatttcctacttacgcatcactactac

SEQ ID NO: 19317 - DNA, 356 bp, Glycine max
  unsure (1)..(356): unsure at all n locations
agctttgaaagtatattttgactaaatacactcaaaagggaccaaattgtgacaatatttgactaatagcattaatggtttcaatgctaatacgatatttttattttatatagaaatatagtattgtattagcatgagaaaacataaataaaattaagacaaagattaaaacaacttaaaaaagaaaaaatacagataatttaatttaataaattatgtgagctaataattaatgtttttttgtattgaataattagtttatatataataataaatttaattatatgatataagttggatcgggttgggttaaaaaaatataacttggtatccaacccgtatatgattangtctta

SEQ ID NO: 19318 - DNA, 345 bp, Glycine max
  unsure (1)..(345): unsure at all n locations
agcttttctctgtatacatggtccggaattgtggaatncaccgcactcctaagtccctctttgctccttgccttgttatgaacccagctcactatgcccttattttccccaaattctggttcagttggccttttcccagttactagttccatcaacaccactccaaagctgtacacatcactcttctcattcactttgtacgtgtagccatattctacaccaattcaaacaaaatccatacattaataagcatgattaaagatcgcaaattaacatacacaatacactacaactcatctcttatcaaaagacaggagctactactcaatgctaaccaggagcaat

SEQ ID NO: 19319 - DNA, 287 bp, Glycine max
agcttgaaggcaaactggatgcattggtcaacttggtaacccatctggccttgaatcaaaaatttgtacctgtcgcaagggtttgtggtttgtgctcctctgctgaccaccatacagacctttgcccttccatgcagcaacctgcagcaattgagcagcctgaagcttatgctgcaaatatttacaatagacctcctcaacctcagcaacaaaatcaaccacagcagagcaattatgacctttccagcaacagatacaaccctggatggacgaatcaccctaacctc

SEQ ID NO: 19320 - DNA, 302 bp, Glycine max
  unsure (1)..(302): unsure at all n locations
tcactaaagcggtgatccatctccacacatattttatcaatagcaacatanaaaatctctgcacggtaatgatgaagaatagtgatagtcctcccttctgctcttgaacgaccccgaactggtatttcgtcatccatatttggtaccagaatactnttagcaacacaaaatccttggacatcggcaaaaaaattattccagccactctctctcattgtgcccaaccgagctttgacaacatcaactaattccatggcattcacaatattaagatcttntctttgcaatatatttgaaagctc

SEQ ID NO: 19321 - DNA, 273 bp, Glycine max
  unsure (1)..(273): unsure at all n locations
gggcctttccaagtggaaggccttggaggaaagaggtatccctatgttgttgtggatgatttctccagatttacctgggtcaactntatcagagagaaatcagacaccctttgagtattcaaagagttgagtctaagacttcaaagagaanaagactgtgtcatcaagagaattaggagtgaccatggcagagagtttgaaaacagcaagtntactgaattctgcacatctgaaggcatcactcatgangtctctgcaccatcacaccacaac

SEQ ID NO: 19322 - DNA, 255 bp, Glycine max
ctcgtattgcatcaccattggtggaggtctaccaaaaactgcttgaaatggtgtcatacccaagctttggtggaaggaagtattataccaaaattgagcccaaggtagcatagtaacccaactcataggatgatcaaatacaaagcaccttagatacatctcaagggtcttattaagattctcagtcaggccattggattgagggtgatatgaagagctcatggccaatgttgtgccttgagctttgaataattg

SEQ ID NO: 19323 - DNA, 294 bp, Glycine max
  unsure (1)..(294): unsure at all n locations
atttaggattccattttctagtaccgtggccaaaatgaactcctgcttccatcatctcttccaagattatgttccaatatctttntgtcatttatatttatccccacacttttctttcatttcanaatcganattctataaattttttgaaatgaaagaaagagacccggtatactgaaatagaaataagtgttccaaaggaaccttctcttctaccgaagattggcctttgataaatgatcnnggccatttttctatttaataattaatatgaatattctctttattatcttt

SEQ ID NO: 19324 - DNA, 341 bp, Glycine max
  unsure (1)..(341): unsure at all n locations
tcaactttgatcatttgaaaattaaatcttagatnncagagctctnttagagcacaaaaattcgtgctcttctcttcctctcccttcattcatctctttcttcctccaagctcttatccatggcctcctatggtggtgagcttcttctagactcatcttctcctcgaagtggcatctcctctctcttcattctcgattctgctgccattcatcttgcaagaagcaaaggaatccattgatgaagaagatcctatgcctacaagctccaatggagcttacatcatgggggacaaaggtatagtgcttttacaactctctcctccactacttgtatgaatatg

SEQ ID NO: 19325 - DNA, 337 bp, Glycine max
ctccaataaacctcctgaccttacagcaaaatcaacctcagcagtagaacaattatgacctctccagcaacagatacaatcccggatggaggaatcaccctaatcccagatggtctagccctcaacagcaacaacaacagcctgctccttccctccaaaatgctgctggtcccagtagaccatacattcctcttctaatgcaacaacaacaacaacaacgacagcatttactgagacaacaatccactattgaggcccctcctcaaccttcattggaagaatattgacgcaaatgacaatacagaacatgccagttcagcatgagactatagccctc

SEQ ID NO: 19326 - DNA, 363 bp, Glycine max
  unsure (1)..(363): unsure at all n locations
atttttatctcttgttccatcaaagcaaacacatgaataatcttcctattaagagcatacacttctatattggtcttgcctaggtgatacatcaattgaaaattatagtctttcataaactccatgtaacatatttgtcttatgtacaaacaaatacttccaactcatgagatcagtgaacacatcaacctttgcttcagaaggataatgtcttcatattttcaaaacaaatatcatcacaacaattctagatcatgtgtaggttagtgtctctcacacatcttcaactatcaagatgcatatgctataaccttcctatgttacacaccaatatgcaactcanaccttgataagagacatcat

SEQ ID NO: 19327 - DNA, 371 bp, Glycine max
tatcattttttcttatacaaaaatgaagctgggaggccacttgttaaacaagtggccacaaatatcttaagaaggggggttgaattaacatattgcaaactatttccccaattaaaattttattttaattctaatgcaagttacaagttcccttaaaaatgaactcttaaataatgattcaaataaaacaatctgaatataaatgcacaacaataataaataaaagattttaagggaagagaaagtgaaaactcagatttatactggttcggccacaccattgtgcctatgtctagttcctaagcaacccgcttgagagtttcactatcttgtaaaatccctatacaagttttgaacacacaaggacaatc

SEQ ID NO: 19328 - DNA, 292 bp, Glycine max
aaacctccggggcagcaaacccaacatgagcacaataatatgacctttcaagcaatagatacaatccaggttggaggaatcatccaaatatgagatggacaagtcctccacaacaacaacagcctgcccctctatttcagaatgctgctggtccaagcaagtcatatgttcctcctccaatgcagcaacagcagcaacagtcacaacaaagacaacaagcaactgaggctcctcctcaaccttccatagaagaattagtaaggcatatgaccattcagaatatgcaatttca

SEQ ID NO: 19329 - DNA, 331 bp, Glycine max
  unsure (1)..(331): unsure at all n locations
gaaattctgatactggggacagatgtcgtaccggatgtcacgacttcacgcttcagaacatgcagattatatgtgtctgtatgaacagattaaacaagtaaataacacaagagaattgttaacccagttcggtgcaacctcacctacatctgngggctaccaagccacggaggaaatccactaaaatagtgttagttcaaagtctaacagccactgtttacaaccttctcacctaaccactacccgtgcaatctctacctaagagccactcttagatatgagaaccctgctcactccctctcaaccacactcccgtgtgtacaaataaatc

SEQ ID NO: 19330 - DNA, 367 bp, Glycine max
  unsure (1)..(367): unsure at all n locations
tagcttgagatgcctgacctttagcaaacagtatgtattcttctgcgaacagtaaatgagaaacacgagggccatttgaggtcaacttaactggcttccacctcacctcccatcagacactacctaagagatcatatcaccaagcctctccatacatgatacaaataaatatgggaacaatgggtctccctgacgaagccctctcacaggaataaaactattttttgttctacctccattccacatgatagaaatagaagtagatgacagagcatgtataatcacagacataatggtattatgaaaataacaaaaatnaaaaagagtttcccaccaacaaaatcctagttcacacgatcatatgcct

SEQ ID NO: 19331 - DNA, 361 bp, Glycine max
  unsure (1)..(361): unsure at all n locations
agcttgccttgctcatgatatatttganggacttatgatcactatgaatgacaaattccttgngataaaggtagtgttgccatgttttcaaagcccgtactaatgcatacaactcctaatcataagttgaatagttaagggtaggaccacttagcttttcactaaaataagcaattggatggccttcttgcatcaacacagccccaatcccaacatttgaagcatcacactcaatttcaaaagattattgaaagtttggcaacgcgagtatggnggcattagttagctnttgcttaagaacattgaaagcttcttcttgtttctcttcccatttgaaaccaacatttttcttgagcacttc

SEQ ID NO: 19332 - DNA, 329 bp, Glycine max
  unsure (1)..(329): unsure at all n locations
acaaganaaaaactagnatatgagtacatggataatggaagcctacactcctttatttttggtacgtaatatgaagaatgctttcataattcgattaagtggacttgcatgtttgtttgtttgttttgctttttaattccagtcacaattagcggctctttaatcttgaatatcttatattgaatgaatagcttgctttgtaaaatcacagataaaatanagggtaaatttctggattggcctcgacgcttccacataatatttggaatagctcgaggacttctgtatcttcatcaagattctcgattaaggattatccatagagatct

SEQ ID NO: 19333 - DNA, 210 bp, Glycine max
attatatgccctaatctgactccgttgattagtatgacaatttgaattctggagagctgccgttgtgcaatttcgagcgtcttgatatattatgcgcctgaattggactctcgtgtcataagtatgaccatttcattttctcgagaccttccgttgttcaatttcaagcttctcgatatattatgcacctgaatcgtgacttcgtgtgac

SEQ ID NO: 19334 - DNA, 383 bp, Glycine max
  unsure (1)..(383): unsure at all n locations
agcttaatgctgtatggtttgtaaacaaacataaggcgaggcttgttgtgaagggatatgcgcagatgttcggggtagacttctcagaaactntntcttcggtttccaggttggataccataaggctgttgttagctcttgctgcacaaaaaggttggattatacatcacatggatgttaaatcagcctctttgaatgggcacttggaagaagaaaattttgtagagcagcttgaacgatttgtagttcatggacaggaggagaaagtctatcggctgaaaaaggccttgtatggcttanagcaagccccaacgtcttggtatggcagaattgatgcacatttgataaacttatgctttgaaaaatgtctaagtgagtttacc

SEQ ID NO: 19335 - DNA, 330 bp, Glycine max
aaaaaatatgcttaatgcgactatccatgctcgtttgcttgtttcaacccgtacaagaccttgtttaatctgtaaactttatgctcacttccaatcttgacataacccggtggttgttcaataaatacttgctccttcaagtatccatgtaagaatgttgatttaacatctagttggcaaatgggccatgaattttatgccactaaagcaatcatcaatctgatcgtgtcatgtcttgcaacttgagaaaaaacttctgtatagtcaatcccatattgttgcttgtatcccttcgccaccaaacgtgccttgtacttgtcaacttcacca

SEQ ID NO: 19336 - DNA, 356 bp, Glycine max
catcaagcttttttttttgtgcatagaatgtggggaaaaactagtaagtgtcatgaatctctgacataagcttcaaccaattaacattgtttgaatgacaactgttgtagttgcaccgcaatcacatagtttgtccaccatggtatgctttatgttcctattggttatagttttggtatgctttatgttcctttggttatagctttggtggtagaatgtttaatttggagtccacaagaggaggatctccatatggtgctggagttattgctggagatggtagaagacaagcaagtgaaatggagctggagctcgcagagtatcatggcacgtatatatgaaattagcccataaat

SEQ ID NO: 19337 - DNA, 446 bp, Glycine max
  unsure (1)..(446): unsure at all n locations
tcgactcatgaacaggggatcttgatcgtgtacgangctgcngngcatgccgtgaatctttccggtggtctccatgaatatcttanccactgtagtagcagtgtagtgcaccggaagtatccccatatgcacccctttggagaaacggtccaccacgaccaggaccgccaagggcggcaagccaactataaagttgagggagaggtcctcccaaggtctcgtcggaattggtagcggacatagtaatctctggctcctacggtggtcattcttggtctgttggcacacgatgcacgtggagatgaacaactggacatcctgcttcatagatggccagacgannattgcactgatgcgagccaaggtctttgtattctcatgtggccgccagtgggagtgttgtggaattctgcgacgatggtggagatggcctgaagacctttggg

SEQ ID NO: 19338 - DNA, 368 bp, Glycine max
  unsure (1)..(368): unsure at all n locations
agcttganaaattctcantcagatagttattagtagcaccaaatatgatatcatccacatatatctagatgattaggaattgacttctataatctttacgaaatagagtagtatctacctttccataatctttgctttaaaccatacaaggctttattaagtttgaatacatgatgagggtagatagaactctcaaacctagggggttgttccacatagacttcttccttgataagtccattaaggaacacactntntacgtccatttgatataacattataccatgatgagcaacaaaggatagtaaaatgtgtatcgcctctagacgagtaacaagaacaaaggtntcactattatctataccttc

SEQ ID NO: 19339 - DNA, 377 bp, Glycine max
  unsure (1)..(377): unsure at all n locations
agcttgaatcggtctctcagtgtgtataaagttatgagcattntaattgctcgacagcttccgttgttcattttcgagcgtctctatatgtgatgcgccttaatctaacttccgtgtgaaaagttatgaccatttgaatttctcaagagcttcctttgttcaattttgagcgtctcgatttgtgatttgcctgaatcggacatccgtgtcaaatgttatgaccatttgaatttctaaagagctttcgttgttcaatttcgagcctctcgacatattatgcgcccgaatcgggcattcgtgtgataatttatggccatttgaatttctcaagagtttccgatgtttaatttcgagcgtatcgatatattataagcctg

SEQ ID NO: 19340 - DNA, 436 bp, Glycine max
  unsure (1)..(436): unsure at all n locations
agctttttatatattcgggactcaatcagactgcgagaagaagtattgtcctttgaatttgctaacgcttcngattcaatttcgagcgtctcgatatattacaggactcaatcagacatccgagttataagttattgtcgtttgaatttgctcagagcttcaacattcaatttcgagctgttcgatatattactggactcaatcagacatccgagtaanaagttattgtcgtttgaatatgctcagggcttcagtattccatttcgagcatctcaatatattacgggactcaatcagacatccgagtaaaaagttattgtcgcttgaatttgctcagagcttcagtaatccatttcgagcgtctcgatatattacgggactaatcagacattcgagtaaaagttattgcgtttgaattgtcagagcttcacattca

SEQ ID NO: 19341 - DNA, 272 bp, Glycine max
tgaagctctgataccacttgttggacaagtggcctcagatctcttaacaacgggggggttgaattaaaatattcgaaactctttcccctcattaaaaatctatcttactttttacttaagttatgaattcccttaatgacaatcttgttatatattaatccacatgaagcaacttgactatgaatataaagcactaatacataaaggagattatcggaagagagaatgcaaactcaattatatacatgttcggccacacacttgtgcctacg

SEQ ID NO: 19342 - DNA, 351 bp, Glycine max
  unsure (1)..(351): unsure at all n locations
agcttttcatattcttatttggtggctngaattaccttacacatacaaggcttgatatagctcgtagtgtgagtgtagtttcaagatatttgcactctccaactaagcaacacttatgtgcaacaaggagggttcttaagtatgttgcaggttcaatcaaacttggagtactttatgagagtgtggataatttcaagttggttggctatagtgatagtgattgngtagggttcttagatgataganagagtacatcagattntgtattcagtcttggcttgggagccatcacgtagagctccaagaagcaagacacagttgctttatcatcatctanagtngaatatgtag

SEQ ID NO: 19343 - DNA, 276 bp, Glycine max
  unsure (1)..(276): unsure at all n locations
agcttataaatatctaaattattatnntaaataaatatttgtttgatagattagatttaaaaatataattgtcaatgatattntatatcattntatgttaaaagagataaaaatntacatgtaaattaagatattttntatttatcaatatatntataacgaatgttctaaaattagagattgaccactcaactaaagttgattaacatagagataaaagtaagtgttatgtgtacattntttaagagccatataagaataaagtgaaattgacat

SEQ ID NO: 19344 - DNA, 337 bp, Glycine max
  unsure (1)..(337): unsure at all n locations
agctntncactcttatgtctgnattaagcgcataatatatcgagaanggcggaattgatcaatggaagctcttgagcaattcaaatgatcataactgttaactccgatgtccgattcacgcgcataatatatcgagacattcgaaattgaacaatggatgctcttgagaaatacaaatggtcataacttttcactctgaggtccgattcagactcatcatatatcaagaccctctaaattaaacaattggagctctcgagaaattcatatggtcataactattcactcggacgatcaattcaagcgcatcatatatagagacgcttgaatttaacaa

SEQ ID NO: 19345 - DNA, 347 bp, Glycine max
  unsure (1)..(347): unsure at all n locations
agctttttgcattttctaacgacaataactnttaactcggatgtgcgaataagtcccgtaatatatcgagacgctcgtaattganaactgaagctctgagcaaattcaaacgacattaacatttgactcggatgtccgattgcgtcccgtaggatatcgagacgctccanattcagaacggaagctttgagaaaaatctaacgataataacttttaactcggatgtctgatcgagccctngtatatatcaagatgctcgaaattgacaacggaagctctaagagaagtcatacgacaataacttatgacttggatgtccgattgtgtcccgtacgatatcgagatgc

SEQ ID NO: 19346 - DNA, 390 bp, Glycine max
  unsure (1)..(390): unsure at all n locations
ctcagctatacaattataataaaagaacaatgacaatngaatattctatacatgtttcctttgatgagtctaatgccattcttccaaggaaggattttctaaatgatatttcagattccttagaagatacacatattcatggaaatcattctaaagaaaaagacgaaggaagaaatgaggattctcaagataatggggctagaggaaataatgaacttccaagagaatgganagcctcaagagatcatcccctcgacaacattattggtgatatatcanaaggggtaacaactagacactctcttaaagatttatgcaataatatggcttttgtatctataattgaacctaaaaatataatagaagtcatagtacatgatacatggatca

SEQ ID NO: 19347 - DNA, 413 bp, Glycine max
  unsure (1)..(413): unsure at all n locations
agcttagctctagatgtgatggaccttntcaggttntggagaggatcaataacaatgcctataggttggacctcccagaagagtatggagtcagcaccacttttaacatttctgatttaactccttttgcaggtggagctgatattgaggaggaggaactaacagatttgaggtcaaatcctcttcaaggggaaggggatgatgcaatcctccctatgaagggaccaatcactagaaccatgagcaagaggctccaagaagattgggctagagctgctgaagaaagccttatggttctcatgaaccttatggtagatttctgagcccatgggccaaagttgggtccaattatctttgtacatattagactaggatgtcattatatttggtccttgtatatanggctccatatt

SEQ ID NO: 19348 - DNA, 352 bp, Glycine max
  unsure (1)..(352): unsure at all n locations
cttctttatccccatatcaattatgcagcttgtagttaacatgaatggccctcccaatattataggaatgtcattatcttcacagacatccattaccacaaagtctatcgaaaagataaaatgtttactctgaccaacacatctttaattactctgtatggtctggtaatggagcaatcaacaagtngtaaagtcatcctagtgggcatgatctccaactctcccaaccttctgcacatggagagtggcattaagttaatattggctccttggacagagtggcatttgctgtaaagctttccaagggcatggttatttccagtttcctgaaatatctaanaatcttgcaaat

SEQ ID NO: 19349 - DNA, 315 bp, Glycine max
ccgtgatgttctcgtaagagcgaacagtgaaatacaggatgaatccttgcctcctcgggtagtttgagtttgtatgagacttggcccacacgttcgattatctgaaacggcccaaagtatcttttggttagttttgggtgtattgaaccaactacggtgcgttgccggaagggacgaagcttaacgtagacccactggcctatgctgaaggtgacgtcacggcgcttggtatccgcgaatttcttcatggtgtcttgtgccttttgaaaacgatgttgtaacttccggtggatctcttgacgcgagtgtagcatg

SEQ ID NO: 19350 - DNA, 414 bp, Glycine max
  unsure (1)..(414): unsure at all n locations
agctnccattgttcaattntgttcgtctcgatatattatgcgcctgaatcgcacatccgagttaaaagttatgaccttttgaatatctcgagagcttccattgttcaatttcgagcgtctcaatatattatgcgcctgaatctgacctccgtgtggaaagttatgaccatttgaatttctcgacagcttccattgttcaatttcgagcgtctcgatatattatgcgcctgaatcggacctccgagtgaaaagttatgaccatttgaatttctcgagagcttccgttgttcaatttcgagggtctcgatatattatgtgcctgaatcggacatccgagtgaaaagttatgaccattttaattgctcaagagcttccattgatcaattttgtacgtctcgatatattatgcgcctg

SEQ ID NO: 19351 - DNA, 296 bp, Glycine max
  unsure (1)..(296): unsure at all n locations
acatttggggttgctatggcgctctataagtggattcccattaagttagtatacaagatcatcttgcttgccacaaacttcattntgggcaacaccaatcactatggcatcaagaggcccaagaccggcccaatagagctcaaactcgccacagggaaaaccccacatcctgatgttggtcaagttgcacacataaaatgtggtaacataaaggtatacacaatatggctcacattaagtgactccattgggtccttttttaccgacaaatgttagacgttagaatattagttttt

SEQ ID NO: 19352 - DNA, 419 bp, Glycine max
  unsure (1)..(419): unsure at all n locations
agcttgnttatgtctctnaagtttgcttctgctcaacaagggagggctttcttcgtttttggcgattcactcgtggacagtggcaacaatgatttcttggctaccactgcacgagcagatgcccctccttatggcattgacttcccaacacacagacccactggacgcttctctaacggccttaacatccccgacataatcagtatgactttgtgacatgttagaaaattagtagaatggattagtgactaaatttagtgacgaaaaattggttattcctcactaactctaaaatcactaaatttagtgacatttttaaatataaaaaaattacatataaatttttcagtcactacatttaatttttatacaagttataagaatgtttgtttggttctagtctcccatttgcatgcatg

SEQ ID NO: 19353 - DNA, 368 bp, Glycine max
  unsure (1)..(368): unsure at all n locations
agcttctctatatattatgcacatgatggtcataacttgtcacacggatgttcgatattggcgcatcacatatcaagacgctctgaattganaaccggaagctctcacaaaattcaaatggtcataacctgtcacacggaagtctgattcaggcgcagtatatatcgaaacatttgtaattgaaaaaagaacgcactcgagaaattcgaatggtcataactttgtcaacggatgtccgatacacgcgcataatatatcgagacgctggaaattgacatcgtatgctctcaagagattcatatggtcataacttatcacacggtagtccgattctggtgcataacatattgagactcttaaaattgaac

SEQ ID NO: 19354 - DNA, 309 bp, Glycine max
acatatactgtaatcgattactttttgttttttcagaaaacattctcaacagtcacatctttttatctgtttcttaaatggccatcaagggcttatatatatgtgacttgagacacgaatttaacaagagtttttcagaacaaaaaagtcttatcctcttataaagcaaaatcggtttatcctcttacaaattccttggccaaaacacttgtgattcaataaggaattatttgagtgctcaaattgttcaatctatctctttcaagagagatttcttcttctcttcttctttattctgaaaagggatta

SEQ ID NO: 19355 - DNA, 335 bp, Glycine max
  unsure (1)..(335): unsure at all n locations
agctngtgttgnattttcatggttgacgtgccgctttgaggaagaccagataagatgaaatggacgggctgtttagtttgcacggcgtgctgaaacagcgcgaggagagtctcaataggggtgtgaaagagatgcancatgagatggatgctttggagcagcagttacagatggtgttgatgaatactgatgtnttggaagggtggttgatggataatcaggggaagaagatggccggtttggagaatcccgaggatgcttttgagtgtgcggatgtgctctccaagcatatgcttgactgtactgctgctgatttggcgattgaggacacgctt

SEQ ID NO: 19356 - DNA, 292 bp, Glycine max
  unsure (1)..(292): unsure at all n locations
atgctctttctcggcatcatgcattactttctatgcttgaaacaaaattgattggtcttgaatgtttgaaaagcatgtatgaaaatgatgaaacttttggagaaatttttaaaattgtgaaaattcttcagaaaatggtttctttagacatgaaggctttcttttcaaagaaaaaaaattgtgtgtgcctaaatgttctactagaaatttgcttgtttgtgaagcacatgaagganggttaatggngcattntggggtccaaaagaactctagaaaattacaagaacatttt

SEQ ID NO: 19357 - DNA, 412 bp, Glycine max
  unsure (1)..(412): unsure at all n locations
agctttgnatggtataatgtgtangacacccctatgttggtcagagctcgaaaaaagccttaccttatgaccagaagtggtacatcaaaccacaaagaaggtcaagtttatccaagaaaagatgacgactgctcanagtatgcagaaaagttatcatgataagatgatgaatgatcttgaattcgagggtggtgatcatgtattcttgagagtcactccctggactggggtttgtcgagcattgaaatcccgaaaactaacacctcgctttattggtccatttcaaattcttaagagaagttgccctgtggcataccaaattgcattaccccgtctttttctatcttcacaatgtctatcatgntgtctcaactcataagtatatccctgatccatcccatgtgattgaatt

SEQ ID NO: 19358 - DNA, 337 bp, Glycine max
atagttaagaagacccgagtaggaatgagttgaatttatctatgaagcatgaaattagccgcagccattgaatcagtctcaatccaaagctcctttaaattaagctcccacgcatgctccaaagcagtaatgagcccccaaatctctactatcataagagaacaacaacccaatttcctggtaaactcgtttatccaatggccattaccatcacgcatcactccaccacagctagccttctcgccaacatctataacagaagcatcaacattgtacttaaaatagcccactgaggcaaccaaacaaaaagcctatccgcagaacaaggttgcccatg

SEQ ID NO: 19359 - DNA, 356 bp, Glycine max
accattgtgttgtggtgcatatacagtcgtaagctctcttcgaatgccatgttctgcacataaacatttgcatattcttgtggagcaatattcatcacctcgatctgcgcgaagagtctctatagactttactagctcattatcaacacttgctttgaagcttttaaatgtacaaaacgcttccgattcttcctgtataatataaccgccatgttttcttgaataatcatcaatgaagcatattaagtatctcttacctccattagaaaatgggtttattggaccacaaatatcagaaagcaccagctccaagacatctatagctctccatgactcttctttgcgatactgagatc

SEQ ID NO: 19360 - DNA, 366 bp, Glycine max
  unsure (1)..(366): unsure at all n locations
actttgattgcttattcaatggagcngacaagaataggtncagactgatcaacacatgtacagtggccaaggatgcttgngagatcctaaaaatcactcatgaaggaacctccaaagtgaagatgtccagattgcaactattggccacaaaattcgaaaatctgaagatgaaggaggaagaatgcattcatgacttccacatgaacattcttgaaattgccaatgcttgcactgccttgggagagagaatgacagatganaagctggtgaaaaagatcctcagatccttgcccaagagatttgacatgaaagtcactgcaatagaggaggcccaagacatttgcaacatgagagtagatgaactca

SEQ ID NO: 19361 - DNA, 379 bp, Glycine max
actaccggatttgtatcttggatgggtgattgtgttcttacatggagttctaagaagcaaggcattgtgacactttctacttgtgaagccgagtatgtagctgcaacttcttgcacatgtcatgccatttggctaagaagattgtcggaggaacttcagttgttgcataaggaaagcacaaagatctatgttgataatagatctgcacaagagcttgccaagaatctggtgttccatgaatgacagtagcatatagatacaaggtatcatttcattagagagtgcattacacagaaagaagtagaattgactcatgtgaaaactcaagatcaagttgcggatattatcaccaagcctctcaaatttgaagatttttgaa

SEQ ID NO: 19362 - DNA, 409 bp, Glycine max
  unsure (1)..(409): unsure at all n locations
agctttgaatgatgcctaaatagtggtgtgtggtgcgggagacggtttttttcctctgcctgtannngngcgttaatgattttgggttttgacttgtgagagctgttgttttgtgcctgatgagtcttgaacttatggaaatgtggagattgtgttgctgaatttatgactgtatgttgtcttttgtggtgataggaatcaacaatatgggcagcgttcttttcacaagtactggcagtaaatgacgcgacggtaaagtttgagatttgggacacatcatgacaagagatgtagcatagcttggctccgatgtattacagaggtgttactgctgctatcattgtctatgacatcactagctcggtatgatatctttgcatttggatattgttgaatacctatttaaatg

SEQ ID NO: 19363 - DNA, 420 bp, Glycine max
  unsure (1)..(420): unsure at all n locations
agctntgattcaattctaacgatnanntaacttttactcgggatgtcccgattgaagtcccggtatatatctgacacgcctcgaaatttgaatgttgaaagctctgagccaatttcaacaacaataactttttactcggatgtccgatttagtgacgtaatatatcgtgacgctcaaatttgaatgttgaacctctgagccaattcaaacgacaataactttgtactcggatgtctgattgaatcccgtaatatatcgagacgctcgaaattgaatgtggaacctctgagccaattcaaacggcaataactttttactcggatgtctgattgagtcccgtattatatcgagacgctcacaattgaatgtttgagctctaagccaattcatacgacaataactttctactcggatgtctga

SEQ ID NO: 19364 - DNA, 258 bp, Glycine max
ctctgagcttcaacattcaatttcaagcgtctcgatatattacaagactcaatcagacatccgagtaaaacgttattgccgtttgaattggctctgaggttcaaaattcaatttcgagcgtcgcggtatattacgggactcaatcagacatccgagtaagaagttattgtcgtttgaattggctcatagcttcaacattcaaattcgagcgtcccgatatattacggcactgaatccgacatccgagtaaaacgttat

SEQ ID NO: 19365 - DNA, 421 bp, Glycine max
tttcgagcgtctcgatgtattacgagactcttcttacatccgagtaaaaagttattgtcgtttgaatttggttagagcttcaacattgaatttcaagcgtcttgatatattacggaactcaatcagacatccaagtaaaaagttattgtcgtttgaattaggtctcagcgtcataattcaatttcgagcgtctcaatagattacgggactgaatcagacatccgagcaaaacattattgtcgtttgaattagctcagaccttcagaattcaatttcgatcgtctcgatatattacgggtctcaatcagacatctgaggaaaaaagttattgtcatttgaatatgctgagagcttcaacattcaattttgagcgtctcgatgtattacgggacttaatcagacatctgagttaaaagttatt

SEQ ID NO: 19366 - DNA, 399 bp, Glycine max
  unsure (1)..(399): unsure at all n locations
agctttgattatataatttcttgattnctaaaatacccatttttctctccccctttggcaacatcaaaaaggccaaagtgcgtaaaatatgaataatttaatcatacacaaagcataatttgtaaaacaaacataaaagattctaaaacatacataaagcaaaacatgaataaaaccaaattgtaatgcaaaccacttagtcatatatcacaaaccataaatatcatgttcagtcatactaagcaaatattaaaagaaatactaagtgttcaaatgtcataataatatagccaaatacacgactagaaatcaaaatactattaataatagtaatgtctaaactgatggtggtggtggaggtaaatcaatgcagtcgcgaatgatggtgacatcttcttc

SEQ ID NO: 19367 - DNA, 397 bp, Glycine max
  unsure (1)..(397): unsure at all n locations
agcttgatgtggaactngatctangaagccacatgtgacagagataaatacttataacttattcaagttagtgaaacttggcggtttgccaagaatcggatgtaggttatgtggttaagatgaactggtataaacatcatgtgtcttatactgattttctctttaaactaacttaaggtgtgaatttgatctttgcttttgaaaaaaactgatccaataacgctttgttagatatgaacaaatttgataaatatttataactctcagatagagtattagaacggaagacttcattagatgatgaactattgattctcagccatctctggcaatgaatgaacagttcaaaatgcttntcttgcgtattcttgataaagcagtgtgtatatacagatgt

SEQ ID NO: 19368 - DNA, 363 bp, Glycine max
  unsure (1)..(363): unsure at all n locations
tgtaatcgattacacatatactggaatcgattattatttcatattttcangaaatattctcaacagccacatctttatatgtggctcttgaatggctatcaaaggcctatatatatgtgacttgaaacacgaatctgctcagagtgtttcagaacagataggtcttatcctcttataaagcacaatcgttttcttctcttacaaattccttggccaaattacttgtgattcaataaagaattatttgagtgctcaaatggttcaatctatctctttcaagagagatttcttgttctcttcttcttcattctgaagagggattaagagaccgagggtctcttattgtgataggattctaaacac

SEQ ID NO: 19369 - DNA, 408 bp, Glycine max
  unsure (1)..(408): unsure at all n locations
agcttgatttanatcttgatgctttggtcatcctaataactcagcttgccatgaatcanaagtctacacctgctgcaagagtctgtggtctatgttcttctgcagatcaccatatagatctctgtccttctttgcaacaatctggagttaatgagcaacctgaagcttttactgcaaacatttataatagacctcctcagcagcaaaaccaacaacagcagaataattatgaactctcaagcaatagatacaatccaggttggaggaatcacccaaatctgatatggacaagtnctccacaacaacaacagcttgtccctcctttctagaatgctgctggtccaagcaagccatatgttcctcctccaatancatagcagcagtcacaacaaagacatcaagcaacta

SEQ ID NO: 19370 - DNA, 359 bp, Glycine max
  unsure (1)..(359): unsure at all n locations
tatattgcgganatcattttccaagcttagggcatncattnagggattttaatgcttatttttaatctgaacaatagttgtgtgggggccaaccactacaaaaaaaatactttcaacattgttattttaacatcggtttttgataaaatcgatgttaacaaatgagcggtgacatttttgtaaataaactgattttgttaaaaaaaacccaatgttaacgtgacaatattaacatccgttattaaaaaaccgatgttaacgtaacaatgttaacatcgagttttgaaaaatcaatgttaacatcgtcatgttaacatcgattttacaaaaatcgatgttgaattttaatgttgtgtttt

SEQ ID NO: 19371 - DNA, 410 bp, Glycine max
tttcttaatgtctcatgattgtcacgtcttgatgcaacaatgggtagtcatggccatacgagacattttgcctaacaaagtcaagcttgccataactcgactgtgctttttcttcaatgccatatgtagcaaagactttgatcttgtcaagttagatgagctggacaacgaggccactattatattgtgtcagttgaagatgtagttttcacctgctttcttcaacctcatgggtcacttaattgttcatctggtaagagaaatcaaatgttatgggccaattcatttgcattggatgtacccggttgagcgatacatgaagatcttaacagggtataccatgaatctacaccattcataagcatctattgtggaaaggtacatcgcaaaagaagtcattgaattatgtt

SEQ ID NO: 19372 - DNA, 407 bp, Glycine max
  unsure (1)..(407): unsure at all n locations
agctngtttataatctcggaatgaagaatctccatatgcctgataaagagggaggaaaacaagataattcatctaagacctggattaatacgttgtgtctaaaagtaatcaagggattgaatcagaaaccatataagccaaccacaaccttaaaaattggcattgctccaatgtaaaacctgactgcatctgcataggcctccgacttgatgcacttgcttagtctatcgggtaggtcatatatgaactactttcaacaaaggtaaaaagtatgtcaatcatattccacttccacaaaagactcagaagtcataccactaagtcaagtatggaaacataaatatttcagtgatgcaaagccggaataaagaaacatgcatgattgctttaataattaatacctgaac

SEQ ID NO: 19373 - DNA, 412 bp, Glycine max
  unsure (1)..(412): unsure at all n locations
agcttcatctttgattagttttattaactntgaaggcatgaataacaataatccctcttgccaggaaaatcaagatctgaaattgagatatcacanattccttgtgaaaatgaacgtatctattggtatcacatcattcctttgcctattatactagctagcttgattccttccatattttgtaagtnttttttataatttttggttttgtttttggagcagtgaccattgtgctacttcatttactgacctttatcgaagctgccccaagtgttccattgaaatctgccttaactgttgcaaagaaatacgcaatggaagtatatcaccccggtctgaactgaagtttcaatatgtgaatagaggctatgattatatgcatggtggtgatcctttaccagtgtcttgtgat

SEQ ID NO: 19374 - DNA, 336 bp, Glycine max
agcttttttttagtcatgtttgaaaaccatgcaggggttatgtttgaatttagcttcagctaagacctcattagctatcattacaccatggaggatatgtctgcctttgaggaaagcaatttgcctttcatcaattaagcgaggcagcacaagagccagcctattagccaggactttggacattattttgtagacacaccctatgagagagatgggtctataatcattaagagattgggggctattggttctggggatgagggctatgaacgatgcattacttcctttggggaatctgccattaatgaagaattcatcaaagaatatgataaaagc

SEQ ID NO: 19375 - DNA, 236 bp, Glycine max
tcataaagcccccactgctcatcttttttttgtcttgtactacagataacaaggtctgctgcatccacagaaagttcttctgcctcaatccttctcgtcatcttataagttgaattgatatcctctattgattggcgtccctgcttgacaaagtgttcaagcttgtttcttccaagtgaatgacctgtaagcaccattggtacatttaaagcacctggaagaataacagcagtatc

SEQ ID NO: 19376 - DNA, 412 bp, Glycine max
tttgcaatcttatgttgcaaatatttacaatagacctcctcaacctcagcagcaaaatcaaccatagcagaacaattatgacctctccagcaacagatataaccctggatggaggaatcaccctaacctcagatggtccagccctcagcaagagaccagagcctccattcagagcttaaccaatcagatgggacaattggctacccaattgaatcaacaacagtcccaaaattctgacaagctgccttctcaagctgtccaaaatcccaaaaatgtcagtgccatttcattgaggtcgggaaagcaatgtcaaggacctcaacccgtagcaccttcctcatctacaaatgaacctgccaaacttcactctattccagaagaaggtgatgacaaaaatttacctaacaatttc

SEQ ID NO: 19377 - DNA, 438 bp, Glycine max
  unsure (1)..(438): unsure at all n locations
tagaaaactaagcttggcagatctatgccagaatgcaaggggacatatatttctcttactttgacatgnatnntaagctagatgacggcgattgtgaaacaccaaatattattacatatggggctttggtggatggtttatgcaaagcgaacagggttgaagaaacccatgaattattggataccatgtcagttaatggttgtgagcccaaccaaatagtgtatgatgctcttatagatgggtnttgcaagactggaaagcttgataatgcacaagaggtgtttgtgaagatgtcatagcgtggatactgtcccaatntgtatacctacagctctctaataaatagtctatataaagaacaaaattggatcttgtttgaaagtgttgccaagatgctcgagattcttgcactccaatgtggtattacacaacatgatt

SEQ ID NO: 19378 - DNA, 448 bp, Glycine max
  unsure (1)..(448): unsure at all n locations
agcctttgggtgttcctcttttccttttctcangccctatcattctcacatactggatnttaagtcttattagtgtctttttctaggatactctacaaaccataaaggctataagtgcctgtctcctactggcaaaatattcatctccaaggatgtggtgttcaatgaaaccaggtttccatatactgatctgtnntctaaatccatatcctcctctaccccaacatccttgtcctcctttttagcanacattccccttgttggtcctccacttgtcactcccttaccaaacactgtacccaactccccttcccctcctcctcanacttcccaaactcatgttcttgattctggttctgacattcagtcagttcccacttctcctattcctcnaaattccaaactcctgttctgattctggtcttacactcagtcagttccacttact

SEQ ID NO: 19379 - DNA, 377 bp, Glycine max
  unsure (1)..(377): unsure at all n locations
cgactaatacacttgtaaaaacatagaaagttagtntatttatatgtatataccatcaattgatatattggtatatgttactcatcaacaacaacaacaacaacaacaacgccttatcccactatgtggggtcggttacatggatcaacttccgccataatgttctatcaagtaccatacttctatccaaaccattaatttcgagatcctttctgataacccctcttatattacttttgggtctatctctgcctcgaatagtctgacttctatccatctgggctactctcctcactacagattctaccggtcttctctctacatgccctaaccacctaagtctaatttccaccatcttctctacaataggcgctact

SEQ ID NO: 19380 - DNA, 196 bp, Glycine max
  unsure (1)..(196): unsure at all n locations
tatctctntagctattcatatggtcataacgattcactcggatgtctgattcaagcgcataatatatcgagacgctcgatattgaacaatggaagctcttgagcaaatccaatggtcataacttttaactcggaggtacgattcatgcgcataatatatcgagacgttcgaaattgacaatggaactcttgaacaa

SEQ ID NO: 19381 - DNA, 355 bp, Glycine max
  unsure (1)..(355): unsure at all n locations
tctgttatgaatttcgagtgtctcgatatactacgggacacaatctgacatccgagtaaaaagttattgacatttgaatntgctcatagcattcgttgtcaattacgagcgtctagatatattaaaggattcattcggacatccgagtaaaaagttattatctttttattttgctcagagcttctggtttcaatttcgagcatctcgatatattacaggactcaatcggatatccgagtcaaaagttattgtcgtttggaattgctacgagcttccgggttcaattacgagcgtctcaatatgctacgggacacaatccgacatccgagtaaaaagtattgtcgtgtgaattact

SEQ ID NO: 19382 - DNA, 412 bp, Glycine max
agcttcagaattcattttcgcgcgtctcaatagattacgggactcaatcagacatccaatcaaaacattattgtcgtttgaattagctcagagcttcagaattcaatttcgatggtctcgatatattacgggtctcaatcagacatctgagtaaaaaagttattatcgtttgaatttgctgagagcttcaacattcaatttcgagcgtctcgatgtattacgggacttaatcagacatccgagtaaaaagttatcgtcgtttgaatttggtcagagcttcaacattcagtttagagcgtctcgatatattacgggactcaatcagacatccgagtaataagttattgtcgttagaaatcctcagagcttcggattcaatttcgagcgtcttgatatattacgggactcaatc

SEQ ID NO: 19383 - DNA, 430 bp, Glycine max
  unsure (1)..(430): unsure at all n locations
tagcttctcacatatagtttcaacccgaggtcctctaagagacttagtgtaaatattagccaattgatcattagaaccaacaaagtgagtcttgatttcaccagacaacaccttntctcttacaaagtgacagtctatctctatgtgtttagtccgctcattgaagactgaattagaagcaacgtcaagagcggcttggttatcacanataagcttagtgacttaagtgtctccaaactgtaattgtaggagaagttgcctaagccatgtaattttgaatgcagcaacttccatggcatggcatttagcttcgatgctgggtctagcaactatattttgcttcttacttctgcatgagaacaaatttcccttcaagagtcagaggtagacctcctatctgatggtgatcctacccaatcagcatcagagt

SEQ ID NO: 19384 - DNA, 413 bp, Glycine max
  unsure (1)..(413): unsure at all n locations
cgaaacaagatgttgagagtgtntgacagaaatcacattctcattttgaagtcccctcttttcaaaaatagaacatttaaaattgagattgatgtgatagaacagaagtgttttaccactacagtaaacagtgaagagtggttatggcattacagatntggccatttanattttagagatctgattaagctaaactcaagagaaatggtgctgggnttgcctcagatcaagcctnctagtgaagtatgtgatggttatttacagagtaagcaatcaagaggcactttcaaacaaaatgtaccaatcagggcaaaagagaaacttganggtgattactctgatgggtgtggccctatgcanactgaatctctgggtggaaatagatactttcatatccttattgatgaattgac

SEQ ID NO: 19385 - DNA, 470 bp, Glycine max
tgccaaaattcaagtagaagagagatatgttgctcattctattactttgtaattgatctcaaaacattataatcaattacactacatatgttgaactcattgctctcaagaaacttacagatgaatcaattcgtttaacaccttagaatcatattaataatgcataaaagaagacttaacctagaacaatcatcatgttagtctataacaatcaatacaaataccacatctattaaacttgtttgacattgtaaaattattaaaccaaaactaagaccttaagacatatcttcatagttttatgctttggtccaacaataattcttcattcgaaaatatgttactactgtttatattataaatgttaagccaaaatcattaataagaccatctaaactcattatcctttttcccatacttataatatttgtgcctccaacctacttctattaaatggtagacttataata

SEQ ID NO: 19386 - DNA, 321 bp, Glycine max
  unsure (1)..(321): unsure at all n locations
agctntcagccatttcaaacgatcataactttntactcggatatctgattgagtcccgttatataacgagacgctcgaaattgaatattgaagctctgaactagttcaaacgacaataactttntactcggatgtctgattgagtcccgtaatatatcaagacgctcgaaattgaatgttgaccctctgagcatattcaaacgacaataacttttttctcggatgtttgattgtgtcccgtaatatatcgagacgctcgaaattgaatgttgaagctctgagccaattcaaacgacaataactttttactcggatgtctga

SEQ ID NO: 19387 - DNA, 390 bp, Glycine max
  unsure (1)..(390): unsure at all n locations
actcagcttaacattcaatttcgagcgtctcgatatattacgagactcaatcttacatctgagaanaacgttattgtcgtttgaatttgctcagagcttcaacattcaatttcgagcatctcgatatgttacgggactcaatcagacatccgagaaaaaagttattgtcgtttgaattagctcagaagttcaacattcaatttcgagcgtctcgatatgttacgggactcaatcatacattcgagaaaaaagttattgtcgtttgaatttgctcagaggttcaacattcaatttcgagcgtctcgatatgttacggggcttaatcagacatccgagtaaaaagttattgtcgtttgaattggctcaaagattcaacattcaatatcgagc

SEQ ID NO: 19388 - DNA, 191 bp, Glycine max
tatctctatgtgctttgttggatcatgttgaaaaggattgagtgcaatgctgatggcggacttattaacacaaaccagtccaataagagcattatattttattttgaggtcatcaagtttgatcttcatgcataacaactcactaaactcctgagccatatctctaaattctgctactgcacttgatcttg

SEQ ID NO: 19389 - DNA, 418 bp, Glycine max
agcttctgttttctttttcgagcatcttgatatatgacgggacacaatcggacatccgagcaaaaagttattgtcatttgaattttgtgagagcttctgtattcattttttagcatcaagaattattaaatgactcaatcagacatccgagtaaatagttattgtcgtttgaatttgctgacagcttctgtattcaatttcgagagtctcgaattattaaatgactcaatcggacatccgagtcataagttatcgtcgtttgaatctgctcagagcttttattttcaatttcgagcgtctcgatatattatgggactgaatcggacatccgagtaaaaagttatggtcttttgaatttgcttagagtcactggtctcaatttggtgcgtctcattatactatacgactcaatcggact

SEQ ID NO: 19390 - DNA, 410 bp, Glycine max
  unsure (1)..(410): unsure at all n locations
ataagcaaattcaaatgacaataactnttgactcggatgtccgattgagtcatttaataattcttgacgctagaaattgaatacagaagctctcaccaaatttaaatgacaataactntttactcagaagtctgattgtgtcccgtaatatatctagatgctcaaaattgaaaacagaagctctgagcaaattcaaacgacaatagcttttgactcggatatccgattgagtcatttaataattcgagacgctcaaaattgaatacagaagctctaagcaaattcaaatgacaataactnttgactcgaatgtccgattgagtcattntataattcgagacgctcaaaatngaatgcacgagctctcaccanatntaaatgacaataactttttactcagaagtctaatt

SEQ ID NO: 19391 - DNA, 403 bp, Glycine max
  unsure (1)..(403): unsure at all n locations
tgccaacccatggaagctcctaatatctcccacactntttgtggtgggccattcttggatgaccttgattntctcagggtccacttggaccccatttctaccaactacaaaccctaaggaaactatattatctacacaaaaagtacacttctctatatttgcatagagggtgtttttcctacggactgaaagaacttgcctgagatgtcctaagtgatcatctangctcctactgtacactaaaatatcatcaaagtaaacaactacaaatctacctatgaaatcccttaagacatgatgcataagcctcaaaaaggtgcttggtgcattagtgagtccaaaaggcatcactaaccattcatacaaaccaaactcggtcttgaaacgngttttcactcatcac

SEQ ID NO: 19392 - DNA, 407 bp, Glycine max
  unsure (1)..(407): unsure at all n locations
agcttgtagcatattcgaacgacaataactatttactctgatgtccgattgagtcccgtaatatatcgagacactcgtaattgaaaacagaagttctgagaaaattcaaacgacaataactttttattcggatgtccgattgagtatcgtaatatatcgagacgctcgtaattgaaaacaaaagcttgtagcaaattcgaacgacaataactttttactcggatgtccgattgagtcccgtaatatatcgagacgctagtaattgaaattagaagctctgagcanattcaaacgacaattacttgtgactcggatgtccgactgtgtcccgtagtatttcgagacgctcgatattgaacactgaagctctgagaaaaagcaaacgacaataacattttactctgatg

SEQ ID NO: 19393 - DNA, 428 bp, Glycine max
  unsure (1)..(428): unsure at all n locations
tttcttcacagtttatctntttcaaacttgagttttggaagaccaactactaagtctttcctaactagatgatataaacgatggatgttaatgtgttcaaccctacaatgccacaaccatgaatcatcatctatcttactcaccaagcaacttagctcatgaaaagatgcatgctcaacattcagcatataaatattacctattctcttaccaatgtggacaactttaccagatatggcttcacttataagatagcaatttctgtcaaactcaatcttgaaacctttatcgcatagttgactaatggttagaaagttatgctctagtgcatccatatgtagcacattctttatctgagttttgtgttaattccctatatttccttccccagtatattttgctttgttattgtctccaaacatgacata

SEQ ID NO: 19394 - DNA, 392 bp, Glycine max
tagctcgtaggcttctatttacaaccatacattggctttgaacaccatgagaaaattcacacaaaaaactgaattagtgagacatggagttacaagatttgctaccactttcttaactttgcaaagattgcataagcaaaaggccaatcttagaaggatgtttacttcagatgaatggttgaagtctatggcagctaaagagcccaaggggaagcaagcaacagatgttgttcttatgccatcattttggaatgatgttgtctatgctttataggctatggggcctcttgaagtgtgtcgatgtggtgaataatgaaaaaaacctgaatatgttcatttatgaacaatggaatggccaagagcttcaatacaatgaaagatagatatggata

SEQ ID NO: 19395 - DNA, 400 bp, Glycine max
  unsure (1)..(400): unsure at all n locations
ntctccactaagtngcctgatgtctgatatgtcttttctgatggtagtggtcctagatgcanggaagaatatctccaagaacaccctcttaaggtcatcccaactaaaaatagacctgcgagcaaggtagtatagccaatcttttgtcactccctccagagaatgaggaacagcctttagaaagatatgatcttcttggccatcanggggcttcatggtggaacaaacaatatcgaactccttaagatgcttatgaagatcttcacctgcaagaccatgaaactngggcagcacatgtattagtccagtcttgagaacatatggaacaccctcatcatgatattgaaagcacaagctttcataagtganatcaagtgcagccatctccctagagtcctct

SEQ ID NO: 19396 - DNA, 400 bp, Glycine max
ccttcactttcgatattgtttgattctcaactagtttatgacactgttagttcttctcaaatgcctcctttcttgtgtgtaacagataaatccaaagtttccttgtgaaatcatcaactattgacatgaagtatctaacttttccctttgattatacctttgaaggccctcacaagtcaaaatgaatgtcatccattctattcttgttggtgagcattccagtactgaatattactatgtgacacttaccatacacacagtgtcacaaaaaaggcttccaatttgtactctccaactgaccttgttgctcaattcaacataccattctactaacatgtcagcctcatatccataactttgcttggcagatattgtctcacactaaactgatcctatacat

SEQ ID NO: 19397 - DNA, 337 bp, Glycine max
  unsure (1)..(337): unsure at all n locations
agctttgagcatattcaagcaaatatcatctnttttactcggatgtctgattgagtcccgtaatatatcgagacgctcgaagtggaacaccgaatctctgagcatattcaaacgacaataactttgtactcggatgtcagattgagtccagaaatttgtcgagatgcttgaaattgaagaccaaagctctgagcaaattcaaacgacaataactatttactcggatgtgtgactgagtcccgtaatatatcgagacgctcggaattgattatcgaagctctgagcgaattcaaacgacaataactgttactcggatggctgatagagtcccgtacta

SEQ ID NO: 19398 - DNA, 392 bp, Glycine max
  unsure (1)..(392): unsure at all n locations
tctcgacatattacggggactcaatcagacattccgaataanaaagtttattngttgntngaaatnttctcatagccttcaacatttcaagttgtgagccgttttgatatnattacgataccctcaatcggacattccgagtaaaaaagttattggtcgttgaatttgttcagagcttcngcattcaagtccgagcctctcgatatactacgggactcaatcagacctccgagtaaaaggctattgtcgtttgaatatgctcaaaacttcgacattctagtccgagcgtctcgatatattacgggactcaatcagacatccgagttaaaagttattgtcgtttgaatatgcttagagcttctgtattccatttgagcgtctcgatatattac

SEQ ID NO: 19399 - DNA, 444 bp, Glycine max
  unsure (1)..(444): unsure at all n locations
ggcatgtttatgcttgtgggattttnntgtgatagtgaattttggccggagaaatgttgagtgaatagataaaagtaccttaccgnngatttgtattttttatgaggtgaattggtgtttttacatttggagttctatagtagcataggcatttgtgacactttttctacttgtganatgccgagtatttgtatgctgcaacttcttgcacnatgtcantgctcatttggctaagaaagattgtttggaggatacttctagttgttgcaataagggaaagcacattagatctattgttgatatatagatactgcacaaagagcttgccaaagaatcccggtgttctcatgaacgaagtaagcatatagatacaacgtatcatttcattagagagtgcattaccaagaaaagaagtagaattgactcatgtgaatactcaagatc

SEQ ID NO: 19400 - DNA, 389 bp, Glycine max
  unsure (1)..(389): unsure at all n locations
tatagaatatataataagagatctatgactattgaagaatctattcatgattcctttgatgagtctaatgttattcctccaagaaaggaaattctagatgatattgcagaatctttagaaaaaatgcatatttatggacaagattctaaaggaaaagggaaaggaagcaatgaagatcctccagaagaagccatatcaaattatgaacttccaagagaatggaaagcttcaagagatcatccccttgacaacattattggtgatatctcanaaggggtaacaactagacattctcttaaagatntatgcaataatatggcttttgtgtctatggttgaacctaaaaatataaatgaagccataatagatgatcattggatagttgctat

SEQ ID NO: 19401 - DNA, 443 bp, Glycine max
  unsure (1)..(443): unsure at all n locations
ttagagaccttaggcatgcaagctntgagttctatggccccaatgacatctatccnccacatggaaaaaggccaaggtgtttacatgacattcagaggatgtggcggaacattgacattgtccgcgtacgcttgacatttatggcattaccttacatgggcgcagcaatcgctttccatagtgagctagtaataacctgctctaaggatattcctggccataccatgcccattggcatgtgtcccanatgcacccccgtggatttccttaatcatgtagttcgcctctctggcatctatgcatcgcatgagggtcatgtcgtcgtttcgtttgtacacgatggtaccactcacatagaaactagtatccaatctccgtaacgtgcttttggcattgtcggaaatccctggtggatattctttgttctcgacatactggctaat

SEQ ID NO: 19402 - DNA, 395 bp, Glycine max
  unsure (1)..(395): unsure at all n locations
tctgtccctgagaaactggttcccagaagacaacaggggagtaatgaatgctgaataccctaaccttgcaacatgtccctaggaagtagacacggagatggacaagaaaatccgcagtattgtgagtagcattnttgaatagacgcctctntgtgcctgattgctgagaaaagatgttccaacatcttccaacccaagtgtttctgtgcctgatgctaagaaagatgttccaacatcctccgctccaaatgctgaagccctcccttcacccagtgaagaggaatcaacagaagaagaggatcaagcctcagaggagactcctgcaccacgggcaccagaacctgctccangtgacctcattgacctggaagaagtcgaatctgatgaagaaccca

SEQ ID NO: 19403 - DNA, 350 bp, Glycine max
  unsure (1)..(350): unsure at all n locations
nttatctggtggattcacttttgatcacaactgtaccatattgaatatcattagtcaccacanaaggaccaatccactttgacctcaacttaccactcgtgagtccaagcctagagttatacaataaaactttctgtccaaccacgaagtccttcttagcgatcaaactatcaaggaacttcttggtcttctccttgtagaatttggaattctcataggcttctaaacggatctcatctaactcacttagttggaacttcctttcctttccagcttgatcaatagagaagttgcaggtctttacagcccagtaagctttgtgctctatctctacaggaagatgacatgcc

SEQ ID NO: 19404 - DNA, 385 bp, Glycine max
  unsure (1)..(385): unsure at all n locations
agcttgtgcattcaatatcctgatgagggtgttccctatgttctcaagactggactaatacattngctgcccaagtttcatggtcttgcangtgaatatcctcataagcatcttaaggagttccatattgtttgtttcaccatgaagcccccaaatgtccaggaagatcatatctttttaaaggcttttcctcattctctagagggagtggcaaaagattggctgtattaccttgctcccaggtccattttcagctgggatgaccttcagagggtgttcttggagaaattcttccctgcatctangaccactgccatcagaaaagacatttcangcatcangcaacttagtggagagaacttgtatgagtactgngaaagattca

SEQ ID NO: 19405 - DNA, 397 bp, Glycine max
  unsure (1)..(397): unsure at all n locations
agcttgcatntctctcccatggctgatatcanatctatgatggtatcaaagctttgctatgctactcacattcttcctctcgattatcatatccttcattcttacatcatgagtgaacaacaacaagatcaatcactcaatgtacgcagtccttattactttcatccgggagaaaatccagggatagctntggtttctccggttcttgattcatccaattataattcatggagttgatctatgcttattgcattaagcacgaagaacaaatatgagtttgtcgatggttctattcgaagacctgcatcagatcatgaacttcatgtagctgggaagggtgcaataatatggtggcttatggttggtcatttagctctctttcattagaaaaaatact

SEQ ID NO: 19406 - DNA, 358 bp, Glycine max
  unsure (1)..(358): unsure at all n locations
tccattgttaaatttcgagcgtctcgatatattatatactctgaatcggacctctgagggaaaagttatgaccatttgaattgctcaagagctntcatagttcaatttctagcgtctcgatatattatgcgcctgaatcaaacctccgagttaaaagctatgaccattngaatntctcgagagcttccgttgttcaatttcgagcgtctctatatgtgatgcgcctaaatcggacatccgaagtaaaagttatatccatttgaatttctcaagagcttccgttgtcaatttaagcgtctctatattgatgcgcctaaatcggacatccgagttaaaagttatgatcatttgatattcg

SEQ ID NO: 19407 - DNA, 355 bp, Glycine max
ctattacacacatactgtaatcgattaccagaggatgttttcagagaacattctcaacagtcacatcttattatctgattcttaagtggccatcaaaggcttatatatatgtgactagagacacgaattttataagagtttttcagaacaataaggtctaatcctcttataaagaaaaatcgatttatcctcttacaaattccttggccaaaacactggtgattcaataaggaattatttgagtgctcaaattggtcaatctatctcttttaagagagattacttcttttcttcttcttcattctgaaaagggattaagagaccgatggtctcttggtgtgaaagaattctaaca

SEQ ID NO: 19408 - DNA, 458 bp, Glycine max
  unsure (1)..(458): unsure at all n locations
ctaagcttgccttccttacaagtcctttgctacctcgttagccactggatcttctttgattggaatctccgctgcctgcttaacaaattaaaagagaaatcagtacatgcattacagtataaaagaattttcataatgtcattcaatatcaaattataatatactaacctctgatgctatttataagaaataagttgtaatgtacactaatagattcagaggtagtatcataaatttataaatttttataataattatcttacaaatcatactaaccctaatttttaattgattgattgatactgaccatgtaaagggttttcatgatttgatccaatcacaatatgcaatanatnggttgtcttctatgataactantacaaaaatcataccaataataatttctaattgatagaatacaagtatttatagacacaacatagaagctttactcaaat

SEQ ID NO: 19409 - DNA, 326 bp, Glycine max
  unsure (1)..(326): unsure at all n locations
tnctgaacagattgatcagctgtttcatacagtctagtctgattgtctcctttatcatcaacatcactggccctggcattcaaattctcaatttccacctgttcttcatcttcattgactgtctccaatgagattgcttctgtcgacaaaaatggagtgtgctggtcatttttctccccagaataatcctcataattggctgcagaacctaaatggtcggaaccatgataattacttctcaaacatcttctcattcttgatgaacttttcattaaatctagcttccagaaaacctattatataatcaaatgtttagttaatcaaat

SEQ ID NO: 19410 - DNA, 412 bp, Glycine max
  unsure (1)..(412): unsure at all n locations
agcttcaagaattaatggcctcatcaaactacttgttccccgaaggcaattcaattaataggcctcccatttttaatggagtgggttaccactattggaaaacccgcatgcaaatcttcatagaggctatagatttaaacatttgggaagccatagaaatagggccttatattcccaccatggttgctagaaatacaacaatagaaaagcatagggaagattggagtgagaaagaaagaagactagtacaatataacttaaaagccaaaaacataattacatctgccctgngaatggatgaatactntanggtatcaaactgtaaaagtgaaaatatatgtgggataccctacaagtaacacatgaaggcacaacagatgttaaaagatctaggataaacacattaactcat

SEQ ID NO: 19411 - DNA, 391 bp, Glycine max
agcttatgttgtgatttctcatgtcctctaccatagtacaatcgaactgaagatgcgtcttatattaaatatttgaatcttttattcattgtaaacctaattccaactgaatttagattttaaaatttgatataccccccacattcatcatatattttaacatttattaaattttaaagatattgtaaccttaatcaatcttaatatgactatgtcttttaaattatacactatgatacatctcattaataaagaacatagtgcttgatgtatataaattatttgcatacttaccttttcaattctaaaagtgtggtgtctttgatctattcatatttactataataccatacaatatttacgattaataatcaaaacatctatgattaat

SEQ ID NO: 19412 - DNA, 390 bp, Glycine max
agctttaacttaatcaattcaaaagccttttgtgcttgttcattccacccaaacgcacccttcttcaaacattcggtcataggacttgctatagtgctaaaattctggataaagcgtcgataaaatgatgcaagacaaggaaagatctcacctccgaactgttgtagggctcggccaagtcttgatagcatccacttttgtttgatcaacggatactccatctttagacaccacatatccaagacacaccacactttcaaccaagaaatcacactttttcctctctccatagagttgttgtgctcttatggtctcaaatatttgtttcaaatgagtgaaatgcccctctatagatttgctatacaccaatgtgtcatcaagataaacaac

SEQ ID NO: 19413 - DNA, 404 bp, Glycine max
  unsure (1)..(404): unsure at all n locations
agcttgttatgccctcaagatgttcaaggagttcatagaaaagtagagtggaagcaaaatcaaagtactcaaaatagatcgtgaccaagaatacctcgcttgtacaaatttctttgagcaacctggattcaaaatcaactaaccaccaatacacacctcaatagaatggagttgttgaaaggaagaacaaaacaatcatggacatggtgaggtgcatgctgaatgccaaacaaatgcctaaggagttttgggtggaagcaattgctaccgctgtctacattttgagtaggtgcccaacanaaagtgtgtgtgataagacaccagagtaagcctggaatggaaggagaccatcaatcagacacctcagatttgttgggtgcatatcatacacacatgtttcaaac

SEQ ID NO: 19414 - DNA, 366 bp, Glycine max
  unsure (1)..(366): unsure at all n locations
agctcgcattctattacacaagtcttgcaattgattacctaaagatatcttcagaaaattatttccaagagtcacatctgttcaaatggtttttacatggccatcaaaggtctatttatatgtgactaggaacacacccccgctgacagtctttttaagaacacaaatgtattatttctcttataaagaaaaatcttcttatcctcttaaaaattccatggccaatacactngcaattcaataacgaattttttgagtgctcaattgctcaatctatctctttcaagagagaattcttctcctcttcatcttacttctaaaaagggattaagagaccgacggtctcttattgtatagaaatctgaa

SEQ ID NO: 19415 - DNA, 321 bp, Glycine max
atggaagctcctcatatctcccacactttgtggggtgggccattcttggatggccttgattttctcaaggtccacttggaccccatttctaccaactacaaaccctaagaacactatcttatctacacccacagtacacactctatatttgcatacagggtgttcttcctaatgactgaaagaacttgcctgagatgtcctaagtgatcatctaagctgctattgtacactaaaatatcatcaaaatacacaactacaaatctacctatgaaatcacttatgacatgatgcataaagctcatacatgagctctgtgcatta

SEQ ID NO: 19416 - DNA, 386 bp, Glycine max
  unsure (1)..(386): unsure at all n locations
ggctctactcttttcagaacttgcatcatcgtagcagttgccaacacagaaggtagataactcatgaacctcgaatctgcaatgttggaaaacaaaacgaaaagcaaattaaaatctaaaaacaatattatgaataagaaaactgacttgcatgaaagatgtaacaaaaatacctccaatgagggagagaagaacgccttcagacttagtgaggaactcccagaagagatgatccttcaatccaagtcttcttgtgaagtaatcaagaaaagagagagaggttggagggttcatcttccatccaagagtgganaggatcaaaatctccatctttntaatcgtcttggcttcgaacaagtatctactcttcttcacctacacaattc

SEQ ID NO: 19417 - DNA, 405 bp, Glycine max
cttcttgcaattcttcggttccttgaagatatattaacactttctttgcagctgtccagtgctctattcctggattactttgatatctctcaagcattccaaccacaaaagcaatgttaggtcttgtacacaccgcgcatacataaagcttccttaatgaaatgatatggaatgttcctcatctgctccctttcaagctcatttttaagacattgattcatattgaatctatcacctctcacaataggtgccatgtttgctgaacaatctttaatccgatatctttctagaactttatcaatataggcctcttgagacaagccaagaatcccttgagatcggtttctatggatctctatgccaatgacatatgctgcctctcccatatcattcatatcaaaattc

SEQ ID NO: 19418 - DNA, 428 bp, Glycine max
  unsure (1)..(428): unsure at all n locations
ntgagcaaattcaaacgacaataactntngaatcggattttcgattttgtctcatagaatatcgagacactcgtaattgaaaacggaagttctgagaaaaatcaaacgacaataagttttaactcggatgtcctattgagccctgttatatatcgagacgctagtgattgaaaacggaagctttgacaaaaatcaaacgataataatttttaactcggatgtccgattgagtcccgtaatatatcgagacgctcataattgaaaactgaagctcttagcaaattcaaacgactataaattctgactcggatgtccgactgtgtcccgtacgatatagagatgctcgtaattgacaacagaaactctgagaaacatcaaacgacaataacttttaacttggatgtccgattgaccccttaatatatcga

SEQ ID NO: 19419 - DNA, 463 bp, Glycine max
  unsure (1)..(463): unsure at all n locations
tgaaggcaaactggatgcgttggtcaacttggtaacctatctggccttgaatcacaaatctgtacctgtcgcaagggtttgaggtttgtgctcctctgctgaccaccatacagacctttgcccttccatgcagcaacctagagcaattgagcagcctgaagcttatgcagcacatatatacaatagacctgctcaacctcagcagcaaaatcaaccacagcagagcaattatgacctttccagcaacacatacaaccctggatggaggaattaccctaacctcagatggtccagccctcagcaacaacaacaacagcctgctccttccttccaaaatgcttctggcccaagcagaccatacattcctccaccaatccaacaacagcaacaaccccagatacagccaacaagtgagggccctccacaaccttccctcgaagaacttgtgaggcanatgactatg

SEQ ID NO: 19420 - DNA, 467 bp, Glycine max
  unsure (1)..(467): unsure at all n locations
tcccaagtttttaagttcttcctcanaactgtcctaatctaagttcccaaagtcctattaacaacttccgtttgcccatcggtttgtgggtgacaagtggttgaaaataacaatttagtgcccaacttgctccacaaagtcctccaaaaatggcttaagaacttagagtccctatcactaacaatgctccttggcaaaccatggagtctcacaatctccttgaaaaacaaatcagccacatgggaagcatcatcaactttcttacatggaataaaatgagccattntagaaaacctatcaacaaccacaaaaatggaatctctaccattgcttgtttttggcagccccaaaacaaaatccatggataaatcaatccaaggatacttcggaattggcaatggagtatacaatccatgaggctntaccttagactttgcctttntacatacaatgcaatgttcacaaaa

SEQ ID NO: 19421 - DNA, 444 bp, Glycine max
  unsure (1)..(444): unsure at all n locations
acatactgtgtaatattattagtaagaaacatagccttctatatttgataactaaaccttcttctccttttgcattcgtatacggcatgaaatatgttactcctggaaagtccccaccttctacttcggccaatccaccatacacaacatcaccccacccaaaatcgacttttccaaaatgataatatatatctcaagtctgacacaacatataacaccttacagttgcgaataagcatcgatccttaatcaccattagatctgccacagaatgcatatactcctccgtcacctaactnttcactaggttgattccactgcatacccaaatggatttgcacaaagctatcctgcagcggtgactgctgcacggtatggaacagcattgccgtaataacctacgggtaactgatgatagaaccgtgcacgtgcatcgactatgca

SEQ ID NO: 19422 - DNA, 382 bp, Glycine max
  unsure (1)..(382): unsure at all n locations
ttcttcttttgtttcgtcttcctgcagctcgctgatattttcacgaagcctctatctccagctctctttcaaggtctctgttccaagctgggaatgatgaacatccattcctagcttgcggngggctctcaacaatagcttgttagttagaaaaagctgttagagttagttttctttctggtgtaactaactaaccaccctttttctctttccttcatatgtgtataaatatcttacgaattcagtaataaagacatgcaattatttggtcatctcacgtacacttgcgtcgtttctctctcctttatggctgttgatccatttaatatttgttccgtgctttcccctggacgacgttntcgagtagagaaatgatgcattt

SEQ ID NO: 19423 - DNA, 473 bp, Glycine max
  unsure (1)..(473): unsure at all n locations
ntgaagcactcacattgngttgaagcaatggaagaagatctaatgtctattgagagaaacaagacatggagtctcacaaagctaccaacaggaaagaaagccatagcagtaaaatgggtctacaaaactaagttgaatcctagaggagaagtaacaaagttcatagccagactggttgcaaagggatttctgcagaagcaaggtctggattatgatgaagtatttgcccctgttgctangttggaaacagttagacttgtaatagcaatggctagctacaattgctgggaagtacaccaaatggatgtaaaatctgcatttcttaatggctcactagaagaagaagttnttgtcactcaaccaccagggtttgtgatgaaaggtagagaaacagaggtgtacaagctgcataaggccttgtatggtctgaaacaggcttccagagcttggaacaagagaatagatacctttct

SEQ ID NO: 19424 - DNA, 433 bp, Glycine max
  unsure (1)..(433): unsure at all n locations
agctntaagttaattcaaatgacaataacttttgactcggatgtccgattgagtcatttaataattcttgacgctagaaattgaatacagaagctctcaccanatttaaatgacaataactttttactcagaagtctgattgtgtcccgtaatatatctagatgctcaaaattgaaaacagaagctctgagcaaattcaaacgacaatagcttttgactcggatatccgattgagtcatttaataattcgagacgctcanaattgaatacagaagctctaagcanattcaaatgacaataactnttgactcgaatgtccgattgagtcattntataattcgagacgctcaanattgaatgcaggagctctcaccannattaaatgacaataactntntactcagaagtctaatggtgtcctgtaatntatcta

SEQ ID NO: 19425 - DNA, 397 bp, Glycine max
ggacctataaaactcaactatggaacttgctcttaacacaagtctgttgttctttgactgctgacagctagagacttttctttcttacgtgcttcgacttgttaaagttcatgttcatgaacttaacagtaccaattaattctttaaaggaaattgagtcaagattctttaaaacccttagtgttgttacttgttaatgtggctccttgtagagcttgtaagccttggatcttcttcatcaatgaagtccttcgcttcttgaagatcaatggccgcggaatggagaataaggaaaggttattggagatgccactttaacgagaagatgagtctcgaacaagctcaccaccataggaagtcatgcataagagcttgaaggtaggagaagatgggtgga

SEQ ID NO: 19426 - DNA, 456 bp, Glycine max
tcttagtttcagatgatgcagatgggcttgtagctacctcatgcactcctctaatgactatggcatcatttctggcgctaaactgttgggagttggaagccatcttctcaattaaatttctggcttcagcaggagtcatgtctccaagggctccaccactggcagcatctatcatacttctctccatattgctgagtccttcataaaaatattggagaagaagctgctctgaaatctgatggtgggggcaactggcacatagtttcttaaatctctcctagtactcatacaggctctctccactaagttgtctaatacctgagatatccttcctgatggctgtggtcctggaagcagggaaaattgtttctaagaatactctcttaaggtcatcccagctcgtgatggaccttggagcaaggtaatacaaccagtcctttgccactccctctaatg

SEQ ID NO: 19427 - DNA, 407 bp, Glycine max
agcttaatggtgcaatcccaatcgaaattggccaacttcataagttgtcaatactgaatttgagctggaattctctgggtggatcaattccatttgagattacaaagttgagcaatattactttcctgaacttgcaaaccaacaatctaagtggttccataccaacatccattgacaacttgaaatttctctttgaactccaactcagggaaaacaaactaagtggtgtgataccaagcatgccggggagtttgcaggtgtcactgaatcttagtagcaaccactttagtggtaatactcccaacaattttggtaatttggatagcctgcaagtcttggatctctcaaataacaaatttcctggtccaattcccaaccaactaactggaatgtcagctctgacatag

SEQ ID NO: 19428 - DNA, 475 bp, Glycine max
  unsure (1)..(475): unsure at all n locations
ctaagcttacatcaaccacttcgggtactgacctacttttatggtcttgatggggcctatgcaagttgaaagccttggaggaaagaggtatgcctatgttgttgtggatgatttctccagatttacctgngtcaactttatcagagaaaaatcagacacctttgaagtattcaaagagttgagtctaagacttcaaagagaaaaagactgtgtcatcaagagaattacgagtgatcatggcagagagtttgaaaacagcaagtttactgaattctgcacatctgaaggcatcactcatgagttctctgcagccattacaccacaacaaaatggcatagttganaggaacaacaggactctgcaagacgctgctanggtcatgcttcatgccaaagaacttccctataatctctgggctgaagccatgaacacagcatgctacatccacaacagagtcacacttagaagagggact

SEQ ID NO: 19429 - DNA, 446 bp, Glycine max
  unsure (1)..(446): unsure at all n locations
tncatcaatttatctcttatttcagcctctgttgaagtgtcatcttcattcaccaatctggataggtggtccgctaccacaatttcagaacctttcttgcccttgatgactaaatcaaattcttgaagcagcagtatccatctgatcaatcgtggcttggaatcaactttgcataacaaatattttattgctgcgtgatcagagtaaatcactatctttgatcccaccagataagatcaaaatttctcaagtgcaaacacaattgtcagtaattctttctcaatggtggcatagttaatctgagcatcattcaaaactctgctagcgtaatagatgcgatgaaacattctgctcttctgctgccccagcacagcacctactgcataatcagttgcatcacacatcaattcaaactcttgtcgctagtctggtgctgtaatcacaag

SEQ ID NO: 19430 - DNA, 329 bp, Glycine max
ttcttatcttgatcatcttaactcgatgtatggcaagtctccatgtggggttagctgaaacatggatgctatggtggcaagcacattacccatctgattttcctctctacgaatgtggtggaaagagacctcatcaagaactcaatcagtttcttgatgtacgcctgatagggtatcaactagagatccctagtttcccattctcccctcagctggcgaattaccaaggctgagtctctgtacactataagcaatatgacattaaagtcaattgccacttggattccgacggcacatgcctcatactcagccatagtattcgtgcaatc

SEQ ID NO: 19431 - DNA, 393 bp, Glycine max
  unsure (1)..(393): unsure at all n locations
tctangcgatggctctgtaagaactccactaccctagttagacgtgtgtttcatcagnccaagcatgactactgcctattcaccattagatcatggaataacttagtcattctactaatgcatatcgatgacatgatcctgtcaggaccaaattctagactagggcaagctagtgagacccaattcaatctatgtctcaattgaggatccttggcactatgaaatattatcttggcttataattatctaaatgcaacagaggtatctcactttcctagagaatatacactctatctcttttggaagatacatgtttattgacatgcaaaccgatcaatctatcgatggatcccagactagatacttactgcctgataaatcaatcttgatgat

SEQ ID NO: 19432 - DNA, 455 bp, Glycine max
  unsure (1)..(455): unsure at all n locations
tggtcataacgtttcactcggatgtcggattcaagcgcataatatatcgagacgctcgaaattgaacaatggaagctctcgagcaattccaatggtcataacttttaactcggaggtccgattcaggcgcataatatctcgagacgttcgaaattgaacaatggaagctctcgagcaattcaaatggtcataacttttcactcggaggtccgattcaggcacataatatatcgagacgctcgaaattgaacaatggaagctcttgagcaattcanatggtcataactnttcactcggaggtcngattcangcgcataatatatcgagacgctcgaaattgaacaatggaagctctttagcaattcaaatggtcataacttttcactcggatgtccgattcacgcacataatatatcgagacgctggcaattgaacaacggaacgtctcgagaaat

SEQ ID NO: 19433 - DNA, 475 bp, Glycine max
  unsure (1)..(475): unsure at all n locations
tagctacacgcaccctatntaaggatagcctatctatatatataatatatatctgaacatttattacaaaaataagggtaaattataaaagataaagaaagatgacaattacaaataattttttcataacatataatgtattatttggcatagcttaacttgaaaatagatctattaagacaatgaataaaataataaaactgtcaagttgtcaactgattaaagaatagtatattacgttacagtaaaaaaatagtatagtatagtagtagctttcaagtttttaactaaaatattatattttaataattaatataaacgtattaagtgagtaaattgtcacgcgtatgtttgtacataataatatatattacaaatacatgtgtaccagacgctcttagctggcatattgatttaatattgcatcatcacaagcatagagcataaactagcattatggttctctagatgatgt

SEQ ID NO: 19434 - DNA, 293 bp, Glycine max
ctgaagcatccattatccctagctatcctggatggttgcaaatactgccctaagtactagcgaaacaagaagactgacagggtaacgaagtaccacgtctctcaagagaaataacaagcgttgaagactaaactataaataaaaacattatttcattgtacaaagcatacctttcttggccttctggctaagatcaagtgtagcatctgttcttatcagttgaatatttgatatgtggaccattggctcacacgatattaaattaatcttttgagggggagggtccattatag

SEQ ID NO: 19435 - DNA, 451 bp, Glycine max
  unsure (1)..(451): unsure at all n locations
atcttcatgtttaactatgtatggcaaaacttcattactggtgttcaagatatacaagtgagcttgtaacaaatcttctacacttggagtgatcacctgcagtcctcttgaacccttaccacccactctgtcatcatgccgagactcangaagcccaacaggtttagccttctctaagtattctgaacaaaattcaatggcttcttctgcaatgtacctctcaacaatagatgcttctggatgatatagattctttgtataccctnttaagatcttcatgtatcgctcaaccgggtacatccaccgtagataaacaggaccacaacatttgatttctctgaccagatgcacaatcaagtgaatcatgatgtcaaagaaagcagagggaanatacatctncaactgngcacagttaattgcggcctcattntccaactcatcanacatgact

SEQ ID NO: 19436 - DNA, 435 bp, Glycine max
  unsure (1)..(435): unsure at all n locations
agcttagattgacaacaacttttgcaccttcaaatggtctcctttttacctggaattgaagtgaaatttacattaaattcatatggaaagcttctattgagaaaatataaaaactaaacaagaaatatttacaatcctaccaaaaagaaccataaattgggagaaatatatacatttttgaaaacttttctatacaaaagttagtcataaaagacgactaacagtaaggcaatgaaatgggaggaggcttgctatatacaatttcatagggagtagcatangcagaagtatggaaggtggagttgtaccaccatttagctaaagagagctaatgaacccaatgatgaggtctatctaaacacatacaccgaagataagtctccaaacgcctcttaacatcctaagtctgcccatctgtttgtgggtgataagagg

SEQ ID NO: 19437 - DNA, 404 bp, Glycine max
  unsure (1)..(404): unsure at all n locations
tgcaatcgattacacatatactgcaatcgattaccatatcatatcttcagacaatatcctcaacagtcacatgtttttatgtggttcttcgaatgactatcaaaggcctatatatatgtgactcgagacatgaatctgctaacagttcttcagaacacaaacgtcttatcctcttataaagcacaatcgtcttattgctcttacaacattccttggccaaattacttgtgatccaataacgaattttttagcgctcaaattgttcaatctatctctttccagagagatttcttcttctcttcttcattctgaaaagggattaagagacccagggtctcttgttgcgaaagaattctaaacacanatgaagggttgccttatgtgtctacaacttgcaaacgaat

SEQ ID NO: 19438 - DNA, 417 bp, Glycine max
tcttaaagagtaagagacactctttatcattctctctttgtcaaatgtacttgccgactaagatgtttgtaccataactcatacattgacaatgtttatatttattttattttactaatcacatttacaacagaatgccttgaattgaaatttgatatatagaataaaaacattctttaataatagaattttaattcaataaaatgtattttggaaatgatatcattacataagactaaaattagttaaaatttatttatattttaatctatattgagatcgtttatctttgctctggaaggagtcctatggaaggaagatatagaaacgaatttactttgagattgaagaaatgttgattgtgatttgatgctagtagatattagttcactgatgtctagattctattctaagtga

SEQ ID NO: 19439 - DNA, 436 bp, Glycine max
  unsure (1)..(436): unsure at all n locations
agcttgccgtcacggagttntccgactatgctcttgtgtggtggaacaagctaaaaaaggagagagcaagaaatgaagagccaatggttgatacatgggcggagatgaaaatgatcatgaggaagcggctagttactcaagggatttgaaatttaagcttcaaaaactaaccacccaaggcaacaatggggttgaggagtatttcaaggaaatggatgtgctcatgattcaagcaaagattgaagaagatgaggaggtaactatggctcgatttcttaatggtttgactaatgatatccgtgatattgttgagctgttggagtttgttgaaatgaatgatttgcttcacaaagcaatccaagtataacaacaattaanaagganaggagtggctaagaggaagtttaccaactttggttcttctagttggaaagac

SEQ ID NO: 19440 - DNA, 419 bp, Glycine max
  unsure (1)..(419): unsure at all n locations
ttcttgtttaccccatgttgagtttgcttacaataaagctgttcatagcactactaattgttctccttttgaagttgtttatgtttttaacccactaacttctcttgatcttttgcctatgcctaatgtttctatttttaagcatanagaaggtcaagtaaaggcggtctatgtgaagaagcttcatgagagagtcaaagatcaaattgacaggaaaaataaaagctatgctaaacaagccaacaaagggagaaagaaggttgtcttcgaacctggagattgngtttgggtgcacatgaganaagaaaggtttatggaacanagganatcatagcttcaaccaaggggagaatggaccatttaagtgcttgaaagaatcaatgacaatgcttacaaagttgagctacccagtgagtata

SEQ ID NO: 19441 - DNA, 469 bp, Glycine max
  unsure (1)..(469): unsure at all n locations
gtgtntgctccgtgcccctatttaagggacctaanaggtatagagctaactangcatttagtgataacccccaaggtagtcatatctctcttgatggtctctagaggtatcatcccctttgaagaacatattgcagtagtagggactactagcaacaataagttttcaaagagaaaagctctagatgagggttcactgtaatcaagcaagtcggagacctagcatgatcacagattcacctccgctccttatgttcccatgaacccgggtatagggcactntttccactcacagtgtgtgcaaatagtgttggtgtttgtgtgcatcanatgaataaatatttacctcatgcatacattntanaacgcactataagcaacaaagagtttatacacacaagcacataagacaaataaagggaaaccaacaaaggagaaagtcacgataaaacattgcacaagaattaaat

SEQ ID NO: 19442 - DNA, 455 bp, Glycine max
  unsure (1)..(455): unsure at all n locations
tcacaacgtaaggaattgtcccagtggcaaactgtcgatatcacctgccctgtctccgtatcccaatacttaatattcttgtcatacccagcactcaaaaacttggtcccatcattgctgaaacagatatccctaacggctntcgagtgtcccatgtaagtcctcatacacttgccagagttgaaaacatcccacatcttaatcttggtatccatgccagcagagagaatcaaatggccatacttggggaacaacctaatagcagacacccctttggtgtgtccactccaagtatgaatcaatctctcgggcatataacaatgatcattactcgcctttgcatccttgngaggcgcgatccaagacctaccttggtaatccttctcctctttcccatgaaaaagtgctttatctttaacaacctcaactnttctccctccanaaccactcttctc

SEQ ID NO: 19443 - DNA, 448 bp, Glycine max
  unsure (1)..(448): unsure at all n locations
cagcatccaacttcgcatgagcaccgcctatcactctanaatcgatagattgatggagttcctcaacagtacgttggaacaatatctccatgcctttgtgcattccaacccgtcgagatggggaaaattcctcacgttacagaatggtcttataacaccgctgttcattctgccacaggactgtcaccttatcaaacagtttatggtaaacctcgtccatccattccccattatttgcttgggtcctctactattgaggctgttgaccaattgctttcagagtgacaagctatgttgcaagctctccataagaagcttttcaaagctcanactgctgtgaaggtgcaagctgacaaaaaacgcatggaagtgtcctatagtattggtgattgggtttatattcgttttttcccctaccatcaaacgtcagtttccaggatgacatata

SEQ ID NO: 19444 - DNA, 493 bp, Glycine max
  unsure (1)..(493): unsure at all n locations
gctctttctcctaagatttaatcggattatttttttgaatctactctgaaaagctctaaacctcatgacaatggaggatatacatggagaataagatcaagaacaaggaattaaagtgaattgaccgaacaaaaagatagaggcagaaaaagaacatcacatagacaaagatgctcttgataccatatgatgtagctccatgtggagcttgtaggccttggatcttcttcatcaattgagtcctttgcttcttgaagattaatggcagcagaatggagaaggaagaaagatgattggagatgccacttcaaggagaagatgagtcaagaacaagctcaccaccatangaagccatggataaaagcatgaaggtaggagaagatgagtggagagagaatgagagaagaagcacgacatcttgtgcctcacatgaggtctgaactntgaaatgtaattctcacatgatcaaagttggaacaatgcacacacaacg

SEQ ID NO: 19445 - DNA, 359 bp, Glycine max
  unsure (1)..(359): unsure at all n locations
atacaatccaagttggaggaatcatccaaatctgagatgggcaagtcctctacacaacaacagcctgtcccttccttctagaatgctgctggtccaagcaagccatatgttcctcctccaatgcagcaacagcagcaatcacaacaaagacaacaaacacctgaggccccttctcaaccttccttananganntagtaaggcaaatgaccatccagaatatgcaattctagcaagagacaataacctccattcagagtctgaanaatcacatggggcagatggctactcanttgaaccaagctcactccccaaattntgacaaattgccttcacagactatgcagaaatcgaaaatgtg

SEQ ID NO: 19446 - DNA, 368 bp, Glycine max
  unsure (1)..(368): unsure at all n locations
cccatctgacctactagcccaattaacatcgacactacccgttgaaaggatatnaggtgatacaccaaagcttccaaacatggaagcaaccatgagaggtgtcctctcttcataacctatnttcttcgaggcaacacaccttccataccaaaaccctaccccatcaatatcatgaccctccttttcaaccgcatctgtgaaactaaccagatcatctgctgcaaaaaactcaagcaaagctgaaattatatgatgcatcccttcttttgcatactcctccatgaccaaaccaaattgagaatgtctcccttggaacaccgacatggagaaataaatattccttaaaactcggcagatctgacaatcac

SEQ ID NO: 19447 - DNA, 469 bp, Glycine max
  unsure (1)..(469): unsure at all n locations
tgctgcanacatctacaacagacctcctcaacctcatcaacaaaatcagccacaacataataattatgacctctccagcaacaggtacaatcccggatggaggaatcatcccaaccttagatggtcgaatccttcacaacagcagcaacaacaacaaccttattttcaaaatgctgctggcccaagaacaccatacgttcctccaccaatccagcaacaacaaaaacagcaacagccccagaaacaaaaaacaattgaggcccctccgcaaccttcccttgaagatcttgtgaggcaaatgactatgcaaaacatgcagtttccacaagagaccagagcctncattcagagcttaactaatcagatgggacagttggctacacagttaaatcaacaacagtcctagaattctgatagaataccttctcaatctgtccaaaatcacanaaatgtgagtgcgaatacattg

SEQ ID NO: 19448 - DNA, 478 bp, Glycine max
  unsure (1)..(478): unsure at all n locations
gcttgccatgttaaaggagaaagcatcacatccttttaaggctgannttattcagttctttctcttcatttatgtgcttaagcaacggaagctgaaccaatatacctgcggatattaacaaaccaagcctcacaataaaaaaaaaggcccaaaacaaaaaagtgtaatcgatattaaaaataacacatgcatgaattgaaaaagcatgtgttcaggcatgtaaagtaattgaggcacaaaaatgtgaagttaattgataagtatgatgaaaatcgaaaagagtgtaataagtgacgaaccatgtacatcanggttaacattcaactcgtgaacttgttttattagttcagcttgcgagacttgttcgggaaggtccacatcgaaggatttgattcccaattcggcgcatgcctttctcttcattcccacgtagctntgtgaatcctttctgttccctactatcacaactgctagtccc

SEQ ID NO: 19449 - DNA, 459 bp, Glycine max
  unsure (1)..(459): unsure at all n locations
ntcactacagctgtctatcttattaatagactttcgttgtcttctcttaattntgaaactccttactttgtcttacatggcacacaccctaactattcatcgctatgtatctttggttctaaatgttttccttacacttgggatgcacgacataacaaattcgaccctaaaacccttccttgtgtgtttgttggatatagtgatatacataaaggatataaatactttcatccttctagtaagaaattttttatctcatgacatgttgtttttgacgagtcattctttcaatataaaactaattgtcatcatacaatttcctctcctacacagcatgtagttagcataattgattcttggctacctcatactaactccagttcttgtgcagacctaacaacaataacaacagctnntgcttccgttcaccatgctcaaatctttaatgaatctcttgct

SEQ ID NO: 19450 - DNA, 475 bp, Glycine max
  unsure (1)..(475): unsure at all n locations
tttgaaagcatgtaatcgatacacatgtcttgtaatcgatttccagtgttttggaatgttttacaacaaccataaaaaatttgaatttaaatttcaaagttatgtaatcgattactagtgtttaaatattcaaatttcaaatgcgaagagtcataactcttcagaagtaactatgtaatcgattacaccattatggtaatcgattactagtaaggattttcgaaaataattcccaatagtcacatcttttcatttaaattttgaatggccatcaaaggcatatatatatgtgacttgngcacgaaattntcttagttntacttgctcaaaaagtcttatcctctcaaaagattcaaagtgtcttatcatctaaaattccttggccaaaacatttgtgattcaataaggaattatttgagtgcttcattgtacaatctatctctntcaagagagatntcttcttctcttcttctta

SEQ ID NO: 19451 - DNA, 391 bp, Glycine max
  unsure (1)..(391): unsure at all n locations
tctatagaaggttcattcctaatttctctacaattgcttcacctcttaatgagctggtgaagaagaatgtggcatttaccttgggtgaaaaacaagagcaagcctttgctttgctcaaagaaaagcttactaaggcacctgttctagctcttccttgagtttctaaaacttttgaactagaatgtgatgcctctggagttggagttggagttgtattgtaacaaggtggacaccctattacttattttagtgaaaaacttcatggtgccaccctcaaccaccccacatatgataaaatgctttatgccttaataagagccatccaaacttgggaacattacctttgttccaaggaattntgtattcatagtgatcatcaatcacttaagta

SEQ ID NO: 19452 - DNA, 491 bp, Glycine max
  unsure (1)..(491): unsure at all n locations
tcaagcttagctacacaccaccctctcataactaagctcacctttttgagaagccnccttatgaagattcctaaagtagcttgagcttagctacacatacctctctaatagctaagctcacctccttgagatgagaagctagagcttagctacacaccccctataatagctaagctcacccccatgacaaanaacatgaaaatacaaaaaaaagtccttactacaaagactacttaaaatgccccgaaatacaaggctaaaaccctatactactagaatggccaaaatacaaggcccanacgaaggaaatacctattctaatatttacaaagataagcgggctcatacttagcccataggctcgaaatctaccctaaggctcatgagaaccctaggaccttcccttggatctctagcccaatctacttggagtcttctacccaatgcccttgcggagtaggattgcatcactctctttcgtagcttctatg

SEQ ID NO: 19453 - DNA, 476 bp, Glycine max
  unsure (1)..(476): unsure at all n locations
agcttctaaactntgtacaagaatgaagctctgataccacttgttagacaagtggtctcagatatcttaagaaggcgggggttgaattaagatattcgaaactatgtcttctaattaaaaatctatcttactttctacttaagttatgaattcccttagagacaatcttcttaaatattaattcaaatgaagcaacttgaatatgaatataaagcaataataaataaaggagattaagggaagagaaaatgcaaactcagttgtatactggttcggccacacccttgtgcctacgtccagtccccaagcaacccgcttgagagttccactaacttgtaaattccttttacaagttctaaacacacaagggacaacccttctttgtgttagagatttctacaacaagagactcacagtctcttaatcccttagagaatgagaagaagaagaggaacaaatctctcttgaaagagatg

SEQ ID NO: 19454 - DNA, 490 bp, Glycine max
  unsure (1)..(490): unsure at all n locations
tgaccaattcanatgaacgaggaactccttcaatactgttaaaaggaaattcttgatttgcttgataaaggtttaatccggaaaagcaaaagcccgtggtcctgtgcggctttttatgtcaacaaacattctgagcttgagcgtggaacaccccgtttagtcataaattacaaaccactgaaccaagcattacaatgaattatgtaccctattccaagcaaaaaggatttacttaacagattaaattctgcaaagatattttctaaatttgacatgaaatctggattttggcaatccaaatccaagagtcagataggtacaaaacagtgtttattgtacttttcgggcaatacgaatggaatgtgatgccattcggactaaagaatgccccttcagagtttcanacaattatgaatgatatttntaatccctattcacaatttgtcattgtctacatagatgatgtgttaatcttttcccacaacattga

SEQ ID NO: 19455 - DNA, 460 bp, Glycine max
  unsure (1)..(460): unsure at all n locations
actaagctttagcccttanacgaaatttcatttactcggatgttgattgattccataatatatcgagacgctcgaaattgaatgttgatgctctgagcaaattcaaacgacaataaatctttactcggatgtctgattcagtcccgtcacatatctagatgctcgaaattgaatgttgatgctctgagaaaattcaaacgacaatatctttttactcgcatgtctgattcagtcccatcacatatcgagatgctcgaaattgaatgttgaagctctcagccaattcaaacgacaataactttctaatcggatgtctgattgagttccgtaatatatcaagacgctcgaaattgaatgttgatgctctgagcanattcaaacgacaataacatcttactcggatgattgattgagtcccgtattatatcgagacgctcgacnatgaatgttgatgctctga

SEQ ID NO: 19456 - DNA, 472 bp, Glycine max
  unsure (1)..(472): unsure at all n locations
tgatcaacccactntgttatgacatcgatgcagggtttccagtcatgtttgaggttggttacattggcatggagagcctcttgaacatcttttctattaagatatgcgtacacataattctcactacatggatcagtcacaatctgcaaaacaaataaacatggcttcaattctagtgaagttcatgcttcatgcaatgttgagttttctaaaatctattaggccagccaaatatttgaagcttactgtgttccttttgggcagggctgtgagatttgcattcttgcatagtggagcataaatattgtataaatcaatgtattcaatatcctccccaagttcatctccggctgcatcgcacacactntcctgaatctttgatgatgatgaatcacaagctntgttgagataagctgctntgtctgagatgattgcatggctggcaagataatcatacagtccgtccgagtca

SEQ ID NO: 19457 - DNA, 454 bp, Glycine max
  unsure (1)..(454): unsure at all n locations
ntgatggtgttgagaagaaatcacatgtttgtcatcatcaaaaagggggattttgtgaatgtatgtatacatgattntgatgatgtcaaaagaagaatcaaacaaggctcattntgcttcaagattaatacaagattgtttcaacaaacaaagccttgattcaagatttcttcaagatcaagccttgcctcacaatgaaaggtttcaagtcattcaaggcacatgtaatcgattaccaatacatgtaatcgattaccaatggtttgaaagtgtgtaatcgattacacatcatatgtaatcgattaccagagactctgaacattgngaattcaaattntaaatgaagggtcacaactgttcaagaaaaacaattgtgtaatcgattacactaattctgtaatcgattaccagagaggattntcaaggaatatcgtcaacagtcacatcttatcat

SEQ ID NO: 19458 - DNA, 442 bp, Glycine max
  unsure (1)..(442): unsure at all n locations
tgatgactatggtgtgttgtgggacttctccaccaatgtagatctttaattnttggcccttacctaactagccacgatctttggattggtcttctatctttatagctccatagggcttaacgtctttaatagtaagggggccactccttctcaattgtaattntcgagaaacaactttaatcttgagttgtagagcaatacttgttgtccaggcctaaattctttgaggaggatatttttttcataatacctcttggttctttctttgtagagcttggatgattcgtatgccttgagtcaaagttgagaaacttcatggctcaatgagcttttatttctaataccactggtaggtggcattctttnttgtacaccatttgaaatanggaaaggccaatgggtgttttgaaggttgttctatatgctcaaaggcaatcatcaa

SEQ ID NO: 19459 - DNA, 473 bp, Glycine max
  unsure (1)..(473): unsure at all n locations
gggatattntnntgaaaatggttatacaaaaacgatttgttntantaagagatgaaagtcaatttanaaaaaaacagaattaaaaacactattaatccttaaaatttcaatttgataagcaaatttattgtctgaacaagtttgaattaacattttctatttgaaaacttatactcaaaatattcttactgagattttgaaaatataaatttatttataatgttataaaaaaaattaaaattgatctatcaaatgtaattatgagatgattttcctatattttaaattaatataatattcatgcacactntttattgagtatatgtataaagtaattgacaatctatgacaatgtgatctttnttacattgtttgtgtattttaattaaatntacatatgtaatataattaaacattctacaataatntataataataaatacttaagaatgcattaatactaattaagttag

SEQ ID NO: 19460 - DNA, 375 bp, Glycine max
  unsure (1)..(375): unsure at all n locations
tatgactcggtcaattgagaattcttgatttacatgtttggaagattgagattcaatgagatatgggtcaaatggattaaggggtgcttgatgtctactanggtatcaatctttgttaatggaagcccaatgttggaatttatggtatcaaaaggattgagacaaggagatcctttagatcccttcttgttcaatgtggttgtggaaggcttatgtgggttgatgaggaaagcattagacaaaaaattagattctagtttcaatgtggggaacaaaggagtgaagataaatatccttcaataggaggacaacacaatcttcatgggagaggctaccttggataatgtcctaaccatcaaaagcattctntgatgc

SEQ ID NO: 19461 - DNA, 462 bp, Glycine max
  unsure (1)..(462): unsure at all n locations
tgctaacccatggaagctcctaatatctcttacactttttcgggtgggccattcttggatggccttgattttctcatttctaccaactacaaaacctaagaaaactatattatctacacaaaaggtacacttctctatatttgcatagagggtgtttttcctaaggactgaaagaacttgcctgagatgtcctaagtgatcatctangctcctactgtacactaaaatatcatcaaaataaacaactacaaatctaccttagatcccttaagacatggtgcataagcctcataaaggtgcttggtgcattagtgagcccaaaaggcatccctagccattcatacaaaccanacttggtcttgaaagcggntntctactcatcaccctttttcatcctgatttggtgataaccacttttaagatcaatttttgaaaagatatntgcaccatgcaacccatcaa

SEQ ID NO: 19462 - DNA, 478 bp, Glycine max
  unsure (1)..(478): unsure at all n locations
attcttttgacattgttcaagttcctcttgcatggctgatgtttcctctatggaggggacgcatcactagaaacacggctaggagactcttgaaagattagactagggatgcagaagaaggccttagggttctcatgagccttaggatagattctgggcccatggactaagtatgagcctacttatctttgtacaaattagattatggggtattgctaggggcacccagcaacattactggtgcacccaacaattntttagaattcccaaaatacccatcaccgtatttttttctacaaaaagttggtttatttcattnttgtttacattgttgctttctttgtttctccatggtagtgctgtgcggtatttggagctttgagagagtttanggtgttgttcgcaatcggcaagtgtaccagatcgcacaagtagtataaaatggtaagaatcgagtatcgaactctcggngaacttg

SEQ ID NO: 19463 - DNA, 477 bp, Glycine max
  unsure (1)..(477): unsure at all n locations
tcctcttgaacccttaccacccactctgtcatcatgccgatacttaagaaggccaacaggtttagccttctcaatgtattctgaacaaaattcaatggcttcttctgcaatgtacctctcaacaatagatgcttctggatgatatagattctttgtatacccttttaagatcttcatgtatcgctcanacgggtacatccaccgcanataaacaggaccacaacatttgatttgtgtgaccagatgcataatcaagtgaatcatgatgtcaaagaaagcagggggaaaatacatctctaactggcacagtataattgcggcctcattntccaactcatcaaacttgacaggatcaacgactntgctacatatggcatggaagaaaaagcacaggcgagttatggctaacctgacttttgttggcaagatgtctcgtataaccacggctaacaattggtgcatgagcatgtggtaatc

SEQ ID NO: 19464 - DNA, 451 bp, Glycine max
  unsure (1)..(451): unsure at all n locations
tganattgacaacggaagctgtcgaganattcanatgttcataactntngtcaagaaggtcagattcaggcacataatatatcgagacgctngaaattaaataacggaagctgtcgagaaattcaaatgctcattacttttcactcggaggtccgagtcaggcgcataatatatcgagatgctcgaaattgaacaacggaagctctcgagaaattcaaatggtcataacttttgacacggaggtcagcttcaggcgcataatatattgagacgctcgaaattgaacaacagaagctctcgagaaattcaaatggtcataacttttgacccgaaagtcagattcaggcgcataatatatcgagacgctcgaaattgagcaacggaagctctcgagaaattcacatagccataactnttcactcggatgtcagattcaagcgcataatatatc

SEQ ID NO: 19465 - DNA, 444 bp, Glycine max
  unsure (1)..(444): unsure at all n locations
ntagctntgtccncaaggcttcatgtagactggtcctttatcgcgaagtgaacctcggatccctgtcagatacaatactagaaggaattccatgcaaccttattacttccttgatgtacaactccactagcttctccattctatacttcatattcactgggataaaatgagcagatttggtgagtcgatctactataacccacacagcatcatgtccacgactagtcttgggtaaactagatacaaaatccatagatatgctctcccatttccattctggaatttccaatggcttcaattctcttgatggtcgctggtgctcaaccttagccttttgacatgtcaaacatcttgctacatattcagctacatctttcttcatgccatgccaccaaaaacttctcttcaaatcttggacatcttagtcattcctggatggaaact

SEQ ID NO: 19466 - DNA, 406 bp, Glycine max
  unsure (1)..(406): unsure at all n locations
agctttgcatattatcaataaaattgatatgctatcttcaaatcacaaacatccaattgtgctacatctctagttgtcattgcatgaatgtcaaactttctaatattaacaagatgatttatacttatagcatcttctgcataaaaaccaccacttcttccacatctaatactatcaaaatcataatcctcttccaccttatactcaatcgacttctcatcttccttattgtcattgtcatcatcttcaactntatcctctccatcttnatgcataaatacattaccatacgcatcacccaacacataaaacgaagctcccaaatcgccgaataacccttctcctactattatgncctncaaaccctacaaaataacacatttcaaaacataaataaatacatagc

SEQ ID NO: 19467 - DNA, 364 bp, Glycine max
agctttcatcacttattccgcaccagcatgattggagtaccgaccttaagtgttaatttgtgattaggtatccctgatgttttcaatgagtttagaaatttacgtgtcagtaatccgaaagtaggattgagtagttcatcttatttatcaatgttatcagtgctacaatactccttttcgtcattgggtatcaatgataagacaataatttattttgtcaacaatatcttttttagaggcaagaacaactcttttttgcaagtaatctgcgttgctatagttatgtgtcaagttgggatatgttgcatcaacaattgcctggataggatcagtatagtcctttataaggaactcatctgggatg

SEQ ID NO: 19468 - DNA, 466 bp, Glycine max
  unsure (1)..(466): unsure at all n locations
ctaagcttaacatcagaccacttccagggtgctggaactacttttatggacttgatggngcccatgcaagttgaaagccttggaggaaagaggtatgcctatgttgttgtggatgatttctccagatttacctgggtcaactttatcagagagaaatcagacacctttgaagtattcaaagagttgagtctaagacttcaaagagaaaaagactgtgtcatcaagagaattangagtgaccatggcagagagtttgaaaacagtaagtttactaaattctgcacatctgaaggcatcactcatgagttctctgcagccattacaccacaacaaaatggcatagttgaaaggaaaaacaggactttgcaggaagctgctanggtcatgcttcatgccanagaacttccctataatctctgggctgaagccatgaacacagcatgctatatncacaacagagtcacac

SEQ ID NO: 19469 - DNA, 453 bp, Glycine max
  unsure (1)..(453): unsure at all n locations
actcagctttatcctggcttctatggtggtgagcttgtctttactctctttttcttgaagcgacgtctccaatcatctttcttcttatccattccactgacattgatcttcaagaagaaaaggactccattgatgaagaagatccacggcctacaagctccacatggagctacatcataaaaagctatgtcttaagctcatgtgctacttcatcgccatccgatacctaaagtagtgaaacccctttgtgacaacaaaatatgcttttgttgagaataattgttgaggagttagccctcacagtaatggataaccacaaattggtacttgcgagatgatcttaaggttgtataaccttggagggagcgactntaagtcatgacgatagttcacatagatgacttggtaaccctgacaaatatataagccatcctcagatggtgagagccgtca

SEQ ID NO: 19470 - DNA, 446 bp, Glycine max
  unsure (1)..(446): unsure at all n locations
agctntaccttagtttcgttgcttacagaanaataaaataattcctatggttggaggattgtgaaatgacatttagaaagttaaaggagtttctttccactcctcctatcttgacaaagcccaagtcagggttgcccattataaaatacttgtcggtcttcgagcatgtcgtcagctcagttctagtacaggaatttggagttgaataaaagccaaattattttgtgaaccgggtgccttttggtttcgagattaggtatcaaagttagagaaattggcattggcagtacggatcacagctagaaagttaaagcattattttcatagttacccaattataatttgaaccaattaatctatcaaaacaaattntacagaaacaggatcttgttgatcagatgatgaagtggttgttgaactctcagagtttggtatatcgtttgaaa

SEQ ID NO: 19471 - DNA, 298 bp, Glycine max
agcttggagccggtcaaaatgccacagtagctgtaatgagctatagtggttatgatatacaagatgccattgcgatgaacaaggcatctcttgatcgctggtctgcgccctgtattgttatgaacaagcatgtcattttattcggcgattttatgcttttggttgccttatattttattgtctacgctttttaacgcagcatttctgatcttgaccttccctgctgtataggtataatgccatcatctacaaccattcgaatgacacatcataccgaatacttacgcctaatacaact

SEQ ID NO: 19472 - DNA, 438 bp, Glycine max
  unsure (1)..(438): unsure at all n locations
ntggcacacagctaatcattaccttcttcatggaattatggtaaacacagttctatcacacaataaaaaaagtgtcatataacctgcttaccgtctctcttgattttggtcgaagaccatgccattttggaattgcatgtgcactctctacataagctgcatttgttccagtaccaacaatcactccagcaacaacatcctgattgctgaatcttgctctagctactgttccgactgtgtcattaacctanatcacatcaccaagttntgtctctggttcaagacattaagtaaccaggaaatttaaaagaaaaaaaattgaaactacaaaactcattgatctaaattntccgccatatagaaactgaannatattctcanagccagactanaggggaaaaagaaaacaagacaaacaggaagagaagtacactgact

SEQ ID NO: 19473 - DNA, 450 bp, Glycine max
  unsure (1)..(450): unsure at all n locations
ggacctataaaactcagcttaagaaaaaatggcctcagcaagcttttatnttttaaagttattcaacaaaggcctccatctttatggagagggtaccactactggaaaacccaaatgcaaatttttatcgaggcaatagacttacatatttgggaagccatagaaatagggccttatatacccaccacagtagacagaattacaatagatggaagcacatcaagtgaaagcataacaatacaaaaacctactgatagatggtctgaagaggataaaagatgagtacaatacaatttaaaagccaaaagtataattacatctgccctgggaatggatgaatatttcacggtttcaaattgtaagagtgctaaggaaatgtgggacactctacaattaacacatgaaggaacaatagatgttaaaagatctacgataaacacattaactcat

SEQ ID NO: 19474 - DNA, 446 bp, Glycine max
  unsure (1)..(446): unsure at all n locations
ggacctataaaactcagctttacttggtgattgtgaagttttgaaaaattatttctgcctatgccgagtataacattttctgtttataacttattgatgtattaattgcattgatcatcactgaaaaatgttagattttggtgtctcatttcttgtttttataatgattgccaggatcactattttgatgtgataaccaacatagttggtttggttgctgctgtcctacgtgataaatttacttggtggattgaccctattggcgctattttgcttgcactctacacaatttcaaattggtctaaaacagtgcttgaaaatgctaggtctctctttctctcttcttattctgcgtcttatgctttgttcaattacgtactctatttaaatgatggttacctcttggnttagtttccttggttggacaatcagctccacctgaagtc

SEQ ID NO: 19475 - DNA, 451 bp, Glycine max
  unsure (1)..(451): unsure at all n locations
tgatattgaaagagaanttgttctacattctatatttattgntttgctcatcaacttcaatgagttcttgttacattggcaaaaaaacatgttcaaattgcattaattgttattcaatttagttgctaatttgtctaatattgttggagcatcatgtaagcactgngatatttttcgaaaaagtcaaattacaatagtgaaagaagcattgcaaaaaggagaaatctcaagtgagcatgacttgaatcaagagagcaggaaacactaaatgaagctcacattatggtacattacttagtttagtttctcttttttcttccatgattgatgtgcttgaaataattgaagaagatgacataagtttagagcanaaggctaaaatatgtgctttngtaaattctgtgcaagcttttgaatntgttttcatcttgcacttgatgaaaaatattct

SEQ ID NO: 19476 - DNA, 451 bp, Glycine max
  unsure (1)..(451): unsure at all n locations
tattgganatgaatcatatctcattctctgttttcatgccttggattttatntgtaaatgaattaagcagcttgttgaataatgagtctgttatttacttcatattaattttacgtgtcatttgctgcagactgattgggagggtggctacttcccgcttacgctgcactttagtgaagactacccaagcaagcctccaaagtgtaaattcccacaaggtttcttccaccctaatgtttatccttctgggactgtttgcttgtctatacttaatgaggatagtgtaagtacatctctcttgataattgcatgactgcttgaaaccaatntattttttgtgatattacatgctaagcaaacagttaagaattataggtttattgttctatacaggggtggagaccagccataacagttaagcanattcttgtgggcatccaagacttacttg

SEQ ID NO: 19477 - DNA, 392 bp, Glycine max
taacttttattccataacgaaattcaataaatacgcctcctatccttaatggagaaagttaccactactgggaacaccgaatgcaaatcttcattgaggcaatagacttacacacttgcgaagccataacagtaggaccttatgtacccaccatggtggctggaaatgcaacaatagaaaaacctagagaagagtggactaaagatgaacgactattagtgcagtacaatttaaaggctaaaaacatcattacttctaccctacgacatgatgaatactttacggtttcacattgtaagaatgataaggatatgtgggacactctacaagctacacatgacggaacaactgatgtcaaacgatctacgataaatactttaactcatgagtat

SEQ ID NO: 19478 - DNA, 442 bp, Glycine max
  unsure (1)..(442): unsure at all n locations
tctttgagaaaacttccttgagaagctagagcttagttacacacacccctctcataacaaagctcacctccttgagaagcttccttaagaagattcctaaagaagctagagcttagctatacatacctctctaatagctaagctcacctccttgagatgagaagctagaacttagctacacaccccttataatagctaagctcacccccatgacaaanaacatgaaaatacaaaaaaaaagtccttactacaaagactactcanaatgccccgaaatacaaggctaaaaccctatactactagaatggccaaaatacaaggcccanacgaagganaaacctattctaatatttacaaagataagcgggctcatacttagcccatgggctcgaaatctaccctaaagctcatgagaacnctagggcctacncttggatctcta

SEQ ID NO: 19479 - DNA, 436 bp, Glycine max
  unsure (1)..(436): unsure at all n locations
tgtagcaaattcaaaccccattaaattttaactcagatgtacgattaagtcccgcaatataacgagacgcttgatattgaaaacaaaagctctgagcaaattctaacgacaaanatgttttcctcggatgtctgattcagtcccgtaataaatcgagccgctcgtaattgaaaactgaagctccgagaaaattaaaatgacaataactttttactcggatgtccgatagtgtcccgtagtatatcgtgaaactcgacattgaaaacagaagctntgagcaaattcaaacgacaataactntttactccgatgtccgattgtgtcccgtagtacatcgagactctcgtaattganaacagaagctcgtagagaattcaaacgacaataactntttactcagatgtccgattatgtcccgtagtatatccatacgctc

SEQ ID NO: 19480 - DNA, 454 bp, Glycine max
  unsure (1)..(454): unsure at all n locations
ttgatatggaaattaagttgaaagtaaaggatggtatgtataggacatcaatcaatgtaatgaatgcagaaagctgtactgtgcctgagtgggtagcatgaacaaggtggccatttggtaatctaaccgtgatggggttaatttgatgatatgagtgaaagtttgttaaggaggaggaaacgtgatcagtggctcctgaatctaatatccaggaggtagagtttgctttttcgtaagatagggttatacctgttgcatcgttactagagcaagatgaaatggaagcgacctgaggcttggtggatgctgagtttcctgcatatggctgttgtattaaagccagcaatgccttgtactgctcangtgaanaacgaaccaattcttgagattcttggcgctgtatttggtcatctgtggcctttccttctacttgccactacgttgtagctattac

SEQ ID NO: 19481 - DNA, 357 bp, Glycine max
agcttataatatatcgatacgctcgtaattaaacatcggaaactcttgagaaattcaaatggtcttaactcttcacacggatgttcgattctggcgcataatatgtcgagaggctcgaaattgaacaacggaagctcttgagaaattcaaatggtcataacttttcacacggatgttagattaaggcgcattacatatagagacactcgataatgaacaacggaagctcttacgaaattaaaatggtaataacttttcacactgaggtccgattcatgcttataatatattgatacgctcgaaactaacatcggaagctctccagacattcaaatggtcataaatcttcacacggat

SEQ ID NO: 19482 - DNA, 453 bp, Glycine max
tgaatcggacacccgtgtgaaaagttatgaaccatttgttatttcacgttatgctttgttgttcaatttcgagtgtcactatatgtgatgcgccaaaattggacattcgagttaaatgttatgaccatttgaattactcaagtgcttccgttgttcaattctgagcgtgtcgttatgtgattctcctgaatcggacatccgtgtgaaaatttatgaccatttgaatttctcaagagcttttgatgttcaatttcgagcctctcgacatattatgcgcccgaataagacatccgtgtgaaaagttatgaccattttaatttctcgagagctttcgatgtttaatttcgagcgtatcaatatattataaggctgaatcggacctcggtgtgaaaagctatgaccatcttaatttcatgagagcttccatgtttcattttcgagcgtctctatatg

SEQ ID NO: 19483 - DNA, 453 bp, Glycine max
  unsure (1)..(453): unsure at all n locations
actaagctaacaggcccttataggctgaaacaagcaccaaggtagtggtttgaccgactaanaattactttgattcagtttgggtttcaagctagcaagtgtgatccatccttgttcatatataagcgtcaagctcacactatttttcttctagtatatgtggatgatattatcttcaccgacagctcatcttctctcatccaacagattacaactcaacttcattttgcattctctcttanacagctaggtcaattggactatttcttgggtattgagatcaagtatctacttgataggtctcttctcatgactcanagcaagtacattagagacctccttcacaggactcacatggctgaagttcattctatttcttctcctatgacctcttcttgcaaactgtctanaactggtggtgaattatttcangatcctactctctacagatct

SEQ ID NO: 19484 - DNA, 257 bp, Glycine max
tagctgttcttcatggttggcatttgcgccaacctaacgtaaaaaatgctcttctccaccgtgagcttaatgaggaggtatacaagcaacttccctcacggctctcggttgataatccttaccaggtatgcacgctgcaacgttccttatacggtctcacacaagctacccgacaatggttcactcgtctctacttatttattgtttctcatggctatcacaaagcctccgctgatcattccctcttcttaagcttc

SEQ ID NO: 19485 - DNA, 436 bp, Glycine max
  unsure (1)..(436): unsure at all n locations
tttgttntcaatttcgaccatctcgatatattaccgttctcatccggacttccgtgtataaacttattgtcaattcaattttctccgagctttggatcaaaattttgagcgtattgatatattacgggactcattcagacatccgagtaaaaaattattgtcgttagaatttgatacgagcttccgttttcaatttggagcatctctcgctaaattgcgacagtctgtcgggcatccaagaaaaaatttattgtcgtttcatatttctaagagtttccgttttcaatttggagtgtctcgatatattacgggactcaaccggacatccgtgtataaagttattgtcatttcaatttgctcagagcttctagtctcaatattgagcgtctcaatatattacccgattcaatcggacatgcgagtaaaaagttattgt

SEQ ID NO: 19486 - DNA, 282 bp, Glycine max
tcacgcttatactaatttatcctaccatgctcagactgaccggcggactgaacggaccattcacccgctggacgaccttttgagggcatgtgtcttaaagcacaagggcagtcggcacagtcttttgacgttgatagagtccacttataacagtagctctccctctaccattagcatggctccctatgaagctctgcatggtacaacgtgttgcacacccctatgtctgctatagcccggagaagacactcacccacgccctgcactggtgcatcaccacac

SEQ ID NO: 19487 - DNA, 364 bp, Glycine max
agtgcacaatatcatctctaatatttctatgaagagtttttattttaaaatccttgcttagcaacattcacttttttgcccgaactagcacagaatatgcctagtatttacttaatagcatcaatctgctctaagtttgttcctgcacaacatagaaaatcatttgcaaaggcaaggtaagaattttttggaccacctttagatgattcaataggcttccaaattttctgctccactacatcattaatcaattgaaataatctctcaatgcaaagaacaaatagatatacagagataggatcctctatcacactcctctaacatgaatgaatttttcaagagcttctccattccacatcacctg

SEQ ID NO: 19488 - DNA, 449 bp, Glycine max
  unsure (1)..(449): unsure at all n locations
ctataaaactcagcttntatagctttgttaacctatcatttaattataatttttattaatgcaatcaatctaaagcaaaagaaaaaaaatgcaatcaatcgtttccaaaattcttaatagaaattttaatcaattgtcaagctatttaagcaactatctattattaaacacatatattaaatattataacatatatanttttgcatatctaaacgttgggttatcttgtttaattttcaaacctgatatcagtgtaaaaaatttctaattattaatgcaaagtctattctttttctcatatctataattctagttcttaatattctgtttatctaaatctttaatttcaaaatattttatctaaaggttcctttaatggtgaaattgaacgaatagaaaataaaaactttaactgtaaataatctattcacaaatgattttcttatata

SEQ ID NO: 19489 - DNA, 340 bp, Glycine max
  unsure (1)..(340): unsure at all n locations
agcttgccccttgatgacggtttcttgtggacgaaggcatgcacgtattgtttcatcatgcgatcncaaacttccgttcgtccatctgtttgtggatgataagctgagctcatccgcaatttcatgtcgctcatctgaaacaggtcttgccagacaattgcttatgaataatgggtctctgtcggagatcaagctgcgtggcatgccatgacactctctgacgatgtccatgaacaggatgacgactgactaacctgagtgctgagctggcagcatgcctacgtgtatgcctcttgaacctcgatctactacacacaatatggcagtatttctgtgaatc

SEQ ID NO: 19490 - DNA, 454 bp, Glycine max
  unsure (1)..(454): unsure at all n locations
ttccataccttgagggaactcaactcatctaagattctatataaaggttctntatgactagtacccttgccattaacactagatgaatgatgactcatgttgcttcctaagttgtggttctttcttgttggaggtttgaaaacaaaaggtaaaagaaactatggttgaaactagccaaataaacactaaaagaggtgtgaaagataaggtaaaaaactaattggtaaaaggaaagctatctangcggtttgacaatggaaggtaaaggaaataagctatgaaagtaagcaagacatgtaaactaggcgaatcctaagagtgtttggatgaccacattcaaggttcccaacanaacactcactatcctaaggaaaaattgcctaaaattattacacacaaatggaagtttggtaacctattggaggctcccaacacactttcaatgaaaggcctt

SEQ ID NO: 19491 - DNA, 452 bp, Glycine max
  unsure (1)..(452): unsure at all n locations
nttgatttcaatctgaagcatctcgatatattacagtgtttcagtcggacatccttttanaaatttattgctgtttgaactttctaggagtttctgttttcaatttctagtgtctcgatatattatgggactcaatcggagatcctagttaaaagttattgtgatttgcttatgaaacgagctttcgttttcaatttcgagcgtctcgatatatgacgggactcaatcggacatccgagtaaaaaagttattgtcgtttgaattntatacgagcttccgttgtcaatttggagcatctcgatatattaccggactcaatcagacatccgagataaaagttacagcggtttgaatttgctacgagccatccgtttcaatttcgagcgtctcgatatattatttgactcactcagaaatttgagtaaaatgttattgtcgttcgaatctgatac

SEQ ID NO: 19492 - DNA, 431 bp, Glycine max
tcggcattcaagtccaatcgtctcgatatattacgggactgaatcaggcatccgagtaaaaagttattgtggcttggaattgcagagagcttcggtattccatttcgagcgtctcaatatattacgggactcaatcagacatccgagtaatacgttattgtcgtttgaatttgctcatagcttcgataatcaatttcgagcgtctcgatatattacgggactcagtcaaacaaccgagtgaatagttattgtcgtttgaatttgctcagagcttcaacattcaatttctagcatctcgatatattacatgactcaatcagacatccaagtaaacagttgttgtcgtttggaattgctcagagtttcaacattcaatttcgagcgtctcgatatattacgggagtcaatcgaacatacgagtcaaaacttat

SEQ ID NO: 19493 - DNA, 409 bp, Glycine max
  unsure (1)..(409): unsure at all n locations
agcttgtgacttttgtaangtctaacgaaagggaaacaggaccaaccaaaggctctaagaacgttataatctggattcttgttgacaaagacagtagtatagggaacattacaatgcacagaagcagtacgcaatctatctatcaagtatgctgctgtagtgaaggcaaaatccccaaacttgagaggcagtgaagcttgtttaagaagagcgagtcctaattccacaatatgtttgtgtttcctttccactacaccattttggtgatgagtgtgtggacagatcaatctaagagtgataccttggcttgctaaaaaattagtgagaggtctgaactcttctcctcaatctgtgtgaacactcttaattctggagtcaaactgaagttcattagcttgaactgttgaaa

SEQ ID NO: 19494 - DNA, 323 bp, Glycine max
  unsure (1)..(323): unsure at all n locations
agcttatacattttactcatttaacaagaattgccactgaaacgatagcattggctgcacttgcaatccttggccacagatcagcacactcttttccaatgggaccagtgatagcagaacctacattgaaacatgtcacaaacaaaattactaccagcaaatgcatcaatagaaggtcaaacggcaaagatgaagagaataacaagtacatgagaacatctcatctgtatttctttctttttgaaagccaaaaataatcagtggctactcactacataaacatgcactttgttaccatgcanataaaatcataaacgatacct

SEQ ID NO: 19495 - DNA, 311 bp, Glycine max
  unsure (1)..(311): unsure at all n locations
agcttctattctgaatttcaagcgtctcgatgtactacaggacacaatcaaatatccgagtaacaagctattgtcgtttgaatctgcttagagcttctgttctcaatttcgagcttctcgatatattacgagactcaatcggacatccgagtaaaaagttatcgtcgttagaaatttctcagagctttcgttatcaattaccagttactcgatatattatgggattcattcggacatccgagtaaaaatttattgtcgtttgattctgctcagagattncgctatcaattacgaggatctcaatatatcac

SEQ ID NO: 19496 - DNA, 404 bp, Glycine max
  unsure (1)..(404): unsure at all n locations
ntgagcaaattcaaacgacattaactntntactcggatgtctgattcagtcccgtaatatatcgagacgcttgaatttgaatgccgaagctctgagcaaattcaaacgacaataactttttagtcggatgtctgattgagtcccgtaatatatcgagatgctcgaaatggaataccgaagctctgagcaaattcaaacgacaataactttttactcggatgtctgattgagtcccgtaatatatcgagacgctcgaaatggaattctgaagctctgagcaaattcaaacgacaataaattttaactcagatgtctgattgagtcctgcaatatatcgagacgctcgaaattgaataccgaagctctgatcaaattcaaacgacaantaacctttactcggatgt

SEQ ID NO: 19497 - DNA, 378 bp, Glycine max
  unsure (1)..(378): unsure at all n locations
ctataaaactaagcttaacctagaggaccagactatccagtgttggttttatcacgacaatgtctacaagattgacttgcctagtgagtataatgtaagtgccattttcaatgtgtctgatctatctctttntgatgcagatggaggggccttgggtttgaggacaaatccttttcaagaaggagggagtgatgatgacataaccaagggcaaggaccatgaagcacttgaagggcctatgaccagaggcagacttaaacaagcccaacacatcatagagacaaggttggtcatttgtatagctgccattgatgatgattgaaggcccaagtggagaaagatgaatgcccagaggcagaggcactaccaagactacta

SEQ ID NO: 19498 - DNA, 402 bp, Glycine max
agcttgttgtcattaaatcttacatgaatggccttttctacagtcaaggttctggagttatgcactctgtatgccttggacaattcaaagtattcaagtaagattctagaatcacactaggagtcaaactttccaagtttatccttggtgtttaggatgaaacgctgacatccaaatgagtggaagtaagagatattgggcttacgtctcttccataattcatagggacttctttaagataggccttatgtaaattttgttctataaataccaggaaacatttacagcttcaacccataaatctttgggagttgagtgatcgttaagcattgttcatgccatttcctgaagagatatctcttttctctcaacaacttcattctgttgtgctgttcttggagt

SEQ ID NO: 19499 - DNA, 450 bp, Glycine max
  unsure (1)..(450): unsure at all n locations
tgccagaaagganaacaagtaaaaagttcttttaaagtcaaaaatgttgtttctacttctaggcctttagagctcctacaccttgacctatttataccaactaggacaacatccttctatggacgcagatatggtctggtcatagtggatgattacactagatggacatgggttaggttcctaacccacaaggatgagtcttttgataccttctataaattttgtaaaaagatttacaatgaaaaaggtatttgtatctcttcaatcagaagtgaccatgagggagagtttaaaaatgatatttttgaaaaaatttgtcaagagaatggtattcaccacaattttccactccaagaacaccacaacagaatggagtttttgagagcaaaaatagatctctttaagaaatngctangaccatgcttaatgacccacccaaccctaaatact

SEQ ID NO: 19500 - DNA, 383 bp, Glycine max
gctttaatggcctagtgaggatggagaggcgcaactaagaagccagtggagtttgatatctccattgaacagtacaatgataaggtgctttgtgatgttgttactatggacgctagccacttactcttggggagaccatggcaatttaataagagggctaatcatgatggtttcaccaacaatatctctctcacggatcaacgcacaaagatgtgctctaaccattgagtccacaagaagtgtgtgaggatcaaagacaaatgagagagataattcttcaagaccagagagacatagaaaacagagccaaacacttgagagttcaaaaagtgacgacaaacagagggaaacacacgagaggacacagatgagtgaaacacttg

SEQ ID NO: 19501 - DNA, 430 bp, Glycine max
  unsure (1)..(430): unsure at all n locations
ttgatggtgttgagaagaaatcacatgtttgtcatcttcaaaatcttcatgattaatttgatgatgtttgtgaacttttgaatgagtttttgatgctttgttactccttaaatatttgactttcattaatatttttttatttatttattatcttataggtatgtagaaaaacctgaaaattatcctgtcataggaacaaaatgggtttttagaaataaattagatgaacatggcatagtaagaaacaaaacaatattgctttatccattgctaaagcggaatatatctctgccggcagttgttgtgcacagattntatggatgaagcaacaattatctgactatggtatccttcttgatcacatacctattangtgtgataatactagtgccataaatctatccaaaaaccctgtacaacattctcgaat

SEQ ID NO: 19502 - DNA, 392 bp, Glycine max
agtttggctctggccatcagaaccatctcattctctacttcatccatcttggaataaacattcctgtcaagtgagtgtctttttgcatcaaacaaatcaaatgtgatcttctgatcatctattcctatttccagattacctttccctatatccaccacacaattggcggttagcatgaagggacaacctaaaatcagaggggattcagcatcctcttcaatgtccatgatcacaaagtccacagtgaaagtgaattgtcgcaccttgaccaatacatcttcaaccatgccataacgccttgaaatgtaacgatttgccagctgcaattcattcttgttgcataatttcagctctccaatcttttgcacatgagagcggatcaaataatacta

SEQ ID NO: 19503 - DNA, 378 bp, Glycine max
agcttgcacatcttctcgatcaggttgacaattcaaatctaattgtcccttggcagcttcagccaccgcatggttttgactccttgaatccaattcattctgcacccgtacctcattctccaatctgtcaactggagttaaatgtcgtaaggtgctatctacttctgattcatctttggtccgccatgataactgatttctctgagcaatctctgcttcacgttcggattgccgcttcttctttcgcatcatcagggttttaaaccgacgtttaactgtcatgcacacattgcatgtgcatgtgggtttgtgtttgcccttcccacttggtggctggatacagacaatgcatgagcacccaggtctatgccgaggatg

SEQ ID NO: 19504 - DNA, 279 bp, Glycine max
agcttctgtctttactttgaaccggtcctggtctatccacttgtggaaccaaagaaaatgaaaacaaagcacttcttctatccatacttagagaacttgcgttcttgttccactgggaaaaaaccagtccaatgaatatggtcaagtgttctacgcaaaccatatgtattgacagcttcattagcagctctaaagccaccaccaatagctggggaagaatcattggccatctgattcttgacaaattcacccaatttattttccacatgagattctgcc

SEQ ID NO: 19505 - DNA, 409 bp, Glycine max
  unsure (1)..(409): unsure at all n locations
agcttccaagaatcaagatcaagattcatgaatcaagagaagacttaatcaagataagtatgaaaaggttttttcaaaaactgagtaccacatggatttttctcaaaacatatttaccaaagactttttactctctggtaatcaattaccagattattgtaatcgattaccagtagcaaaatggatttgaaaaagttttcaaatgaatttacaacgttccaattgatttcaaaaaagctgtaatcgattacaatgttttggtaatcgattaccagtgcctttgaacgttgaaattcaaattcaaatgcgaagagtcacatcctttcacataaaagatntgtgtaattgattacattgatttggaatcgattaccagtgattggttctgaataaactaaaagatgtaact

SEQ ID NO: 19506 - DNA, 397 bp, Glycine max
  unsure (1)..(397): unsure at all n locations
agcttctggatatactatgcatctgaatcggacaaccgtgtgacaagttatgactatntgaatctctcgagagcattccttattcaatttcgagcgtgtcgataaatcatgcgcctgaatcggacattcgtgtgacaagttatgactatttgaatttctcgagagctgccggttttcaatttagagcatctcgatatgtgatgcgccagaatcggacatccgtgtgacaagttatgaccatttgaatttctcgagagctttcgatgttcaatgtcgagcgtctggatatattatgcgcctgaatcggacctccgtgtgacaagctctgaccatttgaatctctcgagagcattcgttgttcaatatcaagcgtctcgagattatatgcgccttgatc

SEQ ID NO: 19507 - DNA, 309 bp, Glycine max
agcttgtgggattatgtgatagtgatcttgccagacatgctgatgatatgataagtactactggatctgtattctttatgggcgattgagtatttacatggagttctaacgaacaaggcattgtgacactttttacttgtgaagtcgaggttataactacaacttcctgcacatgtcatgccatttggctaagaagattgttggaggaacttcagttgctgcagaatgaaagcaccaagatctatgttgatagttgatctgcgcaagagctcgccaagaatccggtgttccatgaacgaagctagcata

SEQ ID NO: 19508 - DNA, 320 bp, Glycine max
agcttatctatgggggcagaatcactctcattaactcagtcctatcagctctacctatctacttactatccttctttaagatccctaaaaaagtggtgcacaaaattgtttccatccacagaaatttcctttggggaggtcatcaagaggccaacaagattccttgggtgaagtgagacacagtttgtcttcctaagaacaaagggggcctatggattaaagatttatctaaatttaatgacgctctacttggcaaatgggggtgggagctggctaataatcacaaccaaccttggactagaattttactttctaaatat

SEQ ID NO: 19509 - DNA, 390 bp, Glycine max
agcttgtgcctcttctcgtctggaatatgaatgtagcatatagatccaaagacccttatgtgctttgctgatggcttcttcccgttccaagcttcaattggagtcttgtcttttacagacttagttggacatctgttgagtatgtaaacagcagtgtagactgcttcagcccagaatttgttaggtagtcccttctccttgagcatcgatctagctatttccataactgtgcgattctttctctcggacactctattttgttgaggagaatatgagactgtaagttgtcgctcaatgccttcatcctcacaaaatcttttaaactcgcgagaggtgtactttttgccgcgatcacttcttagtacttttatccgttttccactttgattt

SEQ ID NO: 19510 - DNA, 390 bp, Glycine max
  unsure (1)..(390): unsure at all n locations
agttttcttaagaagattcctaaagaagctagagcttagctacacatacctctctaatagctaagctcacctccttgagatgagaagctagagcttagctacacaccccctataatagctaagctcacccccatgacaaaaaaacatgaaaataacaaaaaaagtccttattacaaagacaactcaaaatgccccgaaatacaaggctaaaaccctatactactagaatggccaaaatacaaggcctagacaaaggaaaaacctattctaatatttacaaagataagcgggctcatacttagcccatgtgctcgatatctaccctaacgctcatgagaacnctanggcctttccttggatctctagcccaatctacttggagtcttctag

SEQ ID NO: 19511 - DNA, 364 bp, Glycine max
  unsure (1)..(364): unsure at all n locations
agcttctaaactttgtacaagaatgaagctctgataccacttgttagacaagtggcctcagatatcttaagaaggggggggttgaattaagatattcgaaactttttcccctaattaaaaatctatcttactttttacttaagttatgaattcccttaatgacaatcttcttaaatattaattcaaatgaagcaacttgaatatgaatataaagcaataataaataaaggagattaacggaagagaaaatgcacactcagttttatactggctcggtcacacccttgtgcctacgttcagtccccaagcaacccgcttgagagttncactaacttgtcaattccttttacaagttctaaacaca

SEQ ID NO: 19512 - DNA, 385 bp, Glycine max
agctttggagaaccaagccaatcaaaatgctagacgaaatatagatgggaatagaggtaacaatggcggtaatgacggaccgaggcagaaccgggttgagggagtaaagctcaatgttcctcccttcaaaggtagaagtgatccagatgcctacctggactgggaaatgaagactgagcacgtatttgcctgcaatgactacactgatgcgcagaaagtcaagctagcagcagctgaattctccgactatgcccttgtttggtggcataaataccaaagagaaatgttgagagaggaacggcgagaggtatatacatggactgagatgaaaagggtgatgagaacaaggtatgtgcccactagctataacagaaccatgcgacag

SEQ ID NO: 19513 - DNA, 381 bp, Glycine max
agcttgccgccacggagttttccgactatgctcttgtgtggtggaacaagctacaaaaggagagagcaagaaatgaagagccaatggttgatacatggacggagatgaaaaagatcatgaggaagcggtatgtgccggctagttactcaagggacttgaaattcaagctccaaaaactaacccaaggcaacaagggggttgaggagtatttcaaggaaatggatgtgctcatgattcaagcaaatattgaagaagatgaggaggtaactatggcttcgatttcttaatggttgactaatgatatctgtgatattgttgagctgcacgagtttgttgaaatggatgatttgcttcacatagcaatccaagtggagcaacaat

SEQ ID NO: 19514 - DNA, 430 bp, Glycine max
  unsure (1)..(430): unsure at all n locations
attgttttcaattatgagcatctcgatatattacgggactcaatcgtgtcatccgagtaaaaagttattgtcgtttgatttttctcagagcttcagttttcaatttcgagcgtctcgatatactacgggacacaatcggacatccgagtcaaacgttattgtcgtttgaatttgcttagagcttttgttttcaattacgagcgtctcgatatattatggggctcaatcggacattcgagtaaaaagctattgtcgtttgatttttctcagagcttcaattttcaatttcgagcgtctcgatatactatgggacacaatcggacattcgagtcacaagttattggcgtttgaatttgctcacagcttctgttntcaattacgagcgtctcacatattacgggactcaatcggacatccgagctaaagttat

SEQ ID NO: 19515 - DNA, 388 bp, Glycine max
agctttgcagcctattccttccttgaagtagctatggtcttttctggtgtcctcttgatctccctatttgaaacttcaacttgtccatttgtttgcggatgatagagtgatgctaatatgtgttgaacatcatattgttggaggacgtttgaaagttgatcattacaaaagtgtgtacctccatcactaatcaatagtctaggcactccaaatctagaaaagatgtttctctttaagaacttaatcattgtctttgcatcattgattggactagcaattgcttccacccactctgagacatagtgcaccactaccaagatatattcattgccaagggaggatggtaagggaccaacaaaatcaattccccaacaataaaagacttcta

SEQ ID NO: 19516 - DNA, 321 bp, Glycine max
agctttggagcttccatgtgccaatttttcttcttctttagtccagtcttcttctggcttcaattcatcagtgggctctccttctgtgtgcagcatctagggatgttcccagcctttgatgacagctttccaggttctgctatccagtgatttgacgacagccaccatccttgctgtccagtatccatagttggttccatctacgattggtggtctgttgactgtgcctccttctatctccatgtgcatcagaatttatttccctatatctcactctgtgatctcgaatgttggctcttgatccaatcgagattctgatcc

SEQ ID NO: 19517 - DNA, 411 bp, Glycine max
tgcccttctgatccgaagaggctgacccttgcggagtccgtcgagagcgaaattgacctcgtcaacgtgctccatcatctctccgaactcctgcgcctccatcagcgtcgacgtcgccggaatcccctccgccggcgcccgctatgccctcttcgactcccttgctccgcctgcgccggtgccgtttccgaagtcgccgatctccgaatcgaaaaaggaccaacgctgcgaggacgagtcctgtgaggagaacgcgaagccgcagagagggtcgtctatctcctgagataaggaatccctgaatggctccgcaacgtcgtcgtttagagaggacgagcccgaatacgttcccgaaagggtttctctgcggcggtcgcacgtgcggacgatcatcttatacggggatcggcg

SEQ ID NO: 19518 - DNA, 381 bp, Glycine max
tgtctgcaacctcataaaggtgcttggcgcattagctgagcctaaaaagcatcactagccattcatacaaatcaaacttagtcttgaaagcggttttccactcatcagcctttttcatcctgaattggtgatacccacttttaagatcaatttttgaaaagatattgtcaccatgcaactcatcaagcaaatcatcaagtataggaatggggtgcctatactctacagcgatgctgctgatggccctgcaatttgtacacattctccacgtaccatcctttttgggcaccaacaacactggcccaacacatgggcttatgctcttttgacccagcccttcttaacaatcttttacctgaaatctatctcctatctcctgag

SEQ ID NO: 19519 - DNA, 424 bp, Glycine max
  unsure (1)..(424): unsure at all n locations
tgtcaaagccttgtatggattgaaacaagctccaggttcttggtatgaaagactatgctcattcttagttcagaatggcttctccagaggaataatggacaccacattatttagaaaggctcagaaggaaaatctacttattgtacaaatctatgtagatgacataatctttggttcaaccttagaaaggacgtgcaagaagttttttgagctaacgaaaggtgaatttgaaatgagtatgatgggtgagctgaagttcttcctagggcttcaagttattcataaagatgatggaatattcatccatcaagagaaatacacaaaggatctacttanaggttcaagatggatgaaaccaaacctatggctgcccctatgcatccaactattgtcagtgacaaaggtgagaaacacaatgatactc

SEQ ID NO: 19520 - DNA, 402 bp, Glycine max
  unsure (1)..(402): unsure at all n locations
agctttgaatgctctattcaatggagttgacaagaatatcttcagactgatcaacacatgcacagtggccaatgatgcatgggagatcctgaaaaccactcatgaaggaacctccaaagtgaagatgtccagattgcaactattggccacaaaattcgaaaatctgaagatgaacgacgaagaatgtattcatgacttccacatgaacattcttgaaattgccaatgcttgcactgccttgggagagaggatgacagatgaaaagctggtgagaaagatcctcagatccttgcctaagagatttgacatgaaagtcactgcaatagaggaggcncaagacatttgcaacttgagagtggatgaactcattggttcccttatacctttgactatgactctcgg

SEQ ID NO: 19521 - DNA, 428 bp, Glycine max
  unsure (1)..(428): unsure at all n locations
tgaaggtgtgtagcccatcatcttttcatagtagaattctggtaatgtgtctactatcattatcatcatttttttctccgtcattgaggtgccacttgagctgccaggtctctccacctttaggcgtattcttttgaaagattcgtgccccctttttgcacatgttctgtagttgcatcctatccgaagacattatactgacactgcctaacgaaggcaaccattangtcctcccangaatggactcgggaaggttccaagttagtgtaccaggtaacaactaccccagtaagactttcttggaaggaatgtactaacaattcctcatcttttgcgtatgcccncatcttccgacaatacgtctttagatggttcttggggcaagtaatccccttgtacttgtcaaagtccagtaccttgaacttgag

SEQ ID NO: 19522 - DNA, 377 bp, Glycine max
tgggttaagttgagttggttcatcatattgagaccattatgttcattaatatcattaatttgtataaatgttgttacaatctacatgtgtatatcatgctgcttatgaaatttagtttattacaaaaacttcttgctcttaattttgatatgtatggcgtgacaccctttaccccgacatatacataaataaataaaatatgtaaatatattggtaaacaaatccacgtgggtaaaagattcacattcacttcactattatcaaatataatttgtataaatgttgtttcaatctacatgtgtatatcatgttgcttatgcaatttactttattacaaaaatttcttgcttttaattttgataatggatggtatacat

SEQ ID NO: 19523 - DNA, 375 bp, Glycine max
  unsure (1)..(375): unsure at all n locations
agctttgtcaaagttagcatggatggagcaccttacctccgcaaagttgacttgaagatgtacaagagttaccctgagctctctgatgccttgggcaaaatgtttagctccttcaccattggtaactataattaatccataatttaccatacattaacttttttttatatagaatttaatgactgatcataacttttacgtatcagtatctagtttgttttctctttaatataactaccaaaagatatggatcttanatttgattctgtagaaagttaactaatggtgtatgtgaatataaaattgaatcgtgcagctgattcgatggtattaattattggtgtgttcttgatatatttaaggaaattgtgaatc

SEQ ID NO: 19524 - DNA, 390 bp, Glycine max
agcttatcacccttaccggctattaaaaaatcttttaagggaagttaagagcatgatagtgtgctgataccattaactagtcaacaggttcttgagcgggttgagggcatcaatactatatttggaaagacccaaaagaagaaaaaaaaaagtaaaacttccatatggaagatgaggctgatattgtttgatcttccatactggttcgatctagatgtcatacattgtattgatgttatgcatgttgagaaaagtgtgtgtgatagtgtcatcgacaatcttcttaacattcaaggcaagacaaaggatggtttgaatacttgccaagatctagttgagatgggtatacgagaccagttacatccaaggtttgatggtaagaaaatatac

SEQ ID NO: 19525 - DNA, 394 bp, Glycine max
tccatcacattctaaatgtagtttggagaatgaacgatctgctttcttgtaacataaacgtttaggtcacatttctagagaaatgatggaaagattaataaagaatgaaattcttcctgatctacattttacggatctaactatttgtatggattgtattaagggaacacaaacaaaacatacaaagaaaggagctaccagaaacactcggcttcttgaaattgcgcatactgatatttgtgaatcatttgatgttaattccttcatacaagaaaaatactttatcacctttattgatcactattcacgtcacggttatgcctacttactgcatgagaactctcaagcagcggatgccttataaatttacttgaatgaagtacaaagacaatta

SEQ ID NO: 19526 - DNA, 385 bp, Glycine max
  unsure (1)..(385): unsure at all n locations
agcttggagctggttcacgctggcgtcgtacaactggtcaggaaatttattctccattcttagtggctttcacacatgaggtatgacttaatttgtttcacgtacttaattatggattaataatcatcaccatattatactcatgattttttttattgatcagaactcggaaaactggaagtcctctcatttgacaaaaggaactatcatggatccaaattacagcttgcctcccaatattgctctgataactcttgaggtagagcaacttttccaaggatatatatctatagtctataacactcttgactctntttgtctcanactaaaatgttctgcatgagttggatggtggaattgtgctctttccgttggcacatctata

SEQ ID NO: 19527 - DNA, 393 bp, Glycine max
agcttcaacatcagaccacttccagggtgctggaactacttcacatggatttgatggggcctatgcaagttgaaagccttggaggaaagaggtatgcctatgttgttgtggatgattcctccagatttacctgagtaaactctatcagagagaaatcagaaacctttgaagtattcaaagagttgagtctaggacttcaaagagagaaagactgtgtcatccagagaatcatgagtgaccatggcatagaatttgaaaacagcacgttcactgaattctgctcatctgaaggcatcactcatgagttctctgccgccattacaccacaacagaatgtgatagttgagatgaaaaacaggaccttgcaagatgctgctcgggtcatgcttcatg

SEQ ID NO: 19528 - DNA, 404 bp, Glycine max
  unsure (1)..(404): unsure at all n locations
taaacattcaatttcgaggctctcgattattacgggtatttaatcaagcatccaagaaaaaatttattgtcgtttgaatttgctcagagattcaacattcaatttcgagcgtctcgatatattacgggactcaatcagacatccgagtaaaaagttattgccgtttgaattggctccgagcttcaacattcaatttcgagcgtctcgatatgttacgagactcaatcacacatccgantaaaaacctattgtcgtttgaatttgctcagagattcaacattgaatttcgagggtctcgatatcttacgggactcaatcagacatccgagtgaatagctattgtcgtttgaattggctcagagcttcaacattcaatttcgagcggctcgatatattacggtact

SEQ ID NO: 19529 - DNA, 440 bp, Glycine max
aaactaagcttacaaaagtttgtatggcttgaaacaagcaccgaggtagtggtacaagaagtttaatgagtttatgagcaactcaggattcaaaagatgtgacatggaccattgctgctatgttaaaaaatatactaatagttatgttatccttgttgtgtatgttgatgacatgttgattgcaggatctagtatggcagaaattaacaggttgaagcagcagttggcagaaaactttgaaatgaaggatcttggtccagctaaacaaatccttggtatgagaattcttagaaacagatcagaaggaattttgaagctgtctcaggagaaatatatacacaagttgcttgacaggttttaccttggagattctaagaccaggaatacccctctgggatctcatttgaagttttcaaagaagcaatctttgcagacaaatg

SEQ ID NO: 19530 - DNA, 386 bp, Glycine max
agcttatcaaaattgaaaatgatggttcctaatctcaagaatcttagagtcttagattgtgagtcttgccaactaggaaaacatgttaggtcatcatttcctcaaactgtacaaagatgtaactctgctttctctaccattcactctgatatttggggaccaagtagggttacatcttttgattttcggtattttgtaaccttcattgatgaatttttcagatgtacttgggtttatttaatgaaagacagatctgaacttttgcctatattcatgttgttctttaatgagattgagaatcaatttggcaaatcaattaagattttcaaaagtgataatgctaaagagtatttctctcatgatctctcttcctttttatcttcaaa

SEQ ID NO: 19531 - DNA, 411 bp, Glycine max
tggagtaagttcctgagaccgaggactgcttatgaggtcgtagcttgaccatgacccaatcaccttccttaaaggtgacgtccctacattttttatctgccatttgtttcatgaggtcctgagctttcaacagcttcttgcggattaccacgaaggcctcatctctgattttcaaaacctcatctactatgcccaatgtcaaggtgactgtaatgtattgtggtatggtgaggggtttcttgctgaaagtcatctcgtatggggacaaactagagccggagtggaccgaggtgttatagaaccactccacccaatttaaaaacttcccccatgaagacggcttcttatgaacaaaggctcgaagacattgttctatgacacggttcagcacctttgtctaaccatcgatct

SEQ ID NO: 19532 - DNA, 329 bp, Glycine max
agcttggagtgacctttgtgttgacccgagaccgaaatttgtctgtgtgggcgaagtttgaccaaaaccatatcaccaacttggtattcagcttcacggcgctttttatctgctaaatactccatgcgattttgagctttctccaattttttcttgatttctgcgaaaatagcctcgcgatcagtgagcatgacattaacaacatcaatgttagaattctctgcccaatattgagaacagttgaaaggcttcttcgcacatgtgatctcgtacggggaaagacctgagcttgagttccaagaggtgatgtaagaccactccacccaacc

SEQ ID NO: 19533 - DNA, 373 bp, Glycine max
  unsure (1)..(373): unsure at all n locations
tttcatgcaagctttaagaattatggcctcatcgaactacttgtttctcgagggaaattctataaatagacctcccatctttaatggagtgggttaccactattggaaaacccgcatgcaaatctatatagaggcaatagatttaaatatttgggaagccatagaacaaggaccttatgttccctctatagtggccggaagtgcaacaatagaaaaacctagagcatattggactgaggaagaaagaagattantacaatataatttaaaggccaaaaatattattacatctgctctatgaatagatgaatactttacggtctcaaattgtaacagtgctaacgatatgtgggataccctacaagtaacacat

SEQ ID NO: 19534 - DNA, 389 bp, Glycine max
  unsure (1)..(389): unsure at all n locations
agctttcatacatcagaccacgttccacgggtgttggaacttacttcatcatgtgacttgatgagggccctatgcacagttgcaaagcacttggatggaaaagaggtactgccctatcgttgtttgtggattgactttctccagaatttacgctgggtcaatctttatccagagaggaaatcagacacctcttgaagtattcaaagagttgagtctaagacttcaaagagaaaaagactgtgtcatcaagagaattatgagtgaccatggcagagagtttgaaaacagcaagtttactgaattctgcacatctgaaggcatcactcatgagttctctgcagccatcacaccacancataatggcatagttgaaggaacaacatgacttt

SEQ ID NO: 19535 - DNA, 370 bp, Glycine max
  unsure (1)..(370): unsure at all n locations
nttgagcaattcaaatggtcgtaacttttcactcggatgtccgattcatgcacataatatatcgagacgcttgaaattgaacaacgcaagctctcgtgaaattcaaatggtcataactttcaactcataggtccgattcaggcgcataatatatcgagatgcacgaaattgaacaacggaagctctcgagaaattcaaatgatcataacttttctcacggaggtcagatttatgcgcataatatatcgagacgcttgaaattgaacaacggaagctctcaaaaaattcaaatggtcctaacttttcactcggaggtcccattcaggcgcataatatatccagacgcctgaaattgaacaacggaagcttt

SEQ ID NO: 19536 - DNA, 398 bp, Glycine max
  unsure (1)..(398): unsure at all n locations
agcttagcaaatggttctgngtgttgcccagtttcatcatatcttccgtaatactcatcacctctatcatatctaataattttcacatttatgtctaattgcccttttacttcattgtagtaaatttctaaggcatccattgcctaagaaatctcgggcagtaagtagacataactgtaacgtgaataatcataaaaaatgatgataaagtatcattcctttccgaaagaactaacatcaaaaggtccacaaatatcagtatgcacaatttcaagaagctgagtgcttcttgtagctcctttctttgtatgttctggttgttatcctttaatacaacccacacaaatatttagatccgtacaatctagataacgaagaattcatcttttataatcttt

SEQ ID NO: 19537 - DNA, 344 bp, Glycine max
agtcttctctatatgttatgctcctgaatcggtcatccgggttaaaagtcatgaccatttgaatttctcaagagcttttgttgttcaatttcgaacgtattgatgtattaagcacctgaatcggacctccgaccgaaaaattatgaccatttgaatttctctagagctctcgttgtttaatttcaagcgtctcgatatattatgcgcctgacttgtacctccgatggaaaagcgatgaccattttaatttctcgagagctcccgttgttaattttaagcgcgctatatattatgctgcccgaatctgaccctacagttaaagctatgaatattcgaatttcccg

SEQ ID NO: 19538 - DNA, 393 bp, Glycine max
gtcataactcttaactaggatgtcccattcttgcacataatatatcgagacgctcgaaattcaacaacggaagctctcgataaattcaaatgttcataactgttaactcggatgtcagattcaggcgtataatatatagagacccttaaaattgaacaacgaaagccctcgtgaaattgaaatggtcataaattttaactcagatgtcatattcatgcgcatgatatatcgagacgctggaaattgaacaacggaagctcttgataaattcaaatggtcatatgttttaactcagaggttcgattcatacgcattatacattgagatgctcgatattgaacaacggaagcttttgagaaatcacatggtcataacttttaactcagatgtcat

SEQ ID NO: 19539 - DNA, 383 bp, Glycine max
agcttgtatggcaaactggatgcattggttaacttggtaacccagctggccttgaatcacaaatctgtacctgtcgcaagggtttgtggtttgtgctcctctgctgaccatcatacagacctttgcccttccatgcagcaacctgcagcaattgagcagcctgaagcttatgctgcaaatatttacaatagacctcctcaacctcagcagcaaaatcaaccacagcagaacaattatgacctctccagcaacagatacaaccctggatggaggaatcaccctaatctcaaatggtccagccctcagcaacaacaacagcagcctgctcctttcttcaaaatgctgctggcccaacagaccatacacttcttcaccaatccaac

SEQ ID NO: 19540 - DNA, 392 bp, Glycine max
tattctttatctagagtagttgagcatccaacttactactgacatatattcgactgtagtagtggacaatgtagttgagccttgcatcttgcatattcatgttactaagttagcaccgataaagtaatagcttccactagagctttttctttcaactctatcaccaacatagtcaacatcataatagcttgcaagtctgaaactctctctatttttgaacataacaccaagattagaagttccaattaaatatctacaaatatgtttaatttcacttaggtgaacttccctttggtatttttgaaatcttgcacatagataaacattgaacataatatcacaaatggatgcagtgagatagaccactgagttgcatccactttttttgatcc

SEQ ID NO: 19541 - DNA, 422 bp, Glycine max
ttaacattaattaaaagctcactgttgtaggggcaatcacttatggtaatttttatgcatgtgactgaacttgagccaatctatatgaaataaaataaatgcattctcagggtttcgttttgctgaatgctacaggctttgcaaaacttttttgctgctttagtctattctgcaaatactagttttgattctctgctggagtcactactagcctgtgctaagccttctccacagtctggtggcattgctaaacaagctttgcattcaatagctcagtgtgttgctgttctatgccttgctgctggtgatcagaagtgttcatctactgtgaaaatgcttactgacattctcaaggatgacagcagatctaactcagtaagtctttttctccagtactcttgacgtgtagtgatattaattga

SEQ ID NO: 19542 - DNA, 423 bp, Glycine max
tcaaaatgtagttaagactgcagacaacttctgttcatgtttgaagcttgatagaaacacagatgttagctatagtaatatgaggaaggctgcttcttgggaagatttgactgacaactatttattctgttctaaagctgtagatcctcagtacaaggatttaaggcattttcagtggcattgggaaaagggggagcctgtcattgtcagcaatgtgcttgaatgtacatctggtttaagctgggaaccgcttgtcatgtggcgtgcattacgtcatgtaactaataccaagcatggccaacatttggcggagaaaacaattgattgcttagattggactgaggtttgcttaatttcccaatctttaactctattgaccatggagagctctttacacaaatttcattcttcaccttcattctc

SEQ ID NO: 19543 - DNA, 336 bp, Glycine max
tttcatgcaagcttatcaaaactgaatataatggctcctaggctcaagaatcttatactcttagactgtgagtcttgctaactaggaaaacatgttacgtcatcatttcctcaaactgtacaaagatgtaactttgctttgtctaccattcagcttgatatttggggaccaagtatggttacatcttttggttttcggtattttgtaaccttcattgatgaattttccagatgtacttgcggttatttaatgaaagacagatctgaacctttacatatattcatgtcgctctctaatgagattgagaatcaatctggcagatcaattaagattttc

SEQ ID NO: 19544 - DNA, 421 bp, Glycine max
ctgtactcaatgaagtttattcttactgtgacgagtttcatactttatatactgtttgtctcttcccttgtagtttccatagcagcagacacatcatccatttcacaatcccaatccctcagttctggaagaaccatagtttctccaaatggagtctttgaacttggattcttcaatcttggaaatccaaacaaaagttacctcgggatttggttcaagaatattccgtctcaaaacattgtttgggttgcaaacggtggcaacccaataaatgattcctttgccctcttgagcctaaacagttctggccatttggtccttacacacaacaacactgttgtttggtccacaagttctctaagagaaacacagaatccagtggcaaagctcttggattctgcgaatcttgtgataagggatg

SEQ ID NO: 19545 - DNA, 407 bp, Glycine max
  unsure (1)..(407): unsure at all n locations
tctatagaaggtccgttcctaatttctctacaattgcatcacctctcaatgagctggtgaagaagaatatggcatttacctggggtgaaaaacaagagcaagcctttgcttttctcaaagaaaagcttactaaggcacctattctagctcttcctgaattttctaaaacttttgagctagaatgtgatgcctctggtgtgggagttggagctgtattgttacaaggtgggcaccctattgcttattttagtgaaaaacttcatagtgccaccctcaactaccccacctatgataaagagctctatgccttaataagagccctccaaacttgggaacattaccttgtttccaaggaatntgtcattcatagtgatcatcaatcacttaagtacattagagggaaaatc

SEQ ID NO: 19546 - DNA, 349 bp, Glycine max
agctttgagtaaattgaaatgacaagaactttctacacggatgtccggttgagtcccgtaatatatcgagatgctcaaaatttagatccgaagctctgagaaaattgaattgacaataactttatacacggatgtccggttgagtcctgtaatatatcgagacgctgtaaattgaaagcggaagctcgtaggaaattcaaacgacaataactttttactccgatgttcgattgaatcccgtaatatatccagacgctcaaaattgagactacaagctctgagcaaattgcaatgacaataactctatacaccgatgcccggttgagtcccgtaatatatcgagaccctc

SEQ ID NO: 19547 - DNA, 405 bp, Glycine max
agctttcgataaattcaaatggtcataacttttcactcgcatgtccgattcaggcgcataacttatcgagacgctcgaaattgaacaacggaagctctcgagaaattcaaatggccataacttttcactcgcatgtccgattcaggcgcataacttatcgagacgctcgaaatttaacaacagaagctctcgagaaattcaaatggtcataacttttcactcgcatatctaattcagcgcatagcatatcgagacgctagaaatttaacaacggaagctctcgagaaattcaaatggtcataacttttcactcgcatgtgcgattcaggcgcatagcgtatcgagacgctagaaatctaataacggaagctctcgagaaattcaaatggtcataacttttcactc

SEQ ID NO: 19548 - DNA, 434 bp, Glycine max
  unsure (1)..(434): unsure at all n locations
taaggtacgatgaatttcgaggtgcaagtcattcattctcctccccaaacatactcatcccagtaactggtagaattgtaaaatatagaagcttccgaactccctgcactgtacctgcctctctgctccctagaaaacttgaacagcgtggtagcaccatgaactagtttcttcgaataggccttgttgtccttgaaaacaatggaagcagatgccaaggcagcagccatctcagctgcaagatcagaacaactatggcattcagtcacagggcggtcatagtccatgtcctctgggcgcatccagcaatagtggtcattcggactgtcaccaccggaagtatctccaagcccaacctgtcaaacaagcataaaaaaccatcattgagacacatcctactccgcaccacacaacanaattctagtccaccaacc

SEQ ID NO: 19549 - DNA, 398 bp, Glycine max
  unsure (1)..(398): unsure at all n locations
agctttatacgttcaatttcgagcgtctcgataagttacgggactcaatcagacatccgagtaaaaagttattgtcgtttgaatttgcacagaggttcaacattcaatttcgagcgtctcgatatgttacggggctcaatcagacattcaagtaaaaatttaatgtcgtttgaattttctcagagattcaacattcaatttcgagcgtctcgatatgttacgggactcaatcagacatctgagaaaaacgttattgtcgtttgaattagctcagacgttcaacattcaatttcgagcgtctcgatatattacgggactcaatcacacatccgagaaacaagttatggtcgtttgcattggctcagagcttcaacattnaattttgagcgtctcgatat

SEQ ID NO: 19550 - DNA, 444 bp, Glycine max
  unsure (1)..(444): unsure at all n locations
ntgagccaactcaaacgacaataacgtttttctcggatttctgattgagtcccgtaacatatcgagacgctcgacattgaacgttgaagctctgagccaatagaaacgaccataacttttttctcagatgtctgattgagtcccgtaacatatcgagacgctcgaaattgaatgttgaatctctgagaaaattcaaacgacattaaatttttactcgaatgtctgattgagccccgtaacatatcgagacactcgaaattgaatgttgaacctctgagcaaattcaaacgacaataacttttttctcggatgtctgattgagtcccgtaacatatcgagacgctcgaaattgaacgttgaagctctgagccaatacaaacgaccataactntttactcggatgtctgattgaggctcgtaatatatctagacgctcgaaattga

SEQ ID NO: 19551 - DNA, 435 bp, Glycine max
gactgtatattgatttctttagtatgttctctttgtgtccatttccttcaactgagaaccccattggttggtccatacaaacattcttctctaaatcttcattcagaaagggggttttcacatttatttgatgtagctccaagtcataacgggctactaatgccatgataatcctgaaagaatcctttcgagaccagtaaaatgtctctctataatgaatgtcatatttctgagtaaattccttagcaacaagtctagccttgtaacgttcaaggctgccatgagagtcacgtttagtcttgaagacccacttacaaccaactctcttacaaccccttggtaattctacaaggttgcaaacaccattatgttccatggaatctatctcttctctcatggcattcaaccacttctcagagctatcacaacttacac

SEQ ID NO: 19552 - DNA, 318 bp, Glycine max
tagcttgttggagcacgatgggagctgatatttgtgaaggcattcaggaatttcatggcagcgcatcattgcctaaaggtatcacttcatcatttactactcttatccctaaatttgagcaatcgtaaagcttgtcggagtatcaccctattttactcataggtggtcttcataggatcatttcgaagactctggcccatacaatgaacgcagtattacctactattatatctccgcaacaaatagcctttttacccggaaggaaaatccatgatggtgcggctgttatcaacgagttggtggattcgcgaaaaacga

SEQ ID NO: 19553 - DNA, 397 bp, Glycine max
agctttagccttaggttgttccatgttgctgctccccttatctttaacagtaacaagcacatttccattcacaggtttagcgacatcaacatcatcacttgagccctcactttcaatgtttccattatccagtaatatcatgcctcttttatttggacattgagaagcaatatgaccaactccttgatacctgaaacatttgatatcatgggatctagaagatgaattaatttccattttacctttaggtgcagcaaatgaatttttggacttagcttcatcttttgactttgtcatagattttttgttttgccaatttgaccttcatgaataagtggaatcaaatttggaagtactcttagctctcaattgcctctccacttgaatagatttatgc

SEQ ID NO: 19554 - DNA, 443 bp, Glycine max
  unsure (1)..(443): unsure at all n locations
gtgcttgagcccactctgactcttctaggcctgactccgtcattatcctctgagaaggaacttctacctcaaatgggagtactgcctccatcccataaaccaaggaatacggtgttgccccagtagaagttcgcaccgaagttctgtacccgtgtagggcgaaaggcagcatctcgtgccaatctttgtatgacaccgtcatcttctgaacaatcttcttgatattcttattcgcagcctctacagccccattcatctttgaccgataaggggtagagttatgatgctggatcttgaagtcttcgcacatctcctgcattatcttattgttcagattggtgccattgtcagtaatgatcttcctgnggagtccgtatcgacaaatcagctccttctttatgaatctaactaccacattctttgtgacattagtataagaagcg

SEQ ID NO: 19555 - DNA, 376 bp, Glycine max
  unsure (1)..(376): unsure at all n locations
ggtcattagaaccaatgaactcactgacaatctccttggacagaaccttctctcgaatgaaatgacaatccatctctatatgcttagtcctttcatgaaagactgggttcgaggcaatatgaagagcatctcgattattacaatacaacttcatttgcaactcttcacaaaacctcaattcttgcacaaattgtctaatccacatgagttcacaagtaactatacccatcgatcgatattcagcttctgcactaaaccgacctacaaccgtctgtttcttgcttctccaagaaataagatctcctccaatgaagacacaatagcctgatgcaaacctnctatccatgggacagccagctcaatcagcatcacaata

SEQ ID NO: 19556 - DNA, 443 bp, Glycine max
agatgttaggtgatgcaatcctaccccgcaagggcattggatagaaaacttcaagtagattgggccaaagatgcaagagaaggccctagggttcttatgagccttatggtagatttcgggcccatgggctaagtatgagcccacttatctttgtaaatattagattaaggtttcattatttttgggccttgtatttagggctccataatgtaggtagggtaccctagaaatataggatttttcagcccttgtatttaagggcacctagactagtttttgtattacgggtagttttgtaatttcacatgtactaagtggatatttgatgtgtgtggttggaaataaatttaattgaattggtagaagcccaatccaattaaattttagagggggaggtgagcatttgcttactacaccccattgccacatcatatagttacact

SEQ ID NO: 19557 - DNA, 341 bp, Glycine max
  unsure (1)..(341): unsure at all n locations
agctttatcacttttcacacagaggtcagattcgggcacataatatgtcgagatgctcggaattgaaccacggaagctctcgagtaattcaaatggtcataacttttcacacagatgtccgattcgggcgcataatatgtcgagtagctcgaaattgaacaacggaagctgtcgagaaattcaaatggtcataatttttcacacggaggtcacattcnggcacataatatgttgagatgctcggaattgaaccacgaaagctctcgagaaattcaaatggtcataacttttcacacggacgtccgattcacgcgtatcacatatacagacgctcgaaattg

SEQ ID NO: 19558 - DNA, 426 bp, Glycine max
  unsure (1)..(426): unsure at all n locations
acagcttgaatcggacctcagtgtcaaaagttatgaccatttgtatttctcgagagcttccgtggttcaatgtcgagcatctcgacatattatgtgcccgaatctgactttcgtgtgaaaagttatgaccatttgaatttctcgagagcttccgatgtttaatttcgagcatctcaatatattgtaagcctgaatcggagctcagtgtgaaaagttatgaccatttgtatttgtcgaatgcttccttggttcaattccgagcatctcgacatattatgtccccgaatctaaccttcgtgtgaaaagttatgaccattcgaatttctcgagagcttccgttgttcagtttcgagcctctcgatatattatgcgcncgaatcggacatccgtgtgaaaagttatgaccatttgaatntctcgagagct

SEQ ID NO: 19559 - DNA, 420 bp, Glycine max
gtctaaattgacgctttagatcatttttattatgctttgctgagcaacatcttcaaaattgtgattaggacatttcctcagcaatgatttgaattactcctatacttcacaaaagggttcttttgatcctttcctgaatgtagaaatatctgactttacattgatatacctagatggagggaaaaatctatcaagaacttttcttccactatgctccagcttgtcaaactttgatttggatgagattgtagccatgctttggctttccctgttaaagacaatggcaataatctaaggtacacaacctcctcttcacctttaggaatgcccattgtgccatattgttcatagaaagtagatagatgagtatatggatcctcattaccagcacttgcaaactgatgtgcactgatcaaactt

SEQ ID NO: 19560 - DNA, 397 bp, Glycine max
tttcttattgagtaaaataaagcccaaagagcaggaataattaaggaaatcagagctaattgagaaaagcaagctaattgaggaaagaatggctaattgaggaaagcatggctaattaaggaaataagattaattaaggaaagcaaagttaataaaggaaagaagacttattaaggaaagtagaataattaaggaaaccataattaattaaggaaagtaaaggcagacttggtgtaaaaagctcactaatctgcacctataaaagaaaaagagaaaagaaggagaagacacatagaaattccaagagaatataattcctcatagaacgaaaaggctagaagaaggagaagcaaacaataggagtcattccttccctctatctcctttcttatctttt

SEQ ID NO: 19561 - DNA, 433 bp, Glycine max
ttgatgcaacatttggagaggttaatgaaacatcttgttgatgcgctccatgagaggttggatcaaatggagaatagagatcataatgaagaagaaaggaggagaagagggaatgatggtgttcctagacaaaaccgaattgatggtattaaactcaacattcctccatttaaaggaaagaatgatccggaggcctacttggagtgggagatgaaaatagagcatgttttctcatgcaacaactatgaggaggaccagaaggtgaagcttgccgccacggagttttccgactatgctcttgtgtggtggaacaagctacaaaaggagagagcaagaaatgaagagccaatggttgatacatggacggagatgaaaaagatcatgaggaagcggtatgtgccggctagttactcaagggacttgaaattcaagc

SEQ ID NO: 19562 - DNA, 412 bp, Glycine max
acatctagaggtgctttccaatctgttcttttaccacttattctgccttcttttattttcagagtgggaatgcctctgacagcacctttgtcaatgattttcttcatgcctcttaagtgcagatgtcccaatctttgatgccatattctgacttcatcttctttggaggatagacatgtggaggagtaactgctttcttgacgtgtccatacgtagcagttgtcctttgatctgctgcccttcattagaacttcactcttctcatcagtcactaagcattctgactttgtgaagcttacattgaatccttcatcacacagctgactgatgctgatcaagtttgcagtcagtcccttcaccagcagtactttgtccagactatgaagtccatcatggactaactttcccattc

SEQ ID NO: 19563 - DNA, 397 bp, Glycine max
  unsure (1)..(397): unsure at all n locations
agcttagactaaatgtacctaggtacgttggcgatggacaacaaaaagcgagcagtcatggtcgtcagcgcgatggagaaagcttagatgcagaacacggagaagaagagagcgcgagcaatgtaggtcgtgtatgatataagttaaaatgtaattccaacatcgattttcaatacaaaaccgatgttaacaaaatgatgttaacgttaacatcggttttcttctanaaactgatgttaactgatcatatgttaacatcgatgttcaaaaaaccaatgttaacgaacataggttaacatcggttttcttcaaacccgatgttaactaagagacattaacatcgattnttccaaaccgatttaacaaattaatgttaacatcaatcttacaagaatcg

SEQ ID NO: 19564 - DNA, 399 bp, Glycine max
  unsure (1)..(399): unsure at all n locations
tactcaagcttgttgatgagactctgagacggaggaatctctttgattctgttttattatgaccatgcaacagtatgtatgtttaagagggatatgatatttttacattgagaaattaaaaggtcatctgattttgttgggtatattagaggtcaggtatacaacaatataaaatcgatttgttgattttatgtcaagtaaatcctgtgtggatagggaaagcctttctgaatacctacttgatcaccacatccatctttanaaggaaaattagttgcgctcaaattttcagagatgacattatgctctgtgattatctttttcattgattgaaagtcactaatgatatatttcatatcctttatttatgtctattaaatgctgatgacgttttgccgt

SEQ ID NO: 19565 - DNA, 373 bp, Glycine max
  unsure (1)..(373): unsure at all n locations
gcctaattcgtctaagagctcgacagcggcgggcattggatatcgatcacgcaccgngatngcatttaaagctctgtagtccatgcaaaagtgccatgaaccatcctgcttgcgaactacgagcacagacaagacgggtcctttctagagcattgatccaacctgcgattcaatctcatgtttctggtaatgtggataacgatagggccgtacgctgactggcgcaccttgcttcatgatgtgaatgtcgaggtctgtttcgcgggccgtcgtcatctaataacggggctcaaataatgcacgaaaatgatcaattcaagattggatacgtgcgtggggagacataccactctgcggtgcgttttctaccact

SEQ ID NO: 19566 - DNA, 428 bp, Glycine max
  unsure (1)..(428): unsure at all n locations
ccgcttaaacattcaatttcgagcgtctcgatatattactagattatatcttacatccgngtaaaacgttattgtcgtttgaattcgctcagaggttcaacatttaatttcgagcgtctcgatatattacgggccttaatcagacatccgaatacaaagatattgtcgtttgaattggctcagaacttcaacattcaattttgagcgtctcgatatatgataggactcaatcagacatccgagtaaaaagttattgtcgcttgaattgtcttagagcttcaacattcaatttcgagcgtctcgatatattacgggcctcaatcagacatccgagtaaaaagttattgtcgtttgaattggctcacagcttatacattcaccttcgagcgtctcgatatatgacaggactcaatcagacatccatgtaa

SEQ ID NO: 19567 - DNA, 404 bp, Glycine max
  unsure (1)..(404): unsure at all n locations
acctccttaacnttagacccaaaatagccacaacagaacaattatgacctctccagcaacaagtacaatcctgggtggaggaatcatcccaaccttagatggtcgaatccttcacaacagcggcaacaacaacaacaacaacaacaaccttattttcagaatgctgctggcccaagcagaccatatgttcctccaccaatccagcaacaacaataacagcaaacagatgaggcccctccgtaaccttcccttgaagaacttgcgaggcaaatgactatgcaaaacatgcagtttcaacaagagaccacagcctccattcagagcttaactaatcacgtgggacagtcggctacacagttcaatcaacaacagtcccagaattatgatagattaccttttcaatc

SEQ ID NO: 19568 - DNA, 369 bp, Glycine max
agttctagctgtctaggaacttagacgttgatgaactttgttcaacataaattgagaagtattcctagaagccatcttatgaaagatagacactccgaggtactttcccagatccttagtccacgccatacccatttgtccacttagttgatccttgactcgagcctccacatttttggaaaagaacattcaacatttctccaacctaattttctgcttacaactcttgcaaaacaaattccaaatattcctgattgaatggacctgctccactaaagccttcataaataaaataaggtcccatgcaaaggctaagcgagatataactggaccatgtctcacaagacgaatatggcaccatactctttg

SEQ ID NO: 19569 - DNA, 386 bp, Glycine max
  unsure (1)..(386): unsure at all n locations
agcttctatagaaggttcgttcctaatttctctacaattgcatcacctctcaatgagctggtgaagaagaatgtggcatttacctagggtgaaaaacaagagcaagcctttgctttgctcaaagaaaagcttactgaggcacctgttctagctcttcttgacttttctaaaacttttgagctanaatgtgatgcctctggagtgggagttggagctgtattgttacaaggcgggcaccctattgcttattttactgaaaaacttcatagtgccacccttaactaccccacctatgataaagagctttatgccttaataagagccctccacacttgggaacattacccttgtttccaggaatttgtcattatagtgatcatcaatca

SEQ ID NO: 19570 - DNA, 434 bp, Glycine max
  unsure (1)..(434): unsure at all n locations
gctcagtgggtcagttatttaatactggtgcaaaaatntatttttatatattctgaatgaatgagaaatttagatgctaacaaaattaatatcattcctaaagaaattattaaaaattcaacgtgacaaaacagatcatgcaaaaagcatttcaataataataataataggtagataatatagataatagaagatttgtcaccaattaaaataattacatacaatataatcaattgaaaacataattattaatcaaggtaacataattgtatgcacttagtttactatttaaatggattgattgatttgttaaaattttattttaaagtaatcaaaaataaattgtaacatttattattttatttttttgaatttgaactaatttgaattaactaattaaaatagaattaatgacacttagctaatgctgaatg

SEQ ID NO: 19571 - DNA, 438 bp, Glycine max
  unsure (1)..(438): unsure at all n locations
ccttaatctctttgtcaacacaaaaacttcccgtgcaatacttcatttattaacgcgttgccgagggataaacacatctaaagtaaggtgttagattatatgataatatattctgattttatataattcttatatctattagatttatctttagtcatatctttagctattaggtttatctttagttntatagttgttatatctattcgatttatctttagccattccattagatttatctttagccatatctttagcttatatatctttagcttgtaaccttatatataagagaatggtgcttaatgaattattcaaggaaacaatttctttcatggtatcagattgcttaaggaaatatttttgaaccttcctcagccttccgcacacaggccctagcgtcgtttagcccctttcttcttcttctccccttcttct

SEQ ID NO: 19572 - DNA, 330 bp, Glycine max
  unsure (1)..(330): unsure at all n locations
tttcttgtagcaaactggatgcattggttaactcggtcacccaactggncttgaatcacaaatctgtacctgtcgcaagggtttgtggtttgtgctcctctgctgaccaccatacagacctttgcccttccatgcagcatcctgcagcaatcgagcagcctgaagcttatgctgcaaatatttacaatatacctcctcaacctcaacatcaaaatcaaccacatcacaacaattatgacctctgcagcaacagatacaaccctgtatggacgaatcaccctaacctcaaatggtccanccctcatcaccaaccacagcagcctcgctctt

SEQ ID NO: 19573 - DNA, 380 bp, Glycine max
  unsure (1)..(380): unsure at all n locations
tgcttctggtgggacatcttgacttgctttccaatctgacattcaccacagattctgccttcttctattttcagattgggaatgcctctaacagcacctttgtcaatgattttcttcatgcctcttaagtgcagatgtccaaatctttgatgccatattctgacttcatcttctttggaggatagacatgtggaggagtagctagtttcttggggtgtccatangtaacaattgtcctttgatctgctgcccttcattagaacttcactcttctcatttgtcaccaagcattctgactttgtgaagtttacattgaacccttcatcacacagctgactgatgctgatcaagtttgccgtcagtcccttcaccagcagtac

SEQ ID NO: 19574 - DNA, 439 bp, Glycine max
  unsure (1)..(439): unsure at all n locations
cttgagcaattcanatggtctgaacttttcacttttagttctgattctggcacatcacatatatagacgctcgaaattgaacaacggaagctctccagatattcaaatggtcataacttttaacttggaggtccgattctggcacataatatatcgagacgcccgaaattgaacaacggaagcacttgagaaaatcaaatggtcattacttttaactcgaaggtccgattcaagcacatcacatatagagacgctcgaaattgaacaacggaagctctcgagatattcaaatgattataacttttaactcggaggtccgattcaggcgcataaaatatagaaactgtcgaaattgaacaatggaagctctcgagcaattcaaatggtcataacttttcattcggaggtctgatactagcgcatgatatatcgagacgct

SEQ ID NO: 19575 - DNA, 382 bp, Glycine max
agctttgtgtagaagaatgatggataatcttgatccaatcaaggataactattttctaaaaaaggcaagaaagagactgagactttctgatgtagttgttttctcaaaatcacatatttgaccctattttctttggtaactcattttctaattactacctaacaaatattttgaaagaaaataactcttaatatacgcgggataggagcaggtaaatccatattaaaaagctgcaaaatttggcaaaggatacatccagatcttatgcgatcgagttctccattgaaaataatcactttccgttcagtgttcaagaccgcctctttataaagttcttccacaacaagtatttctgaaatacaagggagcagtaatcatgata

SEQ ID NO: 19576 - DNA, 419 bp, Glycine max
  unsure (1)..(419): unsure at all n locations
cttaagtcacctgcggcatgcaagctttcattcccccaccattccctccgtattgttttttagtagattttccaccacccttgctcccgtaactccatggttcagacaatgtagaccaagcataaacatcaccaccccagtttgtcttgttattttttaaacaagatgcaccacgcccaccatgccctccaccagctccatcgttgccaacaggtgtgccactattttgggaaggtggagaccctcctaaagatgatgagtctatataagaattgtatcccattgtcagattggctgcaaataaaaccacagagccagaaacaatggatgcatcttgaccaagtctaacgttgccggatacattgactgttatcatacacccttncatgggacataaaagtgacacatcagagagtatc

SEQ ID NO: 19577 - DNA, 382 bp, Glycine max
atattatttgttctaatcggacatcctagtcaaaagttattgtcgtttgaatttgcttacagcttcagctttcaatttcgagcgtcttgatatattacggggctcgatcagacatccgagtaaaaagttattgtcgtttgacttttcttacagctcccgttttaaattacaagcgtctcgatatattagagggctcaatcggacatcccaataaaaagttatcgtcgtttgattttcctaacagcttccgttttcaattacgagcgtctcgatatcctacgggacacaatcggacatccgagttaaaatttattgtcgcttgacttttcttagagctatcgttttcaatgtccagcgtctcgatatattccacggctcaatc

SEQ ID NO: 19578 - DNA, 430 bp, Glycine max
gtatttatgaaacaactttgcttgtaattctttttcttataattttatataacaaggggcatttgaaattatttatttgaggttataaaagtgactaatgaaatttctataagtttttcattgtattggaccttagatgtaacaaaacttttgttttgggtgcctgtcaagtagtaagtaacaatgtagtgtcatatcatcacttagttgacgataaagattcaacaaaagttttgatatatcaagacaataatgtaaccaaaaaatttattgaagacccaaaataaaaaattgtcatttatcatgaatttcacacatatttaatcttttcttttatttacaagagtttcacgttcgaatttattaataagctcttatttaataacattctattgaataggtgcttcattaacttcgttacctcaatatt

SEQ ID NO: 19579 - DNA, 428 bp, Glycine max
tgaatttacaacgttccaattgatttcaaaatgttgttattgattacaatgatttggtaatcgattaccagtatgtttgaacattggaattcaaatttaattgtgaagagtcacatcctttcacaaaaaagctttgtgtaatcgattacactgatttggtaatcaattaccagtgatagtttctgaacaaaatcaaaagatgtaactcttccaatagttttcaagtttttcttaaagtcataacttttccaaatggtttttaagtttttctaaaggttataactcttctaatggtctcttgactagacttgaagagtctataaaatcaaggctctgatttgcattttatttaaaaaatattcattcattctttagacaacaaacttttgccaattgctttctgaatatctttgaactccttcttcttc

SEQ ID NO: 19580 - DNA, 387 bp, Glycine max
  unsure (1)..(387): unsure at all n locations
agcttcaacatcagaccacttccagggtgctggaactacttcacatggatttgatggggcctatgcaagttgaaagccttggaggaaagaggtatgcctatgttgttgtggatgatttctccagatttacctgngtaaactttatcagagagaaatcagaaacctttgaagtattcaaagagttgagtctaagacttcaaagagagaaagactgtgtcatcaagagaatcaggagtgaccatggcagagaatttgaaaacagcaggttcactgaattctgcacatctgaaggcatcactcatgagttctctgcagccattacaccacaacagaatgggatagttgagaggaaaaacaggaccttgcaagaggctgctcgggtcatgc

SEQ ID NO: 19581 - DNA, 392 bp, Glycine max
tcaacattcaatttcgagcgtctcgatatatgacgggttctaatcagacatccgagtaaaaagttattgtcgtttgaattggctcagagcttcaacattcaatttcgagggtctcgatatattgcgggactcaatcagacatccgagtaaaaagttattgtcgtttgaattggctcggagcttcaacattcaatttcaagcgtctcgatatatgacgggactcaatcagacatccgagtaaaaagttattgccgttggaatggcttaaaaggttaacaattaaatttgaaccgcctaaatatattacggaactcattcaaacttccgagtaaaacgttattgtcgttggaattgcctaagaggttcaacattcaatttcgagcgtctcgata

SEQ ID NO: 19582 - DNA, 350 bp, Glycine max
tgcttttgctagttggaatcatttatcctatctccgacagccaatgggtgagtctcgtccagatagtcccgaagaaaaccagcctcaccgtgatcaaaaatgagaaagaggagttgattcctactcgggtgcagaacagttggagagtttgcatcgactataggagactgaaccaggttaccaaaaaggaccattttcccctgccattcattgaccaaatgcttgaatgccttggaggtaaatctcactactgcttccttgatggtttttctggttatatgcaaatcactattgcccctaacgatcaggaaaaaaccacattcacttgccctttcggcacttttgcctat

SEQ ID NO: 19583 - DNA, 430 bp, Glycine max
  unsure (1)..(430): unsure at all n locations
taatgttatatctgactgctgggaagagtgctaagatcttagtgctcangcttatgctcacattcagtgtcaagatgaacaaaggctctctcaacttcagggagttcttcgatccttatctgcaatgattctccaattgcatgtgcttctttcagtggaagatcctccggtagttctatgtccacctgtttatgtccaacatggatacgaatttcaaattagtttatatcaaattccctttaaatttgttaacatcaaatgtgttttatgttaatacatatcacatggagattggttaaagcacatggtcctacatcacataagaagttccttctttattgagaaaaacatgttttaagttcctaaaataggataaattattatataatntgcgaccaanattatatattccgaactagctntacataat

SEQ ID NO: 19584 - DNA, 426 bp, Glycine max
  unsure (1)..(426): unsure at all n locations
tatcctgcaaacatttataatagaccccctcagcagcttaaccaacaacagcagaataattatgatctttcaagcaacagatacaatccaggttggagaaatcatccaaatctgagataggcaagtcctccacaacaacaacagcctgtcccttttttccagaatgctactggtccaagcaagccatatgttcctcctccaatgtagcagcagcaacagcagcagtcacaacaaagacaataagcaactgaggctcctcctcaaccttccttagaagagttagtgaggcaaatgaccatccagaatatgcaatttcagcaagagacaaaagcctccattcagagtctgacaaatcagatggggcagatggctactcagttgaaccaagcttagtccanaaattctgacaaatggccttcacaaact

SEQ ID NO: 19585 - DNA, 222 bp, Glycine max
tttttctggtgggacatcttgacttgctgtggagtgtgacattcaccacatattctgccttcttctatttttatatcgcgaatgcctctaacagcccctttctcaatgattctcttcatgcctcttaagtgcacatgtcccgatctttgacgccatattttgacttcatcctctgtgcacaatacacatgcggaagactgactggccccttcatgcgtccat

SEQ ID NO: 19586 - DNA, 385 bp, Glycine max
agcttctaacgggcatcacttcatcttggttgcgatcgactactttaccaaataggtcgaagccgcctcatactctatcgtcacgaggaatgtggttgctacgttcatcaaaagggagataatctattggtatggatcgcccaggaagattatcacaaacaatggcaccaatctgaataacaaaatgatgaaagaaatgtgcgacgagttcaagatccagcacggcaattccacgccttactagcctaagatgaatggggcagcacaggcggccaacaagaatatcaagaagattatctacaacatgactctgtcatataacgattggcatgaaattcttcctttcatgctgcatggctatcgaacctcggtacacacatcaatc

SEQ ID NO: 19587 - DNA, 433 bp, Glycine max
tcctcgtggcttctttgagaagctttcacaagaggcttctttgagaagctacatccttatctatccacccctctattaactaaattaacttccttaaaaataattacggatgaaaataacgcaacaaataatcaaacatcaaacataattactaataatatatagatatatatatatcagggtgttacaactctcccacccttttagaaatttcatcctcgaaatttaccttactcaaacaaggatgggtgagcttctcgcatctgaatttctaattcccacatggcatcttctcctgatgcacctccccatatcaccttgaccaacgaaatctctttccctcttaggtgttttgttcgccaatcctcgatcctcaaaggcaatatttcatatgtcaaattctccttcacttgtacatcatccaattcaatca

SEQ ID NO: 19588 - DNA, 431 bp, Glycine max
  unsure (1)..(431): unsure at all n locations
taactaanattaaatatattaaaagatttggcatatactatcacttaaacgttgaaattacctccattagtatagttttcgttcaacagaaattaaactagtaatatagtcattatagatctacaatgagttctttggatttttgttttagaatattaggatttaaaaccaactaattaaataacaatcataggtttcatttacaatttatatatgtaaacaaattaattattagatcaaaattaattgtcataaaatttattatataaattcagatgtactttgaatatacataagacattgtagtcttatatatagcgacattaattattttataacataattagcatattagttcggttgattagagcgaatgcaaaagtcacaggttcgattcctgcattacccattaattctagattcacttatga

SEQ ID NO: 19589 - DNA, 434 bp, Glycine max
  unsure (1)..(434): unsure at all n locations
tggatttccttttagtagggaatctatccttcctaagatggagcctaacccaatcaccctcattaagaattagctcttttcttcctctattgcctttagttgagtacaccgttgttcggttctctatttagttcttaaccctctcatgcaacttctttacaaactcttacctagattccccttctttatgtataaaaaaagtgtccagtggaaggggaatgaggtctaacggcgttaggggatggaacccatagacaacctcaaaaggggattgcttggtggttctatgaacccccctgttgtatgaaaattctacatgaggaagatcctcatcccaagacttatggttgcctttcagaagagcccttanaagggtggataaagacctattcactacctttgtttgcccatcagtttgtggatgacaagtggta

SEQ ID NO: 19590 - DNA, 396 bp, Glycine max
tgcccttctgatccgaagaggctgacccttgcggagcccgtcgagagcgaaattgacctcgtcaacgtgctccatcatctctccgaactcctgcgcctccatcagcgtcgacgtcgccggaatcccctccgccggcgcccgcttcgccctcttcgactcccttgctccgcctgcgccggtgccgtttccgaagtcgccgatctccgaatcgaagaaggaccaatgctgcgaggacgagtcctgtgaggagaacgcgaagccgcagagagggtcgtcaatctcctgagataaggaatccctgaatggctccgaaacgtcgtcgtttagagaggacgagcccgaatacgttcccgagagggttcctttgcggcggccgtatgtgcggacgatcatctt

SEQ ID NO: 19591 - DNA, 375 bp, Glycine max
  unsure (1)..(375): unsure at all n locations
agcttatcccaagaggggatggacctttttgatgcaatcctatgccgcaagggcattggatagaagaccccaagtagaatgggccacagatgcaagagaaggccctatggttcttatgagccttanggtagattctgggcccatgggctaagtacgagcccacttatctttgtaaatattagattaaggtttcattatttttgggccttgcatttacggctccataatgtacgtagggtaccctagaaatatangatttttcagcccttgtattttacggcacctagactagtttttgtattacgggtagttttgtaatctcacatgcactaagtggatatttgatgtgtgcggctggaaataaacttaattgaa

SEQ ID NO: 19592 - DNA, 428 bp, Glycine max
ttctccactaagttgcctaatgcctgaaatgtcttctctaatggcaatggtcctagatgcagggaagaatttttccatgaacaccctattaaggtcatcccagctgaaaatagacctgggagcaaggtagtatagccaatcttttaccactcccttcagagaatgaggaaaagcctttagaaagtcatgatcttcttggacatcagggggcttcatggtggaacaaacaatatggaactccttaagatgtttatgaggatcttcacctgcaagagcatgaaacttgggctgcaaatgtattagtccagtcttgagaacatatggaacaccctcatcagaatattgaatgcacaagctttcataagtgaaatcaggtgcagccatctccctaagaatcctctcacgaggtggaggttgatccatgttct

SEQ ID NO: 19593 - DNA, 395 bp, Glycine max
gcctctcgacatattatgcgcccgaatcggacatccgtgttatatgttatgaccattcgaatttctcgagagcttacgatgttcaattccgagcgtatcgacatattatatgcctgaatcggacctccgtgtgaaaagttatgaccattcgaatttcccgagagcttacgttgtgcattttcgagcgtctctacatgtgatgcgccttaatcgaacatccgtgtgaaaagctatgaccatttgaatttctccagagcttccgttgtccaatttcgagcctatcgatatgttatgcgcccgaattggaccttcgtgtgaaaagtcatgaccatttgaatttcactagagcttacgatgtttaatttcgagcgcatccacatattatgcgcctgaat

SEQ ID NO: 19594 - DNA, 428 bp, Glycine max
tgctaacccatggaagctcctaatatctcccacactttttggggtgggccattcttggatggccttgattttctcagggtccacttggaccccatttctaccaactacaaaacctaagaaaactatattatctacacaaaaggtacacttctctatatttgcatagagggtgttcttcctaaggactgaaagaacttgtctgagatgtcctaagtgatcatctacgctcctactatacactaaaatatcatcaaaataaacaactacaaatctacctatgaaatcccttaagacatgatgcataagcctcataaaggtgcttggtgcattagtgagcccaaaaggcatcactagccattcatacaaaccaaacttggtcttgaaagcagttttccactcatcaccctttttcatcctgatttggtgat

SEQ ID NO: 19595 - DNA, 426 bp, Glycine max
tatcaaggagtacgactagatcctcgttgtgaatgctgacaatgtgggatcgaaccagctccaaaacattcacaagggtctctgcaatgactctgtcatcctcatggggaaggaaattcttcttttaggtgcatgataaaaaggtatggagttccaagtgggaaatacaagttttataggtgtgcctagcagtggataaacaaccattgtatcttaatagcagctgctcgaggcatatgataggagacaaatcaaatttcttgcctctaaaagctaaagaaggaggatttgtaacctttggtgacaacaacaaagggagaattctcagatacctctttatgatgatgatgatgtaagaagtcctaaagaatcctctcctacaagtgaaaaggtagtgaacaataacccttttgaagaacacccact

SEQ ID NO: 19596 - DNA, 330 bp, Glycine max
  unsure (1)..(330): unsure at all n locations
atctttttgtattccatatatagacccattaagcgtgcaaaccacatgctccccactatcacacgataaaccttcatgttgtntcatataaacctcctcctctaaatcaccattaagaaaagctgctctcacatcaatttgccgccactcaacgtcaaaatgagcacctactgccaagattatacgactagaatctttcttacatactgcacaaaaagtctctttgtcatctattccttgcttgcgagtcaatcccttagcaacaactcttgccttgtatctcctaatgttgcctaatgaatccttttctggcttaaagacccacttaca

SEQ ID NO: 19597 - DNA, 393 bp, Glycine max
agcttgaaggtatgagacgatgagtggagtgagagggagagaaggagcacgaaattttgtgcctcaaaagaggtctgaactttgaagtgtaattctcaaatgatcaaagttgaaaaaattcacacacatggcctctatttatagcctaagtgtcacacaaaattggagggaaatttgaatttctattcaaatttcacttgaatttgaaattgaatttgtggagccaaattttggagccaaaatttcactaattatgattagtgaatcttagttatggttcagcccactaatccaagatcaagtccaagattgtccactaagtgtgctttggtgtcatgaggcatgtaaagcatgaaggacatgcacaaagtgtgactatatgatgtggcaatg

SEQ ID NO: 19598 - DNA, 337 bp, Glycine max
agcttatgtgtaactactcttgatattttttaggctatgtgtttaaatttttttaaaacaaagtagattcagaaaataattacatttattattattttgattaacttctgaatatggtgtaaatcttatgtgtgtctgacatattaaacaagttaacgtctaatttatttgattagaatatgaatctgtctaaccaaattaagatgtttaataagtaagtttatttaagtattttatacttcatagcttgtaaggcattacttatatatcgcatataggttcgcaactctctttttatacttcttatcattactattttaatacaccttcctcttat

SEQ ID NO: 19599 - DNA, 410 bp, Glycine max
  unsure (1)..(410): unsure at all n locations
tgaggggggttttaaattaatgggtgtgacttatggttattaaatggttatgttcgactcggatgctaaccgatagaacgacatcaatggaagaccgtggatgatgttcgattattatctnatggttcatccatggacttcaaaatttgtggtgacagaagcaacaatagaccaaaccttggcttggatccgttttccaagtctttggatggtctatcatgatgagactgtattactgaccttggcatcaactattgcaacacccatcaaggttgatctaaacatcttgaatatgcataggggaaagttcgtgcgattatgtgcataaattaatctcaatgtccttgtcgtgggagattttgcatcaatggaaatcggtataatatagaatatgacgcgcttcatattct

SEQ ID NO: 19600 - DNA, 381 bp, Glycine max
  unsure (1)..(381): unsure at all n locations
agcttcttgttttttgcattaaacgacaagaaaagatactagtatatgaatacatggctaatggaagcctacactcctttatttttggtacgtaatatgaagaatgctttcataattcgattaagtggacttgcatgtttgcttgtttggtttgctttttaattccagtcacaattagcggctctttaatcttgaatatcttatattgaatgaatagcttgctttgtcaaatcacagataaaataaagggtaaatttctggattggcctcgacgcttncacataatatttggaataactcgaggacttctgtatcttcatcaagattctcgattaacgattatccatagagatctcaaagcaagtaacgttttacttgatg

SEQ ID NO: 19601 - DNA, 436 bp, Glycine max
tgccttgccccttgatatatttgagggactcatggtcactatgaatgacaaattccttgggataaaggtagtgttgccatgttttcaaagcccgtactaaggcatacaactccttatcataagttgaatagttaagggtaggaccacttaacttttcactaaaataagcaattggatggccttcttgcatcaacacagccccaatcccaacatttgaagcatcacactcaatttcaaaagatttttgaaagtttggcaacgcaagtatgggggcattagttagcttttgcttaagaacattgaaagcttcttcttgtttctctccccatttgaaaccaacatttttcttgagcacttcattgagaggtgctgccaatgtgctaaaatccttcacaaatcgtctataaaaacttgctaagccatgacaactcctcac

SEQ ID NO: 19602 - DNA, 423 bp, Glycine max
  unsure (1)..(423): unsure at all n locations
ctgttgcgaaggtgcccaaaccgtaactttgatgatgctgcacaactgcatatcttttatagtggttcgaaacctcaaaccaagatgatccttgatgcctcagctggaggcactatgatgtccaagagttcggaggaagctattaatgtaatctccattggagcttgtaggactaggatattcttcatcaatggattcctttgcttcttggaagatgaatgtcagcggaatggagaaggaagagagagaggagacgccacttcaaggagaagatgagtctagaagaagctcaccaccataagaggccatggataacagcgtggaggaagaacgagatgaatgaagggagagggagagaagagcacgatattttgcgctcataaagagctctgaaatctgaagtttaatattcanatgatcaaa

SEQ ID NO: 19603 - DNA, 431 bp, Glycine max
  unsure (1)..(431): unsure at all n locations
tctgaaggctcaagatacaatgaaaaagtatgttgtctttctttgtagggatgtggcctatcaacccaatgattgggtcctggtgaaactcaaaccccaccgataattaactgccaaaggacctggaacaagttcgggtaaacaggacaagctgttttatggctcattcagagtgatagaacgcattggggcggcggcttatcggctccagttaccagacggtgctaagatacattcagtcttccattgctctctgcttaagccattcaagggttcaccaacacaatctgaaattgcatccttaccagcacaattcattaatggacaacctatgatttctcctctcgctatcctcaatgatcataaggttccaggatcaacaccagactcctgngaagttctcgttcaatggcaaggtatgtcaccagata

SEQ ID NO: 19604 - DNA, 433 bp, Glycine max
  unsure (1)..(433): unsure at all n locations
tctatagaaggttcgttcctaatttctctacaattgcattacctctcaatgagctggtgaagaagaatgtggcatttacctgnggtgaaaaacaagatcaagcctttgctttgctcaaagaaaagcttactaaggcacctgttctagctcttcctgacttttctaaaacttttgagctagaatttgatgcctctagagtgggagttggagctgtattgttacaaggtgggcaccctattgcttattttagcgaaaaacttcatagtgccacccttaactaccccacctatgataaagaactttatgccttaataagagccctccaaacttgggaacattaccttgtttccaaggaatttgtcattcatagtgatcatcaatcactaaagtacattagagggcaaagcaagttaaacaagaggcatgcaaaatg

SEQ ID NO: 19605 - DNA, 393 bp, Glycine max
  unsure (1)..(393): unsure at all n locations
agcttgtaatcgattacacaaggcttgcaatcgattaccagaagtttttgaacgctctaaaacagcctttagaaatttgaatttaaattttaaagtctgtaatcgattacagaatgtatgtaatcgattaccagagttaaaattcaaatttcaaatgtgaagagtcacaactctgcagaaaacaattgtgtaattgattacaccattttggtagtcgattaccattgaagaattttttaaaataactcccaatagtcacatcttttcaaatgattttgaatggccatcaaaggcctatatatacgtgacttgcgacatgaattttctgagagttcttctgaactganatgtcttatcctctacaaaagattcctcgtctaacacttgatattc

SEQ ID NO: 19606 - DNA, 373 bp, Glycine max
ttcaaaatatggctgcagcttttggcttttccaaacttgcaggtactactatatttattgtattctagtgtcaagaatctcataattaaatattttctcatcttatgccacatatataactaatggggatggtcatttgtatttggtaataagactcaacaggtgtggcaaaagttgtaggttaaggtggacgaactacttgaggcctgatattaaaagagggaaattttcccaagaagaagaacaaacaattctggatctccatgctgtccttggaaacaagtaaatattcaacaccactatagcacctactatttaatgtgttttgatgttaattatatccttaattaaaagactgctcattattatggat

SEQ ID NO: 19607 - DNA, 435 bp, Glycine max
tgcagcacactagcaaacgtagaattatttggaacattagatgtttgcctcattcgacaaaacaactccaaagcctccctacttttatcactctgagcataccgcgctatcatgagactccaaggaataagatcatctttcggcatttcttcaaaaaactgctgcgtctcagcaatctctccagacttggttaacaattcaagcagcacagtgccaacataaagatccctatcataacacgctttcaaagcacatccatgaacacttttcccaacctcaaaattgttcggtctaaaccccataaccctcatctggcagaaaagtagcaacgaatcttcatggcagtaattctcagcatagcaagccatcatcccagtccaagataccatgcccttacaacaaatcccatcataaacttggcacgcagcgataaca

SEQ ID NO: 19608 - DNA, 434 bp, Glycine max
  unsure (1)..(434): unsure at all n locations
agcttgaagtgatctctattctgatgtgtgtggtccttttgaagtgaaatctctaggaggtaacagttactttatgtcattcattgatgaatttactagaaaaatgtggacctatctcattaagcagaaaagtgaagtgtttaacatttttaagaagtttaagctgtcgagtgaaaaacaaagtgtagatgcaattggctttgatgttttgatgatgatcatgatgatgtgttgcaattgatgcaaatgggcttttcaagattaaaattcaagacaatacttcaagattacaaggcacaacatcaagatgatcactagaatattangaagggaattcctaattgaattagcaaaggtttggccaagtgatttacaataaaaagtgtttttcacagcttttactctctggtaatcgattaccagacgatgtaatc

SEQ ID NO: 19609 - DNA, 440 bp, Glycine max
  unsure (1)..(440): unsure at all n locations
agtttcttattcaaggcacattcttggtggcgaagctccttcttccatggcttattccctagtggatggtgcctcttctcacctcttttcctttgtcttccgctgaatctccatggtgaaaaatcaccattgaatgaagctcaaagatccagcctccatagaagcttcacaagcaagcttccatcactttctctccctctccctccactcatcttctcctaccttcaagctcttacccatggcttcctatgttggtgagctntttcttgactcatcttttccttgaagtggcgtctccaatcatctttcttccatctccattctgctaccgttaaacttcaagaagcaagggactccattgatgaagatgatccaaggcctatatgctccacattgagttacattacgaaatatacttgtttgacaatgtagacaattac

SEQ ID NO: 19610 - DNA, 396 bp, Glycine max
  unsure (1)..(396): unsure at all n locations
agcttctggaaggagttctactagatgttctatgcctcttgaaggtggtagtccatgaggaatctccataggaaagacatttttaaattcctgcaataagggttgaacactaggagaaatagaaatagtaaactcattagaattatgagtagaaattttactgtctttgcaatactgtagattgagtggttcatgagcaggtaacattttcctcacttcactcgcctctgcaaaataattaacttttctctcatgtgtatcactctcttcctcgggtgtatcactctttctcatattcctttgtggcgcctcactattttctttctcttgatctctctcttctctcattctgatttgagcatcacacacttctctaggngatagatgtttaagagt

SEQ ID NO: 19611 - DNA, 426 bp, Glycine max
tcagaattcaatttcgagcgtctcaatagattacggttactcaatcagacattcgagcaaaacattattgtcgtttgaattagctcagagcttcagaattcaatttcgatcgtctcgatatattacgggtctcaatcagacatctgagtaaaaaagttattatcgttcgaatttgctgagagcttcaacattcaatttcgagcgtctcgatgttttatgggacttaatcagacatccgagtaaaaagttattgccgtttgaatttgctgagagcttcaacattcaatttcgagcatctcgatatattacgggactcaatcagacatccgagtaaaaagttatcgtcgtttgaatttggtcagagcttcaacattcaatttggagcgtatacatatattacgggactcaatcagacatccgagtaaa

SEQ ID NO: 19612 - DNA, 283 bp, Glycine max
tccgaacccggaacataagatagcgcgacgctcgatatagtacaacggacgtgctcaagaaattccaaaggtcataacttttcactgagaggtccaaatatgcaacataatacatcgagaccctcgaaattgaacaacggaagctctccagaaaaacgaatggtcataactctgcacttggatgttagaatttggaacataatatatcgagacactcgtaatagatcaacggacgctctcagaaattcaaatggtcataacttctcccacggatgtctgaatc

SEQ ID NO: 19613 - DNA, 432 bp, Glycine max
  unsure (1)..(432): unsure at all n locations
agcttgcttttgcagtaaagcatgaaagacatgcacaaagtgtgactatatgatgtggcaatagggtgtagtaagcaaatgctcacctccccctctaaaatttaattggattgggcttctaccaattcaattaaatttatttcccaacacacatatcaaatattcacttagtgcatgtgaaattacaaaactacccttaatacaaaaactagtctatgtgccctaaaatacaagagctgaaaaatcctatatttctagggtaccctacctacattatggagccctaaatacaaggaccaaatataatgacatcctagtctaatatgtataaagataattggactcaaccttggcctgtgggctcagacatctaccctgaggatcatgagaaccctanggtcttcttcaccagctatagcccaatcctcttgg

SEQ ID NO: 19614 - DNA, 423 bp, Glycine max
tatcataatcgattacatagttgtttttgtgacaattattgatttatttaggagtctctgttttaattgattaccatgtcatataatcgattacttttctttttataagtgtttcagaagtaaacaagaacactttaatcgatttctttgagtatctaatcgattacattgttcttgagttgtttctagttttttggaagaacactacaattgattgaaagataatataatcaattacttcattgaattaattaattaccttgtagatttaattgattacaggcggttataactgttttctctataaataaccacattgtgttctctctaataacataacattttgagcttctgaaagagctatgatcacgtgttgttattagttaaagaaagaagagaagaaaagtgcttagtcataacttc

SEQ ID NO: 19615 - DNA, 433 bp, Glycine max
  unsure (1)..(433): unsure at all n locations
agtttgtataaaattgaaacgacaaaaatttttatctaagatttccgaataaattccgtagtatatcgagacgctcgaaattcaaaataaacctctcagcaaaatgaaacgacaataactttttactcgaatgtccgaatgaatcccgtaatatatcgagacgctcgtaactgaaaacagaagctctgagcaaattcaaaagataataactttttactcgtacgtccgattgtttcctgtagtatatcgagaccctcgtaattgaaaccagaagcccgtagcaaactcaaacggcaataaatttttactcggatgcccgaatgaatcccataatatatcgaggcgatcgtaattganaacagaagctatgagcaaattcaaacgacaataactntntactcggatgtccgaatgaataccatntaaatcggat

SEQ ID NO: 19616 - DNA, 429 bp, Glycine max
tctggtatcaattacgagcgtctcgatatactactgttacataatcggacatccgagtaaaaagttattatcgtttgattaggctaagagcttgtgttttgaatttcgagcgtcttgatatattacaggactcaatcagaaatccgatttaaatggtattcattcggacatccgagtaaaaagttattgtcgtttgaatttgctcatagcttctgttttcaattacgatcgcctcgatatattatgggattcattcgggcatccgagtaaaaatttattgccgtttgagtttgctacgggcttctggtttcaattacgagggtctcgatatactacaggaaacaatcggacgtacgagtaacaagttattatcttttgaagttgctcagagcttctgttctcagttacgagcgtctcgatatattacgg

SEQ ID NO: 19617 - DNA, 438 bp, Glycine max
  unsure (1)..(438): unsure at all n locations
agtttgtcattgaattattngattncaggccagggataatttccattaacttggaccttaagaggggtgcaagtggcaggttcttgaagactgctgcttatggccactttggaagagatgacccagacttcacatgggaggtggtcaagcctctaaagtgggaataatgccatgaataaagctgattgccaagaaactatgtttgatcttatatgctttcatacctaagatccgtgatatgattttgccttagcttttgtatctttataaataaataaaacatatatatgtcgagttgagtatatgaacatacaaaggaagctgcatagcagcatcaatgtactattggaagttaatgtttgagatatatccgttacgatcgctatccattatccattatgtttcctctcaattgctgagagtcttagagaatcttga

SEQ ID NO: 19618 - DNA, 363 bp, Glycine max
gggagggcgacgcgagactcacgggtgcgtcttccaagaaaggaaaatgcatggagtcgccaccaacgtttatttggggaaaacatccgaaaaaccgaaaaagacgtggtctacaaactttaagtgtgaggctcgagagttgtatttacgcacggggaaggtattatcacctgttagacaagtggcctcagatatcttaagaagggggggttgaattaagatattccaaactgtttcccctaattaaaaatctattttattttttactcaagttataaattcccttaatgacaatcttcttaaatattaattcaaatgaagcaacttgaatatgattatatagcaataatatatataggagat

SEQ ID NO: 19619 - DNA, 436 bp, Glycine max
agtttgcttttgatcatgggtcagacgaataaggggctgaagatcaactcgtagtggctcacgacctaactcctatagtggtgaaagaaacctctgtctcacactatcacaggaaaacggttgacatttcaccacaagacgagaatttggaattgcacatagtatctttgcccagacctgcagtaccttgggtcgtaatctgaataaataaaacaacatgaatcacgggatacacgacttacctcttacaattaggtattcataatctaaaatacaagtacgtgatatatttaacaatattactacccttggcaagattgttggaactaccaattgcaacgaagccattggtaagagcatgagctggacaaactcgaccagcctcacgggattgagtgtaaccaaggaagcattccggttatcgaactatctcttc

SEQ ID NO: 19620 - DNA, 411 bp, Glycine max
  unsure (1)..(411): unsure at all n locations
tttcaagtttgctaacccatggaagctcctaatatctcccacactttttggggtgggccattcttggatggccttgattttctcaggatccacttggaccccatttctaccaactacaaaacctaagaaaactatattatctacacaaaaggtacacttctctatatttgcatagagggtgtttttcctaaggactgaaagaacttgtctgagatgtcctaagtgatcatctaggctcctactatacactaaaatatcatcaaaataaacaactacaaatctacctatgaaatcccttaagacatgattcataagcctcataaaggtgcttggtgcattagtgagcccannaggcatcactagccattcatacaaaccaaacttggtcttgaaagcagttntccactcatc

SEQ ID NO: 19621 - DNA, 433 bp, Glycine max
  unsure (1)..(433): unsure at all n locations
ntcatatcacttggatgcttcattgcttcaaataagtcgaatgatactttctgatcctccacacccaattctaacttgcctttccccatatctactatatagttggccatgaaatttgtagggtcctcctctatatccataaccacgaaatctgcaggaaatacaagctgcttgacttgaataaacacatcctcaatcactccatacggtctagtaatggagcgatcagccaactggagggttatacatgtgggcattatctctatctctccaagtcgccagcacatggatagaggcattaaattgatactagctcccaagtctatgagagctntacctacaacaacctcaccaatagaacacggtatagtgacacttccgggatcattatgcttcggnggaaggatgcgttgaatgactgtactacagttac

SEQ ID NO: 19622 - DNA, 434 bp, Glycine max
  unsure (1)..(434): unsure at all n locations
agcttatgtgaattcgtagttttataagcaaagagtaaaaatttatcataataaaaagctttcaaaaagaattttcagcctagccaacaggtattgttatttaattccaaattaagattgttttcaggtaagctaaaatccaagtggtctggaacattcagcatcaaagaagttatgctacatggagcaatgataattggaggatccagccaccaaaagaacatgcatcgtgaatggcagtagaatcaaaccctacttangtcgtgatttcaagaggttgaccactgttgtccaactacaagaggctngaaccacaacaaggatgtccagcttanacgatgttaaataagcgctcttgggaggcaatctagtatttttcaactcttcttttaatattnnntttctgattacgtaattgtgttgtgtaatatcta

SEQ ID NO: 19623 - DNA, 422 bp, Glycine max
ttaggaggaagcaggacatggacgtcagtttaccgtttagcttctgcacttcctaaacattggtaggattgtgaatcactagtatgtttgtgcatttgtcggggttggcttctattccctgatgtctaatcatgaaccccaagaactttccaccgcctaccccaaaagtgcatttttccaggttgaggcgcatgacgtacttatggatttctctgaacacctcttctaagtatgccacgtgttaggctatgctttgagacttgacaatcatgtcctcaacctagaccttgagattttttctgatatgttgtttgaagatccggtctatcagtctttagtatggggtgcctacatttttcaggccaaagggcatgaccctatagcagaagttagcatccacaggtatgaatgtcattttctct

SEQ ID NO: 19624 - DNA, 427 bp, Glycine max
  unsure (1)..(427): unsure at all n locations
ntaacataaagaacaaaagactggcctctgcacgaatattatacattgagcaaacaacactgatctcaaatcggtgataaaattctaattaatcgcaattggaagcttcataacatttaatttggataagattttatatgtaattattatttactttgtcaaataacaaacttaatgtaacaatcttatcattagatagtcattgagaagtgaatagaatgaaatgcatcttatttggttatttaatttcacctttttcaataactaaaatatgtataatgttttctaactcccgttctatctttaaaatgtatcctactcgaactagttccctgggcatttattatatgggtatttacaagtttaaataaattttaaaaataagaattatatgaaaatatcattattgttcaataataaatatcat

SEQ ID NO: 19625 - DNA, 433 bp, Glycine max
tctgcttatgctgcaaatatttacaatagacctactcaacctcagcagcacaatgaaccacagtagagcaattatgacctttccagcaacagagacaaccctggatggaggaatcaccctaacctcagatggtctagccctcatgaacaacaacaacagcctgctccttacttccaaaatgctgctggcccaagcagaccatacattcctccaccaatccaacaacagcaacaaccccagaaacagccaatagttgaggcccttccacaaccttccctcgaagaacttgtgaggcgaatgactatgcagaacatgcagcttcagcaagagaccatagcctccattcacagcttaaccaatcagatgggacaattggctacccaattgaatcaacgacagtcccagaattctgactagctgccttctcaagctg

SEQ ID NO: 19626 - DNA, 419 bp, Glycine max
tgtcttcaacaaacaaatcaaaatcaattttctgattttcaaaacctagctccagcttccttttccccatatcaactatgcagcttgcggtcaacatgaatttccttcccaatattatagggatgtcaatatcttcagagacatccattaccataaagtctaccgggaagataaaatattttactctgaccaaaacatcttcaattactccatatgacctggtaatggagcggtcaactaattgtaaagtcattcaagtggggcatttccaactctcccaatcttctgcacatggagagtggcatcaaattgatactggctcccaggtcaataagagcttttcctacattgacttctccaattgaacaaggaatcgttacactcccaggatctttatgcttgggtggaaggatcttcta

SEQ ID NO: 19627 - DNA, 429 bp, Glycine max
  unsure (1)..(429): unsure at all n locations
tttctttgtgggttgatgagttctgtcttgcagaatgtcgtgatcactggctgacatattctcaattagcttagttgcttcttccggggtcttcaactttattttttcccctgcagaagcatctagtagttgtgtggtttgtggtctcaacccatctatgaacatattcaattggattggctctgaaaacccatgggtgggagttcttctcaataaacctctgaacctctccaatgcttcactcaaagattcatcagggaactgatgaaatgaagatattgcagctttcccttccacagtcttggactctggcaagtatttctttaggaactnttcaacaacctcttcccaggtttttagactgttacccttagaggagtgaagccacctcttggcctctcctgccaatgagaatgagaataggccgag

SEQ ID NO: 19628 - DNA, 418 bp, Glycine max
ttctttgagttgcctaatcttctttttgttggcacttgctatgaggatgtcatccacatacaagagaagataaagaacacacattttcccctttttcaggatatatacacagttgtcatatttgtttctaatgaagccatatctgatcaagaactcatcaaatttcaggtaccacattcgaggactttgcttcagtccatacaaatattttttcagcaagcacaccttgttctccccttcttcaaaaccttctggctggttcatgtaaatggtttcctttagatttccatggagaaaagctgtttaacatccagctgttcaagttccaaatcatactgatttaccagaccaagtatgattctaaatgagcaatgcttcacaactggtgaaaaaatctcattgaatcaatccttcacct

SEQ ID NO: 19629 - DNA, 435 bp, Glycine max
agtcttcaacgttcattttcgagcgtctcgataagttacgggactcaatcagacatccgagaaaaaagttattgtcgtttgaattagctcagaagttcaacattcaatttcgagcgtctcgatatgttacgggactcaatcagacatccgagtaaaaagtcattgtcgtttgtattggctcagagcttcaacattcaatttcgagcgtctcgatatattacgagcctcaatcaaacatccgagtaaaaatttatggtcgtttgtattggctccgagcttcaacgttcattttcgagcgtctcgataagttacgggactcaatcagacatccgagaaaaaagttattgtcgtttgcattagctcagaagttcaacattcaatttcgagcgtctcgatatgttacgggactcaatcagacatccgagttaaaagtta

SEQ ID NO: 19630 - DNA, 430 bp, Glycine max
  unsure (1)..(430): unsure at all n locations
ttcagccaattcacccgacaataactttttactcggatgtctgattgagtcccgtaatataacgagacgctcgaaattgaatgttgaagctctgaactagttcaaacgacaataactttttactcggatgtctgattgagtcccgtaatatatggatacgctcgaaattgaatgttgaatctcaaagccaattcaaacgacaataactttttactcggatgtctgattgagtcccgtaatataacgagacgctcgaaattgaatattgaagctctgaactagttcaaacgacaataactttttactcggatgtctgattgagtcccgtaatatatcaagacgctcgaaattgaatgttgaccctctgagcatattcaaacgacaataactttnttctcggatgtttgattgagtcccgtaatatatcgag

SEQ ID NO: 19631 - DNA, 415 bp, Glycine max
taagggtccttagtggcataatcacacattatattttgtacctctaaaaatatcatatgatataagaatcaaacttatataatttcctaccaactaaacatgtgatgattaaagcctatgaataatattttaatttctttattagataataataataataataaatatccttgaatacatcgtctcgaagttgcatacatacgtagccacaaataaatgttacatatgtaaattatatcacagtaattctaaagaataaataatctttttaaaaggacaattttgatatattcatatatctttaagtagatataatttttaaaacataagatgattataggtattttgctagatatcatatagagataatgatatattaaagttgatgtaacatatccttgcctaagtgatcact

SEQ ID NO: 19632 - DNA, 351 bp, Glycine max
tttcaagcttgccttgccccttgatatattcgagggactcatggtcactatgaatgacaaattccttgggataaaggtagtgttgccatgttttcaaagcccgcactaaggcatacaactccttatcataagttgaatagttaagggtaggaccacttaacttttcactaaaataagcaattggatggccttcttgcatcaacacagccccaatcccaacatttgaagcatcacactcaatttcaaaagatttttgacaagttggcaacgcaagtatgggggcattagttagcttttgcttaagaacattgaaagcttcttcttgtttctctccccatgtgaaaccaacat

SEQ ID NO: 19633 - DNA, 431 bp, Glycine max
  unsure (1)..(431): unsure at all n locations
ntagctttgtccccaaggcttcatgtagacttgtcctttatcgttaagngaacctcggatccctatctaatacaatactagaaggaattccatgcaaccttactactcccttgatgtacaactccactagcttctacattctatacttcatattcaccggaataaaatgagcagatttggtgagtcgatctactatgacccacacaacatcatgtccacgactagtcttgggtaaactagatacaaaatccatagatatgctctcccatttccattccggaatttccaatggcttcaattctcctgatggtcgctggtgctcagccttagccttttgacatgtcaaacatcttgctacatattcagctacatctttcttcatgcccatgccaccaaaacttctcttcaaatcttggtacatcttagtcatt

SEQ ID NO: 19634 - DNA, 327 bp, Glycine max
gaatctgtacttcctaagagggagcgccacccactccacgtcattacaaactacctcatttcttcctctatagcccttagccgaatacaccttcgatagggtctctatttgacgcttaaccctctcatgcaacttgtttacaaactctgacctacattacccttctttatgtataaaataagtgtcgagtgggaggggaatgatgtctacaggcgactagggattgaacccatagacaacctcaacacgagatagcttgatggttctatgaacccccctatatgaggcgaagtgtacatgacgaagatactcatcccaagacttatg

SEQ ID NO: 19635 - DNA, 430 bp, Glycine max
  unsure (1)..(430): unsure at all n locations
gcttgagacattcattcataggggactgagaagagagggtttgttcttattcaaggtcggatgatgaagaggcagttcggctttgtaaagacagaaagaagttcatcagacaagctgttgaacatagaactcaatttgccacgggacacatagcatacatagaatctcttaaaagggtttcagctgcacttcgcaattacattgaaggcgatgagcctcgcgagttctcattagacacagtcatcaccccacctttcacgcctgtgaagaggaaaactggctcaggattcattcccatatcagcanaaccctttgctacaacaggagcaattgagtttgggatctgaccaaactctactttgaaagtgaattaccttaggcctggtggtaacccagcaatttcagttgaggaaaggcctcaatccccgga

SEQ ID NO: 19636 - DNA, 423 bp, Glycine max
  unsure (1)..(423): unsure at all n locations
tgtcacttatagtngatgcttatgtcatctcttcatttgatatgcaaacaggtggcttttacttatgaagatggacgccctgtagaaggtatgggtgtagggagaaagataatagatagggtgcaggagacatatcattctgacttaaatggtaaggactttgcatatgatggggagaaaagtctgtttactgttggctctcttcctcaaaacaagcttgagtttgaagttgttcttgaggatgtcacctctaacacgtagaagtaattagagagcatttagttgttgttttggctcttcaaattggttttcgtactattgtttcaatagcctatgatttattttttgtcttctatgaataatggcaattgcagccctgatggtctatgggacaatgagagtgactcaaagaggatgcgaccc

SEQ ID NO: 19637 - DNA, 352 bp, Glycine max
  unsure (1)..(352): unsure at all n locations
agcttcgttattcagctctagtgctggaccttgccgtgactttttgcttcctggaccaccatgatatcaagtttgagccaagaaagatagctgctcctgatgtggaacgtctttcatcaatatctgatgcccaatcaacatcatagaaagcatagagtgccatacgttgtgaaacagaagcagggcgaaggaataaaccatgacaaatagtacccttgagatatcttaatatccttttgaccacaacgcaatgagaatccaatgaattagccatatactgacaaaccttattaacatcatacctaatctcacgtctagtatgggtagcatactggagggcacncactactga

SEQ ID NO: 19638 - DNA, 423 bp, Glycine max
taacaccgatgactatcccaacatagctactgagtatggaatcagaagcatatcaactgttttgttcttcaaaaatggagaaaagaaagaaagcgtagttggtgcagttcccaagtccactttgtccgcaacagtggagaaatatgttgatgtataaactggaaaggaagaaaatgctataacaaggaacgcttgatcataaattatggaccatcttgcttttaatggttttcaacacttcaaaaagtactttgtatccacatcttttacaacatttgttaaagattacattgtataaattccctcttctcttctctgctgttccttctgccatacattacagttcacttcgccaaattctcatgccaagttaatttggcaccattactccaggtttgggagtaaactgaaatttcaatgtct

SEQ ID NO: 19639 - DNA, 426 bp, Glycine max
tgaaggtgtgtagcccaccatcttttcatagtagaattctggttatgtgtctactatcattgtcatcattttttttctccgtcattgaggtgccacttgagctgccaggtctctccacctttgggcgtatttttttgaaagatctgtgccccctttttgcacatgttttgtagttgcatcctatccgaagacattatactaacactgcctaacgaaggcaaccactaggtccttccaagaatggactcgggaaggttccaagttagtgtaccaggtaacagctaccctagtaagactttcttggaaggaatgtatcaacaattcctcatcttttgcgtatgcccccatcttccgataatacatctttagatggttcttggggcaagtagtccccttgtacttgtcaaagtccagcaccttgaactt

SEQ ID NO: 19640 - DNA, 439 bp, Glycine max
  unsure (1)..(439): unsure at all n locations
taagaataacatnntttttaatttggtttgattggaataatattttattatatatatatgtgcaatataaaaatagaaaaaaataaaaaagtataaactacgtacaaaaataaatgtaccacagaaatcatatactttaaaatgtttaatattcatttatattacatcaattttttttaaaaaactaacaactaaattgaccgaaaattacatcaattaacataattggagtgtgaatgtgtacaaaatgaattaattgtaattagataatataaattattcaaatataaaatgcttcatataaattcgtgtatcattatttttaggttttcatagttctaagtgtttttactatttaaaattattcatcattttcaccttatttttgtttactaattaatatgtttatattatatatttcactcatcatttttaattg

SEQ ID NO: 19641 - DNA, 416 bp, Glycine max
  unsure (1)..(416): unsure at all n locations
agtttatttattttataataagagaacaatgacaattgaagagttgattcatgtttactttgatgagtctaatgttttttctccaagaaaggatattttagatgatattgcagaatctttagaacaaatgcacattcatagacaagattctaaaggaaaaagagaaggaagcaatgaagatcctccagtagatgtcaaagcaaataatgatcttccaagagaatggaaagcttanggagatcatccccttgacaacattattggtgatacctcanaaggggtaacaactagacactctctcaaatatttatccaataacatggcttttgtatctacgatcgaacctaanaatctanatgaagccataatagatgcaaatgggataatagctatgcaagaagaaactataccaattg

SEQ ID NO: 19642 - DNA, 434 bp, Glycine max
agtttatttataaacaaaccctaaaccctaatttgtcaaatacccattaaacctcaatcagtcaagtaatcctaaacctttgtctttcaaatacccctaaaccataacaaccaaagtaaccctaaagtctaatttatcaaataaccataaaccctaattagttaagtacacataaaccctaattagtcaaatacacataaaccccaatttgtcaagtaaacctaattagttaaacacccataaaccccaatttttcatgtatcccatgaatcctaaattttcaaatacccctaaatagtgattaatcaagtaactctaaattgtctcataatcctaaaccctaattggtcaagtaacactaaagcttaaattttcacatacccataaaccctaattaagtcaaataaccctaaacctaattggtcaagtaacac

SEQ ID NO: 19643 - DNA, 420 bp, Glycine max
taaactaaattttagggcatgttaggcccatgctattgtgcaacacttgggcaacacttgagaatcccaatagcaagctattgtgttggactcttcccttcaaaaaagtaatttaatatcatgtgaatcattgacccacatatcagatattaatctgataagaacagatactacactcgatcttagccaaaaggccgagaaaggcatgagttgcaatgtcttgagaggctctctttataccgaaacatcaagtcattgttatcttttctaagcgatgtaggatttcaatcacagtttaacattggacattgatatatttcatgctcgttggtgcaaacaagggtgattttgatgaatgcattgaattaaaaagaaatcatgtcgagtggttgtgagacggcatgttcttgttctgtgttg

SEQ ID NO: 19644 - DNA, 408 bp, Glycine max
tcttagtttcagatgatgcacatgagtttgtagctacctcatgcactcctctaatgactatagcatcatttttggcgctaaactgttgggagttggaagccatcttctcaattaaattcctggcttcagcaggggtcatgtctccaagggctccaccactggcagcatctatcatacttctctccatgttattgagtccttcataaaaatattggagaagaagctgctcacaaatctggtggtgaaggcaactggtgcataattttttaaatctctcccaatattcatataggctttctccactgagttgcctaatgcctaaaatatcctttctgatggccgtggtcctagaagcacggaaaagtttttctaagaatactctcttgaggcatcccagctcgtgatgga

SEQ ID NO: 19645 - DNA, 430 bp, Glycine max
tgtaatcgattacacatatactgtaatcgattaccagagcagattttcagaaaatattctcaacagtcacatcttttatgtggttcttgaatggctatcaaaggcctatatatatgtgacttaagacacgaatttgctaagagtttttcagaacaaaaaggtcttatcctcttaaaaagcaaatcgttttatcctcttacaaattccttggccaaattacttgtgattcaataaggaattatttgagtactcaaattgttcaatctatctctttcaagagagatttcttcttctcttcttcttcattctgaaaagggattaagagaccgagggtctcttgttgtgaaagaattctaaacacaaaggaagggttgtccttgtgtgtttagaacttgtaaaaggaatttacaagatagtggaactctcaagc

SEQ ID NO: 19646 - DNA, 441 bp, Glycine max
  unsure (1)..(441): unsure at all n locations
agcttcaacatcagaccacttccagggtgctggaactacttcacatggacttgatggggcctatgcaagttgaaagccttggaggaaagaggtatgcctatgttgttgtggatgatttctccagatttacctgngtcaactttatcagagagaaatcagacacctttgaagtattcaaagagttgagtctaagacttcaaagagaaaaagactgtgtcatcaagagaattaggagtgaccatggcagagagtttgaaaacagcaagtttactgaattctgcacatctgaaggcatcactcatgagttctctgcagccattacaccacaacaaaatggcatagttganaggaaaaataggactttgcangaagctgctanggtcatgcttcatgccanagaacttccctataatctctgggctgaagccatgaacacagcat

SEQ ID NO: 19647 - DNA, 405 bp, Glycine max
tgtaggccttggatcttcttcatcaatggagtcctttgcttcttgaagatcaatggcagcagaatggagaaggaggaaagctgattggagacgccacttcaaggagaagatgagtcaagaacaagctcacaaccataggaagccatggataagagctttaaggtagaagatgagtggagggagaaggagagaaggaacacaaaattttatgtcccaaatgaggtcagaactttgaagtgtaattcccaaatgatcaaagttgaaaaactacacacataagacctctatttatagcttaagtgtcacacaaaattggagggaaatttgaattctattcaaatttcacttgaatttgaatttgaatttgtggagccaaatttggagccaaaatttcactaattatga

SEQ ID NO: 19648 - DNA, 395 bp, Glycine max
  unsure (1)..(395): unsure at all n locations
tattattgtttggagtttaaaacctgaaactcatgagaggtagtaagagaagaggaagcatgcgatgatcatgatgatgggccttaccgtgggccttggactcatcgtgggccccaccaacggagtacctcgcgtaacacttcccgagaaacatgtcaccgtaatccgctgtgccgcaatcgctcttcaggcgcgagatcgcctccgccacgcagtcctggcactccccgtagctcaagtcgccggtgcactgcgccacgccgtgtaccccaccggacccaccgacgcgaaagttcccaccggcggcggcgagtccggcgagcacggcgtcgcggctccccatggcgtcggngttgtacccgaccgacggcccgcacttcttcagcaccaccgtc

SEQ ID NO: 19649 - DNA, 416 bp, Glycine max
tcagcttgagggtagtgttgaaaatcagaattaatattctgattctattaataattgtaatttatagggacattatatttgatttagaggaaacaaaatatcctctatttatgtaccactaatgtaattatcctatataaacaagcatttgttgtgtactctgatacacggttttcactctagtatccctctttattttctctcattttacagatatgatttgatcacgataaatagggaaatttctcagctgataattaaggattatacacattattagtggttatgattccttatattgtactcttgattcattataaatcagaataacatgtgcaacacaactacataattacagtaaataacattgttatattgagtaatattctgagtgctgaccacaactacataagtgc

SEQ ID NO: 19650 - DNA, 362 bp, Glycine max
tgaatcggacctcagtgtgaaaagttatgaccatttgaatttctcgagagctttcgttgttcaatgtcgagcatctcgacatattatgcgctcgaatcagacatccgtgtgaaaagttatgaccatttgaatttctcgagagcttccgatgtttaatttcgagcctctcgacatattatgcgcccgaatcggacatccgtgtgaaaagttatgaacatttgaatttctcgagagcttccgatgttgaatttcgagcctctcgacatattatgcgcccgaatcggacatccgtgtgaaaagttatgaccatttgaatttctcgagagcttccgatgtttaatttcgagcgactcgatatatta

SEQ ID NO: 19651 - DNA, 438 bp, Glycine max
  unsure (1)..(438): unsure at all n locations
ntgngactattcacacaatttaacaagaaacaatgaaggatcaactgtgaaaattaattgcattcccatacctagatctccttctaaattccaccgaatttatatatgtttaaatgcatggaagcaaggattcaagactagctgtggatcttttattggtcttgatggttgttttttgaaaggctactatggtgatcatttgcttgcagcagcgggacaagatgcaaacaatgcattttttgtgattgcttatgcggtagtaaatgttgaagataaagataactggaagtggttcctcacattgttacatgaagaccttggagactgcaagcaatatggctgaaattttatgttagacatccaaaaagtgcaattcaattgttttgctttgatcaattcatatatagaatgttgtaattntgattgcctgcatgcata

SEQ ID NO: 19652 - DNA, 307 bp, Glycine max
  unsure (1)..(307): unsure at all n locations
tgcttgctaacccatggaagctcctaatatctcccacactctatggtgtgggccattcttggatggccttgattntctcaaggtccacttggaccccatttctaccaactacaaaacctaagaaaactatattatctacacaaaaggtacacttctctatatttgcatagagggtgtacttcctaaagactgaaagaacttgcctgagatgtcctaagtgatcatctaagctcctactgtacactagaatatcatcaaaataaacaactacaaatctacctatgaaatcccttaagacatgatgcat

SEQ ID NO: 19653 - DNA, 421 bp, Glycine max
  unsure (1)..(421): unsure at all n locations
agcttagctgtagcatttagtaaaaaaaaaaaaagttggggacagtgtgtttcttttatctgtcaactttctcccgttttctcaattaaaatgggtttaatgatgacccacgttatggaaacaaattattgttctcacataaattttgtatccattcgcttaatcaacaacatcatcgctaaagagcttanattggtgggcatcaagaaccaatttccttatagaagagaatgcgcccattattccaacacccgtgaagaccaccataattgaggtgttaatccaataagtgaaggatgattttggaggcttgtatgtcatgttgtacataagcataggcagaacgaaatccanagggatgaaaccaatggcaccaaccacaccgttgatgtctccaaaaaatggcagcatagctgccaca

SEQ ID NO: 19654 - DNA, 409 bp, Glycine max
  unsure (1)..(409): unsure at all n locations
tattctgagcatgattcctcctaatttccatgcccaaaatctttttagttgctcccatatctttcatctcaaattcactattaaaaagtgacttcagtttccgaatttcaaacttgtgtcaagatactatgggcatgtcgtccacatagagaagtagataaatgtatgcaccatccttcaccttactatgataaacacatgaatcatatggacttttattgtacccatgagagataattaactaatcgaatctcttgtaccattgtcttggagattgcttcaatccataaagagacctttacaacctacaaataaaatcttcctttccttgcacttcaaaaccttttggttgtttcataaaaatttcttcctcccactattccatggagaaaangttgtttcacatcaa

SEQ ID NO: 19655 - DNA, 439 bp, Glycine max
  unsure (1)..(439): unsure at all n locations
tgtcccaaggattcatatcctttaaccccaacatagataggcttgtggatggagtttttgaatgcagtttgataccataaggaatcataacctccaattaaacttagaaaaatgatttttcaaagtacatgccgagaagttcttaggttttatgttgacaaagaggggaattgagggtaacccaaataaatgcaaggccatcatgaaaatgagaattccaagaacggtcaaagaagtgaacaactcatagggaagatcatgtccctgtcttggttcttatcaaaatcgacagagaaggaactccctctgcttaagtgatttcggaagaacaagcacttccaatgggtgctagattgtgagaatgccttcaaacaattcaaggaattcctcacaacactacccattntaacaaggccgaaatcgaaaggctctatacttg

SEQ ID NO: 19656 - DNA, 397 bp, Glycine max
  unsure (1)..(397): unsure at all n locations
tgtaagagcttggtcacttcctttntcaccacatctagaatgacggngttgagtcgtcgctgtggctacctcactggcttagctgcatcctctaaaagtatcctatgcatgcaggtagatgggctaataccaggaatgtctgctaaagtccatccaatggccttcttgtgcttcttgagcaccggcaacaacttctcctcttgctcaacatcaagggaagcagagatgatcactggaaatttgatgcaatcctaccccgcaagggcattggatagaagactccaagtagattgggccagagatccaagggaaggccctagggttctcatgagccttaaggtagattntgagcccatgggctaagtatgagcccgcttatctttgtaattattagaat

SEQ ID NO: 19657 - DNA, 442 bp, Glycine max
  unsure (1)..(442): unsure at all n locations
agcttatagtcattacttgttaagaaccataagccagagtcgattgttcctttgataaagtgaagaatttgttttgcagccttgaaatgagtagtggttagagtctcgatgtattggctgatgagtactccagtagcatatataatgtttggtcttgtgtgtcaaatatcataaactacccaccaaactcttgaaatctatagcatccagttttcttgcttcgtcgaactttgataacttcattntgcactccatcagtgttccaattggcttgcatctatccatcttgaatntattaagcatcttctttgcgtagctttgcagtgaaatgaagatttcatcttctttctgctntacctcaatggcaagatagtatgacatttttccgatatcggtcatctcanacttcttcatcatttctttcttanactctgataattgt

SEQ ID NO: 19658 - DNA, 308 bp, Glycine max
ttgcagcctcgaaatgattagaggctagagtctctatgtataggctgatgagtactccagcaccatatataatgattggtcctgtcgtgtcaaatatcataaactacccaccatactcttgaaatctatagcatacagctttcttgcttcgtcgaactttgataacttcattttgcactccatcagtgatgcaattggcttgcatctatccatcttgaatttattaagcatcttctttgcgtagctttgcagggaaatgaagaattcatcttctttctgctttacctcaatggcaagatagtatgaca

SEQ ID NO: 19659 - DNA, 387 bp, Glycine max
  unsure (1)..(387): unsure at all n locations
agcttcttatccaaggctcatcttggtggtgaagctccttcttccctggcttattccctagtggatggcgcctcctctcacctcttttcctttgtctttcactgcatctccatggtggaaaatcaccattaaaggacctcattgaagctcanagatccaacctccatagaagccccacaatcaagcttccatcagttgtagacccctaagaccaagaaaagacagctttcacatgtccctttggtgtttttgcttattgccgaatgccattcgggttatgtaatgctcctgctacgttccaaagatgtatgatggctatctttgctgacatggtagagaagtgcattgaagtctttatggatgaattttcagtctttggcgcatctt

SEQ ID NO: 19660 - DNA, 393 bp, Glycine max
  unsure (1)..(393): unsure at all n locations
tgtagcaaatgcaaacggcaataacgttntactcggatgttcgattgagtcacgtaatacatcgaaacgctcgaaattgaaaacagaagctctgtgcaaattcaaacgacaatacattttaactcggatgtccgattgagtcccgtaatatatcaagacactcgaaattgagaataaaagctctgaacaaattcaaacgacaataactttttactcggatgtccgattgagtccagtaatatatctagacactcgaaattgagaatagaagagctgagcaaattcaaacgacaataactttttactcggatgtccgatggagtcccgagcgtctcgatatattatgcgcctaaattggacatccgagttaaaagttatgacaattttaattgc

SEQ ID NO: 19661 - DNA, 392 bp, Glycine max
  unsure (1)..(392): unsure at all n locations
agctntaactcggatgtccgattcangcgcataatatatcgagacacttgatattgaataacagaagctctcgagaaattcgaatggtcataacttttcacacggatgtccgattcgggcgcataatatgtcgagacgctcgaaattgaacaacggaagctctcgagaaattctaatggtcataacttttcactcggatgaccggatcaagcgcataatatatcgagacgctcgaaattgaacaacggaagcttccgagaaattcaaatggtcataaactttaactcagaggcccgattcatgcgcataatatatcgagacgcttcgaattgaacatcggaagctctctagaaattcaaatggtcataaactttcacttggaggtccgattc

SEQ ID NO: 19662 - DNA, 428 bp, Glycine max
  unsure (1)..(428): unsure at all n locations
agcttatgttgcaaacatttaaaatagacctcctcagcagcaaaaccaacaacaacagaataattatgacctttcaagcaacagatacaatccaggttggaggaatcatccaaatctgagatggacaagtcctccacaacaacaacaacctgtccctccttttccagaatgttgctggtccaagcaagccatatgttcctcctccaatgcagcaacaacagcagcagtcacaacaaagacaacaaggaactgaggctcctcctcaaccttccttagaagagttagtgaggcaaatgaccatccagaatatgcaatttcagcaagagacaagagcctccattcagagtctgacaaatcagatggngcagatggctactcagttgaaccaagctcagtcccaaaattctgacaaattgccttcacaaact

SEQ ID NO: 19663 - DNA, 358 bp, Glycine max
  unsure (1)..(358): unsure at all n locations
agctntcaatgtacaaacatttagtatatacaactcttatagagacagacacaatacagcagtcacaggcattgaactactccattgtgattgcatggatcatgagtatataagtatcatcacatattcacatatatctcatttatgattacttattatgcacatacctgtctgtccatccaagcaacactgtgacagatcacccaagcaggttgaatattctgggggaggactaggatactcgccagggcaatatgatccccaactactctcttctgcattggaagctgtggatgcatatatattgatatgttaggtaataagacctgctatgagtactccacatacacatgcctcc

SEQ ID NO: 19664 - DNA, 409 bp, Glycine max
  unsure (1)..(409): unsure at all n locations
tcaacattcaattntgagcgtctcgcaatattacgggactcaatcagacatccgagtaaaaagatattgtcgcttggattggctcatagaatcaacattcaatatcgagcgtctcaatatattacgggactcattcagacatccgagtaaaaagttattgtcgtttgaattagctcagagcttcaacaatcaatttcgagcgtctagatatatgacgagactcagtcagacatccgagtaaaaagttattgtcggctgaattggctcagagcttcaacattcaatttcgagcgtctcgatatatgacgggactcaatcatacatccgagatgaaagttattgtcgtttgaatttgctcagaggttcaacattcaatttcgagcgtctcgatatatgacaagactcaatc

SEQ ID NO: 19665 - DNA, 435 bp, Glycine max
  unsure (1)..(435): unsure at all n locations
agcttcttcataaacgtggcatttgtgtgcaatacataatgcctaaaacaccacaacaaaatggtgtatcagaaaggcgtaatagaactttaatggatatgattaggagtatgttaatcaattcaactttactcgtatttttgtggatgtatgccttgaaaactgccatgtatttgttgaatagggttcctagtaaggcagttccaaagacaccttttgaactgtggatgaataggacacctagtataaggcacatgcatgtttggggttgccagacagaaataaggatttataatccgcaagagagaaaatnggatgcaagaacaatcagtgaatatttcatttggtatccaaaaaagtcatggngtatatgtttttttgcctaatcatagtatgagaattggtgaaactggaaatgcanggttactgaaaatg

SEQ ID NO: 19666 - DNA, 246 bp, Glycine max
tctcgatatatgatgtcccggagtcggacatccgagcgagatgttatgaccattcacatatctcgagagctagcgatgttcaatggggagcgacaccatgtataatgtccgcgaatcgctcatgcgcgtgaacagtcatgaccattccaatttctcgagagctatcgttggtcaatgacaaccggctatataactaatgaccccaactccagcatccgagcgaatagttaggacccttcacctttc

SEQ ID NO: 19667 - DNA, 397 bp, Glycine max
tgaatcggacctcagtgtcaaaagttatgaccatttgaatttctcgagagcttccgtgggtcaatttcgagcatctcgacatattatgtgcccgaatctgactttcgtgtgataagctctgaccatttgaatttctcgagagcttccgatgctcaatttcgagcgtctcaatatattgtccgcctgaatcggagctcagtgtgaaaagctatgaccatttgtatttgtcgaatgcttccttggttcaatttcaagcatctccgaataattatagtcttgagtctaacctccgtgtgaaaagatgtgaccattcgaatctctcgagagcttgcgttgatcactttcgagcgtctctgtatattatgcgcccgaatcagacatccgggtgagaagtcat

SEQ ID NO: 19668 - DNA, 430 bp, Glycine max
ttcttagctacacacacgcctctcataactgagctcacctccttgagaagcttccttaagaagattcctaaagaagctagagtttaactacacatacctctctaatagctaagttcacctccttgagatgagaagctagaacttagctacacaccccctatagtagctaagctcacccccatgacaaactacatgagaatacgaaataaatccctactacgaagactactcagaatgcctcgaaatacaaggctgaaaccctatactactagagtggccacaatacattgcccagacgaaggagtaacctattctaatatttacaaagataagcgggctcatacttagcccatgggctcttaatctagcctaatgctcatgagaacactagggccgttccttgtatctctggcccaatctacttggagtc

SEQ ID NO: 19669 - DNA, 403 bp, Glycine max
tataggatactaaggtaatttgagcatccattctggtgctaccaagatgtatcatgatttaaagacgatgttttggtggcccaacataaagagagaggttattgagtttgtgtatgcatgcctagtctgtcagaaggctaagatagaacattagagaccttcaaggaagttacaacccttagagataccctagtggaagggggacagtatttccatggattttgtggtaggactacctaggacccctagaggcttagattctatctgggttattctcgatagattgactaagtctgctcacttcattcccattaatatcagattttccttggaaaagttgactaccttgtatataagtgagggtttcaagttacatggtgtgccatctagcatagtatctgat

SEQ ID NO: 19670 - DNA, 416 bp, Glycine max
  unsure (1)..(416): unsure at all n locations
gtgagccaatacaaacgacaataagttnttactgggatgtctgattgagtccagtcatatatcgagacgctcgaaattgaatgttgaaaccctaagctaattcaaacgacaataaatttttactcagatgtctgattgagtcccgtaacatatcgagacgctcgaaattgaatgttgaagctctgagctaattcaaacgaccatatctttttactcgggtatctgattaagtcccgtaacatatcgagatgctcgaaattgaatgttgaagctctcagccaattcaaacgataataactttttactcggatgtctgattgagtcccgtaatataacgagacgctcgaaattgaatgatgaacctctaagccaattcatacgacaatatctttntactcggatgtttgaatgagtcc

SEQ ID NO: 19671 - DNA, 414 bp, Glycine max
agcttcaacattcaatttcgagcgtctcgatatatgacgggactcaatcagacatccgagtaaaaagttattgtcgtttgaatttgctcagagcatcaacattcaatttcgagcgtctcgatatattacgggactcaatcagacatccgagtaaaaagttattgtcgtttgaatttgcttagagggtcaacattcaatttcgagcgtctcgatatattacgggactcaatcagacatccgagtaaaaagatattgtcgtttgaattggctgagagcttcaacattcaatttcgagcgtctcgatatatgacgggactcaatcagacatccgagtaaaaagttattgtcgtttgaattggctgagagcttcaacattcaatttcgagcgtctcgatatattacgggactcaatca

SEQ ID NO: 19672 - DNA, 401 bp, Glycine max
tgacagtgtttgatgcatcagggaacaatttcactttagtagtgggtcctaattggattcctaattttcaacttacctatttggatgtgacatcatggcagataggtcccaactttccgtcgtggattcagtcacaaaacaaacttcaatatgttggactgtctaacacggggattttagattttattcccacttggttctgggaagcacattctcaggttttgtatttaaacctctctcataatcatatccgtggtgagcttgtgactacaataaaaaatccaatatctatccaaactgttgatctaagcacaaatcatttatgtggtaaattaccctatctttcaaatgctgtgtataggttagacctttcaaccaattcattctctggatccatgcaa

SEQ ID NO: 19673 - DNA, 417 bp, Glycine max
  unsure (1)..(417): unsure at all n locations
tctagaattnttgtcagctgcatcaaaatgggaggcaacttgaggtttttgagtctttgcatcaactcatgctcaactttagcttggcttttatgttaacagttgcccaaaaatagagcaaatcgatttgaaatttgttcatgaccatatccataatgctccatcactagcagctgcattaataagaatgcactttcatgactgttttgtaagggtatgcgctccaatctttaagcttctttcatttttacttaacaagtacaatgttattgttagattaaggttaaggagctaactaagatgaagcatttcagggatgtgatgcatcagcccttttgaactcaacaaccaatcaggttgagaagaatgctcgtccaaatcttacagtaagaggctttgacttcattggcattataa

SEQ ID NO: 19674 - DNA, 433 bp, Glycine max
  unsure (1)..(433): unsure at all n locations
agcttaagctccttcaactgcacaaggctcttaatatttgaagagtatccttgtggaaccttcacccgacgaagacactgacaaaaacttatcttctccttcttggacaaagtatggcaggctgngggcaagtaaattttcttcccatcagaccttgaatgcaactgtgatcgtatacccatatcagctagatcttgacgggtattcaagtcatccttcgtcttgccttgaatgttaaggagcgtcccaatcacactgtcacaaacattnttctccacatgcataacatcaatacaatgtctaacatcaagatcacaccagtacggaagatcaaagaaaatggacctcttcttccatatgcaactctgacttttatccttcttttgggtcttcccanatacagtattcaggtgttgaacccgctgatatacct

SEQ ID NO: 19675 - DNA, 411 bp, Glycine max
  unsure (1)..(411): unsure at all n locations
agcttatgctgcagacatctataatagaacccctcagcagcanaaccaacaacaacagaataattatgatcttttaaggaacatatacaatctatgttggagaaatcatgcanatctgagatgggcaagtactccaaaacaacaacaacctgtccctcctttccagaatgctactggtccaagcaagccatatgttcctactgcaatgcaacaacagcagcagcagtcacaacaaagacaacaattaactgaggctcctcctcaaccttccttagaagagttagtgaggcaaatgaccatccagaatatgcaatttcagcaagagacaaaagactccattcagagtctaacaaatcagatggggcagatggttactcagttgaaccaagctcagtcccaaaattctgacaa

SEQ ID NO: 19676 - DNA, 430 bp, Glycine max
  unsure (1)..(430): unsure at all n locations
agcttctcatttgatccaacagaggaggagcatacaaactatttcactcaagtcactagcataagagacttggtcattactatcttgaaagaattctaaacatgaaaaaagggacatgtcaaaaggtctaccaatactttctgatagtttgccaaactatcatgcttgtcaatttggtaaacaaaacaaaaaatcattccccaaatcatcttggagagcctctcataagttgtagctaattcacactgatgtgataggacctcaaagaacaccatcactacaaggtagtctctactttattcatttcatagatgactntacaagaatgtgctggattntttttcttgaaattcaagcatgaagtggctgaagtatttgtgaagttcaagataatggtggaaactcacagtggctgcnagattcaatgact

SEQ ID NO: 19677 - DNA, 425 bp, Glycine max
  unsure (1)..(425): unsure at all n locations
agcttgtttcttgcaattccaagacactagagagcttcctaataggtggcatgtctaacttgtgctttttctatctaatttgcaacctgcaaaattagaatatgaaaagcctgttagatttaaggaagtatccttgggatacctcaaacctacattggttgtgtccttaaggtacttaatgatctttttgatagatgttaagtgagattccttatgattggtctggtaccttgcacataagtaaacactccactgatttaagtagaaaagtgatccaatcatacctctatatcttgactcatccactgattntcctttctcatctaagtcatggtaggttgaagttgccattggagtagatgcttctttgcattnttccataccgaatntcctaattagttntgtacaatacttggtttgactaa

SEQ ID NO: 19678 - DNA, 409 bp, Glycine max
tgaaggcaaactggatgcgttggtcaacttggtaacccaactggccttgaatcagaaatctgtacctgtcgcaagggtttgtggtttgtgctcctctgctgaccaccatacagacctttgcccttccatgcagcaacctggagcaattgagcagcctgaaacttatgctgcaaatatttacaatagacctcctcaacctcagcagcaaaatcaaccacaggagagcaattatgacctttccagcaacagatacaaccctggatggaggaatcaccctagccttagatggtccagccctcagcaacaacaacagcagcctgctccttccttccaaaatgctgctggcccaagcagaccatacattcctccaccaatccaacaacagcaacaaccccagaaacagccaaca

SEQ ID NO: 19679 - DNA, 430 bp, Glycine max
  unsure (1)..(430): unsure at all n locations
agcttagtatccactaacaagtacaaaccaaccgaaagaaaaattgaaaaagtaaagaagagagaaaaagtaaataaacatgtagaacaccattccaccaccaaataacacgtcaattaaagaaatgtgattggacagattatatatatatatatataggagagagatcaaattacattaactttaactttgattaagtattataccgttcaataatttttaattggataatattttcttaaaacctataatgggattgaaattttatttcacttagatcatatatacaaaattttatattaatccaaaattatttgttacctcattcattcagattaaaattgacctaatataaactnttcaaaatatattaaaatatagatcgtttgattaccttattattgttcaattntgacaaaaattcacacaa

SEQ ID NO: 19680 - DNA, 414 bp, Glycine max
agcttacaaatttgttttaagtcagttgaaggaccaaagtaaaaaagctttttctgttattgcttgaattcaaataggtacatatatatagagagtacaaaagagagagagggaggagagaggctatgacagtgacaatgcactgttgccttctgaaaaaaaaggctaccaactaagttaccaaacatggctaaattacaaggatattcaacactccccctcaagctggagcatataaatcatatgcaccaagcttggtacatatagtctgaatcttgggtcctcttaaggacttagtcaaaatatccgctggctgatcattagaaccaatgaactcagtgacaatctccttggacagaagcttctctcgaatgaaatgacaatcaatctctatatgcttggtcctctcatgga

SEQ ID NO: 19681 - DNA, 417 bp, Glycine max
agcttttgttatcggtcatcttccataactctaaggactgcagagcacaaggaagaaaaatatacattattgtcacagtaaacaagaatgggatgtttttagagaaacagaagtgttgaaatgaggatagtttgcagtattacaatgaaatgggtgcagttttttacatgggtctgatgcatgcagtccagaagtaaggtttttgaatccatgcattcattacaacagataatgaacaaaagcttaccgaacttcctccaatcaccaacaaagttgaataacttggatgataaacacaggaatgcaattggctcccagtggagctgaactcatgaatccattctcctcctgaggtcatactccaaaccttcaccagatttggactcacagatgccaaggcatcaccattcccatccc

SEQ ID NO: 19682 - DNA, 400 bp, Glycine max
tgtgtttttcgataggaggaaccagtttgagttggaggatctgcttcgagcttcggcggagatgctcggaaaaggaagcttggggactgtttacagagcggtgctcgatgacagctgcaccgtggctgtgaagagactcaaagacgctaacccctgcgagagaaatgagtttgaacagtacatggatgttgtagggaagctcaagcaccccaacattgttagactcagagcttattattacgctaaagaagacaagcttcttgtctatgattatctgcccaatggaagcttgcatgctcttcttcatggttagttaaactcaaactcgagcgagctctgatgggacatgatccttcatgataaactttaattaatttgataagcttgattgtttatatat

SEQ ID NO: 19683 - DNA, 418 bp, Glycine max
tcaacatcagaccacttccagggtgctggatctacttcacatggacttgatggggcctatgcaagttgaaagccttggaggaaagaggtatgcctatgttgttgtggatgatttctccagatttacctgcgtcaactttatcagagagaaatcagacacctttgaagtattcaaagagttgagtctaagacttcaaagagaaaaagactgtgtcatcaagagaattaggagtgaccatggcagacagtatgaatacagcaagcatactgtattatgcacatccgacggcctttctcatgacatctctgcagccatcacaccacaacacaatggcatagttgaaaggaaaaacaagacttttgcagaagctgctacggtcatgcttcatgccaaagaacttccctataatctctgggct

SEQ ID NO: 19684 - DNA, 420 bp, Glycine max
  unsure (1)..(420): unsure at all n locations
agctttctttttgatggcctcagctattctcttaggatttgtaactaacanatcatctacaagttgaatatcaactgaagcaagcaatgaagcccatgaaccccaatcatcttgatcaaacggatccttaattgacacaatgngaaattctttaacataattnttatatangtgaccaagactctgagtagagtgaacatgagctccatcattnggctgtttcatgaagttcanatcatacttcccatccttagtgtaaaactctgaagctgcaacatccataccaattntaatctgcaccattgttntttatttccagatcagcacaagtgaatattcanattatgcaacagaaataatcanaacttcacccaccttgccagtataaccagccttctcaatggcatccacgagtaaaac

SEQ ID NO: 19685 - DNA, 399 bp, Glycine max
gttcctttgatttgctctgatagggtttctaagcattagagagaaggagaagagattaaagtcttcattttgtactatctttgtgcgattcacttttctctctccatgaatattatttcacaaatcccaacggtggcggtgtgaagaattgaattgccaaccaggtgcctaaatttcacaatgatccaacggttaactagtttgtatcgtacttttattggacaggtttcgagtctctacgggaaaagagaaagctacaatgcgaaggacatttctcttatctccaacatttttttttcacaatttccaacggtgagaatgctcataaatgagttgcgaacctgatgctgaaatatctcgatgatccaacagttaacaagttcgagattgtcaatttac

SEQ ID NO: 19686 - DNA, 399 bp, Glycine max
  unsure (1)..(399): unsure at all n locations
agcttccattttctatgtcctttatctatagctcgtatccattagaaattatgtactttgatgtttggngacctgttccaataaattcaattgatgattttcgttattatttttgtggatcatttctccaagtatgtttggctctatccattgaaattaaaatctgatgtttcaataattttcccaatttttaaaaacttggtcgaaatacaattaaactcccaaatcaaaactctctactttgacaatggaggcgaatttattaaacttcaaccatttttacaaaatcatggcatctctcacatgacaaccccacctcatacccctgaacataatggtatttctaaacgtanacaccgtcacttagttgagactgttcgttgnctactacaccatgca

SEQ ID NO: 19687 - DNA, 404 bp, Glycine max
  unsure (1)..(404): unsure at all n locations
agcttttaactgaattagcaacgttccaaatgttttttaatggtgtaatcgataataatatattggtaatcgattaccagtgtatccgaacgttggaattcaaattcaattgtgaagagtcacatcttttcataaaatgcattgtgtaatcgattacatggttatggtaatcaattactagtgacaagttctgaataaaaagtcaagagatgtcactcttccaatggttttctcaagattttctcaaggttataactcttccaatggttttcttgaccagacatgaagagtctataaaagcaagaccttgactttgcattcaaataactttttacaacttttagaatctcttgaacaacttttgagaaatcttganacctttacaactcatctttcttcttctt

SEQ ID NO: 19688 - DNA, 445 bp, Glycine max
  unsure (1)..(445): unsure at all n locations
tatgctcgtcaaaaattcacatggaattacgataacttgatattcattatataattggcgtatatctatacgctacaactccgatcagataactctttaaagcacacttgttccctatagacatacattaaattgataagatattctttattgataggaataaaaaaatatattatttaaaatttataataactcacctatcaatttatcatatttgcatatgtacattaattatagaccgtaaaacaccaagtatatatggcctaagaaaatgcttcatgtcatatattaaataaatcttttcatacctgaaaaatagatcattcttaaattactacctacgaattcattntttgtcaaatacctacttgaaaaaaaaatttaatccttcggntaagtgatgacgtgacagaataccacatcattacgtccaatcactgacact

SEQ ID NO: 19689 - DNA, 189 bp, Glycine max
tgatattgcacaacggaagcactcgagacatgcgaatgtgtcattactattcactcggatgtgcgattcgcgggcataactcatctagatgctcggaattgtgcatcggaagctctcgagaaagtcgaacggtcataacttttcacacggatgtgcgaattctgggcataatatatagagacgctcgat

SEQ ID NO: 19690 - DNA, 425 bp, Glycine max
  unsure (1)..(425): unsure at all n locations
agctntggttatngattgaccccaggcctaaaccagcaaccactccatcttgcactgcagtcctgtaagctttggttaaggattgattgtattgagctatagcttgactctcgcctgtaaatgatgcaacctgcattggaggaatgtgtatcttttatattctactgtctacaaacatgtaaaagaacaagattgacaagttccattatgaagattggcatacttgtcgaattgaatcaattgtgcgctctactacagttgctgcttcagaataagctgcttgtccatgggatggcaactttgcaaaagtaaagctcatcatggaaccagagattaccagaggtggaatacaagatagaaggacaagggttagaagccaacccttgatgaatgctatgactaaacgtcctaaaaaacatgccaca

SEQ ID NO: 19691 - DNA, 377 bp, Glycine max
  unsure (1)..(377): unsure at all n locations
tgccgccacggagttntccgactatgctcttgtgtggtggatctagctacaaaaggagagagcaaganatgaagagccaatggttgatacatggacggagatgaaaaagatcatgaggaagcggtatgttccggctagttactcaagggacttgaaattcaagctccaaaaactaacccaaggcaacaagggggttgaggagtatttcaaggaaatggatgtgctcatgattcaagcaaatattgaagaagatgaggaggtaactatggctcgatttcttaatggtttgactaatgatatccgtgatatntgtgagctgcacgagtttgttgaaatggatgattngcttcacaaagcaatcccagtggagcaacaat

SEQ ID NO: 19692 - DNA, 386 bp, Glycine max
  unsure (1)..(386): unsure at all n locations
agcttgaaattgaacaacggaagctctcgagaaaatcgagtggtcataaattntcacacagatgtccgattcggggaaataatatatcgagacgcacgaaattgaacaacggaagctctcgagaaatttgaatggtcataacatttcactcggatgttcgatccggggacataatttatcgagacgctcgaaattgaacaaccgaagctctcgacaaattagaatggtcgtaacttttcacgcgaatgttcgattcggggacataactcatctagacgctcgaaattgaacaacggaagctctcgagaaattcgaatggtcataaagtttcacacggatggtcgatttcgggacataatatatcaagacaatcgaaattgaacaac

SEQ ID NO: 19693 - DNA, 375 bp, Glycine max
  unsure (1)..(375): unsure at all n locations
tgtcatcggcgcggttgacacatgtgatgatgcatgggaccttggcttgtaattgagatagcagaatatgatgagccaatggttgatacatggacggagatgaaaaagatcatgaggaagcggtatgttccggctagttactcaagggacttgaaattcaagctccaaaaactaacccgaggcaacaagggggttgaggagtatttcaaggaaatggatgtgctcatgattcaagcaaatattgaagatgatgatgatgtaactatggctcgatttcttaatggntcgactaatgatatccgagatattgatgagctgcatgagtttgttgaaatggatgatctgcttcacaaagcaatccaagtggagcaacaa

SEQ ID NO: 19694 - DNA, 398 bp, Glycine max
  unsure (1)..(398): unsure at all n locations
gttggtgcatagaagaagaagaagttcagagagattcaaagcttgtaaaggattgatcaaatgaatgtgaaaagtatattgaaaatcaaatcaaagccttacttttatagactcttcatgtctggccaagaagaccatttagaagagttataacttttagaataacttaaaaccaatttgaaaaagtcaaaaaccttttgaagagttacatattttttatttattcagagacaaacactggtaatcgattaccatattagtgtaatcgattacacagagcttttgtgtgaaaagatgtgactcttcatatttgaatttgaaattcaacgttcaaaggcactggtaatcgattaccaaaacattggaattgattacagctntgtgaaaataattggaac

SEQ ID NO: 19695 - DNA, 440 bp, Glycine max
  unsure (1)..(440): unsure at all n locations
tgtgatgacgacataagttcaagtcaggaatatatatatatatatatatatatatagcatgttgagagacaaatgtggngaaaagttaggctggttcttgaagaatccatgccatatggatgctacagagtgaaagggacttgttttagtgtagagagatgaagaaagttctacgttaatttggaatatgatttggtgtttggaaggagaaccgtaaaagagggtgcaagagttttccaacgtgttccagaggcttcatgtgttactttgtcaacatattggtcatattcatcggactacagcttttctctttaagtaatggtttgggcaatttcacactaagttgggattaagtccaatatcaataccatacctactagntacgttntcggctattgcttcctgcacctcttttatggtttctggaatggtcaatcccg

SEQ ID NO: 19696 - DNA, 384 bp, Glycine max
  unsure (1)..(384): unsure at all n locations
agctttcaatgtacaaacaattagtatatacaactcttatagagacagacacaatacagcagtcacaggcattgaactactccattgtgattgcatggatcatgagtatataagtatcatcacatattcacataaatctcatttatgattacttattatgcacatacctgtcttccatccaagcaacactgtacagatcacccaagcaggttgaatattctgggggaggactaggatactccccagggcaatatgttccccaactactttcttctgcattggaagctgtggttgcataaatattgatatcttcgggaagaagaccttcaaagatactcccagattcacatgcctncagataaaatacctgcattaccatcatgt

SEQ ID NO: 19697 - DNA, 361 bp, Glycine max
agcttttgatgcactagttcgaaggtatgtatcaacctggtcttgaaaatcaagatctcatgagccctttcaagaatggatgataaatgataattctgaattgggaaacataatattgcatatcatgactacgtgaatggcttcccatggccaccaagatcatacacttgcagcttttgtacaaaggagtttaagtctgctcatgcacttggtggacacatgaatgttcataggacggatagaccaaggttgaggcagtcatcaccctcaattcatgaagatcaaggacaagctgctggacctatatagcacaaccttaatcttgaccctaacaacaactcactctcatgatgatgggtgc

SEQ ID NO: 19698 - DNA, 427 bp, Glycine max
tcaaacctctcacaaaggagaagacaaagtaaagaatgtgaaatctaaactgatgaatgcaatacaacagtcgcaaatagaaatagttgttttctccaaaagctatactgaatctactttgtgtcttgaggagcttgaaaaaatcattgaatgcaataaattttaaggccaagtacttgtgcccatattttatgatgttgacccatcagatgtacgccatcagaagggtgcttttggaagagcattaaaagaacttgcacaaaacaaatattcaagagaccatgcggcataagtgtttgtgatgtggagccacacactcagcaaaactacagacttttggtgttgggatgcaagagagcaatgttgttagactcgtgattctacgtagaatcgtgaagacttcgtaaactcgacttcgagaatcgaa

SEQ ID NO: 19699 - DNA, 414 bp, Glycine max
  unsure (1)..(414): unsure at all n locations
agcttgaaggcaaactggatgcgttggtcaacttggtaacccagctggccttgaatcagaaatctgtacctgtcgcaagggtttgtggtttgtgctcctctgctgaccaccatacagacctttgcccttccatgcagcaacctggagcaattgagcaacctgaagcttatgctgcaaatatttacaatagacctcctcaacctcagcagcaaaatcaaccacagcagagcaattatgacctttccagcaacagatacaaccctggatggaggaatcaccctaacctcagatggtccagccctcagcaacaacaacagcagcctgcttcttccttccaaaatgctgctggcccaagcagaccatacattcctncaccaatccaacaacagcaacaacccaagaaacaaccaacag

SEQ ID NO: 19700 - DNA, 400 bp, Glycine max
  unsure (1)..(400): unsure at all n locations
ngaaggcaaactggacgttggtcaacttggtaacccagctggtcttgaatcagaaatctgtacctgtcgcaagggtttgtggtttgtgctcctctgctgaccaccatacagacctttgcccttccatgcagcaacctggagcaattgagcagcctgaagcttatgctgcaaatatttacaatagacctcctcaacctcagcagcaaaatcaaccacagtagagcaattatgacctttccagcaacagatacaaccctggatggaggaatcaccctaacctcagatggtccagccctcagcaacaacaacagcagcctgctccttcctttcaaaatgctgctggcccaagcagaccatacanttcctcaccaatccaacaacagcaacaaccccagaaaca

SEQ ID NO: 19701 - DNA, 381 bp, Glycine max
  unsure (1)..(381): unsure at all n locations
cctaagcagccaagtgaggcacaacagaacaattatgacctttgcagcaacaagtacaatcccatgtggaggaatcattccaaccttagatggatgaaaccttcacaacagcttctgcaataacaacaacatccatacttgcataatgttgctgggccaagcagaccatacgtttctgcaccaaatcaacaacagcagcaaccccagaaactacgaacagtcgaggctcctacacaaccttctcttagagaacttgtgaggcaaatgattatgcataacatggcagttcaacaagacaccagagcctncattcagagcttaactaatcagatgggacaattggctacacaattagatcaacaacagtgccagaattctgac

SEQ ID NO: 19702 - DNA, 410 bp, Glycine max
  unsure (1)..(410): unsure at all n locations
agctntntattttcagtagatgaagatgaatctgtggccacctcatggactcctctaaggacaatagcatcatttcttgcactgaattgttgggagttagaagccatcttctcgatcaaattcctggcctcagcaggggtcatatcactaagggctccaccactggcagcatcaatcatactcctctccatgttgctaagtccctcatagaaatattgaagaaaaagttgctcanaaatctggtggtgaggacagcttgcacacgatttcttgaatctttcccagtactcatacaagctctctccactaagttgtctgatgcctaaaatgtcttttctgatggcaatggccctagatacaggaaagaatttctccaagaacactctcttaaggtcatcccagctgaaaat

SEQ ID NO: 19703 - DNA, 420 bp, Glycine max
  unsure (1)..(420): unsure at all n locations
agcttctctacagtcttcatcaaatgctaacacaacatccttgtttagtaaattgctaagtggtttggcaatctttgaaatgtcttttatgaatcgcctataaaacccagcatgtcctagaaagcttctcactcctttgacatttactggaggagggagtttctcaatgacatcaatctttgctttgtctacctcaattcccctcacaaaaattgtatgccccaacacaatgccttcttgaaccataaaatgacatttctcccagttaagcaccaagttggactcttcacatctctgcaacaccctttccaaattcgatagatagcaatcaaaagaagagccanagatagagaaatcatccataagaatttcgatacacttctccaccatatcgaanaagatngccatcatgcacctctg

SEQ ID NO: 19704 - DNA, 393 bp, Glycine max
  unsure (1)..(393): unsure at all n locations
ntgaagttagtgtattttattattagtattattatacatataattaaatacttttatgggtatgattttctattgataattcatgtctatgattttgtagtgttattatgacatgatctcgaaagttattgatatgttgaaattagaaaatatttttatttaatttgatacatgtgtatatgattcatgagatatgataaattattatattgngatcatgaaattgtgattgagaatgtgtgtgtaagtgatgaattgtgagatatatgtgtattgagatgtgagctatgaactctacaatcacacaattgtaagagcctttaagagcgatgagttaatgcgcgataagnnttgtatgagctctactgtgggaacccgatgaagttaatcaat

SEQ ID NO: 19705 - DNA, 232 bp, Glycine max
tcaacattcaatgtcaagcgtctcgatatattatgggactcaatcagacatccgagtaaaaagttattgtcgtttgaattggctcggagcttcaacattcaatttcgagggtctcgatatattacgggactcaatccgacatccgagaaaaaaattattgtcgtttgaattggctcagaggctcaacattcaattttgagcgtctcgatatgttacgggactcaatcagaca

SEQ ID NO: 19706 - DNA, 431 bp, Glycine max
  unsure (1)..(431): unsure at all n locations
tatcctgtaactaccaagaaccatctggtaatcgattacagcctgttgtaatcgattacaaggtcctgttctatggtattttgcatttaaaactaactatttttcactcacaaaacctacacattgagtataacaatcattaacaacaatcaacaatcaaaatatacaattaaaacaagcatcaaaactctcaaacacattcatcaagcacaatcaaaattgcaaaagacaattatcaacaacaatcaacactcatcataactatcaaaacataatcattagagacaatcaaaactcaaacaaagacaatcattaatccataatcaacaataatcatcaaaagcaaactcaattatcaagaacaatagaacanattaacaatcatatgataagagataataatcaaccaagttaactatgtatctaagtca

SEQ ID NO: 19707 - DNA, 418 bp, Glycine max
  unsure (1)..(418): unsure at all n locations
tgcttcaggatttgaaagtgagacatttcctcaacatgttttcaaactcaaaaaagccctatatggacttaagcaagctcctagagcttggtatgaaaagctaagttcatttctcttgaaaatggctttgagcgaggaaaggttgacacaacactcattcacaaaaactatgattctcagtttttattagtgcaagtatatgtggatgatatctcatttttagtgctactaatgaaattctttgtgaagatttttctaagtagatgcagactgaattcgaaatgagcatgatgggagagctgaaattctttcttggattacaaataaaacaaacacccanaggcatctacattcatcagaccaagtatgtgaaagaattactgaanaattcaacatgggtgtcgcaatatagataaag

SEQ ID NO: 19708 - DNA, 392 bp, Glycine max
  unsure (1)..(392): unsure at all n locations
taacaatggggagatggaccattcaagtgctggaaagaatcattgacaatgcttacaaagttgagctgcccggtgagtataatgttagttccaccttcatgtcttgattacctcttttgatgcagatgtagaatccgatntgaggacaaatccttctcaagagggagagaatgatgaggacatgaccaagagcaagggcaaggatccacttgaaggacttggaggacctatgacaagggctagagcaaggaaagccaatgaagctcttcaacaagtgctgtccatactatttgaatacaagcccaagattcaaggagaaaagtccaagggtgtgagttgtatcatggcccaaatggatgaggactaaatgacaccactttgtctcnaatttt

SEQ ID NO: 19709 - DNA, 338 bp, Glycine max
  unsure (1)..(338): unsure at all n locations
agcttganattgaacaacggaagctctcgagaaaatcgagtggtcataaattttcacacagatgtccgattcggggaaataatatatcgagacgcacgaaattgaacaacggaagctctcgagaaatttgaatggtcataacatttcactcggatgttcgattcggggacataatctatcgagacgctcgaaattgaacaaccgaagctctcgacaaattagaatggtcgtaacttttcacgcgaatgttcgattcggggacataactcatctagacgctcgaaatngaacaacnggagctctcgagaaatttgaatggtcataagttttcacacgga

SEQ ID NO: 19710 - DNA, 428 bp, Glycine max
  unsure (1)..(428): unsure at all n locations
agcttgaatgataacttgatgccttggtcaacctaccaactcagcttgccatgaatcagaaatctacacctgttgcaagagtctgtggtatatgttcttctgcagatcaccatacagatctatgtccttctttgcagcaatctggagtcaatgagcaacctanagcttatgctgcaaacatttataatagacctcctcagcagcaaaaccaacaacagtagaataattatgacctttcaagcaatagatacaatccaggttggaggaatcatccaaatctgagatggacaagtcctccacaacaacaatagcctgtccctcattttcagaatgttgctggtccaagcaagccatatgttcctcctccaatacagcagcagtcacaacanagacaacaagcaatttcaaccttccttagaagagttagt

SEQ ID NO: 19711 - DNA, 422 bp, Glycine max
  unsure (1)..(422): unsure at all n locations
agcttggcactatcaacactataaggcanattcccaaaataaagcttggtggcagaggaatcagagtcttgttctgccaccgcttctccttcattctcctccactttctcttcttcaactaaaccagcaccatcatcatccacaacaacaacagcctcttcttgtgcaacagcagcagaaattctaggtccccacaacttgtgcgaattaatggacaaaggttccaccaagtgtgacccaaacatgccacggtttgagggcactgttgttatgagagggtctattatggagcagttcttggaggaacgaagacatttgacactgttaatagaagaagaaaacaaggaagctatgcctgcagcagcagtggcagccatgttgttgttgtgatgtaatgcaactcanaagtgtacattacaagt

SEQ ID NO: 19712 - DNA, 377 bp, Glycine max
cgtgatgacgacataagttcaagtcaggaatatatatatatattatatatatatagcatgtcgagagacaaatgtggggaaaagttatgctgtgtcttgaagaatccatgccatatggatgctacagagtgaaagggacttgttttagtgtagagagatgaagaaagctctacgttaatttggaatatgatttggtgtttggaaggagaaccgtaaaagagggtgcaagagtttttcaacgtgttccagaggcttcatgtgttactttgtcaacatattggtcatattcatcggactacagcttttctctttaagtaatgttttgggcaatttcacactaagttgggattaagtccaatatcaataccatacctact

SEQ ID NO: 19713 - DNA, 365 bp, Glycine max
  unsure (1)..(365): unsure at all n locations
ntggacgcgtttaaaggttttaatgctaaagtagagaaacaatgtggaaaataaattaagattgtgagattagatagagaggagagtattatggtaagtacacagagagtggacaagcacctggtccatttgcaaaatttctttaagaacatgggattgttgcccagtacactatgtctagttctccaaattagaataatgtggcagaaagaagaaattgaactttaatggacatggtaagaagtatgaggagtaacacaaaacttcctcagttcttgtggattgaaacacttaagatgattgtgtatatatttaatagagttccaaccaagggtgtctcaaagacaccttttgagttattcaaa

SEQ ID NO: 19714 - DNA, 335 bp, Glycine max
  unsure (1)..(335): unsure at all n locations
atcttggtgagtgggtcttgggcctgctgatcatgtgtgggctggctctgtattttgagcaatcaatgtaaaggtgcttagtttgctcatgaaacacgagattggccgctatgtggagaatgctttgattatcacaatatataacaactggatgggagcaattgatattaaatcattgagaagataggtgagccattgaaactcacacgtggttgaagtaagagctcagtatttagcttctaatgataaatgtgaaacaatatcctatttcattgatttctatganaccaaggatctgccaatgatgaagcaatttctgtgatggagttggacag

SEQ ID NO: 19715 - DNA, 426 bp, Glycine max
  unsure (1)..(426): unsure at all n locations
agcttgtaatgtttgttgccagcagcattgaaggattcaatgaattcaacattgttttcgaatatcaggaaacgtttttcatctcagcagaatccttgtatactttaccatatttttccatccactgctcatgtctttcgtagatggatgcatcatggagtttgcgggactttacttgggaagtgcaaattgagagaaggagaagtagagctaaaactttcaggtttttgccaatggaaatcatctctttgttagcaattaatgacactacgtactgattaattgttgctagagaaactctattgagtttagtgtttggagctagatgtgtaaattggtatgctcctaaggcaatgtttcgattagtatatataggattattgtccctttaaggggannatatttaatcttagtcagaatgaaact

SEQ ID NO: 19716 - DNA, 312 bp, Glycine max
  unsure (1)..(312): unsure at all n locations
tctatagaaggtttgttcctaatttctctacaattgcatcacctctcaatgagctggtgaagaagaatgtggcatttaactggggtgaaaaacaagagcaagcatttgatttgctcaaacaaaagcttactaaggcacctgttctagctcttcctgacttttctaanacttttgagctagaatgtgatgcctctggagtggtagttgtagctgtattgttacaaggtgggcaccctattgcttattatagtgaaaaacttcatattgccacccttcactaccccacctatgataaagagctctatgccttaa

SEQ ID NO: 19717 - DNA, 426 bp, Glycine max
  unsure (1)..(426): unsure at all n locations
tcacaaaagaaaagtggataatccacatattacaaaaggttgacttccacattaccatcccccacaaggaaacttgcaaacaagttnttctcaatagtttccctctcaccatctcacacaatccttctaataacaatagtaaacaagaaaagtgtcaatggatcaccttgtcttaaaattttttgagcgaaaaattcataagtatttcagcaacatcaaatggtacttgatgtcaaacatcccttaatccaatgaatccacttctcatcaaaacccaacctcttcatatagaacaagaaattccaattaatcanataataggttnttcataatctaaactaaagataagactntntctttttccttnttctttatcaatggtatcattcaccgccaacacactatgaagtangaattttctcccaa

SEQ ID NO: 19718 - DNA, 373 bp, Glycine max
  unsure (1)..(373): unsure at all n locations
agcttggagagcaagtcttccttagtattgttttcccttggtatgtggtacattttgagcaattgaaattatcaacaagggtttttatgacatgatagtttatgaggagaaccacttccttggctcgatatatgttttcaacccatccttggacaagtttcgagtccttatagcacctgagtttccttgctcgaacttcatttgccagttttagacctgctatgagtgctttatattttgtttcattgtttgatgccttgaagtcaaatttgagggcatgctccanagtgacattgttgggtccttcaagcataatgcccgcctcatttcctttcacattggatgcaccatcaacatacaagttccaccagtt

SEQ ID NO: 19719 - DNA, 421 bp, Glycine max
  unsure (1)..(421): unsure at all n locations
agcttgtccctgtgcctcctcctgagatattgnggtggtctttccaatgataacatcctcaccagatactcgtgtgccctatttcataataattaattagttcttgtgaaattccttgaggatagatcaaaaaggcataaattcagatatgcttactggtggggcaagaccatcatcatccagcttatcataagaaccatgtctcattccctgaaaaatgaaacttggtaagaaaccaccaacaagaaaccaatactcttttccaaataaaaattgttaagcaagaatagttatttgctaccaaacccaaatttctcaccatggtgttagctctatcaggacggccacaatcttctttgaccagggttcccatcttcttctcttcatctctataanaagttaagaatacagcatatcataa

SEQ ID NO: 19720 - DNA, 357 bp, Glycine max
agcttgtatttatttcttccttagtattgctttcccttggtatgtggtacattttgagcaattgagattatcaaccacggtttttatgacatgatactttatgaggagaaccacttccttggctcgatatatgttttcaacccatccttggacaagtttcgagtccttatagcacctgagtttacttgctcgaacttcatttgccagttttagacctgctatgagtgctttatattttgtttcattgtttgatgccttgaagtcaaatttgatggcatgctccaaagtgacattggtgggtccttcaagcataatgcccgcctcattttctttcacattggatgcaacatcaacata

SEQ ID NO: 19721 - DNA, 438 bp, Glycine max
  unsure (1)..(438): unsure at all n locations
tatgctacaaacatctacaacagacctccttaacctcagcagctaaatcagccacaacagaataattatgacctctccagcaacaggtacaatcccgagtggagaatcatcccaaccttagatggtcgaatccttcacaacaacagcagcaacaacaacaaccttattttcaaaatgctgctggcccaagcagaccatacgttcctccaccaatccagcaacaacaacagcaacagccccaaaaacagcaaacagttgaggctcctccgcaacctttcctagaagaacttgtgaggcaaatgactatgcaaaacatgcagtttcgacaagagaccagagcttccattcagagcttaactaatcagatgggacaatnggctacacagttaaatcaacaacagtcccagaattctgacagattaccttctcaatctatct

SEQ ID NO: 19722 - DNA, 418 bp, Glycine max
  unsure (1)..(418): unsure at all n locations
ttgcttgtgctattccaagttcattaatcatacctttaagccagattgcttccttcactccttcagctagggccatgtattctgcttcagttgttgaaagagcaacaactgattgttgatttgctttccaattgattgttataccaaacaaagtaaacacatatcctgttaaggacttccttgtgtctacatttcctgcaaaatctgcatctacatagcctgtgactactgcctcgtgtgctgtcttcttgtaccttaaaccagctttcaaagatccatttagataccttagtgtccacttcacagtttgccagtgtgcgcttgcaggatttcccatgaatctgcttataatacttacagcatgagctaagtcaggtctgatgcaaccattccatacattatgcttncaacaccactg

SEQ ID NO: 19723 - DNA, 389 bp, Glycine max
  unsure (1)..(389): unsure at all n locations
tatagaatatataataagataacaatgacaattgaagaatcgattcatgtttccattgatgagtctaatgctatttctccaagaaaggatattttagataatattgcagaatctttagaataaatgcacattcatggacaagattctaaaggaaaaggagaaggaagcaatgaagatcctccagtagaagtcaaagcaaataatgatcttccaagagagtggaaagcttcaagagatcatccncttgacaacattattggtgatatctcaaaaggggtaacaactagacactctctcanagatntatgcaataacatggcttttgtatctatgattgaacctaanaatttaaatgaagccataatagatgaaaatggataatagctatg

SEQ ID NO: 19724 - DNA, 313 bp, Glycine max
  unsure (1)..(313): unsure at all n locations
tgtaatcgattacacatatactgtaatcgattaccagagtatattnttagaaaatattctcaacagtcacatctttttatgtggttcttgaatgactatcaaaggcctatatatatgtgacttgagacacgaatttgcgaagagtttttcagaacaaaaaggtcttatcctcttataaagaaaaatcggtttatcctcttacaaattccttggccaaattacttatgattcaataaggaattatttgagtgctcanattgttcaatctatctttttcaagagagatttcttcttttcttcttcttcattctga

SEQ ID NO: 19725 - DNA, 302 bp, Glycine max
tacgtaagattgaaagaaacatacatatatatttgaaataatttatatttaaaattataagggatttttgcataactaattcaggtagaatttagatatataggaggggaaaatttataattataaagaagatacacataattaattcatgagaatttaaatttaacatttttaaagaagttaataatgatgagtgtagactaacgttattcataagatacttctatactctaatttcattcatacgactggagcagatgattcaaaacatgagaacttaggtgcaacatctataataatat

SEQ ID NO: 19726 - DNA, 359 bp, Glycine max
agctttgatgttgttagtcgtcatttggatgtcgagagtgtcatcttgttggattctgagaagaagatcaataaaatcttggtcctctaattcagctccatcttcttttgcaattttgttcttttcttgatgctctctgatgatggtttccaggaccttgtcaacctgcttgtgcaacttcttcaatctggtcatctttccagttaggaaatataagaatggaattgaaggatagacatcatcaaggtcgaatcctcccccggattctacgatttttcggatcaaagacaccacaaactcatcttgctccttgcatatgccaccgactgctatcctgtaaatagaggctcatatcaatg

SEQ ID NO: 19727 - DNA, 348 bp, Glycine max
  unsure (1)..(348): unsure at all n locations
agctttgagcatattcaaacgagaaataaatttgactcggatgtccgattgagccctgtaatatatcgagacgctcgtaattgaaaactgaagctttgagcacattcaaacgagaataaattntgactcggatgtccgattgagccgtaatatatcgaaacgctcgtaatagagaacgaaagcacgtagcaaattcaaaccacaataaattttaactcggatgttcgattgagttctataatatatcgagacacttgatattgaaaacagaagctctgagcagattcaaacgacaataactctntactacgatgttcgaatgagacccgtatatatctagaatctcgt

SEQ ID NO: 19728 - DNA, 452 bp, Glycine max
  unsure (1)..(452): unsure at all n locations
tcatgagagagtcaaagatcaaattgagaggaanaataaaagctatgctaaacaagccaacaaagggagaaagaaggttgtcttcgaacccggagattgggtttgggtgcacatgagaaaagaaaggtttccgaaacaaaggaaatcaaagcttcaaccaaggggagatggaccatttcaagtgcttgaaagaatcaatgacaatgcttacaaagttgagctgcccggtgagtataatgttagttccaccttcaatgtctctgatttatctctttttgatgcagatggagaattcgatttgaggacaaatccttctcatgagggagagaatgatgaggacatgaccaagagcaagggcaaggatccacttgaaggacttggaggacctatgacaagggctagagcaaggaaagccaaggaagctcttcaacaagtgctgtccatactatttg

SEQ ID NO: 19729 - DNA, 450 bp, Glycine max
  unsure (1)..(450): unsure at all n locations
agctntgcttctacttaggtcttaagtataacttactaagcataagtcaattgtgcgacggtggttatattgtatccttcaacaaagagtaatgtatagtcaagacaaaagatgacaagtcctttgttactaccaaatgacacaacaatctgcatgagattgatctaataggtctaagtaaacagaatgtgacatgtctgctttctagagaagatgagagatggatttggcatagaaaacatagtaatgtcaatttgaaacgtatttcataactttctaaaaaagatttagtgaaaggactacctaagatttgttggaaaacccatcttctctgtgaaggatgtcaacaagggaaatagatcanaacttattntanatctaaagatggtgtttccaccattaaaccattacacatattgcacatagatatgtttggaccaacttgaaccg

SEQ ID NO: 19730 - DNA, 454 bp, Glycine max
  unsure (1)..(454): unsure at all n locations
tcgcccctagttgcgcattgtgtgtaaatacatgatcctgtgtatgatgatcacggatacaaggcaaccagggaatgatattgatgtgtatcttacaccattaatcgaagacttgaaaaaattgtgggaagaatgagtagatgcgtgggatgcaaatgtgcagcatacattcacattacacgcaatggtgttttgtactattaatgattatccagcatatggaaatttaagtggatatagtgtgaaaaggcatcatgcatgtcctatctgtgagaaaaacacaagcttcatccaactcaagcatggaaagaagacagtatatacgagacaccaaagatttctgatagcttttcacccttattgatgattgaaaaaatcttntaatggaagtcaggagaatgaaggctccccagaaccattaactggaaaccaagttcatgatcgggtaaaggac

SEQ ID NO: 19731 - DNA, 437 bp, Glycine max
  unsure (1)..(437): unsure at all n locations
agcttaatacccataatcacatctacaggaccaaggtccttcatatcaaaaattttagacaagaaagacttcacatcatttatgaattgcatattactaccaaatatcaatatgtcatccacatacaaacataaaatgacacatccattatcatcaaattgtttcacatacacacatttatcagtattattgattagaaaaccatacgaaagaacaatttgatcaaatttttcgtgccattgctttggagcttatttcaaaccatataaagatttaacaagtttgcaaactttcttttctttccccggttctacaaagcctttaagttggctcatataaatttcttcttctaattcaccatttaaaaagggcagttttacatccatttgatgaaatttctaaataanaacacaagcaagtgcaattaagaccctaat

SEQ ID NO: 19732 - DNA, 368 bp, Glycine max
  unsure (1)..(368): unsure at all n locations
taatctacatgtccaagcctcctctcccattgaacccaacactatcacccaggcccttcgcgaccctgattggcgctcagccatgcaagccgaatctgatgccttacaccacaacatcacttgagatcttgtcagtcggtcctctgatcaaaatttggttggctgtanatgggtatttcgaatctaacgaaatccagacggatcaattgatcgttacaaggctctgttagtcgccaaagggtttcaccaacgctctggttgggactatacagaaacttttagccccgttgttaaaccggtgaccattcgcattgtcctaactctcgcagttcgtcaagggtggcccatacgtcagcttgatgtcaaca

SEQ ID NO: 19733 - DNA, 456 bp, Glycine max
  unsure (1)..(456): unsure at all n locations
taaagtctcacgattgccatatcttgatgcaataattgttattcgtggccatacgagacatttttcctaacaaagtcaaacatgccataactcaatcgtgctttttcttcaatgtcatatgtagcaaagtccttgatcctgccaagttagatgagctagaaaatgaggctaccaatacattgtgtcagatggagatgtattttcctcctgtgttcttcggcattgtggttcacttaattgttcatctggtgagggaaattaaatgttatggtcttgtttatttgtggtggatgtacccgattgaacaatactagaagatcttaanatggtatacaaagaatctacaccgttttgaagcatctattgtgggaaggtacattgtagaagaagctattgagttttgttcagagtacattgaaaaggcaaaacttgttgtgcttcccaagtctcgacatg

SEQ ID NO: 19734 - DNA, 442 bp, Glycine max
  unsure (1)..(442): unsure at all n locations
agcttgtaggcctaggatcttctttatcaatggactcctttacttcttggaagatgaatgacagtggaatggagaaggaagagagagagaggagatgccacttcaaggagaagatgagtctagaaggagctcaccaccataggaggccatggataagagcttggaggaagaagaagataaatgaagggagaggaagagaagaacacgaaattttatgctttacaagagctctaaaatctgaagtttaattttcaaatgatcaaagttcaaaaaaatacacacacatgacctctatttatatcctaagtgtcacacaaaattggaggaaaatttgaatttctattcacatctcacttacatttganattaaatttgtggagccaaaatttcactaattatgattagtggaatttagctatggttcagtccactagtccaagat

SEQ ID NO: 19735 - DNA, 330 bp, Glycine max
  unsure (1)..(330): unsure at all n locations
tagcttgaatctgacatccgtgtgaaaagttatgaccatntgaatttctcaagagcttccgttgttcaatntcgagcctctcgacatattatgcacccgaatcggacatccgtgtgaaaagttatgatcatttgaatttctcgagagtctccgatgtttaatttcgagcgtatcaatattttataaccgcgaatcggacctcactgtgacaagctatgaccatttgaattcgacgagagcttccgttgttcaatttcgaatatcactatatgtgatgcgcctaaattggacattcgagataaaagctatgaccattaggatgtctcaaga

SEQ ID NO: 19736 - DNA, 382 bp, Glycine max
agcttggatgaagaatgagatgaatgaagggagagggagagaagagcacgaaattgtgtgctctaaaagagctctgaaatctaaagttaatattcaaatgatcaaagttcaaaaaaatgcacacacatgacctctatttatagcctaagtgtcacacaaaattggagggaaatttgaattttaattcaaatttcacttgaatttgaaattgaatttggggagccaaactttggagccaaaatttcactaattatgattagtgaattttagttatagttcagcccagtaatccaagatcaattccaagattctccactaagtgtgcttaagtgtcatgaggcatgtaaagcatgaaagacatgcacaaaatgtgactatatga

SEQ ID NO: 19737 - DNA, 371 bp, Glycine max
  unsure (1)..(371): unsure at all n locations
agcttgtacatctctgtttctctacctttcatcacanaccctggtggttgagtgacaaaaacttcttcttctagtgagccattaagaaatgcagattttacatccatttggtgtacttcccagcaattgaagctagccattgctattacaagtttcactgtttccaacctagcaacaggggcaaatacttcatcataaaccagaccttgcttttgcaaaaatccctttgcaaccagtctggctttgaactttgttacttctcctctacgattcaacttagttgtgtagacccattctactgctatggctttctttcctattagtagctatgtgagactccatgtcttggttctctcaatagacctcaactc

SEQ ID NO: 19738 - DNA, 436 bp, Glycine max
  unsure (1)..(436): unsure at all n locations
nttgtgaatgtatgtatacatgantttgatgatgccaaagataatcgtcttctcaagtttgatccaagtcaagaattcagaaattcataaaataactccccagagtcacaactcttcagaaaataactcctgagagtcacatctgttcaagagatttttgaatggacatcaaaggcctataaataggtgacttgngacacaaaatgaatgagagagattccaagagaacttcattctcaaatgctctctcaaaagaaactcttgggcaaacacttgcaaatccattaagagttcatccatggacttcaattgtaatatccttctcttcaagagagaattcatcttctttcttcttatacaaagagattgattaagggaccgagggtctcttaagttgtaaggattcctgaacacaagggatgggtngtccctgtgt

SEQ ID NO: 19739 - DNA, 434 bp, Glycine max
  unsure (1)..(434): unsure at all n locations
agctntgagtctattcaatctacaataccttttgactcggatgtcggattgagtcacgtaatatctcgagacactcggaattgaataccgaagttatgagcaaattcaatcgacaataaatttttactcggatgtcggattgagtcacgtaatatatcgagacgctcgaaattgaataccgaagctctgagcaaattcaaacgacaataactttttactcggatgtccgattgagtcccgtaatatatcgagacgctcgatattgaataccgaagctctgagcaaatcgaaacgacaataaatttttacacggatgtcggattgagtcacgtaatatgtcgagacgctcgagatagaatacctgaactctgagcaaattcagacgacaatacctattgactcggatgtcggattgagtcacgtaatatcttcga

SEQ ID NO: 19740 - DNA, 421 bp, Glycine max
  unsure (1)..(421): unsure at all n locations
agcttgtcatatggaaggataggataccctatgctttntggaagggcaacccaacagtgtctattattaggagagaactcggcaagtgcaacaccacagaaaaacatgattggaatgcaagaatatatgacatagtaaatatataatctaaaaatttacttttgttttaggttaatgcattaattatctcaagattaaattaacacattttttctctctctcttttcagcaatggttgcgagagagagcaagtaattttgagaactcaaaacttgaaaatcaatgtacctttaggtaaagttntgaagcatattttatgattctgatttttttaaataattattatagaaggggttagtttactcttttgaatctgtcacatataatcttttttagattgtacttactacattttgaaact

SEQ ID NO: 19741 - DNA, 430 bp, Glycine max
  unsure (1)..(430): unsure at all n locations
agcttatagattatataataagagaacaatgacaattaaagaatcgattcatgtttcctttgatgagtctaatgttatttctccaagaaaggatattttagatgatatttcagaatctttagaacaaatgcatattcatggagaagattataaaggaaaaggagaatgaagcaatgaagatactccagtagaagtcaaagcaaataatgatcttccaagagagtggaaagcttcaagagatcattcccttgacaacattattggtgatatctcaaaaggggtaacaactagacactctctcanagatttatgtaataacatggcttttgtatctatgattgaacctanaaatttanatgaagccataatagatgaaaattggataatagctatgcaggaagactanaccaatttgaaagaaataatgttt

SEQ ID NO: 19742 - DNA, 380 bp, Glycine max
  unsure (1)..(380): unsure at all n locations
tatagtctcacgaatgccatatcttgatgcaataattgttattctttgccataccagacattattgctaacagagtcggacatgccataactcaatcgtgctntttcttcaatgtcatatgtagcaaagtccttgatcctgccaagttagatgagctacaaaatgaggctaccaatacattgtgtcagatggagatgtattttcctcctgtgttcttccgcattgtggttcacttaattgttcatctggtgagggaaattaaatgttatggtctctgttatttgtggtggatgtacccgattgaacaatactagaagatcttaaaatggtatacaaagaatctacaccgttttgaagcatctattgtgggaaggtacatt

SEQ ID NO: 19743 - DNA, 162 bp, Glycine max
  unsure (1)..(162): unsure at all n locations
ntaactcggatgnncgattcaggcgcataatatatcgatacatttgatattgaataacagaagctctcgagagattcgaatggtcttaactgttcacaccgatgtccgattcgggcgcagagtatagaagagacgctcgaaattgatcaacggaagctctcg

SEQ ID NO: 19744 - DNA, 280 bp, Glycine max
  unsure (1)..(280): unsure at all n locations
taagacatctctctatggacttaaacatgcaccgatgcaatggtatggtttacttanaaacttccttcttgaacaaaaatttgagagaggaaaagttgataaaacacatttcattaaaaagatctctcataacattttactcatgtaagtttatatggatgacatcatttttggttctactaatcgatctctttgtgaagattttgtacacaagatgcacgaggagtttgaaatgccaataatggggggggggattatattactttcttggtctctatgt

SEQ ID NO: 19745 - DNA, 446 bp, Glycine max
agcttgaaggcaaactggatgcattggttaacttggtaacccagctggccttgaatcagaaatctgtacctgtcgcaagggtttgtggtttgtgctcctctgctgaccaccatacagacctttgcccttccatgcagaaacctggagcaattgagcagcctgaagcttatgctgcaaatatttacaatagacctcctcaacctcagtagcaaaatcaaccacagcagagcaattatgacctctccagcaacagatacaaccctggatggaggaatcacgctaatctcagatggtccagccctcagcaacaacaacagcagcctgcttcttccttccaaaatgctactggcccaagcagaccatacattcctccactaatccaacaacagcaacaaccccagaaacagccaacagttgaggcccctccacaactttccctcgaagaa

SEQ ID NO: 19746 - DNA, 338 bp, Glycine max
  unsure (1)..(338): unsure at all n locations
tgtagcanattcaaacaggaaataaattttactcggatgtctcattatgtcccgtaatatatcgagatgcttgaaattgaaaacggaagctcgtagcaaatgcaaaacacaataactttttactcggatgttcgattgtgtctcgtagtatatcgagacgctcgttattcaaaacagaacctcgtatcaaattcaaacgacaataactatttactcgaatgtttgattgtgtcccatagtatatcgacacgcttgcaattgaaaacagaagctcttagaaaattttaacgacaataactttttactctgatgtccgattgggacccgaatatatcgag

SEQ ID NO: 19747 - DNA, 367 bp, Glycine max
tgatgactaccctcttatgtgaacaatacgggtatttacgatcttgttacatgaatatggcacagccattagaaataacgctaggttagtagccaatggatacaatcatgaagaggggatagattatgaggaaacatatgctcctgttgctagattataagccataacagagatattagccgttgcatccataatggaatctaaactttatcaaacggatggaaagagggcctttgtgagacgcttatcccagaggacgtatatgtctatcaaccccctggctttgaaaactcagatatgcctaatcatgtctttatattgaaaagggctttatatggtatacaacaagcctctagggcttggtatg

SEQ ID NO: 19748 - DNA, 383 bp, Glycine max
  unsure (1)..(383): unsure at all n locations
tcttagtttcacatgatgcagatgggttngtagctacctcatgcactcctctaatgactatggcatcatttctggcgctaaactgctgcgagttggaagccatcttctcaattaaattcctggcttcagtaggagtcatgtttccaagggctccaccactggcagcatctatcatacttctctccatattactgagtccttcataaaaatattggagaagaagctgttctgaaatctgatggtgggggcaactggcacatagtttcttaaatctctcccagtactcatacaggctctctccactgagttgtctaatacctgagatatccttcctgatggttgtggtcctggaaacaaggataaatctttctaagaatactctc

SEQ ID NO: 19749 - DNA, 415 bp, Glycine max
  unsure (1)..(415): unsure at all n locations
agcttgcacattgctgcttgatagaagaagagcaagacggtaaatcatggtactttgacatcaagcggtacgtagagtataaggagtatccacagggggcttctgacaatgacaagaggacattgtgaaggttggcaactagtttctttttaagcggaggtatcctatacaaatgaaatcatgatatggttttgctctgatgtgtagacactaaagaagccgagcgaatgctcatggaggtacatgaagggtcctttgngatgcatgctaatgtgcatgtcatggctaggatgattctaagggcagactatcactggctcaccatggaaaatgactgttgcatccatgtgaggaaatgccacaagtgccaggcattcgcgaacaatgtgaatgctccgcctatgcctttgaacat

SEQ ID NO: 19750 - DNA, 440 bp, Glycine max
agcttctcctataacacagtatcatcagcatattgaagaacattcacaggaactttgttcttccccaccaaaaaacttctgaacctattctgggaaactgcttctctcatcaaccctgtcaatccctcagccactaaatcaaagaggagaggtgccaaggggtcaccttgtctcaatcctctttgaggattaaattctgaagttgggctgccattaacaagaacagaaatggaagccgaattaaggcaggcccttatccatctaatccatctctcatggaaccccattctcttcagcatataaatgagaaattgccaagatacagaatcatatgccttctcacagtccaccttaaaaaccatacaagacttctcggatcttctagcctgctcaatcacttcattagccaccagaactccatgaagcaattgtctaccctg

SEQ ID NO: 19751 - DNA, 417 bp, Glycine max
  unsure (1)..(417): unsure at all n locations
agcttgataatggaagacacatgaacagctctaggcaataacattcatggggctccgaanaatggtgagaatggaggattgccttgagggtcctcacttangcaatcatgaaacacaactccaaactcgaaagtggaggacacatgaccagccctaagcaataacattcatgtggctccgaaaaagggtgagaatggaggattgccttgagggtcctcacttangcaatcatggaacacagctccaaactcgaaaatggaggacacgtgaacaaccctaagcaatagcattcatgtggctccgaanaagggtgagaatggaggattgccttgagggtcctcacttangcaatcatganacacaactccaaactcgaaaatggaggacacatgaacagccctaagcaataacattcat

SEQ ID NO: 19752 - DNA, 339 bp, Glycine max
  unsure (1)..(339): unsure at all n locations
gtttacaaagcgtcgatgccaagtgtatactgtttttatttcatgntacaattgtacgcagcttgtgtctccttcatagagagggcatgcacgatggcctttaacactgcattcattcaaattcctatatgctagaaagtcattaatggtgcccaataacattgcacacaacttgaatgatcaatttggatagccatcaaacacaacaatgcactcatactacaactttgtcaagtacttaatcaagggaccgagataaacaccaatatcatatcctcggctgtcttgcggctgatagcatcattgacaacatcatgtatatttgttgcatgcgcaacc

SEQ ID NO: 19753 - DNA, 352 bp, Glycine max
agcttgctcgagcatgtatcaacttataccaatgtgtatgagttacggacaaagcttgaatctttgattcaaaagaagacgccaaggaataaagctcatcttgtgagacgcttggtcaaggtggagtacatgggtggttagaacatgattgaacatcttaaaaccttcaaatgtattgttaatcaattaaagaagatagatatgaatatagattatgaactacaaactcttctactcctcaattctctgcctgagagttaggacacattggttgtcactctcaacaactctaaactagatggaaagcttagcatggataatgtcacagatagtttgctaaatgaagagtcta

SEQ ID NO: 19754 - DNA, 330 bp, Glycine max
  unsure (1)..(330): unsure at all n locations
tgaatcggacatccgtgtganaagatatgaccatttgaattttgtgcgtctctatatgcgatgctcctgaatcggacatccgtgtgaaaagttatgaccatttgaatttctcaagagcttccgttgcacaatatcgagcctctcgtcatatgatgcgcccgaatcggacatctgtgcgagaagttatgaccattagaatttgacgagaactcacgatgagcaatatcaagcgttactatatgtgaggcgcctaaattggacattcgagttaaatgttatgaccattcgactgtctcaagagcttgcgctgatcaattttgagcgtgtcta

SEQ ID NO: 19755 - DNA, 339 bp, Glycine max
  unsure (1)..(339): unsure at all n locations
tctcgatatattatgcacatgaatcagacttccgtttgataagttatgaccatttgaatttctcgagagcattcgttgttcaattntgagcgtctcgatatattatgcaccagaatcggacttccgtgtgactagttatgaccatttgaatttctcgagagcattcgttgttcaatttcgagcgtctggatatattatgcgcctgaatcagacctccgtgtgacaagttatgaccatttgaatctctcgagagctttcggtgttcaatttatagcgtctcgatatgtgatgcgcccgaaccgtacttccgttgacaagtgatgaccatttgaatttctc

SEQ ID NO: 19756 - DNA, 379 bp, Glycine max
agctttcactctcgaagtctggttcaggcgcataatatatcgagacgctcgaaattgaacaacgaatgctctcaagaaattcaaatggtcaaaacttgtcacacggaggtctgattcaggcgcattatatatcgagacgcttgaaattgaacaacgaatgctctcgagaaattcaaatggtcataacttgtcacacggaggtccgattcatgcgcataatatatcgagacgctcgaaattgaacaacgaatgttgtcgagaaattcatatggtcataactagtcacacggatgtccgattcatgcgcataatatatctagacgctcgaaattgatacacgaatgctctcgagatattcaaatggtcataactttgtcca

SEQ ID NO: 19757 - DNA, 450 bp, Glycine max
  unsure (1)..(450): unsure at all n locations
ntgatggtgtcgagaagacatcacatgtttgtcatcatcaaaaagggggagaatgtgaatgtatgtatacatgattttgatgatgccaaagaagaatcaaactaagttgcttcaaaggataagcatggctttaagattaatacaagattgattcaacaaacatagccttgcttcaagattaactcaagatcaagcctggccttaaaacaaagtgctttcaagacatgcaaggctctggtaatcgattaccaagcagtgtaatcgattaccagaagacagggttgagaaatagctgttgaaaagggttttgaatttgaattttcaacatgtaatcgattaccatatgtttgtaatcgattaccagtggagagttttcaaaaaagtcatgacacttcacattataactgtgtaatcgattacacaaacattgtaatcaattaccagtggaga

SEQ ID NO: 19758 - DNA, 394 bp, Glycine max
atcttctaaactctatacaagaatgaagctctgataccacttgttagacaattggcctcagatatcttaagaaggggggttgaattaagatattgcaaactattttcccaattaaaattctatttcaatttcaatgcaagttacaaattcccttaaaaatgaactcttaaataatgattcacatcgaacaatctgaatataaatataaagcaataataaataaaagagtttaagggaagagaaagtgcaaactcggatttatattggttcggccacacccttgtgcctacgtccagtccccaagcaacccgcttgagaattccactatcttgtagaagcttttacaagttctgaacacacatagacagttcttcctttgagttcatacttcttt

SEQ ID NO: 19759 - DNA, 435 bp, Glycine max
  unsure (1)..(435): unsure at all n locations
tccttaagaagattcctaaagaagctagagcttagctacactcacatctctaatagctaagctcacctccttgagatgagaagctagagcttagctacacaccccctataatagctaagctcacccccatgacaaanaaagatgaaaatacaaaaaaaaaaaagtccttactacaaagactactcaaaatgccccgaaatacaaggctaaaaccctatactactagaatggccaaaatacaaggcccaaacgaaggaaaaacctattctaatatttacaaagataagcgggctcatacttagcccttgggctcaaaatataccctaaggctcatgagaaccctagggccttcccttggatctctagcccaatctacttggagtcttctacccaatgcccttgcgggataggatggcatcaataactttcacatgg

SEQ ID NO: 19760 - DNA, 451 bp, Glycine max
  unsure (1)..(451): unsure at all n locations
tctttgaganaacttccttgagaagctagagcttagctactcttacccctctcataactaagctcacctccttgagaagcttccttaagaagattcctaaagaagctagagcttagctacacatacctctctaatagctaagctcacctccttgagatgagaagctagagcttagctacacaccccctataatagccaagctcacccccatgacaaaaaacatgaaaatacaaaaaaaaagtccttactacaaagactactcaaaaggccccgaaatacaaaggctaaaaccctatactcctagaatgaccaaaatacaaggcccaaacgaaggaaaaacctattctaatatttacaaagataagcgagctcatacttagcccatgggctcgaaatctaccctaaggctcatgangaaccctagggccttccttggatctctagcccagtc

SEQ ID NO: 19761 - DNA, 426 bp, Glycine max
  unsure (1)..(426): unsure at all n locations
agctntanaagattggctaagattttgttaaattataagcacttagacaatgaaggaaagctggagttgctgcacatgatgtccaacgttatgtcaaggaataagatcgggctgcacaatgcacaaggcaagataaaatgtctaatgaagaattgaagttgcaggatccacgatgtcggatacaatgtcctgacatcctgcccgaaaatactggagttgctgcacaatgcataagtcaagataaagtgtcaaatgaagcattgaagctgcaggatccacgatgtcggatacgatgtcctgacatcttgcccgaaaatactggacacataaatctgttatatctttaacagattattgtgcagttagcaagagattagatgatctatctttaggaacgaattaaaagatcattanagttcgaatttc

SEQ ID NO: 19762 - DNA, 443 bp, Glycine max
agctcgaaacatatagattgaatcctagctcctcttaaggacttagttattatatctgtcaactggtcattagaattgatgaacccagcgataatctccttggacaataatttctctcgaatgaaatgataatcaatctctatgtgtttagtcttttcatgaaagactggatatgacgcaatgtgaagagctgcctgattatcacagtataacttcatttgcaccacttcacaaaattccaactcttggagaaattgtttaatccacataagttcacatgtaaccatagccatagatcgatattcagcctctgcactagatcgagcaacaacagtttgtttcttgctcttccaagcgataacattccctccaataacaacacaatatcctgaggtaaatttgctgtctatgggacaaccagcccaatctgcatcacaatatct

SEQ ID NO: 19763 - DNA, 389 bp, Glycine max
  unsure (1)..(389): unsure at all n locations
ttgatgtttgtgttgaatgcattaaaggtanacagaccttatgcacganataagtgcatatagggctacagacgtcttagaattgatacatacgaatatatgtgggtcatttcatacaccttcgtggagtggttgacaatattttatatcattcatagacgattaatccagatatgcatactttgttcttatacatgaaaagccacaatctttggatgtgttaaaacatttaaagtttaagttgaaaatcaactcaacaaaagaataaagtgtgtcagatctgaccgtggtggtaaatactatggcagatatgacagttcaggtgaacaatgtctggngccttttgccaggtatctagaggaatgtggaatcatcccacaatacaccat

SEQ ID NO: 19764 - DNA, 412 bp, Glycine max
  unsure (1)..(412): unsure at all n locations
agctntcatatgatggtggtagagaggctaacttaatcatggtagcatcttcatcctctatcttaacatctatatctcttaattccatcaaaatagaattcaattcatcaagatgatctttaagagatgtaccttctttcatgtgtaaaccaaataaacgcctcttcaagaagagcttgttgcagattgacttagtcatatacaacttttccaacttgagccataagccacttgcagtttcttcatttgcaacttcatataaaacttcatcagacaaggaaagcaagattagtgagtgtgccttttcttcttgttctgcaagttcttcagtctttgaaatagaggccttttcttttgattcagaagccacttctttcttcacagatgcagaagcaacaatagcctaaacacc

SEQ ID NO: 19765 - DNA, 414 bp, Glycine max
agctggctacattgatgcatactgactatggcttgtgcgattttggcacttaaatacgggaggctcaagttgtctatcaaagaagatgatggtgagagtactaccctctattaaccaccctaatcaactttgtgaaggaagatgactcagcatgaaagtgataacgagttttccgcaggagtcagactagagctaagaagccgctcgagctaatacatgctgacgtctatgggcccatcaagccatgctcactacgtaaaataattatttcctccttttcattgatgactcttgaagacaaacatgggtctattccgtatagcacaagtcagaagtgttttctgcccttaagaagttcagagctacagtggagaaagaaaatcgcttatttatccacgccatgaggattgaccg

SEQ ID NO: 19766 - DNA, 424 bp, Glycine max
  unsure (1)..(424): unsure at all n locations
cgtgggntaaagtctcacaatagtcacgtgttaatgtttctttgttagccgnggctatatgagacatcttgcgaaacaaagtcaggttagccatgactcgcctgtgctttttcttgcatgccatatgtagcaaagtcgttgatccctgcaagtatgatgagcagtgaaatgaggctgcaattatactgtgccagttggagatgtattttccccctgctttctttgacataatgattcacttgattgtgcagtggatgtacccggttgagcgatacatgaagatcttaacagggtatacagagaatcaatatcggctagaagcatctattgttgagaggtacatctgtataagaagccattgacttctgttagaatacattgagaacgctatacctgatgacctctctgagtctcgacatgatga

SEQ ID NO: 19767 - DNA, 438 bp, Glycine max
  unsure (1)..(438): unsure at all n locations
tgtccaattganataagctgaanagagcttattctaataatcttttccatcgagtttattgaaacaagttgttcaatagactgcaaaacctttttttttttgtctttattaggattgaataatgcaccaagtttattgttattgctgatgtgcatagatgttgacagggctgatatttggtcttttgggattacggcacttgagttggctcatggccatgcaccattttcaaaatatcctccaatgaaggtatttacatcccgtggttgttcagagacaatgtctagacacatgttaacattggaccgattgaagttcatgtgatataatttgtaataaaagaaaaagagagttcactttttatttcatgtataggttcttctaatgacaatgcagaatgcccctcctggacttgatgatcgagataaaaagttctct

SEQ ID NO: 19768 - DNA, 432 bp, Glycine max
agcttagaaagacattatttcattcataacattatgtaaactagagagccatccacaatatgcgaataaaacatatatgaataattaaaggacatagaacacaataccgaatgtaagtacataccactagccatatatcattgaaggaattaagggtaagacacataatcataaacagccaagagcaggtctatataatcataatgttcaggcatactaagcaagtgttaaaagaaatactacgtgttcaaatgtcataaaaacatatgcaaatacaaggcttacgaacaaatataattataatctaaatatattatccgagaatcaaaacttaattctaagtaacaaaaattagatatgaacacatacatggtaacttattacttatctcgattaatgaaccactagaatgtaagtatcgaataacaatca

SEQ ID NO: 19769 - DNA, 431 bp, Glycine max
agcttataaagataaatgatgacatgattttttcccaatcacactatgttgaaaagctgttgaagaagtttaattattttgatgtgaaacctgtttctactccttatgactcatccatcaagctaaagaaaaatttgggtaaaggaatttcttcacataaatattctcaaattatcggttctttgttgcatttgacaaacttctctaggcctgacattgcatatgcagttggtagattaggaaggtgtactaataatcctgatcattctcattggattgcattagaaagagtttttagatacttaaaaggaaccatcaattatggcattcattatacatgttttcctgcagtaattgaggggtttagtgatgcaaattggatttctgattctgatgaaacaaaatcaacaagtggttatgtttttacttta

SEQ ID NO: 19770 - DNA, 447 bp, Glycine max
  unsure (1)..(447): unsure at all n locations
agcttaagctctntcaactgcacaagcctcttgttatttgaagagtatccttgtggaaccttcacccaacgaagacactgacaaaaacttatcttctccttcttggacaaagtatggcaggctgngggcaagtaaattttcttcccatcagaccttggatgcaactgtgatcgtatacccatatcagctagatcttgacgggtattcaagccatccttcgtcttgccttgaatgttaaggagcatcccaatcacactgtcacaaacatttttctccacatgcataacatcaatacaatgtctaacgtcaagatcacaccagtacgaaagatcaaagaaaatggacctcttcttccatatgcaactctgactnttatccttcttttgggtcttcccaaatacagtattcaggtgttgaacccattgatatacctgctcaccagtcaac

SEQ ID NO: 19771 - DNA, 397 bp, Glycine max
agcttaacaagtggaatcagaggaaagtctctatggcaggcttaattactttaattaattctgttctgacagccttgcctttattttatctgtctttcttcaaagctccttcagcagcgttagtgaggctgacttcaatccaaaggaattttttgtggggaggaggtgctgaagggaaaaagatcgcttggatggcttgcgatcatatatgtactcctagaaatcaaggaggtttgggtatcaaagctatcaaggatcttaatagagcccttcttattaaatggaagtggctgatgtttcaccaatcagaccaattgtggtgcagaatcctcatctcacaatacacacgatggagagggctggaagagaattcccacaggcagtctcattccttctg

SEQ ID NO: 19772 - DNA, 285 bp, Glycine max
gcgcctatgacagtggcaagccctgaacgaatgattcttgcctatgttgtggcgggctagtcgcacagaactacctcgtgtcaactatactcagagatgcaatctgacaccttatgacacatatcaggtatatattgtcatgactttcaagacatacttactgtggcctcgagagattcaggactgaccattgcccatagtatgaacacatctcgcctactgcattacgtccatacgaaggctccagtcacgagttctctgctaccattgcaccacgacacagtg

SEQ ID NO: 19773 - DNA, 445 bp, Glycine max
  unsure (1)..(445): unsure at all n locations
cgcttgagctggtatctgngttaaaaaanaattcgcatttttctttgttggagcaattgggaagaatgagcagtggcagatggaggcagctagatacctgaactgtggagttctgtcctttccttttgcatacttgggtatccccattggggataatccaagatgtagtgatctttgggatcctatagtcagaaaattcgagagaaaattagcttcttggaaacaccaacatatttcatttggggggagagtgacactcataaatgcagccctagcagcaatccctatctactttttttcctttattagggtaccttcaagagtaatatccagattggaagcaattcagaggcaatctctatggngaggaggtatggatcagagaaagattgcttgggttaattggaaaacagtctacaatccaaaggatatatgaggacttggc

SEQ ID NO: 19774 - DNA, 402 bp, Glycine max
  unsure (1)..(402): unsure at all n locations
atggaagtactaagtatttattacctatacttaacagaaaatacttataacacaacaaaataaccataaattggaagagtttgatacaatttacacaagttttatacacaaaagttagtcgtgttcaccgactaacaccatgcagcgcaaagggaagcatctcgtgccaatccttgtatgacacggtcatcttctgaactatatcttcttgatattnttattagcggcctcaactgcctcattcatcttaagccagtaaggcatggaattatggtgttagatnttgaaatcctcacacatctccttcatcatcttgttgttcagattggtggcattgaaggtgataattttccttagcaacccatatcggcaaattatctcccttntgatgaaactaatcac

SEQ ID NO: 19775 - DNA, 302 bp, Glycine max
tatgttaatcaattagactttatccgtatccttgtggatgtataccttgaatactgccatgtagttgttgaacatggtttctagtaatgtaattccaaagacacctcttgagctgtagacaaataggatacctactataatgcacctgcatgtatggggttgccaggcagatataacgatttataatccgcaagaaagaaaattggatgcaagaacaatcagtggatatttcattggttatccagaaaagttaaaagggtgtatgttctattgtactactcatagatgagaactgacaaact

SEQ ID NO: 19776 - DNA, 451 bp, Glycine max
  unsure (1)..(451): unsure at all n locations
ntgatgaaagtgcagtctgaaggtagccaaatacgccttctatgcttaacgaagttgggcgttaacacatgatcagggtagtctgctgggttcgcatgaaccttctcccttaaagtgatgaagtcattatgcgactgcaactccttatagagatcttcaagaaacacaaaatgaggcattgagaggatgaaacatgaggtactaggtaattctgaacatcgcgataacgcgtctgcaaccatattagttttgcctattcgatattgtatagagtaatcaaatcccaacaatcgtgccaaatatcagtgctgttccagcgtttgaatggcctggctcatcaattctttcaagcttctatgatcagtcaggattataaagtggtgccccataaggtattgcctccatttcttaacagcagtggtaatcgcagtgagttcacgaacataagtgg

SEQ ID NO: 19777 - DNA, 434 bp, Glycine max
agctgtgccgtgatggtgcatttgaaattggtgattgggtttatgttcgccttcgtccctaccgccagacgtccatagcgtcgacttacaccaagctttccaaaagattttatggcccattccaggtactggatcacataggcccagtggcttacaagcttcagctgccactttcttcccgcatacatccagctttccatgtatccctcttgaaaccgcatcttgggccatcctcgactacaactgccacattgccatctacagggaacaaccaccaactcttggtctctcctttatccattctggattggaagtgggaccattcatcttccccacctaacaagaaagtccttgtttagtgggatggcttagcatcgaaggatacttcatgggaactatgggacaagctgcgtgttgcctatgaccttgaggac

SEQ ID NO: 19778 - DNA, 450 bp, Glycine max
  unsure (1)..(450): unsure at all n locations
tgttagactgtttcatacaagatatggaaacaaacaaatattcttctatatcgcangtctcccagaacaggtcagaactttgaaacatatatgaatatgatgatgactatgaaactgatattgattccaataaagcatccatgtactctttaagtttcaattttgtaattgcaccttccattctgctttctggaacttcctgcccgttcttgaagagtattaatgtcggtagtccataaactttatactcttaaattacttgcgggttgacatcatgatcaatctttacaaccgttaatctgtcttcatattcctgcaagttattattataaaaaataatcatggtccaggggagacaaattaagatcctaaagatcacttgacaatagttcttaggaaaatcatactatttgtttcacaccatgctatccccaccatatatagcctata

SEQ ID NO: 19779 - DNA, 365 bp, Glycine max
  unsure (1)..(365): unsure at all n locations
tctcgatatgttatgcgtctgaatcggacatgcgagtgtggttttgtgatcatnttaatatcccgagagcttccgttgttcaatttctagcatctcgatacgctatgtgcctgaatcgggcatgcgagtgaaaagttatgaccatgtgaatttctcgagagcttacgtagttaaatttctagcggcatgatacactatgcgcgtgaatctgacatgcgagtgaaaagttaagagcattttaatttctagagagactgcgatggtgaaagtcgagcgacatgatgtgtcatgtgcctgaatcggacatgcgcataatacgttatgaccatatgaatctctccggagcatctgtcgtgcaattacta

SEQ ID NO: 19780 - DNA, 424 bp, Glycine max
tgatttcttggcctgcttgtgctcctttttcggtgttctgtttatttcagtgcctttaggccttggaatagcggtaagataggaattccttaatctgcttcctgccattagaaacctaaaattcattgtatgctaatactatgtgtttaatattactgacttcgccaaaatcttcaggtggcaatatcagtcttcaagatcttgcttcatgtctctaggccaaacacactggttttggggaatataccagggacgccaatattccacaacctataccaatatagagaagctttgaggatcccttcatttatcattttggctgttgagtctcccatctactttgctaattcaacgtacctacaagaaaggttagataaagcgacttgtagattggcgatttgtgaatgcttactacatttcaaat

SEQ ID NO: 19781 - DNA, 439 bp, Glycine max
  unsure (1)..(439): unsure at all n locations
tgtgccttttcacgtctggaatatgaatgtagcatatagattcaaagacccttaggtgctttgttgatggcttcttcccgatccaagcttcaattggagtcttgtcttttacagacttagttggacatctgttgagtatgtaaacagcagtgtagactgcttcagcccagaatgtgttaggtagtcccttctccttgagcatcgatctagccatctccataactgtgcgattctttctctcggacactccattttgttgagaagaatatgcgactgtaagttgtcgctcaatgccttcatcctcacaaaatctttcaaactcgcgagaggtgtactctttgctgcgataacttcttagtacttttatccgttttccactttgattntcagcaagggccttgaactttttgaatactccaaagacttctgattnttcttt

SEQ ID NO: 19782 - DNA, 439 bp, Glycine max
gatctctaagcgactgagcatgcaagctttgtactccactaaatttgccttttgttgaccaaagctaataccgctgacaaccttgtgaaagctgtgcacccaggatacaaaggcatctttgaatcattttctattttctcatacaaaggtacatgtgcttgttgaaatctgtcctgccccaaattgcaaatcatgtcttctatacggtatcccatgtctacatcgactgactcagggtgagagactgatggcttgtttggcaattccccatgccatatccattttgtgtaatttggaatgatcctatgacatatattgactggtgtctcctattcccacattttacgcatggacagaaaaatttaccccgcacacatggtgcattgagtttagtaaattggaggaattggtcaactctattctcatactcgtcactgat

SEQ ID NO: 19783 - DNA, 429 bp, Glycine max
agcttgacgactgtggactgattatattctcttatgaaatgatgatcaatggcaatgtgcttagatcgttcatgatgagcaggattcgaagcaagacttatagcagatgtattatcacataataacatcgcagatggcacatcaacttcagagtgaagaagtaacctgtgtaaccaaacactttcactattaacacacgacaagacacgatattcagctatagtggatgattctgaaacagtgggttgtttcttagaacgccaagaaagaaggttggttcccaaaaagacacaatagccagaagtggatcttctagtatcaacacaattggcccaatcagcatccggacaggcactgaggtcgagagagttctgagcacggaataacaaaccttgtccaggagcacatttgatatactgcataagatga

SEQ ID NO: 19784 - DNA, 405 bp, Glycine max
  unsure (1)..(405): unsure at all n locations
agcttctaaactntatacaagaatgaagctctgataccacttgttagacaagtggcctcaaatatctacagaaggtgggggggttgaattaacatatcacaatcttttctaaattaaaaattctattttgattctaacccatatcccaagatttctttcaaaaatgaactcctaaataattatgcaaattaatcttactaaatagaaacaataagcaatatacaataaaagagtttaagggaagatagattgcacactctgatttatactggtccggccacacccttgtgcctacgtacagtctccaaacaacccgcttgagagtttcactatcttgcaaaagccctttacaagttctaaaccacacaaggacaacccttcctttgtgttaaaattctttacaac

SEQ ID NO: 19785 - DNA, 443 bp, Glycine max
  unsure (1)..(443): unsure at all n locations
tgaaggtgtgtagcccaccatcttttcatagttgaatattgttaatgtgtctactattattgtcatcatctttttctccgtcattgaggtgccacttgagctgccaggtctctccacctttgggcgtattcttttgaagaatttgtgccccctttttgcacatgttttgtagttgcatcctatccgaagccattataccgacactgcctaacgaaggcaaccattaggtcctcccaggaatggactcgggaaggttccaagttagtgtaccaggtaacaactaccccagtaagactttcttggaaggaatgtatcaacaattcctcttcttttgcgtatgcccgcatcttccgacaatacatctttagatggttcttggggcaagtaatccccttgtacttgtcanagtccagcaccttgaacttgagaggggtgatgatatt

SEQ ID NO: 19786 - DNA, 281 bp, Glycine max
tcgaacaacagaagctacgagaactacaatggtcattatatgtcacacggaagtccgattcaggtgcataatatatcgagacgctcgaaatacaacatcggaagctctcgagatattccaatggtcataacttgtctcacggatgtacgagtgacgtgcataatgtatcaagaagctggaaattgaacaacgaaagctctcgagaaactctgatggtcataacttgtcacacggacattcgacacacgcgcataatatatcgagacgctcgaaattgaaca

SEQ ID NO: 19787 - DNA, 246 bp, Glycine max
agctcgaatttgaacaacagaagctcttgagaaattcaaatggccataacttatcacacggaagcccgaatcatgcgcataatatatcgagaccctcgaaattgctcatcaggaagccctcaagaaagacaaatggtgataactcttcaaacggaagtcccaatcacgagcatatatatatcgagaagcttgaaattgaacaatggacgctcttcagaaattcagtcagtcatatctcatcacacg

SEQ ID NO: 19788 - DNA, 470 bp, Glycine max
  unsure (1)..(470): unsure at all n locations
ttacgagcgtctcganatcctacgggactctattggtcatccgagtgaaaagttattgtcggttgaatttgtttagagcttatgttttcaattacgagcgttttgatatcccacgggacacaatcggaaatccgagttaaaagttattgtcgttagaattttctcatagcttccgttttcaattacgagcgtctcgatatcctacgggacacaatcgaacatccgagtcaaaagttattgtcgtttgaatttgctcagagcttcagttttcaattacgagcgtgtggatatattacaagactcaatcagacatccgagttaaaagttattgtcgtttggactttaatagagcttctgttttcaattagagcgtctccatatattacgagactatattagacatccgagtcaatagtatggtcgtttactttcacagagcttgcgtgttaatttgagcggccgatatatat

SEQ ID NO: 19789 - DNA, 405 bp, Glycine max
  unsure (1)..(405): unsure at all n locations
agctttgaggaaattcaaacgacaataacttttgactcggatgtccgattgtgtcccgtagtatctcgagacgctccaaattcaaaacagaagctattagaaaaatctatggacgataactttttacacggatgtcccattgagtcccataatatatcgagacgctcgtaattgaaaacagaagcgctgaccaaattcaaacgacaataacttttgactcagatatccgattgtgtcccgtaatatatcgagacgctcgaaattcagaacaaagctattagaaaaatcaaacgacgataactttntacacggatgtccgattgagtcccataatatgtcgagacgtttgatattgaaaactgaagctctgagaataatcaaacgaccataacttttaactcggat

SEQ ID NO: 19790 - DNA, 469 bp, Glycine max
  unsure (1)..(469): unsure at all n locations
tgtagaaaatcganacgacaaannattttatctaagatttccgaataaattccgtagtatatcgagacgctcgaaattcaaaataaacctctcagcaaaatgaaacgacaataactttttactcgaatgtccgaatgaatcccgtaatatatcgagacgctcgtaactganaacagaagctctgagcaaattcaaaagataataactttttactcgtacgtccgattgtttcctgtagtatatcgagaccctcgtaattgaaaccagaagcccgtagcaaactcaaacggcaataaatttttactcggatgcccgaatgaatcccataatatatcgaggcgatcgtaattganaacagaagctatgagcaaattcaaacgacaataactntntactcggatgaataccgtaatatatcgagacgctcgtaattganaacaaaagctctgagcacattcaaacgacaata

SEQ ID NO: 19791 - DNA, 424 bp, Glycine max
agcttctgttttcaattacgagcgtctccatatattacgggcctcaatccgacatcggagtaaaaagttattgtcgttagaatttgctcagagcttctgttctgaattttgagagtctcgatatactacggaacacaatcggacatctcagtaaaaagatattgtcgtttgaatttgctcagagcttctgttcttaattacgagagtctcgatatattacgggattcattcggacattcaagtaaaaagttattgccgcttgaatttgctcaaagcattcgttgtcaattacgagcgtctagatatattacgggattcattcggacatccgagtaaaaagttattgtctttttatcttgctcagagcttctgttttcaatttcgagcatcttgatatattacatgactcaatcggacatccgag

SEQ ID NO: 19792 - DNA, 403 bp, Glycine max
  unsure (1)..(403): unsure at all n locations
tataagtgaggcctngtgagaggatttgtccaaaccctcctatatcagtacttgtagtaataaagctgacactactactactaaggcaaggataagatgcagcatcgaccaaagctntctgaagaacaaatctgttaagggtaccacggaacttcttgaacagcatgtgtggaggccccagagagggttgccagagcgtgcagtggcaattcttaaagcctggttatttgagcattttcttcatccgtatgttagtctctatctatgtctcttattaatatatttcttgcttcgtgactctcttttctgcattctaaagagacatttggattgaattgtgtgctttttttgctgatgttgaatatctctttcattaccctacagacactgattaacacatgct

SEQ ID NO: 19793 - DNA, 412 bp, Glycine max
agcttatataggaagcttcaaaggagaaacaaaatgagagagaggggaaaaaagtgacatgggaatgaaggaaagatggggaaagaagttgaactttgactcgtatgcaatatcatacttcgagagttcaattgaccatgtcatcatttgtctgactaactcaggcttgcgtaatatcttgcctattgggcaatcagtttgaacagtgatcttgtggctctgaaagtattgtcgaaggtagcaagcggcgttgaccagtgtgagggctaccttttccatcacctgttacctcgtctctagatcttacagctcccgacttacaaagtatatcgacctctgctatcttccttcctcttgtatcaataccacgcttatggcctcgatcgagatcgacaggtaaacaatcaatctt

SEQ ID NO: 19794 - DNA, 427 bp, Glycine max
  unsure (1)..(427): unsure at all n locations
agcttatgctacaaacatctacaacagacctcctcaacctcagcagcaaaatcagccacaacagaacaattatgacctctccagcaacaggtacaatcccgggtggaggaataatcccaaccttagatggtcgaatccttcacaacaacagcaacaacaacaaccttattttcaaaatgttgctagcccaagcacaccatacgttcctccaccaatccagcatcaacagcagcaacagccccagaaacaacaaatagttgaggctcctccgcaaccttcccttgaagaacttgtgaggaaaatgactatgctaaacatgcagtttcaacaagagaccagagcctncattcagagcttaactaatcagatgggacaattggctacacagttaaatcaacaacagtcccagaattctgacagattacct

SEQ ID NO: 19795 - DNA, 489 bp, Glycine max
  unsure (1)..(489): unsure at all n locations
nggttcccaacgctttgttcanactctcccanaacctagaggttttatagaatctctatcagacactatgctagatggcacaccatgtaatctgacagtctcactaatgtacagggaggtcaacttctctaaggaaaacctaatattgatggggataaagtgtgtagatttggtcaatctgtcaacaacaacccaaatagaatcaaaacctttgggggtcctaggtagtcctacaacaaaatccatggggatactatcccacctccactgnggtatctctaatggttgtaacttacctgaaggtctctgatgttctatcttagccttctggcagactaaacacgtatacacaaactcgttaacctctctcttcatgttgggccaccanaacattatctttagatccggattcatcttggtagcaccaaggtggatgctcanngtgctcctatgaccttcctctaagatcatcttcctatgttcggcaca

SEQ ID NO: 19796 - DNA, 407 bp, Glycine max
agcttagactgagttcatcctaccatcctcagactaatggccaaactgaacggaccattcattcgttggaggaccttttaagagcatgtgtcttagagcagaagggaagttgggagagttttcttccattgatagagttcacttataataacagttttcactctaccattagcatggctccctatgaagctttgtatgatagatgatgtacgacacccctatgttggttagagcccggagaaggcctcaccttatgaccagacgtggtacaacaaaccactgagaaagtttagttaattcaggaaaggatgagaactgctcacagtacgtagaatagttatcatgataagaggaggaaagaattggaattcgacgttagcgatcatgtattcttgagagtcactctg

SEQ ID NO: 19797 - DNA, 411 bp, Glycine max
  unsure (1)..(411): unsure at all n locations
tgtcatcgattaccagaggacattntcagaaaattatttctatgagtcacaacttttcaaatggctcttacatggccatcaaaggtctatttatatgtgacttggaacacanatttgctcacaatttttcagaacaaaaaggttttatcctctcaaaaagcaaaatcttcttatcctcttaagattccttggccaatacacttgcaattcaataaggatttatttgagtgctcaaattgttcaatctatctctttcaagagagatttcttcttctcttcactctaattctcanaaagggattaagagaccgagggtctcttgttgtatagaaatctgaacacanaggaaggattgtccttgtgtggttcagaacttgtatagggatttacaagatagtggaactctcaagc

SEQ ID NO: 19798 - DNA, 342 bp, Glycine max
  unsure (1)..(342): unsure at all n locations
gtggttntcaattacgagtgtcgcgatatcctacgggactcttttgacatccgaatcanaagttattacgtttgacttttcctagagctcccgttttcaatttctagcgtctcgatatattaaggggctcaatcggacatccgagttaaaagttattgttgtttgacttttcttagagcttccgttttcaattttgagcgtctcgatatattacagggctcgattagacatccgagttaaaagttattgtcgttagatttttctcagagcttccgttttcaattacgagcgtctcgatattctacgggactcagtcggacatccgagtcaaaagttattgtc

SEQ ID NO: 19799 - DNA, 403 bp, Glycine max
  unsure (1)..(403): unsure at all n locations
agcttagagttgataagtattctagcttacaaacttcattggatactggaacagctaaaggcttaaccaagggaaaaagagtcatcttaccctcaacgtttgttgggagcccatgttatatggatcaactttactttgatggtatggcaatatgcagtcatgttgggtctccaaatctttttattactctaacctgtaatccaaattggcccgaaattcgtagattactttcacctttgaatctcanaccaacagacaggccagatattgtatcacgaattttcagattaataaatataaacacatgctgtcagacttaacaaagggtcaattactgtgaaaagtggttgcatgtaagttgaccatcatctttatacttaaatacaaatataagttggtcatt

SEQ ID NO: 19800 - DNA, 507 bp, Glycine max
  unsure (1)..(507): unsure at all n locations
tattacggacactatagatactcagctanacattcaatttcgagagtctcgttatattacgggactcaatcagacatccgagtaaaaagttattgtcgtatgaattggcttatagcataaacattcaactttgagcctctcgatatattacgggactcaatcagacatccgagtaaaaagttattgccgtttgaatttgctcagaggttcaacattcaatttcgagcgtctcgatatattacgggactcaatcagacatccgagtaaaaagttattgtcttttgagttggctcagaggttcaacattcaatttcgagcgtcccgatatattacgtcactgaatcggacatccgagtaaaaagttattgtcatttgaattggctctgagcttgaacattatattacgagcgtctcgatatattacgggactcaatcagacattcgagataaaagtattgtcgttgaattggatataagacaacattcaattcgagcgtctgatatata

SEQ ID NO: 19801 - DNA, 342 bp, Glycine max
  unsure (1)..(342): unsure at all n locations
agctttatgccaattcatacgacaataactntttactcggatgtctgattgagtcccgcaatataacgaaacgctcgaaattgaatgcttaagctctgagccaattctaacgataataactatctactcggatgtccgattgagtctcataatatatcgacacgctcgaaattgaatgtcgaagctctaagcctattcaaacgacaataacgttctactcggatgttccattcagtgacgtaatatatcgggacgctcgaaattgaatgttgaacctttgagccaactcatacgacaataactttttactcggatgtctgattgagtcccgtaatatatcca

SEQ ID NO: 19802 - DNA, 374 bp, Glycine max
  unsure (1)..(374): unsure at all n locations
atgaagtggctngacctttccatactgagtatcatggactgtattctcctacttttggaacattattttatctcgaatatctagacttgtcttcaaacaagtttgaaggttcaattcctcccaaattgtgtgctctaaggagcctcaaaacattgaacctttccaataactcgctggtgggagagataccaaacgaacttcatggccttgagagtctacaggattttcatatattcaacaatcacttgagcggtttgataccatcttgtgtagggaattggaccaatctgagagttgttgctgcttatgagaataattcctatggaacgtgtacaagtaaacttggatctatttatgagcttacaacacttaac

SEQ ID NO: 19803 - DNA, 233 bp, Glycine max
  unsure (1)..(233): unsure at all n locations
tatgaaagctcttgagcatgtcgaatggtcatatctttcacacgacggtcagactcacgtgcataatatatcgcgacgctcgaaactgatcaacggaagctctacatacattcaaatggtcatacttgttactcggacgtgcgaatcatgggcataatatatccagacgcttgaaattgaacaacgcgaactcncgagaagttcaaatcggcataactttttactatgaggtc

SEQ ID NO: 19804 - DNA, 389 bp, Glycine max
agctttatctagataagtatgatcagggtttttcacaaactgagtagcacatggatttttctcaaaacatgtttaccaaagagttttactctctggtaatcgattatcagattattgtaatcgattaccagcatccaaatggatttgaaaaagctttcaaactgaatttacaacgttccaattaatttcaaaaagctgtaatcgattacaatcttttggtaatctattactagtgccattgaacgttgaaattcaaatttatatgtgaagagtcacatcctttcttataaaagccttgtgtaatcaattacactaatttgataatctgattaccagtgattgttactgaataaatcacaagatgtaactcttccaaagggtttgacttt

SEQ ID NO: 19805 - DNA, 370 bp, Glycine max
  unsure (1)..(370): unsure at all n locations
ccagggtgctggaactacttcattttgacttgatggngcctatgcatgttgaaagccttggaggaaagaggtatgcctatgttgttgtggatgatttctccagatttacctgngtaaactttatcagagagatatcacataccttctgagtattcaaagagttgagtctaagacttcaaagagagaaagactgtgtcatcatgagaatcatgagtgaccatggtagagaatttgataacagcacgttcactgaattctgcacatctgaaggcatcactcatgagttctctgcagccattacaccacaacagaatggcatagttgacaggagaaacttgaccttgcaagatgctgctctgcgcatgcttca

SEQ ID NO: 19806 - DNA, 426 bp, Glycine max
  unsure (1)..(426): unsure at all n locations
agcttgcaaagttagaaatatcttgtttgattccgatgttgtgaagtcaaggaaagatttttctattgccatgatgaggtcatctatagttttaggagcctctttgtgttgtaatgactgaatggcattaaagaagccaagatctaagacattaaaatcaagcaagtttgggggttgagaaaccaatcgaatgtcaaaaccgccttcactagcagcttaatggaagtcgttgtcatcttcatcaatgtgacatggagcattgtcttgttgtatgaaaatagtctctcctctatccnctattggccattttgctttgattgcagacaacacatgatgaataagaanatgtttgcttacttgtttaattattgaagatattggttntgttccatagtccctgtatctcttgttgcactccttctcttt

SEQ ID NO: 19807 - DNA, 405 bp, Glycine max
  unsure (1)..(405): unsure at all n locations
ntgagcaaattcaaacgacaataaagttttactcggatgtccgattgagtctcgtaatatatcgagaagctcgaaatggaataccaaagctctgagcaaattcaaacgacaataactttttactcggatgtcttattgagtcccataatttatcggaacgctcgaaatagaataccgaagctttgagcaaattcaaacgacaataacctttttactcggaagtcggattgagtcccgttatatatccagacgctcgaaattgaatgttgaagctctgagcaaattcaaacgacaataacctttatactcatatgtcggatagagtcccgtaatatatcgagacgctcgaaatggaataccgaagctctgagcaaattcacacgacaataactttatactcggatg

SEQ ID NO: 19808 - DNA, 376 bp, Glycine max
agtctttgtattcaatttcgagcgtgtcgacatattacgggactctatcagacatccgagtaaaaagttattgtcgtttgaatttggtcagagcttcgataatctatctcgagcgcctcgatatattacgggactcaatcatacatccgagtaaaacgctattgtcgtttgaattcgctcagagcttcggtctttaatattgagcgtctcgacatatgtctggacttatctccacttccgagtaaaaagctatttgggtttgaatttggccagaacttccggattcaaattcgagcggcacgatttattacgggacttaatctcacatccgaatcaaaattattgacgtctgatttgccagaacttcggtattcat

SEQ ID NO: 19809 - DNA, 459 bp, Glycine max
  unsure (1)..(459): unsure at all n locations
attgagtccgataattcagaatcttcatctggcaattgtgttttggaggcatggaagttaccaggagtggctccgtttgctttctgtctctttttctcgaagctcgtggcttacactnttctgtactggttgcccttctacataaggcacacaggtaatcattattattatattacatgaaaaattatgatatatatagagttgcattgccttttatctaacatcagcatgttattcatatgcgaagaatttattactagtgtcttcatattcctgatatattgtctcaagggtttgtcactacgaatttggagtgcttgtttggtaggactggtatgtgatgtgtctttaggcagatatgaatctgtgtgacaggtattgcatggcggtttattagcatgtatggtgcaatttgaatctggagaaataattgtatattttcacaagctctctcagcta

SEQ ID NO: 19810 - DNA, 357 bp, Glycine max
  unsure (1)..(357): unsure at all n locations
agctntttcttatggtctgtaccacacattattataacgaacacccttaatgtcataaaccataagtttatgattaaaaaaaatgttgtttagcatgacctattaggtcatcccatgtcaactataatgtggaaaatatttaaaaattcatgtggacatccatggaagagccagaagattcttcagtccaatgatttctcatgtactatttattctcaaaggaagttggtaattacactatcaccaagaaaaattggaaatgagtctattttatttttagaacggatataatgtgatatttgtggatcaatatattcaccatatggatcatttagatatttcatgatgcatcaacta

SEQ ID NO: 19811 - DNA, 449 bp, Glycine max
ctcatgagagagtcaaagatcaaactgagaggagatataaaagctatgtctttctagccaacaaagggagaaagaaggttgtcttcgaacccggagattgggtttgggtgcacatgagaaaagaaaggtttccggaacaaacgaaatcaaagcttctaccaaggggagatggaccatttcaagtgcttgaaagaatcaatgacaatgcttacaaagttgagctgcccggtgagtataatgttagttccaccttcaatgtctctgatttatctctttttgatgcagatggagaatccgatttgaggacaaattcttctcaagagggagagaatgatgacgacatgttcaagagcaatggcaaggatccacttgaaggacttggaggacctatgacaatggctaaagcaaggaaagcaaggaagctcttcacaagtgctgccatactattt

SEQ ID NO: 19812 - DNA, 429 bp, Glycine max
  unsure (1)..(429): unsure at all n locations
agcttcttcacatagtccgcctttgcttgaccttctttatgcttaanaacagaaacattaggcataggcaaaagatcaagaggagttagtgggttaaaaccataaacaacttcaaaaggagaacaattagtggtgctatgaacagctctattgtaagcaaattcaacatggggtaaacaagcttcccaagtttttaagttcttcctcaaaactgtcctaagcaaagttcccaaagtcctattaacaacttccgtttgcccatcggtttgtgggtgacaagtgagtgaaaataacaatttantgcccaacttgctccacaaagacctccaaaaatggcttacgaacttagagtccctatcactaacaatgctccttggcaaaccatggagtctcacaatcttcttgaaaaacaaatcagccacatgggaa

SEQ ID NO: 19813 - DNA, 478 bp, Glycine max
  unsure (1)..(478): unsure at all n locations
ccgtatagtttatcaattcaactcgagatttgatataaacatccaaatttcaatgtttccccaatgttgatacagaataacagcgatactcattntaatatacagagagggacatgctatgatacggcaatgatataagagaatatggcaaattgcaacttataaattaatttaaaattaagtttaatcatcatgcactcacaagtttaatggtcaatcaatcataaatctttattaatatataacttttaaggtataatctattttctctttaaaattaatttatttcctttttaaaaataaattagaataaaagttcagattataagagaattcatattctagaaatgaacataagtcaatatatacataaaaatgttaaaacttatataattagtatgagattctaatttatatttggatacaagttaanaaagtatacgtagaaaattatgacaataacataacagtatccata

SEQ ID NO: 19814 - DNA, 423 bp, Glycine max
agctttaatgtccctctggtctttacaccattgttttatagtgtatctcaagttcctcaacttatttttaagggcaattcccccccccccccaaccaccctacagatctgtattccaagcctctttgatcatagagtggtaccctttatgattaagccaccagtccacaacccgaaaaggcttagggccccagtccaccatccttgtcttcaaaatgattggacaatgatcagaataatctctttgaaggacatgttgggaagtatcaggccacaaggataaccactgatcagacaccaagaatctgtccagcctactcttggcactgccattgagcctaaaccaagtaaaatagctgccaaagcatctaatatcatggagctccatctttgatatccagtcattgaaatctgaggtatctga

SEQ ID NO: 19815 - DNA, 401 bp, Glycine max
ttcgagtgcctgtatattgatgcgcctgaatcggacatacgagtgacaagttatgaccatttgaatttctcgagagcttcctatgtttaattttgagcgtctcgatatattatacgcctgaatcgaacctcagtgtgaaaagttatgaccatttgaatttctgtagagcatccgttgttcattttcgagcgtctctatatgtgatgaaccttaatcggacctccgtgtgaaaagttatgaccatttgaatttctcgagagcttccgttgttcaatttcgagcgtctcgacatattatgcgcccgaatcggacatccgtgggaaaagctatgaccatttgaatttctcgagagcttccgttgttcaatttcgagcgtctcgacatatgatgcgcccgaatcg

SEQ ID NO: 19816 - DNA, 240 bp, Glycine max
agcttgaatcggacctcagtgtaaaaagttatgaccattgaaatttctgcagagcatccgttgttcattttccagcgtctctatatgtgatgcaccttaatcggacctctgcgtgaatagttatgaccatgtgaatttctcgagagcttgcgttgtgcatttacgagcggcgctacctattacgcgtccgataccgacattcagggaaaaaggtatgaccttatgaattgcacaagagct

SEQ ID NO: 19817 - DNA, 477 bp, Glycine max
  unsure (1)..(477): unsure at all n locations
tcaagaattgatggcctcatcatactactagttccctgaacgcaattcaactaatctgcctcccattgttaatggagtgggttaccattattggaaaacccgcatgcaaatcttcatagaggctatagatttaaacatttgggaagccatagaaataaggccttgtattcccaccatggttgctggaaatacaacaatagagaagcctaaggaagattggagtgaggaagaaagaagactagtacaatataacttaaaatccaaaaacataattacatatgccctaggaatgaatgaatactttagggtatcaaactataaaaatgcaaagggtatgtgggataccctacaagtaacacatgaaggcacaacanatgttaaaagatctaggataaacacattaactcgtgaatatgaactatntangatgaatgcanatganagtatgcaagacatgcanaagaggttcacacacat

SEQ ID NO: 19818 - DNA, 471 bp, Glycine max
  unsure (1)..(471): unsure at all n locations
taatatatcgagacgatcaanattgaacaacggaagctctcgtgatattaaaatggtcataagttgtaactcggatgtccgattcaggagcttcacatatcgagatgcacgaaattgaacaatggaagctctagagaaattctaatggtcataaattctcacacggaggtcctattcaggcgcttaatatatccagacgctcgaaattgaacaatggaagctctcgagatattcaaatggtcataacttttcactcggatgtccgattcaggcgtatcacatatccagacgctcgtaattgattagcggaagctctagagaaattcaaatggtcataacttttcacacggaggtcctattcaagcgcttaatatatcgagacgctcgaaattgaacaacggaagctctcgagaaacttaaatggccataagttttaactcggatgtccgattcaagcgaatcatatatcaa

SEQ ID NO: 19819 - DNA, 420 bp, Glycine max
agctttccaatgtcttcaagcatcaaatcaatacaatgggctgcacaaggagtccaataaatatgtttccttttgtcctctaacaacttacccgctaaaacatagttactcctattatcagttacaacttgaacaacgttctcttctccaacttcctccacaatagcatcaagcaactcaaaaagcttttcacctgtcttcacaaaatcagagccatcaacagacttcaaaaacattgtaccagcttgagagttaaccaaagaattaatgatgcatctttgtttccgatcagtccatgcttcgaacataatagtacaaccatacttgacccattgctccttgtagtctttcatcagatctttagtgcagtcaacttccttcttcacgagtggaactctgatatcatgacagctcggaatg

SEQ ID NO: 19820 - DNA, 425 bp, Glycine max
  unsure (1)..(425): unsure at all n locations
agcttgaccaggaattacttgtatgggttggatgttgaattctggttgttcctggtgcggagatgatggtacagcgggtgaaccagaagcggaagtttcttttggtgaggtagccatggaaaagcagagcgtttggaatgatttcgtaaatttcagaaggctattgggaaatgctggtaaaaacacgaatgccaagcagatataaatttgaatgaggaatgtatagggtcgtgtgaagcaacggtcgaattttccttggttcagtagtgaacgtgctattaatgttaagtgattcgtttgggcacgttcagattgctgtagttgctataattnctctagcacacaaatgcccagcttgcccctcagttnttcaaactgatttgcatccaaagcctttgtgaacatatctgctatttgttcctcag

SEQ ID NO: 19821 - DNA, 483 bp, Glycine max
  unsure (1)..(483): unsure at all n locations
ggatgcatacaacctatatgctccaggttgagggggagagttgagatattatgtagattacagagatatatattaagagacatgatacgagttcgatttagttatatcagatttgatttgtatttatgtagatgagatcttttctatagtgtaattaggatcatatttctagtgccattgtatctttagaattacctctattcatgtatcctttttacagtttaatcaatccgaaatatacatacttcttcaattatttcctccagtctcaaatataccatgttgagtgttatcagcaacaaattttcagtataataaagtattactagctatttccagtccagttctatcagaatgtanaagaagggagttaagttcttacaacagcaacaacaccatcatatgagttaagcttcacatttgtcanagaagacatcacatcaaatgcctctcctgctctctctgtcacaatcacctagtaat

SEQ ID NO: 19822 - DNA, 358 bp, Glycine max
atgatgttcgtgttgaacgcattacatgtagacataccacatgctttatattatgtgcatacagagctacatacatcttggaaacgatacatacggacatttgtgggccatatcatacgccttcatggaatggtcaacaatattctatatcattcataaacgattactccagatgtgcatacttgattgatatacatgagaagtcacaatctctggatgcgttcaaaacattgaaagtcgacgtggaacatcaactcaacctttgaatgcactgtgtcagatctaaccgtggtggtgaatactatgtcagatatgactgttcaggtgaacaacgtccagagcctatcgtcacgtacct

SEQ ID NO: 19823 - DNA, 425 bp, Glycine max
  unsure (1)..(425): unsure at all n locations
agctntggagtttccaagtgccaattcgtcttcttctttagtccagtcttcttctggcttcaatccatcagtgggctttccttctgagtccagcatcttgggatgttcccagcctttgatgacagctttccaggttctgctatccagtgatttgaggaaggccaccatccttgctttccagtattcatagttggttccatccagaattggtggtctgttcactggtcctccttctttctccatgttcatcagaatttatctccctaggtctcactcagtgatttcgagtgcccgctctgataccaattgaaattctgataccaatgccagatgtcgtacaggatgtcacgacatcacgcttcagaacaagcagattatctctgagtgtatgaacagattatacaagtaaataacacaagagaatt

SEQ ID NO: 19824 - DNA, 436 bp, Glycine max
  unsure (1)..(436): unsure at all n locations
ngagagagatctcaagaaccggaggttgcttagggactggatgtatttactggttgttgccgaaccagtataaaattcttgtgttgttcttcttcttccatacactatttaatttccgttgtgtactttacttttatgctatacttttgtttaagttacataacttagtagtaaagcctaattgaatctagtaacattaagaaggatcagttttaattagtcaaggttacttaataattaattcaacccccctattctcaattactccaaggccacttgatccaacacattgtaccctgagcaactgccagatagttcttcttccttttcttttcttttcttaagagctgaatgtaatccatgtacccttatgggtcctctctgatattatgtatgtattcatcttctcacctttatcattagtaattncatttca

SEQ ID NO: 19825 - DNA, 423 bp, Glycine max
agcttgaaggtaaactagatgccttggttaacctggtaacccaactggccatgaataaaaaatctgcacctgtcaccagactctgtggtttatgctcctctgccgaccaccacacagacctttgcccttatgtgcaacaatctgaagcaattgaatagcctgaagcttatgctgcaaacatctacaatagacctcctcaacctcagcagcaaaatcagccacaacagaacaattatgacctctccagcaacaggtacaatcccgggtggaggaatcatcccaaccttagatggtcgaatccttcacaacagcaacaacaacaaccttattttcagaatgttgctagcccaagcagaccatacgttcctccaccaatccaacaacaacaacaacaacaacaacaacagcaacagccctagaaac

SEQ ID NO: 19826 - DNA, 431 bp, Glycine max
  unsure (1)..(431): unsure at all n locations
ntgatgcaacatatggagaggttaatgaaacaacgagatgatgttctccatgagaggctggatcacatggagaatatagatcataatgaagaagacaggagtagaagagggaatgatggtgttcctagacaaaactgaattgatgatattaaactcaacattcctccatttaaaggaaagaatgatccagaggcctacttggagtgggagatgaatatagagcatgttttctcatgcaacaactatgaggaggaacaaaaggtgaagcttgccgtcacggagttttccgactatgttcttgtgtggtggaacaagctacataaggagagagcaagatatgaagagccaatgtgtgatacatggatggagatgaaaaagatcatgatgaagcggtatgtgccggctagttactcaagggacttgaaattcaa

SEQ ID NO: 19827 - DNA, 424 bp, Glycine max
  unsure (1)..(424): unsure at all n locations
agctttatatgattggctaagattttgttaaaacataagcacttatacaatgaaggaaagctggagttgctgcacaagatgtccaacgttatgtcaaagaataagatcgggctgcacaatgcacaaggcaagataaagtgtcaaatgaagaattgaagctgcaagattcacgatgtcggatacaatgtccaggacatcctgcccgaaaatactggaattgctaaaagcattgatattgctcgatccacgatgtcggatacaatgtccaggacatcctgcccgaaaatactggagttgctaaaagcattgaagttgcaggatccacaatgtcngatacgatgtccaggacatcttgcccgacaatactggacatataaatctgttatatctttaacagattattgtgcagttagcaagagattag

SEQ ID NO: 19828 - DNA, 426 bp, Glycine max
gcttgttatgaagatgataaaacctatctcttactagatgtcagctagttgtgagtctgtatccataaactcaatgtcacaatcacctttgtgaatatgatccctaatgaaatgatgcttaatatttatacgctctgtcctagaatgcatgatacgattcttagtgatactaatgacactagtgttatcacatcttaaaggaatatgtcctaaatgcaatataaagtcagaaagttattgattaagacacaagatttgtgcacaacaacttcacacaacaatgtactcagccttatctgtaaacaaggcaacacatgctcgattcttactattccatgaaaccaggccattacctaacaagcggcaaatactactagtgcttctcctatctagtgtaaatctggaaaagtttgaatctgagtattc

SEQ ID NO: 19829 - DNA, 386 bp, Glycine max
agcttgacatatttaacatacttaggaactttttttgtgcggtgggaattctctaattgtatcatgtgggccttttgaaagtaacaaacagaaggccagtctgttgcaagtttgctgctgaacatcacattccaccctaagaaaacacaaggtggattgcatcgagggtggataccttaccttagcacagaaggaaaaagtatgtcagtgcaaagtatggactaaactgctttcaggaaaaaagttgtaaaaattgatacaggttggaaaagggaattttccttcccggcttggagtcctcccaatttaaggcagaacccatccactccaatttctgcagtttaaaactttctctacttatttagttgtctcctctgagttcaacc

SEQ ID NO: 19830 - DNA, 387 bp, Glycine max
agcttgcttcttgatgaaatggctataaatgcattaaggatctatatagtattacaacaacaacccaacactgtcgatgcgtactttggaagataggtaacatctcggcattcataaagtctgtcgatctttatttggaaagatttgctccctctccgacttgggtaatgaaagcatgggaaacaactcaagatgaaacgatgactgctggtgtgttggatgctgtggatttcaacacattcggtgtgttcaacttgttcaatcattctaaaaccgaaacctcttgaacctttatgtcttatattgtggcatgctatggtgaaatggttatactataagtttaatctgaaatcacaagatgcaacctacttgtgaagtatcctaatc

SEQ ID NO: 19831 - DNA, 365 bp, Glycine max
agcttagtctggctggatatgaaattctgggttgaaaattcttttctttaagaatgttgaattttggcccccactctcttctggtttgtaaggtttctgcagagagatccactgttagtctgatgggtttccctttgtgggtaacccaacctttctatctggctgcgcttaatattttttccttcatttcaaccttggtgaatctgatgattatgtgtcttggggttgctcttctcaaggagtatctttgtggcattctctgtatttcctgaatttgaatgttggcctgtgttgctaggttggggaatttctcctggataatatcctgaagagtgttttccagcttgattccattctccctgtca

SEQ ID NO: 19832 - DNA, 400 bp, Glycine max
  unsure (1)..(400): unsure at all n locations
agctttgctggtcttaccttatctccttttggtccataaggtcccagaaggcctgngaaacccctttctcctttcaatcccgataaaccagtagagccagtgaatccttgaggacctgttgggccttgaattccaattggtccaggtcgtccctaaggtggacagaaggagtgcaattagtcaatagaggacttagcattaatacttctcattttcccacgcacaaagagcactgtcataacttcactgaataattttggctaagagatctgtgaggcacgccaaagttccagacacggatcagaaaaggctattttagggattgctaagcttatttggatagaacacattttataagcacatttaataagattcatgtgcaccaagatccttcaacttt

SEQ ID NO: 19833 - DNA, 392 bp, Glycine max
  unsure (1)..(392): unsure at all n locations
agcttgatgaaattcaggatagcacagaaacaattcagaatactgtcagacaaatttacaaagagatttaattaatttttaacaattatgcagacattttttaaatgaaaaacttagttgacatactgcagaatgcatcagagtctcttactggcagaattgatcaagcagaagaatcagtgaacttataaacaggctatttgaaaatacacagaggagacaaaaggaagaaagaataaaaaagaatgaagcatgactacaagatctagaaaatagtcttaacagggcaaatctaggagttattggccttaaaattattggccttattggcctgatgaggtagagagagagagacggnggtagaaagtttattcagaggaatagtaacaaag

SEQ ID NO: 19834 - DNA, 383 bp, Glycine max
agcttttgggtctcgctgagtttttggctattcacttttctttcttgtgatgcccctgtgcaggtaagaaatgtgtatacctcttctactgtgaatctgcctgttgtcagtttatttcatagacttagttattgagccctcagaggatagagggaaagtcttccctctcatatagaagggaaaaggtagctccgagagtgggagaatatatttataatacatttctctaagagtacttatatccataatttataaacaaattttgaaaattaaaagagagcagtagaataagcaaaacagttgaacaattatatgtttgcatacctatgaaatgcaaatatataaagaaatatatatatctgcaatttatatgaacagaatca

SEQ ID NO: 19835 - DNA, 386 bp, Glycine max; identical to SEQ ID NO: 19829

SEQ ID NO: 19836 - DNA, 365 bp, Glycine max; identical to SEQ ID NO: 19831

SEQ ID NO: 19837 - DNA, 404 bp, Glycine max
  unsure (1)..(404): unsure at all n locations
agcgttcatcacccttgcatcgactgcattgtgtggcattatccattcagacttacaatggctgcccctcctcatactacgcggaggtgagccaacagctctgatgtatacattcctttatgactatgcaaaaggtagaaaggatttggggcacaaatattcttgccttggactggatnggatctctttatttccttgagtggctcgatatttattagaaggagattgctatctaatcggaccaattttctataccttttgatttttagggcgtgtgattggatagacgggctgctcttcttgctggctattcttggcgcatgctccataatgcaacgattcacacgccttccaagcgaactatatggcctgctaataccaatgctctctatgcagtaggctat

SEQ ID NO: 19838 - DNA, 400 bp, Glycine max; identical to SEQ ID NO: 19832
  unsure (1)..(400): unsure at all n locations

SEQ ID NO: 19839 - DNA, 392 bp, Glycine max; identical to SEQ ID NO: 19833
  unsure (1)..(392): unsure at all n locations

SEQ ID NO: 19840 - DNA, 447 bp, Glycine max
agctcttcctctggttgctctgctaaggtttccatgtgctagaaagaaagagaagagattgaattctccattccagtgtctgcatgtgatgagtatttatccctccctagatattaagttaacaatcccaatggagaagatgtgcgtaaatgaatcaaaaacttggtatccaaatttcacgaagatccaatggttaaaaagtctcagattgtagttttactaaaacagatttgggtatatgcggaaaaaaggaaagctacgacacggagggaatttctctcagctccgacattgtttctcatattgcaacgatgggaatctttggaaatgagttccagacttggtgctcacatttcacgacgatctaacggttaacgagtttatgatcgtcattttctgagacagagttcagtgtatgcgcgaaaaagatagggtcttgggagagga

SEQ ID NO: 19841 - DNA, 383 bp, Glycine max; identical to SEQ ID NO: 19834

SEQ ID NO: 19842 - DNA, 384 bp, Glycine max
tctgactcatgacctcagctatcttaagaaggggtgaattaatttcccactaaccaccttttgacccccttctaaatgatacgctccaaatgtagaagtataagcaacaatcaattcaataatgttctttatacatgcgagacaaaatcgactgccataatataaatgagattagggaagagagaaatgctaactcactttatactatttaggacacttcccgtgcctacgtgcaattcctcagcaacccacttgaaattttccactctctttgcaagaatacttttacacagtctgaaccacatagggacaacccatccattgtgtccaggaatacttaccacttaagagaccctccatcccttaatcaatctctttgaataa

SEQ ID NO: 19843 - DNA, 386 bp, Glycine max; identical to SEQ ID NO: 19829

SEQ ID NO: 19844 - DNA, 294 bp, Glycine max
agcttgaatttgaacaacagaagctcttgagatattctaatggtcataacttatcacacggaagtccgattcatgcgcataatatatcgagaccctcgaaattgcactacggaagctctcacgaaacataaatggcgataacttttcacacggatgtgcattcaagtgcataatatatagagaagcttgacagtgaacaatggaagctctctagaaatatcaatggacataacttatcagacggaagacgcattctggcgcacattatatcgagacgctagcaattgcacaaag

SEQ ID NO: 19845 - DNA, 365 bp, Glycine max; identical to SEQ ID NO: 19831

SEQ ID NO: 19846 - DNA, 376 bp, Glycine max
atcttaagtcactgggctgcagcttaaccaggggagatggaccatttcaagttcttgactgaatcaatgaccatgcttacacagttgagctgcccggagagtataatgtcatctccaccttcgatgtctctgatctatctctattctatgcaaatggacaatcctatttgaagatcaactcttctaaagagggagagaatgatgatgacatgaccaatagcaatggacaagatccacttgaaagacttggaggacctattgatgaggacatgaccaagatctatggcaatgatccacttgtacgacttggacgacctattacatcgtctatagcaaggaaagccaatgaagctcttcaacacatgcatgacatact

SEQ ID NO: 19847 - DNA, 449 bp, Glycine max
gctgtaagacattatgcaacattgttttggatattcaacatgaacatcccatttcttgacgttggtaccttcgcgattagattgcttctcctatctctgatggaaagactggaatctttcattgaatatcatagcctttattgagtaattgacccaaactcataatattattcttcatatttgggacatagtagacatttgatatgaattcatgtcttccatctttcaaataaattaagatcttacattatccttttacaagaatcttagaattatcaccaaatgagacattgtcacttactgattcatcaagatccacgaacatgcttcttttctacacatatggttgcttgcaccagtgtcaacgtatcatgtgttgtcttggctaccttcattacatgcacatgctagaagcactatttcaaacttcttggctttttgctccacat

SEQ ID NO: 19848 - DNA, 400 bp, Glycine max; identical to SEQ ID NO: 19832
  unsure (1)..(400): unsure at all n locations

SEQ ID NO: 19849 - DNA, 392 bp, Glycine max; identical to SEQ ID NO: 19833
  unsure (1)..(392): unsure at all n locations

SEQ ID NO: 19850 - DNA, 399 bp, Glycine max
agctattgataatatcttacgtgtcataagagagtcaaaagtcctaattacaattcctatcacatacctgtccaaagcaccacaatgttgtctttggttaaactcttgaaatttgaaaataaatattttataacaaatgctaacttgtgctctaagaacattagttgaggaatttaaagtagaaattatttttactagaaaacgaaaaattatgttcccattatcttattacgcttttatgatttaggcaataaatatttttctcttttaattctttaatcaatgtcttaagtacattacttatcaatacctatattctatttatgctctagacagtattcattgtattcgacaaatactttttttaattttaaataaaatgtgtggggatgttagttt

SEQ ID NO: 19851 - DNA, 450 bp, Glycine max
agcttcaaccaattaacattgtttgaatgacaactgttgtagttggacaacaatcacatagtttgtccaccatggtatgctttatgttcctattggttatagctctggtatgctttatgttcctattggttatagctttggtgctagaatgttcaatttggagtccacaagaggaggatctccatatggtgctggagtttttgctggagatggtacaagacaagcaagtgaaatggagctggagcttgtagagtatcatggcaagtatatatgaaattagcccataaaagctagattgaattctgcgattataaattcattaagccctcctagccaggtcagcattctagtctgtcccaagttggtgacctctaaatcaaacttcttaatgcactcaaacaaaccattggtgacctcacaatcaaacttcaagtcagtgttgtcataaaa

SEQ ID NO: 19852 - DNA, 386 bp, Glycine max; identical to SEQ ID NO: 19829

SEQ ID NO: 19853 - DNA, 365 bp, Glycine max; identical to SEQ ID NO: 19831

SEQ ID NO: 19854 - DNA, 400 bp, Glycine max; identical to SEQ ID NO: 19832
  unsure (1)..(400): unsure at all n locations

SEQ ID NO: 19855 - DNA, 392 bp, Glycine max; identical to SEQ ID NO: 19833
  unsure (1)..(392): unsure at all n locations

SEQ ID NO: 19856 - DNA, 438 bp, Glycine max
agcttgttaccttattgacatttaaattaatactagctagtaaagggtgaaattaatcatttcttcacaagagtgtgcaaagatgttcgaatcacctgtggtggaccaccgacatcatttgtgcaatagagcctggcatcatcaacaagtttgcaaaatcttggaaatgcattagcaaatcttttgtgagatttcaactgtgaattcacccttactgccctacctgtcataatagctctcctcgtaaaattccaatggcaagatgttaacctgtcatatatatatatataaaaccaattcccaaactagcaacacggatgattccacaaagcatttatacctaatgcctctaacaacagcaagatagccatcacaaaccacaccaactagctcaattctgtaggctttcgcgtgcgcgatctcattacaattttctct

SEQ ID NO: 19857 - DNA, 464 bp, Glycine max
agcttcccaagtatttaagttcttcctcaaaactatcctaagcaaagttcccaatgtcctattaacaacttccatttgcccatcggtttgtgggtgacaagtagttgaaaataacaatctactgcccaacttgccccacaaagtcctccaaaaatggcttaggaacttagagtccctatcactaacaatgctccttggcaaaccatggagtctcacaatctccttgaaaaacaaatcagccacatgggaagcatcatcaacttttttacatggaataaaatgagccattttagataacctatcaacaaccacaaaaatggaatctctaccactgcttgtttttggcagccccaaaacaaaatacatggataaatcaatccaaggatactccggaattggcaatggagtatacaatgcatgacgctgtaccttagactctgcccttttacatacaatgcaatgtt

SEQ ID NO: 19858 - DNA, 383 bp, Glycine max; identical to SEQ ID NO: 19834

SEQ ID NO: 19859 - DNA, 386 bp, Glycine max; identical to SEQ ID NO: 19829

SEQ ID NO: 19860 - DNA, 274 bp, Glycine max
agctcataatatatcgatacgctcgaaattaaacatcgaatactctctggaaattcaaatggtcataactttctacacggatgtccgactgcagctaatcacatatcgattcgctcacaactgaacaacggaagctcttgagaaattcaaacggtcctatctttacgcacggatgttagattaaggcgcatcatatataacgacgctcgaatttgaacaacggtagctctcgagaaactcagattgacatcacttttcacactgatgtccaatt

SEQ ID NO: 19861 - DNA, 365 bp, Glycine max; identical to SEQ ID NO: 19831

SEQ ID NO: 19862 - DNA, 400 bp, Glycine max; identical to SEQ ID NO: 19832
  unsure (1)..(400): unsure at all n locations

SEQ ID NO: 19863 - DNA, 392 bp, Glycine max; identical to SEQ ID NO: 19833
  unsure (1)..(392): unsure at all n locations

SEQ ID NO: 19864 - DNA, 383 bp, Glycine max; identical to SEQ ID NO: 19834

SEQ ID NO: 19865 - DNA, 386 bp, Glycine max; identical to SEQ ID NO: 19829

SEQ ID NO: 19866 - DNA, 314 bp, Glycine max
agcttcgatttgctgcgatccgcgaggaacatgcatcaaccgcaccgatcagtggcaaaacagcacaatcgtgaagcataagaggagacaacagagagaaggacagagagtcaccgacctaggattgcatcttcgtcctcctcgccggtggtgacagcaacctcctcgagcttgacgatgggagcgacgtgtgctccggtgttctctgcgacgacgacggcgggtgcctccttctcttatcggagctcgggatcggcgctcgacatcttgtggaaggagagatggacacagagagatagagagagagatcccgt

SEQ ID NO: 19867 - DNA, 365 bp, Glycine max; identical to SEQ ID NO: 19831

SEQ ID NO: 19868 - DNA, 400 bp, Glycine max; identical to SEQ ID NO: 19832
  unsure (1)..(400): unsure at all n locations

SEQ ID NO: 19869 - DNA, 392 bp, Glycine max; identical to SEQ ID NO: 19833
  unsure (1)..(392): unsure at all n locations

SEQ ID NO: 19870 - DNA, 383 bp, Glycine max; identical to SEQ ID NO: 19834

SEQ ID NO: 19871 - DNA, 360 bp, Glycine max
  unsure (1)..(360): unsure at all n locations
tgcttgacattatagcagnaacctggaattttgtgggttatagctcaacttcaaaggcctacagaatctacctaccacagagcaacanagtaatcgtcagcagggatgtcaaatttctggagtcagatagttgggactggaaaaatgataagaggtctgagtttcaggaggagaatgaagatgttgatgaagaacccatcagaggaaccagatcactttcagacatctaccanaggtgtaatgttgctgtaatggagcctganggatatgaagaagctacagctgatcagaaatggagaaatgcaatgaaagaggagcttataatgatngaaaaaaataaaacatgggagctggtggaca

SEQ ID NO: 19872 - DNA, 332 bp, Glycine max
  unsure (1)..(332): unsure at all n locations
agcttgtcatgttctgtgcaggtgttgctactggtggaggcacttgaatttggttgccagacctcaaggtgatggcactcacattttttgggttctgcacagtttgtgaaagcaatttgtcataattttgggactgagcttggttcaactgagtagccatctgccccatcttatttgttagactctgaatggaggctcttgtctcttgctgaaattgcatattctggatggtcatttgcctcactaactcttctaaagaaggttgaggaggagccttagttgcttgttgtctntgttatgactgctgctgttgtattggaggaggaacatat

SEQ ID NO: 19873 - DNA, 322 bp, Glycine max
agcttctgttttcaatttcaagcgtctcgatattttacggggctctatccgacatccgagttaaaagtaatggtcgttggataattctaagagcttcccttttcaattacgaaaatctcgatatattacgggacacaatcggacacccgagtaaaaagtaattggcgtttgaatttctcagagcttctattttcaattacgagcgtctcgatatattacgggactcaatcggacattcgagtaaaaagttattgtcgtttgaaatttctcaaagcttctgttttcaattacgagccgtctgatatattacgggactcaatcg

SEQ ID NO: 19874 - DNA, 383 bp, Glycine max
agctttattatttattctttcttcctattaatatatcttgtgttggtaaatccacacatttaattaagttactaagttagtcaattaattaagctcagcttaacatctagcagtatatataaacatgcacggaaaggaaggatagtttaaatatatatatatattcttgtggtatttcagtaacctacataaattatcgactctgttgtgtaattaataaactctacgtcaccagtatgtagaatatatataaaagatataaacaatgagcaaacagcaccagtggtctagtggtagaatagtaccctgccacggtacagacccgggttcgattcccggctggtgcatattgtttctaactttttatctatgcagtctcatca

SEQ ID NO: 19875 - DNA, 209 bp, Glycine max
tatagaaactcagctcatgctacaaacatttataatagatctcctcaacagccaaaccctttttcttcataattattatgaaccttccaaccattggatccattccaggttggaggaatcatccaaatctgagatggacgagtccctcacaacaacaacagcctgtccttcctttctagaatgctgctggtccaagcaagccatatgtt

SEQ ID NO: 19876 - DNA, 301 bp, Glycine max
  unsure (1)..(301): unsure at all n locations
catcagaccacttccagggtgctggaactacttcacttggttttatggggcctatgcaagttgaaagccttggaggaaagaggtatgcctatgttgttgtggatgatttctccagatttacctgngtcaactntatcagagagaaatcagacacctttgaagtattcaaagagttgagtctaagacttcaaagagaaaaagactgtgttatcaagagaatcangagtgaccatggcagagagtttgaaacagcaagtttactgaattctgcacatctgaaggcatcactcatgagttctct

SEQ ID NO: 19877 - DNA, 309 bp, Glycine max
agcttcattctttatgagacgaaccattccaagtgttggagaagatcaacgacaatgcctacaagattgacttgcctagtgagtataatgtaagtgccactttcaatgtgtctgatctatctctctttgatgcagatggaggagccttggatttgaggacaaatccttttcaacgagggagtgatgatgacataaccaatggcaaggaccatgaagcacttgaaggtcccatgaccagaggcagacttaaacaagcccaacacatcatagagacaaagctggtcatttgtatagctgtcattgatgatg

SEQ ID NO: 19878 - DNA, 264 bp, Glycine max
  unsure (1)..(264): unsure at all n locations
tcggttaaaacatccaaaggaggcttccattgggaaatgacaatgccacacgaggattgcgcaacttcactccctaagaagtatttgagtggacccatgtcttttgtctganactgactatggagacgagatctaagtcagagaataccctcagaatcattgtcaataatgacaatgtcataaacatagacaacaagctacatgcaacgactagatggagaatggatgaaaaacaccgagtgattagtctcacaatgggtcatg

SEQ ID NO: 19879 - DNA, 350 bp, Glycine max
  unsure (1)..(350): unsure at all n locations
cgaatcggacatccgtgtgagaagttatgaccatttggatttctttatatctttcggtggncaaatnccaaccctggtgagttttattccacccgattcggacatctgtgtgaaaagtcatgatcatttgaatntctcgagagtttccgatgtttaatttcgagcgtatcgatatattataaccctgaaatcgacctcagtctgaaagttatgaccatttgaatttgacgagagctttcgttgttcaatttccaatatcactgtatgtgatgcgcctcaatggacattcgagttanatgttatgaccatttgaatttctcaagagcttccgttgttcaattctgagcgtc

SEQ ID NO: 19880 - DNA, 346 bp, Glycine max
  unsure (1)..(346): unsure at all n locations
agctngcttcttttggtgcatagaatgcaggcaaaaaaaaaatagtaagtgtcatgaatctctgacataagcttcaaccaattaacattgtttgtatgacaactgttgtagttggacagcaatcacacagtttgtccaccatggtatgctntatgttcctattggttatagttttagtatgctttatgttcctattggttatagctttggtgctggaatgttcaatttggagtccacaaaaggaggaactccatatggtgttggagttcttgctggagatggtacaagacaagcaagtgaaatggagctggagcttgcagagtatcatggcaagtatatatgaaat

SEQ ID NO: 19881 - DNA, 411 bp, Glycine max
  unsure (1)..(411): unsure at all n locations
agcttgcttcctttcccactggaatnncctctatcaaagccactctgattactttttcctcctctgggagcataattctaagggaagccattcttcctaaaacatctatcaactgtatgattgtctttgccacagtaagtacatgaaaatcctgaattcgatgaggttgtgcttgctgcattgatcaagctactgtttcctatcatatcattgctattaatctatctttcttgttgaattgcataagaaaagactctagttatgccaggtaaaggatccatcatcaatacattggatctgacagtgttgtactgatcatttaatcccctaaggaattgcataactcgatcttgcttctttctttccataacactaacaagagcatcacatgtacattttagattgcatgta

SEQ ID NO: 19882 - DNA, 353 bp, Glycine max
agcttgtttatattactagaagactatgagatgtttcctaatagtgcaatagatgatgatggtaaattggttcatctagcactaatgggagaagcagaacctgtcactttcccagaagcaattaaaaaggaagtatggttagaagctatgagagaagagttgaaagccatatagaggaacaagacatggaagttggctagtctaccaaatggaaaaacagctataaatgtcacatgggttttcaagaacaagctcacaccagataggagtattgctaaacacaaagccagactagtggcgaagggctgtatgcagaaagaaagctatgattacaaagaagtctttgcactggt

SEQ ID NO: 19883 - DNA, 336 bp, Glycine max
  unsure (1)..(336): unsure at all n locations
ataagtatattcactaggagaacatcgtagtggaaggaaattgtactgatgtgattcaaaagatccttccacccaagcataaagaccctggaagtgtaactattccttgtttaattggagaagtcaccgtgggaaaggctcttattaacttaggagccaaaattaatttaatgccactctccatgtgcagaaaggtgggagagttggagatcatgcccactangatgactntacaacttgctaaccactccattaccagaccatatggagtaattgaagatgtgttggtcagagtgaaacattttatcttcctggcagactttgtggtaatggata

SEQ ID NO: 19884 - DNA, 410 bp, Glycine max
  unsure (1)..(410): unsure at all n locations
agctttttagattgacacatatcttnaaactattgggaaaagacacaatgggcctatatatatgtttgctgacttcaaaaagcaacagagagatttcaaaagacaacttaattgtcaaatgctctctaaaaaactataggtcaaacactttcaaatcaattgagtattcttgtaagatcttcaatttgtattatcatctctaaaagagagaaattcttctgtacattctaaatactgtgttgtgatcaagagattgtttatctctagacttgtgagaatcctgaacacaatggagacgaatctcaaggtgtgttcagaagttgcaaagagtgtacaaagatagcggaaaatctcaagtgcgttgcttgatgacaggacatagacacgagaagtggtcgatcaagataaaa

SEQ ID NO: 19885 - DNA, 446 bp, Glycine max
  unsure (1)..(446): unsure at all n locations
taagaggtgcaaattaaataccatttgatactgagacaatgtgacaaganatgtaataaataagacccaagtgtatacgataaaattgtgacagactccacatactacacatgtaaaacattaacaagccatcctgattcctaaacacatgatatgcatcttcattttcaaagccacggactgaggtccatcatctacaccaagcttctcaaggtcctcataaaaagcatcgggatttttcttccacaactcttccaccttatttatttgctgttcacttatttggcgagcccttaactgcttcttaaggtataagacttgtatattctctatgtgataacctaaaaggcactttcttgaagcatcatatgatatgccaaaatcatcacattctaataagcattantgtaagttaaatactatttcttgaagtttcaattactttt

SEQ ID NO: 19886 - DNA, 340 bp, Glycine max
  unsure (1)..(340): unsure at all n locations
agctttgaatttctttgttccggaaacctttcttttctcatgtgcacccaaacccaatctccgggttcgaacacaaccttctttctccctttgatggcttgtttagcatagcttttacttttcctctcaatttgatctttgactctataatgaagcttcttcacatagtccgcctttgcttgaccttctttatgcttaanaacagaaacattatgcatatgcaaaagatcaagaggagttagtggattaaaaccataaacaacttcaaggtttaagaaagaagaatcatcggatgacgccgatcgaacatttcctaatagacatcatccaaatattattc

SEQ ID NO: 19887 - DNA, 310 bp, Glycine max
  unsure (1)..(310): unsure at all n locations
actcggatgattgattgagtcccgtaatataacgagacgctcgaaatngaatgtngaagctctgagccaattcaaacgacaataactttttactcggatgtctgattgagttccgtcatatatcgagacgctcgaaattgaatggtgaacctctgagccaattcanacgacnataactntttactcggatgtctgagtgagtcccataatatatcgagacgctcgaaattgaatgttgaacctttgagccaattcaaacgacaataactttttactcggatgtcctattcagtgacgtaatatatcggga

SEQ ID NO: 19888 - DNA, 362 bp, Glycine max
  unsure (1)..(362): unsure at all n locations
agcttttatcattctactttnttttacttcttacaaataaaaaaatatctttcttattttgaagttcgaaaagttagtataaattattaccgttaaaagtaatcaaattaaatatatattaatacagtttatccaaaatttaataagatgtttacaattattttcatcanaccattgtctcatatattctatttttataatatagtgagtataattttatttgcaaaanaattaaattcaagtattttaaagaatttaaaaataaatatatatatatatatatatatatattantttaattacatatatgtatagatatnaaatattttaataaagtgcataaattataatatacatatatt

SEQ ID NO: 19889 - DNA, 463 bp, Glycine max
  unsure (1)..(463): unsure at all n locations
gcttgtgtcacgattcactgtgacagtcaaagcgccattttcttagtttatcaccaaatgtaccatgagaggacagagcacatagatgcgaaactacacttcatcagagatgtgattgaatctgagaaggtgaaggtcgataaggtttcaacagaagataacccggctgatatgtttacaaaatccctctctagtgtcaagttcaagcactgcttggacttgataaattttgaggatgcctaaagcacattggtagaagtgcatccctgaatcgcaagataagcacttgttgatttggagtcaaagtggagatttgtggtgtgtgactcanaatcacaaatggcacaagtgggaagactttaagaagtgctatcataactaaattcagttatgataactgaatctgttttggcaccanaacatagctagaatgagtgtgtgtgatatatatatatatatatat

SEQ ID NO: 19890 - DNA, 474 bp, Glycine max
  unsure (1)..(474): unsure at all n locations
actatannaaactcacgctctgagacaattcanacgacaacaactntntactcggatatttgattgattcccgttatataacgagacgctcgagagtgaatgtttaagctntgatccaattcanatgacaataaattttttctcagatgtctgattgagtccaataatataacgagacgctcgaaattgaatgttgaagctctaagccaattcaaacgacaataactttntactaggatgtctgattgcgtcccgtaacatatcgagacgctcgaaattgaatggtgaagctctgagacaattgaaacgacaacaactttttactcggatctctgattgaagtccgtaacatatcaagatgctcgaaatngaatgtggaatctctgagccaattcacacgacaaatacgttttactcggatgtctgattgagtcgcgtacatatcgagacgctcgaaattgaaggtagagctct
